United States Patent Application Publication US 2011/0183924 A1 - sequence listing, part 243

SEQ ID NO: 673096 - DNA, 930 bp, Homo sapiens
  misc_feature (323)..(323): n is a, c, g, or t
ctttagaaaagaaaagtaggcgtatttgggatactgccagcggcgagcggcggaaaggaggcgagccccgaggcggcctttgttagtgtgcgctgtctcgttgttcttatacctgggctggaatttctttaatgaaccggctgtccccgcccgttttacggcgtgactttctttttgccttcctgcccctgttcggccaattcctggagtgaatattgtttcaaccgctggttggaagttcccccccacccggcaggtggacttgaatccctaagggcatactgaagtgggcctttagatttgattggatcgtaagctgtccntcaatcatggcttaatggatttatgggttatcaccggaatgggactggtggctttataagaagaggaaaagagtactgagcttgcatgccccgccccccgagagcctcccctagagtgatgctaagtggaaaatgtgaggtgcacgctgccacccgagggcccccacccacgggaaaagtttacatgtctaagtggattcccggccacccggagagagtgccccgtggagcgcctgggagcacggagcctgaccacccaccccggagccccacgaaactgtggagtcacatggcacgcaagcagcgcccccttgggaaagctttatggcaaccacgcctgccaacccacttcgaggcagccaccgtaggctgcaccccacgccaagccaccacggcccggggctaacctgaggccttgggggccccatccctgctccacagtgtgtccctgaggcacgcaccccgaagtccaaagagattattctcttcccccagataccttttctctcccctgaccccttaaccgcatctgcttcattcccctcaccttccccggctgatctgaggtaaactttgaagttaaattaaagctgtgtttgagccatcc

SEQ ID NO: 673097 - DNA, 157 bp, Homo sapiens
cggggcccacagaagttgcacctgcacagacacagacctgcaactcacgcacacacttgtactgcacacacacgcaaagtcacacatccaccctggaacacgcagccccgaccacacagtcaccggttgtccacatccgcacacacaacgggatgaa

SEQ ID NO: 673098 - DNA, 1099 bp, Homo sapiens
ctgttttatactgttgacgagggtttgtgtgtctgcccaaaggttctctggtggtattggaccctctcgaaatggctttctatagttgcgcgccgtgggttatctaacaggcgcctgcgtgcagagtagcccggcactttcacggagatcactctttcagaggcgaatctaaggcctttccctagggcggtgataaacagggggccaatcaaaaaagggtttcccctttggggaagtactcgtctgactggcgtggacattgacacccgatggggctaccactccctggagccaagggctgggaccccaagggttcctcccgatatcaacctcaccaggaggcacaaggaatggtagcaggagaacctcttcaggccctcgagagagcaccagagggacacgacacgttaagcgaggggacgacctgagggaaacgacaagaaaacattggctggcgatacccaggggcctgcagtgtcggtacagggaggaagctcaagggcggcgcataagcgcagtgagccacgcagcatctaggctgggaaggcctagctgaggtctcgcccacaccctgaggagccctggtctcagccccactcagtctgatgaattgcttagcatcgttctgcctttcgatctaggggcctgggtgggcctcattaactgctaggggtcccctttgagctctatgacttctggcctgaaggagggatgcatatgtcgtactcttgctcgtatccttgtacccacatttgggggaacactagaagagagggaggaaacaagtacagtccacagctctgcttaccagacactgtcctctccacccgcaagctttgaggaagagcatcccctgtcctcctttacctggccactgctgctgcagccaatatcctctctgcgcctgagaccctctccacagaggggatgtggtcctggtcacagacataacctagcagcagtaggataaactcccttcctatgaaggggaagcagactgggccataaggagacagcaggacatggctcaagtgcccaaggtttgtttagggcgtggcattggccatgtgtaattattgagtggagtatggtgggcctt

SEQ ID NO: 673099 - DNA, 146 bp, Homo sapiens
cggagatgtgtgtgctgactgagacggaaccgggagccgacagaaagcagtatgcacagagggctgagctcggacatgggggcagagcggcgaggctgtgcaggcacgtgggtgtgcaggcctcgtgcttgtcaggagagatcggg

SEQ ID NO: 673100 - DNA, 319 bp, Homo sapiens
caggccagtgaagaactgaatgaaatttctgagctggtgatactatttcattacattagaccatttagaaactatccagcaactcctaactgcagtactgaagaacattccattagtcactgcgtaatgtgaagatgccagctgcttttctgcaaattctgtggagcacttctatggctggaacattgcataaaggagagtcgttgattgtaaaacaccctgacgatgcgaaaagtcttacaagaaatcctggagaagaatccgagatttcaccacctgactcccctcaaaaccaagcacatcgctcactggtgccgct

SEQ ID NO: 673101 - DNA, 102 bp, Homo sapiens
gaatcgagctcggaccgggagtggagagagaaggctgtttctgtttggaaacagaaactcattgctagtaaatggagtagcagatgggaaacagtaattccc

SEQ ID NO: 673102 - DNA, 199 bp, Homo sapiens
  misc_feature (179)..(179): n is a, c, g, or t
aagcttctcaacgtagggaggggataaccgatggaaagagatagaaggcgcagaatcgcatttgctgtgatgagttgatctctagtgcgtctgcatgcggactgacaggccacactctgcagtggaccacagcattcctgaatacatcaggaagcacatgagatctcttaaaagggagngtgtaacctgcatttctaag

SEQ ID NO: 673103 - DNA, 236 bp, Homo sapiens
cgcgagactacaggagaggacaaatatacgcgctgaaatgtaccataaaaacctggaaagtgaactccggaaactagaaatagattcagcagatggggttcatcctttctttttggctcagaagtgacatactgtgtacgggggatctcgaaacgcagagaggacactgctcagctggctgctgatctgcctgaaggagtggctcagcccgtggatcttgcgggaggtgagactat

SEQ ID NO: 673104 - DNA, 237 bp, Homo sapiens
ttttttttgggggggggggggggcccccccccccaaaaaacccctttttttttttccccccggggggggaaggggggggggggggaaaaaaaaaaaaaaaattttttttttttggccccccccccttttttggggcccccccccttggggggggggggggggggcccaaaaaaaaacccccttttgggtttttttaacccccgggggggaaaaaaaaaaaaattggtttttttccca

SEQ ID NO: 673105 - DNA, 735 bp, Homo sapiens
agaaggaggagagcccggaaccatgtgtcctggagcggcgggcggagccgatgctgcggggaagccgctccgtggtgcccccacccccgcgcgcctcagtggtgcctggccgatgggcagggctcgcgagttgcggggtgctcgcgccgcttgtcatgtgcgtgcggggcgcgcgaggcgtgcggccagctcggggcagcggaaacccaggagaagctgaggggggggcgtgtagctgtgtcgggcctgaccgggctactgacgaagcgacttccccgtgcgcgtttttccccccagccttccttcccggccggtatgccggccccttttttccttccccttccacttagcgttccccggatttttgcgggcaaggtacgcggccatcgctttccacaagccggccgcctgtctttcccttcaaggaaccttcatcgggcgcgtgggttgagccccttattccccaggagggcaggttgaattgctaaacccttgttaaccccaaaagggagggaaaccaggcttggcttaagcctcatcaattggttacctgggtgggagcaccaattgtcccttaaaagcttcagggcacagcaattttaaccaaacaaagaattgaccccaagttccaataaactctcgagtctcatttgaaaaccttcaaacaagtctggtgaagaattcaatgttgaaaacatctctctaaatatgccgtgtacccggtgtctgtcacag

SEQ ID NO: 673106 - DNA, 166 bp, Homo sapiens
cgtatgtctcccaggtccagcatcagacatatgtaggtgctctgtactctgacatgtgactttattaaggggcatgtcaacctcttagatcactttcctcaatccttagaatgaataacttgtacacgtagccaacctgtggactagtagccggaccgtggactgg

SEQ ID NO: 673107 - DNA, 690 bp, Homo sapiens
cgccgtggggggaccccgcgcttgtgggccgggcgcggaccccgccccctgggttcaccccgcaaatcatcccccgctgtgtcacccagcccctgtgcccaagggggttaaaaacattaacgagtgcgctacccacgacgagtaggaaatttccccaccggcggaggccccgagagtcgggacatatggaggtaaccccaaggactactctggaggacaaaagacacgcccgctagggtagtcaccgactctttgtcaaaaccctcaccggttggtgctcgcccagacggagtagcatgaagggatctttcgcccctcactaggtgagggaccactatgagcgggataattcatgaagtggaagatacacctgtgcgaccgccccaaaacgatggggacatttcttgggaacgccacgtgcatttctccccctgtgcgcgtcacttaatgtttctattttcacaccggtatccacgttcattaattagtatccccaccaaccgtgtgcgctactatataccagtgagaagcacactattcttcttagcactcccccaaacttttgtaaagagctgttcatcatgctctcccaacgatagtggccccaccaaaccaaagaagtataaattctccttttctagcaccaccccccctttattaacaagaacatcttcaacgcacaacataaca

SEQ ID NO: 673108 - DNA, 392 bp, Homo sapiens
aggtagcttggtgttgtgttgcacgcctgctgtcctaggccacttgtgagagttgaagcaggaggacttccttcaacccagaaagtcaaggctgcagtgagtccgtgatcgcgacatcgctctcgagcctgggccacagagtgagaccctgactcaaatttaaaaaaaaaaaaaaaaagaagaagaaaagaaagggctgggtgcaatggctcaatttcttcttaaaaaaaaaaaaaaagggatacacgttgcagattgtgcgggttggacccttatcaagggattggtaaatacggtcccccaaagtgctgggtattacgggttgtgagccaccaccccgggcccttatttttttttttttaagggaccctcatttctgtttttcacagcag

SEQ ID NO: 673109 - DNA, 391 bp, Homo sapiens
ttcaggaacgttaactccatcgagggccgagggatttttgggataagtttagtttagtctactgcctctgaactgctgcctggcacataacatgtgctctccacactatttgctgattaaacagcatatacctagattatttccgcttacatgctatatttttggaaagccatcacactgttacggaaggttggaagggctaggttggtgtgtttccgtagagctttagtcgtctcaatgaatcttcagtgcagtactaccactggaaactccgcattccaggcaggcttttgtatgaaggaagcctgatggttatcatgtcctaatgttgaacctcagagttttcattaaggaaataagcgtgagatacgagtctccctttccaagtaca

SEQ ID NO: 673110 - DNA, 311 bp, Homo sapiens
  misc_feature (17)..(17): n is a, c, g, or t
ccaggagatacaaaggngagtgttactcattctataccctcttctggctctcatatgacttgctgggtaagaaagtagagaatttgttttttttgatcttacaaatgacccaaaaatctgctgggtcacctgagttaaggctgtggatctcgtgcagggattgtgaggaggatgagcaagtgatcaccatgttcacttggtatctactggcacaaatgccaaactatcaattctactgactcatctgcatctgcaactggcaggacatacctgtatcccgtgcagagcctgccagatgctactctgtagtg

SEQ ID NO: 673111 - DNA, 138 bp, Homo sapiens
taaaacaagcaaatttattaaaggaaaattttgctcctttaaggtttgcaggtgaaattttgtaggtgaaaaggttacttttcaccagtctatctggcatgctcaatgatgcagagtcacctggatcaatgatagcca

SEQ ID NO: 673112 - DNA, 1127 bp, Homo sapiens
  misc_feature (4)..(4): n is a, c, g, or t
  misc_feature (76)..(76): n is a, c, g, or t
  misc_feature (154)..(154): n is a, c, g, or t
  misc_feature (333)..(333): n is a, c, g, or t
  misc_feature (402)..(402): n is a, c, g, or t
  misc_feature (413)..(413): n is a, c, g, or t
  misc_feature (896)..(897): n is a, c, g, or t
  misc_feature (946)..(947): n is a, c, g, or t
  misc_feature (961)..(961): n is a, c, g, or t
  misc_feature (963)..(963): n is a, c, g, or t
caanaaggcccctcagttcccctcaagcctggcaccagccgcaggcccggtgtaactttgcagggataggggactncttttgaagacggaattttctcttaaatctctaagtgttttgaggtttgcaaaatctgttttcgggattgttctttcntcagttaaaataacaaaataacccagtgtgttcctgtagaggatccagggttttagaaccggacttgcgagtctcacctgcctggcccctctcccccagccccaggccatctgcaatctgttttaccagcacaggcctcccttcctctccctctgccttggcctctcccacacccaagngcccattcctgtctattctcccagggtggtgagtgagcctctgcaccacacttgccaagggtgctcacngagcaggcatnaggcccgcttactggaggaagcgagtctggactcgggctcaggcctgtggcgagccttcatgggggctgccctgcacctgtcctcagctggggcctgcggcaccatagaactttctctgtccaaaaggaaagcagacatctctccccttcgatgtgtcatcccccgcggcccccgagcgtcccacatgaacctgcagcacatgcccggaggcactgcatacagtggctgcaccccaggccatccaaagaacagcagcacctggaaggcagcagcacctgccagccctggaaaggcacaccaggaagctggcggggacagggtgtgctggcctgttccaggaactcggagctcatgtggccagggccaggtgcagcctggctccttacaggggccaggagtggcacgggagaagtaggtcgtcggctcccgtcttgccagggcctggacactactgctttttcctgtgcccccatttttgtccnngcatccctttgtgttgggattgcactctgtagcactggaatgatgtggnntgcaagtccagttngnctagtgaggacaacacagtgcttcccaggggctcagatctagggttgacccaggcttggggtgctaagggggagcccaaccagctcctgcccctgtgtcgggctcctccctctccactgcctttgtgctcccccctgcacctgcttcaagagggaagccacagc

SEQ ID NO: 673113 - DNA, 517 bp, Homo sapiens
catatgcagcaattctcctgctcagcctcctgagtagctgggattaagggtgcctgccaccacgcttggctaattttttgtattttgggtagagacggggttgtctccatataggccaggctggtcttgaactcctgacctcaggtgatccacccgccttggcctcccaaagtgctaggattacaggcgtgagccactgcgcctggcctcttttcccttcttatcataggcatccttgccctcatcaaactcaagattgtttactgtttgtcattataattttgattaatgtcatgaaaagggatgcatggagtattctaggaatatagcagggacccattgaaggtttcagggaaaacctgaaggcaatgatgtttaagatgagacaagaaagtaaaagtaaagtagatcaaatgaaagaatgagggagaaagtgtgttttggggaggggaggtgattaagtatcttctgccgaaaaggaagccatgtttgcaactaaaggcaagattaaaagtca

SEQ ID NO: 673114 - DNA, 205 bp, Homo sapiens
tgaccaggttaagagtccgtgtggccaaggagtagccaagccgccttgtatggcaagcgagacgagtctcctaagtccccgtcagtgtggttttcaacacaggactgtctcttgtcgttttcccctaatgccttctcctgccttttctgtgcctagtattttggctcttcacatattccatattgattttgacgctctgtatatt

SEQ ID NO: 673115 - DNA, 174 bp, Homo sapiens
ttttttttttgggacttttttggggcaaaggaattttggagattttagtgtcgccgcttccgggcgggttttggcccaaccttggggggttccctttccctggggcttttgcctaccaacaattgggttttttcttggggaaacccaaaaattttcccccccccgcccccccca

SEQ ID NO: 673116 - DNA, 202 bp, Homo sapiens
aaagggggcccacccaagcagggggttgggggcccccaaagccaaggttttcgccccggcttaaaaaggttaatttgggggggggggcaaaaagattgaagccaaggtaaataaatcccaggggggggggcccagcttgtaaaatgtcccccaaaccttttttgggccctttttttttaataacccccggttaaattcccca

SEQ ID NO: 673117 - DNA, 1544 bp, Homo sapiens
  misc_feature (1496)..(1496): n is a, c, g, or t
gacatggcgcgcgagctgcgtggcgctgcgtgtctgtggggcctgccgcctgttggctttgctgtgtggcgccggcgctggcggtcgtgccgggaggacaaagccaattctgtgtactctggaggaccataagcccagttgggcctccagtgtcgaaacccaagaccgtggcagcgttgtcatggtcacgtgacgactggcttcagccattgcgagaaaccggctacgtcaccacaggcaggacacacccttgtattcgacttatcagcatgacagagaagctgtgaagggttcacacgtgtccgaacagcagtgacgattccatggggcgatggacaaaagacaggcgtatgagtggacagcttggttaagcccgtgtcccatgctaccttcaaggaaacatacgaaggtgctgaattaccgcgtgagactgactcgtcacaaaaatgtcgcaacgtctgcatgcccttgagaagaaaagactagaggtctacaaacatcgtgaggttggtcgttggaccgggtcaccgaaacgccgaaacttgtccgaagcgacatatgtcgggcacgaatgtacaccctttgacaagaaactcgaagctagcctggatgaataacgggccaaccccatgataaagcaagtcctaaggggaataccgtggatactccggtggaacctgaagaagccagagggaaagtaagcgctgtgctgcttacacaaaacccacattgggcgagccagccccatatttggccgcaataaacatctagagggcggatcagataagcgggcccatataccccctaggggaaactgtgcgtatcatagacaaagataaaagcctaagggaggcatagtagagggcccctaagccaaggacaaatgcaccttcaatgtacagggacccaatggctattgtggggacgataggggaggtttacaataacctctaccatcattattcgagatcgcggtaggggacttggaggcaaagaacgtgttggcgcacgggctccactaagttgttgccccccggccacttcggagccaaaggtccacacacaggagcagcacaaagcccctgggggaagatctaacacacaagggtttgtgtgaccatatacgtcaaaaacattgatgcttatcgtagggacacagttggatttatgaaacaacaactacagcgaccggaaaccaggccgatacaccagaggacagatttctaagacagagcaccggtggcgatacaaaagacattacctgcgaattccaaattaccaaaccctgataatcacttccgcaatgattgcattacaggcaagcattatataccccagtacgcaacaggagaccacgactgagcattgcgcaataactggatgatgataaaacgcaaaggaatacgcacagaaactggatacgaggccagtgcgatataccccagtatgtgataactattgtaaatgtgtgaacaggggatgagaactgtaccacnccattgacacaagggaccacaacattgacaatgttaaagtgtgacaac

SEQ ID NO: 673118 - DNA, 740 bp, Homo sapiens
gcaactgctgggcacgacagagacgctggtgtggtctgcagcaatgaaaccgaggtagcacccacaccctggacctctccagggagtctctcggagggcccttggcccagatctttgacagccagctggtggctgcgcatctgtccatcagtcgtgaatgtgcagggcgtaggacgcgcctgggcttcatgtggccactacaggtccatccttgactgcccaaccatggcaggcccaggccctgtggaaggagccgtggcatggaatgtcgaccatgagtgtgggaatgccatcgatgtgtgtgcccatggtcaccggaccttctcgaggtacttctactcccgaaggattgactatcgaccctgtcgtcagtcaagtgcttccacaagctgggcctctgtcctatggggccaggtcgagctggcagggctacctgcgcatagcctcttgttgccatcctcctcccccaggacccctcgttccagatgcccctggatcctgttatgcctatgtcagtggccacatgggtgacgccctgctggagaagctctgcctacagttcctggccctggaacttcgaggccttgacgcaggcctgaggcctggtccagtgtccccacagactgctccaagtgctgctgcccaggagcgactggcggtgcccagcgagctggccctactgaaggccgtggacactggagctggggggagcgtgctccatgaggaggtggagggttggg

SEQ ID NO: 673119 - DNA, 294 bp, Homo sapiens
aaggcctgtctgattgcctcctttggaagggctcatcagaaactcaaaagaatgcaaccatttgtctcttacctacctgtgccctggaagtcctctcccacacttcgagttgtcctacctttccatattgatccaatgtccatcttacatatattgattgatgtcttatgtctccctaaaatgtataaaaccaagctgtgccccaacccccttgggctcatgtcatcaggacgtcctgaggctgtgtcacacctgtgcatccttaaccttggcaaaataaacttcctaaatcga

SEQ ID NO: 673120 - DNA, 437 bp, Homo sapiens
  misc_feature (257)..(257): n is a, c, g, or t
tgccttatgtacctgtagctcccaagagcctcgggcctggttgtgtgagggggggacaatggggcccccctgtgcctgctcgtgttgcccaaaagtccctgggtgttgagggggtggttcagcctgcaccccccccttgtttaaaaaagggcccttttgcccctttcaaaaaaaaaaggaagggggggccctaggcctttggctttctggtaaaggggggcaaccccaaaggttttctgggggtggattaaaaattngggtgtgggggttgaaaaccttttgtggcccccttggggacccacgcttttgtccccttttggttgccaggaaacaccaaacaaagccccccgggcattaaggtggttttaaaagggcttcgggatttttgttttgccctaaagtttttgggatttaacaaaaaaattttgtttgcccga

SEQ ID NO: 673121 - DNA, 267 bp, Homo sapiens
atcctcttcacagctttcagcaggaagtcgacgctggacatcgcttgtctctcagcgaagcagaggttgcgatgagccaagatcatgctgttgcattccagcctgggcaacaagaacaaaactcactccatctcaaaaaaaaaaaaaaaaatttctaaacatgggaaattcatttggcgggaataaaagggtcaagtcaaagatttgttaagataagggcataacgatgcctccagtttctgttaaaacacaccaggatactgtgat

SEQ ID NO: 673122 - DNA, 359 bp, Homo sapiens
tgggtcggcgtgatgcgtctataagatcgtgcgtggagacgctgcgggccttggggatgcacgccggtttgcgtcgtcgagcccgggtcctcctctgcctagacccaggtgtccagcttcaggccccgcctccctcagacccagaagcccaggccccagcctctcctccctcagacccaggagtccaggccccagccctcttccctcagacccaggagtccaggcccccatccctaatccctcagacctgggagttcaggcccccatccctgctctctcagacccaggagtccaggccaccagtgcttcctccctcagacccaggagtccaggcccccatccttcccctctcagaccca

SEQ ID NO: 673123 - DNA, 896 bp, Homo sapiens
attcggcaagtggtgcaatgaatggagtagagagatgactcagttatatatggggcctagaatggagtagaatcttaaataccgagagggatgaagatagttgaatgtagacgaggggacccattcttaataaaataatgtgtgtagtggttgcctatacgtgactccgtaccgtgaacactaatttactatacaattaaagtggtctgggcaattgccttggagatgaatgatttccgaagaggagagaatgaactgcgagcatccaatattgggagaacaggtgcagagaattacgagtagctattaaggggcggtatgcagactctaggatagaccagcggtagaacaaggacacctaaggacgtgtggtctgattcgtgcacagggtgaagtgagatacgtaagtagaaatagctgggtaaatagcatggtaatcgagaaaatggaggcatgcatcgagtgagaacctgtgaggccgcatgaggaattacctgggcgagtttatgctattgtatgaaccgggatgtgaccttcttggaatggctgaggggtaattgtatgagagtcctgtaaagagttggaatcgtgcctggtggttgctaggtgtttgtgacgtggttgattggtttggatgacagtgcaggaaaatgttgatagcaataggcgtgttagcggttccaagaatctctgctataacaaaggaggcacgggataaaaagctcgccagataaggaagttgctcaagttggttccgaactcgggttggacaccagatgtttgtggcagatccgggggcgtcttgttggcccactggttttgataaacttggttaaaagggaggcacacaagcacaaagttgcacaaaatacacgaaaacctcctgaaaatactgc

SEQ ID NO: 673124 - DNA, 99 bp, Homo sapiens
tgtcataaccctgtatcaaccctgccaattacgcggttagttgggcgctcgatatcgagcgcccaactacccgtttattaacaaggttaatagccgggt

SEQ ID NO: 673125 - DNA, 899 bp, Homo sapiens
ttctggatccggagctgtccatcagcaccaaaggccgcgggcgggctcagtgtcatgggtgccgcggttctggggcgtgccgagccccggctcctgcgccttccccttcctcaggcccagcccgagttcccggacgccgctgggactggagtgccagccggtgttggacagtggagcggcgcctgacaccgctgccgacaccattctctccgtgacccagcaatgccccacttcactctgcactgacgggacatttcaccatgtgaccccagtcagttggagcctctggctgccccgcaaaccccgtgcacccatcgtggccatcatgaccacaagcacatcatttcacgtcagacagcatcaggatcagcacatccagacccagacacgtatgccggggactgtgagcaaacactgcggattccagctgactgcacccctgagccagatgatgccttctggggtgcaacattgtgaacagcgccctggagcgcaggtaccaggcactgccggacctcgatctgcatcatgtgctgtaatgtattggagtcgtctactgcttcttcggttaccgctgcttcaaggcagtgcatcttccatcactgggtagctgaattggctcggtgggtcatcgttcctcactcatgactaccgagagcgggtgctagacgacaacagcaagagtgcatggggacgagacgacgggaaatagatcttgaggcactcgggattgctactagcggagctggatggccaactgacaagatgagacacgagagaggcctcataccctggagagggcagactgaacaggccataaatgacacgcaaatgcaggcacatgaatgagatcagaaacacaacaaaccagaccaggccccaagaggagataacatgag

SEQ ID NO: 673126 - DNA, 355 bp, Homo sapiens
  misc_feature (118)..(118): n is a, c, g, or t
  misc_feature (260)..(260): n is a, c, g, or t
ctggctgcgacatctgtcaccccattgatcgccagggttgattcggctgatctggctggctaggtgggtgtccccttcctccctcaccgctccatgtgcgtccctcccgaagctgcgngcttcggtcgaagaggacgaccatcctctattggggaaggttgtcctcttctgaaactacctttgcaaaaattatagcagtgagaaaattatgacagtgaaagaaatctgacctaattgactccatgcttgcttctaacctnccagctgcccttgttcattcctgggcatagggagcactaactttgggaggatttagtttatagtttaactttgaaacaaagatgattaacagccc

SEQ ID NO: 673127 - DNA, 389 bp, Homo sapiens
aataaactttaagtacagtaacagagactatccaaactgaagtacaaaaaaaaatgacagaccaaaaaggaaggcctcagcacttgggggcagtctgactgggtctaacctaggagtcactgaatattaagataagggttcaaggatgtaggaaattgtgatgaaatcacgaccaaaactttgtaaaattttatgaaaactctaagcatacagactcaggaagctcaatgaacaccaaagagaataaccttagaaacctattccaaggtatatcagaatcaaatagctacaaagtaagtgactaatagaaaatcttaaaagctaccaggggaaaaaagacatagtacatacagatgaataaagataataatggaagcagatgtctttca

SEQ ID NO: 673128 - DNA, 1020 bp, Homo sapiens
tcaaatggcggatgacggccggtgcagctgggggggcccggtggccctggtggccctgggatggggaaccgcggtggcttccgcggaggtttcggcagtgtgcatccggaggaccggggtcgcgtgccgtggacggggcctggggcctgaggtccgggggagctcgcggatggcatagggccgacggataagggagtggagtgccctgtcatccaagattggggcctgtattggttcaaggtagcatgaacatcgaagtccgctgcgaaggacagatctaatcttcttcgtctccatgaccgcagttagacggaatcgatgagtagtcatttgatttcgttccgtgcgggcgtccctcttctcgataggcattgagcgtttggagacatgacttagtgccaagtgctcatgaagcgagaccacgtatgcctggtcgcaagcgcgacctccggttctagaggcgcatttttgtttgcattagtctgggggactacataattgggcctaacgatccgtgtcgtgcgggtgtgttagatgttgcttctcacatggatacgaggtgcgacgccatccgtgccgatcccggatgggcgtgtccagtcgatcccttggtttccaacagtcttcctctccatccgtttcctccctgtatgctgtcaggcagtggcttactttggacgtgggcaaactaaagagatctggggacagattgtcacccccgaggatgttggatccccctgtgcaaaccgggttggaccaggggcgctgacattgagtggtcatccttgttcgcttggcgtaccggcgcgatcaattccgcgtgttaacccccatggtggggcctaccttggggcggatttcgggtcctcctggcaacccttggtgccccttagagcaaacgggcttgctccaattgaattggaggccagggataattcggattggaactggcgtaacaaggcgtccaggcccccggtggaggccttgcaacttggccccaacccccttggggccaaacat

SEQ ID NO: 673129 - DNA, 451 bp, Homo sapiens
gagcgtaagctgagacatctcccatcaagccctgattcctctgagcggtcgtggggctctctctcctcccagtggcctttgaactccgtgaggggcaagggactgggggctttcttggtcaccgggctttttcagtgatcagcccacaatgaacatgtaccataatgggtggctaacgctctgtatcaggggctggtctgtgtgctttcatataaatctggataacatttaattctcacaacaatcttgtaggaagacggctatggtcattcccattcgtcaactaagaaactggggccgggcgcgtatggctcacccctgtaaccaatcccagcacttgggcaaggtcgaggcgggcggaatcaccctgaggtcgggagtccgagaccagcctgacccgaccatggacaaaccctttcgtctactgcacatacaaaatcagccgggcatg

SEQ ID NO: 673130 - DNA, 853 bp, Homo sapiens
ttgtattcagcaaaagcccaggtcagcggacagtccgctcggaaaatgcgcctgggagatgcggtgaacagggtgtgattaataacacagtattaggctatttcatggccgcatctacctctacctcacgaaggtgggcaatatctccagataaactccgcttccggcgagcacatggagaatgagatggcccattatgcctgtgactgtggggatgcagaagatccaaaacgatcctacggttggattgagatgtgggatgtgctgatcgtccggtatgacctctcctgtcatgcacggaagccacaaagtcccacttgtagctgagaaacccctgaaagaacccaaaacagtcaatgtggttcagttgagacccagttaagggagcaattggtaaggcatataacgaaggatgcgaacactgggtgatggagtatctgccattgtgatgagtgctacattacagaactggtgatgctgtgcgtgagaacgggaattcacaattgagagctgaagggaatacatttcagtttagaaacgccatgatcaagtgaagagatgcagaaaagacggataaggggcagacaggtcccgatgtcatggagcggtcccttcgggcgggaggatcggtctccgatggacactacattcaggtgcgcgcaggggactgacgacagatctgagttcgcgctgaatgtcatgaaaggtgccgcccagtagcaacgggtcgccgggcaggaacgagccaccagaggatccaacacacgcaggacaaggacacaaagacaggagcgcagtagcaaaacccaaatacgcaggagacacggtcccacacgacagggcaagaaggaac

SEQ ID NO: 673131 - DNA, 575 bp, Homo sapiens
ctaaatttaactatagcctttacattatctctactaggtacttttatatttcgctcccacttaatatctactctcctctgcctagaaggaataatactatcactatttgtcataacttcaacatccacattaaactccaactccataatctccataaccatcccaattaccattctagtttttgcagcctgcgaagcagcagtaggtttagccttactagtaaaaatttcaaatacttacggaacagactacgtacaaaacctcaaccttctacaatgttaaaaattattttcccatctatcatactcctcccactaacatgactctcagccaacaaaaaaacctgaaccaatgtcacctcctacagctttctagtgagcctatttagcttagcactcctatgacaaaatgacgaaaattacctaaatttctcagttatattctcctccgattcattatccaccccactaaccaatctaaaaacttggggcccccctactaaatatggctcgctagcccaacatcatattacttcaaacgattaacacccccgaggggggggccgggtacccaat

SEQ ID NO: 673132 - DNA, 183 bp, Homo sapiens
tggtttttggtaaagacaggtttctccatgttgcctaggctgctactgaactcctaggatcaagcaatctgcccatttgggtttcccaaagtgctgggattacaggcatgagccatcacatccggctggggaatacttttaaaaacttaaagcgagttgaagggagttctgattaagagttat

SEQ ID NO: 673133 - DNA, 967 bp, Homo sapiens
  misc_feature (515)..(515): n is a, c, g, or t
aagatacgtcaagtggacacattgtacacggtaacttagatctgtggtaatctgtagctgggtgatttcaagagtatatgaacaaagagtgataggtagctagtcttcactggctagataatggcttcagagtgaggttcgtctatgatacataggttggtcttactccgtttcaattcgataactcatgtgcagtatcgggacagtaacatctagccgtgagaggtggatggtgttttacgtgggctattgaccttattcaggaggcacttctatcttcgtgtggtccatagaaaactgcaagaatattatatactggaattaagcgtgtcattattcccctcctgtctagcacaacaaagacactgaaacattatttgtttccaccacttatttttaggactttgaagaatatcctgaacatagaacgaactttttcttactacttcaggctgtcaattctcattgtttcccagcattccttgctattccacctacacagtttaaacttgttntggattccatcatttgggctttcaaacatactatgaggaatgtcgcagatacgggtaaataaaagatgttcttttattcatttgcctgcaatccaaaaatacaaatatagttaattgtacataggaaggtattacttgttcagagtttgagtgtgtgaattacatatatgaacatctgagaaaatcctattaagcagtttaatcactggtcccactccacattccaagtgaggtccatacggcgaaatgagtaatgggagaaggggccagtataattggttgcgtaacacaagtcaccggtcagtgatgttgtcaaagtcattaaatcgggcttcgaatgcgaagggtgcagcacctaatgggatttcccagtttaaaatccacaggttactacacattgggaaagcgtggccacaatccggctcacaaggccgtgggaaaccatttcccgt

SEQ ID NO: 673134 - DNA, 104 bp, Homo sapiens
ttgatagagggatcgcaatataaggagcaagcccccattttcacccgatcctagggctctccctataccaagctagaagggctagggccctaatgactagtggt

SEQ ID NO: 673135 - DNA, 233 bp, Homo sapiens
aatagtattctagcagtagtactctagtgctttagactcaccctagttactttgaaataccagtgaaccaaagaggactggagcatctgactcacaagaagaccagactagtggagacataaaaatacctctttatattggattgcaaggaaggttttctccactttgttggaaagcaggtggcatctctaattggagcaattcctgtagccatttctggagtactccagtgg

SEQ ID NO: 673136 - DNA, 526 bp, Homo sapiens
  misc_feature (246)..(246): n is a, c, g, or t
  misc_feature (414)..(414): n is a, c, g, or t
ccgaggctctctacctccttcctcagatccagcatcttcggacaatggtgctttctggcacatacctcctccctccctcttttcggggcggcggttacatgcatccatggccttcaatgaaataagctcaaagggagacgggaagaaatgggttatctcacatgtttatccggcttcggcccccagaaaaggctacattttcagtactcaagaagtctttactcggtaacccaaggatgacatatntgtgaaatgaggtatactttacatcaaatacacagattgaaaggatgcagctgggggagtcggggtaaatgtataatcatcatcccagtcgggataggaaacatttccatcatccttggtgcctcggtccaccagaattggattctggaccgcttgtgcaaggagggntatagcctcacagaaagtacccggtgtacaattcattatgtggtataaagcaaatctcccagggttaatttctaaaccaaactttatttatcaaaaataattaagggtaaca

SEQ ID NO: 673137 - DNA, 174 bp, Homo sapiens
gctgtaggattcctgggcagtggggctggttttcggtgggagagcagagctaggatgggtagggctctggagctcagatttgagcacagcgcccgacatgatggtatacgactggctgttggcagcagtgccctggctactgctcgccccggctgattgttggtagatgccagg

SEQ ID NO: 673138 - DNA, 971 bp, Homo sapiens
ggctccatcttgggcctgctgggactcgcgtcggttggcgactcccggacgtaggtcgtggtgggccgagttctgaggccgttgattctgctttacttttccactctagtgccacgatgcctgcttagtaaccatgagctgggatggaagtacagccgctgctgggcagaagcgtttaccgtcgcgttgatccctatcgcagggctcggtgttgcactctcaaagatataggcattctgatggcgagccttgtgtgtcaagagtaactgatgcattgagtcagacaagtggtctctgctctatgggtcaggctgtgcagttggcagagggcacttgatcatagctcacctggagtccgtcgagctctgtgggactcaagcgggtcctctttgcttacaggcctcccttgaataggcaagagactacgagtgttgtggtgtataagaaatagaccagagctcagcgatgtcaaagctacgatcggcagaaatttccaccaagtcaattaattgcgacttatggtacgcggttggaatgcccgttaatgttcccatggagacactgagatgagatggtttgaacatggaagactgtgtcgggtacgtgacggacgtacattatcttttgcacttaggagcacaggttgtggggattagaaagctacgtttatgtcacctaggtgtggctgagccagaacagctaagagggccctttgggtacatctcctttcagtgacttcagacgagctagcgactgcaagtggttccggaagaaggccttaattacttttggacttgacagaccctgctctggtctaaaacggaagtttttggtgttgggtacccatgtctgcgcctggaattggttcggcctggcctgagcttggaccgcttcttatggccatttagaaacgtcctgacctgttgcgaagacgcgccacctatttgcccctatgtcggtaatagcacaca

SEQ ID NO: 673139 - DNA, 380 bp, Homo sapiens
ctctgatgtagaggacgccacgatgcatgtgaatgccgcccgctttataaaccactcttgtgagcccaactgcttctctcgggtcatacacgtggagggccagcacattggtatcttcgccctgcgccgcatactgcgtggtgaggagcttacctacgactaccagttccccatagaggatgccagcaacaagctgtcctgtaactgtggcgccaagcgctgtcgtcggttccttaactgaggccgcggctgtccaccacgaacccttacaccttctggtgtcgtcgctgtcatcttggccctagcctgggggcttcctagacccttccagagcatattacccccacaccttatgtgtcaaggtggatgtgggctgcgtg

SEQ ID NO: 673140 - DNA, 211 bp, Homo sapiens
ctcagtgaaattgtgacatgatctggtggaacttgagatgtgcctggaaactatattaacagaaacctggatattttgaggagctcctaggtgagggcaaaaagaaaactgaaaaatgttactggagactagggggaagggattctatgtgatgcaacagcagaaagcaacatggctgcacgtggttacgagtgaaaagtacaaaataata

SEQ ID NO: 673141 - DNA, 383 bp, Homo sapiens
aatttcgactggctgatcacaacgggatgggctgtggcacgtgctggcatttttcttcacatgcaaccatgtgctcccccgtcttcttgggcaacgaatgaaatcccaacggttgtcattacgccagcgcttcagcaaaaagggctcctcccggcccggaggggcgggaccacaagtggccgtcacaggctgagatccgtctcttagatgttgatggggatgttggcagcagagccgaacttataggtgggacatacgcatggagtcgtcaactgtgaaccgagcagtgaaggggctgcctgggacgtgctgttcatttgtacttgactagaatgctagaagtacccacgtgacagcacaaggcaggtaggaacacgctgcat

SEQ ID NO: 673142 - DNA, 661 bp, Homo sapiens
  misc_feature (661)..(661): n is a, c, g, or t
agacattaacacgcacccaaaccaagaaactggcactgctcatggagagcaagaggatgtgatacagagatccacattacgtgtctcctcatcagagattactaatcttataggccttaatcatgtctcacactgcagcttaaatcgtacccctcaaagaaggtgcctgataccaatgtgaacatataatcatgactccccgggagaacatgataaataccatctctttcattcccccactttcctgggtgaaccctacccgagaatatgtcttatttgctgctctttcgcggaaaggaatcaccccccggggcgtcttccccctcctgattctatgaccagcttctcgagtatatcacctaaccctccacctaccccgtcatcccccccaacccaaccgtctccgccaccctatcatccggccccccccccggggcccccctttcaccaggtctacctgctcaccccctcccacgtgccttggatgttttcccgttccctccccgccggctcttatccgcccccatcacgcttttctcccttctctcccgcctcccgcccccggacttcagggagccccctccggatccttccactccggtcagccctgctcgatttccttcttttctcccactcccccctcatcaaccctctccgctcn

SEQ ID NO: 673143 - DNA, 213 bp, Homo sapiens
  misc_feature (89)..(89): n is a, c, g, or t
tttttgggggggggggccccccccccgcttttctttctggggggggccttgggggggggcccgggctttggggggggtttttccctcanaaagggtccccgaaccattggcggggcctgggggcttttcccgggggggggggggtttttggggggccccccggcccccccccccctttcccccccccgggttggggtttgtttttttttttta

SEQ ID NO: 673144 - DNA, 161 bp, Homo sapiens
tgttgtatgtctactactgcagaattagatcaattgatcatgcgtatcgcatacgaattagaacaattaaatgaaaaagatcaacaaattgctcgtatcattatcccgtatttaatcacaaaactaaattgtgattacagacgacgcgctcttacgcgggg

SEQ ID NO: 673145 - DNA, 408 bp, Homo sapiens
  misc_feature (30)..(30): n is a, c, g, or t
ggaaagcacacgcaacaggtatatattacngtggcatcactttcttgatatagttgactctgtgtccccaagcaaatctcatctcaaattgtaatccccataatccccatgtgtcgaaggaaggacttggtgggaggtgattggatcatgagggtggttcctcccatgctgtcttgtaatagtgagagagttcacaccaagatctgacagttttataagcattcgacagttcctttttcacatgctctctctggcctgctgccatgtaagacatgcctccttagccttccgccacaactgtaagtttcctgaggcctccccagccatgtggaactgtgagtcaattaaacctcttggctttataaattacccagtctcagggaagttcttggttgcagtgtgcttccg

SEQ ID NO: 673146 - DNA, 282 bp, Homo sapiens
ctttgttcgcttcattttacggcttgttcttcttgacaataaagggaggtgcccttaatagcttggaaaaagtaaacatctccctggcccatcccttcatttaaccaggctattcaagtattcctatgccagagcagtgccaactcttggaggtccagagtgcagccaatgcctttgtgtggtagttctaaattttaattgcaccttaaaacctgggcacctaagcaatgagccaaagcaaacggtaaggaccaccaccaaataaggtgttgttaatttgac

SEQ ID NO: 673147 - DNA, 385 bp, Homo sapiens
aacttttaagggaaattaacatgccccccccccatttaacctacctgccgggtagggaccatccctgcttttttgaagaagtgaaagagccctgatttcagcagctaagaaatggggtcttttaaggggatttagacattgcagattgttccccagagaagggaccttagcatttcctgttaataaggggcctaattaaggctaaagtccccagaaatggtaaagaaagaatcccctttttggggtgggggggtaaaatccttttttagtggctagagtggggaaccctgaactttttttttttttaaagagccatgaagcaagttcctggggggtttgcagaacttggataatgagatgaaaaaacaagaatggaattaatgta

SEQ ID NO: 673148 - DNA, 198 bp, Homo sapiens
  misc_feature (194)..(194): n is a, c, g, or t
gaacatgtgcatcctcatacattcattacttgtggaaatacaaaatggtacagccactttggaaaacaggttagccatttctcataaagttaagtataaatttatcatatgacccaggaattccactcctaagtatctatcaagagaagtgaaaacatgttcatacaaagacttgaatatttttattacatttncacc

SEQ ID NO: 673149 - DNA, 103 bp, Homo sapiens
tttacgcattttaaaatttacttaaatatgtttgtactgattttggtcccatctgggctgccttagagaggctattttcccacacttcaacaaacagtagatc

SEQ ID NO: 673150 - DNA, 489 bp, Homo sapiens
tgcacccacagcaacatataggtattaggcacagctggaaacattcctcttgagaactggaacaaggcaaggatgccctcttttaccactcctattaacatactactgagataaaatgcatccaaataggaagacaggaaatcaaacttctctgtttgcaaatgatatgatcctataccccccaaaaccccacagtctctgttgaaaagctcctgataaacaactttagcacagtttcaggacagaaaataaatgtacaaaaattaggagcatttctatacacgaataatatccatgcagagagccaaatcaggaaggcaatcccattcacaatagccacaaacagaataaaatatctaggaatatagctaaccaggagatgaaagatctctacaatgagttacaagatgctgctgggaacaaaaaaaaccaaacaaaccacacagagatgagcccaatcgagggaacaccatcccatactaagggaaa

SEQ ID NO: 673151 - DNA, 142 bp, Homo sapiens
tgagtcaacacatttttattaaacacctgaagttactgggaggaggccatgatgctggacacactgtcaaagtcaattttttccacaatgttcttgggtttaaagctctttttttggctacaaataaaaatctgcccctttt

SEQ ID NO: 673152 - DNA, 1194 bp, Homo sapiens
gtccctcttattaattcctttatctaccgccgaagagtctttgtgctgctgtgcccctaagggctctcgaccttctgaccttcattcaggtggtgcgccgagcctggtggctgctcactcccctctcccaggtcgctccccgtcccctcagacataattgattcttcgtccttttgagtacgaagaacaggtctgctcgtctcaccgaaaacgtgcgtgcccgtgaaccgtagcgaggctagcgcacgcacgtgatttgggcgagtgctcgatgagccagtgtatgactgataagtgcacaagtagtcctttagcaaatcggctgaagtatattgccttgtcgctacattgcctatcgcagtaggatacgtatacggacgcaaaccattcgtgttcaccctggctggttaggtgaaggaaaggacccgcaaacggtgcgtcaaagatagtgaaacagcatcgttagaccgcatcgtccgtcccgcttgtgatgcaacttcctgaacaaggcctgggcctgttggcgtgcaacaagcggcacatagaaactcacacggaaaatacgactggactactaggatgggactgcgcctcccggacgggtcccatgaccttccatctgaccctcgtagagtcggcccaggcaccctagtccgcggagcaagatacgccggaagcggcaatgtcacgagggaacccacgcttgggaacgcgatcccacggggaggcccatcagaggaacgccaaggacataacgcgcagaccagggaggggacagcgcaaagaggaccacaaaagcgatcacgaagcgaagacgacaaagcacagtagaacaaccattatcgcacggggacgcagaatgacgacaggacttagaccaaactagcccactatgtaaaagaagccccacccaacgggcataaaataactcaggagcacggagggccattgccagcgcgccacagcgaaacggggaacttaggggccgtgggaaaaacccaccggcgggcgacaaggcaagaccacgaaggaacaagcatgggctgaggaaacacccggaagaaaacgacgagtggaccccaagaacggcacaaccacccaaaacccagcgagggaacaaccgccgcacaggccaacgactaccgccaacagacatccatgcaaacctacgcgagaagtactaatcaataacaa

SEQ ID NO: 673153 - DNA, 647 bp, Homo sapiens
ccgctttcctctcgcgccgccgcagccgccacctcctccgcaggcagcccaccgcgaagcgaggtcgaataagccatggcagacgccaaggccacgacggcggtcaccctccgcacccgcaagttcatgaccaaccgcctgctcgcccgcaagcagttcgtgctcgaggtcatccaccccggccgcgccaacgtctccaaggcggagctgaaggagaggctggccaaggtgtacgaggtgaaggaccccaactgcatcttcgtgttcaagttccgcacccacttcggaggcggcaagtcctccggattcggtctcatctacgacaacctcgaatctgccaagaagttcgagcccaagtaccgcctcatcaggaacggccttgctaccaaggtagagaagtcacgcaagcagatcaaggaaaggaagaacaggacaaagaagatccgtggtgtgaagaagaccaaggccggagatgccaagaagaaataagaacatttctgtcttcatctattcactatcagcctttgcttggtttaggacggtatccctgtggcaatgttgctgagtgcttaattatgactagaaaagactttgccatttgtgtcaatctcccgttatgttaagagggcattttgtagtaaaaaata

SEQ ID NO: 673154 - DNA, 164 bp, Homo sapiens
  misc_feature (161)..(161): n is a, c, g, or t
catgtgtgcaggggaagtgtcgctacgtttactatgaggaaaaactcagagggcaacagggttatccgagatgaccaactctgaggcgaagttcgtggataccaaacacccatttcatgaaaataaaatcaaaagggaaatcaaaaataaagaaaacgctnaag

SEQ ID NO: 673155 - DNA, 245 bp, Homo sapiens
aacgaaaatgaaggctccggacattcagtcccaagccccatgttagaaggtcagtcaacgctggagctgagtcacaccggtctccagcacaaaatccactcaagcctctttacagacgatgaaatgggttcaaatgttcctcaacttataaggacaaacccatccattattttgaaaacgtcacaagtcaacaaacgcatgtaatatatgtaacctgccgaacaccataacttacatgcgttttt

SEQ ID NO: 673156 - DNA, 174 bp, Homo sapiens
ttcggcacgagcttgagcccaggagtttaagaccagcctaggcaacatggtgaaacctgtgggactgagaggctgcttggttgagaggtgggaggatcacttgagcccgagaggtcaaggttgccgcaccactgcactccagcctgggtggtagagcaagatcatgtctcaaaa

SEQ ID NO: 673157 - DNA, 301 bp, Homo sapiens
tatacatatagtcaataaggcaatataaaaaaaaattatatacctggagtagaccagattcttaagcttataggcttaagtcaaactaggcgcatgagcaccatcccacggtgaaggtcgagcaacttgatggactcttctggtgctatagtacaactggtgtgaatatttagtgctcagcagagtaaaactttccttagtatgggttggggtagcataatagggttgtggtgtatgtctccaaaggaagctttcatagtaggtattatgctttatatagctcagtataaggcagccctaa

SEQ ID NO: 673158 - DNA, 637 bp, Homo sapiens
  misc_feature (2)..(2): n is a, c, g, or t
  misc_feature (63)..(63): n is a, c, g, or t
  misc_feature (65)..(65): n is a, c, g, or t
  misc_feature (68)..(69): n is a, c, g, or t
  misc_feature (87)..(87): n is a, c, g, or t
  misc_feature (111)..(111): n is a, c, g, or t
  misc_feature (122)..(122): n is a, c, g, or t
  misc_feature (130)..(130): n is a, c, g, or t
  misc_feature (139)..(139): n is a, c, g, or t
  misc_feature (147)..(147): n is a, c, g, or t
  misc_feature (160)..(160): n is a, c, g, or t
  misc_feature (206)..(206): n is a, c, g, or t
  misc_feature (215)..(215): n is a, c, g, or t
  misc_feature (217)..(217): n is a, c, g, or t
  misc_feature (225)..(225): n is a, c, g, or t
  misc_feature (235)..(235): n is a, c, g, or t
  misc_feature (247)..(247): n is a, c, g, or t
  misc_feature (254)..(255): n is a, c, g, or t
  misc_feature (262)..(262): n is a, c, g, or t
  misc_feature (275)..(275): n is a, c, g, or t
  misc_feature (285)..(285): n is a, c, g, or t
  misc_feature (294)..(294): n is a, c, g, or t
  misc_feature (298)..(298): n is a, c, g, or t
  misc_feature (342)..(342): n is a, c, g, or t
  misc_feature (350)..(350): n is a, c, g, or t
  misc_feature (389)..(389): n is a, c, g, or t
  misc_feature (399)..(399): n is a, c, g, or t
  misc_feature (401)..(402): n is a, c, g, or t
  misc_feature (415)..(416): n is a, c, g, or t
  misc_feature (453)..(453): n is a, c, g, or t
  misc_feature (539)..(539): n is a, c, g, or t
  misc_feature (630)..(630): n is a, c, g, or t
cnggatggtcccccactttccacaaactataaacagcaacatgaacacagagaatcacaaatncnccnntctttcctcatgtctccnctccccccattcttccataatgcntcccagttcgnccctagcngcgccaggncatctggnagttctgggctgngggtggggtgcggtgggtggcctcagagtggtgcagatgcttccgngccagagananagccagcngggggggtgnatctgggctggngtgctcnnccagggncggggggaagtgngggccgtgtnctgggtggngggngcggaggacagagagacaccagtgctcttccacctgccatcggntataaatngagggttcctccagctgtgaggaggactccaaccactgngtcaccactngnngaccctcctctgnnatcaccgggggataccgatgctgcaggggctatgagnaggaggtcattgcctcggttggacatgatgtcctcaggaaccgtggtggtgatgatctcatccttggttctggggatcaggagtanaggaccctggtatctgcacagctgctccgcgttgtttagattgagatgctgcctcacggtcctggtcaccaggcccctccagctgtctggnatgacct

SEQ ID NO: 673159 - DNA, 778 bp, Homo sapiens
tcccttgtggcccaaatttttttttggggggggtcggaaaaaaccgggggtaaggggcccttttctttaccattcctttctaacaccagaaaagaaccctctcaaaggggagacatgaagagaagccccaaaaaggcttgtggtggcctcaagagggaccttgtgaggcgcgccaacaccttgtgtggtgcagtgagattctcctgtggccctctacaaagacggtgttggggaacaggtgggcaaccttcttgggcgcacacaggccgggcgatcttttgggtgttgccaaaagagagccccgggtggggtgaaccccctcgatagagatcttgcgcgcgcgggctctacacatatattttcagcgctctcgaggcaaaaatttcgcgcccacaatgtggggggggtttatacacacaccgcgggtgttagatcttcaggcgccgccggagagtgttatttgcgcggcgccacaaatagttgtgggtgcgtcccacccaccaaaaaatgggcgctgcgtctctaccacgagtgtttttcgtggaccaccaactggtgggtgttgtttttcacaccaccaggggggggagcacgtcgttttatcacatggagtagacacacagcgggtgtgtggagagacctcttcgcggaggcctgtctcaccatatttcttctcacagaagaagaatctcctcctgaagagaggagggttggtgcgcgccccccgtcgaacgggttgttgttgacacaggatacacctcctctccggaggaggacc

SEQ ID NO: 673160 - DNA, 1722 bp, Homo sapiens
tcacaatgcgcctctaccctctgatatggctttctcttgctgcgtgcacagcttgggggtacccatcctcaccacctgtggtaaacactgttaaaggcaaagtcctggggaagtatgtcaatttggaaggattcacacagcctgtggcttttttcctgggagtcccctttgccaagccccctcttggctccttgagatttgctccaccacagcctgcagagccctggagcttcgtgaagaacaccacctcctacccgcctatgtgctctcaggatgctgttggttggcaggtgctctcagagctcttcaccaacaggaaggagaacattcctttacagttttctgaagactgcctctacctgaatatttacactcctgctgacttgacaaagaacagcagactaccagtgatggtgtggatccatggaggtggactggtggtgggcggagcatccacctatgatggactggccctctctgcccatgaaaatgtggtggtggtgaccattcagtatcgccttggcatctggggattcttcagcactggggatgaacacagtcggggaaactggggtcacttggaccaggtggctgcactacgctgggtccaggacaacattgccaactttgggggcaacccaggctcggtgaccatctttggagagtcagcaggaggtttcagtgtctctgttcttgtcttgtctcctttggccaagaacctcttccacagggccatttctgagagtggtgtgtccctcactgctgctctgattacaacagatgtaaagcccattgctggtctggttgctactctttctgggtgtaaaactaccacatcagctgttatggttcattgcctgcgccagaagacagaggatgaactactggagacttcactaaaattgaatctttttaaactggacttacttggaaatccaaaagagagctatcccttcctccctactgtgattgatggagtagttctgccaaaggcaccagaagagatcctggctgagaagagtttcagcactgtcccctacatagtgggcatcaacaagcaagagtttggctggatcattccaacgcttatgggctatccactcgctgaaggcaaactggaccagaagacagccaattctctcttgtggaagtcctacccaacacttaaaatctctgagaatatgattccagtggtcgctgagaagtatttaggagggacagatgacctcaccaaaaagaaagacctgttccaggacttgatggctgatgtggtatttggtgtcccatcagtgattgtgtctcgaagtcacagagatgctggagcctccacctatatgtatgagtttgagtatcgcccaagctttgtatcgcgccatgaagacccaaaggcagtaataggagaccatggtgatgagatcttctcagtatttggatctccatttttaaaagatggtgcctcagaagaggagaccaacctcagcaagatggtgatgaaattctgggccaactttgctcggaatgggaaccccaatggtggagggctgccccactggccaagaaatatgaccaagaaggaagggtatctgaagattggtgcctcaactcaggcagcccagaggctgaaggacaaagaagtgagtttttgggctgagctcagggccaaggagtcagcccagaggccatcccacagggaacatgttgagctttgaatgggcggctcca

SEQ ID NO: 673161 - DNA, 462 bp, Homo sapiens
  misc_feature (31)..(31): n is a, c, g, or t
  misc_feature (66)..(66): n is a, c, g, or t
  misc_feature (96)..(96): n is a, c, g, or t
  misc_feature (161)..(161): n is a, c, g, or t
  misc_feature (454)..(454): n is a, c, g, or t
  misc_feature (456)..(457): n is a, c, g, or t
cgcaacctcctcaacctcaattagcctccanagaacggaagagagttagggccttgcccctggaantaagctgtggccctaaggaaagtgtttganctattttgacccactaaaactttcctttacatcagcagtaaggcctgtttcactttccttatcanttgtgccgtgaagaatcaactttaatttccttcaagaacttctcttttgcatttacaacttggctaattggtacaagagagctcacttttggcctatctcatttttggcatgcctttctctcaaagcttaatcgtttctagcttttgctttaaagtgtgagatctgtaactctttcagttgaacacttagaggctatcaaaaggttattaattggcctaatttcaatattgtgtcttagggaatgggaggcctgaagagagggagagagacagggaaatggcctgttgatgtngnnggttt

SEQ ID NO: 673162 - DNA, 860 bp, Homo sapiens
  misc_feature (633)..(633): n is a, c, g, or t
  misc_feature (675)..(675): n is a, c, g, or t
tacggctagtacgaggctggtttgaatcggcaccgaggttggaggctccgggcccgagatgatggctgcgagctcagcaaccccagtgccagcagagtcagactgtgccgggcagatgctggtaagtgcagtccacggattgtatttcggtggggccgctgccgtcgcggagccagatcacctgatgggaagcgggcatcacggtcgtgctaacagtggactcggaggagtcccagcttcaaggcggggcctggggtcgaggatctatgcgcgcctcttcgatgccattcgctggacaaacccgagacggacctactcagccatctggaccggtgcgtggccttcatcggttcatgcgcccgcgactgagaggccgtgcggtgttggtccactgtcttgcaggagtcaggtcgaagtgtggccataataactgcttttctaccatgaagactgatccaatttccctttgaagacaagcctatgaaaagctccagcattctcatagatccacgaggctaatgatgaccatgaggggtttgaggtggcaggactgaatagttatacccatggcaactgggatacgtacaggtggatacctctagtgcaatcttatacagcaattatcgtttacanaaggttacagagaagtatccagaattgcagaatttacctcangaactctttgctgttgaccaactaccgtttcacaaggattgaacgatgaggttctctacaagtgtagaaagtgcaggcgatcattatttcgaagttctagtattctggatcaccgtgaacgaacgtggacctataggctttggccaccagagaatgacccatcttcatgttacccaggaggcagc

SEQ ID NO: 673163 - DNA, 1009 bp, Homo sapiens
gactgcgataagcccactctgcatcaactgaacgcaaatcagccactttaattaagctaaggccttactagaccaagtgggacttaaacccgacaaacacttagttaacagctaagcaccctaatcaactggcttcaatgctacttctcccgccggcgggaaaaaaggcgggagaagccccggcgaggtggaaagctgcttcttcgaagttgcaatgtcaagatgagaatcacctcggagctggtgaaaagagaggcctaacccctgtctttagattgacagtcgaatgcttcactcagccattgtacctcacccccactgatgttcgcgcgacgcgttgacatatactctacgaaaccacaaagacattggaacactatacctattattcggcgcgagtgagctggagtcctaggcacagctctaagcctccttattgcgagccgagctgggcgcagccaggcaacgcttctaggtaacgatgcagcatctacaacgtgatcgtcacgagcccatgcattgtagtaatcttcttcatagtaatagccatcataatcggaggcttggcaacgtgactaggttcccctaataatcggtgccccgatatggcgtttgcccgcattaacaagataagacttcgtgactcttagctccctctctcctactcctgcgtcgcatctgataatagggaggcggagcaggaacaggtcgaacagtctacccaccttagcatggaactagtcccagcctggagcgcggagaactaacatcttctcttaagctagcaaggtgtcttaacgtaggggcatcaagtcaccacaccagatcacaatggaccccggagacagacaaggccctggagaacggcaacaagagcaatggcaatccgacaaggggacataaacaagcgagcaacactggcgggagggacataagctaggagccagaagaacagggaacgagaacgaaacgggagaaacgagaggaagaggacagcagcaaaacactg

SEQ ID NO: 673164 - DNA, 797 bp, Homo sapiens
  misc_feature (442)..(442): n is a, c, g, or t
  misc_feature (444)..(444): n is a, c, g, or t
  misc_feature (448)..(448): n is a, c, g, or t
  misc_feature (485)..(485): n is a, c, g, or t
  misc_feature (497)..(497): n is a, c, g, or t
  misc_feature (530)..(530): n is a, c, g, or t
  misc_feature (541)..(541): n is a, c, g, or t
  misc_feature (546)..(546): n is a, c, g, or t
  misc_feature (574)..(574): n is a, c, g, or t
  misc_feature (577)..(577): n is a, c, g, or t
  misc_feature (581)..(581): n is a, c, g, or t
  misc_feature (584)..(584): n is a, c, g, or t
  misc_feature (609)..(609): n is a, c, g, or t
  misc_feature (613)..(613): n is a, c, g, or t
  misc_feature (624)..(624): n is a, c, g, or t
  misc_feature (632)..(632): n is a, c, g, or t
  misc_feature (637)..(637): n is a, c, g, or t
gccacaccctttggtggagactcccatgggaaattcccattgagatcgcccgggagggttaaggcggaataaagggaatagaattttttttgggagaaaggatccccacaaccatttcggagaccggacgtggttgtgacccagtgaaattgtaaaagtggtgataaatagggttcttaaaacgtctagaaaggccactggataggctttttctctgaaccgtgtagtttttttggaagtaagtttttcacagtttaaattgtatcttgtaaaacaccccaaacccctaataattccccaaccccgattaccacacgagccaaactgttgtcccctctatttatctttgattttccgtcttggccattgtttaaaaaaaaaatctagatttgttttattaggttcagagtatgtggggaattatagaatccctctttcatcncnttgngtatgtcttttgttaacatatttgttatgccttattntaaaattgagtntccaactggaatgcctttgaagaccgatgcttntatagaggttntttgncctaaatagttcagcctttgtatttttnttntggnatntaatcagattcctaatcatagcccntaanaaggaatgttnctttaatnttggnctttgctcatgtgctcgtgtccccctttttttttttcttaaaatcatagccatatggtaaattttctattttgttatggttctcttttattgatgggcatacccgtgggtgttacttggaaatggcccatttttattaaaatatttctggaagaaattta

SEQ ID NO: 673165 - DNA, 1216 bp, Homo sapiens
ctcaccgtccagatatctcatcatacaaacgacttaatcaccagcccaaagcaatgactaatccaaactagacgctcaaaacagaataatagccatacacaacactaaaggacgaacctgatctcttatactagtatccttaatgcagtttctattggccacaaataacctcctcggacgtgcctgccctgcacgtacattgtacaaccaacgcatccctaactatctataaacctagccatggccatccccttatgagcgggacgcgagccgatttagtaggcttgtcgcatctacacggattcacaaagatgcgcctagacccacgaccatgtgctctcatcgccagccacatgggacgatcgatcgcgtaagcgaacccccacctttactacactcgcgatcatcgtcaggcttagtattagtctgagaaatcgcaagtcctagaccctcatcgtcactatcagaccgaaatcatggcgcactagggccgtaatctgcacgtaaaacccgccataaggcaatttacctgggagggcccactcgtaacgttcatgaacaccgtaagttggaagacgcacagccctagcgaagtgatcaagcctagtgtaaacccgttcccttcatagcagcagttaatcagtcgtgtcatgaactttcctaagttcggtacctggacgtatgcctatgaacatcgcatgatcgcgcttaaactcccaaggcacgtaacgatttgtgtcaacacatatcgatagttataggcgcgtctttgaccggtggcgaactgaagggatatcatctaataagtggaacaccaacacgaaatccacgatttgccggtattcgagtagttacggtaaaaaaacaccgaagacccaatgaacgccccgtaaccgaagggggcacgcttcttcaaaggccccgtccctaaaatggaccctcccgggtccgcttaggcccattgttggatttttcaacttttccgacttccccacttaaaacggcatgctctcgaataactaaggtgcccttagctaaacaccaaacaactaggcttaaagccaataatttacccaaagtgaattgggcggcgaatgttaaccagggaagaaaaagccaacatacgcatgggtccgaccaagaagagccaaacctggtcccatgaagaggccctttcggatacggggataagtccttatttatataccctcagaaa

SEQ ID NO: 673166 - DNA, 468 bp, Homo sapiens
gctcgactgtcagaattctaggcgttctgaacggcggtaattagcatatgacatgtcattcccttcactgagatgcagctcccttgatgagaagaccctcttctcacttcgaaaaagcttaatatgctaaaaatattttgtaaacattttcttggtggtaaagtttgccagcgactcgcaaacgcaatctgcgtacacaacatccaggcttcgatcgtggatttgcattcctatggagtgtgagcacataggcgcagattggaacatgatctatagtctgtttggcatggcatttgttggtgggccagtcataacccccccctcacgtccaccagtagcgccacagatggaaaaaggtcggtgcgacgaagcacaccgagtccagccggtcgagcatgccaccatggccttcgaccaatatggcccccagtccttaacccaacggtcgcccttgatcgccgacatgac

SEQ ID NO: 673167 - DNA, 389 bp, Homo sapiens
agctcggtaccggcatgtgctgtaggccagcgttgtgcaaaagggctgaagtgatagtgtatgtgattttgatatagtgatttattactactaacactgtgattagttaagttgttaatatatagttgtatatatttatggggtacaaaatgatgttatgattcatgaatataaagtggagcaattaaatcaagctagttaacaaatctatcaccttatacttattttttgtggtgagaccacttgaaatttactcacagcgatttttttctgttttgcttttgagacagtctagctctgtcacccaggctggagtgcagtggcacaatctcggctcactgcaacctccacctcccgagttcaagcagttcgctggcctacagcacatg

SEQ ID NO: 673168 - DNA, 130 bp, Homo sapiens
tcgtcagccgtaccaccagatttcacttccacagcaggctttatttgttctgtctctgggacctagcagttgaccctgggcaagttacttctcatttgtcctggcaaggacattaaaactctgccttgtt

SEQ ID NO: 673169 - DNA, 889 bp, Homo sapiens
  misc_feature (442)..(442): n is a, c, g, or t
  misc_feature (444)..(444): n is a, c, g, or t
  misc_feature (448)..(448): n is a, c, g, or t
  misc_feature (485)..(485): n is a, c, g, or t
  misc_feature (497)..(497): n is a, c, g, or t
  misc_feature (530)..(530): n is a, c, g, or t
  misc_feature (541)..(541): n is a, c, g, or t
  misc_feature (546)..(546): n is a, c, g, or t
  misc_feature (574)..(574): n is a, c, g, or t
  misc_feature (577)..(577): n is a, c, g, or t
  misc_feature (581)..(581): n is a, c, g, or t
  misc_feature (584)..(584): n is a, c, g, or t
  misc_feature (609)..(609): n is a, c, g, or t
  misc_feature (613)..(613): n is a, c, g, or t
  misc_feature (624)..(624): n is a, c, g, or t
  misc_feature (632)..(632): n is a, c, g, or t
  misc_feature (637)..(637): n is a, c, g, or t
gccacaccctttggtggagactcccatgggaaattcccattgagatcgcccgggagggttaaggcggaataaagggaatagaattttttttgggagaaaggatccccacaaccatttcggagaccggacgtggttgtgacccagtgaaattgtaaaagtggtgataaatagggttcttaaaacgtctagaaaggccactggataggctttttctctgaaccgtgtagtttttttggaagtaagtttttcacagtttaaattgtatcttgtaaaacaccccaaacccctaataattccccaaccccgattaccacacgagccaaactgttgtcccctctatttatctttgattttccgtcttggccattgtttaaaaaaaaaatctagatttgttttattaggttcagagtatgtggggaattatagaatccctctttcatcncnttgngtatgtcttttgttaacatatttgttatgccttattntaaaattgagtntccaactggaatgcctttgaagaccgatgcttntatagaggttntttgncctaaatagttcagcctttgtatttttnttntggnatntaatcagattcctaatcatagcccntaanaaggaatgttnctttaatnttggnctttgctcatgtgctcgtgtccccctttttttttttcttaaaatcatagccatatggtaaattttctattttgttatggttatgattttaagaaaaaaaaaaaaggcggacgaggagcacttgagcaaagtccaatatgaaagtaacttgccttcttacgggctatgattaggaatcggattaaataccagaaataaaaatacaaatggctggaactatttaggtcaaagaacctctagggtaccggagctc

SEQ ID NO: 673170 - DNA, 286 bp, Homo sapiens
ggaaaaaaaccccatttttcccaggcgggggttaaaaaaaggttaccccccattttacccggttttttaaaggatttaattttccccccaaaaaaattttaagggccccccaaaaattttttttagggcccccaaaacccccctttaaaaaggttttttttttgcaacaccagggttaaaaggaaacccggggggttttttttggacccacgcccccacccccccctttttcccccccccccctttttttccccattggggggggaaaaaaaaaaggggtttttta

SEQ ID NO: 673171 - DNA, 932 bp, Homo sapiens
tgctaggtagagacccggtgtttaatcaggacgagggtggatcgcttgagcccaggaggtccaggctgcagtgagccatgatcgagccactgcactccagcctgggcgacagagcgagaccctgtctaaaaatattacagagataggccgggcgtggtggctcacgcctgtaatcccagcactttgggaggccgaggcgggctggcatcactatgagtcgccgagattgtagacgcaactacgtgttgtaccaactggttgatgaacaccgctatcatccttaataaatactacaaaataagaccaagagaaaaccctgcgcggggcgctcttgtcggtggcgcaggcgtacgcagagaggcttgagggcgaggagaatttgccgctgaagcctccgtttcgggtgatgccagaccatgctaggtggagtcccagaatgagtgcggaagacacatccgtggcggggtccacgccttagtgggcgagacggccgtattaacatccgatcgtaaaaaacaccgtgttgtactcctggtcttacacgagaatttcggcccaactagcgtaacttaaaaaagggcggtatacctaaaaaatgcacaaaacatcttatggcacaccaatggctttgcgcaagcaactaaacataaaaataacaccctgatagccacaacgcaccccatcttactcgacaaagaccaacgagcctttcccctgaacgagtctcccacaaacggtacagctctaagtagccccatcacggtattgccaagcgcttctattcttgtgccattaacccacccccacactggtgaaggccaccccaaataatctctgaaacctccttgatcaatgtgcacaattgaacaacctctccgcattttccaaacaacagcactcttcatctgaccccttgtacccactcttcgtca

SEQ ID NO: 673172 - DNA, 420 bp, Homo sapiens
  misc_feature (22)..(22): n is a, c, g, or t
  misc_feature (43)..(43): n is a, c, g, or t
  misc_feature (113)..(113): n is a, c, g, or t
  misc_feature (130)..(130): n is a, c, g, or t
  misc_feature (405)..(406): n is a, c, g, or t
  misc_feature (420)..(420): n is a, c, g, or t
gtgaagcccaaccgtgcccggnccctgtttttggtttttaaanaagaacaggggtcttgctttgtaaccccccaggctggagtgcaagtgggtacaaaacgtaattcacctgnaatcctcaacccccccngggcctcaagggctccctctcgttttagccctcctcaagtatctgggacctaaaggcgtgtgcctacccattccctggctaatttttttttttaatagagatggtgtctcgctatgttgcccagtctggtcttgaacctctgggctcaagtgatctgcccaccttggctccccaaagtgttgggattacaggcatgaaccactgcacccagccatgtttttattttatctgagagaaaactgaggttcataacttaactgcatacttctggaatnntacacagagaaatn

SEQ ID NO: 673173 - DNA, 705 bp, Homo sapiens
ggccagcacgcaggagacctctgagagcagcagggagtcaaaggggaaaaagtcttccagccatagcctgagtcataaagggaagaaactgagcagtgggaaaggtgtgagcagttttacctccgcctcctcttcttcctcctcctcttcctcctcctctggggggcccttccagcctgcagtctcgtccctgcagagctcccctgacttctctgcattccccaagctggagcagccagaggaggacaagtactccaagcccacaggcccgcgcattcagcacccatccattcatgcgcactcagaatgccacgagcacaccccaagggatgaccggttgaagagacagaagggggtcttcatctggcgtgggggcccatcagtggcgcgtaactgcaaccagacagactccagactcaggacgggcccgggaagcacatcccactggggactataagtctccccacgtacacggggtcaggggccatcggcaggcacaccacaaaacggatgcccgcactgagtgacaaccctgtgcctagctgatgagacccctgagacaggcctgaaggagaagaagcacaaagccagcaagaggagccgacatgggccaggccgtcccaagggcagccggaacaaggagggcactgggggcccagatgacccatccttgccagtgaccagctggcgggatgatgagggctg

SEQ ID NO: 673174 - DNA, 1204 bp, Homo sapiens
cttgacccatttatgtctagtgttccattattggaacgctaagcttatgggagttatttagagcctactgctcaaggtcatcaccaaggtctggttgcaaaaattcacaaaattgcaacctcaggcataaatggcttaagcccaagagatggcactgaccataaatggtggcttgtgtgtgaagggtttggacttcaagatatactaacacctagaaaactaaaagtgcaattgacccccaattactattttagtttgaggtatcaagggcatttgccaatctcttatatgtagcttctagagttgtgctgtccaatattatatccactagccaacgtggcttttgaaattaaaattaattaaaattaaattaaaaatgtaattcttcagtcacaccagccacatttcaaaggctcaatagccacgcctggcttgtggctaccatattggataacaagaaacacttccgtggttgaagaaaattttaatggacaatgctgtgtttcatttgaattcgttgtccttgaagaaaagggaagaagaggaaagaaacaagatttggtagctcttgggcatatccaagcatttttgattttagagaggccctatggagtaatgaaaaaaatacaagctgacacagctttaaatccccactgtgttatcttgggaaaatcacttcaacctccttgagtctcaatttgcaattttggaaaagaaaaacaatttttgtcctgtctttcttgcaagattattatgcaacctgattaaatgtacagatgtgcagactcttaaaaaccttatgttaatgtaacccatataaagtacgacttttggtcgagtaccagcacaaatttgcattcaaaggaagaatagttcatcagtgcaaaaagcgttcaaaggtaatcagttcatcacgtatcttgagaaaaagagaatgcattcaaaacacaaagcaaaattgcttcagtttcttttctgcccatctgaatatttcctttagtatttgtcccacatgacatccatcccatgtatttatccactctttcacaacattgcctatgaacatccttcaactggctcagttctttattgcatagagccacttagcttctctagtttcttatgatttcctattttacacttaacagcaaaaggaggcttccatttagaaggcactatctcaaacataaataatttcatattt

SEQ ID NO: 673175 - DNA, 332 bp, Homo sapiens
cctatcaagaggaggtggtagaccgagattctaaattgaaaaatgaaggccgggtgcggtggctcacgcctgtaatcccagtgctttgggaggccgaggcgggtggatcacaaaatcaggagatcgagaccatcctggctaacacggtgaaaccctgtctctactaaaaatacgaaaaattagctgggcgtggtggcgggcgcctgtagtcccagctactcgggaggctgaggcaggagaatggtgtgaacccgggaggcggagcatgcagtgagccgagatcgcaccactgcactccagcctgagcgacagagcaaagactcttgtcttca

SEQ ID NO: 673176 - DNA, 152 bp, Homo sapiens
ctgggcctagataccgagacagtgctataatgctcgtaatggcaataagtctcagcgaaaatgacagattgagacatatttcaaaaacgtgtatcataggtagacctgaagaggttatgtatattgaagacaggcacaggaaaacgtagaca

SEQ ID NO: 673177 - DNA, 123 bp, Homo sapiens
cgggtgctctgaggatcccgggtcggcaaaggtctgcagaaagttaaataaatcacaaagactgctgtcatatattaattgcataaacacctcaacagtgctcagagtttcatccgtttggtt

SEQ ID NO: 673178 - DNA, 151 bp, Homo sapiens
tgtatgactagcggatagtcagtccccagatgagtgagccccagagagagctctgagtacaagtacaggccagctcaggcccaaatcgccagctctcccgtctgtatctgcatctaacatcgatctgctgctcatgggaagaacagaattg

SEQ ID NO: 673179 - DNA, 1459 bp, Homo sapiens
tcagcggacgcgtgggtcgaccacgcgatcgagaaaactccaggatcccctgaccacacgactgacccagaccacaccaagaccccctggcagctgcccctcctggaagcagaaagtgcctttatctcagccatccgcagactgctcggacagatgcggggacaggctggaatgagggaggcagtcttcatcatcccggagcatcccaacaatcatacagagcaaacaacaagaaacaaaacaggagaatgaaagatgcaatgaatgaaagacaaatgaagaatcaagaataagaaagaataaaaaagcgaaagaaagaatgaaaaaaaaaaaacaaaaaataagaaaagatgataagagaacaggataatacagcaaacgatggcaaacatagactgaacaggacgacaagtaagagagcgcacacacaatggaaaacagaagacaaagaaaaagagacatgaatagaaaagagatagaaacaaatgcatacaccagcagagaatatgcgagaatatagagaacacaaaagtagaaaacatgaagaactagtgcacagagaagaccatgacacaatggaacccaacacaaagaaacaagcggtcccaatgtcagatgaatgatacatccaaagtctgaatcataaccatattaacaaaacaagagaaaagatcaaaacacgatcaatgacatataagagatccacaacaaaaacatactccctacaactacactacaaaataaacaattaaccaacacaaacacataccacataccttacaacaaaaaaaaccaaaaaaaacacaatcaccaatacaatacttactaacaatactacattacaccaacagaatacatcaacattaaataccaacaaaatatacaacaatatacaaaaaaaaacaaacaaatcacaataaaaacaatataaaacaccaccaacaacatacacaataaaaatacaccaaacaaataaacataacaccaaacaaaacacaaccacaacaaaacatcaacaaaaaaaaaaaaaacaataaacacacaaatactctactaaacatctaaacctaaacaacataaacaatataatacaaacaaaaaacacactactcactacctaatcacataccctacaaccaacaaccacacaataaccaaaccactacaaacacacacaaatcacaaaaaacaaacaacaactacaataactaacaataaaaaacacaatctccaaccaacacaaaaaaaatcaacataaaaaatagaacaataacaacaaaaaagaaaaataaaaacaacacaaacacaaaaaaaaaaaaaataaaaaatagacactccaattacactacaaacaaataaaatacatcaacaaacatcatagaataacacaaaatagctaatacattaaaacaatcagcaacaaacataaactacacaaaaactaaaaatcaaccagaac

SEQ ID NO: 673180 - DNA, 291 bp, Homo sapiens
actttcggattcagtggagaaaaggtcagacgatgcagacatgaatagatgcagctatggctagaagggtagcaaccaggttcctgctagcctatctgccttaggtgtatcacttcactttataagagcatgtgaggttcccataggattaagaaaaaacgtgtagagttcaaaagttaactgatcggtatcttgcatcggtgggtgtgcacccgaagctctgtacaatacgctatgagaagtatataacatgaacaaatctcaaaacaaactcgagactagctcttctcg

SEQ ID NO: 673181 - DNA, 506 bp, Homo sapiens
atgccaataacctccatctaaagtcagaccaaagaaagaatcttaagaactatgagacaaaagtgtcaggtaacccatatgttaatctaacttgttagattaaaggacatttttcagcagaaatctcacagatcagaagggattagggtcctatctttagctgccttaaacaaaataattgtcaggcaagaaatttgaatccagcaatcctaaggttcataaatgaaggagagataaattatttttcagacaaatgctgacagaatttaccacttccaagccagcactacaagacatgctataggagttctaaatcttgaaacaaaacctcgaagtacaccaaaataaaaccttcttaacgcataaatctcacagggaaagcaataactgacaatgggcgcgaaaacaacaaggtattcaagcaacaactagcatgatgcatataacagtacttcccatcttaaatactaaagaacgtaaattgccttaaatgtccccttaacaga

SEQ ID NO: 673182 - DNA, 828 bp, Homo sapiens
aacatactcggattctaccctagcatcacatcgactcgacacaatccccgtatctagagctcgttcttactgagcccaaaacctgcccctgactcctcctagcacctaacacttgactagacaagtctattacctaataactaatttcatcaggcaccagaaatctctcaccatccatctatcaccatcatagcccaagacacaccggcatacttgaacacttctactgtcctctctttcttctgtcccactcagtcctatagccctatcgtccgtaatcacattaacctatttcccccgtagacaactctcaattacaatatatacaccaacaaacaatgttcaaaccagtaactactactaattcaacgtcccatagttcatactaaatagacctccacgcaatcctatatattggatcactcccgtagagtcataccctggatccccgttactcctgtcatgaacattagtatcatctgtcctagcactattaaacgtttaccacaaccaccagaccatcatattctttcacccacagcaacagtcctacctccattgcttaaacccaactaaaacactctaccgaagcacctctaacgcccctgtactcacccgagagtcgtcaggatgaatcctcatatagccgactcgctgtgagtgatattcaaaagacaacgcatcattcccccttatgttaacttaagcttgagactattggaccctcaatataatccgtcccgcctggatagaatgcgaagccaattgcttgaataatggcttcttgggggagcgccatggtgtcgtgagaagctttttttaaaaact

SEQ ID NO: 673183 - DNA, 323 bp, Homo sapiens
catgagtttggtagaaaagtaaaagtaaaagctgcccccgttacatactgtttattgttttaatggccaactaactatttgcaaaaaatgtgatttaatttattgctgttttgggtagaaaaggagaactaatgactgtggatataacccatgttttgtataaaaaattttattttttgtgcgaactggtcatttaaaaaatctacttcctttgatgtttggaaataaaagggtatgggtccttgtaaatgtttttatcaagcaaaaatgccccggactcaaagtataacaatgtgttttcattaaaaaatacatcccccgga

SEQ ID NO: 673184 - DNA, 120 bp, Homo sapiens
aaggttatcgtgaactgtagaataggtgatagtgcctctggttggggcacagtttggttttagtggccctgcgcccgttacctgtgtgcgtactccttcgggacatgcgcgttggttctg

SEQ ID NO: 673185 - DNA, 952 bp, Homo sapiens
gaatcggggccgtaccatggtctggataagactcataagagtgtgaacgattgctcctggagcagttgtatgtgtagaaagtgagatcagaggagatgtaatctatcggacctcggacagtgatccaccctacaggcaagaattattgtcggaagctcgggccaatagttgatgggcgaggggaagctactagaagaacaggtcggccttatcgatagaatatgtcttacccagatattatcactcctgacgccgaagatccagaaccaaaagctatgatcattgcaccaataatgtgtttgacatgtgggttgtgattcccaatgccatggaagtatgggagtataataatgtcattgatagtcgagaacgcatatgtaggcacgataggaatgtaacagtatgtcgagcaagatggctgcaatctttggcggcttgtgtgcaacctacgagtatccatttgaatgcctcagtccctgatgaatacggctgactctagtggtgctagactgcctttcgatcgggggtggcagatcttgagtcgaccgcaggcccagaatagtactggctggtatgtttggactgaaaggtcttggcctgattaccagcaccgtaaagaagagtatgatgggacgctcactcagttatgaagttagtagcgttgtttacatgaggatagcattggccttggaccactggcttttgaactgggccagcgttgatgtctctgaagaacttcgagattaatcatgtgcctgattcgtaactggtggacggacaatgggtgccggacggccccggtgtcataaggtaattcaaaactgggccttggaacccataggtgtgaataacacaccactttttagtctccacaacacgcgcttttctcaagaaatcgcgcaaaaaacagcgcccaataggggagggcgacaacaccgtcgttgctcgccgg

SEQ ID NO: 673186 - DNA, 485 bp, Homo sapiens
  misc_feature (13)..(13): n is a, c, g, or t
  misc_feature (481)..(481): n is a, c, g, or t
tttggcatcggcngcttcactacagaagaggaggtggactacacggcggagaagtgcatccaccacgtgaagcgccttcgagaaatgagtcctctctgggagatggtccaggatggcattgacctcaagagcatcaagtggacccagcattagaggagtgggctgtgactttgtgctggcctggctgttctggcctcactgatctgtgcacagccaggaacctcactgcctgacgtggtccatgctcaaagcagatgggaagctctgcagtgacttcaccacagaatgttctctagttgaaagctgaggctagctttcttagcctcggtcctgtgtaggcatgtattccgtaatcttcctcaggagttcttctcttgcctggcgtggcaattcttatctgagggcctggaagcactgccttgttactgccacagggaggacctacctgtgcagagatggaagaactggaagaaggctctangttc

SEQ ID NO: 673187 - DNA, 204 bp, Homo sapiens
gaaaaggagtctcgcccccctgctcgccagcctgggcaacaaagttagactttgcctcaaaaaaaaacccaacccaaccaaagaaccagaatagcatgtgcccgtatacccaaacgtttcccaacgggcattatgttttgccactgttttatttccaatggatcccaagttttatgctttaataaaatttaatcataacttcca

SEQ ID NO: 673188 - DNA, 391 bp, Homo sapiens
gtcgaccatgtgcatacattataaaagagcttacattatctaaggctgtatcccaacacgatgaatgtctgtaggctgaagagccagatccatttgtagcccttccattgctcggaagaataagatgcaagcttcagaacaagtgggaccaatgaggctgcaggcttgaaagtattcggagagttgctggagttggcccacatggtaaagctgaagagcctgacactgtttctgtttttgctgtgttgtgcttgtttatgacgagttgctagtggcattttgttttgggaaatatctagagctagataaatgaaaaatgaacgaagcaatggatgaaggcatcaaattgatcgatacatgtattatgataaaccttagtcttttgtcgacg

SEQ ID NO: 673189 - DNA, 296 bp, Homo sapiens
ctatatgaggaacgtcactcatggctgtctattcattcttaatacaggtgttttaagaatttgaaacataatggcatctaggccgggtgcggtcattcacacctctaatcccagcactttgggaggctaaggcaggcgtatcacctgatgtcgggagttcaagaccagcctggcccaacatggcaaaacactgtcactactaaaaatacaaaaattagccgggtgtggtggtgtgcagctgtagtcccagctacttgggaggctgaggcaggagaatcgtttgaatctgggaagcg

SEQ ID NO: 673190 - DNA, 559 bp, Homo sapiens
ggagagaactagtctcgagttttcggaggtatttttcaagaaaaaacagggtttcaccggtgtaagccaggatggtctcgtcctgacttggtgatccgcccgcctcggcctcccaaagtgctgggattacaggcgtgagccaccaaaccgtggccccggaagtatctttaaagggattgacaccagttccgggcttctgaccaaagaaaaatatgtcccaggagactttgaacgaggcagacacggagggtggttggcagaaacactagcagctgctctcttggatgctgctggggtgctctccgaggacggtggtgtgacacagcgcacttacaacatgagcaggccgcctggcatccaggggtggtcctacaatttcagatgggtgcccctgggattgtgtgcgaacgccaagcctttgggcgcgcatggaaacccagtctcacaaagaaggtctacccaaggatcagcatagctaggacagagacgccagggtattatacaggcccataatgttgttgtacacgacaaaacacccgttctggcaaggaaagtctca

SEQ ID NO: 673191 - DNA, 510 bp, Homo sapiens
gtctgagcaagctgggtagacagcatttcacgctaatgagtaaattatccaagtacaagaaaaatctgatgttcaagtttagggaaattacccttacactttccaaatatttttctgttcctgaaaatgtgcacctaaacaaattcactgtgaccttattaagatcttcaatacttttttatacttttcacactgagtgtcagtctgaacgccttatccaccatttcccttagagaaaatctaagggaaggcaaactgcacaacccaagagaataacatgatagaagcttgctccccacatgggaccccttgtactggagggtggctgaacagacaagcaagatgagacaaattctggctcctcctacatcagttcctcccaatgtggttccacagtatagtttcaaatggcttcccagaatatctgaaaaacccctttttcctctacatcttctgcttcccactaccaccttcttaaaaatacctttcccagcttgctcagacggtatc

SEQ ID NO: 673192 - DNA, 456 bp, Homo sapiens
  misc_feature (13)..(13): n is a, c, g, or t
  misc_feature (155)..(155): n is a, c, g, or t
  misc_feature (160)..(160): n is a, c, g, or t
  misc_feature (166)..(166): n is a, c, g, or t
  misc_feature (193)..(193): n is a, c, g, or t
  misc_feature (196)..(196): n is a, c, g, or t
  misc_feature (225)..(225): n is a, c, g, or t
  misc_feature (228)..(228): n is a, c, g, or t
  misc_feature (231)..(231): n is a, c, g, or t
aaagtgttaaaanaagtttccttgtttagttagaagactaggaaagggtagtttagtgaggtagaaaatttaaagagttactgttctattaggttcacactatagaaaaaactatgtagccccacatttacacctgtagaggtgaatggggagcntaggntttganaacagtctagcaataaggaagccactntcnggggccatggaggagcagtaatgaggcantcntanttcctccagccagaactcccaccttcacgcaccagtaatgagccccccaatcttgagcatcagtcgaggttgaatggagagcctagacttcttcccccactgttagtaacaaggtgtgtacccttccctcccctgccacagtggtatcataaaatgccagctacaacagaacatttacagaagacccagagtctcattacatgataccccaaatatccagtttca

SEQ ID NO: 673193 - DNA, 286 bp, Homo sapiens
tgttgttgccgaggctggagtgcaatggcgcaatctcggctcgctgcaacctccgcctcctgggttcaagcgattcccctacctcagcatcaggcaatatacccaggtgacaaacctgcacatgtaccctgtgaatctaaaataagttaaaattatttttaaaaaacaaacaaataaaaagcaacaacaaagccccaagaattagctgggtgtggtgttgcaagcctgtggtcccagttactcagcaggctgaagcagaaagatcacttgagcctggaggtcgacg

SEQ ID NO: 673194 - DNA, 841 bp, Homo sapiens
cggaacacatttacgggtaacaccttctgtgcccacctttttataagcccaccaagtttttcgaagcccttcgatagctctcccccctattttaatacattcttgagggagaaaattttcaggaacacaaccagagtttgttttgaaagaaaacatctatcatacctccgctccattttcgtttacccacagaactcacaccccacttttattcccctcgttgtgtatgcaacctccaagcccgcacaaccttctacatctctggtaaaacttcaaggagtttttcttaaattgtcatccctgctttcacaaatgtatagtggtccccccaaaccccctttttccacgggttcgaccctcgtgcaaatctaccccccccctctttctaattactctccctaatcatatggtataatgttctccctcgcacaaacactgtgtgagctgtagaacaaaaccacatgttgggctagctcatcttctgctttctgcccccccccaacatattctactgccagaagccacctacgcaaccattttgtcttctgtggttattagaaatatacgtggggcaaaattaccatgtgcgcccacacgacaattctccacaaaatacactctgcaacgatgcacacgcgcactatggagagagaaatcatttattcgagaaaaaagtagtctcacctagactatccccccagttcaaccgtctttatagagatgtttattccacctttagagctccatggtatagtgtctttcttgtttagatgaatcccccactgtctggcgtcgacatagaagctcttcccccataaaacaaaaccaaacccacaaaaca

SEQ ID NO: 673195 - DNA, 230 bp, Homo sapiens
aagaccattgaaaatttgagaggaggctgctgagatgggaagggctccttcaagtatgccttgggtctttggataaaccttaaagcttgagcgtgaacgttggtattaccattgatattttcttgtggaatttgaggaccagcaaggatctattgtactattattatgcccaggcacagagagcttattaaaacatgtgtttcaggggcatcttgggttgctgtgcggtg

SEQ ID NO: 673196 - DNA, 589 bp, Homo sapiens
  misc_feature (27)..(27): n is a, c, g, or t
  misc_feature (421)..(422): n is a, c, g, or t
  misc_feature (468)..(468): n is a, c, g, or t
  misc_feature (485)..(485): n is a, c, g, or t
  misc_feature (516)..(516): n is a, c, g, or t
  misc_feature (573)..(573): n is a, c, g, or t
ctgcaggaattcggcacgaggctttgntcttttcgctgaggaatgtcttggatatatgggctctttcttggttccatataaaatttaaagtattttttctaattctgtgaagaaattcaatggtagctcgatgggaacagcatagaatctataaattactttggtcagtatggccgttatcacgatattgattctttctatccatgagcatggaatgtttttccatttgtttgtgtcctctcttatttccttgagcagtggtttgtagttctccttgaagaggtccttcatatcccttgtaagttggattcctaggtattttattctctctgaagcaattgtgaatgggagttcactcatgatttggctggttgtctattattggtgtataggaatgcttgtgatttttgcacattgattnntgatcctgagaccttgctgaagttgcttatcagcttaaggaggttntgggctgagacagtggngtttctaaatatacaatcgggtcatctgcanacagaggaactggcagaacttcagtactgtgttgataggagttggcttgtgcagttntcaaagcaatgcttca

SEQ ID NO: 673197 - DNA, 381 bp, Homo sapiens
ggctgcaggaattcggcactgtagcttgattcttctgtgagctttatagtgaagcagccgacacgagtcgttgttcataaaacagctctcgaaagctgttagcacacccctgatgaaccgactgtgcttgcttacgtctggatcatgacttaaaaatcgagtacaggtgatgaaatcttggcagcgttaacaaaaaagtagcgtgcatcgcgctatttttatttactgtagaaactcaaccattcgcagagaggaaacaaattttcacacattgaagctcattctgacatgtactttcaacctcaggcgccgcatcacggagacattctctgcccgttccagagtggtgcccgccccagaccaccgtctccacatgcggcg

SEQ ID NO: 673198 - DNA, 248 bp, Homo sapiens
gccacggcgcccagcctagcatgtctactttttaatgtgattgggccattgtatgtaggtaatgctcttccttagaaatatagaatgttttcctagggcctagggccccaaggtccattggtgttgttaaggtgaaaataacctttgattgttaagggggttcttttttttgtcttttgcggaacactggagatgattagacttcctgaatagagaaagcttatgtgcttgttaaattggggaacaac

SEQ ID NO: 673199 - DNA, 936 bp, Homo sapiens
cagggctaaggcgtcttggcctggtctgcctttttggtttacttccgaccgttcttcacctggatatttttaggacgtgttagactccccagcatgtgggggggcgattctccccgagtaccatatgggggggtgtctcctcgcgcccccgggggggtcgcgccgtcgttgatgattttgttcatgcttctcgtgcttattaggaccacactgggtctgcggtggctggtttttttggtcagacgactgccgccccgacccgactgggggtcgaatgttttttttctttcgcgggggggtgagaagtacacatccttctcgcacgaacgtcgtggggccctccatcgcgggcgctcaactagcatgggcgtcccctctctcttatgttggtggcgtgcggtcgagattccatccccctcttccccttctttctatgggtggggtggccgccccccgtgttgttttttctcccgcgccagggtctcctatgaactcccctcgcctctgctcatcattcgtgtggtggtgggaacaccccctgtgtgacttactcgttgtgtggcgtatcaaacacgccccccccccccctgcttgcttcctcttgggatgcaggggcgccccaccaacccactccagggcgggcttcctctagttatgcggtgcgccccccccccccgcggcggtcgtccccctctcccttttgtattttttatgctcgacccctcctccctgcgcggtgacctcctttgccgcgagttccttcttgttgcaccctctgggaggggtggcccaccgctgctgcgtttgtgttccccccccccccccccccacgcttgtttgatggatgtggtggcgccgccttttttccgggggggcccccccgcaacccccccgttttttttttttccaaaaaaaacccccctcccccccccaaca

SEQ ID NO: 673200 - DNA, 377 bp, Homo sapiens
tattggccaggccaggcgcggaggctcacgcctgtaatcccagcactttgggaggccgaggctggtggatcacctgaggttgggagtccagaccagcctgaccaacgtggtgaagccctgtctctactaagaatacaaaaaattagccaggcgtggtggtgcatgcctgtaatcccagctactcaggaggctgaggcaggagaattgcctgaacctgggaggtggaggttgcggtgagctgagattgagccattgcactccagcctgggcaacaagagtggaaccctgtctcaaaaaaaagaaaagaaaagaaaagaaaatagcgccaagtccattttcaaagtggttgtaccagtgtacctacccacaagcacctg

SEQ ID NO: 673201 - DNA, 385 bp, Homo sapiens
catatctgggctctgtcctctttgctcatcgtgattgtcggaatatgccatatgtctgtcaactgtccaggtatctcgttccatgcagctccccgtgagaagggttgtctgtaccttgtagcctccaactgcacatgcctattatttcgaatacgctgcactcctctatctccccatccgatgtccagcgaatcgaggccaatgagcctttctatccgatgtctattaccaaagccagactgcttctgacggtgagttgcatgtgagatatgcttggagtttccatgacgtatgtcccattactacattgtgactatggacataggcagtgtcggcaagattgggaagctagaatcattttgctggatagaatgtagagccgacc

SEQ ID NO: 673202 - DNA, 131 bp, Homo sapiens
tggtgcagtacaactaggcttaatagggacatgtctgtaataccccactttagaagccaaggcaggaggattgcttgaggccaggagttcaagaccagtctaagcaacatagcaagatgctgtctctacac

SEQ ID NO: 673203 - DNA, 932 bp, Homo sapiens
  misc_feature (18)..(18): n is a, c, g, or t
  misc_feature (87)..(87): n is a, c, g, or t
  misc_feature (102)..(102): n is a, c, g, or t
  misc_feature (164)..(164): n is a, c, g, or t
  misc_feature (191)..(191): n is a, c, g, or t
  misc_feature (195)..(195): n is a, c, g, or t
  misc_feature (205)..(205): n is a, c, g, or t
  misc_feature (212)..(212): n is a, c, g, or t
  misc_feature (267)..(267): n is a, c, g, or t
  misc_feature (352)..(352): n is a, c, g, or t
  misc_feature (361)..(361): n is a, c, g, or t
  misc_feature (374)..(374): n is a, c, g, or t
  misc_feature (398)..(398): n is a, c, g, or t
  misc_feature (603)..(603): n is a, c, g, or t
  misc_feature (789)..(789): n is a, c, g, or t
  misc_feature (920)..(920): n is a, c, g, or t
cctgctctgcctcttagntgcgtgggttgtgcttcatagacagagtagagatttatcctggtgagcaggaagtgaactcttttctcngataatgttgctctnaatcccaacacgttccatgctcccggctcttagcaggtagttggtggacacttggttatagnagctgggtgccagatgcctgcatctcnctgnggaatgtgtncagggangatgtcaacactggccgggaaaaacatcaggctttcacctcactcatggcctccntaagtgcgagcgctgttgtgtgactgctgtcgtcaggaaaatggtcctgtagcctttctcgtctgcccaggaaccggaggtctgngatctcagngaatgtacaaccnccgcggagaacaccaccaagatgnggcgcgagggactcactggaagcgcttgtcttccgtgtagtcatatctgtgaatgcggaagtcactgcgagttgagcagccgttccactcgtcatcaaggccctgctcagcttcgccgctctagcacctgctcaatgattcggcagctcaggggcacgtaagctccggctgaagacgtgagccatgtctcggggcactttcgagntcgatactgcgccgtccacacgtgggatcaaattcagctttttgctgatggcacgaaaattgctcctcttggccagagaactgaaggcatcagtaatctttcctgcagccttgtcggtcaccagcttgctcactttactctccacggctgtgagggtgtcccgggggcctgctccgttagagccangctcttcgcagattgggagaaggttagcaggtgctcagggccatagctctgcagatactgtgttttcagagatcggtaatccttggggatcaaaccattctcagtgatggacaaaaggcacatgaggcgcngctttctatagg

SEQ ID NO: 673204 - DNA, 432 bp, Homo sapiens
  misc_feature (9)..(9): n is a, c, g, or t
  misc_feature (64)..(64): n is a, c, g, or t
cggcactgntaggatccaaaggggtcccaatacatacctggccggaacattttatccccatggnctgcagaaataccacattccttttttaggcaccatgtatccattcctcaaggatagacccatatgttaggtcacaagtccttaaaacattaaaaaagttgaatacccatcaagcatccttcctctgacccacagtggaatacaactagaaactaataacaagaggaatttttgaaactacaaatacatgaaaattaaacaatatgctcctgaatgaccattgagtcaatgaagaaattaagaaggaaattgaacaatttcttgaaacaaatgataaaggaaacacaacataccaaaacctatgggatacggcaaaagcagtactaagaggcaaattgatagctataagtgcctacatgaaaaaaaaaa

SEQ ID NO: 673205 - DNA, 408 bp, Homo sapiens
agggctaggaaaatgaagttgggacttgcattcccagaaggctattcccagcctctagatgtttacagttaaggaaatggattaataatgtttactaacaaacccaaacttcggagtgtccagatatcccgatatctcgagaacaaaggcattcctaattttgcttcaaagataataatattgattcttgcaaaatttggtaattttaaaaaagaatcctttatcacaaaccctgtagcagagcacatctccccatgatctttttttatcctatatatatacaagcactgtacctagggtggatgcattcctcctcttacttttgggaatgccctattctgtctatggagtagctgttctttcaccacttgactttctaaataaacttgcttttgctttgcaaaaaaa

SEQ ID NO: 673206 - DNA, 306 bp, Homo sapiens
tgcgggagtatttgacaagtgtcatagtctcgcaaaaaatctgagaaacggcgcacctcgggattctttcttttccacttgttgagcaaggcctccaaacccaatacccgtggggccaaaatttttggcatagcaaactttgcaataaagttccccatctttgtcagtgacatgggtggactctagacattgccgacagactgctgaggatgaacaggtcttatgccaaggcttgccacctcccataaccttctcagcagcatagactgacttgccacatcgagggcacttctcggactctccaaa

SEQ ID NO: 673207 - DNA, 218 bp, Homo sapiens
ggacagatataatgtacagtaagaattctatatcaattcaggatcgagatatgaagcgaaataccttagtgaaattgctccactttttggaaaacttggcattttcgtctactgctcgatttgacagcaaagataaaattctgcttacgttggaaaagcatagggggttctagtgactagccagacatcaagagacaccaccatgtatgctgtgtata

SEQ ID NO: 673208 - DNA, 190 bp, Homo sapiens
  misc_feature (30)..(30): n is a, c, g, or t
  misc_feature (52)..(52): n is a, c, g, or t
cacacacccagttagtcaaatgagtgcatntaaaactggtggaatctgaatntggtccgcgaattgtaccaatggcagtttcctggttttgatactgtgctacagttatgtaagatgtcaccactggaagaaactgggtgaagggtacatagaagcttctctgcaactattttcccaaatctacaattat

SEQ ID NO: 673209 - DNA, 228 bp, Homo sapiens
gccctgctatgtaggatacagttctaagtgaccacttcctttaaaagcgatggcaaaggcctggtacagtggctcacacctgtgctcccagcactttgggaggccaaggtgggcagatcacgagatcaggagatggagactgtcctggctaacatggtgaaacccagtctctactaaaaacacaaaaaaattagccaggcatggtggcatgtgcaagtagtcccagct

SEQ ID NO: 673210 - DNA, 528 bp, Homo sapiens
tgaacctaataacgtatatggaggtccaggctaggggtcaaacgggagctgtagccaccggtctacactacagccacagcaacaccagatccaagccacatctgcgacctacaccacagctcatggcaacgccggatccttaacccactgagcaaggtcagggatcgaacctgcagccccatggttcctagtaggattcactaaccactgagccatgacgggaactccggtgccctagttctcaaatgggtggtaccaatccctgtagggagaaatgtggaaggagactttgatggtcaacaaggattttcggggcagtgaaactattctatctgatactacattggttggcatgtgtcttaagggtgttggtccaaacctgtagaatgtccatcgtaattagggttcaaaccctaattaccgccaccagctatcaccaggctcgattaggcctttcacctctacctacaagtctactcactattttgccacatagatgagttggatcttttaacactgtcatgggta

SEQ ID NO: 673211 - DNA, 134 bp, Homo sapiens
agtagggcacaactactcataggtagcttcctctatttcgtcacgtgttccatcttcgtctcttcaactccagaggggatatcctgcaccatgtccgctgcctcacacaactccttgcccctctccatatgcaa

SEQ ID NO: 673212 - DNA, 112 bp, Homo sapiens
ccagtatgactggtgtcttaacaaaaagggaaaacttgggcacagagatgtacataaagacaatgtgaagagtcatagggacaagatgccttctacaagccaaggagagagg

SEQ ID NO: 673213 - DNA, 385 bp, Homo sapiens
attcgcggccgagtccacgagcgagactctgtctcaaaaaaaaagagatggagtctcattatggtgcccaggctagatttgaactcctgagctggcttagatttactttttgagtgttagaatatgtagatatttattagccagcctctttaaaagtatggctcagcgtaggactgttaaaaacttgttaactgtggaagaagtatgactgagacaatcctgattgttttgtaaactgatgtttgcttgtttaagaaatattaatgtttgtaatcccagcactatggaaggccgactgggaggattgcttcggcccaggttatagtaagctatgctcttgacactgcacactccagcccgggtgacagcaagactctgtctctta

SEQ ID NO: 673214 - DNA, 103 bp, Homo sapiens
cacccatgatggtgttgcaactgtgcccgttggtccagctgagtcctcagaagctccaaagaggttttaactctggtttctcagtcccatcttgagcctgtgt

SEQ ID NO: 673215 - DNA, 704 bp, Homo sapiens
  misc_feature (704)..(704): n is a, c, g, or t
gtactcccagctgtgccctaaccactacgtgtctcctcgcgctgcacatgcaggatgctctactgccttacttatactgagggcaaggttgatgccactgagaggcatctgctcccaagaaagccagagcctgcgaggtgtatgactatacgccttcactcaagatagctgacgggcatgggcaaagcgcacacaggtctgctgctgataggaaatactgttccctctccccacccagcaccatggcactgcaacaggcccagaagacgctgagcatgaacaggctgtatgcgatggcggacgtgcagcagaacaacacagagatctttgctgtcgcactctgccacctcgcagagctacacgcggagcagggctgttttgctgcacattctgaagtgttcaagcacttgaaggaacgatttccgcctaatagtcagcacgcccagatatggatgctatgtgatcaatacagtgtgacagagcaatgaatgatggcacatatcatttggctgattcacttgtgacaggaatcacagctctcaatctcatagagggtggttattggacagcggttgtattacaagctcagaacccaatgtcagaggcgcataagcttttacatactgtccggggcagaggtgaactggcgatcttcctccctaccaatgcgctgcccatgctcctgcaggtctggcctcttcggn

SEQ ID NO: 673216 - DNA, 138 bp, Homo sapiens
cactggagtagaggtaaagattcagctccacacaggagaaaccctggtattgcctggggtgctacaatgttctgggtctgccttgtgctacagtgagctccccatcagaactctgcaagcagaggcaaggacatcaag

SEQ ID NO: 673217 - DNA, 430 bp, Homo sapiens
ctcaaaagatttaggtctggttctataaaaggatcgaggtatttccaatccccgtcgaggtcaagatcaagatccaggtttttttcccgaccaagaagcagccgatcaaagtccagatttccctctccaaaaaaaagtcgttccccctcaggaagtcctcgcaaaagtgcaagtcctgaaagaatggactgaagctttcaagttccccccttagggaaaagttattttgtttaccttattataagggatttgtgatgtctgtaaagtgtaacctaggaaaaataattcaaccctttaatcaaaatggatttggattactatgtaaattcccaccagtaaaataatataaattttgttgaatgtattaacctcatatggtttgaaaatgtgggtttttatttggcccctttaaataaaatgtttttaacta

SEQ ID NO: 673218 - DNA, 181 bp, Homo sapiens
caaagaggtagacaaccagttctccacagcagcacatttttcataggaacttaaaaacagaagccatgtcttgggatggctgtccacacctggatccagaaagcattcattcattcattacattcatgcccggctaattttgtaagagacagggtttcgccgatattgaccaagctggtct

SEQ ID NO: 673219 - DNA, 504 bp, Homo sapiens
  misc_feature (173)..(173): n is a, c, g, or t
  misc_feature (176)..(176): n is a, c, g, or t
  misc_feature (183)..(183): n is a, c, g, or t
  misc_feature (189)..(189): n is a, c, g, or t
  misc_feature (260)..(260): n is a, c, g, or t
  misc_feature (283)..(283): n is a, c, g, or t
  misc_feature (321)..(321): n is a, c, g, or t
  misc_feature (403)..(403): n is a, c, g, or t
  misc_feature (483)..(483): n is a, c, g, or t
ttccacaggtcataggctggcattgaacccaacatggggagcagctgggttagcagccatctgcccattctgtcctgcaagtgacctgctagctatggtccagtgtgaaaagatgtgatgagtggggccaatcagattgcctgtcttgggaatttggtgtgaaaataagcacngcnactgccnggttgnagcagatatgtggtgtatatgtagtggcttagaaaggccggaactggtgtgatcgttaatattgagtgtcnacttgattggatagaaggatgcnaagtattgatcctgggtgtgtctgtgagggtgttgccnaaggagattaacatttgaatcagtgggctgggaaaggcagactcacccttaatgtgggtgggcaccatctaatcagctgccngcgtggctagaatataaagcaggtagaaaaaaaaaaacgtgaaaagactagactagatgggcctagcctcccatcctacntcttcctcccctgtggaaaag

SEQ ID NO: 673220 - DNA, 349 bp, Homo sapiens
  misc_feature (14)..(14): n is a, c, g, or t
tctctgcctcccangattcctatgcggcactgcccgcagcgtgtcacagggtcctttgcgcgccacctggatctcccgcccgatggtacaggccgtggcctccatgctcgcacgcgctgcggtatgtgacgccgtcgctgccgcgggtgcggatcttggtggtcgtagcaaatattcaaacgagacctttgaaggcctgaagtgacgaaggtgtcccattgtgaacatgcaagttgaacatgggtcaagtcggccctgagagatgggcgcagcgccgtaccgaatggccggggcgatgccatccggttgccatcgggctgatcgaaagggagtcgggttcaagatcccc

SEQ ID NO: 673221 - DNA, 440 bp, Homo sapiens
acgcgtgggtttttaagccggtctgaaaagcgcaatattcgggtgggagtgacccgattttccaggtacgtccgtcacccctttctttgactcggaaagggaacttcctgaccccttgcgcttcccaggtgaggcaatgcctcgccctgcttcggctcgcgcacggtgcgtgcacccactggcctgcgcccactgtctggcactccctagtgagatgaacccggtacctcagatggaaatgcagaaatcacccgtcttctgcgtcgctcacactgggggctgtagaccggagctgttcctattcggccatcttggctcctccccagacaactttgcaccatgcggacaggtcaaatgagaccagaagtattatgaaccaatgctaatcaggactgtttcctgcactctgagaccaaaggggccattctcacaaagaaaga

SEQ ID NO: 673222 - DNA, 91 bp, Homo sapiens
acccgggccccccctggggggttttttttttgggccttggattatgtttgggggttttaagggtttttacgggccggcttttcccccccca

SEQ ID NO: 673223 - DNA, 1001 bp, Homo sapiens
gagacccgccgacacgagcagagcaacctaaaaacggtccccccccagacgcggacaggaaaaaagggtctggacggcgaagaagcttcacctgcgggctacaagactggaaccgtgggccctaaagccccaggctctcttcgatcagggcggcatatccgagaagcgatgcccacatgcccacggacagcgaagcgtggattgtccaatggggcccaccgaacacgtgagagcaagccagtgcaagaagctggccaagcccccgggaaggtagagctgggaccacagctctgcaccttcacagtgcactgaaggtacctagggctcatttggaccttctgcgcctgctatggggacctgacctggtggtgtcagtcactgctgacaaccactcagagctggaacccaagatcctagatagtccgtagatagcacttaggacaagaatgtgcattgactgggggtggatgactgaggtgccaggcactgggtagagcaccatggtccacgtggattgtctcagggaagccttgaataaccatctggaggatggatgaccagcataagggcccatgtaggacagaaggcaaagtacaggtccaagaattgggagcgatgggagcgagatggcttcccccaactatagggatcgatcgaggcgagagggaagcccttgctgcctgccattcccagaccccagccctttgtgctcaccctggttccactggtctcaaaagtcacctgcctacaaatgtacataaggcgaaggttctgatggctgccttgctccttggcgtcgcgcccactcccctgtcgaggactttctctaggaagtccttccctgactacctgtgcaccagagtgcccctacattgagactgtattagccctcgctatcagatgccagatcatatgtgtctgtctgtgtgtccatcccgccgaccccccagaatgaacctccaggcatggactgaatctggttcatcctctctgacacccct

SEQ ID NO: 673224 - DNA, 354 bp, Homo sapiens
ctatggacttcttcagccaacctggactcagacagaagacaaagaaggattaaaaaaggaaagaaaaaaaaatcagaagagtgagactctgtctcggaaaaaaaaaaaattacagggtaactacagcttagaggacttgaacctggagcagggactcatttatcacccttacgttccccagggttaaagcagccgccttccaaattactctatctcagagataatgagactagaacaggggtcgggtaacgggtcgatggggacctatccggatgacacaccagcaactaccaggccagcaatattacagtgagtgggtatgccggtatgatgtccctgggcagctaaaagtta

SEQ ID NO: 673225 - DNA, 293 bp, Homo sapiens
  misc_feature (6)..(6): n is a, c, g, or t
  misc_feature (9)..(9): n is a, c, g, or t
gcagcngtnaacctccatctggagctcctcgtgcacactgtcgatcttcgtggagaacggggagctgaacagagtcagttcgctttcgtagagtttgaaatcagacagccttttctggaattcggtcttgagttccgcgattttgggaatgttgttcaggccatcgctttcatttctggaagccaatttcagggtgggaaagtgggccagattattcctcgtcaaatgagtctcccagaggcacagttttgctaggaacgcccggatcaggtcatacatctgcgtgacgattt

SEQ ID NO: 673226 - DNA, 463 bp, Homo sapiens
atttttgtatttatgtagagatgggattttgtcatgttgcccaggctggacttgaactactgggctcaagcaatcctcctgctttgccctcccaaagtgctgggattacaggcgtgcgacccgcgcccggcccccccaattactcttaaaggtaacatcactattgtgaacctaagatcagctttttgagatgccttttcaggtgtaatggttaatactgagtgtcagcttgattggattgaaggctacaaagtattgatcctgggtgtgtctgtgagggtgttgcaaaagagattacctggggaaggcagatgcacagttaatctggtgggcacaatcttatcagataccagcgattataaagcaggcagaaaacattaaaaggacagactggcctagctcccagcctacatctttctcccatgctggatgcgtcctgccctcaacattggctgaagttcta

SEQ ID NO: 673227 - DNA, 610 bp, Homo sapiens
  misc_feature (18)..(18): n is a, c, g, or t
  misc_feature (22)..(22): n is a, c, g, or t
  misc_feature (37)..(38): n is a, c, g, or t
  misc_feature (40)..(40): n is a, c, g, or t
  misc_feature (44)..(44): n is a, c, g, or t
  misc_feature (48)..(49): n is a, c, g, or t
  misc_feature (68)..(68): n is a, c, g, or t
ggagagcacgccctgganaganggaatggtttttttnngncctntggnngaagaatccccagcacagnaaaggatataggactaatacgcttccgtgagaaatgttttagatgaagataatgataatgttgggcaacccaatgagtatgacctgaacgacagctttctagatgatgaggaagaagactatgagccaacagatgaagattctgactgggaaccaggaaaggaagatgaagagaaggaagatgtggaagagcttttgaaagaagcaaaaaggtttatgaaaagaaaatagtaactaacttctgtagtcatatctgccttacatttactttttctttgtgggaaaacatttatgaactaaggaggtacttaagtgacagttattttccttcttttgatagttaatgacttttactactgactctttacaaatgagacattgaaacgtcagccttcagtataatagatggaattttttgttgccttgccttttctttcctacttaaagcatctggaaataggaagacagagaaggtagagtaaaaatggatattttttatgtactttgtatattggtaataaaaagtaaaagccataggttgca

SEQ ID NO: 673228 - DNA, 102 bp, Homo sapiens
agagctcggcccttatatgggcacagaaatttgttctgtgacatttattgaactacaccctgcatccaaccaaaagtagggctgaatgactccttttatggt

SEQ ID NO: 673229 - DNA, 1242 bp, Homo sapiens
agcgggcttgcaagaggagtcagagggcaaagggtgagacccttccaccggtccagctgggctctagcctcagggacgtcctgctcctgggggcagtctcaggtaaaaccaaaggaagaggattggtcatggaagactgtgcaccgaaatgattgaaatgccaacatctaccttagaggaaatgccacaatcattttctgcaatcacattaagtaacacagagatgaataatattaagactaatgcacagagaaacaaacttccaatagaggaacttggtaaagtttctaaacataaaattgccactaaaagaacaccacataaagaagatgaggcaatgagctgttctgaaaattgttcgagtgcccagggcgactcacttcaggatgagtctcaagggtctcattctgagtccagctctaatccctccaatcctgaaactttgcatgcaaaggcaactgattcagttctacaaggttctgaaggaaacaaggtcaagaggacatcctgcatgtatggggcaaactgctataggaagaatcctgttcattttcaacattttagccatcctggtgatagtgattatggaggtgtacaaatcgtgggccaagatgagactgatgaccggcctgaatgtccctatggaccatcctgttataggaagaatccccagcacaagatagaatatagacataatacgcttccagtgagaaatgttttagatgaagataatgataatgttgggcaacccaatgagtatgacctgaacgacagctttctagatgatgaggaagaagactatgagccaacagatgaagattctgactggggaggaagaaggaggaggaagaagaaggtgatggtgaggaaagaggatggagatgaagatgaaggaaagctgaggtcagtacgggcaagcgggcagtgaagatgatgacgatgaccgatgtcgataccaagaagcagaagacgacgaggatgactagaacagcaaaaaaggagcagttaagtaaaacaaaaggccggggaaccaataccctcaaatccggttcagaatataaacgggccccttcagaagaaggccggccgccaacgggacaggccccggagatgaaggcgcaccaaaacaaccaaatgaaaatggcacagcggggaacagcagacaatacggccgagaccaagaaccaaaaagaaggggcaaagacaaatacagagacagaggaacagaagaacaccaagaat

SEQ ID NO: 673230 - DNA, 197 bp, Homo sapiens
cccgtactagcccgacagcatggggttggagccaccacaggaggtaccagagccacctgtggtggcacaggagttgccaggcctgcctttgtggacagcagcacgtagagttgccgagagcagacctgcgcgtatcatgtagcaagtggagttgacgcgaacaacctggtgacgacgacgagagttggagcagcctg

SEQ ID NO: 673231 - DNA, 928 bp, Homo sapiens
  misc_feature (737)..(737): n is a, c, g, or t
  misc_feature (752)..(752): n is a, c, g, or t
agcgggcttgcaagaggagtcagagggcaaagggtgagacccttccaccggtccagctgggctctagcctcagggacgtcctgctcctgggggcagtctcaggtaaaaccaaaggaagaggattggtcatggaagactgtgcaccgaaatgattgaaatgccaacatctaccttagaggaaatgccacaatcattttctgcaatcacattaagtaacacagagatgaataatattaagactaatgcacagagaaacaaacttccaatagaggaacttggtaaagtttctaaacataaaattgccactaaaagaacaccacataaagaagatgaggcaatgagctgttctgaaaattgttcgagtgcccagggcgactcacttcaggatgagtctcaagggtctcattctgagtccagctctaatccctccaatcctgaaactttgcatgcaaaggcaactgattcagttctacaaggttctgaaggaaacaaggtcaagaggacatcctgcatgtatggggcaaactgctataggaagaatcctgttcattttcaacattttagccatcctggtgatagtgattatggaggtgtacaaatcgtgggccaagatgagactgatgaccggcctgaatgtccctatggaccatcctgttataggttggaagttcagtgtccagttgaaaaacaccaactcagctagtttcttctggtctgcattacagtattttacctgnctttttatgaaaagngcacgttctaggaaaggatggaagattctcaaagaaacaactttccccttctaaggcagatgaaaacctgtacatgtacctaacattttttcccctttttaaaatataaaatttcacattacattttctgctcttcctttttggaataattaaatgtaacacttctttcataaaaa

SEQ ID NO: 673232 - DNA, 1292 bp, Homo sapiens
  misc_feature (18)..(18): n is a, c, g, or t
  misc_feature (22)..(22): n is a, c, g, or t
  misc_feature (37)..(38): n is a, c, g, or t
  misc_feature (40)..(40): n is a, c, g, or t
  misc_feature (44)..(44): n is a, c, g, or t
  misc_feature (48)..(49): n is a, c, g, or t
  misc_feature (68)..(68): n is a, c, g, or t
  misc_feature (1112)..(1112): n is a, c, g, or t
  misc_feature (1140)..(1140): n is a, c, g, or t
  misc_feature (1172)..(1172): n is a, c, g, or t
  misc_feature (1187)..(1187): n is a, c, g, or t
  misc_feature (1195)..(1195): n is a, c, g, or t
  misc_feature (1201)..(1201): n is a, c, g, or t
  misc_feature (1224)..(1224): n is a, c, g, or t
  misc_feature (1235)..(1235): n is a, c, g, or t
  misc_feature (1253)..(1253): n is a, c, g, or t
  misc_feature (1288)..(1288): n is a, c, g, or t
ggagagcacgccctgganaganggaatggtttttttnngncctntggnngaagaatccccagcacagnaaaggatataggactaatacgcttccgtgagaaatgttttagatgaagataatgataatgttgggcaacccaatgagtatgacctgaacgacagctttctagatgatgaggaagaagactatgagccaacagatgaagattctgactgggaaccaggaaaggaagatgaagagaaggaagatgtggaagagcttttgaaagaagcaaaaaggtttatgaaaagaaaatagtaactaacttctgtagtcatatctgccttacatttactttttctttgtgggaaaacatttatgaactaaggaggtacttaagtgacagttattttccttcttttgatagttaatgacttttactactgactctttacaaatgagacattgaaacgtcagccttcagtataatagatggaattttttgttgccttgccttttctttcctacttaaagcatctggaaataggaagacagagaaggtagagtaaaaatggatattttttatgtactttgtatattggtaataaaaagtaaaagccataggttgcataaaactttggtctttttaaatttttttccaaagattatggagtactctgcaagtataaccaggcaaagtacatgaaaacatgcctcttttcattgttactgaagtaattctgtaagcagaaccaggctttaaaaaatgcagccattacataatggcgttttttttctagtaccttagatgtgagctttgcaatttcacttactacttttatccttcaaaacttgggaagattggttccaaatgggtactgaaaatagattcaactaggctgtagaagagaaatgttcaccatgtagggaatgttattttgtgttccacatctgcaatttactgtatgtttgaatttaaaagtaaaaaaactcaaaaaacttgacctttttttcaaactaaagtcctagctgattattttaactctcagtgtgctgtctttatattaagaatagagaaacgaccataactttctcaaatggcattagttttgccttaagttttttttgaccntcagatggaaagtaagcaagttggttgncaagtttgaaagttccaagattcctgggcctncccatattccagganggaaaccnctttanttcctcccagtttttaccaaagnaatcctttccnggtaatttcccggttccnaaaaaactaacttttaaagccccctaataatggcncctt

SEQ ID NO: 673233 - DNA, 139 bp, Homo sapiens
acctcttaagcactgggacaataacttgaagtgccgctaattcttcctgctacaactggactgattcacctgcaatgactgtgtggcgtggagccggcagccgactggcaaaggtgtcgtggtggtcattaagctggag

SEQ ID NO: 673234 - DNA, 2017 bp, Homo sapiens
  misc_feature (753)..(753): n is a, c, g, or t
  misc_feature (772)..(772): n is a, c, g, or t
  misc_feature (1837)..(1837): n is a, c, g, or t
  misc_feature (1865)..(1865): n is a, c, g, or t
  misc_feature (1897)..(1897): n is a, c, g, or t
  misc_feature (1912)..(1912): n is a, c, g, or t
  misc_feature (1920)..(1920): n is a, c, g, or t
  misc_feature (1926)..(1926): n is a, c, g, or t
  misc_feature (1949)..(1949): n is a, c, g, or t
  misc_feature (1960)..(1960): n is a, c, g, or t
  misc_feature (1978)..(1978): n is a, c, g, or t
  misc_feature (2013)..(2013): n is a, c, g, or t
agcgggcttgcaagaggagtcagagggcaaagggtgagacccttccaccggtccagctgggctctagcctcagggacgtcctgctcctgggggcagtctcaggtaaaaccaaaggaagaggattggtcatggaagactgtgcaccgaaatgattgaaatgccaacatctaccttagaggaaatgccacaatcattttctgcaatcacattaagtaacacagagatgaataatattaagactaatgcacagagaaacaaacttccaatagaggaacttggtaaagtttctaaacataaaattgccactaaaagaacaccacataaagaagatgaggcaatgagctgttctgaaaattgttcgagtgcccagggcgactcacttcaggatgagtctcaagggtctcattctgagtccagctctaatccctccaatcctgaaactttgcatgcaaaggcaactgattcagttctacaaggttctgaaggaaacaaggtcaagaggacatcctgcatgtatggggcaaactgctataggaagaatcctgttcattttcaacattttagccatcctggtgatagtgattatggaggtgtacaaatcgtgggccaagatgagactgatgaccggcctgaatgtccctatggaccatcctgttataggaagaatccccagcacaagatagaatatagacataatacgcttccagaggctgattcagcgcataatatttctgctcacagaatgagaaaatnaaatgcatactatccaggntgcactcacttgcatttatatgtgcatacaaacagtgacttgtatcaatgagaaatgttttagatgaagataatgataatgttgggcaacccaatgagtatgacctgaacgacagctttctagatgatgaggaagaagactatgagccaacagatgaagattctgactgggaaccaggaaaggaagatgaagagaaggaagatgtggaagagcttttgaaagaagcaaaaaggtttatgaaaagaaaatagtaactaacttctgtagtcatatctgccttacatttactttttctttgtgggaaaacatttatgaactaaggaggtacttaagtgacagttattttccttcttttgatagttaatgacttttactactgactctttacaaatgagacattgaaacgtcagccttcagtataatagatggaattttttgttgccttgccttttctttcctacttaaagcatctggaaataggaagacagagaaggtagagtaaaaatggatattttttatgtactttgtatattggtaataaaaagtaaaagccataggttgcataaaactttggtctttttaaatttttttccaaagattatggagtactctgcaagtataaccaggcaaagtacatgaaaacatgcctcttttcattgttactgaagtaattctgtaagcagaaccaggctttaaaaaatgcagccattacataatggcgttttttttctagtaccttagatgtgagctttgcaatttcacttactacttttatccttcaaaacttgggaagattggttccaaatgggtactgaaaatagattcaactaggctgtagaagagaaatgttcaccatgtagggaatgttattttgtgttccacatctgcaatttactgtatgtttgaatttaaaagtaaaaaaactcaaaaaacttgacctttttttcaaactaaagtcctagctgattattttaactctcagtgtgctgtctttatattaagaatagagaaacgaccataactttctcaaatggcattagttttgccttaagttttttttgaccntcagatggaaagtaagcaagttggttgncaagtttgaaagttccaagattcctgggcctncccatattccagganggaaaccnctttanttcctcccagtttttaccaaagnaatcctttccnggtaatttcccggttccnaaaaaactaacttttaaagccccctaataatggcncctt

SEQ ID NO: 673235 - DNA, 859 bp, Homo sapiens
  misc_feature (214)..(214): n is a, c, g, or t
  misc_feature (230)..(230): n is a, c, g, or t
  misc_feature (243)..(243): n is a, c, g, or t
  misc_feature (276)..(276): n is a, c, g, or t
  misc_feature (303)..(303): n is a, c, g, or t
  misc_feature (332)..(332): n is a, c, g, or t
  misc_feature (345)..(345): n is a, c, g, or t
  misc_feature (352)..(352): n is a, c, g, or t
  misc_feature (361)..(361): n is a, c, g, or t
  misc_feature (367)..(367): n is a, c, g, or t
  misc_feature (410)..(410): n is a, c, g, or t
  misc_feature (416)..(416): n is a, c, g, or t
  misc_feature (433)..(433): n is a, c, g, or t
  misc_feature (436)..(436): n is a, c, g, or t
  misc_feature (443)..(443): n is a, c, g, or t
  misc_feature (446)..(446): n is a, c, g, or t
  misc_feature (463)..(463): n is a, c, g, or t
  misc_feature (471)..(471): n is a, c, g, or t
  misc_feature (481)..(481): n is a, c, g, or t
  misc_feature (488)..(489): n is a, c, g, or t
  misc_feature (508)..(508): n is a, c, g, or t
  misc_feature (518)..(518): n is a, c, g, or t
  misc_feature (534)..(534): n is a, c, g, or t
  misc_feature (622)..(622): n is a, c, g, or t
  misc_feature (633)..(633): n is a, c, g, or t
  misc_feature (635)..(635): n is a, c, g, or t
  misc_feature (637)..(638): n is a, c, g, or t
  misc_feature (644)..(645): n is a, c, g, or t
  misc_feature (652)..(654): n is a, c, g, or t
  misc_feature (664)..(664): n is a, c, g, or t
  misc_feature (682)..(682): n is a, c, g, or t
  misc_feature (695)..(695): n is a, c, g, or t
  misc_feature (701)..(701): n is a, c, g, or t
  misc_feature (705)..(706): n is a, c, g, or t
  misc_feature (709)..(709): n is a, c, g, or t
  misc_feature (711)..(711): n is a, c, g, or t
  misc_feature (714)..(714): n is a, c, g, or t
  misc_feature (717)..(717): n is a, c, g, or t
  misc_feature (734)..(734): n is a, c, g, or t
  misc_feature (737)..(737): n is a, c, g, or t
  misc_feature (739)..(739): n is a, c, g, or t
tagagggtggcaggtacatcagttctttttgatatgaaaacattcatgtttcagacattgaattgagagcttttaggggaagcataatggttattgtcactatcaacagtctaaaaagaaaaactgaggtctttttaatcttgattacagcactcacggcatgcaccctactcagtgtgggtgtcttcgtttgggggcttttttttttttggcncttctgaggctaaatntgtctggctgaanattggatgtggtccctccttaactatgcgtccngtaataataggtacggtacggggctcngtgtaagtgtcgtgggggtaggacctatntttaaatactgtncctaacnttccatttnactagngagaaatcttggattccatttaatccttggtaattctagacantagatngtagtttagccataacngangtttttnaanaggggatatattttctngcacagtngttcaaaaangagacanntttcagtcctcaaggctgnccttggtttnacgggtcacaagtttnctagctcagacaacttttgaaaactctgtcagactattctcaggttttaactcgaagaccctctgggggtaggggctgttcctaagtnacgggcagatngngnnctgaanntggtccnnngtgccagacnggtactgagctgacagangggattttctgtnctaaantgtnnctngnttncanacgttaccgggcttagntcnancaattagcggtcgaattctcttaaaaaacaatatcacataaaacaccatttgttggggccgtggcccgaaaaaatttttaaacacatttgtgggggcggggccaaggtatattgaacttg

SEQ ID NO: 673236 - DNA, 226 bp, Homo sapiens
atcgtagcttagtggtaagtgctgaagatcaggaagcgtgatattacaggtttttcaaggtgattgggctgttgggtgttcctggcgtttccatatgaattggagggtggattttcctatttctgcaaaagacatcattggtattttgataggaattgcattggatctgtagatcactttcggtggtcttgacatcttaacaatattggtcttcctatccatacgt

SEQ ID NO: 673237 - DNA, 393 bp, Homo sapiens
  misc_feature (1)..(1): n is a, c, g, or t
  misc_feature (239)..(239): n is a, c, g, or t
nattcggcagagtcttgatctgtcacccaggctggagtgcagtggcgtgatcttggctcactgcaacctccgcctcccaggttcaagcgattctcctgcctcagcctcctgagtagctgggattacaggcacacgtcaccactcctggctaatttttgtattcttagtagagacagggtttcatcatgttggtcaggctagtctccaactcctgacctcgtgataccgcccgcctcagnctcctaaagtgctgagctgggattacaggcatgagccactgcgcccagcctgaaatcagcttttttagtgagtgatagctccttctggtttgctttgatttattaataatggagagagatgtgttggaaatctcctatccaaatgggtggggtt

SEQ ID NO: 673238 - DNA, 500 bp, Homo sapiens
cggggcgcttagaaataatagactttacctttcgacctttctcactgtggcgttgtgaaatcggcggcatttcgggggctgctgaagctcggaatgaacaagaggaacagggggggaacagtgagatcaagaggaggttaacccgaaaggtcattcaaaggcccacggtggaagaacttccggaaaaaaaaaatcctcatccgctttaagggactaactggagggggctgacgctcaggacttataacgcagggcaaataacccggggaccccgcttacccgtggaaaaaaaactggcatccggggacctaagtgaattcccccttggatggaagttcatgaattggagtggacacttaacaaggtttaaccgcccttccatccgatttccttttggagtgctatgcctggcttccccctcaccctttctcctccccccgcacccccgcctttatctctactcgctagtcctctcccggtcctcttggcccctcttctcg

SEQ ID NO: 673239 - DNA, 110 bp, Homo sapiens
cggccgaaacaatgtgaactgggcaggcggtgcctctaatactggtgatagctagaggtgatgtaaaaaggtagaacaggcggggtaagattagccgagttccttttact

SEQ ID NO: 673240 - DNA, 845 bp, Homo sapiens
cacatccatttcccccgcttcctcattaacttaccatcacagaattttcgttggatatgtaagagaccgcaagctgccaatctgcaagcagttattaatgaagtttgcaggcacagaccgctgaatttgggtccctttgtggtacgtgctttccttcgtagttcaacaagtgaaggtttattactgaagattgatccatccgtgcctaaagaagtaaaaaatgaagaaagcgaacaacaagatgcctacatgcggtgaattgtgaaactatcttcactggttttaagaaccaatggacataatgacgctacagtataatttttacatttgatgcctccggttctgatcatacttcaaagtagaactttaacatttaaaaattgtacattcctcttcatgaataattaaaatatatttttatactttgtctgcaactcccaaaaaacaaaaacaactgccctttattgaccccttcggtaatagccctccagacggtatcctttacggcaggatttttacatgatcctcagacactcatatttataaacagacgcctacgaataatcagatttgctattaccaactcttaaaagttttcccgcttgcggcagaaaacaactaaacgcaacctctccgacaaacaaattgcttatccccctgctcatttaatagataaaaaactcactataatgtcctatcaatttgtattaatataatggtaccacccgtacagatcaggaataactcaattcgctttcacgccgcatcacgaaagaatttattcatcacacactccacctacctaattcattactcctctatatagtacttcgcatcacctcacc

SEQ ID NO: 673241 - DNA, 479 bp, Homo sapiens
  misc_feature (19)..(19): n is a, c, g, or t
  misc_feature (68)..(68): n is a, c, g, or t
  misc_feature (234)..(234): n is a, c, g, or t
  misc_feature (245)..(245): n is a, c, g, or t
  misc_feature (297)..(297): n is a, c, g, or t
  misc_feature (450)..(450): n is a, c, g, or t
caaggtttttcttccaacnctacacccctccaaggtcttaacttacagacagaaaccaaagtagccantttaaagcgttagatatcggatacaagacatacactggggagaatgcttcaccatctgaagctcacaccacaatggcccagtggacagctgtgcactctgcttgtgcttaagtccctgggtgtggctgaggggaaggcgtgttttcagaacagaagaacagctgtntttcacaagtnctgaagcatttacgactcgcatcgcgcgcgcgcgcgtatatattttcatgtngaagcggaagaggggaaatcagcaaagtccctcccacagagcattacgcgctgccttgcagagagcacggcacgaaaagcgcgacttctccttgctcacgctcgcgtgaattctctgcacgaccttggcagcgtccttcagcacgggtgtccnctgaactggcgccatggttcaccggaaaa

SEQ ID NO: 673242 - DNA, 121 bp, Homo sapiens
gcgtcctcgtggaagtgcatcgttttaaaccctgcgtggcatcttgacgcacgcggtatcccagggaagacagcgcgccctggaggcccaccctactccctgaggatcacccacctatggg

SEQ ID NO: 673243 - DNA, 485 bp, Homo sapiens
  misc_feature (72)..(72): n is a, c, g, or t
  misc_feature (84)..(85): n is a, c, g, or t
  misc_feature (87)..(87): n is a, c, g, or t
  misc_feature (108)..(108): n is a, c, g, or t
  misc_feature (117)..(117): n is a, c, g, or t
  misc_feature (129)..(129): n is a, c, g, or t
gctttcttagctgttagctgagaggaagtctctgaacaggcggcagcggctcttatagtgcaaccatggcanactattcaacanngnctcccccctcttctggctcanctggtggcngtggtggcggcngtggtggtggaggagttaacaacgctttcaaagatacactacagagagcccaacaaattacagcaaaaattagagataataccaaaacatcactaaattcaaataactataattataaaaaacaaaaaagacctttagaacataaatatcaaccagatactaagaaacttactcctcaaaataactcttttaaaacacacttaccaccaatacatcatcatcaaagcatatctataataacaaaagaatacaaagtgccacataaaataattaaattcataattaacagagaaaataaacatatctcacgcatacaacagaaatctgaatacaaaatacatatatctcctcacagt

SEQ ID NO: 673244 - DNA, 364 bp, Homo sapiens
  misc_feature (361)..(361): n is a, c, g, or t
ggctccattcaggggggagcagctggggcaacatatcaagacccatgtctacaaaaaaaactatataaaaagacaggcatgggggtgtgcactggtggtttcagctactggggagatggaggggggaggatttacttcagccgggttaaggctatagtaagccataatggtgccactgcactccagctggggtgacagagtgagatccggtctgaataaaggtggtacattgcgagcatgtgaagtgtatccacacggtgaggcaaaatacctctaaaagttttacatctggtaaaactaaaactcagtacacattaagtaacacgggcccattttaccctctcttcagccccgtgagggnagc

SEQ ID NO: 673245 - DNA, 130 bp, Homo sapiens
aatggagctgccctgctgcgaagtagggtgggctctaaatccaaggactggtgtccattatagaacaacattgaagacatagatgagacatggacaaggaagatggtggtgtgaagagggagtgcagcag

SEQ ID NO: 673246 - DNA, 135 bp, Homo sapiens
tcagaccctttcagcttgtgttgatgaagctcatgcgactcgatgaaaagtttggggcactgacaagcggctcaaagcggagctgtgccccacctgctgcccctttctaccccagatccaccaccttgcagtccc

SEQ ID NO: 673247 - DNA, 121 bp, Homo sapiens
atggaagacaagaagctttacaatttggaatgcaattgatggacagaggcgagagagatacttttcatctttatggtcaaggtcactggctaggaacttgatttgctacagtgtacagggt

SEQ ID NO: 673248 - DNA, 942 bp, Homo sapiens
gcagcaaaacgcgtccataagttcgttgtgcttggattccgcgatcgtcaatgttaaagtggaaacttcttcaacgtgtccggagcctctatgtactgctacactgctagatagtgagaagagacgcggacggacttgtccgtctagagtctcctatggcgagcaggagggcctacgtgtagagtggacagccaactctttgtacctgtccacgcatgcggacacatgctacagtcgtcaatacatgagggaatagagctgactgcgaatcataatattcgatatgagtcatccaagagggcatctctcgggtaggaaagggcttctaggttgttccgggtgcgcggcacacttggttggctcaccttgataaagacgcttgttgtgactgttcagggtgttgagtactccgttccacgcgtatactacgctgggccgagagtggtctgcgtgccctgaactgtgtatgactgggtgccatcctggcgagaccaactgcgcaaattgacgtgggtcccggctttcgaaaatcgcatggcattgcctctcgagcttaaaaaccagcgatgcaggataggcaacgttaccaagggaacggcctaccgtgctttacctttggcttgggtttctgagcttggcatcgcgccccaaggtggcttggcaattcgatcgcgaaggcccccatccttcgcccttgggcaattgggccgagtcatatccagttgatgtggccaagcccttaagccttaccggcgagtctgggcggcctcgcgtcgttggaggcaaccaaggtaatttgcctgctcggtctttgggctgtcggtaatctgggtggggaaccatgttgtggcccagttcgcgctaggtggcccaacggagaagcgagagtcggacacgcttctaccggtccacggtggggggtccttggagttggtggggctg

SEQ ID NO: 673249 - DNA, 107 bp, Homo sapiens
ccaagcttatggctattgttgaaactgtcattgtcccgggaaaaaagagaactatgtttaacccggggagggaaaaaagagaaacttgtatgttttaaccgcgggca

SEQ ID NO: 673250 - DNA, 719 bp, Homo sapiens
ttcctcctctcctccatccaccccctctctcctctcgctcgccggtgttgtctcctctctctctttgtctcgccgcgcggtgtgtgccccctctctggggggactttctccgcgggtggagaggagaaatgttcttgcgcgccctctctcccctctcttgtgataaacacccctcgttggagggtctcccacggcgggagggtttcccacaaaagagagagaacataattttgtgagaatatatcccgcggagccctcagagaggggagatattttgttttgtgcgctctctctctgtggagacgagagagagaaactaataggcctctctctctgtgtgcggcacgagttgtttggcgcctcccctctctccccaaagaggccctttttccctcttaaataatccacactcttctcccccagaagaggagaacactctaaaggggtgtgttcacacacccagtggtccccagagagagtgggccgggtttcctcgatagatagacacttggggggacacaccccccaaacctcttccgcttttatcaagagagagagagattgggccacgcggagaacacctgcgggagagagaaggggaaaattttctcttttttgagaggggtaatgggaccccgcgcgggggtttaaatttttttttttttttttttaaatttgtgtgtgtttaaaaaacccccttctcttttttaaggggggca

SEQ ID NO: 673251 - DNA, 200 bp, Homo sapiens
gcagaaaatcacggtgggcacaaaattttggacacgatgttgggagcgtgagagctattgttcacgaatccagggccagaccgtggtgtctgtcttcctttaaagcacctgggatggtacataaaatgttccagaattgattttcttgaaactcaataaattcatcagaacaggcgttgctgtagacagtaatgataaga

SEQ ID NO: 673252 - DNA, 280 bp, Homo sapiens
ctaaatggctgttacctaaatggctgtacctaaatggcaactcgtgatcgccaaatccagcagccatttaggtaacagccatttaggtaacagccatttaggtaacagccatttaggtaacagccatttaggtaacagccatttaggtaacagccatttaggtaacagccatttaggtaacagccatttaggtaacagccatttaggtaacagccatttaggtaacagccatttaggtaacagccattaggtaacagccatttagggtacagcctgtgag

SEQ ID NO: 673253 - DNA, 1217 bp, Homo sapiens
  misc_feature (565)..(565): n is a, c, g, or t
tcctcactaccgccagacaccccggtggaagcatttagaggggaccacggtgagggatcaagggcttctctgtccgcccgtgtcacaccttccaggccgtcacgttcacattaggcacatcacacaacacgactggtcacacagcaggtgatccatccatccgttcagttcatatcaagatatttatatgagcacgctacatatgtgcccgagcaccgtgattactaggcgactgggtcattacgcatagcagaacaaaatagacagaatacatctgccctcatgggaaggtgacgtacccaggagagggcacctacacagtcgcgcaaacacacactaattacactggcagggcactccgcgagcccactcctcctggctgagcagtactctgtggctgacaatgactgagcagagtaacacagagcccccttctgactccgcttcctcctggccagaccaggcaacaccactcaaccgtgctccatcacatcactctaggtctcggagaccatgggagggcatcagtagggggaggacacatcatacatgcatatgcctcagnatgtggccccgtaccgcagcaccctttccacttgcatcgtgggaacagccactccaattgtctgcccaaacacgcatcttactatcctttccttcctgtccttctattgctatccttccattccttcatggaaatgatctagcaccccagattctggccaatatcccagtttctttactataaccatgtccttccatgtctttgagggtagtgcccctcagttctgtccattaaccactttccttaccaggtccggacagattcttttactgacaatccgggaacgaaatctgggacaggataggcccaggctggaattgcacaggtgaaatcttcaactgaacttggcacctgcagcttcctgaggttgacgtgaatctcagggccacagacaccaggagtcactggcgcatgaagacacacgccaacaagccaagaaacaaggagccgactcagaccgggtcaccaagtatggcacggcgggctagaaacagcgaccgagaacaggagccccagcacccaagcgggaacaggagtcctcgccggcgcaccgcactaaaggcgatcacggcaacgcctcgcgaagccgcgcacaccccacagaggtcgcccccgccaagagggaaaattacaccgggcaggagcggccccc

SEQ ID NO: 673254 - DNA, 648 bp, Homo sapiens
tctgccgagagggcaggtcctgggggaagctccggactcctagagggtgctggccaggtgggggccctggtgaccatgtgacatgactgtgtgtgttttttaactgtaaaggagatccgcggtgtgatgtgtgaccccctgggtcctgcactgcctgcctggtggcatgtgcctgggccatggttggtgtgctcactgccccctgtgcatgtggcctgcctcagtgtgtgaggtggctctgagaacgactttttaaaactgcagatgaaaagctccatttcttcccgatggacctacatgatgcagcccttgtgcccatggaatggcatgtgagacagaagggccatgtgaatgggtccaggagggtgtcgaaaaattgttccttgggggaccccttggacgcccagcaggcacgagccatgtggacagcagcgccacgcgcgattgggcatgcctttggagtgtagccccacgtgggccttttgcgacgtaagcacgagacagcaaaacttccccccttggatgaccccccatagtaggactggaggtaaagaaattgtgccaggaggaaagacgcgtggtcacttggggactacgatgccttgtgtgcacacaattggcctatggtgcctttgacccatcgttcca

SEQ ID NO: 673255 - DNA, 319 bp, Homo sapiens
  misc_feature (57)..(58): n is a, c, g, or t
tctagaggatctccgtaaagaggtatctttactataaaagctatgtgtaagctagtnntacagccatttaggtaacagccattaggtacagccatttaggtaacagccatttaggtaacagccatttaggtaacagccatttaggtaacagccatttaggtaacagccatttaggtaacagccatttaggtaacagccatttaggtaacagccatttaggtaacatttaggtaacagccatttaggtaacagccatttaggtaacagccatttaggtaacagccattaggtaacagccatttagggtacagcctgtgag

SEQ ID NO: 673256 - DNA, 614 bp, Homo sapiens
tctaggagttcccaagctgtacgaggatattagaggctgggaagggtaagaaggaggaggcaatagggagagatttttaaaagtatacaaaattagagctagataggaggaataaattctagtgttctacagcaatgtaggataactacagttaacaataatatattacatagtttcaaatagtgagaaggaggatattgaatgttcacaatacaaagaaatgataaatgtttgagatgatggatatgctaattgctctgctctgatcaccatacattatatgtatcaaaacatcacgatgggcagggtgttgtggctcacgcccataatcccagcaatttgagaggccaaggtgagaggatcgtttaagctcaggagtttgagaccagcctgggcaacacagcgagacctcatctctaataaaaataaaaaaaattagccaggtgtggtggcatgtgcctgtagtcccagctactcaggaggccgagttgggaaaatctcttgagcctgcaagatacgggttgcagtgagctgtgatcacgccactgcactctggccttctggcctcggtgacagagcaagacctctcttctcgttagcttgggtacgagtcg

SEQ ID NO: 673257 - DNA, 594 bp, Homo sapiens
ggcggggcgcggtggctcacgcttgtaatcccagctctcagggaggctaagaggcgggaggatagctgtgagcccaggagttcgagacctgcctgggcaatatagcgagacccggtcttccagaaaagggaaaaacaaaaaacaaaaaacaaccaagaggcacaaaaaacaaaaaaaacacaaaaaaaaaaaaaacgtgtgggggggcacactgggccacaagaaaaaaacttaagaaacacaacgggggggagcgcgcgcgggaccaccaagaggggcagagacaagtgggccacaacgacgcgtggtcacccgagggagacactcctggggaacaacaaacaaggcggcaggggatcttcaccaacaaattaaaaagagggccgccggagggggacaacacacgaggagcgttcttttgagcagacaacaaactatccacacaagaagagagggagagatatcaagagaggcggcgcacaaacacaagggggaagacctaaatacaaccacagagaggacacaccacaagacggagccatcagaaattctacaaatattatccccccgagatgttgtggtgtggggatgggg

SEQ ID NO: 673258 - DNA, 232 bp, Homo sapiens
agatgcatacaccacatgaaacgtcctattatctgtaggctcattcatttctctaacagccatttaggtaacagccatttaggtaacagccatttaggtaacagccatttaggtaacagccatttaggtaacagccatttaggtaacagccatttaggtaacagccatttaggtaaccatttaggtaacagccatttaggtaacagctactagtgcagccattagtacagct

SEQ ID NO: 673259 - DNA, 899 bp, Homo sapiens
tacggcccccccttttgtaataacccttctctatttccagaaatctcctccggggctaaaaactcctgggttctataaaagaccccagaacagctgtccaaaatgggaccacacttttgggcacgtcgttgatactcccctttttcgcgccaaataattctcgtaattgtagaggaccctcctgttcacccccgtgtgaccggaatcttgcagtcacaacgtgtctctcgcccgtgcccgaagatccctctgtccccaatcattggtagttccaaacccctttttattgaaaccttaaaggagtttaataaactcccccccccctgtcaaagattcataaaaaggtccgggaccccattttccaccttatgaagttggtcccccactataccccaacagtttagcctgtggggacctccccggccccccccacaatagtagtagtttttattccaggaccccgctaggaagggacaatttttcaaaaaaaaaccatgtttctgtagtatgtaacaccccacacacacacacattggtcttttctcttcttcaccaagaatcaccccgctctcgttcctctgcaacccaacaaattggttccttttaaaagaatgtgcaagtaaacgccttccaattagcccatcagccctaaatacttttctccttcctggagtttaagagtattcttttggtcaccacaacaacacaactatgggcaactatgtttcttttctctcccctcataaatgctgtgtattccccccatatccctgcatccgttttaagaaagatccccctcgtccgccgtattacataacttattctcacccacatatatagtatgaacaaagaacactgggtttcaccccccaaaaaaagggctttttttcaaaataaca

SEQ ID NO: 673260 - DNA, 306 bp, Homo sapiens
  misc_feature (33)..(33): n is a, c, g, or t
  misc_feature (93)..(93): n is a, c, g, or t
tcaacccaaacacaggcaatgctcataaggcanaaaggttaaaaaaagtaaaaaaggaaatcaggcaaatcttatccccgcgctgtttaccanaaaacatcacactctagcatcaccagtatatagaggcaccgctctgccacagtgacacatattaggtaacagccatttaggtaacagccatttaggtaacagccatttaggtaacagcatttaggtaacagccatttaggtaacagccatttaggtaacagccatttaggtaacagccattaggtaacagccatttagggtacagcctgtgag

SEQ ID NO: 673261 - DNA, 326 bp, Homo sapiens
gcacggaccagaatagaaggtctaaatttaaactgtgactggaggcttcagggagccaggccggccagcaggctctccaggcgggtagctctgccccgcctgcagccacaccctcctgcgccctcccagagtggaaactgtttcatttctggctgctgagaactggtttcctcccaaggaaattatgtctcaccgcagttgtggcaggagctgccctctggaatttccctgcagcgatgaaacacctcctggatgagctgctgttagatgggacacgcccagagcctgctagtgcacaacccagagggagacacacccacacacag

SEQ ID NO: 673262 - DNA, 129 bp, Homo sapiens
ctaaatggctgttacctaaatggctgtacctaacatttaggtaacagccatttaggtaacagccatttaggtaacagccatttaggtaacagccattaggtaacagccatttagggtacagcctgtgag

SEQ ID NO: 673263 - DNA, 366 bp, Homo sapiens
tatctgaactttttctatacaaattaaatataatactaggagtcttcatgagaagccaatagctagacagactacattaattggtgtataggagcctccttatcgataaccaggtccaggttgtgtattgccctgaccaaagggaggacggttacgcgcataaggattaggcccacttggaggaggggtcatggtacttccaggaagtgaagtaaaacctggtcttggttgataggccccaggttggcttggagccattccaggttgagaggcaggagccacagtataattagtaggctgagaagtttgggcagtgtcagtttgtgcaggataattgctcgcctggtactgctgtggcggctgagc

SEQ ID NO: 673264 - DNA, 403 bp, Homo sapiens
tgatctagaggatccctactaaatggctgtatctaaatggctgctggatttggcgatcacgagttgccatttaggtaacagccatttaggtaacagccatttaggtaacagccatttaggtaacagccatttaggtaacagccatttaggtaacagccatttaggtaacagccatttaggtaacagccatttaggtaacagccatttaggtaacagccatttaggtaacagccatttaggtaacagccatttaggtaacagccatttaggtaacagccatttaggtaacagccatttaggtaacagccatttaggtaacagccatttaggtaacagccatttaggtaacagccatttaggtaacagccattaggtaacagccatttagggtacagcctgtgag

SEQ ID NO: 673265 - DNA, 429 bp, Homo sapiens
  misc_feature (216)..(216): n is a, c, g, or t
ttcagaggccccagtctgtagtcccggaagaatgaagatttaaatacgaggccatggctaaacatctgaagttcattgccaggacagtgatggttcaggaggggaacgtggaaggtgcctaccggaccctgaacagaatcctcaccacggatgggcttaccgaagtcataagtcgacgacgctactatgagaagccttgccgccgccgccagcggnagagctatgaaacatgccggagatctacaacatggaaatggctcgaaagattaacttcttgatgcgaaagaaccgtgcagacccgtggctgggctgctgaggcttggggctaggcacccacacacccatgtccaactcctttctttatccagccaagttctgttacttttctctataataaaaactccatcacaggtgaacaaaaaaaaaaaa

SEQ ID NO: 673266 - DNA, 396 bp, Homo sapiens
agatgcatacaccacatgaaacgtcctattatctgtaggctcattcatttctctaacagccatttaggtaacagccatttaggtaacagccatttaggtaacagccatttaggtaacagccatttaggtaacagccatttaggtaacagccatttaggtaacagccatttaggtaacagccatttaggtaacagccatttaggtaacagccatttaggtaacagccatttaggtaacagccatttaggtaacagccatttaggtaacagccatttaggtaacagccatttaggtaacagccatttaggtaacagccatttaggtaacagccatttaggtaacagccatttaggtaacagccattaggtaacagccatttagggtacagcctgtgag

SEQ ID NO: 673267 - DNA, 107 bp, Homo sapiens
actctagaggatctctgcaagcgttatttccattgttcacacataaaggttcactgggaaacacactcaaccacagcaaggcaggcagcttaccaattcaaggaaag

SEQ ID NO: 673268 - DNA, 324 bp, Homo sapiens
tgatctagaggatccctactaaatggctgtatctaaatggctgctggatttggcgatcacgagttgccatttaggtaacagccatttaggtaacagccatttaggtaacagccatttaggtaacagccatttaggtaacagccatttaggtaacagccatttaggtaacagccatttaggtaacagccatttaggtaacagccatttaggtaacagccatttaggtaacagccatttaggtaacagccatttaggtaacagccatttaggtaacagaatctaggtgacagccatttaggttcagccatttattacacattatac

SEQ ID NO: 673269 - DNA, 344 bp, Homo sapiens
  misc_feature (1)..(1): n is a, c, g, or t
ntcccaagagcacaagcaacagcgcaaaggagagaagccccggtctgcagtcatttaggtaacagccatgttaggtaacagccatttaggtgacagccatctaggtaacttccagtttaggtaacagccatttaggtaacagccatttaggtaacagccatttaggtaacagccatttaggtaacagccatttaggtaacagccatttaggtaacagccatttaggtaacagccatttaggtaacagccatttaggtaacagccatttaggtaacagccatttaggtaacagccatttaggtaacagccattaggtaacagccatttagggtacagcctgtgag

SEQ ID NO: 673270 - DNA, 412 bp, Homo sapiens
agggcttgaatatggaactgcccgagcgagaaacttatagactacattgatcagacgaatatatgaactccaggagcacattgatgagtatattgctttgttgacttgatttgctgcaaaatcccaactcctcgcccagtaggctgcctctaagacattatgactctggtagaaggactttcaaatttagaaagatgatctctcaacataaacagttgtactgcagatctttgtttacatatttattacaaagcctaaacccaaaaatatttataaagaagcaaggatttaatgtccttttaaggatcatcatcttacttactgaagtgacctcagtgttcattattactacacttgtcctgtatactaatacttaacatgatacagtataatatttttgctattaatattt

SEQ ID NO: 673271 - DNA, 347 bp, Homo sapiens
gagagacctctagaggagcctgttctgtaatcgataaaccccgatcaacctcaccacctcttgcacagccatgttaggtaacagccatttaggtgacagccatctaggtaacttccagtttaggtaacagccatttaggtaacagccatttaggtaacagccatttaggtaacagccatttaggtaacagccatttaggtaacagccatttaggtaacagccatttaggtaacagccatttaggtaacagccatttaggtaacagccatttaggtaacagccatttaggtaacagccatttaggtaacagccattaggtaacagccatttagggtacagcctgtgag

SEQ ID NO: 673272 - DNA, 1341 bp, Homo sapiens
ccacgcgtacggacccacgcgtcgaccccgacatcattaccgggttttcctcttaaaaaaaaaaaaaaaaaaaaaaaaaaaaaaaaaaaaaaaaaaaaaaaaaaggggggacgaccacgaaaagattccccacagagggggccccacacagacacacacaccccaatattacagtacgaacaaaggggagaccacagaatgaggggacagttaataacacgcacaagaggcaggggacgccgcgtgtatcaaacaaggggcggagacaggggaagaaaccggccgacacaagagaggacacaattggagaaaaagaggaacaccataacaaggagagggagagaaacacccaaacgggagagacacaacacaccccaccacacgagacattataaaaacaactacactaaagaagaaaaatatataaacaattatcacaacaacagtacatatataacgtgcgtgtataacacaaaactacgcaaaactaatgtcacagcacaaaccaaaaaaaaacacatcaacaataacaccacacacacctatgatctaaatccaaacacaaaatatatattacacacacaagagagcaataaaaacgaaacaacacaaaaaacaaacaaataaaaataaaaaacaacaaacaaaaacaacaaaaacaaacacaaaaaaaaaataataataaacaacaaacaaacacaaaaacaaaaacaaaaaaacacaaacacaaaacaaaaagagaagaagaagcaaagaagagaaagagagaaagagaagagagagaagagagtagagaagaaaagacgaaagaggaagaagaagaaagagaaaaaagaagaacagaaaagagagaagaaaagagagaaaggaagaagaaggaaaggaaaaagaagaacagaaagagagagacaagagaaggagaaagaggagaggaagaacgagagggagagggaacagaagagtaagaagaaagaaagagagggggaagagagagagagcgagcagagaaagcaagagaagaaaaaaaaagaaaaaaaagagagagagaagacagacagagacaagaggaagagaggaagagaaagaaaggcataaaaaaacattcatacagaaacaatcaagcatacacacaaaacaccaaaaaacaaataaacaacaacaaaaaatcaaaagacaacataaacacactcaagaaacaacacaaagaaacaacaaacaaacaagcactaaaaacaataacaaaaaaaaataagaaaaaataataacaataacaaaaacatattagacaaacgaaaaagaaaaagaaacaatcaaataagataatacctagaataccaaatt

SEQ ID NO: 673273 - DNA, 997 bp, Homo sapiens
gcagcgtctgaggttgctggtgttgtgggcaatgtgcccccagtcctcgcggaaatctgctagtatatgtgcttccgacatcagacgacatgtctcccagatggtctacgcaccagaagactctgtcacagaagcagaatacgtcgcgtctgttgagggtaagtagccaaacgataaccaaggagaataacagaaatgtccatttggagcactcagagcgagagatcctggtgtcatcagcaggtgacaccgtcagcgagacgcgaccaggtggtgtgaggagaaaacttgatagcctcagcccttgtcttgctgcggagtgggtcgtcagtctgagttgagaggatgtggccagcgagccagctacggaggaggagggggacactagagccttgccgggagagcctccatccaggtcagctcggtctcttagacgggcagggtgccatatctaagcagcgtttgcctccaggaattgctcctgatagagaaatccccacgaaagtctccatcctaaaggaaggtaactagggcacacaagcttgcatgtccgacctggtagtgtctccagccaatagtggggttgaaggagtccgagtgggatcaggatgatgatcaagataactcttccctgacagctttctcagaacattgtgtcaggacgtgcctttcgtacagctgagttcagccagagtaagcgcggattcacgcatatcgtaaacgcaggttggcttcactgatgacagtcagcactggtggtgccgggcgtgcctcggaggtctggccgagcagaggccggtggtggatagcccgtgggataaggcccttgcagtgaggggggcggaggccctcccgggtttggggtccgcgtgccctggggagacacgcctgtggacctcgcgggtcggagccgggttcagccatgaccttgtggggcccgcggtacaccttttaaaactcgttctgcgcaaggttccctccagcctctggtggacgc

SEQ ID NO: 673274 - DNA, 227 bp, Homo sapiens
cccttaattttcaaaagggaaactttggtttaggggggcaaaaaagccctgggctaaaagtttagggccccccggtgaaaagcaactaaaaaatcaaacccgggaaaacggggggggattggaccacccttccccccccatcatggttttcacccggccttttccagggtttttttcctgggggcagggggttccccattaaaaaaaaaaaaaaattttccctttta

SEQ ID NO: 673275 - DNA, 436 bp, Homo sapiens
tgagaagaaaaggctcaccgcaacctccacctcctgggttcaagagattctcctgcctcagcctcccaagcagctgggaccacaggtgcacggccactgcccggccaaacctctttgtatttttagtagagacggggtttcaccatgtcggccaggctgatttcgaactcctgacctcaagtgatctgcacgcctcagcctctgaaagtgctaggattacaggcatgagcaccatgcccagccctctgttcccattctaatagatgttctactatggattctacattatggcctatagagttagccttcgactgacgtaaaactcagggaataccttgaggaaatctaagtgagcagaacaagggccaaagcgagctgggaagtgcagaacatacgttcctggtccaaattatagggacaaaagagaaaaacagtg

SEQ ID NO: 673276 - DNA, 166 bp, Homo sapiens
tctagctcgcacaccactagcccgatggagacagctgagcctaatgctggcaataacgtccagcgctaagtacacatagtagatttgtgcactctcatctatcccccgctccgagataaggtaaccgctcccctgaatatgacctccaggagacagacatgagctt

SEQ ID NO: 673277 - DNA, 898 bp, Homo sapiens
  misc_feature (290)..(290): n is a, c, g, or t
  misc_feature (346)..(346): n is a, c, g, or t
  misc_feature (369)..(369): n is a, c, g, or t
  misc_feature (384)..(384): n is a, c, g, or t
ctggctcctatggaagctgctaaggttcgaattcaaccagcagtatgcacacttgagggatcagtccaaatgtataaggaaaggctaaagctctacaggggtgctctctctggtgagacgatacataaccagatgaattgcctgcttgaacgtctgtgaagcatgtacaagttgtgggcctaagcccgcaggaatgtcaaagccagagcagctggttgtaacatgtgtagcaggttacatagctggagtctttgtgcaatgtttctcaccctgctgattctgtggtatcngtgttgaataaagaaaaaggtagcagtgcttctctggtcctcaagagacttggatnaaggtgtatggaagggatgttgnccgttcatcatgatngtaccctgactgcactacagtggttaatcgtatgacctccgtgaaggtctacttcagacttcctcgccctcctccacccgagatgccagagtctctgaagaagaagctgggttaactcagtagtatagatcaaagcaaatgtggactgaatctgctagttgatcagggttgaagaaagtgcacaaggaacttctatatagtcggacaggtaaggaaattgtactattacctgatagtactcaactgtagtacctctggcttaaggcacagagctctcaccattaccgttgaaatcaacccaatcttcctgacaacaaagacaaacaacagctcaagtcatgttacttacggtggaatggtgttaactttcgagcaccaaaccgagtgctcatcatcctctctccaagaggacgcatcatagatttcttcgtcgcattgtgcccctcccgcctttaagaatacacgagacatccctcactagttgtgcaccggcgcgtatctcgcggctaacttc

SEQ ID NO: 673278 - DNA, 281 bp, Homo sapiens
gcgagccaggacatcgaggctgcagtgagccgtgatagcctcagtgcactccagcccgggcacagaacaagacgtcggctcctgaaaaaaaaaaagaaagaaaaacttaaaggcacattttggttattttagtccctaatagaatgagtttccccattatagactatagtgatttactaatcattttagtatcacttatcatatccatattttagattactccattgactggcatcaataatttgcagctggtatattacgtttatcctcaggactccgat

SEQ ID NO: 673279 - DNA, 94 bp, Homo sapiens
gctgccccctccccgccccctgtttggggcagggggggaaggttttttcgagataaagccccggccccccaaattaaagttgtgaggttgccca

SEQ ID NO: 673280 - DNA, 342 bp, Homo sapiens
catgacagtatgccaggcttagagcacatctggcctgggtttctgacccattgagactgccgtgccacaatgctcggtcacctcctttatagaagcaaccctagcgatttgaccaatgaagtctggcacaggctcagcagtgtgaaggaagagtaagctttcaggaaaccacgcagggaagagtagtagggtcctgacttgtctcagggtctttgaaaagttgggtgtggcctccaaggtgagaagatagtgtgtgggccaccccgaggccatgacaggcgggcagtattgcacaggcttctctctacagtctgtcgtgcgtggcatctcctttgagggtca

SEQ ID NO: 673281 - DNA, 687 bp, Homo sapiens
gcccactgtctctctctcttcggccctctatagctgtccgcggtctgatagaacggaacgggggtttttgcgtctttcacgtggacattaatctgggggcacctgaggacgacctctgaggtggacctggacaagccgttctggcagattatccatccgacttacccaagcggcgctgctgagcccgcccagtgctgccgcggcgtacgatgagcttaaaagttgctccgcgctccaatacgcacacgttgtgcaagaacgaaggcgcgcttgagacacttctgagatatcatgaagcgatctgcctaatgtaccacaattgtcattttatggacatcagatctgcttgagagataactggaaggatgcttgcgattaaggacactgttttgaggcgttaggaaactggatcttgaagctttagaatgaaaagagctgtgtgtagttcaaatgtgcaagcttttggaggctgattgccatgtaacactatctggtaattgacgagggatgatacttgtaagactaaccggtttctagggggggcttgtacagaattgcacgattatttggcttaagttgagagctgaccaggacactttttctggaccggccggcacataatataatttgccggaccgaattaagggcaattttttgtcacgcgcctgggataacatgggttgctgg

SEQ ID NO: 673282 - DNA, 238 bp, Homo sapiens
gaaaaaaaaaagctttgttttttttttccccatatgggggggggggtttaccccccctgccaatgccttagccctggggggcttttttcaatttggtggggaaaggggggggggggaatgaaagggccaaaaaaaacatgtttttaagaactggggttttttacaatagaatgttttttagcagaggcctcttgtttttatattttaaaattttgcaaagccctttggggttctgcca

SEQ ID NO: 673283 - DNA, 882 bp, Homo sapiens
ttcagttgtatgaagtacatttatatgttatgcgaccatcatcaccatccatctctagaacttttttcgtcttgcaaaactgaaactctatatccactaaacaatcaatccccattcccctagcccctgagaaaaccaacattctaccctgtctgtgattttaacatacctcaatcatgcagcatatgccttttgtgactggcttatgcacttagcataatgtcgtcaaggttcatctatgtagtagcaggatttcattgttaaggcttgataatattccactgtgtgtatacaccacatttgcttatccattcgtcaatggacaggttgcttccatgttgagctactgggaataattctgctatgaacatcggatgtactaacactatgttaagagacactggattggcactaattcatcggatatgacactaacggcaaggcaccctcaacgaaaccgacaaaccgactttataaccactcctcaaccccatgctgcatctaacagacattatcctatgatcactaccattatcctatgatcaattaaccaggcaaccagcagactcaggagaacactcttcgccactgtctatctgacgcaggatgatcatcctgatacagagagaatctaaaaaccaacaaggagaaccgatcaacaaaggcacggctgatagactcccaagagacaccaggaatgaagagccgcctatcatgcgaaggttcaaacgaatcactaaccagacgaggtcacaccacacagggcgctgcgcaggactccagggggagcagacccggaacatgacacaaacagaaggcactggacaagaaacaacagaacacgggaagacaacgaacaacgacgccccgcccgcgccccga

SEQ ID NO: 673284 - DNA, 4440 bp, Homo sapiens
ggtgcctgaggttgcagccgagagtgtgcgccagcccgcggcccagccgaagctctttcccgccgcctctccgcgcctcgcccaggttcagccccgcctgaccctccgcttggcacggtcccctgaccctcagtccggcccggtccggcctcccagccgccccggggacgatgaacggaggataaatggtgcccaaggcagacagcggcgccttcctgctgctcttcctgctcgtgctcactgtcaccgagccgctgcggccagagctgcggtgcaaccctgggcagtttgcgtgtcgcagcggcaccatccagtgcatccccctcccctggcagtgtgacggctgggcgacttgcgaggatgagagcgacgaagccaactgtccagaagtgaccggggaggtgcgtcctcatcatgggaaggaggctgtggatccgcggcaggggcgggccagaggaggcgacccttcgcacttccacgcggtgaacgtggcgcagcccgttcgcttcagcagtttcctagggaagtgcccgacagggtggcaccactacgaaggcacggccagctgctaccgggtctacctgagcggggagaactactgggatgccgcgcagacctgccagcgcctgaatggctctctcgccaccttctccactgaccaggagctgcgctttgtcctggcccaggaatgggaccagcccgagcggagctttggttggaaggaccagcgcaagttgtgggttggctatcagtatgttatcactggccggaaccgctccttggaaggtcgctgggaggtggcattcaaaggctcttcagaggtgttcctgcccccagaccccatctttgcctcggccatgtctgagaacgacaacgtgttctgtgcccagcttcagtgcttccatttccccaccctgcggcaccacgacctccacagctggcacgccgagagctgctacgagaagtcttcatttctgtgtaaaagaagtcaaacatgtgttgacatcaaggacaacgtggtggatgaagggttctacttcacccctaagggggacgacccatgcctgagctgcacctgccatggaggggagcctgagatgtgtgtggctgctctctgtgagaggccccagggctgccaacagtaccgcaaggaccccaaagagtgctgcaagttcatgtgtctggacccagatggcaacagtctgtttgactccatggccagcgggatgcgcctggtcgtcagctgcatctcctccttcctcatcctgtcactgctgctcttcatggtccaccggctgcgccagcggcgccgggagcgcatcgagtccctgattggagcaaacttgcaccacttcaacctcggccgcaggatccctggctttgattacggcccagacgggtttggcacgggcctcacgccgctgcatctttctgacgacggagagggtgggactttccatttccacgaccctccacctccctacacggcatacaagtacccggacatcggccagcccgacgaccctccgccgccctacgaggcctccatccacccggacagtgtgttctatgaccctgcagacgatgatgcttttgagcctgtggaggtcagcctgccagcccctggggatggtgggagtgaaggtgcattactccggcgcctggagcagcctctgcccactgcgggggcctctctggcagacctggaagactctgccgacagcagcagcgccctgctcgtgccccctgaccctgcccagagcgggagcaccccagctgcagaggcactgccagggggtggccgccacagccgcagctccctcaatactgtggtgtagacggcctggcctgtaccccaacggtctgggagcacctgtctgttgcagaaaacaccggtccctggggagacttgaaaggcccctgtcccagcctggacgccacgcactgccgcacgtcactggcgggctcgcgtgtgtacatagagaccacagcccgccttctgccaaaagaagtgatggcctgcaccgagcttccttgagggcttcagaaacatgcatagctttggatcactgtcttctcctttataaatggcagaagagtgacaaaattcattcagaccgcacatgttagaggcagggaatgaagaaggtactgtgggccatggccacacctgatgcgtttttggtgggcctacttggtgcagtgtgctgtccagagagacctgctgacccagtctgggacaggcacagtgggagctgccacagtgccccttgctggccgccctcaggagggggcctctggaccgtcagtgtggcgtaggcagtgggtctgcttcagggaggcagcctcttgactttgtcacaacggttgcactgaagatggcccccacaagcccagttgtgaatatcaaggtgaccctgcccctggctgggagctcccctggggctctggaacctgaagccctgagaaggagagcttggaaggaggttgagctcttcactgtgtctttccatctgggctctgcagcccagctctgtggcaggaggcctgaccccaccccatcagtccctctcccagcattgctgtgcatggctccctcaggaagaagctctggagtggggccgaggccccagatgctctgctggggtctggggactgagctgcctcctgtctctccactctggagccctgggctcttgcctcctgttgaattgcccctgggcctgcccccggccccatttgtgccataaagggttgcttcattgcaggaggggtggctgaaaccaccatcctgggctgcatctatctccttaaagtccactccttacatcaccgccactactgcagctcagtgcccagtggccgcatgcacacctcccggcccctcctcagcagcgcaggggctgggggcccttcctggcacccttttgcctgacggaccctgttgcctgctcctgggcagtggttttgttgcctgacacagggcctttaacatttctgaggtttggagattaagcgggttctgtgcgatttttagcacatccatatcttttctacgttgaatgtctggatctttcctttgtatgtttgtgtctctgtgtgtgtatgtggccaagcgtctgcaggtgagggtggcacatggaacttcacgggtcactgggggcccactcttccagggtcatcgatgcatcctgggctgtgctgaggcagtgctgtctcgctcagtctttccagaccagcggggcagcacctgggaggcctgtctgaagcatgcagttctgtggtgctgctcggggatggactccatgcacagtccacttcttgacacattctcacactgtggctggagacccattttttccatcccatgtggaatgagaatcttgagttgcccacagacagacttgacctttgtgccagaactgtccagagctgtgagttttgttactgaattgcctgtccctgagcttggcctgctggagcatgatgctggaggctgtgtgcgggcaggcttgtgctccccttggagaagggctgctacttaacaaggaagtcctggccacaagagtcccctactggctgcagaggacgaagcaggaagcatgccgtggatcccacatgcactggggcagggcagccaggttccagagcagcaggcatgtgcattatgggtgccaggtggccagtgagggcccgaggaccacgcagcagagtcccccacgggcctgagcctgagagctcagaggattcctgccaggcctcagaactgtgtgtgcgggacagggtggctggcacgagatgtgtgggactgggacgcttcctttggggaccagaggaacattaggggccggtcagacacgtagggggcagtgaggaaacggggtaaagtggaccatgcaggctgcagagggtgggccttgggctggccggggttgctgggtggccccttccccatgggcctccacaagcactcgggcctccacaagcactcaggccactggcacgttgggccaggcagaaggtccacatggcagggctgcctggaacaccgctgccactgtggctccaggaggcccttgggagcatgaggagagctggactcgctcatctgttcttgcaccaccatccagaatgccccctttgcaaggcctgctgcagtccccagtctgaccagcaagtcccggggtcacccttgctgaaccttgtgctccaggggtcctcctcctctaggaccagcttgccacggtttctcagagcccaggtgccctctgacctgccatgcggaggtgggatttgatactgtacattgtcttgatgcctgtttttttatgttttcattaagggtttttagtttttggttgggttgacactaacttttcttaagatgctgtgagaatcatttcatccaaatgccaaataataaacttgtggtttcgcgga

SEQ ID NO: 673285 - DNA, 418 bp, Homo sapiens
cccgccgtacaagtgcggcaatcgggggcttaccctatagtctaccacggaatcagtggactccctcactagtatcagtgcggggaaggcttagttgaagtctgtcactacctgggtgaagtcttccactcccttgttggagtcttagttgataggggtagtgttccatcctaagtctacccggtcgaagtctggttgttacttgttgggttcaccaagcaactgctaacgagactgatcctaagcatagtaagacttaaatccgtgctgctgctactgatgctaggtattactagtatggtgattcggggaaggtattatcagcactttaaaccaaggtaaaatcctttaactcgctaccgctattagctcactgacgcgacacattagtagcgcaactggtacggcggggtaccga

SEQ ID NO: 673286 - DNA, 760 bp, Homo sapiens
gcgcaagcgtgcggagattggaggcccgcggtccctggtctgggcatgcttggctgtgatgctcggtgagggagactgttgttcccggagatgcggcgcgcaggatgaaatctacattgctccttcaggagttgcaaaaggaacgaatcagcctgaagacatgtagtggggtgatatcattgaaaaggacatcagtggaccttcgtcatcgaatgaagctaaaaaaaaggccagtgtactcctctttacatgaatgcttacacaatgagaggagcaggtgcagtgattcatacccactctaaagctggctgtgatggccacccttctctttccaggacgggagttaaaattacccatcacagagctgataaccggacatacaagacacatgtacttccggaagcgtataatagataatgatggatatgtaagcggtaccccattattgagaaatacacctgaggagaaagaccttcaaagatagaatggtcagtgcactgaatgaataccccagattcctgtgcagtacctggtcagacgtcatggagtaatatgtgtgggggggaacacatgggagaagggcaaaaccatgtgtgagtgtaatgactatgaatgtgatatcgcgtatcattgaagcaacgtaggattgatccttccaaaggtcccagtgggagaacactggaattgtactaaggcaaagaacggtttaattatatacagagataaagtaaacggaaattactattttaatggaacgctt

SEQ ID NO: 673287 - DNA, 211 bp, Homo sapiens
acgctctctctgatggggcaggcgggagtgcagtggcccatcacagctcagtgcacgtcgggaaatcctaggctctagtgtgatcctcccacctcagactcccccgcatagctgggactacaaggtgagcaccaccacacccagctcatttttcaatttttagtagagccagggtctcactatgttgcccaggctggtctcaaactcctga

SEQ ID NO: 673288 - DNA, 405 bp, Homo sapiens
agtatttctcgcgaagaccccccctccccattgacccctccatgtttcccacgtgggccgccaaaaacgaacaacagggtgttaaacggggccccagcccgaggcccccttaaggaggcctgggctacaaccaactgggtgacgacgaccttaaggaaacgggcttccccctttcccccccgaaccaaggggccttttccgcgggccccgggttcaacctcaagtttttaaggtcaaagtggaccccgtcatggggaaaaatcaaccggggccccaggggtgggtacttcggctggaacttcgattaaactcggaactccttgttttactttgtgctccatgttttgtttttgtattttggtttgtaaatttgtaaaattaaatcattttccttgttgtggagga

SEQ ID NO: 673289 - DNA, 812 bp, Homo sapiens
  misc_feature (43)..(43): n is a, c, g, or t
  misc_feature (73)..(73): n is a, c, g, or t
  misc_feature (81)..(81): n is a, c, g, or t
  misc_feature (117)..(117): n is a, c, g, or t
ggtcgcgcaattggggcccgtggtgatccggtggacaggaagngaaaaagggtgtccgaccagtgggatttcnttttgggntaggttatccccagggccggcccgcggccaaacggnttagaaaaaagcgcaaccgcggcttaaccaccaaagggggggcgaggcggtggcgcgcccaggcccccacattagggaacaagggcctggcgcacagagagaggcgagcaacattattcttcgagggccccgtaggaagacgggcccggggaggggcaaaaacacccgggggaggacaataaacccgattttttctcaaaagggaggggcagcccaaagttttacagaggcctcaccacacaatgagtgtgcgagcactacgatttccaaatatttcctccaaaaaacggggagaactcgccgcccgtggggtggcgcgccccctgggggtataggacgagctcgagagcttcttgtggacccacagccgcatgattccggggctatcgaagaaaagaggcggcgcatggagcggacttacccattgccaccccggggcgggcgggcaacaatgtcccgccggtgtatgaaaaatttttccccgggagagagacatttctatagataagcacatggctaaattaactcgggtcgccgtgaggtcgataaacacgagtggtagacaagtggcccatattggggattttgtacccccaagatttatagggagccccccggagttctcgcacgtaaacagggagtcggagacccccaaatgtttcatccgccaaaacctagtagacaccgcatgggtg

SEQ ID NO: 673290 - DNA, 1000 bp, Homo sapiens
  misc_feature (261)..(261): n is a, c, g, or t
  misc_feature (648)..(648): n is a, c, g, or t
  misc_feature (669)..(669): n is a, c, g, or t
taaattaacttgaaaggacaattttttttttaaacagagctcaagggggtaaccagggttatcatcagaagtgcttccaaaggaaaaaagggaggaggagccgaaggagaacacaatcaagcggcactctcccacacttttaaacggggttgtgactctacgcgtgccagtgtaacaacattaggggtgccgtctggtgtggaaaactccagagggaggttaacacaaggtgtctcagtgccgcatgtgagggctctctcnagtgcatctcggcttggtgtctcgtgtgtgtaatctcccatatacgccgtatagaggctctgtggtcactcgagcacaaactctccaaaattaaacttctccccccagaaatgtggaacagaaactctccagcgttacccagttatactcatgtagacccagcagagggctcatataaggcaccatgtgcccagtatacgtgaacatctcccaacatgtcttataatatagtctcgtgtgatctctcgtgggatctccaaaaacaggcaagaaatgtgcggccacgggtttctacccacctttttatttatataagtctctctcgagaaactcgcgtgtgtgtggcttctcgagagagaaagtgggagaggagaattatgtgaaggnccttatctcggtggagagccncccgagggaaaaaagtggccattctctatacgccaaagatgtggcctacagtgtgctctctatcggaagagactctctacaggcgccgtggtggacaattttcccccatgtgtggtgttgtggggtcttacgcgaaaaagccccacaatattaaacaacgcgcccaccaccaggttgtggcggcggggagctaccatttggggaggaaaacacacgtcgtcgtgggggtcataatacttccaagaagaaggttgtggcgcccatacttctgggaaaactgttgtggggcgcgccggtattaccacccatatataaggcggtattatccccc

SEQ ID NO: 673291 - DNA, 411 bp, Homo sapiens
  misc_feature (402)..(402): n is a, c, g, or t
ggccacacaagttttaaaggaatattaaaacagccagccccccagagtgatccctattctaggctagcccttggcaacggggggctacaaactttacatcaggccacccaagatcaaggaaaggaagagcgtcatcaagatcgtgctctgcccatcaacaaacaagtactcagaaacttcctaaaggacagcaagaggaacgtctcagagaaaaggcagagcaaaagaaacttttggaccagcgggcccagaatgtgggcaagcccaaaaatattcgtatgttaactggcgagactgaagcaacaaaagagaagaaaagaggtggtggtggtggccggcgttctaagaaggcaggagagtttcatgaatttgacaatgagcctctgatgatgacctgcctanacccccccc

SEQ ID NO: 673292 - DNA, 274 bp, Homo sapiens
tctcccagcacaccacgatgcccttgtcgggttgaggacaggcgttcgcgatcagcctagcccaccgataggtgaacccccatctctacctaaaaaactacaaaggttagccgagtgtaggtagcacacacctgtactcccagctacctaagagtctagagtgcacaagaatagcttgcaccgggaggcggccgtcgcagtgagccgagatcattccactgcactccagcctgggtgacagagtaagactattttcacaaagaggcctggcaca

SEQ ID NO: 673293 - DNA, 307 bp, Homo sapiens
  misc_feature (125)..(125): n is a, c, g, or t
atcgaccaagagattgcacaaataatgaacagcttagacgaagcagctattgtcacttccattactggtatttctaatcgtttgggtagcgttattctagccgaaatcaatcacattaataattntcagtcacctgatcagctattagcttttgccggcttagaaccttctgtttatcaatctggccagatgaatgccacgggtaaaatagttaaacgtggttcgacatcattgcgttgggcgttgtgccaagcagctgaatatgcttctcattggtcgccgactttacgtcaataccgtcaaaaga

SEQ ID NO: 673294 - DNA, 416 bp, Homo sapiens
cccggggggggggccgttttaaaaaaaagggttcccccgggcccaagaattttggcccaagggaagtttttttccattaaaggggtgggggtttttcagcaattttttgggggcccccaaaaaaatgggaatgttttttttttcaaggggtaaaaggtttttggggggggggttttttaaagtattttttgcccttaaaaccccgggtttttttaaaaggggtgtttaagaaaaagtttaaaaaatagggggggtttaagtcttttgaaaaaaaaaatttttatcccccccccccaaaacaaggggcagttttttcccttttttatcccacctctttggggggccaaaaggggggggtccttttggcccagaaattggccccccccccgggtaaaaaaaaaaccccttttttttta

SEQ ID NO: 673295 - DNA, 116 bp, Homo sapiens
gatccatgtctatgaggcagttacaattttctccctgaggagataagcctactatcataatatactcataatgtctaatctcccattgtagacatagtaactctactcatctgaca

SEQ ID NO: 673296 - DNA, 957 bp, Homo sapiens
  misc_feature (550)..(550): n is a, c, g, or t
cgcggaggccgcacggtgcctggagttactgtaaaagacgtgaaccagcaggagttcgttcagagctcttggcaagccttcctcaaaaatgtccggggaagcttgaaagggtccccgaagtgggtgggataccctgtcaaagcttggccaatgcacaaaaggatgctttgctcacctacgattgaggaactgtttctacacgcgaggcttgtttccacaggcgcgggaacccttgtaccctccgggggttggccgctgggggggttggctcccatgaccccaagatctatgggggcgacgtcagagagaaaacggtgcgtcattgcccacaggccacttttcaggccagaaggctcccaagatgtgtggcccctgccggggttccatccaaagcccttggagggggccttgaaaaattgtgtggaaaaacgggccccaacaggattgtgcggtgctgaaaaacttgaacacccttcaggtgacacaaacggagatcttggccagaattcgccggaccaggttgggctgttgcccaaacaaagtaaggcantttaggaaacaaaaaccccattggctggggttaattaagaattggccttccatttccggtagtcacgacagcatcatccatactgtactatcaacaacacacaccagtgtgggctggccacgcactcaggccccgctcagaaagaaacgtttctaacgaaccaagttagttagtgagagcagcgagccacgcgagtagtagtcactggacaacgggtcacagcacgtgcgccacaagaacacccgctgtcaacacaacgcggtgggtgtcccccccaaaaaaaaaacgccgggggcagcaagcagcgggtctaaccaacccacaggagagctcggaggccaacggggtcataacaggggagccacgaggccattaatgccgccgcgccacactagagagacacgacg

SEQ ID NO: 673297 - DNA, 431 bp, Homo sapiens
ctgactctagagtgatccccttcattacggcaatatacagcgatactcaaggtaggtcaatgaacgaacattcgtggatagcaacgcccactgcacaaccagaagatgcgacctgatcagcatcccccagacaaaccacagacacggccagtgtgcaaaatgaagcctagttggatgagattttaaaagagatcaaatctattaaagacacaatctgcaatctagatcagcgtatatccaagttagaacagcagatagcatagatcgcagtcctgaaggtccctacccccatccctacagaataaatgggagccagaacttgtgcttgggagctggttattggtgtggtcctagggagggcggacagggaggctctgccctcctggagactcttccatttccgatttgcctttccttaagggttccgagct

SEQ ID NO: 673298 - DNA, 345 bp, Homo sapiens
  misc_feature (67)..(67): n is a, c, g, or t
  misc_feature (74)..(74): n is a, c, g, or t
  misc_feature (109)..(109): n is a, c, g, or t
  misc_feature (139)..(139): n is a, c, g, or t
  misc_feature (178)..(178): n is a, c, g, or t
  misc_feature (184)..(184): n is a, c, g, or t
  misc_feature (206)..(206): n is a, c, g, or t
  misc_feature (238)..(238): n is a, c, g, or t
gaagtatcatgtcatggcaaatcataatagtttgcccattttgaaagccggagatgaaatagatganccaagtnagagggaaaggctccgaacagtctctttagaactnttcggagcctttccctctcacttgctccgnaacagttctaaagagactgggaaagctcaggtgcatgcntgaganttgctccagtagcttcaccagnctcatgggatatctctaccatgtcagaaaatntggcaaaggggctgcagagctggaaaagatgaccctgaaatgtcaccactgtggaaaaccatataggtcgaaggcttggacttgcatatcacctgaggtcagagcat

SEQ ID NO: 673299 - DNA, 514 bp, Homo sapiens
  misc_feature (315)..(315): n is a, c, g, or t
tcttagaggatccccagcgcacgtagctatctctaaaataggataataccaccacagatggagttgcgtgaaaagatcaaacatgatcaagttggtaaagtacatggtatttcccaaagatgggggaaatgttttcatttccgggggatactttttttggaaaaaaaaaaaatttttctttgaaatacaaggtttttaagcatgatgaaaattacttaacggggccgggcgcaggggctcatgccggtaatcccaacacttggagaggctaaagtggggggatcacctggggccaggagttcaagaccagccggnccaacaagttgaaaccccatctctactaaaaatacaaaaattagcggggggggggggtgtgcaccggtaatcccagttacttgggaggctgagacatgagaatcatttgaaccggggaggtggaggatgcagtgagctgagatggagccatggcactccagccggggcaacagagcgagactcttgtctcaagaagaag

SEQ ID NO: 673300 - DNA, 322 bp, Homo sapiens
  misc_feature (322)..(322): n is a, c, g, or t
aggaattccttcctgtcatattttagccattattactggttatatgcctcccttgcagcaagcactactatgtagtgtgatcttcatattgtgaatagcttagaatactgcaaaggataagctaattgaatgcctattaaattattatccactgttcagatagttcaatctttttttcagtttttatttattgttggcacttgattgcagttctgtgatggcttgagcttttcatacacctcacctgctttggcaagcctattttagtagatatggcagcacggatattacactatgcattaaaagcactttttgtaatacn

SEQ ID NO: 673301 - DNA, 323 bp, Homo sapiens
cacaacggtacccaccgagtacatcccatactgccttcgacaacttctccggatgaatttgacaagctgaggactctctgactacaccaacacagacatcttcctgctctgcttcagatgtcgtgagccccatcatccttccagaacgtcagtgcagaaatgggtgccggcagcttcgatgccactgtcccagagcccccatcatcctagttggaacgcagtcagatctcagagaagatgtcaaagtcctcattgagtaggacaaatgcgaagaaaagccagtgcctgaagaggcggctcagctgtgcgccgacgcctacgca

SEQ ID NO: 673302 - DNA, 206 bp, Homo sapiens
gagtgactttattgatttgagcagcatatgctgtgattggctgccctgcaaatttgtttcccttaagggaccctcaccaacctatctctgctggatttggggaggttccgcatctttttgtggggagggcaaggagtattggcaatctacaacccggtggtcaggtttttgattaactctgaagccatcgcgatatggagagaaaa

SEQ ID NO: 673303 - DNA, 397 bp, Homo sapiens
  misc_feature (345)..(345): n is a, c, g, or t
ctagaggatccacctgggatcacaggcatagcactgtgctcagcctggctgtaccctattgatcttatctctaatttctcagttacaagaaatgacatctcccgtaacttctatctcggggaggtgacgtaagagcctaatatttgagaccaagctctgtttgctgtgtctttaaaaaccatttcctgtagggtctgccgtgaacgagctttcaaccggttcatgtcccctaccccatgcatttttgagacccagtgttttggctcacacctggtgtcccagcacttttggggaggctggaggtccggcaaatcccgacctccaggagatcgagaccatcctgtncccacagttgtgggagcccctctcttctacccctacgcgggggtcccccttt

SEQ ID NO: 673304 - DNA, 861 bp, Homo sapiens
cgtggtggcgcgtgcctgtaatcccagctactcaggaggctaaggcaggagaatcacctgaacacttgaacctgggaggcaggggttgcagtgagctaagatcgtaccactgcactgggtgacagagcaagactccatttcaaaaaaaaaaaaaaatttaaagataaagaaattctgaaacaaattttttaatttatgtgaattaagggtaactctccagggtggcagaagataaaaaagaattataaagctaaataaggccggaagccatagctcacgtgtgtaatcccagcacttgggataggcatgagatcaggcaaattcacttgaagtcagaagtttgagaccagactggggcaagattgtgaaaccccggtctttactaaaattacaaaaattagccggggaatcgggtgggaacccataccgaagtcccagactactacataagggtacggaaggtgaatggttcaaacacaaggaggcggaggtagaaagtagaagcgttgaaattgcatacgtgactctagccgggggtacaaggaagaccctgttcaagaaaaccaagaagctacaggatcagttttaacattgcagctggcggggaggataaagaaagttagtagaacaaataccttaagagggggggaactgaactatgaaggcgctaggaataacgatgtgggaaaaagtcatagtgctccctttttgggacaaagtgatgggatcaatgtaaacaggagagctctaaaaaatgtgggactatagatcggagtgtccggattatgcgggagcatgggtagtgacgagaaaacagggaataggagttgaccagtgatcagggtgatagagaagtgaggg

SEQ ID NO: 673305 - DNA, 142 bp, Homo sapiens
  misc_feature (57)..(57): n is a, c, g, or t
  misc_feature (128)..(128): n is a, c, g, or t
ggacgacgaggagatggatccgcagacgatcgacagcctcattgagctgtccgccanactccacctgccagcggacgacgtggtcagcatcatcgaggaggtggaggagaagcggaagtagagaagantttcctcccgagcc

SEQ ID NO: 673306 - DNA, 1088 bp, Homo sapiens
  misc_feature (1080)..(1080): n is a, c, g, or t
cgtgcaatttccccgttttccctctcccttggctatgtgagttccctctgggtgataatggcttcaggcaaaacatgaggggttctttttctttggggccctgttcagaaggctgttgacgggtgtctctgtgaacattgttaggcctggttgtgctcacagtcctcaaattcgggagctattcaggctgccatcagggcaatcttgcaggatagggtcatcctcaagaaatgttgaaagcttgttttcgagaattatatttggtgtcaaatgtttggggacccatcttaggtattccctgctcccctgaagaatgattacacgtgttaacagaagactgacaaagactctttttatttgggagccagaggacgggaacgtgttacttgtgctataactgcttttgtgctaaaatactgaattgtctcaaaattagctgtgtaaaactacgcccgggttccctggctcctgctgaggtcccctttccttctgggctgtgaattccttgtacatactttctctactttttgtatcaggcttcaattccagttactgttttaatgttgtctctgaagatgactttgttgtatttttttttgcttttttctaaaccatgaagaacgtcctgtttagacagagcatgctctgcattgttggtttcaccagcgttctgccctcacatgcacagggatttaacaaccacacaatataactaccacttcccttgtgagtctcctaatatataaagtagagtacccttaggtactctgccctcctgtcagtagtggcaggatctattggcatatctcgggagcttcttaagaggcgatgaggttcatttgaacacagtgacaacttgtagaatcttagtgaacctttctatcgcatagcagtttattgactgttattgctaagaagaagtaagaaagaaaaagcctgttcggcaatcttggttatttccatctaagatttctggcagtgtgggatggatgaatgatagtggaatgtgaactatcggcaagctataaatggacagccgtcccatgttcttaccttccctgttcactatcacgcactccnttctcgct

SEQ ID NO: 673307 - DNA, 325 bp, Homo sapiens
caagcagacagcctggtgccacaccctgggcctggtagttaaagactgacccctgacctaatcggttatgttatctatagattacagacactgtatagaaaagcactgtgaaaatccctgtcctgttctgttccaacctgattaccagtgcatgcagcccccagtcgtgtaccccacttgctcaatcgatcacaaccctctcacgtggacccccttagagttgtgagcccttaaaagggacaggaattgctcatttggggagcttggttgttggagatgtgagtcttgctgaagctcccagccgaataaagccattccttcttta

SEQ ID NO: 673308 - DNA, 514 bp, Homo sapiens
ggtctcaatgactagagcagaatactgacagcatgcattactgagtatatatccaaaagaatagaaatcattctattataaagatacatgcatacatgtatctttcatttcattgcagcactattcacagtagcaaagacatggaaccaacctaaattcccatcagtgatagacttgataaagaaaatgtggtacatatacatcatggaatactatgcagtcataaaaaggaatgagatcatgtcctttgcagggacattgatggagctggaagccattatcctcagcaaattaatgcaagaacagaaaaacaaacactacatgttctcacttataagtggcaactgaatgatgagaacacatggacacacagaggggaacaacacacactggggcctgttggacggtgtggcgggggaggaaggagagcatcaggaagaacagctaatggatgctgggcttaatacctacgtgatgggataatctgtgcagcaaaccacaatggcacgtggat

SEQ ID NO: 673309 - DNA, 846 bp, Homo sapiens
ggagagaactagtctcgagtattttttatttatttggtaggtggtaggtgggttatttttaagaaacggattttaactcttgtaacccaggctgaaaaaatctggaaggaatgtttagaaggataaaaaaaatgatgatttttttttctcgtttctcgaaaacagaagttcctcgcgtggtgctcccccaggcgtggagttgcacgtggctgcggatctcaactcaccaacaacctcgtgtatccccgagtgctcagatgtgaatcctgtggggtgccatcagccttatccgaagattagccgggaatcaacgaggcgcccaaccaaccaaaccgcgggctaaacttgcgggctatctcaagtataaatcacctttgtgcgagaacagcgagttcttacacctcgtgttcggccccccaggcctgcagtgtcccacaggccgcagggatactcctcgaagcctccacgtggcacacacctcgatgccatcccgcgggatccagagccacattcttctcgtgcctacgagcccccccagggtatacctgtggcgccacttcacggggcgcctttcggcgccaacaacagcccgcgggccatcaatcggggcaccatccacacgacacacacctagtgggcgccctattccagcccatctgttgttgccccccagccgcctaagcttttggaacaccccctttaaccactgagaatgtgaactcccgcgtgtgcctgtagggtccacccacccaacaagttgttggcgcaattcaacaggggcgagttcgaccccaactgtgcgcgcctagtggccctaaatatggcgcacacccaacgcacgaccca

SEQ ID NO: 673310 - DNA, 85 bp, Homo sapiens
ggcaatgcgtgatgacgacctagggttcgcgcctccccgccggtccccgcccgccgatcctctccccgccgcgccccgaggatcc

SEQ ID NO: 673311 - DNA, 251 bp, Homo sapiens
ccagttcagtgtacagaaaactgggcacagtcagaagacagctgacgatcccagccaaaatggactacgctgggaacgtggcagaggctgagggctcttggtgccctgagcagccaggagacgggctcaagcttcccgcatctgacagcgccgaggccagcaacagcaggaccgactgctcctggactccactcaacacccaaatgagcaaaccaggttgactgctcacccgccgttttaaaggctttgga

SEQ ID NO: 673312 - DNA, 414 bp, Homo sapiens
  misc_feature (27)..(27): n is a, c, g, or t
  misc_feature (46)..(46): n is a, c, g, or t
  misc_feature (48)..(48): n is a, c, g, or t
  misc_feature (277)..(277): n is a, c, g, or t
taggtgcagggtccacatcttcagacngatggactggatggtggcncngggctgtgagcatctgctggcaggccaggagaggtgggcgacagagaagtcaaagccccggccttgtggtgcaactctgggcgagtcagttcacctctctgcgtctcagcctcttcccctgtgcccagagagctgctggagggtggattcatgacgacaaaaggtgcccaggacagggcctctccatgctgagggctcgctgcaagccacccttctcaccccgtttgtngttattcttactgttccagcccaggacccagcacaagcctggcatgtaagtgaggataacccgacattgaataaaaagagaaaggaataaagctccacctaagatgtgtggggacatacagggacagaggcctccca

SEQ ID NO: 673313 - DNA, 507 bp, Homo sapiens
tagtgtcactcatatctttttattatctatttcgctggttaatacagtgacataaactgagttttggaaaaagcgtctcgtgcatttgaggatctaacccctatgatgtctgtctcggatatgcagagggagctctgcattaccaactgtgtgataaaaacaaaaattcaaggtggtccccacacccagaacccaatatttcatgtaagagcctcgacatggcttccaactgtcctcagaagctcaacccaccttcaatttactcccacactgttgcagagcccatctgtctgccccactagtcatcaagagctaggcagctagggcctttgcctcctgggagctggtgcccagtatgcaatcaaaaagtgtttgatgaaataaacaaaggaaacaaacttagaccatattcacaagcctctccagaggcaattcatgccaagactcctgggtcaggatagagagctggctctaaagggaaatgaggaggtgctggggaggccctga

SEQ ID NO: 673314 - DNA, 845 bp, Homo sapiens
ggtgtcgtgaaaactacccctaaaagccaaaattgggaataggaaatagacggtcatatcaacattgtcgtcatctgtgacacgtagattcgcggcacagtccaccactgactggccactctgtatctataacatgcgcgtgagcatctgcactgaaagtaaccgattgaagaaaagtctcgaaggaaggagagcgtgcatggaggatgggaacagggcgtcccttcaacgatatgccctgcgcgatcattgggataaactgaaaggctgagtcgtgaacagtggtatcaccattgatatctcctttgttggaaatttgagaccagcaagtactatgtgactatcagttgtatgcccctaggggtatctacacgtagtacttgattcagaaaagcgagtgcacttacatgggcaacagtctcaggcgtgagcgtgatggcgtgctaccgtgactatggttctgcgtgcctgggtgttgagtcgaattgtgagaagcctggctagtcgtccaaggagaatggggtcgaggagcccggaggagcactgcccgttctggctttgacacactgggtgtgaaacaacgtaagttgtcggtgtggaacaagatgggcattccactgtagccaccctacagccagaagagcatctgaggagcttgttggaggatagtcagcacctgactttactgagagatgggcctacaaccccggatcacggttagcatttgtggcaatctctggttgggggtggtgacaacgtgctggcgcccagtgccaactggccgggtccggggggcgcccccgtagggtggccggcggggaccgcggctgaggcggggggtccac

SEQ ID NO: 673315 - DNA, 587 bp, Homo sapiens
  misc_feature (135)..(135): n is a, c, g, or t
gatgtagacaagacgtcgtattaagggatgtcctgtgtagctttcttcaatgaagtagtcgatcaattgctttatgtgaagattttagaaatgagtgaaaatctcctgtttagacttgggtggaagcatgaatcnaaggaagcagggcctcatgtcttgatgggtcacatgtgctgaaggtgagtgagaagaccttaaacatccgtggtcatcaatcgtcttatctcaatactgagcagcttggggattaacatccatgccgcttgcctgtgcagtttgctctcacaatattacgcaggcccatgctcagctgctttcagtgattttgaaagcagtcattgacgatcatctgtataagaccattcatctgtatggaagtcatctatgacatgagtagtggagaaatcaagtaagtgggggaacagattagtatgggggggaactcaagggctggagatggcatcatagaatccacaacttagagttaaacgtactttcttctccagatcgcaaggcaggctctgggatctaacttgtcttataaatgagaaagttttaagtgattgctgtattgatatatcaggaca

SEQ ID NO: 673316 - DNA, 357 bp, Homo sapiens
  misc_feature (29)..(29): n is a, c, g, or t
  misc_feature (91)..(91): n is a, c, g, or t
  misc_feature (99)..(99): n is a, c, g, or t
  misc_feature (105)..(105): n is a, c, g, or t
  misc_feature (122)..(123): n is a, c, g, or t
  misc_feature (126)..(126): n is a, c, g, or t
  misc_feature (132)..(132): n is a, c, g, or t
  misc_feature (135)..(135): n is a, c, g, or t
  misc_feature (141)..(141): n is a, c, g, or t
  misc_feature (144)..(144): n is a, c, g, or t
  misc_feature (156)..(156): n is a, c, g, or t
  misc_feature (158)..(158): n is a, c, g, or t
  misc_feature (167)..(167): n is a, c, g, or t
  misc_feature (172)..(172): n is a, c, g, or t
  misc_feature (182)..(182): n is a, c, g, or t
  misc_feature (188)..(188): n is a, c, g, or t
  misc_feature (198)..(198): n is a, c, g, or t
  misc_feature (246)..(246): n is a, c, g, or t
  misc_feature (308)..(308): n is a, c, g, or t
  misc_feature (319)..(319): n is a, c, g, or t
ggatctgtgataatatagccaagattaanagattacttgttctagctttcctggatacaaatgaatgccactcttgtgtagaataggtgcnctgtaggnacaagnaggtaatccatgagagnnggngctgcngantacagnttntgcccacataantnagtattggnaacanaacttctganattgtnagggattgantgtgccctggtgaatgtcaacatttgcctactgcatttgtctcaaaanagatgcacttatttactgtctaattgatagggtctcttatacaatcttaaatcctatatgtnatttaactatngtgtgattcttctcttgttcttaatttttaagattctt

SEQ ID NO: 673317 - DNA, 205 bp, Homo sapiens
  misc_feature (150)..(150): n is a, c, g, or t
atgccaaatctgtcaagatcaagaaaaataaggacaacgtgaagaaagcgatgcagccagatacctttacaccctggtcatcactgacaaagagaaggccagagaaactgaagcagtccctgccccccggtttggcagtgaaggaactgnaaatgaaccagacacatgattggtaactgtcattatattaaatcactaaaaatcc

SEQ ID NO: 673318 - DNA, 708 bp, Homo sapiens
agcaagaaacggaccagccccagaacaaacctggaagtgaccatggccgccgacatagttctgtattttgtggcgccttccttttgaggaaagcacggaatcacgaatagcctttcctatatctttaaaacatttgtaaaaagcgcctacactccagggggggtcatctgaagggccagcagtaagactgttttcatgggacactcaagtcctggacatagggatcttgattcaccccatagacctttctttggatagttctgcccagtgggtttttcaaagtgggtactagagttttccatacacacgcatgcttcacagcattttgcagcagacaccgaaaacgtttttgtgaaaacttgatttactaggatttgttatttattgcagctgaaaatgaagactggggtaacttaacagaaagatcagttttcggaattttagacagagttttggctcataaatcattagccagagaaataaacgacttgtttcctaagttctggagcccgtacaaaaaatgcccactattttttctagaaattgacaaacacttagaagcctccgcttttagcagtggggtacccaacccaccgggaaaacaactattggacaaaaatttggtttttttgaacgaaaactgaactcttgctgtccttcttggtttcagaaggttgtcgcccgggttaaaacggtagacttgaagag

SEQ ID NO: 673319 - DNA, 228 bp, Homo sapiens
cgcatcatcaggaagcggatatgctctttgcggaggacgatggctgccagcgcgtagagggtgtcagccaagaacgccctggtaggtcctacgccttcaacatgaagtagcgccgtggtaggatgaggggctcaagggcaaggatcagccgagcgcggtacatagaagcaaggttctgggacaacgtgtcaacgaggtcatctcgtctggctggacgccaacaccttg

SEQ ID NO: 673320 - DNA, 138 bp, Homo sapiens
agaagctaaaacttgtttccgagactgggaggattagtaggctttcttttgctgtattgttttataggccttctttacctcccagtctccgccaacaagttttagttttttattggtttggagactgcctcgccaaat

SEQ ID NO: 673321 - DNA, 129 bp, Homo sapiens
agccccagtcaagatgttgaaaaacgtccctgtggaaaatttttacccggcacccccgagaaaaatttaaaaaagcccccgcgggaaaatttttttacagacccccccacgaaataaataaaaaacggc

SEQ ID NO: 673322 - DNA, 233 bp, Homo sapiens
  misc_feature (51)..(51): n is a, c, g, or t
aaaaaaccccttttgggggggaatttttttttttgggccccccaccccccnccccatttcccatttgaattcccccctaaaaaaaaaaaaaaaaaaaatgcggcagccccatttttccctttattttttgaccctccccccccgtaaaaaagggactttagttcagttttaaaaccaagggacccccattttatttaattttttttaaaaaaaaaaaccaaaagccttggcca

SEQ ID NO: 673323 - DNA, 187 bp, Homo sapiens
gctggcatccattaactacacaccttgtatgaagaggtggatgttgcagagtagccacttgctccagacaccagggacaccattgagccatgtcgacgcaagctggattcagatccatatccagattcagtctaaaaaaaaaagtaaactatgtgaaaagaatttaaataaaaaatacttgagaaaa

SEQ ID NO: 673324 - DNA, 532 bp, Homo sapiens
ccacgcgtcggacccacgcgtcgcggacgcgtgggtcgaaccaagcgtccgcggacgcgtgcacaatgaaatgtcagtactgatcctcaaccaattaaaatctacagtatgaaacaaaaaaaaaaaaaaaaacaaaaaaaaaaaaaaaaaaaaaaaaaaaaaaaacacacaagagcaacaccaccaaaacaaaaaacatatggacaacaacaaaaaaaacaccagcaaaagaaacaacatacacaaaaaagaacagaaaaaacgagatacaaaaaaaaaaacagaacaaacaatcaacaaacaacaacacaaacgtaaaagaaaagaaaagcaacaacaaagccagagcagctcaaaaaagaagcacaaacaaccaataaaacacgcaaagcaacaacaaaaaataacaaacaccaacaacacaagcaaaaaacaaacaaaaacaaaatagaaaacacacaccacaatcaaaataacaaaaaagtaagacaacaacaaaagaaaaaaaaccaatagaaaaaaaataacacag

SEQ ID NO: 673325 - DNA, 306 bp, Homo sapiens
ggatggggtctgtacggttatgtaaggaggctcctggagctggcccaggctctctgcagcatgcctttatggagtgcctacggggtagcacgatcagatgacaggccaggctgccagagctggggtggagcaaggtaagcagagaggtgagggaaggagggtgctggcttagcaggagctgaatgaattggcctggaggggaaaagctaagggggatggggtggcttgagtggagtaggttaggcctaggttaaggggagctgtggaccttccaggacggacggatgcgagcagtcctgagtgggg

SEQ ID NO: 673326 - DNA, 199 bp, Homo sapiens
cagctcggtccgtgtttgggctcaggacgtccactgacgcatgctggagggcacctcccctttaccacactgctctgtacggggcacgttggcacacatgcacactcatactcacatatcgcctgtagccctgcaggagtggaactgggtctgggctgtgaacgttccactcctgcagggctcaggcgtatatctgagt

SEQ ID NO: 673327 - DNA, 545 bp, Homo sapiens
ggattacaggcatgcaccaccacacctggctaatttgtatttttagtagagttggggtttctccatgtggtcaggttggtcagctcttgacctcaggtgatccgcctgcctcggctcccaaagtgttgggattacaggcgcgagccactgcgcctggcccacctggctaatttcttaaaaaaattttgtagagactggatttcactgtattaccctggttggtcttaaactcctaggcttaagcgatcctcctgcctcggcttcccggagtattgggattacagtggcgtgagccactgtacctggcctggataagcattttaacgtggccatttatttatttaggacagagtctggctctgtcgcacaggctggagtgcagtggcatgatcttggctcactgcagcctccacctcccaggttcaagtgattctcctgtctcagcctcctgagtagctgggactacaggcacgcaccaacactcccagctaatttgggattttagtacagacagcgttttgccccgttgggccaggcgaaactca

SEQ ID NO: 673328 - DNA, 148 bp, Homo sapiens
gcaggttcgtacacttagtcggtattccaaagtatttcggcacgaggattgacaaggggacagacaagttgggacgtcagggaattgaacaaaagggacgcagttttttgggtggatgggggtgtgggagtctgagcaagggtgaggg

SEQ ID NO: 673329 - DNA, 803 bp, Homo sapiens
accagatgtggtgacgctattgattatgtcctgcagcttcaaactttggatcttttagaggttgcctattttgagctgtgttctcatgtcacttaatttactgatacaagtttgatacatgcaattgttgggaggaaagattcctcagaaggcacaaagagctgtattgtgtatattccatttcaaaacaagagaaacgtggtattcatccttgctgatggcattcactgaggtatgacgacatagattggcacagctgaaggttctccacgtctgactgcacccagattggtgggctgttgttcttatagatataatttaaaggaaggcttgtacattccccaggtatctcacatgatgctattgctcaagagtctaaacgagtagttggcagaactttggaacgcaaatgtacctggagacgcaggtattattctctagtgtactttctgcactttggtgtcctttctggaattgcgtcaatagatgtcggtcgtcggctggatgcagttgaacacttacaagtccagttactattcttaatattccattcaggtgagctcattcttatgtgaacaaagcaatatgcgatttcagtcgatcatcataagaaaattatgcagacccaacaatgcttgccaagacgtgtagggacactgtcttacctcgatctagtttaagttgacaaaacaactggagttctgggctttaccgggttctcggagtacggggggttacgcactactattcaataggttaagcttgtccacctggcatgtctccgttttttccattgctctccc

SEQ ID NO: 673330 - DNA, 779 bp, Homo sapiens
agcggagcttccggcaaggccttcaagcgcgggacgcgacgaagtcatggaccgcaacccctcgccgccgccgccgggtcgcgacaaggaggatgaggagtgaggtggccggtggagactgcatagggagcacggtctacagctaaacactggactcttcggcgtcctcagcggactcatccaggatagtcagccctgacaaacaccaaatctagctcagatgatgaggagcagactgacggaggcttgatgaacgataatgcgagaactgaagattatgccaggagctatgggagtagtgtcaagtggcatgaggacgtgcgctgttatttcgtgcaagaggtttagatgctccgtgagtacgtagtatcagtgggcaggtactggcccaaagggtcccaagatgtgcctcggattgaaggaatatttccgtgtcagaccgtggacccagatatcgactgatgagggacacatgagggcaagctgtgagcaggctaggatggtcaaagttggaactggatatccgccgttagatcgcgtacacgagcgtgggagtatagtatagagtggcatttatcacgcgtttggaggaagggtcgtatacccatgcgatggacttgacaaatcgccgtaatatgtccacgattgcacctttgaaagaggggcgcccatcgcctcgcgttcagtttggcgaaattcgaggggagtcaccagcgtggaagtggttggcaatatacgtggggaaaaataagattgagagatagaacgtggcatgcaaa

SEQ ID NO: 673331 - DNA, 306 bp, Homo sapiens
ataccgagatccagctctgtatgcaagttagacagtgctatcaacgtcctttgatacgtagagcacatattccttatggcaggttcaggtctcgactacttatacgcatatgtttcttgaccagaaactttacactcactgtcattatgttccctatcgcgacaaaactactaacacaagtaatatgctgcttcaaattataacagaaatctgtgagagtggcatgatataattgcctttggattgcctgcttttattattatcactactactgtctgctcacgatttctgtgcccgtttccaggt

SEQ ID NO: 673332 - DNA, 377 bp, Homo sapiens
atgtctgtgtactgcagcaatgtgtgaggagatgaatggcacggtgatcagtgcacggggagaccctgctgccgcaccaatggaggagatcaactgagctgaacctgcatgatccatgaggctgactggctgaggtggagaatgccaagtgccagaactccaagctggaggccgcggtggcccagtctgagcagcagggtgaggcgtgccctcagtgatgcccgctgtaaggctggccgagctggagtgtgcgccctgcagaaaggccaagcaggacatggcctgccttgatcagggagtaccaggaggtgatgaactccaagctgggcctggacatcgagatcgccacctacaggcgactgcttggattacaagga

SEQ ID NO: 673333 - DNA, 134 bp, Homo sapiens
catctaaggaccttatcgtgtgcatctgcatctagcacatgtgcgctaatgtctgcagatgctctagagtatacatgcgaaagagagcaacgcaggtctataggcgtgctcaagtatcgtccgttctcactgtg

SEQ ID NO: 673334 - DNA, 152 bp, Homo sapiens
cgcttctgtgggtctacgctgctgcttactttgtcacggcacgctggcggcgcgcggtcacctgcaccgacttccgttactgttctcctctgcccgacgtccctgggtggactcgactcaccacccgggtacccgagctcgaccttcgtacc

SEQ ID NO: 673335 - DNA, 124 bp, Homo sapiens
ccccccagtcagtgttcccggacgttggcaccccgccacgacgggtgtgccacttctcccctccccacgccccggctgcggactggcactggccccccctcactctctccggtgaccgtgctcg

SEQ ID NO: 673336 - DNA, 698 bp, Homo sapiens
  misc_feature (625)..(625): n is a, c, g, or t
atggctgttgctgacaggactggttccgagacgtcttgattcgcatggctgagctgagctgtggctacgctattttgacgatctggacgctatgcagtgcactgcaaagattcaggtgaactgaagtcatgcagtccagaatggaaaggcaagtttcctgaactgatatgtgatggggttgcatccattcgacatggaagctgaattactgaagagtggagagagaagtgcaagcgtacagcattcagacttgacttgaagcaaagactggacttgatatctattgtactacactgaattgaccacaactgaacaggatgagaatagctgacgtgagaaccgtgcgacgttgacacagcccacgataggatagtgaaatggagacatgacattagtataatatgggttagaatataccgcacttggattggatgagatgctgatactagcttgcctagcaacattgacatgctaatgcagtacaagtacattctcagaacgcagtgttatgatactagtaacgtggacatgacactggttatcatattactatcagtgctgtcgacatgacaaggtgcagtgtagcaagccagtacacttcacggtttagtatgggtgggcacgncacagttgtgcgcgccatagaccagtatttatctacatcgccatcttagtccagattagactggtctggctgg

SEQ ID NO: 673337 - DNA, 235 bp, Homo sapiens
ctaggtcggtaccccagagcaagaccccgcctaaaaaaaaaaaaaaaaaaaaaaaaaaaaaaaaaaaaaaaaaaaaaaaaaaaaaatttacccgggcgtggtgtagggcgcccgtaataccacctactcgggaggctgattcaggaaaatcacttgaaccgggaggcaaaggttgcagtgagctgaaattgcaccattgcactccaccatgggtgactgaccaaggtttcacctc

SEQ ID NO: 673338 - DNA, 128 bp, Homo sapiens
gggggggtttggatttggggggggggccccccttttttttcaagggccccttttttttcccccccttggggggttaaaacccccccttaaatggaaaaaccgttttttggccccggccccccccccca

SEQ ID NO: 673339 - DNA, 763 bp, Homo sapiens
gggcgtttcattgatcattccatggcccctcggctgacaattaaaacggcatctcccctagctcaccaggcctggcctcggggcagtgtggcctctaggctatatctagtgtccagtatatggaggctgagtatctaggtatcatgcagacaaagccctgtcctatcagtcttctagaaacagagacaagaaaggcagacacaccgaaggacaggcacccatgtagggcgcccaccctgggctaccacacagcagtgtcccctggccccagaggtcgcagactaccctacagacctaccaatagacattgagctactagtaccagcccggcaagccccattctaggaccggtgctagggttcaccactacccggacctaaggcaccctaccaccgactactaccctgtacacgcgtcatagtacctagtcctaggtcctagaatgcccgtatagtctaggagaacagagccaagcactgctacacgtactctgccgcctagcgtaaaggagagcccctgggctctcacccagtaccccacccgactgcagagagggaactagggcaccccttgtttctgttgttcccgtgaatatatatcgctatgggaggcagccgaggcctggccaaatgcggcccactttcctgagtctgtcgctgctccatggcagcagcagggaccccagaaccagaagacccgcaggtcctcctagctcgggggtctagctctcaggcccggttctttccagcaagtgagcattgta

SEQ ID NO: 673340 - DNA, 88 bp, Homo sapiens
attgtcttctggctgcttctgagtctgttgagaaatcagctattatttatttgcaataatatggctttcccccttctgtcgtcttctc

SEQ ID NO: 673341 - DNA, 283 bp, Homo sapiens
acaggttcccgcgcggctgccggcacgggacacaaccctcaaagacgcgcagcgctccagctgcctacgcagcagtaccacgtctcggcccaccgtcgacttccagctcaggctcctgcaccagtcactggctcatgctctggctccagctcttcctccgtcatccagtcgctcaggaagctccagcacctcccgcatctccagctcttacctagcccttctagtgtctctcctcacgttcctttttcggctgcagcacccttactcacagtgacgcgctccc

SEQ ID NO: 673342 - DNA, 168 bp, Homo sapiens
gatattctgtgttaccacgctgcaggcggacacctcaaggataatcactaaattctgccaaaagaactgaggaacggtggctggaaaagggcaagaatatcacggcatgggaatgagtagcttgaaactgctgaagtatgtcctgtttttcttcaacttgctctttat

SEQ ID NO: 673343 - DNA, 247 bp, Homo sapiens
gctgagaaggagcggcgactcagggtcgccgcccctcctcaccgaggaaggccgaatacagttatggccacccaggtaatggggcagtcttctgaggaggagggctgtttaccagcagtggcaacattggattagccctgcctaacgacatgctatgacttgcatgacctttccaaagctgaacttgccgcacctcagcttattatgctggcaaatgtggcttaactggggagtaaatgcagctcct

SEQ ID NO: 673344 - DNA, 244 bp, Homo sapiens
gagtatcccgatgactcttgaagcctggcggtgttacaatgtgctcgatgggagagctcttgagtccaggaaaaggaaatccacaggattaatcactcagttaaggtggggcaagaacaaatcacaatggtggaatgtcatcagataaggcggggcagggccttttcacttcttttgtgattcttcagtaacttcaggccatctgggcgtatacgtgcaagtcacaggggatgcgatggcttgg

SEQ ID NO: 673345 - DNA, 1137 bp, Homo sapiens
  misc_feature (482)..(482): n is a, c, g, or t
agcggatcttgccgagcttctgttgacacgtgcctggagcaccagaacagccggagagtggttcttcatcacagactctgctcttgcttaggcttaaggtgggtggtgggggaatggacgatgaggcatttggtttattgcaagactatagatctcggagacgccgatgtagaataactggtcccgtgcgtgtagctcacaggctaacatgcgcaagatgtctcttgggttgcacctaggcagtggacaattggatgcactcgcgtcgtcttggtgtgtacccataaccagacgctccaggtgtctctgggcaagattgtgaagctgaagaacatgttgaaggtgcgcagggtgggcatggagatggaggaacgatggggagcatcacagtggcttgggatacttggtgacgaggggccaaggaaagttaacgcagggagcgaagggtaggctcgaatcgaattatgtatcacacttgtccnagggacatctataaagcatggacttaggggtcgcgggatgagcgtgtggcaagccgttaggtgggatacggattaaggcgcaccctaggataaccaaagcgcgagagagggcgctggagacagaatggagctcgtagcgctgtaacgtgggtcataaggcggtacagggggaaaccgggcttggaccagccgctgtaaatctcgatcgcttgattcgtcgcaagaaccccaaagcgggattcgcatttgaacatgaacaggtgggagttccaaagcgcacgcggtgttcttccttgactcctggagggtcctggccccgggttggccctgagtctatattagtgccccataggcaccgactcatggtcctgaagggtggacatggggccaggcacagtgcaacgacgggcacccacatggttcatgtgtacgggctaggcttagataatatgtgcactggggcacccgtgaggttcgaatgtgcgcatggggcaatctaggaccggccacaggtagaaataccgtcaaggcttaagaggaatcaccttggtttgtgacaacccccaggaagtctcgtatctgggcacaattaagccggtatttaggttgggaagcgaacggccttgaagggctcccctttgcctgtagtacttga

SEQ ID NO: 673346 - DNA, 700 bp, Homo sapiens
  misc_feature (41)..(41): n is a, c, g, or t
  misc_feature (43)..(43): n is a, c, g, or t
  misc_feature (60)..(60): n is a, c, g, or t
  misc_feature (62)..(62): n is a, c, g, or t
  misc_feature (69)..(69): n is a, c, g, or t
  misc_feature (77)..(77): n is a, c, g, or t
cctgttacttccttcgtctacgctaccacacacgccgcccncncttgcacaaccatgaanantctctcnggtgtccnccggtggtggacgctctagaactagcggattccacgaactgcacgaattcggcacgaggcccagactcagacatctaaatttgggggggtggcgctaggtactcctgaccacacacaccctaggctatggaaaaacgcagtatatggctgtggtgctctgcctgtgccacactgtgaccatagggaagggctgcgtgcttctgagctacatagcacgagacagttacagtgagtgcttccttggagcttgttaggggaaacaggagacttttcactgacctggaggggtcgaacgacatactagactgtgtggccatccttgaaccaaagtcttgatacaatgaggaggaaatgtcactcactgctcaagtgcaaggaccaacccaagaatttaagaagcggaccaacgtgagggtaaagacgaagacaggctgctctttgacacctcggacgatcaatctactaaccaggggagacaggtgaaaatccaggtcgctttcatgggcgttttactcacctggaagaatgatttcccctcgtttcattcacgatcccacaagtaaatggattggaacatggataagtctgtttggcgggtggctcaggtatttatttccccttct

SEQ ID NO: 673347 - DNA, 337 bp, Homo sapiens
cgcgcccactcttgccatcacactggaacgccaatcacgccccctttaaattaaactataagccctctatctagagcccaatgggagctttaacccacccaacaccttagttatacacgctatagcacccctaatcacaactggcttcaatctacttctcccgccgcccggggaaaaaaggcgggaggaagccccggcacggtttgaagctgctttcttcgaatttgccattcacatatgaaaatcaccctcggagctggtaaaaaagagggcctaaacccctgtctttagatttacagtcccatgcttcactcagcccttttacctcaccccccca

SEQ ID NO: 673348 - DNA, 263 bp, Homo sapiens
cactgaggtggagagggctctgcacactttagccccaagccactggacacccgggcctgcttcctcatctataaaatgggcctatttatgcacagcggtctcataaggaccgtgagccaagcgaggagcaacaaacatgaactactgtaatgcctgtgatcatggctagtcctaccactgccatgtgcgttaacgactgctggcacgggtggcacctgcatcctcttgggtcatctgcaccatggccagtaagcccattttat

SEQ ID NO: 673349 - DNA, 362 bp, Homo sapiens
  misc_feature (237)..(238): n is a, c, g, or t
  misc_feature (240)..(240): n is a, c, g, or t
  misc_feature (247)..(247): n is a, c, g, or t
  misc_feature (261)..(262): n is a, c, g, or t
  misc_feature (281)..(281): n is a, c, g, or t
  misc_feature (330)..(330): n is a, c, g, or t
aggaagaccctcaatcttcccacccggtaaaaaaaaaaccttccaaaaacgtttttagggcccccccccaagccccttttaacagcccgtgtctccccggggggggaaaaacccccccccccggggggggccccaaaagcggccccaaggagaacctttttttttttataccggggggttcccccccccaaagggaggaaaaaataggggccccccccctcgcggtttttttaaaannanacttttnccccccccccccgnnacatttttttatttttttntgggggggggggggccccccccccaccccccttttaaaataaaaatttngagggggggggcgcccccccttttttatttag

SEQ ID NO: 673350 - DNA, 708 bp, Homo sapiens
  misc_feature (47)..(47): n is a, c, g, or t
  misc_feature (81)..(81): n is a, c, g, or t
  misc_feature (98)..(98): n is a, c, g, or t
  misc_feature (101)..(101): n is a, c, g, or t
  misc_feature (106)..(106): n is a, c, g, or t
  misc_feature (108)..(108): n is a, c, g, or t
  misc_feature (394)..(394): n is a, c, g, or t
  misc_feature (532)..(532): n is a, c, g, or t
  misc_feature (573)..(573): n is a, c, g, or t
  misc_feature (607)..(607): n is a, c, g, or t
  misc_feature (610)..(610): n is a, c, g, or t
  misc_feature (615)..(616): n is a, c, g, or t
  misc_feature (669)..(669): n is a, c, g, or t
  misc_feature (677)..(677): n is a, c, g, or t
  misc_feature (685)..(685): n is a, c, g, or t
  misc_feature (692)..(692): n is a, c, g, or t
  misc_feature (699)..(699): n is a, c, g, or t
acgctctcctttagaattttacagactaaagcacaacccgaagcaantcacagtctcaatcattaccacactacctaaggngcctgcctactctccanccnccccntngctgaagtttgtgacatgccactgtaaatgtaagtattattaaaaattacaaattgtttggtgattatcttgatgacctcttgagcagcagctccccccaagaatgcagcaatggtatgtgcgctcagcagctccatatcggcaaaattcgtggacataatcatctttcaccattacagataaacatattcctgaaggaagccagtcagacaagacttcaactttcctatatcttcttcaacttgatagtcagatactcctggatatctaccctgttgtctatganatctatcaacagcgcgtaacattaagtacaacactatttcattatctggattgtccatgccagacataatttcatccttgtcaattgtatccaaaccatattcttcagctaaggatcgacatcttaccactcgaaganatgcagaattgctgcagagtaattctaattctctctctganatggactctggtgcctggccaatggactgcagcnatntggcnncatgactacccacagcggcagcatctctctctgcgttctcacggtacacgccntgcagtcntatatatntgcctgnatctgcnatcacatca

SEQ ID NO: 673351 - DNA, 363 bp, Homo sapiens
tctagaggatcggacgtcgacttctgctctttctggaggctggatgagtcatgtgtagacaaaaacagatgggagttgggaggtcagccctgagcagcgacagactgaggatgttgtggttggggatacagtgagtatattgttcatgaactaggtaaggaactaactcctcacctcttgtgctcctggaggaaggttgacattggtcaggagagcagcatggagagagacagctcaatggggttcttggagcccctttaagcacaaggtttgggctatcctcattgatttggctttccccaagtccccctggagttattccagcctgtagaaggggccaagtctagagcagaaggtcgacgc

SEQ ID NO: 673352 - DNA, 849 bp, Homo sapiens
atggcacatgcagcgcaagtaggtctaccaagacgctacttcccctatcatagaagagcttatcgccgtttcattgagtcacgccctcataagtcactggtacctctatcgtgcttcctagttcctgatatgcccgttttccctaaccagcgtcacaacgataacgtagactacatgactaacatcgtcagacgctccggaaatagaaagccgtctgaactatcctgccctgccagtcatcctatgtcctcatcgccctccgcattccctacgcagtcctttacatagagcagacgaggtcaactgatcgccatcctcttaccactcaatatcagtctgggcaccaagtggtactgaaccgtacgaaggtacaccgaactacggcggtacgtaagtcgttcaagctacctacattacttacggccattagttcctagaaagccaggcgaacgctaccgaaatccttgcacgttggacaaatcgcagtaagctactccccgattgaagcctcccattcgtataatacattacgatgatcaagaaggtcttgcagtcatgaggctgtgccaacattaggctgtaaaaacgagatgccaattcccggacgtctaactcaaagcactttgaccgcttacacgaacgagagggtataactacgagtcactgctcgtgaaaatcctgtggagcaactcatcaggttcctcgcccatcgtccctcgaattaatttcccctaggaacctttgacataggggcccgtattaaccctatagcgagcccctctaccccgctctaaagccagacaaaacacacacacgaacaaacaccttgtgtagggcatctgggcctca

SEQ ID NO: 673353 - DNA, 134 bp, Homo sapiens
gtgttgtgttggcgttgggtgctgtgtgtgtgtgtgtgtgtgtgtgtgtgtctgggtggtggggtgctgtgtgtgtggcttggcatgggtgggcacaggggtgtgcgtggggaggcaggcaggaggtgagcttg

SEQ ID NO: 673354 - DNA, 777 bp, Homo sapiens
agctcatctggtgcggctggcgtgcaatgtggggacatgtggctgggtggcgcatcacctggcgcggaggcaggaggatgcagtctcattgttcctgggagccgtcaccacatgtagtgtccctcgtgctcagtcgtgcccagcccctctcagtcctccccaaccccctacaacctgccctgcggctctgagcacgctggcccctgtgcggcgtgcggcagcagctgctagcatctatctccaccctccagccatggaacgacctgtgaccatgtctcctctggtctcgtcctctggacagcccaccccggccgcagcccgcgttcaatgtaccagttcgtgagggagcccgaggactgaggaggaagaagaggaggagggaagaggatggacgatggacagaagacctggaggagctggagtgtgctggagaggaagcccgccgccgggctgatccgcggtcccagtgcccaccgcccctgccgccgggcgtcgccctaatggacttcggaaatgccttcgtgccgccgggcccccgggactcctgccggctgctccccccgtcgtccccggagcggagacgtcttgggacccgagccccggtgtcgtcgaccgtgcccgagccatcccgctgttcgtgttgcgcagtctacgccgtcaagctccctgaggaggacagctccggcgtggcctaccggaatccacgacaggtaaccgcagtgagagcctgaatttccacgcagacctaggcaaacatattcatttggacagtagcta

SEQ ID NO: 673355 - DNA, 145 bp, Homo sapiens
cacaggcacgcatgaggggccgccatgaggcacggcacacatgattgtagaactttttctccagcatgctcaggtgtcaggtcagacactgagtgggtggggagcgggggaaggcccctctgtagaggcgggatccccctgctat

SEQ ID NO: 673356 - DNA, 481 bp, Homo sapiens
ataaatggttcacacaaatctgtccaattgtatctgacctgtgacttttcactgcccagttttggacaacagtatgagtgggtagcgggtaacggtcggagaagcgggagcaagccaggcagagttttccacagtgggcccgtggacaccctggaccttctctgtgacgggcgactaatacttgcgtgtctctttaggttgtggcaaataaatcatgacattagttctagcacatccgcttaagtatgcttactgtagacagccctcaaggcagccaaatccagactcatccctgtgcacccctggcctgtccctgccctttacaccgagctcatttcctgtcctcttggctcatctgctccttccactccaacatcaccatcttagggccacctgtgcagaaagtgtgcttctacctcgaatcttcatctactttgctttgggcagcatgacaacgacattccttaatcactctccagcc

SEQ ID NO: 673357 - DNA, 1414 bp, Homo sapiens
gagaagaagaagcagaaagagcaggaggctgacaatgaggtagacgaagaagaggaagaaggtggggaggcaagcaggcaggcaggaagaagaaggtgcatggtgcaggacagaggcatggcagatgcacagatgcaggcacagctgcagtccagctcacggcgcaagctgtcggcagctgcaagcatgattgcacggatgactgcatgtcgataccacagacagcagaacgacctgactgaggatgactatgacagcaaacaaaggaaaacgttacactaacagaaaaaacaatggccgccgtgacctattcaccctccacttcccgtctcagaatctaacccgtggtcaccttcgaagtagaagaggcccgacccgcccaccgctgggccagctgccacccgccagatgacacgacgctctccaccacccaacccaaaccatgcagaatctgcaacagggagagcgaacacacgcacccaaccacttccaaggcccctgacattcttcctaaacacgtaccctaacaaaagcgaacattcgcacgaactatcatacattaaccactccatatacttcaggctaccttactggcaacgggtcacgccatataatacatgactctcgcgcatgaccaaacacagcctatcgagagcagttcctctgtcctaccattctgacgtacaccattgtagcgagtgacccaatagtcatacaataactcctcacaagggagaacacaaacaaccccttggtacaagaacaaagccacacaatggacagacacgaccacaagcgcgattccttaatttacctgaggccatatcgcacgcaacaacataccgacatgctggattgctacgcttcggcagttccctctaccagcatcatctggcatcggcaccgacagcctgcggcgtcacagcgtgccacagcacgtcacaaagggtcatatgctatcatctcaccttaaacttgacatcaacacacctactctactcctcacaccaaatgccccactgaaaatacagccataactccaaacaacccgttacttcaaacaactaaaaacgaaacatccacactactcacacaacgtctacctacaacagacaatacacaccaacacaaaacctgctcacaccaacataaaaccactcatctacggatcagacacatacaatactcatacagtatactttacaactacctccattatctcatcactaaccaacactccgccaccacaaactacgcatatccacacacatctatctcactatctcacacaatctcattgcacactacactcacaacctaacccactcatataatctatcaactacacacctacctaaataacacagccaaaccccaacttatatcaatcatcggatactaagtgatacactaa

SEQ ID NO: 673358 - DNA, 1180 bp, Homo sapiens
  misc_feature (490)..(490): n is a, c, g, or t
  misc_feature (535)..(535): n is a, c, g, or t
cttccctcatggtgggcccggtggatgaggtgcgcgaactgcagaaggccatcggggccgtgccgctgattcagggcgagtacatgatcccctgtgagaaggtgtccaccctgcccgcgatcacactgaagctgggaggcaaaggctacaagctgtccccagaggactacacgctcaaggtgtcgcaggccgggaagaccctctgcctgagcggcttcatgggcatggacatcccgcaccagcggccactctggatctgggcgagttcatcggcgtactaatgtgtttgaccgtgacacaacagggtgctccgaggtgccgctctagttccaagggtcggcgcacacagaaacagaggagagtccagagcaggaggccctgccagcggccctcccacacacacccacacactcgcccgccactgtcctgggcgccctggaagccggcggccaagcccgacttgctgttttgttctgtggttttcccctcnctgggttcagaaatgctgcctgcctgtctgtctctccatctgttnggtgggggtagagctgatcccagagcacagatctgtttcgtgcattggaagaccccaccctaagcttggcagccgagctcgctgtatcctgtgggctcccttcatctccaggagtcccctccccggccctaccagcgcccgcttgggctgagcccctaccccacaccacggccgtcctcccgggccctcccttggaaacctgccctgcactgagggaccccatctgaccagcttgggccacagcctgggctctgccaccctacctgttccgtgtacccgggcccgttcgacggatgaggccgtacagaggcctgacggactgagctgcaacggagtgacgaaggcggacctaaatcccccacctttgttggatgccctggacaggggatggctagcttgggtgcactgataccagtccccagggggccaatggtcttgcactgcacgggtgagcagtacggcaactcgccgggggatgcgtgccaagccccctaccctccctccaggcttgcacccatctcttcttagtacctcaacacgtagcggcacggcattgacatcgcaccccagctttcaccacatgcatcactacaagctcggatggcctccgggcccctacaccttccaaccacatcactcacatca

SEQ ID NO: 673359 - DNA, 792 bp, Homo sapiens
ctagccccccctctggtaggagtcggtgaaggtgagagtcagtgagggaatacaaggtagtggctgtaagggagtggaggggtggccaatctgtccttactggtgcagttggtcgctgggactttcattgagaaagatgaccccagcatcggaagagtttctaccgcaaagagatcgacacgatggactcttcccctgcatccgatgctggcacagttctggacagcgcaaggaacatgagcacgtgttgacttccagtgagacgatctctatgattcaataaatcgggcaatggtttcgatccatggtttgactatgcgatgagttaattcaacatgtcttttcaggatatcaagccaagtgagagatcaaatcgtcagagtgaacgcagatatgaaaaagtcgccactaatcgcgtagtaggaaataaagtggatctggaaccagaaagagaggttatgtcttcagaaggcagagctctggctcaagaatggggctgtcctttcatggagacatcggcaaaaagtaaatcaatggtggatgaactttttgctgagatcgtcaggcaaatgaactattcatccctgccggagaagcaagatcagtgttgtacaacttgtgtcgtccagtaaagaagataacctcaatcatggccataccgagcagataaaactcagaggaaatttgcacagatgctggcttggagaactttacaacctgggttgcagaactgagccttggtaaacctgtctctattacagcatgttgccatacatctatttaagtgcatag

SEQ ID NO: 673360 - DNA, 497 bp, Homo sapiens
  misc_feature (35)..(35): n is a, c, g, or t
  misc_feature (93)..(93): n is a, c, g, or t
  misc_feature (95)..(95): n is a, c, g, or t
  misc_feature (98)..(98): n is a, c, g, or t
  misc_feature (110)..(110): n is a, c, g, or t
  misc_feature (121)..(121): n is a, c, g, or t
  misc_feature (182)..(182): n is a, c, g, or t
  misc_feature (217)..(218): n is a, c, g, or t
  misc_feature (226)..(227): n is a, c, g, or t
  misc_feature (238)..(238): n is a, c, g, or t
  misc_feature (242)..(242): n is a, c, g, or t
  misc_feature (269)..(269): n is a, c, g, or t
  misc_feature (278)..(278): n is a, c, g, or t
  misc_feature (297)..(297): n is a, c, g, or t
  misc_feature (302)..(302): n is a, c, g, or t
  misc_feature (306)..(306): n is a, c, g, or t
  misc_feature (322)..(322): n is a, c, g, or t
  misc_feature (372)..(372): n is a, c, g, or t
  misc_feature (389)..(389): n is a, c, g, or t
  misc_feature (396)..(396): n is a, c, g, or t
  misc_feature (398)..(398): n is a, c, g, or t
  misc_feature (436)..(436): n is a, c, g, or t
  misc_feature (482)..(482): n is a, c, g, or t
ccgcccccccccccctttcctaaatcacaggggtnggtttccaagctacactcttacttctaatgccttggaaccctaaggagaactaaagcncnccngcggtggctgcnctggaagtgcngggtggggggggcggggcaatatcctgtcccaggctagatacagactctgagccaaaagcngactctgtgacatggaaagggaccacacaattttnntttttttnntttttttgtgncagngtctcgctctgtggccgtggcccaggntggggtgcngtggcacaatctcggctcnctgcnagcnccgcctcctgggttcncgccattctcctgcctcagcctcccaagtagctggaactacaggtgcccncccccccgcctggctanttttttntnttttttgtagagacggggtttccccgtgttagccaggntggtctcgttctcctgccctcgtgctctgcccgcctcggcctcccnagagtgctgggatta

SEQ ID NO: 673361 - DNA, 1261 bp, Homo sapiens
gggtgtcaccttgggccgtaagcggggtcggcgcgcactcgtcaaccggagccagagggccgattggagtcgtgcggatcggcggggaacgggcgtagtggccaggggccgggcaggaattagacggcgtaatccccagtaaccttcccctgatggtcctgtcaaaggttacctagtgatgaggggccatggtcggtgattggtgacggctacagtattgctgtcctagggctccctggatcctaggtgaatgaacccggatgccggtttggaccgggagtggaatgaggtgccgagtagcatcgaagaagtagcataataccctatgtcgttcacatttcgccttcatccagctgtactctggaaagggcgggaatggactctgagcgggcactttttagcatgggggactggaacggtggtgcggaccttgctggggctggttcgaaaggccgttatcgctactagccaactaatctcccggccttggggggcattctttattgtcccgtggggcttgttgtttggaggtcgggcctcgaactatgggcgggccttgccatgtgatgagctcccgcgcccatggggatttatacgtgtcttgataggaggcgtgttcgaattttgggacagttggtagcccggcgaggtggttggccaaactagcgatgcgcttgtgatggtgggcagatacgactcgaggtcccgacacggtgggggtcctttactaccggtgaatagactggggcccgagttgggcccgttttttcccaagatttgacccaggtgcccgttgggacttactaaaaaaggtgggtcgtcttaaccggcccattggaattttcgagaagtcacgccgcggggacatgaagggcgttgttcaccttcatacaacccttgattggacggtggggcgcttgggtatttcccccgattacccattgggcacttcagagaggccggtccgactcctggtccaaaaatggttagccccaggattccgccctactattaaatgtccccccaaattcccaatatgcggagttcactataacagtggggcacctcaacgggcattaccgttcctgcctgggaaacacgaccattccgttggtggcccaacttatactgtgggggcccatagaacttgagaatccaagaggagggagacattgggtcacacaaaactgggatgacacttcaattggccctgggtggggtgcaatttgggccaaaaggaaccccggaatttccaggaaca

SEQ ID NO: 673362 - DNA, 159 bp, Homo sapiens
atttattcatcagtcagggtgtccgattgggtcctagaacttccaaaggctggcttgtcatagaagccattgcatctataaagcacggctcctgttaaatggtatctcctgtctgaggctgcctactgaaaaggcatttggttacctcaacctctatgt

SEQ ID NO: 673363 - DNA, 608 bp, Homo sapiens
  misc_feature (442)..(442): n is a, c, g, or t
cttgcccttgccgtggggctgcagtgggccttccaagtgggttgaaagccttgtgccttctggagaagatccgtcggcgccttgtacatacccagcaagttttcagatgccaattgctgcttgggacgccttttgttaataatacatggccaaggagttccaggagggttttgcattggccgtggctccccgtgttaaggcccacaaaagccaggtctttttgtgggtgacccttgcttaaaaggggtgctgtgggcgctgtgggccaggtttcgggggctccgggaggttttgcctgccaggggaagttggaaccagtagcaaggagcccgggatcagccctgaactcactgtgtatttttttggagccttgggtgggcagggagggcccaggtacctgtttttttgggaaaaaagagggacagggccaagggcaaaaggntttaggccagagcaaggccaatgttaaagacccccgggatggggcttcacatttgccccccccagaaccagttcacttggccagagtgggttcttgttggccagggggcagccttgatgacccctgccgttgcccctggggggtggaataaaattccccccccaga

SEQ ID NO: 673364 - DNA, 533 bp, Homo sapiens
  misc_feature (48)..(48): n is a, c, g, or t
  misc_feature (169)..(169): n is a, c, g, or t
  misc_feature (172)..(172): n is a, c, g, or t
  misc_feature (185)..(185): n is a, c, g, or t
  misc_feature (188)..(188): n is a, c, g, or t
  misc_feature (190)..(190): n is a, c, g, or t
  misc_feature (192)..(192): n is a, c, g, or t
  misc_feature (194)..(194): n is a, c, g, or t
  misc_feature (198)..(199): n is a, c, g, or t
  misc_feature (204)..(204): n is a, c, g, or t
  misc_feature (219)..(219): n is a, c, g, or t
  misc_feature (224)..(224): n is a, c, g, or t
  misc_feature (227)..(227): n is a, c, g, or t
  misc_feature (238)..(238): n is a, c, g, or t
  misc_feature (468)..(468): n is a, c, g, or t
  misc_feature (479)..(479): n is a, c, g, or t
  misc_feature (482)..(482): n is a, c, g, or t
  misc_feature (486)..(486): n is a, c, g, or t
  misc_feature (499)..(499): n is a, c, g, or t
  misc_feature (507)..(507): n is a, c, g, or t
  misc_feature (509)..(509): n is a, c, g, or t
ttggtaaaacgggaaaagcgcccccaattctttaggtttggggatccngcccttgtttatttggtttccgcccaccccccgggtgttgggaggttttccccacacccccccttggggggcttttctgttttggaaaaaaccacccccatttggggggggtttcttcaanccntggcccaaaaggnttntngngntggnnaggtnccccagtttgccccnaaagnccnaagggttaatnaattttttccctaaaacccgccccccccctttttatccgtgggggaaaaacggtttccaaactgtttttttccattggcccctttagttttgtagttaaaagctggtttattattcccatgcctcgttaacccctccaaaggaaaggagaattttttttgggcccccttggtttttttttttggggggggccgtttttagttttttgttttttaaacccggccttttttntgggaaccccnttncccnaaatttttccccnaatttttngncccctttaaaaagttttattggga

SEQ ID NO: 673365 - DNA, 172 bp, Homo sapiens
agacggacagagacagaaagagagggccggaaagagcgagaagggagagagagagagagagagagagagcgagagagagagagcgctgtgagagagagacagaagtcgtcacacagacaggcactgtgcgcgctcacacacagacacacagagactgcacccccccaaacaa

SEQ ID NO: 673366 - DNA, 328 bp, Homo sapiens
taactcctgaagcatatttatactgtggaacggtacggaacagacaggagtatctgcagcggctgcagctgcgaagacgtggacccattgtctgtgttgatgtgttagcaacacgctgtgtcgacgatcactcgtgacagctgtgaagaagctggtctcatagtactaaatggtacgtcaacgagctcgctgggcggatagcacccgggcatattctgggactggatgaggtctggcaccctgagcagtccaagcgaggacttgggcttagttgagcaattttggctaccaggatagtatgcagcacggttctgagtctgttggatag

SEQ ID NO: 673367 - DNA, 900 bp, Homo sapiens
taacgcggacgccggatcggttctcgcccagctcggacccccccccagaagggccgactcaaaccaggcggccaagaatgtctgtcccgcgccagcaccaggaacgggaccagccgagacacgacaccccgaaagaaaggaccgaattagactcagctttgggcacagacactctcaacccaatcacaggagagccaccccggaggaccccatcctccggaatgtggcagaagcggtcatacaagctccctgaggaagaagctccctcgactgtctgtgcccagaaccgttttcactccaagacacggaaattcagcacctgttccgcgagcctgagaagaggccccccaccgtggtgtccaatacattcactgccctgatcctctcgccgtcgcttctgctcttcgctctgtggatccggattggtgccaatgtgctccaacttcactttgtgctcctgagcacgattatatttcacctgggacatgctgctatgctgggactcatcgtatgtctactaggactcagcttcaacatgttccagaccttgaaagtacctaggccatcttgggcagtgtgacgtttcctgggctggcaatcggatgctggcccagcaggcatgtgcacagaacgaacagcacattagttccagaagacagatggaaattctgaacaaactgaatgtcaagcaaaggagtccagaaccattcacagtatgagaagagaaatggacaataccaaactttactttaaaaaagaaaaaagtccagatctgtagttatacttttgcttgtctttcagtttccccaacacacagccacatacctggtgagctcagatagtctctttctctgacacatgtgtaagaagctgtgaatattcaaatccacccagatgtgc

SEQ ID NO: 673368 - DNA, 445 bp, Homo sapiens
ttctgactgcatcatccaggtattatttttctttaatttatttcttgagacagggtattgctctggcaccctggctggaatgcagtggtgtgatcatagcttactgcagccttaatctcctgagctcaaacaatctgccttcctcagcctcctgagtgcctaagactatgaggcatgcaccaccatgtccagctaacacccagattttctttttttttttgagacagagtttcactcttgttgcccaggctggagtgcaatggcgaaatctcggctcactgcaatctcagcctcccaggttcaagcaattctcctttctcagcctcccaaatagctgggattacaggcttgtaccaccacacccggctaatgttgtatttttagtagagacggggtttctccatgttggtcaggctggtctcgaactccgggtctcaggtgatct

SEQ ID NO: 673369 - DNA, 341 bp, Homo sapiens
  misc_feature (145)..(145): n is a, c, g, or t
gcactgatatagaggcaggcgcggtggcggaggcggcaacactgtggaaggcggatgcagaaggggattgggattcagggagcggctagtggataggctgaaaaaagggaagagaaccgacgtgtggtcaaaccgactaaagccnatatccacttacaggtgggcccacgagcgcggctagaagccttgatcaaccacaacgttgtaattcttgggagcttagaaactgtagagatggggatagtttcattttattgtttttctttacttttcttttagtatataagtatagggcgatagaaggctatagaaaggataagtttctatgttctattatgtta

SEQ ID NO: 673370 - DNA, 141 bp, Homo sapiens
gaaaaaaacccgggttcccccttttttggggggggggggggtttccccccccaaaaaaacccccttttttcccccccccccccccccccctccttgggccccccccttgggggctttttttgggggggtttttggggggga

SEQ ID NO: 673371 - DNA, 240 bp, Homo sapiens
agagacgagatgcaggtggcaggacatgagacagcaatggttgtatcaactatgaagcgttagtgaggcatatcctgtctggggtgagcggtgcccatggcggcggagctcgtccgtatggtgctgaatggctgatgatcttcccagtctccccagagtccgtgcctttcccttgtgtgaatttggtatctagcctaaagtttgcgtatgctttcttgtctcagcgacttaccgatctcg

SEQ ID NO: 673372 - DNA, 421 bp, Homo sapiens
  misc_feature (421)..(421): n is a, c, g, or t
aggtggtacacaaacccaggggagcaccacctgttgacccacgcgctcctcacaagcaccttgaaggcccatatgagccccatagcctgtacgccaagggtctcccattacaccctatacaagtcctgtgagttggacacgaacgcagcgtatggttctacagcacagtactttggggaagcaccacgttatggcgacttactgagattcccccatgagtgagaccggctgtgtgctagattctgtgtggagggccatgtgccatcaccatgagctccacattgagacccaatgcagaaccaagtggctttgacagagagggaaccctattgtgcaaccggctgccttgtaacttttgtgagttgtgccgagcgatgtgggccagggacatgggacagattctggtgtgagactctgcctn

SEQ ID NO: 673373 - DNA, 193 bp, Homo sapiens
tgactctagagtgatcccccacactgccatgtaatctgtatgcctgtgctgtaaatgatgtgttttatgatcaccccctccccaataaatgctaaaactcacctgagttgtaaaaaactccatgatgacacaaaatatgactactgattgactatgtgtgtgtgtttgtacctgagctctgaattctgtaaat

SEQ ID NO: 673374 - DNA, 109 bp, Homo sapiens
ttctttttatgtggtacatacattaacatacattttaccattttaataatgtaattaagtgtacagtgaagtggcattatagtacagtataaaaaaaacattttcatta

SEQ ID NO: 673375 - DNA, 294 bp, Homo sapiens
ggcgtgcctagaaaaaaaattaaattttcacttttcttacacagtcccgggcttacaacaagggcaaaaattacatgcaacacacggatacactcataagtggcacatatgccccaggggtctttattagataacaataaaggctagcacttggtcacggccatcagattttcttatagtcttagagtcatgtaaataaaagttcataagggaattaaggaaaattaatttttctaatcttagatcagtcccatagaaacctattaatttttttaaggtaggccgtagaagggc

SEQ ID NO: 673376 - DNA, 701 bp, Homo sapiens
gacaagcagttttcaggaaacttgataaaccgatcaagaacatctcagagaattgtgtcattgacagtcggtgctgtttctgactgggcacgtgggccggtccccagacccatagtagctgtgagctgtctaaggaaatcatggcattcacacacgcccatacacagccacgacagtattatccaagaggaacgattttgccacagtttgtattatatactatgtagtggcactgacaagcaagtgctgaggagtatttgaagtacgcaaaacacgtaatcgaatgctctacatacacctcgtgtcacagagcttacacatacttgcatactactgtggagagcctagttgatccaatcacaaaaagcaactgtagtcagtcgcaagaatcccctgattgatggggaaattgaacccttgaaggtttcgagaagccggtgtcaccgaggcacgtgttgtctacgcgtgctgctacgtagcgctggctatgaaggtaagtgctccgactgagagagcgaggttgcggatgcgcactgtcgtgccggggcatccgcctggactagaaccaccaacacctggagagtccgtgcaattgtctacacgttcgggatgttgttcaatccaccgtttaccaggggctccaaaaagcacccaagacttcttttgcttccaggtttgaactttaacttgattttcttaac

SEQ ID NO: 673377 - DNA, 239 bp, Homo sapiens
ctttatgatgagcacataaacagtttttttttctttttatttatctacttttacttacttaaattttagagatggggtcttgctatgttgcccagactagactcaaactcctgggctcaagtgatcctctagcctcagcctcccaagtagctgggactacaggaaggagctactgcacctgactcaatttttttttttttataaaatggactttgcctctgtgacccaggctcaaaaaa

SEQ ID NO: 673378 - DNA, 196 bp, Homo sapiens
atgtaggtcatagtgccctcaaggcactgcaaatctgaaaggagtgaatgatatgtgctgggaatacactggcatttagaggatgtaaacagggatattaaaaatcctgcaaatcagcaaggcatggtggcgcacgcctgtagtcccagctagtccagaggctgaggcaggagaatcacttgaacctgggaggcgg

SEQ ID NO: 673379 - DNA, 204 bp, Homo sapiens
tttctaaaattcccttttgattagctcgaatcagctcatctaattggactctttcctgtaactggtgttggaattgagacctggtgattccattcatactgtttgtcatattactttattgccctgaagtctggtatgtgtagtctagtgcccttcttttcattttccctttgtagcacctccaaaattcaccttaattctggt

SEQ ID NO: 673380 - DNA, 115 bp, Homo sapiens
ttggctatatccatcgcgacatcgaaacacagagagaactcagatggacgacatgttggtcagatgctcagccatcagcagcctgcccgagatcgtcttcaccatcaatggagtc

SEQ ID NO: 673381 - DNA, 153 bp, Homo sapiens
atcagacactatgattgttccataagtgccattatccatcaccaccgtgggctcgtgctatcctcacatgtggaatcaggcaccagccacattatgttccagacaaagcctggaagggtgtggacccagacgtggagtggagtgattctcttg

SEQ ID NO: 673382 - DNA, 348 bp, Homo sapiens
gctcgactttaggccaccatgtggaactgaacctttttggaggtttaaaatgtcaaaataccttgccgggcgcagtggctcatgcctgtaatcacagcactttgggaggccatggtgggcggatggcaagttcaggagtttgagaccagcctgaccgggatggtggaacccatgactactagaaatgcaaaaaaaaatggctgagcgtggtggtggggcgctgtggtcccagctactcgggagacagaggcaggagaatcccctgaactgggggagggcgaagttgcagtggagcgagatcgtggcattgcaccccagcctgggtgaacgagcgagacttcttgttcc

SEQ ID NO: 673383 - DNA, 981 bp, Homo sapiens
aggctgcggaagaggggactatgctatttcgaattgtggagtaatgtgcccctagatccttccgtgtgcatggatgaatcgggacggtgaactgaggtaatgtcgtaaatcatggatatgaagagttgagaagatccccaacaaacgtatctgaagaatgagtttagtcttaacccactctactacaaacaggtagtgggcttgcgttgatcaagggctcgggaagaggatgcgggaatcatgagtgttgatagctatcgagaaggaggatgtcggatgggtacatggtgagctcatgatacaagcgtgttgatgcgtcgacaccccgagtggacccactaaaaggatcctcgtgtggcacgacttggcaaccatgacaaggaagttcctcttggctgtttaatgacacacttcgcgtagcgcaggggctgtgatcgctggggcagcggcactgacttgaatgagatcgtaagtcgtcgcccgtgcgttcgatactattcgcgtgggtaagcctcgggggcgactccaatacgcgcatcgtctgtatgtgctacgtggggaagtttctttggcgtaaagagaattcctgtaggggcacaggaaagagggcctttaaaatctcaactcgtaccgattatagtcggggatggggaccttcgtacttgaatccacctagtcgcgtagaactctcctggatttaaacctatcttgactgtgttcgaacgacatagctggatcgcggccaccaggagtcatgcgtcgaagactaggcggttgttgctttgttgcgattcaccgagggggactgaatccgttgcatggcctcgtgggcgaacctccccttgtgtacttaattggttcgtaaatgaaaaggccccatgccttggacccaccgtgaagccatttggtgggaaccaccaaaggaatgagattacttgcccagcaaccccgaatctttagaaaccagaaggggttggggaa

SEQ ID NO: 673384 - DNA, 1646 bp, Homo sapiens
  misc_feature (399)..(399): n is a, c, g, or t
gcgtcctcgttgcctccgctgattgtcttgtgggtcgtgccattatgtctgttggctgagggcgtcttgcttctccgcgctgtttcttgttcccccttcgcgggtgtgtgtagttgtgagaccacggtacactcggtgtgtgttcgcggcgcacactgtctcagtaaacacagcggcgggggacgagcagcgactacgcctggtgtttgtagcaccccacctgttgtggggaccttgtcctctcactcaggtgtcctccggggtgagcttatgatggtggtcttgcgccgccagtttggcccacgggccgccacaacgaatattttttctgagatgccagcgtagtgctccgggtgttttcccgccgcccccagggggtgacctctcctcctggggccnccttgggtaccttcgacaggctgcgcccgcttccctggttatcacagtggttgtccttggggtgtttctcttttgccccccgttaggttgagagccccgagtgtgttgtaaagggccctttaatttgtgtctcaattttggacccttgttggtttttttggggaagcttcggccttattgtgaatgacgccgtcctgacgccccacccccggatgaacccgtggcccccggggaagaattttccccctcggtggtggcccacgcgctggcgccttttttggaaagcccacccctttccctctcccagttaaacactgtttttcgcccccaacccctttattgtgaaaatatggcgccccgtgtgagaaatatagcgcctctctggttgaaaatattgtgatcccctcccccccctctcccccttttacatttttacccttcggccttctggagacgagacatattctgtcgccctctttgggcacccccatgaagaatccctcttataaccaccccgctgtgtttttgtttgttgttgtatatagtgtcaaccacgcaatatgctcgcccaatatctccagaggcgtactctcacgaaaacatatggtgtgttggcataaattttcagacatatataagtgtgtcttcttttgtgttttataacgacacactttaattttttcccacacaccacctctaataagggggccttttttttggaccacttctcttttataacacctgctctttcttggtgttttttctttgtttaaagttttctctttataccacacttttaaatagagttttttttggaaagaccacacttctcaaggtgttatagccccacagagcgccacaagtggccactcttgtgtgtcgcctcttaaatcttggcgggcgttgggagaaggggagaaagagagggtgactctggcgcacacactaagtgtgtcgctcttgttaaactccgcacctctgttctttgataatatatccgtttgcaattgttgttaccttgcgtacccctgaggtgacctttccaggaagacctgaccttataatatttccggggtgaggtaaagtagttgggtataagatcttgaaccttttcatctcgccgagcgccaagaaaaatatttgaccttgtgacttgactgtgtgaagatgatggttccctgtttttaggtttgtataagtttccctctttgtgataagatgatttaataaatctcctttaaatatta

SEQ ID NO: 673385 - DNA, 83 bp, Homo sapiens
tgctcgaattcaagcttctaacgtttttttttttgatgctcgaattcaagcttctaacgttagaagcttgaattcgagcaaaa

SEQ ID NO: 673386 - DNA, 267 bp, Homo sapiens
ggaataataaaaggaatgatgttagataaatgtgactatcataaagaaaatgggggctgctcttccactatcttagtggtcaaccactgagcgtcagcgttgattggatagaatgatgctaattattgatcctgggtgtgtctgtagaccggtgttcgccacaaggacattaccatctgagtcagtggacttagactagctgacgcacccttaatctgggagtggcaccatctgttctcctaccagtgcagctcgcccctgagttgc

SEQ ID NO: 673387 - DNA, 482 bp, Homo sapiens
ccggctctgaacttaggacagtcttccatctatcgcttacagaattagtgtctctctgagggctcaaagtatgtaggagtgttagataggggattatagggttgacaagcagggtaatataaacatgggaaaatggggcaaggcaaatcactgaacaataagggcacaaaacatagagtcgggtcttccgttgagggcgggaaatgatccaaagggagtaaggggaagaaaatggaccgtaggaccgtgttcctcccactgtgcctgtattggggccctttctgttgccaccagtccggggcttggatagagagagatctgggtgaggtagcacagcctgttacttaggatgtgtgtgatcttactgttctgtgccacagtcgttgcaaccaagctcattgggctgttgtgaggatgacatgagattgtccatatgatgcttaccacagtgcctggcctgaggtgaggtctctgatgttcat

SEQ ID NO: 673388 - DNA, 128 bp, Homo sapiens
aaatggggtaggtggagttgagggagatggggtaggtaggagttgaggcaactgggcatggcacccacacagtccatgactaggcactcatgtagctgcatccctaaacatgtcacggacttgccgga

SEQ ID NO: 673389 - DNA, 460 bp, Homo sapiens
agtgcagctcttaatcgcgttcctcggtcggtacacccaaacgtgctgggatatacaggcgctgagccaccgcgccggcagaaaacaggatcttgtaaagacataagcacatccatatacatagcaacatcatacacaatcatcaagcgtggaaacacctaacatgtccatggacagatgaatggataagcaaaatgtggtatatacatacaatggaatattactcagccttacaaaggaagaaaattctgacacatgttacaacatggatgaatcttgaagacatttctgctaagtgaaataagccagctcacaggaagacaaatactatatgattccacttattatatgagacatttaaagtaatcaaacgcatagaaccaaaagtagaacggtggttgccaggggctgggaggaggggacaatagagagatgtcaacagatgtcgagtttcagtcat

SEQ ID NO: 673390 - DNA, 876 bp, Homo sapiens
  misc_feature (2)..(2): n is a, c, g, or t
  misc_feature (68)..(68): n is a, c, g, or t
  misc_feature (92)..(92): n is a, c, g, or t
  misc_feature (127)..(127): n is a, c, g, or t
  misc_feature (147)..(147): n is a, c, g, or t
  misc_feature (149)..(150): n is a, c, g, or t
  misc_feature (154)..(154): n is a, c, g, or t
  misc_feature (156)..(156): n is a, c, g, or t
  misc_feature (260)..(260): n is a, c, g, or t
  misc_feature (262)..(262): n is a, c, g, or t
  misc_feature (366)..(366): n is a, c, g, or t
  misc_feature (370)..(370): n is a, c, g, or t
  misc_feature (378)..(378): n is a, c, g, or t
  misc_feature (432)..(432): n is a, c, g, or t
  misc_feature (435)..(435): n is a, c, g, or t
  misc_feature (439)..(439): n is a, c, g, or t
  misc_feature (492)..(493): n is a, c, g, or t
  misc_feature (499)..(499): n is a, c, g, or t
  misc_feature (543)..(543): n is a, c, g, or t
  misc_feature (545)..(545): n is a, c, g, or t
  misc_feature (555)..(555): n is a, c, g, or t
  misc_feature (593)..(593): n is a, c, g, or t
  misc_feature (616)..(616): n is a, c, g, or t
  misc_feature (663)..(663): n is a, c, g, or t
  misc_feature (665)..(665): n is a, c, g, or t
  misc_feature (671)..(672): n is a, c, g, or t
  misc_feature (686)..(686): n is a, c, g, or t
  misc_feature (693)..(694): n is a, c, g, or t
  misc_feature (719)..(719): n is a, c, g, or t
  misc_feature (731)..(731): n is a, c, g, or t
  misc_feature (741)..(741): n is a, c, g, or t
  misc_feature (744)..(744): n is a, c, g, or t
  misc_feature (750)..(750): n is a, c, g, or t
  misc_feature (752)..(752): n is a, c, g, or t
  misc_feature (754)..(754): n is a, c, g, or t
  misc_feature (760)..(760): n is a, c, g, or t
  misc_feature (767)..(767): n is a, c, g, or t
  misc_feature (777)..(777): n is a, c, g, or t
  misc_feature (780)..(780): n is a, c, g, or t
  misc_feature (784)..(784): n is a, c, g, or t
  misc_feature (787)..(787): n is a, c, g, or t
cngccaagcagatttttcagcattgatgagaccgacagagctgcatttctactatgatttttgcttcngttcagcagcagattgtaagtganttagaataaaatgaataagcaaaagatctataacntggtaaggcataatctatcnannagcngntgagaaatttgaaatgaaggcatttgttaatacaagatgcaacgcacagcactctgtctgaggctttggtaaaaagtaaaggggaagaaagaacttgacagatntntttcaactcaaattaatggtaacgatgatgctgtttcaccaagtatattttgaattggtttctacacatttccagtagtatggcagtacagtgctctgttcatngcangctggcanatttatgtagctatgtggaatgatatgtcataatgtaaaattagataaattctnttntctnataattaatataacatttctggacttgaactctggcaagagatgccaaaaggnnttggtnccgtgttatttgtttatatgaattactttttaacaaggaatgtntnttattcattnaatgaattcaacattttctctgtaaaaacaatagagtntcagtacatgaactatagaaaanaatctatatataatgtacataaatgttacatttgtaaagaaaatgtnanaatgtnnctatagcatatganttgcttnnactgtgctgcattgttggatgacanctctttttgtcncagttagagnatnaggttnantnatgcanattatgnattgagtccncanaggnacncaaaactctttgtagttctgttacatcttttatggagatttatttatggtcagcctaccaatttaaactatttcgcttggcaaaaaaaa

SEQ ID NO: 673391 - DNA, 388 bp, Homo sapiens
ccgggacccagttatttctatgagaaggtacagtatctaggtgtcatattgagccacgaggaacacatgtgttgggctatgagaaggaagcaaggccatgtgtgcacttctaacgcccgactacccgatgaccaataggaagttttagacgcagcaacattctgccacatctggattccaagtttttgcactgatggctaagctgttatatgacgccacaaaaggaggggaaaaggagcccctcttttaaaaaactaagccaagaaataggccgtcaaacagatcaaggaagctttaacccagaccccagccttaagactatgagacataactaagtctttctatatgttcatgaacaaaaaacaatgactatcatagaaaatatctg

SEQ ID NO: 673392 - DNA, 180 bp, Homo sapiens
ctccttgaagaaaaagcaactttggactgtaggtgatgtaagtagttcgaggaagaatcaaagcaactgtctgccagtcttcctgcaaatacagcaaatgacttcacggactgctactatcggcattacaggagaggacagacgctcctacttcctgcaaggagcgaggagcgaacttcg

SEQ ID NO: 673393 - DNA, 817 bp, Homo sapiens
  misc_feature (489)..(489): n is a, c, g, or t
gtctacaaatgtaaaacaaggccaggtgcgggggatcacgcctgatcttccagcactactgggaggcacgaggtgggccaatcatgagatcaggagatggagaccatgctggccaacatggcgaaacctcatgctctactgaaaatacaaaaatcagctgggcatggtggtgcactcctgtaatcccgctacttccgaggctgaggcaggagaatggcttgaacccaggaggtggaggttgcagtgagctgagatcgcgccactgcactccagcctgggagccagagtgagactccaaaacaaaaaacaaataaagttacaccagagtcttcatgaaagatctaggctctgttaatgatcctgcttaccatgctgacgcaggacgtcctttttctactcctgcacattcaggtttagaacatgtatgaatggtgctgactagcagcacatattatgttgcgcatgaagttcaggtgctgcataactagnagtccatcctaatgactggaccggctgacctgtccttcaactgtccagcaaacgagtctaactgactagcgattaactgtttgacctaaagcaattgtatatctcttgagaaaacatgttttctgccgcgttaaccatgaataaaaccaaatacaggccgcatcctggaggatctcctgaggcgcttgcctttagagagggtaaataatgaccctcgctaactagatcggtggactcccgcctgcagtttaagcaaccggtctacttacctcaaagctgaataacggttattcacataataccgtgtacttaaggaaaaactgtcagc

SEQ ID NO: 673394 - DNA, 382 bp, Homo sapiens
  misc_feature (148)..(148): n is a, c, g, or t
  misc_feature (179)..(179): n is a, c, g, or t
  misc_feature (196)..(196): n is a, c, g, or t
  misc_feature (202)..(202): n is a, c, g, or t
  misc_feature (319)..(319): n is a, c, g, or t
atcaagctccgttcagtgacgagcagtgaagaggtggatgtccgaagagaagaccttgtggaggaaatcggagaacaggccagcccctctgcatctgctgaactgaacaaactatccagaggaacaggacagtggtgacttggcgacntattttttgaaggggttaagggacgaagacntgcatttattgttactntcgaanatttggcgtatttggcaacgtttatccctgtttacacgcggtaagaccatgaacgacgtggtctagagacagcagcctttgatttattattattggttattttattggattattacntggctaacggatcaggtacatagacccttgtttccatatctggcgcccaggatgggctttgtc

SEQ ID NO: 673395 - DNA, 157 bp, Homo sapiens
ccaatgggtcagtcctgtcaaccaacctacaagacaccacccatcccccaccctcttccatgggttatcaactggtaatgattctactaaccactcagatgttcaggccccaaaaccaggacctatcttgaccactctcttttctttactttcctat

SEQ ID NO: 673396 - DNA, 454 bp, Homo sapiens
  misc_feature (69)..(69): n is a, c, g, or t
gggccgatatccaccatatgatgcatcatcaccatggcacctcagattggcagactcctggggctcgtntcacagagtctcaccttgctgagatattggcaaaggccaaagaatcaggtgaaggtgctgaaggagaaggtagtgaaagagatctgatggggcagattattccaatctacggttatgggatttttttatacatagtgtaacattctatttaagctatcaagggggaaaccaattgcagaggattgagaatgctatactgccatgcttgaaaacacccacatgaaaataaccagttttgagcttgcacaatttgcaagaaaaactgaaggagacagaagcagccatggaaaaattaatcaccagagtgcgacctaaatggtgagagcttgccacctacagtctggatgacgaaactacccaggctataatagacagttatgtctga

SEQ ID NO: 673397 - DNA, 85 bp, Homo sapiens
gtatcagtgaacaaaatggttcttagaaaacatggccttgtggtgccaggtgcccagggcagctcttcccttctgtcgtcttctc

SEQ ID NO: 673398 - DNA, 765 bp, Homo sapiens
cagtacggtccggccgtactgggctcttatccctgaaggacaatgtcttaatgtataccgaataataaattatgatatattggaaaatccaacataattgcacactcagaaataactgaattgtgattattctcccaggcattacaatatatgatataatatgcatgtgtgttctttaagtaagtggattcttagaaaatataatgttctgttatctggttaatacactaaaacagtattgtaggtacctatatctgccttaatagcgtacaaatctgctctaacccctacccatgcataagcatactgatacatgactcaagtaacatataatagtaaactattactagtaggatagaatctatataataaacctataaaaccaacaagatataggacacaatataatcagatgaaagccgtgaacaagataacatagacatgattacatacctatgataacaagaaacaacctatacccacaggaatcttaaacaagaaaaaaatacaataaacaaatagagaaataaaaactccaatactaaggaggaagacaagacacaggacaattccacggaaaatacaatccccacaataagtataccaatagaagaacccgaaaacgagctacagaacaaaggaaaaaaatgaaatacaagacgtttaaatcggacgacaacaggcaaactacccaaagaacataggacgagtgaaacacctgaatgaaagaacacacatacttcggaataaagaaacagaaacccc

SEQ ID NO: 673399 - DNA, 209 bp, Homo sapiens
acacacacacacacacacaacccaatcaaaacaaaacaaaacaaaaaacagccatgtgttgtggcacacacctatagtcccagctactcaggaggctgaggtgggaggatcacttaagccagggagctgcagtgagccgtgatcacaccactatactccagagcaacacacccacaatcctgtctcaaaacaaagaaaaaagacaaacc

SEQ ID NO: 673400 - DNA, 157 bp, Homo sapiens
attctgtatgaggaagggacacaagttgcaagtgtgcaggatcatgacaaaaaccttcaagacctggtggagaccatgtcagaagtggccaccacaaaatttggtaaactttagatatttgatcaagtcccttgcgaaagctggcttcagaccgagc

SEQ ID NO: 673401 - DNA, 1248 bp, Homo sapiens
  misc_feature (1134)..(1134): n is a, c, g, or t
gatcaagaggcggcggaaccctccctgagcctgagggtcagaactgccctgggctcctgtagccggacctcggcgaagaagcacctgggcagacgtgcgtgcttgcggccgtggctgagccgctcggatgactgagagctggaggagctagtgctgcccgcgacgcccctgggtgggcaggctccggcggcacctgctgtggacgtctgcgtgggtggcagacgtgacatgcgggcggtgggggtgtccccaggactggctcgccctggtgtctggggcccccgcggttgcgggtatggcttccatgaaccgtgttcaacagtgtcgagacgcgtccactgtctgcttgtgcccctctcggtggtctcaaaggtcgtcctggtcagatcaagggggtttcccacttgcgacaccggctctcccatggggttctggaagcgcggtgaaccttgggtagtggcacaatctgtctttcctctcgtaaggggaaccttaccttctattcgtgctccagtctgaagcgttaagcccgccacaagggttgcacacatatgacctttagggacgacttaccataggcttgggatactactgggtggtttcctttagcacaggactccttcacacggggggaaccaagtagttcagcgtcattggtcggctcatagggtcgcataacatgacttaggcgtccttggggcccaagatgtcgtccaagtcccaataagcgttacgccatgggctctcattaccaggcacaagacacgatattaccagagagcatcagacgggcccgatagagcgaagctgactataagagccatctccagtttgttaatcaacggcacacttccaagttaacagggcatcgcagaacaacgcaaggtgctaagtattcatctcatcttgctattcgccaacttgtatactacacatgtccaacgccaacgcagggcagattggtcacgcccacccggaatcaggacaaaaacgctcgagagtcacccactggggattcccgttatttccgtgcacacggcaaggcttccagcgcagatcggtcgagaggtggcaaaaccaatagagttcaagtttcacatatcccggggggtcaccgtcagtccacagataccntgcgcagcccgctgctttgacgcgcgggcgtaagtacataacgccccgggtcggacggcaccttatagttacccccaactgtctgctgaacctgctcactgtcagcaagacacg

SEQ ID NO: 673402 - DNA, 717 bp, Homo sapiens
  misc_feature (49)..(49): n is a, c, g, or t
  misc_feature (118)..(118): n is a, c, g, or t
accaggacttccaggagacttatgcggaatctttcactttcagttctgncagtacggagagtgggtgaagtggtcattgacgacaggctgccaccaagaatggacagctgctctttcntacactcggacaaggcaatgaattctggagtgccctgctggagaaagcctatggcaagcttaatggttgttatgaggctctcgctggaggttccacagtggaggggtttgaggatttcacaggtggcatctctgagttttatgacctgaagaaaccaccagccaatctatatcagatcatccggaaggccctctgtgcggggtctctgctgggctgctccattgatgtctccagtgcagccgaagccgaagccatcaccagccagaagctggttaagagtcatgcgtactctgtcactggagtcgaagaggtgaatttccagggccatccagagaagctgatcagactcaggaatccatggggtgaagtggagtggtcgggagcctggagcgatgagtaggtttttttcccccgcttctccagtcatctctccctctgcggaagggtgtcgtgtaaaacacacaacaatgagatcgatgtcacagtgagttcagcagcacgtcctgtctgcagatcacacagtgtgttcagaaaagagtattaaatggatccaggctgggaaaagcaaaataaaaacccctgggctgtaaaaaaaaaaa

SEQ ID NO: 673403 - DNA, 730 bp, Homo sapiens
gcttactcttggcagacttatggctccctacacaccttttctcactgaattgatgtaccagaatctaaaggtgctgattgagcctgatgtactgttcagagacgaaggacacactcagcgattcactacctcatgctgccccgtgatgcgatgaagaatggattgacagagaaaacagagagtgcagtatctcagatgcagtctgtgattgagacttggaaagtaggtgaatcagtagcaccagaataaaactatttccgcataaagttatcgctttgaaaggacagactctgtggtttatccatcaaggagtccagaagctcttaaagatatcggagtctttggtaggaaggttatcctcattgaggaactcgaatgttcgaacaggttacactgtctacagatggaaccaagtatgggcattcgcgtgtaagagggcagaaccatgatcactatggtcctgtgggaagcgtcatgaagggtagcctatgtaaggtcagtggatgtacgtccatcaagcagttgagcagtgaggagctggagcagttccagaagactgggaccattgttgtggaaggccatgaattgcagcgatgaagacatccgcctcatgtacacctttgatcaggccacaggtgggactgcgcaatttgacatgcatactcgagatgctcaggctttggtcctcttgagatgtcactcctgagcagtcatggtcgatgaaggcatg

SEQ ID NO: 673404 - DNA, 1641 bp, Homo sapiens
gggagtccatggtgcctgggtgccccaatgcctgtgggctgtctgagctccccagtgcatgaccaaacctcagtggaggggcctctgcattcaggcccctgcctggctgacattcttgatgccccccatctggagtgccccagacacagacaacctgcccatgtactttcctctgtggcttgacccaacatgtgggagttctccatgtgcctagtggaacatgtgagatgatgtgcccatgtgcaccctgtgtgtaggtgttgccctgggcgaaaactgccactgcggaacctgctacatgaatgcacaaatgcattgttccaattggcctgtagagggctggccttgccaggggtgaactcggacattatgctgttgatgatggctgcgtgatgtgccatgtggctgttccatggccctcggttgcttgtactacggggaacctccttgaccctgttggtgtggcggtgatgtgcccggtctgtgaactttatcctacgatacacgcaaatgtggtttgacagcacaagtgacacactgtggcgaacaaaaattctacacaacgtgggtgtctcaaaaaacacaccgaaccatacatgtaacggttgagcactgggcgggcagcatgcactatgccaatatgggtattgaaatatagaatatggaatacattagaagagataaaatagcaggagttggaacagattgatatcccaattaagacataaacaataccaagtccacccactttgaaaccttactgaaccatcagcgctaacataggtgggtgcaacttcatttgagccatagagtatgcccatatggcagttggcacaattggggcacaaagacacacaccaaaatacttacaaccccaatttgcaaccaatgagggctgagctcactatggcaatagacaccaccacaatggtgtcgccaccaaagtgcaccttaccagactactgggatcacgacgaaccaaggcggtagagggaccacatggttgggaaacaaaagacacgcgtgcaggagcagagacccccaagaggagagcagtataaacccagtccacacattgaatgcaaggaatagatacaccccatggaaatggaacattcacactaagcacacaaagtggaccacagacaccaagattgagtcaagggcaaacagtcgattgggttaaagaatggaagtggacgcccatgtttacatggtgaaaacatactagacccccgattgaccccaataagcgagcaagccgccacgacaacatcagaacgatagatgcgcatgcagaacgaacgagacgcaaaaaaataatttacctcattagcctatggtgacaatatctagtagccagacacattgtaagaaggaggattacgaacagaacgcccggtgtaaccacaagaaccagaaagcaaagatggtacgagtgatagagcaaagagacacactgaggtagacctagtgttagtgtacacaaaacgagtctgatacatcgaccgcacgatgtagcagcctataataatgaataatacatcaaggaagacacaagcaggtacgcattcatatacacgaagaatacagatacgaagacgatacggattcaaagactaggactcatatacgacgagc

SEQ ID NO: 673405 - DNA, 134 bp, Homo sapiens
  misc_feature (31)..(31): n is a, c, g, or t
tggaggcgctctacgacggatcccagaggtngtggcagggatggataagaggtgtactcttaccgtccccggttctacctcttatccatccccggccaccgcctcatacccatcccctgtgcccaccgccacaa

SEQ ID NO: 673406 - DNA, 884 bp, Homo sapiens
taaaaaaaccccggttttgggggggggggggttttaatactaagtggaaatgatttcttttagggggaaaggcccttgggaaattaggccttttttttttgtgtccttctgcgtaacgagggagaggaacattggaacagctagaaagcaaaaccgcgaactcgggaataaacccgcggttctaaaccccagacatgcagcgtcagggacttaacatcgcgtggcaacaaagcaacaccttaaataagcgcgggcgggccccatgcgggaagtgtccggatccaccatgcggaggctccgaacaccctcaatggtggatagtgagcacactcacaacaaaatgaagaagtcggcgccgtggtaaactccccatgaggggatacactggtgtccgcggtggcgtctcaaagtcattagtggaggactccaacgtgaggagattaaatagacaagctaacgactaagtgaacagcgtgagtgtgcaaccggtctctctaccgccaagtgtcaagccgagaacccggcggagaagggctgcgaggtttaagcgcgacctcgccgaaggggctgcccgccccccaaaccgcgagaacatctattataaaaaaactgcaccagagggtacgggggaaaaccgtatacaagcgagcacccccgggggaggggtatgaggctaacaacagagaccagtgagatgggcgagcattttacacataccacatcttaacaacagcgccccaccaataaaagggcgcacctaccaacgagaacaaatggccggggagaggtacactgcgccccgcgccatcacttaacaaagcggggaacgaagcgcacacacaatccgccccgtgagggaacaaacacaaggagatcaacagaag

SEQ ID NO: 673407 - DNA, 368 bp, Homo sapiens
ttcgaagagtaagccagagctagtacacagcaggacagtgattcatgctgtcttgagtcgagtgctcacagctctcaaggagtatatgtgtggaccccagatctagcaggcagtgagtccttgtctcgaatacaactgggcaaggggtaaggtgcccagaaggagtttaagtgtaacatcaccgggtgggtattctcacttagcaacctaggcaaacgcaattaactacataaaactcattaaataacacactgctctccaacagcactggcagggatgagaggaggagagtcattttttctttctccaaagacaaaagaaagcagcaaggaggtcgggcacggtggctcatgcctgttatcccaaca

SEQ ID NO: 673408 - DNA, 108 bp, Homo sapiens
tgctccagcttaactgatattctggaggtcagcactggtgctcacgtgtctgacgtgaacttgtacagtgaggcatgcacctgcagatggtgaatacactgtctgacc

SEQ ID NO: 673409 - DNA, 348 bp, Homo sapiens
ccgttgatttggagagcaatgggcagccgggggaacaattcaaaaaccacccctcccggggtgggatccgacgggtccttttttctttataacaagctccccctggccaaaaacaggtggcagcagggggacgttttttttttgtccgttatggattagggtttgcccaacccctccacgcaaaaaagcctttccctgttcccgggttaattagttggacggccggcaaaccccccctccccggggtttttcggttgcccgaggattctttgcccgttccccgttttcattctttcccggccccccgcatggaaattaagccccccccccttcccttgggcccttcga

SEQ ID NO: 673410 - DNA, 115 bp, Homo sapiens
ctttctttctttctttctttcttttctttcttttctttctttctttctttctttctttctctctctctctctctctctctgtctctctcccctccctcccttctgtcgtcttctc

SEQ ID NO: 673411 - DNA, 273 bp, Homo sapiens
ggcatgctagacgatacgccaagtcccatcgtcacaccagacgccctgacgtcttctcaaacagacatcgccggctctcgagacctctccaccagcacagtactcaggagtcctgctggtctcccagtgctgttctaagggtccacatgaaggcaggtcatgcgggactccccgggcaagcacttctgtaccacggaacagcacgaggcgcacgtgagccctggacacggccggtcctattggacaacaggaatacttaagacgtgatttggc

SEQ ID NO: 673412 - DNA, 951 bp, Homo sapiens
tcaagcgtgcgcaggccatgacccctaacagggggcctgtcaaccctctgtaatgacctccggcctagccagtgtgatttcacttccactccatataggctccgcagactaggcctactatagacaactgactaaccatatatcacatgtatggacgcgactgtatagcgagcgaagaaagacttggcactaggcaaggaacaccgacacatcgaaactggtccgaaaagagggccgttcggaatttgggggaccttgaggtgtctgagtgttgttaggactctcgagaaatgtgtgtgttgtgtgtcggcgggagttggtgctgaggcctgtgtgtaaccacatccagacctaggctcgcctactcgccctgagatctaggagggtcgactggcccccgaaggagggcatcagcccggttaacaatcacgcgctagaagtcccagctcctaagacacattccgtgattagctcgcatgcaggaggtatcaagtcagcctgaggctcaccataggtctagtagcaaagagcaaccgaaacgcaagtaattcaaggcactgctgatgacgagattgttactgggtctctattttaccctcctacaagcctcagagtaccttcgagtctcccttcaccatttccgaggacatctacggtctcaacattttttgtagccacaggcttccacggacttcacgtcattattggctcaactttcctcactatctgcttcatccgccaactaatatttcactttacatccaaaacatcactttggttcgaagccgccgctgatactggcatattgtagatgtggttgactattctgtatgtctccatctatgatgagggtcttagaaaacaacacaacaaaacaaaaaaagagaggggggggccaaaaacccccgggggcccattcgatccctgtttttaaagggccccaagagggga

SEQ ID NO: 673413 - DNA, 863 bp, Homo sapiens
agcagctctacccctcacgacgacaaacatggcagcggcagaaggaccagcagaaagatgccgatggcggaagggctgcgtcgggcacgactcctgcttgcgcgacagcatgacttccctccggatggctaggccgaggcagctggcttggtagcggcgccgagactgagcgatccggactccttgtgagcatccttctgtggaccatgcagtcgcttctcacggccccgcaaccttggggagagctgtgccattcgtcctcatacgtcaagcgtggtagtactaccagaggcaactatgtgttcggtgttccgtggggcctcatcctgtactgtgtggtgacgtcccctatgcttgctggtggcgtctggcgtgtctttttcggcgcctgttacaattcgtctatctgcgcaccttgggagtccaagtcttggtgctcgttttggccgagaggtgagcccagcgcttcagtatgctctggctggaggctgtctccttccccttcttcgtggctggctggtgcgggctcggccggcttctgggtgctgggagccaccctggtggtcatcggctcccgcgctgccttccaccagattgagggctgtggacggggaggagctgccgatggctccctgtgtgagggtgtcttctgggacctggcggcctcccggggccaggtgccccagccgtgcccatgcctgtcctgcacggctcgtgctgctcgggcccacagacgccgtcccatcacaagcccggggagggatcccgcctttgagactaagctggaatgggatgtcattcaggaaaacacaaagaaaaaaaaaaagaagagatcactcgagaataacccagaagggcgacaa

SEQ ID NO: 673414 - DNA, 196 bp, Homo sapiens
taccattgcttcctccagctctgtcagaaacctggtggctgatatccgcagggatgtcaacgtcgcattcacaggatcacactttcggcacctatacatgcacattggccttgtaatcatcgttccggcccaccccttatgctttaaaagtctggttgtccatcccattgctctcactgagtgaaggcacataaag

SEQ ID NO: 673415 - DNA, 156 bp, Homo sapiens
tttttttttttagctcacatgctattgttagtgttagtttattttatgtgtggcccaagacaattcttcttcttccaatgtggcccagggaagccaaaaaactggacactcctggtatagatggtgtggctcattctgctcatccttctgtcgacg

SEQ ID NO: 673416 - DNA, 371 bp, Homo sapiens
caggatgccatcaaagtctactgcaatatggagactggtgagaccagcgtgtacgcccactcagtccagatgtggacaagaagaactggtagcatcagcaagaatcccaaggacagatgaggcatgtctggttcggagtagagcatgacacgatgtgcatatccagtatcgagtatggtgagacagggctccgaccctgccgctgtgcgcataccagctgaccttcctgcgcctgatgtccaccgaggactcccagaacatcatcgtaccactgcaaaggcaacagagtggcctacatggaccagcaaactggcaacctcacagaagggcctgttcctccagggctccgaagagatcgagatcagtgcgag

SEQ ID NO: 673417 - DNA, 301 bp, Homo sapiens
ggaagacagtagaggatccccgacaggctccccagggacgctccaacgcgctgcctgaccggcttaaaggggctgacataggtgcccggggggtgtgacgcctcccatccggttcagacgcgcttggcgaggaactctgaccttgaggagatgctctgaacagggaaagtttagagtgagggttgacatttcacatttagcatgttggttaacaacttttcacaagccgaccctgactttcaggaagtgaaatgaaaatggcagaatttatctgaagatccactatatagaaatggaaccc

SEQ ID NO: 673418 - DNA, 168 bp, Homo sapiens
ggaattcagccggttcgccgcgcgcaacggagcttcgaagacggtgccgtcgatcagcttgccggtgtagtgaacgcgaacgcggtcagtacgcgccgggatcgggccttcgccctgggtcagaacgcggaactgcaggccagactcggtgctgttcacgccttcgcg

SEQ ID NO: 673419 - DNA, 1002 bp, Homo sapiens
aaattaggctaggtacgaggctgggtttgaatcggccgagggttaacgccggtcggaactgctccggagggcacgggctccgtaggcaccaactgcaaggacccctccccctgcgggcgctcccatggcacagttcgcgttcgagagtgacctgcactcgctgcttcagtctggatgcacccatccccaatgcaccccctgctgcgctggcatgcgcaaagccaaggaagccgcaggcccggcccccgtcaccccatgcggggccggcaagccgagtcccactaggctgccggctagggactccgtgggcctgaacgtccgtggcaaaatccacgttccaagggttcagaccacttcctagcaaacctggcggtgaccgcgtatatcccccatcgcagtgctgcccagatggaggtggccagcttcctcctgagcaaggagaaccagcctgaaaacagccagacgcccaccaagaaggaacatcagaaagcctgggctttgaacctgaacggttttgatgtagaggaagccaagatccttcggctcagtggaaaaccaacaaaatgcgccagagggttatcagaacagactgaaagtactctacagccaaaaggccactcctggctccagccggaagacctgccgttacattccttccctgccagaccgtatcctggatgcgcctgaaatccgaaatgactattacctgaaccttgtggattggagttctgggaatgtactggccgtggcctggacaacagtgtgtacctgtggagtgcagctctggtgacctcctgcagctttgcaatggagccgctggggaatatatatcctctgtggctggatcaaagaggcactacttggtttgggcccagcgtcctggttcagtttggattccgcgcgaacggttccattacagactctgccgatgctcctagctgaacctatcgacatggtcagttggctccccctatttggtaaacagtcccctgtgccccaaat

SEQ ID NO: 673420 - DNA, 965 bp, Homo sapiens
aaattaggctaggtacgaggctgggtttgaatcggccgagctccgtaggcaccaactgcaaggacccctccccctgcgggcgctcccatggcacagttcgcgttcgagagtgacctgcactcgctgcttcagtctggatgcacccatccccaatgcaccccctgctgcgctggcatgcgcaaagccaaggaagccgcaggcccggcccccgtcaccccatgcggggccggcaagccgagtcccactaggctgccggctagggactccgtgggcctgaacgtccgtggcaaaatccacgttccaagggttcagaccacttcctagcaaacctggcggtgaccgcgtatatcccccatcgcagtgctgcccagatggaggtggccagcttcctcctgagcaaggagaaccagcctgaaaacagccagacgcccaccaagaaggaacatcagaaagcctgggctttgaacctgaacggttttgatgtagaggaagccaagatccttcggctcagtggaaaaccaacaaaatgcgccagagggttatcagaacagactgaaagtactctacagccaaaaggccactcctggctccagccggaagacctgccgttacattccttccctgccagaccgtatcctggatgcgcctgaaatccgaaatgactattacctgaaccttgtggattggagttctgggaatgtactggccgtggcctggacaacagtgtgtacctgtggagtgcagctctggtgacctcctgcagctttgcaatggagccgctggggaatatatatcctctgtggctggatcaaagaggcactacttggtttgggcccagcgtcctggttcagtttggattccgcgcgaacggttccattacagactctgccgatgctcctagctgaacctatcgacatggtcagttggctccccctatttggtaaacagtcccctgtgccccaaat

SEQ ID NO: 673421 - DNA, 836 bp, Homo sapiens
  misc_feature (836)..(836): n is a, c, g, or t
gccgagggtccaatcaaccctagaacccgcgtcacggtccgggttttcagcaatacccaccaaccggaagggccaagcgagaggggtcttcactttttcccctcctacagtgtataattgtcccggaaagctaaaggctaagaggctatctgggaagctcatcatccagctcaggaagagatgaaaccaggaggcaggagaatgtcaggcatgaccccacacttgtgcaacagccacgtcctgctcctgccattagcatggctcatccgaggcccagccccaggatccatacaaagtgtgttcctgctgctggcttctcatctgctctgcttcctaagggacgtatctgttgctgcgtctgaacccacggtttatcgaaatcccaccaagatgtcctgccagcagaaccaacagcagtgccagccccctcccaagtgtcctatccccaagtatcccccaaaatgtccctcaaagtgtgcatcctcatgcccacctccaatctcttcctgctgtggctccagctctgggggctgctgtagctctgggggctgtggttgctgcagctctgagggaggtggctgctgcctgagccaccacagacaccataggtcccactgccacagacccaagagctccaattgctatggcagtggcagtggccagcagtctgggggttctggctgctgctctggagggggctgttgctgacctggaccaggagcagcaccaaaggaattagtgggcgaaggacccattgcagcctggtgttttacctccttcactctcttgcctttcctttctggagccccatcaattaataaaagcagatcggcagn

SEQ ID NO: 673422 - DNA, 199 bp, Homo sapiens
gagagagagactgtatgttgagtgtcagatcagggtattgaggtgagacagtgacgagaggttcttgttcgcagtgcctcaggatgttatgtgagtggtctgagttattcaagctgatgtggcgagtcgagattcatttgcactctgacagtcatgtggtggcacctgcggtcagttctcttccctcaggtacgagtcg

SEQ ID NO: 673423 - DNA, 131 bp, Homo sapiens
ggtaaaagataatttaatttcagctcctcagtcacactagctgtattccaatgcgctctagtagccacatgttactagcagctactctattggacatgtgcgggtgcggaggtattcctatcaggcacagg

SEQ ID NO: 673424 - DNA, 349 bp, Homo sapiens
  misc_feature (19)..(19): n is a, c, g, or t
  misc_feature (59)..(59): n is a, c, g, or t
  misc_feature (157)..(157): n is a, c, g, or t
  misc_feature (189)..(189): n is a, c, g, or t
  misc_feature (212)..(212): n is a, c, g, or t
  misc_feature (251)..(251): n is a, c, g, or t
  misc_feature (265)..(265): n is a, c, g, or t
cccccttttgggttacttncccctttccaaggaaacttattcttccaggcccatttccngatttcccttaggaatgtatgtgttaccccataattgacccacttcaaacttgtaagaaaaaaaatgttatggtccattttgttatttttagagaccnaagtatttctaatctaggtttgcatacaaccntgaggctgtgagatcattagtcnattgctttaattataagccctgttttttttttaaatctnaaaactaatacccnatctataagaattataacagattattttcttcattaaattactttgtaatcaagttctagattaaatgtttaaacatgcattaa

SEQ ID NO: 673425 - DNA, 1712 bp, Homo sapiens
  misc_feature (75)..(75): n is a, c, g, or t
  misc_feature (296)..(296): n is a, c, g, or t
  misc_feature (319)..(319): n is a, c, g, or t
  misc_feature (323)..(323): n is a, c, g, or t
  misc_feature (800)..(800): n is a, c, g, or t
  misc_feature (1208)..(1208): n is a, c, g, or t
  misc_feature (1241)..(1241): n is a, c, g, or t
ggggcatgcgttgtcggggctcctgggtagtgaggaggtcgccgctgccgagcactgcctgtgcttcatggaggnagagagtgctcgtccgccggtctcccggcgatgcctggtctgggcgctgtctcagaaggccggacaagagtcaggagatggctgagtagccatcgccgataactttatgctagaatgcagtgcatagcagtgttgaaacactgtaaggaacactgatgggaccctttcgaacctgtgtcctgggaaaaggtagaaggcacgcgtctcgtgatacgagcganaacgagatgtcatctacgctagntggnaatgcgtacttggagcctccagatataacctcaacgagggtagtgagtcgcatgcacctggatcatccgactcgggagacttgggaagttgtggcagacacgccaaggcatcctacgcctaggtacatgagaacccacgcataccacatctcattgtcccgtcgcggtctctcttacgttcgaacgtattgcttgtgtgcgatcgtgatccaagtgcagagcctcttgcatggtgttggggccccatggggcagggcccaggggcgcaattgcctaaaacgcgcccaagacaagaaagcccgaaactttccgaggtcaccatggcgcttatccctgggggcttcaacagagtttcttatccaactttttccacgcgccctgggtgggccccttgtatacccggttacctggtatgcaacaaagtgtacgtacgacccactagaagctctttgagccatggaggacgccgacataccncaggtgggaccgcggtttgtgagttgcacataatacatggtgcgcgagaaccgtcgcaagggcatcgtccgcatgtgcctggcaacttgattacttgttccgcaaaaggcacaccgtttttctaaccgggggggtggcgccccaagtggggcgcacctcgacttgggggataagacagcccaggtggcttgtgccccccccttggtgatgggaaccggcctttggcgtgggacattttgggttcgtaacctttaagggcgcccttggttcacaacgccttatgttcaaacactttgtcggcgggacacaaccacgccaattgccaagggtcgctttccattgcccccattgggaaacgcgttctctccaatttaattaggggcacggaacaacaagagtatgagacancttgaacactttaaaaacccccagaggtggtgnacacccacggaccacgtcaattttttgcgccgggaaaagaagaggcctgtattcaaacccaattagcgggcatctgggtggacgcacaagcgatcgtgctcacgcggccgggcggcgacacactattgtttgaccaccctgttctgacggtacgactttcccctattcccctattggctctgtgggtgtgggtacggcaaaaacctatataacttgcgccaggcgtcaacatcggccggccacagcttggggttgtacaaacaccgggcggcctttggcttttacggacaccaactaaaatgcccgtggacatgcgctctcactagtacaacattggcgcattttatatgctacaagcgcagcagccgacaagaaaaatgtgccgaaaattacaaccatgttacccttaggggggcgattgcagcacccaaacaggttgcgacctccgcaccacctggcggagatccatcc

SEQ ID NO: 673426 - DNA, 1080 bp, Homo sapiens
  misc_feature (37)..(37): n is a, c, g, or t
ggagatagttccttcgggggcgcatcccctgttgctngcccaattgcgtgggtccgccgccactcctccgccgccaaaagaattagtcggttgttcttctcgtcacaccacgggggtactctcgctccacgcctccaggaagattgccgcggtttgacgccccattatgtttcccgtgcgccaccataggggcggtgtttgtatagtattgtaaggagataatattaggagagagaatagttgtggccccccgctttggggccccagaaatgggccccacacacacacgcctgctcagtagcgggtattagacgctttctctactgtgatatacttttgggggaaatataacgcccttcttcccgagataaaagagacatgtgtgtcccctctgaggagaaggcttttggtagattactctcagataaatatcacgcgcacctcggggaagtactgtgttcgaaggagacctcttctgtgttgtgctcgagagtagtattgtggggaccccctcttgtgtgtagtattggagagagtgtaaaacactcggtgtggccccccctctggagtgagtgtagacaccctgggtgctcacggggcgctgcgagagtgtgtgtctctctgcgagagtcttgtctctctattagagagggcttcgggccacacagagacacccacctttgtgtgtgtgtgttgtcttttctcgggggtgtctctgcacacggggtgtgtggagaaagtgtcccacacacccgctgaggggagaccccacgtgtgtgcgctctttctctatagctgcagagatgttctcttgggcgccacagagaccacccgctcggcgctcgtgtacacttgcgtcgtgttgaagttggaaaccgcggtttgcactttagcgccccggtaaaaggattcacatttgttaaatttaatgttaagggtttttttgtggacgccacattgtctcgaatttctttgaagagatgaccacaccacaattttggttttttactgtcatcgtgagaaccttaggcccccagccacacgtccttgtgtaaggaaaaattaaagtgctgcccgtta

SEQ ID NO: 673427 - DNA, 94 bp, Homo sapiens
cctcactcccgctgcttgcactcccggatggtgctgactgctccctaagcggcggcggggcgagtcgtgaggaccgcgcggaggctgttcgggg

SEQ ID NO: 673428 - DNA, 719 bp, Homo sapiens
gccactctgcatcaactgaacgcaaatcagccacgtttaacttaagcgtaagcccttacgtagaccaagtgggacgttaaacgccacaagaacactgtagttaaacagtcctagagcaccctaatcaacctgggctgtcaatctacttctcccgccgccgggaaaaacgggcgggagaagccccgggcaggttggaagcttgcttcgttcgaattgtgcgaagttcgaatagtgacaaagtcacctcgagagtctgtgtaaaatggaggccgtatactcactctgctctcttagcatgttacatgtaccgagatgtcttcagcattcagtccgatttttatccctctagcgcgcgcgcaacttgtactggtatcgggcactgaaccccagttatgagcatcagtatcttcttgacaagatcgcaacgaaaaagacgaattcggatagcaacgtgaataacgcgtactttactatcggtgccgcaggtgagtcttggaggtccctaagggcgaacaacgtcttctaaagggcccccatccgtttaatgttcggaagagcgctgatgccttgggtggccagacgcaaagggcgagaccgcggtctcatacagggcttaaatcagaagccgagcaagtccgttatccaaatcccgctttgagttccggtcgaactacagatccccaagtggcaatctctggtaaaattaaattcatgtcctg

SEQ ID NO: 673429 - DNA, 547 bp, Homo sapiens
  misc_feature (28)..(28): n is a, c, g, or t
  misc_feature (41)..(41): n is a, c, g, or t
  misc_feature (79)..(79): n is a, c, g, or t
  misc_feature (106)..(106): n is a, c, g, or t
  misc_feature (123)..(123): n is a, c, g, or t
  misc_feature (126)..(126): n is a, c, g, or t
  misc_feature (207)..(207): n is a, c, g, or t
  misc_feature (230)..(230): n is a, c, g, or t
  misc_feature (316)..(316): n is a, c, g, or t
  misc_feature (350)..(350): n is a, c, g, or t
  misc_feature (402)..(402): n is a, c, g, or t
  misc_feature (409)..(409): n is a, c, g, or t
  misc_feature (426)..(426): n is a, c, g, or t
  misc_feature (430)..(430): n is a, c, g, or t
  misc_feature (472)..(472): n is a, c, g, or t
  misc_feature (510)..(510): n is a, c, g, or t
ggggggggattcccaagaaccctggttnacccggtaggaanaataattaggaggggcaacattaaagattactggatgnggagaattcccatgaacccttggtttnacactgtaaggacagantanttcagcatgggaacatttacagaccactggatgatgaagaattcccatgaactcctggttccaactgtaaggacacattanttcagctgtagcctgaagccgcntccttacatactgtaagtttagcctataggtttctccatacgtagtgaacagtcatctaattggatgtgtggacactgtaacttantcttgaatcagtcacaggcagcagcacttcaaantctgtttcaataagccagacacgagctgtagccaccctgctgtttgcaggcntcacttntgctttttgtgcctcantccnttttctgtccgtaagtctttggccacacagtggcactgggtntttctgagcttattttggtttgagggttccctgattcntgaatcattctttgctcaattaaactctgtaaaattt

SEQ ID NO: 673430 - DNA, 291 bp, Homo sapiens
ctgaaggcgtttaggccacagactctgctgagaaataaagatcgcatgtaggatgcgcatgtcctatgtgttgtcatgtccttacggaatcggcccagcatcttcacagcagatgaggaacagaatggaacacacagttgcttcctattaagtgattttcactcttctagtcacaggcttcacagggttctatatttacacttttctatttgcagcagtcctactatctctggaatgtactggccgtctttacaaatactgccttattttcttcatagcacttaacaatat

SEQ ID NO: 673431 - DNA, 160 bp, Homo sapiens
ctggtaaagtcaaagctgcgtatgcccaaggtcccagtataccttctaggtatatccctagagaagttgttggccatgtgagcaccagaatacatggcataaatatttgtagcagcattgttcataagaatcaaaaactaagaacgactcaggtggtgtg

SEQ ID NO: 673432 - DNA, 240 bp, Homo sapiens
ccacgcgtctttcagtgctccttcaacccacagcctaaactgcaacttgcctcttatcctacttctctacttctggttagaaccttgaagaacactaacaggctgggcgcagtggtcatgcctgtaatcccaacacttggggaggccaaggtgggcaaactgcttgagaacaggattttgaaaccagccttggcaacatggtgagatctcatctctactaaaaatacaaaaaattagcca

SEQ ID NO: 673433 - DNA, 272 bp, Homo sapiens
tgtatcccccgcgggcaatatcctgttctacactggaaactcgcgcacgagaactgcttgaacccgggaggcggagcttgctagtgagccaagattgcaccactgcactccagcctgggcgacagagcgagactctgtctcaaaaaataaagaataaaaaatttccaggcaagagtgcagtagcatgactcgtagctcactgcagcctcaacctctcaggcccaagcaatccttgttgcctcggcctcccgagtttgcttaggataatctgc

SEQ ID NO: 673434 - DNA, 353 bp, Homo sapiens
taggcaatagagcaagactgtgtttcaaaaaaaaaaaaaaaaaaaaaaaaaaggatgagttcatgtcttttgcagggacatggatgaagttggaagccatcatcctcagcaaactaacacaggaacagaaaaccaaacaccgcatgttctcactcataagtgggagttgaacaatgagaacacatggacacagggaggggaacatcacacaccagggcctgttggaaggttggggggtgaggggagggaacatagaggacaggtcaataggtaaagcaaaccaccatggcacatatatacctatgtaaactgcctgcacattctgcacatgtatcctggaacttaaagttaaa

SEQ ID NO: 673435 - DNA, 922 bp, Homo sapiens
ttcccgcagaaataggacgtgtaaaaaccctggtgatgccgcccgacatttggggctacaaacgtctgggagataaaaatcggtggggccgtgttaaaccacccccgcggacgtgcggagagtgcctggggccctgccctgagacacctgccgcagaagggcacgcaacaatgtaaaaggccgtcgctaattctcgtaagggcgccccccccccctgcttcaccgcgccttaggaaattgtcccctcggggccgtaaaccgccaagccagccgttggtaggggctaacaagccaagaaggcccataatacaggggtctttccaagaggcggtgagcaaaaacaaaaaaagcttgctataggatagaccagtccaaaggccaaaaccatcaaggagcccatgtgaacaacaagggagtagcctcgccttctggttacaggcgagaaaacgacggtgcccacactttcaagaagagagtggtcgagaacccacctattaggagttagccaagaagacaggacaggcccacacctagccgcatcattccaatcagcgggcgtcggtaagagctcgatagataagggacccccccccccgaatactaccgttagagacacttctctttaaaatcgatggatcacgaccttgggtaacaccgagcacccattggtacaggttgcgaagactaggagtcttcaaattaatcatcggggtgcaatcttataataaggtgggggatcaaaaatattatagattctctataatattcctaaggactccatgacaaattatggtcgacgagtgactctataagcttaggcaaggataaattggatggacgaattctaaaaggtgctgataaacagcccaattttgaaaacaaagacatagaaaaatatccctaaataaccggcacaaatcaa

SEQ ID NO: 673436 - DNA, 389 bp, Homo sapiens
  misc_feature (46)..(47): n is a, c, g, or t
  misc_feature (115)..(115): n is a, c, g, or t
  misc_feature (149)..(149): n is a, c, g, or t
  misc_feature (153)..(153): n is a, c, g, or t
  misc_feature (169)..(169): n is a, c, g, or t
  misc_feature (195)..(195): n is a, c, g, or t
  misc_feature (218)..(218): n is a, c, g, or t
  misc_feature (233)..(233): n is a, c, g, or t
  misc_feature (267)..(267): n is a, c, g, or t
  misc_feature (276)..(276): n is a, c, g, or t
  misc_feature (283)..(283): n is a, c, g, or t
  misc_feature (291)..(291): n is a, c, g, or t
  misc_feature (295)..(295): n is a, c, g, or t
  misc_feature (297)..(297): n is a, c, g, or t
  misc_feature (303)..(303): n is a, c, g, or t
  misc_feature (331)..(331): n is a, c, g, or t
  misc_feature (338)..(338): n is a, c, g, or t
  misc_feature (341)..(341): n is a, c, g, or t
  misc_feature (358)..(358): n is a, c, g, or t
ctttcatttaccttttttggcaaaaaggagccttttgctctctgtnnccctaagagccccctgcacagggaaaattgccccctccagacctggctcccctcttgatctctcttgncctcttctgctcttttcctggggctcctttttcncggnggggtgtgggtaatanaacaaccgtgggcttttggggacccntaacctttttttctctcttttgnttataaaaaaccctnaaccttccattcccgagaacccaaaatccccccntccccccgnaccctantaaggggnttgngntttgcncccaaccctttctcttttccttctgtcntggtaangcntttaaaaaccaatgagntttttatataaataaagtttttaaagtgtga

SEQ ID NO: 673437 - DNA, 154 bp, Homo sapiens
gtatgtacggaaagaagatatgacctatgcagtgagaaaactggataacactaagtgtagagactcatgagggcgaaactgcctacatctcgggttaaagttgatgggcccagaagtccaagttatggaggaactcggtacacgaagccgttag

SEQ ID NO: 673438 - DNA, 193 bp, Homo sapiens
ccccctaactgcattcatgatgcgaggctgaggggtgtgtcccaatctagcacacaacgccacttggcgaagtcagctccgtccttcttgtacttgggcacagcgctcagacatgccatccaacccttgagtggtagtctcgcgatttgtccctgccagtggtaccacgcccttgtctaccttgatgcccaca

SEQ ID NO: 673439 - DNA, 139 bp, Homo sapiens
cgatactgctctaacgggtcagaaggcgccagagaggaaccagctgactgagccttgctcctgggccctgctcccctcctggctgcagctgcaccaaggttctcattagcaggtgcccccgtctagtgagctgtaatct

SEQ ID NO: 673440 - DNA, 289 bp, Homo sapiens
aagggccaaaaaccggtttgttttttttttttccaattttgggggccccaccccctttttttttgggccgggaaagtttccttttttttaaaccccccccccggggggggggcttttttaacccctttttccccgcccttttttgaaagggggttcatgtgggttccccttcccccccggggtttaaatcatttacgggccaggttttctttgggggggggggatttttggttcttcttttaaccctttggggcctaaataaatttttttaattccccggggggcccca

SEQ ID NO: 673441 - DNA, 190 bp, Homo sapiens
  misc_feature (63)..(63): n is a, c, g, or t
ttcacactgggtcgagtcttagaaggctgttagcaaaggcgatcaaaactgcgtttccttacnacaaccatcatgtgatgacaggtgggctttttgcttggtgcttccaatatgtctagaagaaaacaccccattattaaaattaatctttaaccatctaaaagggattcaccattttaaaggttttttc

SEQ ID NO: 673442 - DNA, 240 bp, Homo sapiens
  misc_feature (74)..(74): n is a, c, g, or t
agatatttaaatgttcttattctgaaatgcaattctgtaaaaactactcctaaagacaagattagaaaatttcngccaggctcggtggctcacatctgtgatcccggcactttggggggctgaggcggacggatcacctgaggtcaggaattggagaccagcctggccagcttggtgaggccccgtctctactcaaaatgcaaaagttgaccgggcgtggtggcacccgcctggtggcca

SEQ ID NO: 673443 - DNA, 436 bp, Homo sapiens
aggttcctgccttcatgtgaaggagtgaaagaggtgcatctcaattctctgtgttgtgtggtttccagacccttgtttcagttctccatgagggcctttaataagttttaattggtaattctttggatgtagaaataacccaacagccagacagggcacagtggcgcaagcctgtaatcccagcgctttgggaagctgagttgggcagatcacttaagatcaggagttggagactggcctggccaatatgatgaacccccatgtctaccaaaacatacaaaaattagcatggtgcgggggtgcccgcttgtaattccagcttcttggaaggctaaagtgggagaattgcttgaccctggcaggtggaggtctcagtgagccgagatcgcgccactgtgctccagcctgggcgtctcagagtgaggctctgtctaaa

SEQ ID NO: 673444 - DNA, 233 bp, Homo sapiens
taattctctactggtttttaaaactggcattatcttccctctatttctctcctcaggctctctccccccacacccttcccttttctggtggctggcccctcacccgccctcggccgagtcccagggtggtagattctgtctggtcgggaagcccaggcaccaggcatgcatgggttttggcacacaggcaggggcatgctggctctgcggccacacaaggtctaatcagggtc

SEQ ID NO: 673445 - DNA, 244 bp, Homo sapiens
ggacagaaatccggtcactaccgtctcaagcaactgcgggtcaggaaggaaagtttttctcccttttgaatccgctatcgatcagtcaactgaatgaatgtaatgttgcaatgaagtaatattggcatgtgtaaaataagcagctgaattggttgcgagcgctagtaaaaggccagcgtttaaatcgttgttcggagctccttctactacttttttcgttgatggatccacagtcgcatgacac

SEQ ID NO: 673446 - DNA, 454 bp, Homo sapiens
  misc_feature (355)..(355): n is a, c, g, or t
gacctgaacaagtactgagaaagctgctagcaaaataggagcttctccagcatgggcaacatggtgaaaccctgcctataccaaaaataaaaaaattagccagacttgatgggagcctgtagtcccagctactcaggaggctggggtggagaacggttcgagcctgggaggtggaggttgccgtgagccaaggtcacgccactgcactccagcctgagcaacagagagaccctgtctcaaaaaagtagctgggtgtgatggctcatgcctgtaatccaacacttaaggaggccaaagtgggtggatcattcaaggtcaggagtctgagaccagcctggccaacatggtgaaacantgactctactaaaaatacaaaaaattcacttggtgtggtggccggcgctgtagtccagctactcaggaagctgaggcaggagaatggtgtgaaccggga

SEQ ID NO: 673447 - DNA, 187 bp, Homo sapiens
tggacatcgcgagcttcatcaccaaaggtttttatttatttatttttagtagagacaggtctcactatgttgcccaagctggtctcaaactcctgggctcaagtgatcctcccaaagtgctgggattacaggcatgagccaccgctcccggcctgtttgtttgtttcttgatggaagcgtcgcgcat

SEQ ID NO: 673448 - DNA, 1706 bp, Homo sapiens
  misc_feature (97)..(97): n is a, c, g, or t
cgacgctaacgggctggcactcgcggtcccacgtggctcaggacaccctttcgggggcgtgtctcccagttctagaggttcccagagaagaggaggngctcactaaccaggcagctcgcccagactccgggcagtgagagggagggagcgccggccgcgggagcgggatggaaaccagcagcccgcggcccccgcggcccagctccaacccggggctgagcctggacgcccggctgggcgtggacactcgcctctgggccaaggtgctgttcaccgcgctctacgcactcatctgggcgctgggcgcggcgggcaatgcgctgtccgtgcacgtggtgctgaaggcgcgggccgggcgcgcggggcgcctgcgccaccacgtgctcagcctggcgctcgcgggcctgctgctgctgctggtcggcgtgccggtggagctctacagcttcgtgtggttccactacccctgggtcttcggcgacctgggctgccgcggctactacttcgtgcacgagctgtgcgcctacgccacggtgctgagcgtggcaggcctgagcgccgagcgctgcctagccgtgtgccagcccctgcgtgcccgcagcctgctgacgccacgccggacccggtggctggtggcgctctcgtgggccgcctcgctcggcctcgccctgcccatggccgtcatcatggggcagaagcacgaactcgagacggcggacggggagccggagcccgcctcgcgagtgtgcacggtgctggtgagccgcaccgcgctccaagtctttatccaggtgaatgtgctggtgtccttcgtgctccccttggcactaactgctttcctgaatggggtcacagtgagccacctgctggccctctgctcccaagtgccgtccacttctaccccgggcagctccacccccagccgcctggagctgctgagtgaggagggtctcctcagcttcatcgtatggaagaagacctttatccagggaggccaggtcagcctggtgagacataaagacgtgcgccggatccgcagcctccagcgcagcgtccaggttctcagagccatcgtggtcatgtatgtcatctgctggctgccgtaccatgcccgcaggctcatgtactgctacgtacctgatgacgcgtggactgacccactgtacaatttctaccactacttctacatggtgaccaacacacttttctacgtcagctcagctgtgactcctcttctctacaacgccgtgtcctcctccttcagaaaactcttcctggaagccgtcagctccctgtgtggagagcaccaccccatgaagcggttacccccgaagccccagagtcccaccctaatggatacagcttcaggctttggggatcccccagaaacccggacctgaatgtaatgcaagaatgaacagaacaagcaaaatgaccagctgcttagtcacctggcaaagcaggtgagcaacctcatcactaatcattcaagcttcgcagccagggcgacttctatcaacccctgctctgctgagaaccatcaagcgcagggaagccacgtgacccctcctagcctcaggctccctcgtctgtgtagtggagataaagaacagcacccatctcttagtgttgcctgagactaaagtgcttagcacagaacctggtgcgtagtagatgctcaataaatttttgctggcacgaaaaaa

SEQ ID NO: 673449 - DNA, 612 bp, Homo sapiens
  misc_feature (31)..(31): n is a, c, g, or t
  misc_feature (304)..(304): n is a, c, g, or t
  misc_feature (375)..(375): n is a, c, g, or t
  misc_feature (428)..(428): n is a, c, g, or t
  misc_feature (474)..(474): n is a, c, g, or t
  misc_feature (517)..(517): n is a, c, g, or t
taatatttttatataacaaatttatattcanattctttatttttctatgtttgtgtgatatgtttagatgtttgcagcttctagttgtctacattaaagttgagatagatatggagaaatccagccccactccctctggaacaggaaagatgactgtggtgaggaaacacaggttagcatgtggaacaggggttacagtggacacgggggtgggctgtttcttcacctcctcacattatgctaacagggacgcagaaacattcaggtgcctttgcagaaagagatgccagaggctcttgaagtnacaaaggggaggagtgaagaaatcctgcatctcagttcctcacaagacagcggtgtcaggcttttcaagcngtgagagaaacatcagagccctgggcactgtggctggacgcagcctgagagtngctccctccttttccacctgagcccttcctcctacacatcacagtngcgaccacagccccgatgaccacaactgccaggacagccaggncagccacaatgcccacgacggggatggtggactgggaagatggctcccatcttagggtgaggggcttcggcagcgcctcatgctgtacatggcat

SEQ ID NO: 673450 - DNA, 1652 bp, Homo sapiens
  misc_feature (97)..(97): n is a, c, g, or t
cgacgctaacgggctggcactcgcggtcccacgtggctcaggacaccctttcgggggcgtgtctcccagttctagaggttcccagagaagaggaggngctcactaaccaggcagctcgcccagactccgggcagtgagagggagggagcgccggccgcgggagcgggatggaaaccagcagcccgcggcccccgcggcccagctccaacccggggctgagcctggacgcccggctgggcgtggacactcgcctctgggccaaggtgctgttcaccgcgctctacgcactcatctgggcgctgggcgcggcgggcaatgcgctgtccgtgcacgtggtgctgaaggcgcgggccgggcgcgcggggcgcctgcgccaccacgtgctcagcctggcgctcgcgggcctgctgctgctgctggtcggcgtgccggtggagctctacagcttcgtgtggttccactacccctgggtcttcggcgacctgggctgccgcggctactacttcgtgcacgagctgtgcgcctacgccacggtgctgagcgtggcaggcctgagcgccgagcgctgcctagccgtgtgccagcccctgcgtgcccgcagcctgctgacgccacgccggacccggtggctggtggcgctctcgtgggccgcctcgctcggcctcgccctgcccatggccgtcatcatggggcagaagcacgaactcgagacggcggacggggagccggagcccgcctcgcgagtgtgcacggtgctggtgagccgcaccgcgctccaagtctttatccaggtgaatgtgctggtgtccttcgtgctccccttggcactaactgctttcctgaatggggtcacagtgagccacctgctggccctctgctcccaagtgccgtccacttctaccccgggcagctccacccccagccgcctggagctgctgagtgaggagggtctcctcagcttcatcgtatggaagaagacctttatccagggaggccaggtcagcctggtgagacataaagacgtgcgccggatccgcagcctccagcgcagcgtccaggttctcagagccatcgtggtcatgtatgtcatctgctggctgccgtaccatgcccgcaggctcatgtactgctacgtacctgatgacgcgtggactgacccactgtacaatttctaccactacttctacatggtgaccaacacacttttctacgtcagctcagctgtgactcctcttctctacaacgccgtgtcctcctccttcagaaaactcttcctggaagccgtcagctccctgtgtggagagcaccaccccatgaagcggttacccccgaagccccagagtcccaccctaatggatacagcttcaggctttggggatcccccagaaacccggacctgaatgtaatgcaagaatgaacagaacaagcatcattcaagcttcgcagccagggcgacttctatcaacccctgctctgctgagaaccatcaagcgcagggaagccacgtgacccctcctagcctcaggctccctcgtctgtgtagtggagataaagaacagcacccatctcttagtgttgcctgagactaaagtgcttagcacagaacctggtgcgtagtagatgctcaataaatttttgctggcacgaaaaaa

SEQ ID NO: 673451 - DNA, 177 bp, Homo sapiens
gtcgaactcctgacctcaggtgatctgcccaccttggcctccccaaagagctgggattacaaggcatgagccactgtgcctcgccatagcatttgactttgatgcagtgtttcctgatttagatcagtggactcctcaactttacgtaccacatttttctcctgatattttgatcaa

SEQ ID NO: 673452 - DNA, 1628 bp, Homo sapiens
  misc_feature (97)..(97): n is a, c, g, or t
cgacgctaacgggctggcactcgcggtcccacgtggctcaggacaccctttcgggggcgtgtctcccagttctagaggttcccagagaagaggaggngctcactaaccaggcagctcgcccagactccgggcagtgagagggagggagcgccggccgcgggagcgggatggaaaccagcagcccgcggcccccgcggcccagctccaacccggggctgagcctggacgcccggctgggcgtggacactcgcctctgggccaaggtgctgttcaccgcgctctacgcactcatctgggcgctgggcgcggcgggcaatgcgctgtccgtgcacgtggtgctgaaggcgcgggccgggcgcgcggggcgcctgcgccaccacgtgctcagcctggcgctcgcgggcctgctgctgctgctggtcggcgtgccggtggagctctacagcttcgtgtggttccactacccctgggtcttcggcgacctgggctgcctagccgtgtgccagcccctgcgtgcccgcagcctgctgacgccacgccggacccggtggctggtggcgctctcgtgggccgcctcgctcggcctcgccctgcccatggccgtcatcatggggcagaagcacgaactcgagacggcggacggggagccggagcccgcctcgcgagtgtgcacggtgctggtgagccgcaccgcgctccaagtctttatccaggtgaatgtgctggtgtccttcgtgctccccttggcactaactgctttcctgaatggggtcacagtgagccacctgctggccctctgctcccaagtgccgtccacttctaccccgggcagctccacccccagccgcctggagctgctgagtgaggagggtctcctcagcttcatcgtatggaagaagacctttatccagggaggccaggtcagcctggtgagacataaagacgtgcgccggatccgcagcctccagcgcagcgtccaggttctcagagccatcgtggtcatgtatgtcatctgctggctgccgtaccatgcccgcaggctcatgtactgctacgtacctgatgacgcgtggactgacccactgtacaatttctaccactacttctacatggtgaccaacacacttttctacgtcagctcagctgtgactcctcttctctacaacgccgtgtcctcctccttcagaaaactcttcctggaagccgtcagctccctgtgtggagagcaccaccccatgaagcggttacccccgaagccccagagtcccaccctaatggatacagcttcaggctttggggatcccccagaaacccggacctgaatgtaatgcaagaatgaacagaacaagcaaaatgaccagctgcttagtcacctggcaaagcaggtgagcaacctcatcactaatcattcaagcttcgcagccagggcgacttctatcaacccctgctctgctgagaaccatcaagcgcagggaagccacgtgacccctcctagcctcaggctccctcgtctgtgtagtggagataaagaacagcacccatctcttagtgttgcctgagactaaagtgcttagcacagaacctggtgcgtagtagatgctcaataaatttttgctggcacgaaaaaa

SEQ ID NO: 673453 - DNA, 357 bp, Homo sapiens
  misc_feature (32)..(32): n is a, c, g, or t
aattatgtgtagtataccagggacagacctanttttcatgtcttatttctttaaagagctgcttcattggccgggcgccatggctcacgtctgtaatcccagcactttgggaggccgaggcgggtgggttacttgaggtcaggagttcgagaccagcctggcaaacatggcgaaaccccatcttaactaaaaatacaaaaaaattagccgggtgtggtgtcacgcgcctgtaatcccagctacttggggggctcaggcaggagaattgcctgaacccaggaggcggaggttgcagtgagctgagattgggccactgcactccaccctgggcgacagagtgagactcggtctcagaaa

SEQ ID NO: 673454 - DNA, 327 bp, Homo sapiens
gggaaatacacatttgctgctcacatggatggaccatacaaattttggttttagtaaccggatgtccaccatgactccaaaaatagtgatgttcacgattggatattggggaggctccaaagggacaagatatggaacagagctcaccagaacaggctagaggagatgatcaatgagctagcagtggcgatgacagctgtaagcacgaacaggatacatggagtcggggagatacacagagccatcacgacacacaaacagcagagtggtcctttggtcctcctttgagctcttgttctgttgcatgcattggccagatctctcctg

SEQ ID NO: 673455 - DNA, 1068 bp, Homo sapiens
ggtttgaatacgcgtcgtggggttatggaggaccgtgaccaacagtcgtatgagttgtggctgcgggtgagagaacagtttgtcaggggcccggccaagaaggaggccgtctgttacgatggtgtccatgagtttcaagcggaaccgcagtgaccggttcgtacagcacccggtgctgcggcgtggttgcagtgtccagaaccgggacgatcatcctggggaccatggtacatggatagtaaacctattgatggcaagttttgcatgacgtgtggaagtgactcatccaaactccatgccagctgtcaacattcacgtatgaagtcatcggtaattactattcttctgagagaatggctgataatgcctgatgtccgttaagccgtctcctgatccttcatgtttgattaatccaagtccaatgctaggattaaatggaagaaaattgactaattaaaagatggagtgaggcgtagatatcgaagtaaggtatcgttgtaaacggagaagtataatagggacattcgatacctacagattagacataggattgctaatataggtatcttagtcagcgtattatgaccaaagaattccagaagagaaaataatccctggacatcaaaacattacccttgcaatttacaccgcatgtacgaaacaggaatgaccccttcaggttgggccgatatggggaacgtcaccaaagctggaccatcacatgggattcagtttgggtatactaagggtaggtacttattaggcccctataagttacagttccagttattgataaaaaggagcatataattcgtaagagttatcaccgtgggtggatttaggcaggaaaacaatgtgagtaagtatagaagttagcagttgcaaagcgagagtaccggaaagaaacgtatggcacctgaggcagaaattttgacgttgctgcattacccgttgagcgttgtaggaaagaggcaactaatagctataagatgtagggtattgtagggacgagcgattattggaaaagtggggcctagagtgaaaatatggagagtagaaagagaggaa

SEQ ID NO: 673456 - DNA, 347 bp, Homo sapiens
aaatacaaacaattagccgggcgaggtggcgggtgcctgtagtcccagctactcgggatgctgaggcaggagaatggtgtgaaccccagaggcggagcttgcagtgagccgagatggtgccactgcactccggcctgggcgacacagcgagactccgtcttaaaaaaaacaacaaaaggcaatcgtctaatctttgaatcagagttggcctagggttctgcttccctaaaattcaaactccttctggataagccacccacagaagtcattttaaaacatcatctggggccgggcatggtgtctcgtgcccaccatcccaacactttgggaggctgaggtgggaggat

SEQ ID NO: 673457 - DNA, 324 bp, Homo sapiens
  misc_feature (18)..(18): n is a, c, g, or t
  misc_feature (34)..(34): n is a, c, g, or t
  misc_feature (159)..(159): n is a, c, g, or t
  misc_feature (165)..(165): n is a, c, g, or t
  misc_feature (173)..(173): n is a, c, g, or t
  misc_feature (198)..(198): n is a, c, g, or t
  misc_feature (221)..(221): n is a, c, g, or t
  misc_feature (233)..(233): n is a, c, g, or t
ggactggggggacttggnggtagggggacacacncggaaaagggtttgaatgctctggcaatggcgaaaaaaaacggccgccccactgtcccctttgctgcccagcccccaggatttttgcctggagccctttgccctgtccctgctgcctgaggtggngtaaancaaagganaaaaatttgctccaggccaggagcncaaatcgttgttcaatgaatttntctccaactcgnccttggtaaacggaaatgttgggggtgaaaaaaaacaatccctattttttttttttttatttggtaaataattaaaaaaaaaaccggccca

SEQ ID NO: 673458 - DNA, 598 bp, Homo sapiens
  misc_feature (53)..(53): n is a, c, g, or t
  misc_feature (394)..(394): n is a, c, g, or t
ttttcacaaggtgggcaggcttttcacgcatttttgcgggtgagggccccgangacttccccggtgtgtgtgttggggaccaggcagtttttggagtcccagcgccaggtcccccgatcaaaagcttttgcttttggggcctccccccacgtggcctaatttgaggctttggccaaaatgggtttcaaagtggacaaggctttttaacagttggtgggggctgtccggaaaaaccaggaacaagagttccccccgagccctcccagtgcccccaggaaaaagggggggggttgcccctgggtcttcttttagcccaggcaaaaaagaagcaacccccccaagcttttgggaatagtggcctttgcacctttttggttggccctgggcccccccntgagccccaatttctttttttgggtttcccaggacacatcaaaaacccccccttattttttggccttttttggggtattgcccttgtgggccttttgccaacccctcctttccccccctaagcctggtgggggtgggggggtccgggtcttttttgtatataactcccctcccccaaaaaaataaatgttcttgcccacgtcca

SEQ ID NO: 673459 - DNA, 1170 bp, Homo sapiens
  misc_feature (976)..(976): n is a, c, g, or t
gcttaacttctttgctggtcattatgacacaccctacccactcccaaaatcagaccagattggcctgccagacttcaacgccggcgccatggagaactggggactggtgacctaccgggagaactccctgctgttcgaccccctgtcctcctccagcagcaacaaggagcgggtggtcactgtgattgctcatgagctggcccaccagtggttcgggaacctggtgaccatagagtggtggaatgacctgtggctgaacgagggcttcgcctcctacgtggagtacctgggtgctgactatgcggagcccacctggaacttgaaagacctcatggtgctgaatgatgtgtaccgcgtgatggcagtggatgcactggcctcctcccacccgctgtccacacccgcctcggagatcaacacgccggcccagatcagtgagctgtttgacgccatctcctacagcaagggcgcctcagtcctcaggatgctctccagcttcctgtccgaggacgtattcaagcagggcctggcgtcctacctccacacctttgcctaccagaacaccatctacctgaacctgtgggaccacctgcaggaggctgtgaacaaccggtccatccaactccccaccaccgtgcgggacatcatgaaccgctggaccctgcagatgggcttcccggtcatcacggtggataccagcacggggaccctttcccaggagcacttcctccttgacccgattccaatgttacccgcccctcagaattcaactacgtgtggattgtgcccatcacatccatcagagatggcagacagcagcaggactactggctgatagatgtaagagcccagaacgatctcttcagcacatcaggcaatgagtgggtcctgctgaactcaatgtgacgggctattaccgggtgaactacgacgagagaactggaggaagattcagactcaggtgctctgtcctctngaaaaaaaaaacaaaaacaaaagaaaaaaatcagaaaaaacaaaaacaaaaaaagggggggggggataattaggggggaggaaagccttttaaaagggccaaaggggtataaaaggggggggaaagaggggggaacggttttgggactttggggaagggcaaagaagggaaatgtgtggcgcttggtgctgaaa

SEQ ID NO: 673460 - DNA, 210 bp, Homo sapiens
ctcggtcccgcgtcgtctgagtctgaggaattctgaagttgcggtcccgtcttcgtgcccttatcctctgtcacgctgaggcctgagctgcctctctgcttctcagcagagcggcggcgctgtgaccactgctctcaggagagtgggggatgagaggccatgaggtgatgcaggctcagaccccggcttcaggagctcggggtggggtcg

SEQ ID NO: 673461 - DNA, 418 bp, Homo sapiens
  misc_feature (42)..(42): n is a, c, g, or t
  misc_feature (328)..(328): n is a, c, g, or t
  misc_feature (335)..(335): n is a, c, g, or t
  misc_feature (376)..(376): n is a, c, g, or t
  misc_feature (405)..(405): n is a, c, g, or t
  misc_feature (415)..(415): n is a, c, g, or t
cactcgggaaccctgaagttgcccaaatgttagactatcggnttgacagtgatggcaacacactcaccattagcaatgttagaaattttgattggcaagataaaacccattttcagccgcgctgggaaactaggcaatacgacttggcaaaactgcaaacggttgattttattgcctcttattggatgggcgatgccattgcccatacgctagtgagttttgggtttagtgatggaaagcagcttgcgttatctatcgagattcgcaaagaagtcaatgaacaatttagtacgctgggtggattttttcgcaagtttgaattggtgantatcgtnccgatgaaaaagatattatttacacccgtagtaatatccgnatgaagatgtttatattatcccatcgagngggaaggaanttg

SEQ ID NO: 673462 - DNA, 697 bp, Homo sapiens
taatattataacaacctgaaaataatggaaaagaggttttctgaatttttttttttaaataaacaccttcttaagtgcatgaaatggtttagatggtttgctgcattacaggtatttgggcaaacaataattggagggcaagtgactgcagttttgaggaatcagttttgaccttgatgattttatgtgtttccactgtggcaaaataaactgtttgtacaataagtgtaataaaaatccctttgcattctttctggaccttaaatggtagcaggaacaaggctcgtgaggccatttgtactcttttgctggttcatacgttgctaacttcctacaagctgcttcaagactgcttcatgaggaggtataatctaacaatttaaacaagtaattctcctcttggcaccgtccacttattctcatgaagcagatggttcatcatttccctggcgctgttaaaacaaaagcgaggtctaacggttagcacctcttggggacactcagcctaggttttccaactctctattagggcttgtcacgacatgggaaaacctacttaaagaaaacactccctaattatcattttcgaggcactggtccacacattattttattcagcaaacccattgcatccccagaagggccaacttgttcgcatcagctatgacttgcgaaaagaccagcgctatcgagtata

SEQ ID NO: 673463 - DNA, 935 bp, Homo sapiens
tgggttttgtctcccccccccggccatgttggttgccacagcccctcgttccggcaaacaattgttgagagtcccctctccttctggttgttgtattcaacctcttggtgggccgtcgatttgattttgatcagaggagcccgtcgtgtttcggtggtgtcgacatccaagcagctggctagtattgtgctcgcgcttgttggatataagtgtcgtcattgaacagccccgaccacaagaagcccctcggttgttgttggacacgacacgcacttttgtggatctcatcaccacaccccctggaaggtttttactcccgcgcgggccgcacgatatctgtgtctataatgattgtgcgccccgcgggaggggtgtattatttcgccgccctttctattgttattgttggccggtgccgtagagcgacaatcctattcaatctttctatcgatcgccgctcctctcacccgtctgcgtcctaacaataatactctcttctttctataagagggggatatgtccgaacgtcttgttcgctctccccccctatagaaggcatctttgtggtggacgattttttccacgctctcgtgtagtagttcgtcgcttttgtccgcccccccccgtggtacactcatctgtggggcgactatcttcttggttgatggcagccaccgctgtgttttttgtttgcgaataatcactcttgctctctttctcgggacgtctcacaattaatgtgtttccacgccccttaattgtctcctttcattaagttcttcccgccccaccacaccgggggtgtcctcctccccccccccttcacaaaattaccccttttttccccgggaccaaccccctttttttacacacccctttccccctttttttctttttccccccccccccacatatttcccgggttttttttttta

SEQ ID NO: 673464 - DNA, 427 bp, Homo sapiens
gtcaataagagagggtgcaggcgtggaggcacatgcctgtaatctcagcgtttggggaggccggctggtgcctgggaggtcaaaggtacagtgagctgtgttggtgctgctgcactccagcctgggtgatggtgagaccccgtctcaaaaaacaaaataaaataaaatatgaacctaatggaaatgggagaatggaaaactacaatatctgggctgggcgtggtagctcacgcctgtaatctcagcacttttggaggccgaggcgggcagatcacgaggtcaggagatcgagaccatcctggccaacacggtgaaaccccgtttctactaaaaacacaaaaacttagccgggtgtggtggcaggcactggtggtcccagtactcgggaggctgaggcagaagaatggccagtacaacctgccggtgg

SEQ ID NO: 673465 - DNA, 191 bp, Homo sapiens
  misc_feature (135)..(135): n is a, c, g, or t
  misc_feature (180)..(180): n is a, c, g, or t
  misc_feature (189)..(189): n is a, c, g, or t
ggcatggtggctgaagcctcgtgatcccagcatgttgggaggccgagtgggaggattgcctgagcctaggagtttaaaccagcctgggcaccatggtgagaccccatctctattatttaaaatgtttcttaaatncaaaaaacacaaacattagcaactagttggctagccataattccnccccctggntt

SEQ ID NO: 673466 - DNA, 157 bp, Homo sapiens
gacaatgtctattaactaagacgtacggtgccactatgcctcaaaagttactatggtgcttaagcatgtcttgatcttgacatatatcacctatctggtgttatttactccattgtgcccaggacctgtgcaatattcatgatgcctattgaccaag

SEQ ID NO: 673467 - DNA, 732 bp, Homo sapiens
  misc_feature (1)..(1): n is a, c, g, or t
  misc_feature (182)..(182): n is a, c, g, or t
  misc_feature (192)..(192): n is a, c, g, or t
  misc_feature (201)..(201): n is a, c, g, or t
  misc_feature (209)..(209): n is a, c, g, or t
  misc_feature (218)..(218): n is a, c, g, or t
  misc_feature (226)..(226): n is a, c, g, or t
  misc_feature (240)..(240): n is a, c, g, or t
  misc_feature (272)..(274): n is a, c, g, or t
  misc_feature (276)..(276): n is a, c, g, or t
  misc_feature (278)..(278): n is a, c, g, or t
  misc_feature (284)..(285): n is a, c, g, or t
  misc_feature (290)..(290): n is a, c, g, or t
  misc_feature (300)..(300): n is a, c, g, or t
  misc_feature (304)..(304): n is a, c, g, or t
  misc_feature (348)..(348): n is a, c, g, or t
  misc_feature (351)..(351): n is a, c, g, or t
  misc_feature (357)..(357): n is a, c, g, or t
  misc_feature (360)..(360): n is a, c, g, or t
  misc_feature (375)..(375): n is a, c, g, or t
  misc_feature (386)..(388): n is a, c, g, or t
  misc_feature (394)..(394): n is a, c, g, or t
  misc_feature (396)..(396): n is a, c, g, or t
  misc_feature (537)..(537): n is a, c, g, or t
  misc_feature (546)..(546): n is a, c, g, or t
  misc_feature (549)..(549): n is a, c, g, or t
  misc_feature (556)..(556): n is a, c, g, or t
  misc_feature (597)..(597): n is a, c, g, or t
  misc_feature (600)..(600): n is a, c, g, or t
  misc_feature (611)..(611): n is a, c, g, or t
  misc_feature (632)..(632): n is a, c, g, or t
  misc_feature (636)..(636): n is a, c, g, or t
  misc_feature (731)..(731): n is a, c, g, or t
nataaaatagatgagcgttagtttagataatcaagaggtgacagcttcaggtatcatcttcaccaagaataaatttgtagtgtttcatattcatttaaaggaatcaggaagaaaaattcatttaatttctgctgcctgcccagtcacttcaaaaattcttaagggaagctaaaataaaaatncctatagagnttatggttnctttattncagatcccnattatccngctgcctcaaaagnagtaagttcaatttggtgtcttgtgttctggnnnanancagttnngtttncagcactgcnagtnacagattttcaaatgactgtgaccaaattaatttagaagagttntantctgcnggntccattttcaaaatntgttgagctcnnnctgtananttcgtatattgccaatgagacctttgaaaaacaattcttcagtgatggtagcattcatcagtcttaaagctggcaatctgagtagtagtctggataacctgtaggtgtcatctggatatgttttggttatataatcttggnattccacanaanccttttnctgaaatttctctatctagttccatgttttctaggcttggntgntctggactaangagtcatattgacttcaggtnggcntattcgtatccatcaatgcagagtttaaccatgctgttacaaaactcctgtagtttgaagatgtgctccatcaataattttcttctttctgttgnc

SEQ ID NO: 673468 - DNA, 348 bp, Homo sapiens
  misc_feature (90)..(90): n is a, c, g, or t
  misc_feature (147)..(147): n is a, c, g, or t
  misc_feature (228)..(228): n is a, c, g, or t
  misc_feature (242)..(242): n is a, c, g, or t
  misc_feature (246)..(246): n is a, c, g, or t
  misc_feature (263)..(263): n is a, c, g, or t
  misc_feature (312)..(312): n is a, c, g, or t
  misc_feature (315)..(315): n is a, c, g, or t
  misc_feature (323)..(323): n is a, c, g, or t
ggatccggttgcagtgagccgagatagtgccactgcactccagcctgagtgacagagtgagactgcatctccaaaaaaaaaaaaaacctntggacacggaggcttctatggttggaagtgctctgtgtcaacgtcaccgggaacatnagcgctgtcttaaactccacagggaggtgacaaaggaaagccctgtgtctggaaccgtccagatcacctaaagtgatccgnccaccttggccccnaagnggccccatacatctttngcctttggttgattttaatctgtagccttgcactgtaattaaatcatanctnaaagcgtnacaaccgctagggctcttcgggggt

SEQ ID NO: 673469 - DNA, 275 bp, Homo sapiens
agcttcagtgttggaggaggggcctggtgggaggtgactggatcatgggggtgaatttcccccttgttgttctcgtgatagtgagttctcatgagatctggttgtttaaaagtgtggggccctgccccttccctttatttttttcctgcccccatgtgaaaatggacttgcttcccctttgccttcccccatgattgtaagtttcctgaggcctccccacccatgcctcctgtatagcctgcaaaattgagtcaattaaaccttgtttttttata

SEQ ID NO: 673470 - DNA, 114 bp, Homo sapiens
ctcctattgttatttccagggtcttggggaaagggtttactctgcaggcttccagcaaaaatttaacaacttcaacatgaccctctgcagcagctacatggagtgctgttctag

SEQ ID NO: 673471 - DNA, 1409 bp, Homo sapiens
  misc_feature (490)..(490): n is a, c, g, or t
gagagagccggagagtcatgtcttaccatccctgttctgcttactcacccactctgttcctttcctgcaccaactaagcatgtgccagccaggtcagagtcttggtgctgtctcccaggaagcagggacgactaggtgaaccagaacactctatggaacccttacactgatagggctgagaggcatgaagtccgagcaaggaggcccttgatgtgtcacccccagggaagaccgtagagggttcgcacaactcgtccagcccatccatcgtgccgtatgccacagatgttagcccgaacataggttggcaggcattgttggaagggcattgcgaccaagagcacgtactatgtcacatctactcatagttgagcgcattttctgtacctactggggcaagaagcaaggtgcattcctagtcggccattatccctacaactacatagttaagtagtgttaagtcgcggggtatcaggttgcgcaatagcanatcgtcagcactcctctcttctcccttacacatgcgcctactcgacgttataaccactcaaataccactagttacacaatggtattccgagtgctccacggagtactggcgtgtaacaacttagcactaaaacgaggcgagcgtcccttgggaggattccccctatcaaactcatagcgaagagggttccctttgttttcactagatccctcaggggaaggtgcctgtagtctcaaaaaacgcccgcgtcagtctgagaccaacgaatgagcacgcgaattcacccgtgcgcacacaacgagaccatgggcatccgtctggggctttgtggagcccctaattggggtagaactaacgacacgcagtcctcggcttgcattgagtctctacaacgcatatcgtggtgcccacggagccgccatatggctcccaccggcggcctttagcaaggccccccgacgggtctcttgccccaggacctagcggccctgggctgtcctttgggttcgggccagcatgcgtttgggacgtatatggccctcaccgtgccttggggctcgcactagggggccggcccagctcttggcccctacttggtggtgtgccttggcgtcgcccttcacgcgtccacccttggcgtccctgggccggtatttggatggccccctcgttacaccctgggtgcccccacccactatccttaggtcgcccccagcataccttggccgcgcagcagcgtgccctcggccggctcccatgccccttggctgctacttcgcattcgctcactgtggctctcggcctttaccggccttccggcggccccacttccatagctggcttacccctcttccccctgcgtgccccacaactccttcccgtttcacccaacaccttgcgtcagtcgccctccctcgat

SEQ ID NO: 673472 - DNA, 119 bp, Homo sapiens
ccgtgttacgccggccgtgcctccgtcctcctcgttcgctgtttcacgtgtacccgccggccgtgtactccgtctcctggtcttcgctgtttcccagtgtaaccgacggcccgtgctat

SEQ ID NO: 673473 - DNA, 405 bp, Homo sapiens
gtacttttgcacagtgggaggaaaggcgtatcttcctagcatacaagaataacctgtatcctaggaatctcgattcacatcagaatgccgactgatgatgtaatggatacgctcatgcctcgttttacacaattgtgctcatatctggtgaccgtagtctttagtcattacgcccagcctcctgaattgagacggacaagaataaacctgacttcccccacaaataaatctgcagacgtcacttattcattctcggatgttctattgctcacgatcttcgtcgagtggagagaagttaggctctcacgttaatccagttctaactcatgagtcaaactgagactgcaacaaaagaacgccccttttttcttttacaggattttccctttcccctgagtatacttc

SEQ ID NO: 673474 - DNA, 348 bp, Homo sapiens
cccttgaaatttaaatggccattccaagctatcaaattttacatgacccaggacatgtccctcccatggccagaaagcctaaattgggaaccagttgttagcaaaccctttcacccatttaaatgaaaacccccaagttgaaaatgcccagaatgtttttcatttgaaaatggcatggagacttttgtttctatttaatgttttcgagatatgccatgtgataagatggaaagcccataaccctgtgataagtttttaagaatatgagaatatacgtatatgaggtatttttagttcagtgatgcttttgtatttggggcgattttaataaaggatatggccttccca

SEQ ID NO: 673475 - DNA, 314 bp, Homo sapiens
gagagtctgtgcctgcagggtcccctcgtcaccccagaaatgccctcccccactgaaatcctctcctcctgcctcactatgcccaagctcagagtccttgagctgcaggggctggggtgggagggtcaggaggcggataagatcctgtgttaggggctgtctcactgcatgggcatctttgtggctgtgcccatatgacttttggacatggtggatgtaactacttctcctgccattgcgaccagtcctgctttttcattataggatcctcatacctctatggaccagtactattgaacagggctgtatttatt

SEQ ID NO: 673476 - DNA, 225 bp, Homo sapiens
  misc_feature (27)..(27): n is a, c, g, or t
  misc_feature (60)..(60): n is a, c, g, or t
  misc_feature (86)..(86): n is a, c, g, or t
  misc_feature (97)..(97): n is a, c, g, or t
  misc_feature (162)..(162): n is a, c, g, or t
  misc_feature (207)..(207): n is a, c, g, or t
ctgacgctggcggtggcgcggtttgtntgggcttggtgagggcggggaggcctggctgtntggatgtctgacaggtgaggcggggnacgcagaagtncagccgccctctcccacagcggagtccaaaacaggcctaccagtcagttcttatttctattgggngtttccatgctccaccatgttaagagctaagaatcagcttttttnactttcacctcattacct

SEQ ID NO: 673477 - DNA, 231 bp, Homo sapiens
cacagtgagatttgggtctgtgagtaagcagacaatctaccaagtggtctggagacatccgtgtcgttacaatggagcactctctaagttcaacgctggtggattaggagccccagttcaccaagaggacccacaacgtgtgagccctctacctgggttcgggtcaggagctccatcttgggaactaacagctgctagttcccatgattgatgctcctgagcccgaaggtg

SEQ ID NO: 673478 - DNA, 338 bp, Homo sapiens
aagggggatttgccttaaaggttccctttaatgaaggggaaacatgagaatgagttgggggggaaatttttttttgatatcccgggggtagtttgccaacctaaacttttgattgtttttgatttcaaagagggccggggggtaaaaaacatggccacaggaaagtttaaggggtatgggtttgtttcctttttccccaaatggggggggtcagtgggaaggggatgggtaatgctttaagggtaaagaatgggaaccccccgttttaattactaattttttttttgggtggggtttttttttttgatggtttaaataaacccccccttgagggttta

SEQ ID NO: 673479 - DNA, 989 bp, Homo sapiens
  misc_feature (114)..(114): n is a, c, g, or t
gggtcgccagaacacaggtgtgcgttgaagaactacccctaagaatgccaaaatgggaaaggaaaatgactgcatattgaacatatgtcggtcattggtacacgtatggattcngggtcatacatccaccattactgggccatctgagtctataaatgcggtgtgcatcgattgaaataagccattcatggcaacaaactttgaggaaggcaggactgctgccggaatgggcaatacgggctccttccaagtatggcctggggtctccggatcacagatcttgcaacatgcgtgagctgtggaacagtcggtatccacacaatctgatatcctctcctatggttgggaaatactctatgtagcaccaacgtcgggacgtaacctattgtttgacttatcccatatggaattgctcgcccagcgaataaccagcaggactattatcgaaaacagacattgcatctacgatgggtggacaatcttctaggtccttgtacatgatgcgtaggctccctagatttgtttagcctgcgtgggcgcgttaggcctgcacactcttcgcatgcttcgtctgatctccccaaaagtgaaatgggcgcgagaccccggaggagcactgcccccctctcttgggccttaccagcacctgggcgttagttgcacataccaactaaaacttcgtccggtctgtctatcgaacttacgtgggtcttgccactggaagacccaacccactaaccaggtccagccaagggagaactcactgacgcgcaaaacctctgcttaaaagcggcacgcctacaagccactgtgatcattatacacgcaacaacatttggggtaacaaagcccgttaccacccgattaggccacatagtgtcggaccaaattttacttgggatctgggcaaagtgggtcgaacaactcattgtccatgggaagtcgcctaggttgtgtgacacattgcctttggtgtccaaggggaacta

SEQ ID NO: 673480 - DNA, 240 bp, Homo sapiens
cacttcgagattcacatcgagatgcgaagccgcgaacgcggcctgcttgctgccctcgcggcgctgcgcctcgacgccgtcgaggtactcctgcgtcacgtcgccggtgacgtaattgccgctgaagcacgaatcctcgaaatgcgtcaccttcggattgaccgagcgcacgtcgtcgatcagcgcggtgaggtcctggtagatcaactggtcggcgccgatttcgcgcgcgatttcctc

SEQ ID NO: 673481 - DNA, 211 bp, Homo sapiens
atcgcaccactgtactccagcctggatgacagaatgagactctgtctcaaaaaaaaacaaaaacaaacaaacaaaaaaacagatatttctcacagttctggagactggaagtgcaagatcaaagtgttggcaaattgtgtttcttaaagagggcctgcttcctagattggaaatggccatcttctctcggtatcctcacgacaactcagct

SEQ ID NO: 673482 - DNA, 1056 bp, Homo sapiens
  misc_feature (447)..(447): n is a, c, g, or t
  misc_feature (476)..(476): n is a, c, g, or t
gaggtcactgatagcatctgcctagtagtcaaagctccgtgcttcgtcatgacagtggccttatcaccgcgagtgacgttgggtgcccactttccgaaggaaacatacttatgtgatatatctcgttatagacaaactcccgcggtaagcaaggcacgtcgagagcaatgcatcacatagtcacataggcgtggtggtgaatagacgggcagcaagtaggtggtgctcatctcttgcggaacctacactgctgttgtcgggacaaagagttttgtgaagtagctacatatgaactcgcaagatggtggaaggcagaacaggaaataggaatggatggatgaagcatcttgttgagtcatacacatcatctaagctttatgaacgtctgtgcttataaagcgaacatgccgtcatggaggatggtgcgtgcattgtctgtgtcgtagnacaatcttttctagcaagtggcactttgntccagaggatgacagaggccaacgagtgcttaagagctggttccctcggagatagcgcccgaagcctgtcgagtgtgagtccctgaagacatctggcttggactagcgaaacaagtcttatgtcacagtctccgtggtgaagaacagcagtggacgagggcgcttatggagaacctttcaaaatggacctttcgagaaaggaggttaccttttgttcttcctagggcaagtcaagggacgttttcgcccaaggacgtgtggcgggcaaaatttcggcgaatccttaactttatggacacacatcggagagaatcaagggctggtttccattcgaggaacaaccattggaggaaggtttccccctctagtaaggcagtaccggagcgattttattcggtggaataaatccttttccactacggggaggacatgatagagattgacaatctggggtactgttaaaattcctttgaaggcaaggcactaaagactgccgtgcctcggggacttcgatggggaagcgccatggggctcgtggcaagggaagcttcaaggcgtcatagatggcccatgggagctg

SEQ ID NO: 673483 - DNA, 857 bp, Homo sapiens
  misc_feature (1)..(1): n is a, c, g, or t
  misc_feature (303)..(304): n is a, c, g, or t
  misc_feature (306)..(306): n is a, c, g, or t
  misc_feature (326)..(327): n is a, c, g, or t
  misc_feature (330)..(330): n is a, c, g, or t
  misc_feature (333)..(334): n is a, c, g, or t
  misc_feature (362)..(362): n is a, c, g, or t
  misc_feature (365)..(365): n is a, c, g, or t
  misc_feature (369)..(369): n is a, c, g, or t
  misc_feature (402)..(403): n is a, c, g, or t
  misc_feature (411)..(411): n is a, c, g, or t
  misc_feature (521)..(522): n is a, c, g, or t
  misc_feature (530)..(532): n is a, c, g, or t
  misc_feature (563)..(563): n is a, c, g, or t
  misc_feature (571)..(571): n is a, c, g, or t
  misc_feature (586)..(586): n is a, c, g, or t
  misc_feature (591)..(591): n is a, c, g, or t
  misc_feature (619)..(620): n is a, c, g, or t
  misc_feature (631)..(631): n is a, c, g, or t
  misc_feature (655)..(655): n is a, c, g, or t
  misc_feature (702)..(702): n is a, c, g, or t
  misc_feature (707)..(707): n is a, c, g, or t
  misc_feature (761)..(762): n is a, c, g, or t
  misc_feature (846)..(846): n is a, c, g, or t
nacatgctaccaagaaggttctgtctttaattttttaacagaatatacagagccacacaatacgatttcaatttcaaattatgggagatcatattcaaatatgcttaggtttgacaagttgctgttacaatactgagaactttcatgaaaacggtatttaacaatttttaagataatcaaatatctttttgctacgtgggccaacgcattaatactaacttgtttaaaaatgcagtcttttagacttcaaattattataaaacaatatcaagatcatatagatatacttcctgattactcaanncncgttccattctgatggaggnnggnggnnaatgttattctcccttcgcccatttccngcnaccncttctcctttgcacttacctgtaaaagtcaaannttaaaccncaatttcctaagacataactatttctagaatacattggtgtaatcataaaagactacaagttaattatcatttttatactaacactttttaccacaacacatctttcctnnaacgcccnnncccccttgggaatttggatttcccttaacgntaacaggntctcatactttctgnttttnataaatttccactctttttccagttggnnctatcttcacngcacagtgctacatataattatancagtgagatgtacgttcagattcaccatataaccaacacagtggtancatanaaagtttttctgcaggtaaaaatgctaagaaaggccacagtggacagtgcccgnnaatgaatacagtaaattccaggtgccaccgagcttcagagaccacaaagtttcaaatatttttcagcaacggaaagaaaaaaanatgtagagaaa

SEQ ID NO: 673484 - DNA, 1119 bp, Homo sapiens
aacgaatgctgacagagcctgaacgctttctgataactcctgcctgggacaggggactaaacggaaacactaaaggtgacaagcacgatgacctccagcgggcgcgtttcatctgccccgcttgctgggcctggagactgaacggccgaccacaggctctctgccttcccttcggctgcctgcggcctgctgctgcttctctctgagccgagcctttgcaaagcagactaacaagcggcaagctcttgccaccacgctgctgcgggcctgccctctcccaggcagcgactgactgtcactctgtgcctccacactgcgccaacccaacggccacggcactgtgagaccgctgccctgcaacgcacaccgcgcactggcacggcacgcagcacacgcgcctgcacgcacgccgcacagccctgcgcaacaagcaaaacaccacaaacgcacaacccgcaaacggccacgccacgcaagctcctggccttccccacacacaccccagccaactgcgctccagcctgaaacacggaacaagcccccccccagcgggccccccaattcaaaccaagagcctctcacacgccacccacgcgcccaaaggccccctgcaagcagcacaatggccccaaagcccccctttggccaacctctcccataacgcaaccgcagggccacccgcaacaaccactatcccctacatcccctcctggacgccacttcccccccaacgactcaaacggccacccacggtccaaaaatttggaacacttgcgaccgaatgccacgttcctttcaccgttgcgcgcaacagcccaaggcgctcatggcgccgaaaacggcccccattccccggcactggcatggggcaaagacccccaaaccactacacggcaacgagggttccaccaatattccgggaccattgggcaacctcaaggcttggcaacacgcgaaacaactttccggcgcacaccacggcccccccttaacccacaaagcttttcccacacatttaccttgctactaaacagcgagctcttttacgaaccagaggccccctatcccccgtaccccctaataggcgctggcgcgtcttccccaaacagtggcccacgg

SEQ ID NO: 673485 - DNA, 438 bp, Homo sapiens
  misc_feature (7)..(7): n is a, c, g, or t
  misc_feature (168)..(168): n is a, c, g, or t
gtctgcncgtcaataatcccagctactcgggaggctgagacgggagaatcgcttgaatcccgggaggtggaggtttcagcgagctgagatcacgccattgcagtccaacctgagcgtccgagcgagactatctcagaaagtaaagacagaattaaagtgcccagcgcnaagtgtcacgcctgtaatcccagcgctttgggaggccgaggcgggcagatcacctgaagtcaggagttcgagaccagcctggccaacttggcgagacctccttaaaaatacaaaaattggctgggcgtggtggcagacacctgtaatcccagctacccaaggaggctgaggcgggagaatcgctggaacccgggaggcagaggctgcagtgagccgagatcgcgccactgcactccagcctgggtgacagagcacggaaaatgtctctga

SEQ ID NO: 673486 - DNA, 396 bp, Homo sapiens
agagcaactgacaactggccctagtgcttgtctagatattgttgcagtatctggcagagagactgatgatgatgacaggatggacattcccttggaccttgttttatgcgctggctcaggcaagagaaggagaaggggcaacctacccaaagaggctgtgccgattcttcgagattggctgaatgagcaccgatacaatgcctatccttcaaagcatgagccttgctgtgccatcagacacacctgtataagctacaggtctgtaactggttcataaacgcccgtcgcaggctcctccctgacatcctgagaaaggatggcaaagatcctcagttaacaatttcccgccgtggggccaagatatctgccgagctctgtagagtacgtgatgggctc

SEQ ID NO: 673487 - DNA, 795 bp, Homo sapiens
  misc_feature (148)..(148): n is a, c, g, or t
  misc_feature (665)..(665): n is a, c, g, or t
agcgggcgctgcctgcctctgactggtcggaagcggcacttactacgtggcggatgctgacgtgtgcaagaggactgtcccacagtgaagagtgggaggcaagtgcctgctgaccgggaggaggtcgaccttacaggagctgggtatngtagctcattctaatagccctagtctacttaggaaggcaaaagggaagcagcaagaagtggccatcagaaggcatgtggtcccgtagaacggtagaacgggtgaggaggatgcaggagatggtcctactgtgtggacgcatcggggctcagaagtccgcttgttagagatggcagtgacctgtgacaactccagtcgtggccgagaaagccttccggagtccttaggaagcgggaaggaggccccggaccaagtgcagatgaacgtacgttagccgtaagtatcacggtagctgggcttggtcgacagaagtccatggactttacattccatgtcgtatcgtgacttcctgacgctgggcaccgcgcctaggtacgctcaggcgaatagacgagtgagtgaatagttgcgtgccaagggggcagagttggcagaaggactgggcaatggtccaagccgaaccggggatttcgaagccttttgcaatgtgcctggcaaggtcgacagaacgttcctgnaacgaattgtggcgaagccacgaatgagttggaacgtgactccagacaaagtgggcatctgtcagccagaatgagcaggcatcagacggagtgaggaaggacctgggcgcggcagggctattttacctcg

SEQ ID NO: 673488 - DNA, 1537 bp, Homo sapiens
cacaggtgtcgtgaaaactacccctaatagccaaaatgggaaaggaaacgactcatatcaagcattgtcagttcattgtgacatcgtatgattctggtgcaatgtccacacactactggtcctatctggatctatgagaatgccgagtggacatcaacagaaaagtagacctattgcaaacatagttttgacgtacatggcatggcttgcatgagatgtggcaaatgggctccgttcaagttatgccttgggtcattggatacaactcgaaacgctgagacgtgaatcgatggataatctaccgaatatgactatcatccattgatggaaactttgacgagccagctaatgatacgtagtgtgagcttatttcattgagtgccccgaggacatcagatgacgttaattcactacataccactgagttacacgggaccatcttcacgggacatgacttgatgcttcgtccagtgagtatgtatagatagcgttgagtagtaatagagtggagattatagacacgctaggatatcgtcgctaatgaattggagcgagacgccagaggaagccattagcccatatcttgagtcatttactacaagcatgagggattggtgaataacaatacgtacaatatatgggtcagggcattcgctatgatgcaaaaaggctggtgactattcctacattggaagcgctatgccccgataacaagtacgagaaaatagaacgacgtactgacagggaaaacgatatgtagcaacggaaagttcacggcaacagtgtgaacacttttaacgaagaacaagtggaggctaacaacagcacccggcaacacaagatagacaaattaagaagagcacacaaataagaacaagtgatacgagaacatgcgaggaaacaaaacaaatgtacaatgagaaaagcccaaagactagcatacacaaatatgccatctgaggagacacaagagagaaacagaagaacaagagatacaccacggaagagcgacactaggaaatacgcaccaagagaaaaaccaacacagacaaagatagaaaaggcacatggaacaagaggcaatcacgaggacacacacaaacaaccagaccacagggaaacgagagccacaggaaggacactagctactccacaggaaaggcgtcattagcaaaacaagggagaggcagactgagacacaagaacaagaagaggaacgaggcatgaggaacagtgaggatgaaccaaacagcagggaagggagtgaaacaaaagagaggacaggcacagagaggaacagaacgagcaaagcacaaaagagaaagagacacaggaagcacaagcgaaacgcggacacacaggaaaaaggcagacacagaaacacgaaataaagaaggcaccaatggacacatcgtagacgaaaaaacaaagagaggaggaaaacagagaagagaaaagcagcagagaacagcaacaacgagcgaagcaaaaaacaaacaaacgagaatggacgcaagtcccgacaaagagaaacgag

SEQ ID NO: 673489 - DNA, 753 bp, Homo sapiens
aattcggcaccaaggggcacttcgattacacctgcgaaggtgctaccttgtcttcgctggacgttactgcggagccttagctagcatcgtgacaacattcattatcgcacctaagcttgaccctacacgtcatcctatcttggcatggaattgaccgctaccctagatgcgcgactgctgcctgtggccataggaagaatccccaagccatcaacgataaaatcctgtgctaaattctcttactactatcacctcttgcgccaccggtactacgtgaattttccctccgacaacctgacgtatataacgatgctcttacagatcctgctcttagacgcaaaggcccactgcagtccaaagctaagtttgaccagagtgtcaagacacgcaagatcatgtcggctcttacagaaactgcagatttacacgcttggatatcatcatcacgcgtttgtgcacaccctttatcccaacaaataccctaagaactcgatgacctggtctcctcgtgcccattacgaagcgatatttgttatggccctgcctgcaactggggaactgtcccaccatgcgcagacaagtgccctattaacccctggactgcagccccgggtctgcttgtatccccccgtaggcgcccctacggacccaaatttccccgacttgtaagtgggaaccccggatcccacccccaggagactgatgacctttaaagttttgtcccctttgagcctaatgggtgtggtttagtac

SEQ ID NO: 673490 - DNA, 381 bp, Homo sapiens
  misc_feature (273)..(274): n is a, c, g, or t
  misc_feature (277)..(277): n is a, c, g, or t
  misc_feature (292)..(292): n is a, c, g, or t
  misc_feature (295)..(295): n is a, c, g, or t
  misc_feature (301)..(301): n is a, c, g, or t
  misc_feature (307)..(307): n is a, c, g, or t
  misc_feature (313)..(313): n is a, c, g, or t
aaacaggcaccgcctgacgtcgaggtgttggtgggctcgtcaagaacaagtaagtcgtggtctccgagcatgattgaaaccagtgcagcccgccgtcgttccccacctacaggagcgcggcgtggcaatgctcgtcgtctcacacgaccgttggtttcttgacgagatctgcactgacatctgggaggtccacaacgccaccgtcgaggcttatcagggcggatactcggcctacaccttagcccgggtagaacgagcccgcgtcgccgccannaangaggccaagcgtcanaanctggcncgtaangaattngcgtggttgcgacggggagccctgcccgtagctccaaaccgcgtaccgagtcgagccaaatgttggtt

SEQ ID NO: 673491 - DNA, 612 bp, Homo sapiens
atgtcaagttatgatgattaagaattattgagttaatgcacagcagtaatcacttggcagagggaaagctaaggaaataaattattacttttctgaagaaatttgtggccatagattggggagcatatgactatatgtaatatgcattacagtttaatacactatgtttaatgcagatagattcttagtgaagcattttgtgtagatagtattcttgatacctggtttcttaaagttacgtaacgtggtatatagctaatatattgttagtgtcttttgtatgaagatatgatagaaccagtaactatcggagtagcgagcttttctataagcgtatttaagagttcatttatggtcattcgagtaagagtattgtgagtgccttgcgtgtactaggcattgttctaagtgctggaaataaagagcattgaaagagatagcatggtgtttatgagtagtagccagatatgggggtgctcagcagagagaagtaagatgatcaataaactagcagaatagtaagtgctttcctgagaggagattcaacagttgcacaggtgagtatattggtagagaatccatctgtggtaatggtggctcgaggaaggtgtg

SEQ ID NO: 673492 - DNA, 314 bp, Homo sapiens
tgacatatgcaaggcaaggcagaagattgcttgagtgcaggagttagatgactagccgtgggcaacatagtgagacccatctctaccaaagaaataaaaaaattaactgggacacggtggcacactactctcgagctatatcaaggaggttgaaacatgaaggactccttgtaagccagagaattcataggactacagtaagacatatgcattgtgcctgttgcacccaacgtcacagccatggagtgacagcagcgagacacatgtctctaaaaaaaagaaaacaaagctctagactgggccaagatgtggta

SEQ ID NO: 673493 - DNA, 793 bp, Homo sapiens
  misc_feature (685)..(686): n is a, c, g, or t
  misc_feature (689)..(689): n is a, c, g, or t
  misc_feature (704)..(704): n is a, c, g, or t
  misc_feature (707)..(707): n is a, c, g, or t
  misc_feature (713)..(713): n is a, c, g, or t
  misc_feature (719)..(719): n is a, c, g, or t
  misc_feature (725)..(725): n is a, c, g, or t
atgagcaatgattaaccgaattccgagctccggtacccccaacattggcctcgacgggtccgaagcccatgccgccgtgctcctctggcacggccaggcccatgagacccagctcagccatctcgccccaggcctccttggagtagccaccttccttgacgatgccgcgccggcgctcgaagccataggccttgtcgacccacttgcgcaccgcgtcgcgcagctgttcctgttcgtcggtgaagtcgaagtccatctcacacccccagggtcatctgagcgacgatgttgcgttgcacttcgttgctgccgccgtagatcgtcgtcttgcgcatgttgaagtaggtcgaggccaatgttggttcgaccgcgctatggccgatctttccggtggggaacgacggcgggctgcactggtttcaatcatgctcggagaccacgacttacttgttcttgacgagcccaccaaccacctcgacgtcgaggcggtggcctggttggccggccatctgcgccacctacaggagcgcggcgtggcaatgctcgtcgtctcacacgaccgttggtttcttgacgagatctgcactgacatctgggaggtccacaacgccaccgtcgaggcttatcagggcggatactcggcctacaccttagcccgggtagaacgagcccgcgtcgccgccannaangaggccaagcgtcanaanctggcncgtaangaattngcgtggttgcgacggggagccctgcccgtagctccaaaccgcgtaccgagtcgagccaaatgttggtt

SEQ ID NO: 673494 - DNA, 344 bp, Homo sapiens
  misc_feature (176)..(178): n is a, c, g, or t
cggtgtgtagcccctgttctgccggggcgggtaaggtaggcatgcgctcgttcctgatgactctgttaaggagtcccagtacagcgaaggggccagccgccaagggcggtagatagctacagccgatgttttgcgggaacttggctatcctcatccatgggtttgatcccaaccgnnnagcctttatggacgattccaacaacaagccgccgactttctggcagatgcttcacagcgtgatggcagccgccttcggggtgcagagcgggaggaatcgcgcccgcgactttacccatggcaagcccagccactttgtcatcctggtcgacgcggccgcgaattta

SEQ ID NO: 673495 - DNA, 360 bp, Homo sapiens
catcccggctaatatttgtatagaagtagagacaggtttttgccacgttggacagtctggtctcaagctcctgagctcaagtgatccacatagccttggttgaccaaatggctgggattacaggcatgagccaatatgatcagctcaaacatcttctttttaaagtgtccaggaagcatgtatagtgattatttcttatattatcccccttgatccatctcaccagatatatgttgattttataagaattttcaaactaccagcttctggctttgttgaacttggatttctgtttcactaattttctttctcctgtctttgtacttactttgttggtctttttctaagttttaaagattg

SEQ ID NO: 673496 - DNA, 794 bp, Homo sapiens
  misc_feature (686)..(687): n is a, c, g, or t
  misc_feature (690)..(690): n is a, c, g, or t
  misc_feature (705)..(705): n is a, c, g, or t
  misc_feature (708)..(708): n is a, c, g, or t
  misc_feature (714)..(714): n is a, c, g, or t
  misc_feature (720)..(720): n is a, c, g, or t
  misc_feature (726)..(726): n is a, c, g, or t
ccccacccaaacagttgggcccttccgaccgggttcccggaaaggcccaatgccccccgtgcctccctcttggcaccagggccaagggccccaatgagaacccaagctcagcccaatcctcgcccccagggcactcccttggagtagccaccttccttgacgatgccgcgccggcgctcgaagccataggccttgtcgacccacttgcgcaccgcgtcgcgcagctgttcctgttcgtcggtgaagtcgaagtccatctcacacccccagggtcatctgagcgacgatgttgcgttgcacttcgttgctgccgccgtagatcgtcgtcttgcgcatgttgaagtaggtcgaggccaatgttggttcgaccgcgctatggccgatctttccggtggggaacgacggcgggctgcactggtttcaatcatgctcggagaccacgacttacttgttcttgacgagcccaccaaccacctcgacgtcgaggcggtggcctggttggccggccatctgcgccacctacaggagcgcggcgtggcaatgctcgtcgtctcacacgaccgttggtttcttgacgagatctgcactgacatctgggaggtccacaacgccaccgtcgaggcttatcagggcggatactcggcctacaccttagcccgggtagaacgagcccgcgtcgccgccannaangaggccaagcgtcanaanctggcncgtaangaattngcgtggttgcgacggggagccctgcccgtagctccaaaccgcgtaccgagtcgagccaaatgttggtt

SEQ ID NO: 673497 - DNA, 723 bp, Homo sapiens
  misc_feature (615)..(616): n is a, c, g, or t
  misc_feature (619)..(619): n is a, c, g, or t
  misc_feature (634)..(634): n is a, c, g, or t
  misc_feature (637)..(637): n is a, c, g, or t
  misc_feature (643)..(643): n is a, c, g, or t
  misc_feature (649)..(649): n is a, c, g, or t
  misc_feature (655)..(655): n is a, c, g, or t
atgagcaatgattaaccgaattccgagctccggtacccccaacattggcctcgacgggtccgaagcccatgccgccgtgctcctctggcacggccaggcccatgagacccagctcagccatctcgccccaggcctccttggagtagccaccttccttgacgatgccgcgccggcgctcgaagccataggccttgtcgacccacttgcgcaccgcgtcgcgcagctgttcttcgttgctgccgccgtagatcgtcgtcttgcgcatgttgaagtaggtcgaggccaatgttggttcgaccgcgctatggccgatctttccggtggggaacgacggcgggctgcactggtttcaatcatgctcggagaccacgacttacttgttcttgacgagcccaccaaccacctcgacgtcgaggcggtggcctggttggccggccatctgcgccacctacaggagcgcggcgtggcaatgctcgtcgtctcacacgaccgttggtttcttgacgagatctgcactgacatctgggaggtccacaacgccaccgtcgaggcttatcagggcggatactcggcctacaccttagcccgggtagaacgagcccgcgtcgccgccannaangaggccaagcgtcanaanctggcncgtaangaattngcgtggttgcgacggggagccctgcccgtagctccaaaccgcgtaccgagtcgagccaaatgttggtt

SEQ ID NO: 673498 - DNA, 690 bp, Homo sapiens
aggttgctttgagccgagatcacttcacagcactccagcctgggaaatagagtgaaactccatctctctctctctctccctctctcacacacacacacacacacacacacacacacacacacacacacacacacaagaaaacatgtatagcctggtgcccttggctggggtcaaatagttctatatacctcaatagtctaggagaacttcattgatatccaacaggacaagtgttaaatttggttcaggacactttgttttctctttattaggttttgagatggagatttgctcttgttgcccaggctggagtgcaatggcaccatctcagctcactgcaacctccgcctcctgggttcaagtgattctcctgccttagcctcctgagtagctgggattacaggcttgtgccactcatgcccagctaattctgcatctccagtacagatggagtgtctccatgtatgacaggttggtctcgaactcctgccctcaggtgatccgcccaccttggcttcccaaagtgctgggattacaggcgcgaaccactgcacctggccctcaggataagttaattagaccaaaggaaagaggtcactttcctatggggggtcctgtggttgagaggccccaacttgcccaggatgtctaacactcgggaaggagaaccactggtctggacttcattct

SEQ ID NO: 673499 - DNA, 105 bp, Homo sapiens
gtgctgatcggtacctcaatggtgacgtggtcgcgctggactcccagcaccgtgtgaacgacgaaatggcgcgctcgcgtacgtgagtgtccgacgggacaacgg

SEQ ID NO: 673500 - DNA, 261 bp, Homo sapiens
ctgcgccaccgcatgtttcctccgtgcgacgctcatgtaggcactgaagacctcccggtgcatgcatcacacggcatagctcgcttgccccttattctcagtaccaatacgaccgtgaaagcggcggcctcccgatccttcctgaccattcttgggcttttatgcccagtagggtgtcagcaacaatgctttccactagggttaacctggccctgttggccgagccacagctgcttcatccgcggactctccgcttcctct

SEQ ID NO: 673501 - DNA, 101 bp, Homo sapiens
cctcggtacctgtatgcatgtggaaattggaagagcaaggaacacgttctgccttagtatcctgtatccagagagcacaaagataccttgcatttcagcct

SEQ ID NO: 673502 - DNA, 869 bp, Homo sapiens
  misc_feature (211)..(211): n is a, c, g, or t
ccaagaatcatctgaagcgaggtggcaggtcctaacacagttgtggatgctggataaattgaccggtgtgtgatgctccgtcgtccatccaccggttccccactaagattgatagagtgtctccccctcatcattttcctgaggaacatacttaagtatgccctgacaggagatagaactgaaagaagatttcgaattgcaagcgagttcnagttaccacctcgcgataggccaagggtccggaattggactataaccttacccgtgctgtgattccagtcggatgtcatcaatccagtttgacggagaccgggtgacgatgaatcttccgtcctggatctatagacgaccctaggtggtcccattttgcttgtactatcgtattacaccttggcatggaagagccaaagtcctacgttgtgcaacgtgtgaaaagatctttgtgggtcacccagaggaatccctcatctggtgagctcatgatgcccggcatccatccgttaccccgatccgcctctatcaaggtgaatgataccattcagattgttttcgagactggccagattactgatttcatcaagtgcgagactggttaactgtgtatggtgactgaaggtgctagacctatgaacgaatcgagtgttatcaccaacagagagaggcctgcctggatcttaatgacgtggctcacgtggatgatgcctgtggcaacagatttggctactccgactttccaaccattttgttattggaagggccaaaaaacattggattctcttcccgagaaatggtgttccggctcaccattgtgaagatagagaccatgactgggggcaccgcagccaggtgaatgggtcctcggtgagacg

SEQ ID NO: 673503 - DNA, 153 bp, Homo sapiens
ctgggcgtgatgatgtgcgcctgtagtcctgtctactagggagtctcgctcttgtcacccagactgtagtgcagtggcacgatctgggctcgatgcaacctctgcctcccaggttcaagcaattttcctgcctcggcagagacggggtttcac

SEQ ID NO: 673504 - DNA, 445 bp, Homo sapiens
tgccaatgagcaagaggatgggagaagtcaaagaagggggcgcagctcagggtctgggcaaggagatgagcaagtagggctggggtgtaagatcatgccaattgctgacattttgattccatcttctgccttctccatgtcagcttgtccttggcacaggcaggaccaagtgagatgctctgctctggtcgatgcttctggtccggtgtttcctcctcacccccgtaccctcaggttctcctccgtcagcctactgaagttgccaccattaaggatcctgtcttgcacctttaatgaccttgagctaggtgtggtggcaggctcccagctctttgggaggctgaggtgggaaaatcacttgagcccaggaattcaaggctgcagaaagctgtgatcatgccactgcactccagccttggtagcggctcaagacccccatcactta

SEQ ID NO: 673505 - DNA, 743 bp, Homo sapiens
  misc_feature (33)..(33): n is a, c, g, or t
  misc_feature (114)..(114): n is a, c, g, or t
  misc_feature (128)..(129): n is a, c, g, or t
  misc_feature (138)..(138): n is a, c, g, or t
  misc_feature (165)..(165): n is a, c, g, or t
  misc_feature (176)..(176): n is a, c, g, or t
  misc_feature (178)..(179): n is a, c, g, or t
  misc_feature (182)..(182): n is a, c, g, or t
  misc_feature (198)..(198): n is a, c, g, or t
  misc_feature (257)..(257): n is a, c, g, or t
  misc_feature (288)..(288): n is a, c, g, or t
  misc_feature (291)..(292): n is a, c, g, or t
  misc_feature (341)..(341): n is a, c, g, or t
  misc_feature (363)..(363): n is a, c, g, or t
  misc_feature (376)..(376): n is a, c, g, or t
  misc_feature (378)..(378): n is a, c, g, or t
  misc_feature (460)..(460): n is a, c, g, or t
  misc_feature (486)..(486): n is a, c, g, or t
  misc_feature (496)..(497): n is a, c, g, or t
  misc_feature (510)..(510): n is a, c, g, or t
  misc_feature (513)..(513): n is a, c, g, or t
  misc_feature (520)..(520): n is a, c, g, or t
  misc_feature (602)..(602): n is a, c, g, or t
  misc_feature (618)..(618): n is a, c, g, or t
  misc_feature (635)..(635): n is a, c, g, or t
  misc_feature (642)..(642): n is a, c, g, or t
  misc_feature (660)..(660): n is a, c, g, or t
  misc_feature (666)..(666): n is a, c, g, or t
  misc_feature (674)..(674): n is a, c, g, or t
  misc_feature (679)..(679): n is a, c, g, or t
  misc_feature (711)..(711): n is a, c, g, or t
atctgagtgacaagtacatacaaacgcattacngcgagagagacttagatggagataaaagaccacattgcaatagagggatcacacagaccagtgggatggttcttcggaganaacccactttatgnnggaaacagngtggactctggggacggcctctgcgcnggctgaggatngnnggnccagagcggtacaggnatcggcgtagtgttttagtttggagaaaacaggaagttacactcatcacatcttttgcncagatgatagaattcgaaatccccccggggntgnncatggaatgagccgctctgttatggggtgagccgtgggattaatcagcnacccctcactaggtgttggggntccaccacgcttncnccaccccccgtcatccacagcagcgggtagtatttaggttgaatattccaaatagtcaattatgacagtgaatttcaaaggngaggacttcgggtacacgtgggaacnagacgagggnngatcacgacgcangcnatccgtntgtgtaatcaaagccttctaagtcttgatatgtccttacaaagacgaaggatagagtgaatgtcaaaatttgccaaacaggngttactgaaagtctgnaggggaaagcctagttnggttttntcttagaagtgatttttnaaacgnaacacgcngatangctcgagctttctggagccgattcctaaggcnttgcaggtggtaagggggtcgagagttggctg

SEQ ID NO: 673506 - DNA, 343 bp, Homo sapiens
tgctggcaggatatagccaggagtcgagaccagcccgtgcacacagtgagacctgtctgtacaaaaacacaaaaaatcagtcggatgtggtggtgcatgcccgcagtcccagctactcaggaggctgacgtgggaggatcgcttgagctcaggagatggaggttacagtgagctgagattgtgccactgtactccaagctgggtgacagagcgagaacctgttctccaaaaagataaaaaaaatgccaaccgattattaagaggaatgccctgtgcgcatcttacccctggtcacactgaagagctactccctgtctgtgactctgatttagcctttgcacag

SEQ ID NO: 673507 - DNA, 382 bp, Homo sapiens
tggccgggcgcgatgattcatgcctgttatcccagcactttgggaggccgaggcaggcggatcacaaggtcaggagtttgagaccagcctggccaatatggtgaaaccctgtctctactaaaaatacaaaaattagcctggtgtggtgccggccacctgtagtcccagctactcaggaggctgaggcaggagaactgcttgaacccaggaggcgaagtttgcagtgagccgatatcacgccactgcactccagctgagtgacagagcaagactccgtctcataacacagtacctccttcaactcaaattgcttccccaacaacattgccaggatgttaaataaaacaatgtttggcacagtgcttcatgcgtaggactgctt

SEQ ID NO: 673508 - DNA, 714 bp, Homo sapiens
catgtccctatacttcgtgtgcttttcctttttttttttggagacggaggctcactccgtcacctaggctagagtacaggggcacgatcttggctcgctgcaacctctgcctccctgattcaagtgattctcgtgcttcagcctcccatgtagctgatattacaggcacttgccaccatacccggctaattttggtatttttagtagagatggggtttcaccatgttgcccaggctggtcttgaactcctaacctcaggtgatccgcccgcctctgccttccaaaggtgctgggacttacaggcgtgaagccactcgtgcccggctatatctttccttatacgtgttttggcttcgtaagaggttctgttgagcagtgattggcaactctggctgacgttgctggggaagctttacaaacaaaaaaggatgccccaccggagatccggattccaatggcccggattcaatgggcttggattagaattcaggcttggctatcttcaaaaacttccccagtgttgagacccccttctcgagcatttgacaagtaggtatatcaccttccggaatctcacggagatctgggccgaacctggctcttcccgttgggcttagcctccctaaccttcgccatggcacatcggcatctgcagccatactgggcccctggtacctgttgccactgtcttctcacagttcgacccttggccag

SEQ ID NO: 673509 - DNA, 126 bp, Homo sapiens
  misc_feature (9)..(9): n is a, c, g, or t
ccgatcctnttgctgttactaaatggctgtcacctaaattgctgtcgcatttagatacagccattaagtcacagccatttaggtcacagccttttaggtaacagccatttatggtaacagccattt

SEQ ID NO: 673510 - DNA, 432 bp, Homo sapiens
tgttgatagctgactctagaggatacactctcgctactgtatcctacctacgtgtttctgccaaattaaagaaaaaaaatgcaggccgagcacagtggctcacgcctgtaatcccaacacttggggaggccgaggtgggcagatcaccagaggtcaggagttcgagaccagcctggccaatatggggaaaccccgtgtctactaaaaatgcaaaaagtagccgggcgtggtgataggcacctgtaatcccagctactcgggaggctgaggctgaggaatcacttgaactcaagaggcagaggttgcagtgagccaagatcacaccactgcactccagcctgggcgacagagcaagacaccttctcaaacaaacaaacaaacaaacaaaaaaggattccttaatcatggtaaagccatggtagagtatttgat

SEQ ID NO: 673511 - DNA, 126 bp, Homo sapiens
tggtgagggtgcagagaagagtgatatgccactgaagtccagccataggtgacagagtgagagcggtgtctcaaaaagaaaaagattccttgttgcctctctttgtgctttgcttttatttttttt

SEQ ID NO: 673512 - DNA, 137 bp, Homo sapiens
caggatagacatctagaggatcccagcaccgtcctgagaatcgggggtatgctgtacgaattcataagaacagggaggttagaagtagggtctatggagacacaatatgttgtagtagagtatcaggggacgagtgc

SEQ ID NO: 673513 - DNA, 785 bp, Homo sapiens
catctgtgccgcacccgcacattttaccacctggcggcccccaacagtcacctgtcagagcactccaccctactatgaggcccatcagaagcaagacaccgaggttctcttctgctttgacacttgatgagctcaccctgctgcaccttcgtgagtttgcaccagaagaagctgatctctgtggagacggacatagtcgtggatccactaccaggaggagaacatttgaggaccggtcccccgaccgccgagggcctatcagagaaggaagacggaggagcctcatggcctcggatgagaaatgtagctcggggtcgcgctgtcacccaacgtgaaggtgaccctccgactggacagcccaaccctgccaatggtcacccgctgcctggagatgggggactgccccccaccttacctgcgcacagcaacacgctggcccagagaccccggaggagcgcgcacagctcctgcagcccacgctggagatcaacccccgggcacgcgctcatccagaagctgaatcagctgcgcgcacacacgaaacctcggcctcggctcagctagctggtggagtcagatatacgagcacgaccctgattgctgctggacttgttgacgaccctagggccctggtgggccgcttgaatgactgctttcaaggccctggagcgcacactgacagccaagggggccagaaggactgacaccccagatgacagccccccctccttgagctttatttaccttaatttaaggtatttcttaacccgaaacaaaacaaaaaa

SEQ ID NO: 673514 - DNA, 872 bp, Homo sapiens
  misc_feature (1)..(1): n is a, c, g, or t
  misc_feature (65)..(65): n is a, c, g, or t
  misc_feature (75)..(75): n is a, c, g, or t
  misc_feature (108)..(108): n is a, c, g, or t
  misc_feature (114)..(114): n is a, c, g, or t
  misc_feature (122)..(122): n is a, c, g, or t
  misc_feature (135)..(135): n is a, c, g, or t
  misc_feature (139)..(140): n is a, c, g, or t
  misc_feature (205)..(205): n is a, c, g, or t
  misc_feature (290)..(290): n is a, c, g, or t
  misc_feature (329)..(329): n is a, c, g, or t
  misc_feature (380)..(380): n is a, c, g, or t
  misc_feature (407)..(407): n is a, c, g, or t
  misc_feature (411)..(411): n is a, c, g, or t
  misc_feature (421)..(422): n is a, c, g, or t
  misc_feature (424)..(424): n is a, c, g, or t
  misc_feature (452)..(452): n is a, c, g, or t
  misc_feature (454)..(454): n is a, c, g, or t
  misc_feature (456)..(456): n is a, c, g, or t
  misc_feature (460)..(460): n is a, c, g, or t
  misc_feature (469)..(469): n is a, c, g, or t
  misc_feature (471)..(471): n is a, c, g, or t
  misc_feature (476)..(478): n is a, c, g, or t
  misc_feature (483)..(484): n is a, c, g, or t
  misc_feature (487)..(488): n is a, c, g, or t
  misc_feature (496)..(496): n is a, c, g, or t
  misc_feature (510)..(510): n is a, c, g, or t
  misc_feature (512)..(512): n is a, c, g, or t
  misc_feature (527)..(527): n is a, c, g, or t
  misc_feature (529)..(529): n is a, c, g, or t
  misc_feature (538)..(538): n is a, c, g, or t
  misc_feature (558)..(558): n is a, c, g, or t
  misc_feature (581)..(581): n is a, c, g, or t
  misc_feature (591)..(592): n is a, c, g, or t
  misc_feature (596)..(597): n is a, c, g, or t
  misc_feature (601)..(601): n is a, c, g, or t
  misc_feature (607)..(607): n is a, c, g, or t
  misc_feature (619)..(619): n is a, c, g, or t
  misc_feature (658)..(658): n is a, c, g, or t
  misc_feature (671)..(671): n is a, c, g, or t
  misc_feature (680)..(680): n is a, c, g, or t
  misc_feature (690)..(690): n is a, c, g, or t
  misc_feature (704)..(706): n is a, c, g, or t
  misc_feature (721)..(721): n is a, c, g, or t
  misc_feature (735)..(736): n is a, c, g, or t
  misc_feature (782)..(782): n is a, c, g, or t
  misc_feature (786)..(786): n is a, c, g, or t
  misc_feature (790)..(790): n is a, c, g, or t
  misc_feature (795)..(795): n is a, c, g, or t
  misc_feature (799)..(800): n is a, c, g, or t
  misc_feature (806)..(806): n is a, c, g, or t
  misc_feature (812)..(812): n is a, c, g, or t
  misc_feature (828)..(828): n is a, c, g, or t
  misc_feature (850)..(850): n is a, c, g, or t
ntcttcacatcatggtgtttgtttgtatgattaataagaagcagctttttcttgttatgcttggnggtgaacgtnttcttagcctgtgagatccgaccatcccattanctttgntgtttctnttgattaatagangagnnggggggggggtgaagaaaaggaggaacatgctaaaaaccttatgacaatcatccaaatgtgaggnaagaacaaccgattcaccaactccactttttctattttacaactttctacatctcactcttgattttggccttcctggctgaaanagcctaatgtgaaaagaaactgcactgaaaggtaaaggnggaaatggtgatgaactgggcttatgtgagaatgtctatattttcataagncagccccagaatctttctctcagttanagcntcaggcaaannangttctggttggtgggttctgcgggggtntntnccancactgggcntntagtnnnaaaannatnnttgacaanatcgtgtgtgtgtnanttccctttgcccacntncagggcacntggggaagcccacaggaggnaaagaaaatgaaatgaaatgaanaaaaagtatnnatanntaantattantttaaaaagcanaataaagagaaaagttgaagctgcaatgtgtgtttaagncagagcaaagcanatagctctnaaaaaatctnaaaataagcaaatnnncaaagatataaatgncaagagcaaaatgnncatattaatgcgcgctgcaaaggcattaatagcttagcttaaagcntagnatgntatgntatnngctagnattttnatttttagcaaagctnatgctattaattaaatatatgntagcaaattgctataaggcagc

SEQ ID NO: 673515 - DNA, 447 bp, Homo sapiens
ggcccccagtctgcccgggccggtcatgcccgtccggaacgctataaaaaaggaaaaagcccgagtcctcccttaggaaaaaaaaaatttcaaagccttcgctagtttccgtatggcccgggcccacgcccggctttttggcatacgggcaaaaaaaacccaggaagcccccgaaccggatgtttaaaaaaaaaaataaagcccccctgggggcttggaatccgtcggccgtccttctgggtccccccctggtgtgttttgtgggaaccactgggcctgggaaggggcttcccccctgtgacttccccccgcccggggatttggggctttctttaaaaaccgtcccagccctggataaagcttttccttttgtgtttaaaccccgttggttgtttgggtagtgacttatgtaaaacggtttttttgtgggggggtttccaaggctga

SEQ ID NO: 673516 - DNA, 532 bp, Homo sapiens
cggggtggctcatgtctgtaattctagcatttgggaagtcgagacgggtggatcacctgaggtcaggagttcaaaaccagcctggccaatgtggtgaaaccccatccctactaaaaatacaaaagttagctgggcttggtgatgggtgcctgtaattccagctacttggaaggatgaggcaggagaagtttatgctgcttagaagagaaggcctaagaaggatagagctcacagttgtaaaatctacagggttcatatccttgtatgatttacatttgtatcatttcccccacacacctgcgttacctcctggattctctatttcgtacagccttaacaagatctacctgtggcccaagccaaaaccctagatgatacctcttctctacccatcctctaaatacagacactaaacccaattgatattagctcttaaagacgccctgatctatttccttctttccatatgacatcattttcctcttaactgctcctttctcttgctcctctccccctctccccaggcattatt

SEQ ID NO: 673517 - DNA, 257 bp, Homo sapiens
tagtcactcagtctacatcatcatctttcaatctgcaccatcctcactcagtctacacaatcatcactcagtctatgcactgcatcactcagtctacacaatcttcactcagtctatacaccatcatcactcagtctgtatcatcgtcaactcagtctatgcaatcatcactcagtctacacaatcatcactcagtctatgcactcatcactcagtctacacaatcttcactcagtctgcatcatcatcactcagtc

SEQ ID NO: 673518 - DNA, 542 bp, Homo sapiens
ggcgctccgctccgcatccagctcggtatcatgtcccgccaggcgaaggatgacttcctgcggcactacacagatgtcggaccccaggactcaccccaatggtgctacacctgagtacaaagtaaccgcgcacgttcatctcaaagaatggacccagaggactgtcacaatgaagtgtggctgagtcatgagaacgcgagtacaagcgacattccgcaacgctgcaatggaagaccatggacctacacccaccgcaacctcttccgccgtcctcgagagagttccccggctttcctcccggggcccaggtgtttggccgcgtttgaaggccgtcagtgagtcgaggagcggcgaaagggggcagaggacctgcttcgcgttcactgtgcacatacctgcgctcaactaacagcccccagctacaacggagttcttccggggtggggaggtgacccgacccttgcgaggtgtccagggtacctacacatcctgccaccaagcatagagctacaaagaaaacgacaagataaagaaagagtaca

SEQ ID NO: 673519 - DNA, 134 bp, Homo sapiens
gaatcgagctcggtaccgacagcatcctaaccagataatctggcactgccattgggttgaagaacattgtggacagaacaaagaaggtgacggacagaaaacacaagtgctttacaaacaggcatccgtaaatg

SEQ ID NO: 673520 - DNA, 155 bp, Homo sapiens
gactagaggaccctcttgctgggacttattgcctgtcagtactgtgggtgatatttgcctttagtgcactcttctcctatcgaataaagtggttggcggtggttatcatgggtgtaggtgctacaaggtgccaacctgtatggttacatcacggt

SEQ ID NO: 673521 - DNA, 239 bp, Homo sapiens
ttcagaggatcccggagctatcggttcattgtatgtgctactttgtacagtccatactgtctggatactgtagccttatagtataatttgaagtcaggtagtgtgatgcttccagatttgttcttttggttaggattgctttggtatgcaggctcctttttggttccatatgaattttgggattgttttttctaatttctgtgaaaatctgacatttggtatttttattaggtattgca

SEQ ID NO: 673522 - DNA, 367 bp, Homo sapiens
tattagacgacccttttttttggtacactggagctgtctgtgcggcgtacttggagctgtctgtgcacactggagccatcggctgcgtcactggagctgtctgtcctgcatcacctggagcccgtccctgtgccacaccctggagcccactcctgtgccggcgacacctggagcccgtcctgtgccggcgacacctggagccgtcctgtgcacacctggagcccgtcctgtggcggcgtcacctggagcccgtcctgtgccacacctggagcccatcctccgccagcgtcacctggagcccgtcctgtgccatacctggagcccgtcctgggccttccttcacgtgtgacaagtctcgcggttaaaa

SEQ ID NO: 673523 - DNA, 223 bp, Homo sapiens
  misc_feature (22)..(22): n is a, c, g, or t
gtagtggtgtaaaaagacgggngatggtgtgggagtgggggggttgtggacacgcatgcgaactgctccggggggacgctgtgtgcattattgtactggcatgtgggtgtaccctttcctggacacattggccaggagccagaatcatcttctttgagtctaccaccatcttaatgaacttcctgtacctgctgggagaagttctgaacaactatctctggga

SEQ ID NO: 673524 - DNA, 335 bp, Homo sapiens
agtagcaccctttcgtggcggcgggcataccgagcaagaaggtaagtttctaggatctgcagcagttatccgattttgttcatcaagtaggactggatatacctgtatacgtcattcagcaacttttgccgcgactgcaaaaagcgtctattatcgaatgggatagttcacagcgcgcattcaagtgtctaggccggcagcaggtcaacgaaataatcgcgccatttataagcgaagatcttggcgatatttcggagactatcgaatctcgactgtctcaattcgcgctacgccacagcgttaacaaggtcccagcatcggactcttggggcgac

SEQ ID NO: 673525 - DNA, 407 bp, Homo sapiens
  misc_feature (9)..(9): n is a, c, g, or t
ccagacgantctctacttgaagagcttctctggctatccaaatcctgatactcctgatactattatttttttatttccatgagatgctcagtcgctcaggctgtgggtgcagtgccgcaatctcggttcagggcaacctctgcctctcgggtacaagtgattctcaggcctcaggcacccgataagctagaagtacaggtgtgcgccaccaagcccgactaatttcggtattttcagtagagacagggtttcaccatgttggccaggctggtctcaaacttctggtctcatgtgatctgcctgccttggcctcccgaagtgctgggattacaggcgtgagcaattgtacccagcctaaatcctgattcttaaagtcaccttctcctttaaaccttttttttacccag

SEQ ID NO: 673526 - DNA, 874 bp, Homo sapiens
  misc_feature (1)..(1): n is a, c, g, or t
  misc_feature (112)..(112): n is a, c, g, or t
  misc_feature (289)..(289): n is a, c, g, or t
ngtgtagagaactgctctttggcgctgtacagtggggtcctcttttatccgcccccatttgtcaaatccgcgcccggttctttttggcgcgccacacggccgtgttaaatcnggaaagatttctgcttgcaccccagtgagggatctttgttcctctgtaagcgaggccgcaccacccctctggggagtgtctttgaagcccccttgtgtccttcctcaaagggtctctcccaggggcccccacttggggtccccccacggcggtattcacgcggggccgacgacccantgggctcatcttcgtggccagcccaattctgtggccccgaggcgtgaaaaccagcgaagggcgccgtcttgtctgcgtccaaacaacccccgcgcggagacttctacaactaactgtgaggccctttgaggcccccctatgtggagttagccccattctcctggaacgatggttgtttgccacccgaagatttccggcacgcccgaggaatccccgtgcattctatggggcgccggatttaattacatcccgggaccctctgcggcgggttttctcttataacccagagtgtccaccccccgattctcatgagatcatctcccggtgaaacataacatgatcaaaccttcccctcctgtaccattatcaattgggaaacatttgtccttttccggcgccaccccccgcattttaccatctgaatctctaaaacaacaaatgaatatactcccccttgctaaaactacaatttgtcccccccaccatgtaagacacctctgttcacccctcgttcaaacacactggttttttaataaggttttgataagccgcccccaaaatctgtagttaacggcccacatacaa

SEQ ID NO: 673527 - DNA, 691 bp, Homo sapiens
aagagtggtatcaacgcagagggcccattacggcgggggctgtagtggcttcgtcttctgttcctcttccttcgctaacgcctcccggtctctcgtcagcctcccgccggtcgtctccgtttaacaccgaacaccatgccttcaattaagttgcagagttctgatggagagataacttggaagttgatgtggaaagtggccaaacaatctgtgactattaagaccatgttggaacgatcgggaatggactgatgaaggagatgatgacccagttcctctaccattaatgtgacagtgcagcatattgattagcaacgaaggtcagttcacgtggtgcacccaccagagggatgagcctcctcctcctgaagatgattgacggaacatagaagcaagcgatcagatgatatccctgtttgggaccaagaattcctgaaagttgaccaaggaacactttttgaactcattctgggtgcaaactacttagacactcacaaggtttgctgatgttagcatgcaacgactgttgccaatatgatcaagtgggaagactcctgaggagattcgcaagaccttcaatatcgaaagatgactttccctcttgtgtgtaagcaatgtctggctagtttatggccagttaactttagtgagcttttaaaatgtgggcttgtacttaaacacactttgccaa

SEQ ID NO: 673528 - DNA, 300 bp, Homo sapiens
ggtgaagcggcggtgcacgctgattcgtgatgtcgttctagagttcccctgtggcagcgtgacgccgtacagtgcttagctgcctgcgcgccaccggtcaggccggccagcagctgcgagtgaaggcaaggtgctggttttcatgactgtgtctcctgtggggcccggctaccgggttgccttcgccgcggtctctggcgtcgcgtgtcgggggcatgcgtctatctcacacctttcccgacccgggcacaacggcccatagggatgaatgggtaacaggttgcaggggatagccgcaga

SEQ ID NO: 673529 - DNA, 207 bp, Homo sapiens
gaaccgatggaaaggatgagagaaacgatgagggaaatttcggaaaagggaggagtttgggagtggggagggatggcccagcctgtaaaatactgtaaatgggctgctgtaaaaaccggaatgaattttttggacatgtttggttaattttttttggacaagatttttgtatgtttccttttcaataaaatcagattgggacagtga

SEQ ID NO: 673530 - DNA, 269 bp, Homo sapiens
tttttttttttattcatcaaatatgtttctcttttttaggccgagagcagatgtgaatagcaacacactgctggccatattctctctctgtctgtctgtctgtctgtctgtctgtctgtctgtctgtctgtctgtctgtctgtctgtctgtctgtctgtctgtctgtctgtctgtctgtctgtctgtctgtctgtctgtctgtctctctttctgtctgtctctctttctgtctgtctctctttctgtctgtctctctttctggtcgacg

SEQ ID NO: 673531 - DNA, 642 bp, Homo sapiens
  misc_feature (177)..(177): n is a, c, g, or t
gcctacgacgaacagacctaaaatcgctcatagcgtactcttcaatcaggccacatagccctcgtagtaacagccattctcatccaaaccccctgaagcttcaccggcgcagtcattctcataatcgcccacggacttacagtcctcattagctgattctgcctagcaaactcaggngctacggaacgcactgcacaggtcgcgatcatagatcctcgtctcaagggcttcaagactctactcccgacataatagctgttttgatgacttctagcaagcctcgcgtaacctcgccttaccccccactattaacctactgggagaacgtctctgtgctaggtaaccacgttgctccgtgatcaaagtatcactcgtccgtacttacaggactcgaacgatactgagtcacagcccgtatactccctctacatatttaccacaacgacagatggggctcactcacgccaccgagcattaagcaacagtaaaagccgtcgattcacacgatgaaaacaccctcatgttcagtacacctatcccccattctcctcctatccctcaagcccgacgatcgattgaccgggtttgtcctcgttaaaagaaaggatagaagaaaggaagaaaaaaaggggggggagtgaa

SEQ ID NO: 673532 - DNA, 1035 bp, Homo sapiens
tcaggcaccttctcaggtacttctactcccgaacggattgacatcacgcctgtcagtcagtcgagtgcttcctacaagctggcctctgcctatggggccaggcagctgcagggcttacttgctgcacgcctctttgccatcctcctccccgcaggaccccgtcgttccatgatgcccctggacctgtatgcctatgcacgtggccacatggggacgccctgctggaggagagcgtcgtgcctacaggttcctggcctgtgaacttacgatggcgcttgagcgcagggcgatggcctggtgccagtgtccccacagatgctgctccatctgctgctgcccgaggagcgatctgggtggtgtcgccagctgtatgctggccctactgtaaggccgtgtgacacctggagctggggtggagcgtgcctctccatgaggaggtggagggctgggtggagacagatccggttcccaatgatgctccgctgaggaggtctttgagctgcagattcgaactgtgccatgtacttggagccaagaggaccgtgtaccagaaagaagactctgtaggcctcgtgtgcaattccacaattgtgcccttccaagttgtctggccggtaacaaaggcttgaactcaacgaggataactaaagccccgggatttacacatcgaccactgaaatgcatagtaaaagacagttactggagtgcacggaaagtaaagaaacggtactatcacgatcagaaggaggggccttagggacacaaaattcatgtggattaaatgcaaagagaccatttgtgataaggaatactaaccttagcagtgctataaagaatcacaaaaacaccaaaataactatcaagaaacaaaggatcagtgaccgtggtttaaaatcccacaaataaaaagtgtggaaagaaataacgagtcaagtagaagacacatagcaattggacacacagaatggggagtaataaaaagaacagaaaaaaaatgaatagttaagacaaagagagaaaacaacaaagagaaag

SEQ ID NO: 673533 - DNA, 145 bp, Homo sapiens
  misc_feature (130)..(130): n is a, c, g, or t
tagttagagatcgtccctggtatcccacccaaggagcaacccgaatggaccctactacccgctacaggcttttctagcccagaaggtggctacccaggctactgctaaggactcgtacttcccagttagnctgtgggcagctttc

SEQ ID NO: 673534 - DNA, 348 bp, Homo sapiens
catgttctctgcgtcgatggaaatagtctatcaccgtattcattcacttgagcatgattctgcgaccacaggtctgtctgtcaggacagtgtattctcacagggaaacgatcacctttagcgtcttgagtctgaaatacacaatccagcttgtctggcaccatgaagtttcagcacgtgctcttaacggtcagtgatgtataatccctgcccaacgagctgctggatcatcccttcgcatagactgcggtgtgcatcttcatacttaacaatctcatagtgttgtgagcaaagtaagatgcacatgttgtgtgtcagatggtagctcactattgttacaccattacac

SEQ ID NO: 673535 - DNA, 364 bp, Homo sapiens
  misc_feature (62)..(62): n is a, c, g, or t
  misc_feature (92)..(92): n is a, c, g, or t
  misc_feature (173)..(173): n is a, c, g, or t
  misc_feature (300)..(300): n is a, c, g, or t
  misc_feature (316)..(316): n is a, c, g, or t
  misc_feature (325)..(325): n is a, c, g, or t
  misc_feature (343)..(343): n is a, c, g, or t
  misc_feature (345)..(345): n is a, c, g, or t
cccaaaaggcttcctttacccaagtgggtggttgaataaatcttctcagttccctggctccnaaggcccatgaagaagatgtacaaggcgtncctcaagtaccccgagtggaaacagaagcacctgcctcacttcaagccgtggctgcacccggagcagagcccgttgccgancctggcgctgtcggagctgtcggtgcagcatgcggactcactggagaacatcgacgagagcgcggtggccgagagcagagaggagcggatgggcggcgcgggcggcgagggcagcgacgacgacacnctgctcacctgagcgncgcaccgcnaaagggacggagacaggnangcggcgagccctggggcgg

SEQ ID NO: 673536 - DNA, 156 bp, Homo sapiens
gcaattcactgccaatgctctcgctttggccatggagcgggatggctcagtggggagtcatcgacctggcagccattgcagagtcaggggtagagcgacaagtacttttggagaccagtacccaattacgcgtgcacttaccacccgctgatactg

SEQ ID NO: 673537 - DNA, 340 bp, Homo sapiens
  misc_feature (52)..(52): n is a, c, g, or t
  misc_feature (212)..(212): n is a, c, g, or t
  misc_feature (296)..(296): n is a, c, g, or t
  misc_feature (311)..(311): n is a, c, g, or t
tgttggtcattagaggatcccgcacgaggggtgtccaggctggaggccccanggctctgcgctctccctgcatggtgggcctggagagagcaccagcaccacctcccactttcactggggtatgcttgcccctgtgcctcccaccccaagaagctacaaagagacaggctgtccgtgtccccaacactcctccctggtgtcctgcggactcncctgttctgagtgggctaagtgttgcctgtgggcccagagggccctctcccagtggacaacccatctctctcctctgtgtcccncttgccccccacacntgagggaatgtcttgtgtctcttgttcct

SEQ ID NO: 673538 - DNA, 238 bp, Homo sapiens
ccactctcagcctgggcataagagctactccagcctgtgcataagagctactccagcctgggcaataagagctagactctgtctcataaaaaataaaattttggcagggatcttaaaaattctggattgtgtgtggttaaggaccaaattggacttgtgctgacttttcttaaatagccctttttttgaaattccttgttcatgggttgcgggaagaagggaggtgctcatggtggag

SEQ ID NO: 673539 - DNA, 175 bp, Homo sapiens
cgtgtcctactagcttgcccggatcagcctgccatgcactgaatgtacggccagccctctagggctgtgcttgtgtctgtgggttccaagtcagtattcactgaacttaaggtaccatttatgctctccctgtttgactctcttctagtttctaacactggtgttcaatcaacat

SEQ ID NO: 673540 - DNA, 348 bp, Homo sapiens
gggggggggggaaaaagggggggggtgtgtccccccaagtgtccctcagtatcagggcccgccttagtttggaaaatttcctttctggttttgtttttgggggaaggggggttaaaacccccttacaccttagccccccctttttttttaaagcaaatgtttattgtttttaaaacggggttttttttccctaaagccatttttttttttttggtttaaagaaggtttgctagctgaagcccgttttccataaaaagatgtccgattttttttaaaggggggccgcctttttttaaacccaacccttgaccctttttaaaaaccattaaacctttttttcccccccca

SEQ ID NO: 673541 - DNA, 632 bp, Homo sapiens
aggagagagagagagagagagagagagagagagagagagagagagagagagagagagagagagagagagagtgagagagctcgttagagccacattccctgttcttcccttacgccttcatttccccctgtgcgtcttccacctctctgtgcgctctttcacgacccttactatatttgccgccgaccccattgttcctcttcatgccataagtgagtcctgctccggagacattctctacttggtctttaaccgcctgtgtgtctttcatccacattgctctttgctgtacagctctttccctatcttcccaaattttctttgctctcaggctactcgtcatatcgagcttcctagcgtcatgactacctatccttcatagcccacatttttgctctacttttacctctacttgccatatctgcactctctattttgtgctgcacattccttggcgcacttcgcgtgtctatctagtctctcggcaccttcaagcctccgcttatccattctaatgagagcgagccttctttgcttcttttttcaaccactttttctcggcttccccttcttcattcttctttttccgcgtgtgccttgatccctttggcctcctttgtcgtttcccttcg

SEQ ID NO: 673542 - DNA, 132 bp, Homo sapiens
gctgtcagatatcagagaaccatacaaacggccttctagagacgccagacgctaatctgactctaggccactgcttgccaactcttacccactgtagccaaggtcctttaacctgggttctctgcatcctct

SEQ ID NO: 673543 - DNA, 234 bp, Homo sapiens
tgatgtccagtttaaggcatgcagctgtagaccgggggggagccagtgttccagtttgagggctgtgcattctggagacccggtggagatctgatgttgcatggttgagggccgtgtgagctgtagacctgggcagggagctgatgttccagtttgagggcgatgccgctggatacctggctgggagctgatgttgcagttggagggcgctttgtaggatgagagctgcttctc

SEQ ID NO: 673544 - DNA, 123 bp, Homo sapiens
tatacttacccagtgtgcaacggaaatattgagatggctaacctccagtcttctgatccattgatttgcataagtggtgatgtacaccaaatacacaaaagctggagtataaatatttatttt

SEQ ID NO: 673545 - DNA, 203 bp, Homo sapiens
  misc_feature (77)..(77): n is a, c, g, or t
tacaaataataaaaaagccaggcatggtggtgtgcacctgtagtcccagctacttgggaggctgaggcaggagaatngctggagcccaggaagttgaggctgcattgagcacagcacttggcttgagtaacagagaccctgtcttaacaaacagaaagaaagaaataatatgcacttatttaaacgagtttgaaaaccctctc

SEQ ID NO: 673546 - DNA, 560 bp, Homo sapiens
ttcggccattatgtgtcgggcatggtggctcatacctgtaatcccagcactctgtgaggccgaggcgggaggatcacgaggtcaggagatcaagaccatcctggccaacacggtgaaaccccatctctactaaaaatataaaaattagctggccgtggtggcgcacgcctgtggtcccagctacacgggaggctgaggcacgagaatcgcttgaacccaggaggcgcagtcttcagtgagccaaggttgtgccactgcactccagcctggcgacagagtgagactctgtctcaaaaagaaaagaaaagaatgaactacttaggactaaacttaatcatggatgacatggacttggactctgctgactatattctttcagctgtgacataggccccataaattagtcgaacaacagagcacattcctccaaggactaacgactgaaagctatagctttgaagaaaccgcctgatacggcatggagtccacacgcctagcagctgctgtcctcctaacagcgccgaacggatcggctttcccagtgctccctccagtggcgg

SEQ ID NO: 673547 - DNA, 128 bp, Homo sapiens
tgtgagaaggctacgatttaaagatgtcatttcgtgtaagggcgcagactgctgcgaacagactggtgataacgcctacgcatagtgttagagtttggattagtgggctatttcccgctaagggacat

SEQ ID NO: 673548 - DNA, 103 bp, Homo sapiens
ttttggtttcggttgttcatctattaactatggctgagctcaggtgattgatactcctggagtgcgagataatacgtgcatgtgttctaggatctgggacttc

SEQ ID NO: 673549 - DNA, 179 bp, Homo sapiens
tacttttgcccccccccctaatttttaattgggttttttggaaaaacagttttggcccatgttatctttgtgggaggaaggaggccggctttggtggggctgggtaggggataggatccctcctgggttcccctgctttagaatttaacccgaaataaaaacctagttttttaggggga

SEQ ID NO: 673550 - DNA, 238 bp, Homo sapiens
  misc_feature (39)..(39): n is a, c, g, or t
gctcgacggacttttaatacagcatgaagaggcattatntctataggcgagcgtattaagaatcttcaggaaatagggacacaacggaatggcatcccaagggctggacttcggagacgtcggagccttctccacggaccttccgagctgggcccacgggttctgttttgtctttttagctggactcacacgtatggacagacacagacacggacggggtcaccgcatgggggcggag

SEQ ID NO: 673551 - DNA, 407 bp, Homo sapiens
cttggcctccactggaatacctttaaatacttttcacacctatgtggtgctcctgaaactgagtggttccccctgtgatagggcacggggtagggcacccttccaactcctccctggtgtcactctctcccttatcacctttagtttcttttctacctgtgccttaggtgtcccagtcccctatcttcggtgaatccaaaaatccatatccttttttttgccttgtattctgttttttgattttgtaagtaatacatattctttggaaaaattagaaaatagaaatagggctgggtgtggtgctcatgccataatcccagcactttgggaggccaaagtgggaggatcacttgaggtcaggagtttgagatacagcctaggcaacatagcgagaccctcatctctac

SEQ ID NO: 673552 - DNA, 871 bp, Homo sapiens
  misc_feature (87)..(87): n is a, c, g, or t
  misc_feature (101)..(101): n is a, c, g, or t
  misc_feature (121)..(121): n is a, c, g, or t
tttttttctcatttaactttttaaaggggtctcaaaattcgtggtgacaaattttgtgggctcaagttgtgttctccatttaaaaanttacgtgattttanaaaacataattaacttaaancgtgccacagccaaaaaagaaaaccaaaggtggctccacaaacacatttctcctttcctttcgtgaagggttttcacggatgcgctattggttctatctatttacacccagcctttctactaactaaaatcttaatttgggccaattggacacacaacaccatgttctggaagaccggttccttccaccactggatataacaatgtggggtgtgtggccgggttattcagcgggataaattattacatcttaacgcctttctggacgccttttcctcgggcgcaaagacttgggtgagaaccttggcccagttccccaagcacgccctttcttggtcccacctggtttatgagatgagaccaccccacacgcgagacacgtgcgtcgtgctcctcacataattcaccggacactagacacaaagcgggaccacacaggggtgagctctaacgtcgggcaagagaggctcctcaaaaaaacaccatgtggggccgtgggccaggggacaccactatctgaaccaagggggcacgccaactcgaccacagagagctctccaacgacaccagttgcgacgggggcccatgtgtgtccacgagatttatttataaccccaagaaaggggggagactccaaattctttttacccattcaaagactcaagcgcaacaactttggccctttgcacatgtgttgaagccgtgtgttggcaaaatcacaatcaccgggggggacattagccgggacccc

SEQ ID NO: 673553 - DNA, 513 bp, Homo sapiens
  misc_feature (24)..(24): n is a, c, g, or t
  misc_feature (162)..(162): n is a, c, g, or t
  misc_feature (197)..(197): n is a, c, g, or t
ggtggggggggttgttgtgggggnaataacccgccccctcccccccccccccctccgggggggggcgcgggggtttatgtgggggggggttttgttttttttccccccccagagggaggggggtggccccttccaccccccccccccttttttttttggggncccccaagggccccccccgggggggggtttttttnaccccccccccgccccccccccgggggggggggggggggtgggggggccccccttttccccccgggggggggggccttgggggttttggggggttcccccccccgttttggggccccccggggccccggggttttccccttgggggggtttttttgggggggcccccctttttttccggggggggggggttggggcccctttttttttttttgggggggggcccccccccccccccccttttgggtgtttttcccccccggggggccccccccccctttttttttttttttttcccccccggggggggggggggga

SEQ ID NO: 673554 - DNA, 179 bp, Homo sapiens
ttaacatctttcattactacaatataatatgaaaacttcatatccttggcctggcgtggtagctcatgcctgtaatcccagcacttcgggaagctgaggtgggcaggtcacttgaggtcagaaattcaagaccagcctggccaacatggtgaaatcccgtttccacaaaaaatacaaaa

SEQ ID NO: 673555 - DNA, 195 bp, Homo sapiens
gagattcggtatactcagtgaggatgggggccagtttgttgtcctgtgcatcaagataccatgccggtatttcatagctgtgccttgtgtaacatctgggactcagaagcgaaagggggctattcctagttttattgctatagccattatgattattaatgatgagtattgattggtagtattggttatggttca

SEQ ID NO: 673556 - DNA, 798 bp, Homo sapiens
gttgcttgtccggggggtttttgtgcccttacctgctggtggacccgcaatgcgccctgattcttcgcgccgggggttatccgacctgcctcgaaggtctccctccccgccggtgagcggatcccccgtccgttagcgtacaactctgtttgcgcatggagccgggcgctctctcggccagacgctgtatcttccgctccaggcggcgctctttcgcagtctgaattggacgccgcgcgctttgtccgccacgagggtctttcccctacgcactccctgcgcgcgcccccctttgcccaagccacttctttggcggccagctgttcctgaattgagacccattggcctgactagcgtgggttcctttcgaagcctcctccgcccttgtttacgacgacgttgctctgggggtcgggcgttccctcgtgtggtcgtgcgtcctccccgcccttcttctcggcgcacgctatattttctgcccgctcctccgctccgactcacgcgggcgggtctctctccccaacactaacaggggtgctcgccgccggctctgtttgtctcgcgccctgtgctcaagatgctcgcctcccgtacgacgctcgaggggggcactatcagcgccccgcccccgttgtgcaacccaatgagggccgcctgggctgtctggccccaggggaagcccccctccatttgttgagcagtcacgtatctcaccgccccatttccgcctgccagtgctcgctctcctcgccctcgcggcagctcttatacccggtggtttccctgcccaacaataac

SEQ ID NO: 673557 - DNA, 672 bp, Homo sapiens
ggcttcctctcgagaaggcgccgcgcgggctgtccggcccgcgaggcgtgcgagctcgtgcgcgccatggctcacagtaggttcccgcaagcgctcgcaggaatcgctagccggtcccgggccatggtggggtctgtagacgagaaagaatcaagatggtaggaaacgacacttcgaggtgacctgttcgggctccacgatcaccatatgtcgcggagggctcggcactggcccgtggtggcaggaggcatagaaagcaagcatgaacgtgcccggaaggagagcatgatccagctccatccgtcctcgttctcccaagtgactacctaggcttctcatctatctttccatccttgcgatgctcttctcttccatcctttgcttcacaagtgataggcctggtaatcgaagcgggtggagaccggtacagacggagcaaaagacattatggaaggaccgacagagaagccacgtagcggatcgccagtgcgtgtgccggaagggcagcgacggccagcggggggaatgcagcgttgccgacaccagtgggagggacgggggggacctggacagtccgtgaccgcagggtcgtagagacatttaagacgcctgattgccattacgagtgagggagcgtccagagatgctttgacgaaacgaagacggcgcgaa

SEQ ID NO: 673558 - DNA, 2785 bp, Homo sapiens
  misc_feature (196)..(196): n is a, c, g, or t
  misc_feature (1821)..(1821): n is a, c, g, or t
  misc_feature (2207)..(2207): n is a, c, g, or t
  misc_feature (2229)..(2229): n is a, c, g, or t
  misc_feature (2238)..(2238): n is a, c, g, or t
  misc_feature (2271)..(2271): n is a, c, g, or t
  misc_feature (2299)..(2299): n is a, c, g, or t
  misc_feature (2364)..(2364): n is a, c, g, or t
  misc_feature (2437)..(2437): n is a, c, g, or t
  misc_feature (2495)..(2495): n is a, c, g, or t
  misc_feature (2529)..(2529): n is a, c, g, or t
  misc_feature (2549)..(2549): n is a, c, g, or t
  misc_feature (2561)..(2561): n is a, c, g, or t
  misc_feature (2695)..(2695): n is a, c, g, or t
  misc_feature (2725)..(2725): n is a, c, g, or t
agagaagcatgtgactactcatatgtatctaactttcgaatatagcactattaaatgtagagatctcagtgccctaatgcactgagttatcaaatgatggtgctcgtagacaatctagaatttatatctggaagaaatgatcctccctctcatggatcagctcagtgcccagagtagcggcaaccgggcaatgtcnatcatagctggtgctctcacagcatgcatgcatgtggtaagattggggatgcaagaatatcccaccaccagcatgggcagcaagcaatcattctaccaaattcatattcataagcaacaaaacattcatatcagcacttgcccacagtcatatcgcacaaaaccagcagcatagtagggccccaaggtctcaggacatcccgcaaagagcagcaggagggatcgtatcacaggcacagcattacacgaattaggcgcaaaatcaagcacagggcttaaatacccccaacccgtccaccacaaaggcacagacacacgctcacacagcacacaccagggccctggcgaaggagcccggccacccaagaagaagctggaactcctaacaacaccgtactgtacgcaaacaagaaccccactcttacatcacggcaaactgagacaccacgcgagagacacacgagaacagcacagggcacacacgaagactacgagccaattgatcacgaaacgatcacacagcaagacggggtaaaacagcagacacaaactcctaaataacaccagacgacatggccgaggcaagaccccgaagcaagaaacaaatcccacacaagggcacccagcaggggcgaggatcacatgcatgtccacaaacatcccacacaaaactgcgacatcgaagccggggcaaaatcacgcacccatacactacgaaccgccaccaatcaggggcaaccacacggacccatggaaagcagggaaggcaaccggacaacccaccgacgaggagacgggacgtaagcaagcaaagtgaaaaacgaaaaggaaaagagaaactgctacaaagaggcacgcaggaaacagactcacaactacacactagtacgaaacaacacacacaatggcaaataacaaccacggagtccggacgactcgataagctagaagaaccaagcacaaacaccacagacgacacaacaatgagaaactagaaaacgaacaccagcaacaacacaacagacaactacaaacaaacagaagaaaaacgaacaaacgacgaaccctcgaacaacacaaaactagaagagcaacaagagaccaatcaaatgaaagaagaaaaagagacacaacagacaagaggcaacaaaagagcgcacgacacagacgaaacacacacacaagcaaagaatcacagcacaccacagacatcaacgcacaagacagagcgaacgaacggaagaacaatcagacagcagaaagaagcaacgcaaaacgacgacgcgacgacgcaaccacagacacacgacaccacacagtgactcgcgccacggcacgcacacggcgaaacactgacagacagacagcagcgagacagcagacagtacacagcagcaacgaccgaggagcataagagagagcacgagagaagacgagcacagcacgggagcgacacgaaacacgaagacggacgaccgacagcacgagcacacgagaagacgaaggacacacgcacgacaaaccgagacgaagcacgcacagcgagagcagagagacaaagacgagacgggagaacgacacgacacgaacggcacaggagagcgacgaagaaaacagccacagacnagcacaagggacgagccgagtagacagcgcaggacaccgcaagaggactacaccgaacagcacacaacgacaaagacgcgacgaagactgcagaaggagagcgagacgagaagacaatgtagcacagataactcgagagtgacgcacagacgcgatgtagaagcgacgcagcgacaagacgacagacagaacacgcgaagacgagaagcagccggacgagagcaacagctaagcacagtgcactgcgacagagatcagcagcacagaagcacgtacagcacgagaggacaggctcagcagagagaccgacgcggtacgacaacgagcagcaagacacacgcgagacgagcacagcagacacgtagactgacgcatcaagagcagangacacggaagccgacacgcagnacgcagctnagccgagcgccagcagtctaaacggacagatgngacgacagagacacgatcatgaacgagnacgtaggcgaagcacggacgaacagcagacagctgaatcacgacagacgaagacgacacagcacnaccgagacagcagacgacagcgacgcaagagccagcctgccaagaacgagcgagctctgaggactacgcagcngacgagaagccacagacagagagcagtcgacatgagatgtgaacgacagcaagcaacngcgcgtcgcacaagtaccaccagagagccgacancgcaagacgagcacacgcangacagcaagcgngccggacgagcgaacgagagcacgcacaggaacgacagcgaagagacgaataggagcggtcagacgagacgacagcacagcggaggtagcaacgagagagcacagatagcagcaagcacgagagcagcacgagnggagcagcacgaccgaagacgcagaacagnagcacatgcgctagagacgacgacacgcacgcgaacggagccagagagcagcgagaccga

SEQ ID NO: 673559 - DNA, 1068 bp, Homo sapiens
agcgggtctctgccgaccggtgcagggagggctgccttattccttgcagtacgccttgaaggcttccgggccgttgaagtttacgatcgagggcagtgctgttactcagtgtgtgccggcgctcggacggcacggtgagatagagattcgagaagacagaggctggctcccgggaggtcacgtcctcgcagaggcctttcctcctctctccactaatttgtgttctacttggttccgtcgtagacccacgacggtttccagaccgccttctatccttagatccattagaatgttggttggcttctttgtcagatgaccgggcagctcccagatgctgtccgtggaagctgcgaatcgacggatgccagggaggacctgtgctctggagttgggcagccaggatgagtctggcgagccttgcgaggtagcaagacgatggcgttgcggacaggcgtgcagtggggcttggcttcccgggtaccttgcggggggctgtgttcgtggacgccggtgcagctctggctgtgcgtgggcctgggattgggctactgtgctgagtgccacgggcagagtccgggccgcattgcgctcagcttgcacacatagctgaagcattgagtctggtgccaccaatcttatactactttatttcgtgcctgggcagcaccctggaacgctgtggcttgcgtgtgcgcttcgtgcgctccttgcgtctgaacatgaggctgtagacgttgggcttcattgctattccgtgccccctgttgggccccaaagtctcccggcgatctggactcacgaggttcatcggccccgcgggacagccaggaccttccgtggcgttgggaaaattttccttaccattgctggcaagaggttgcgcggatttggagtatccgttggctgaagaacagacttggcgcgtgttctggacattttcggcccgggccggtaggcagaactaatttttgaagccatgggtgggttggggccccttgtggtggaacacgggaaggtgttggcgggccgtggaacaccagtggggactttggagagtgggaagggagg

SEQ ID NO: 673560 - DNA, 368 bp, Homo sapiens
ctccatctcaaaaaaaaaattagctggacgtggtggcacgtgcctgtaatcctagctactcaggctgaggtgggaagatcactgaagcccaggaggttgaggctgcagtgagttcaagcgattctcctgcctcatcctcctgagtaattgggattacatgcgcctgccactgcgcccagctaattttttcgtatttttagtagagacggggtttcaccatcctggccaggctggtcttgaactcctgaccttgtgatccacccacctcagcctcccaaagtgtgaagtgacagccttgtgtgtgatctttctgccctccccaagtttgcattttccacattaaattttactttttcattaaaaaaaaa

SEQ ID NO: 673561 - DNA, 191 bp, Homo sapiens
tgactcactataggcttcagccactttcccaacaaacagcaaatctccgtcgagttgaactcgtgactgaggcaatgggggcatcccaggcaacacaggtgaaggtttgctaccgtggcagcagggcgagcgtggcaaaagcacgctctgggtgttgaagaggaggcttcacccttaaatccacaccaaca

SEQ ID NO: 673562 - DNA, 810 bp, Homo sapiens
tgtgggccgggtctgaggccttggtttctcttatacttttccactctaggccacgatgccgcagtaccagacctggaggagttcagccgtgctgccgagaaagtttacctcgctgaccctatgaaggcacgtgtggtctcaaatataggcattctgatgggaacttgttgtgttaactgtaacagatgatttagtacgacagtgtcttgctctatggctccaggctgccgttgctgtggattgatcatggctcactgcatcctcgactcctgggctcaggcggccctcttgcttcagcctcctgaaatagcagagactgcaggtgttggtgtatacaaaccagacccaagctcaagatgtaaagaagattggagaaaattccacagtcaaataatggcggattatgggtagccaaggaagcccgaagtgttacctgtggaaaatgagtgaatggtttgaaatgaagactttgtcggtgtacttagaaaagtaaatatctttggagatagagaaagtgttgggaccagaacagtactttatgtaactaagttgggctttgttaggaaagctttagaaggtcatttttttgtattattcttttttaattactttagacgtgctagggattgaaaatgtttcagttaagaaatgccttttattttacttttggaaatgggacacgaaatggaatcttgtctaagaaaatggagatataagatgttggtaacaccattaattggccctgaaaatttgttcgcattgaactgcagtatttggaagcactttttaattagtacttcttaaggaatt

SEQ ID NO: 673563 - DNA, 1230 bp, Homo sapiens
ggagatctgcgcaggggttcccttggccgatctctctcacctcatcttgcaaacctaaactcgagcctggctgttcaccggcactagcatgctctcgccatggtctcagcgatgctgacgtgcaaaagcagataaagcatatgagtggctttcattgaacaaggaagccaagtgagaaagcgaagaagaaatagatgcaaaggcagaagaagagttcaacatagagaaaggtcggctgtgtgcaaggcccaaagacgtacagattatggacatattatgagaagaaagagaaacagatggagcagcagaagaaagaggcagagttgtaccaagttggatgaatcaaggcgagactcaaagtcctcagagcaaagagatgacctgtatgacagacctagctaagatgaagcaaaacagagactcagggaaggtggtaacaagatagcaaccagggaccaagggctgcgggatggactggttctccagggtgggtaccagtagctggagccccgagtgatggtcggaggcaggaaacaagatttccctctggtagaggctgcagtgcagaaggcacattcctatgtacgaaaattgcgcacaaaaaacggatgtagatgttccacagtgacccaggagtcctcactgcctgaaagacatagctggtggagttggagactctataatggagatcggaaaaattaaagggttgccaaaaccgggaaaagccgggagcgaacacatacgcccaagacagagtgaagccggaacgtccggcgagcagtgggaggtgcaaatgagcaaccatggacgtagagagggaactaaaagccatccaggagagcggcaggacggtcgccaggccccccaggccgtgatggcgcgaagcgactggacaggtgggaacacgaaaagcgaggaaacctggtcatgcgggagagcctacccctcatacaacaggccacgccaaagagatatggctgcggacaaagtagaacaccagacgaaaaggccacgacaagggagcacatccaggacgatcggccctaagatggtgacaacacagacgggagacaaggaacacaggacgagctaataacacggagaaccaaaccacaagataataccgaaagagggcaccaggtacacgcgggacacagagaacacacagggaaggaggaacaaatgaggagcaaggggaatgcgaggaaacgacagaatcacgtaggaaaa

SEQ ID NO: 673564 - DNA, 321 bp, Homo sapiens
tccccctccctaacgtcgatcacaggcgcagcagcacggagagagggagcccactgaaaggaagcgttgaataagtaccatacagaagaactgacatctttgggttcttaacaacaaaaactcacattgaggaagcgagaaaatgaaaaagggaaagaatttaatctgaatcattggacagaaatatgtggattactaacccacccccataatgcatacaatttcatactacaatggaacaataaacaccacaaatcattgcaatgcattccaaatattagcaaccaaagatatatgaacatataacaattgaaactgctt

SEQ ID NO: 673565 - DNA, 640 bp, Homo sapiens
agcgggtttacaccgatcagtactaatccggaccgaaccgatccggattaaggggccggaggcgggtcctgggcaccagcggttcctgacccaccccggccctccgctgccgcacccgagtggcccccagccgagcgggcccccacctcctggcccggcctgggcccttctgcgcctcccttggcctttgtccagcgccaggaggccggtcccgcgcccgcgtcagggcgcctggctctagtactgctgatgcccggggatctagcggccttcgttgccccccctccacctcagtccgacctttgcgtggagcccggcgcacggctggctgctgcccgggcggggaggttgcggctgctcaggtgaggacccccggactccgtccccgggacctgtcccaggggcgcagagtcggcagccggtccagcagacgaggctcgtggctcggggcccccttcccgggagtgtagcgctggagacgagcggctggcggcaggcccgaccctaagtggaatgaacttgctataacgcgtggatcccatctgacagagctaggacattccttagacggccaaggctttactggagtcaggtgtacacgtaagtgagttcacatctgtaatcccagtctcccaaacag

SEQ ID NO: 673566 - DNA, 558 bp, Homo sapiens
  misc_feature (1)..(1): n is a, c, g, or t
  misc_feature (384)..(384): n is a, c, g, or t
  misc_feature (538)..(538): n is a, c, g, or t
ntatgttctcaatctatactaaagctggcgggtgtcatatactgacgatctctcaagtgtgtttgttctgtagcagctatgttcacagttcgtgcgtatcacgaattcgtagtacaggaaactggcatgtcagccgctataggcgggccagactctcattagctggagtctgtctcgctgttcaccgctctgtactgttctccagaagtttaatgacctcacggcagctgttgccttattgagtgtttaagtttttgcagtagtgttgttttggcagtaccgctgtccaagtaagtgtttcaaagtagcagtcacttcgtaagaattggtaatgccacttctttaacccagaagggattcgatagtttgttggtgatgccttanaggtagcaagttgcaaggcgaaagtgttcaagctttttgggtaaagtgtagtagcattctggcagtatttaaggttggttcatgatagtggtctcagttggctttccgcatatctttgcttgtgtcgctcgtgctcctgttgtaacaggtaaantatcacttggttcattctgt

SEQ ID NO: 673567 - DNA, 625 bp, Homo sapiens
  misc_feature (17)..(17): n is a, c, g, or t
  misc_feature (101)..(102): n is a, c, g, or t
  misc_feature (104)..(105): n is a, c, g, or t
  misc_feature (118)..(119): n is a, c, g, or t
  misc_feature (123)..(123): n is a, c, g, or t
  misc_feature (158)..(158): n is a, c, g, or t
  misc_feature (165)..(165): n is a, c, g, or t
  misc_feature (179)..(179): n is a, c, g, or t
  misc_feature (239)..(239): n is a, c, g, or t
  misc_feature (421)..(422): n is a, c, g, or t
  misc_feature (425)..(427): n is a, c, g, or t
  misc_feature (431)..(431): n is a, c, g, or t
  misc_feature (433)..(433): n is a, c, g, or t
  misc_feature (436)..(437): n is a, c, g, or t
  misc_feature (450)..(451): n is a, c, g, or t
  misc_feature (455)..(455): n is a, c, g, or t
  misc_feature (464)..(464): n is a, c, g, or t
  misc_feature (474)..(474): n is a, c, g, or t
  misc_feature (476)..(476): n is a, c, g, or t
  misc_feature (482)..(482): n is a, c, g, or t
  misc_feature (516)..(516): n is a, c, g, or t
  misc_feature (522)..(522): n is a, c, g, or t
  misc_feature (527)..(527): n is a, c, g, or t
  misc_feature (531)..(531): n is a, c, g, or t
  misc_feature (533)..(534): n is a, c, g, or t
  misc_feature (552)..(552): n is a, c, g, or t
  misc_feature (562)..(563): n is a, c, g, or t
  misc_feature (588)..(588): n is a, c, g, or t
cccagggcgaagctganagctgggcagagctccagggaggcggccacacgggaggctggagctcttgccctgggaggcaggctggttccctctctcacccnnannccactggacccannactnaggctgaggccatgagtaatggatggaaccatccncccaccnctcccccacaacancccctccaccaccctccccaccactccctccaactttctcttcattttcccatccacaancacaaaaaaacaaaaacccactcacacccacccacacacaaccaacccacacctccccaccacacacacacacaccatctctatccccaaccaacacccacccacactatctctcaccctcacaactccacacacaaaaccccacccaccaaccacaccaatcacactcacacatcccacgnncannnccangncannaaacccacccccnnacanaggagcgtntcacagatananacaaanattcctggagagagacacacacaccgactcaggnggaaangaggngagngnnagggtgccccgggggagngggggggggnncaaggacagggaggaggcctggggnccctgggctgctgccgcccgcctggaccccgtgggct

SEQ ID NO: 673568 - DNA, 504 bp, Homo sapiens
  misc_feature (399)..(399): n is a, c, g, or t
ggtcaggtgagcgggcgcgtcccgcgacggcgctgacttcccgaggcggttcacgtaaagacagcgagatcctgagggccagcctgggacaggaggctgtggatatggcagctggctgtctgccaaggtcctggggccacgctgcacgcttgccctagctgctgtccttgggggactactgtgtggtgactgcgcccctgctgcctgcggctccggggacgccgtagagccgcggcgctgcgcgcattggcccatggctctcgctgcccctgcgcttcacgcctacctggctcgctccgtcagtgggccgggctgatttgttccaggtgttggcccaaggggaggcccatggggcccccaatcggaaccaccaccgcgggaacccttggggacaggacnggcgccgagccacgttgaacacaggaagcgcaagttgcacccggtgcaacaaccccgggaggcatggattccagttacaggactacgaccacagtaccgtgaacg

SEQ ID NO: 673569 - DNA, 137 bp, Homo sapiens
ctgaatctaggtatgcactggttattgtacacagtgccaccgccctttacagaacatactactctggtccaggggagctttcaaccaggcaaatgcacttggccaggtttctgcggatgctttttggactcgctgtg

SEQ ID NO: 673570 - DNA, 801 bp, Homo sapiens
taaggcccatttgattttttggttttccaataagggaaatagtgggtattaggattaggattgttgtgaagtatagtccggatgctacttgtccaatgatgtgtcaaaagggtagctttactgggttgccctcccgattcaggttaaaatgaggagtgtctagcggctaggagtcaataaagtgatgggtcttagtgggcgaaattattatgctttgtgcgttttgggatattatggaggatggggatatattgctcaggatagagagatagcgatagtcaatagggcaaggaccgcctaccttatttttggttagggacggactccggacaatttttgtgtagcgcaaataggaaattatcatccgggctatgatagtagggagaaggggttgttaaacgggtgttcggctaagggtatacatctagtctgggggtcgccataggaggtctggtgagaaatagtggtatcaatgtcatctaaggacagagcattgaagagaatgtaagccgagggcgtctttgaatggtcgtacctacgggtgcggaaggtagattttaaatccgagaatgggagcgggtcgatcccctcaagggggtttgttcagacccccgtattgcgtccacaaaatacgggacgtggtggactcgcctgactaagggcttgccacaaatatggaagcgcacagatagaattgcaactggtaacaacatccgtctgaaagggtcggacctcgtccaaaggagataggccccctcaaaattcttggaccacggttgcccccctttgatgtatcgcgga

SEQ ID NO: 673571 - DNA, 819 bp, Homo sapiens
tccgaggatgtagtctagatccgaagaagctagacgatcttccttcactgataggtaaagaaagcctgcccaatttctctggttagacaaggcgtttcattgtttccgtaatcggcaagcctgtccttggttgcaataaggtaggccccgtccatggtaatacctgttggttccccccaacctgtattcagggtacaatggccgtgtgagcaattgtctagagcaagagtgtaagagtcttgtgggttggaagagttgcagaaaggagaactaagtggaatatgtgcaaggctttctaagaagaatgggaatgttgggaatataacaaccatggcttatgactaaagtaaatctaaaggagagacagtggtatagtagtaagtaaggaaggtcatacgctttggagatggagtaatgagaatcttgtagaaatatggtgcagactcccgagtgaaggatgataacagcttcctcatactacaatctccacaagaacccaagtctcttgaattggtcgagttttgtacgacaacagcctttgtctgaagaattgcactacctcagtatcagacatcccaggacgtggaactctgggagggagaagtggtcaaagagctgtctgtggaagaacagataaagagaaatcggtattatgatgaggatgaggatgaagcgtgacaatattgcaatgatgctgggccgtaaattcatgttagtgttagcgagccagctgccggtttgtcaaaatgtgactgcacctaagaatgtatcccagcacgagatgtacttacttagtaccacttgtaagatccttaaccc

SEQ ID NO: 673572 - DNA, 322 bp, Homo sapiens
ttctgcaaggacgtagaaagacacatacatctaattttaacgtctctctctctctcttttttaacataaaatactgaaattaactttatatgcaaggtgtgagaccatgattcaattctatcattttatattctcaaatcattacccagtatattaatagcataaatggcagaatccctcttgttacgtgaattaaaaacgttaccctgttactagataaaattacactcaatttctgtgcccatttcaattgaaatgggcacagaaatttcccatgtatttcccccaaagaggcacagactccctcatcatcagcatcccc

SEQ ID NO: 673573 - DNA, 115 bp, Homo sapiens
acgctgcagttatcctttgagacaccaaaaaaagttgcttccctatggttacattgttaattccataatcgcatttacaatatcattactgttgttcttctctgctggatacctt

SEQ ID NO: 673574 - DNA, 140 bp, Homo sapiens
ttcgattggcgggcaacttatttgggaaggttaaatgagtccatatttatacagtacctaggaggttatgtcctgcagagattgacgtgggtcgtcgaggtgcagcaccctgttgctttctatcacagatggggatagca

SEQ ID NO: 673575 - DNA, 538 bp, Homo sapiens
ttatgctaaggtagacgatatgtctggtcggaatagtagtataaagatcacactcgtacatgagtcctcaccaagcagtgccataggaagagtggtacgtaggtaatcagtaagggcatcatgcctaaacacatagaggatgccagaagcaaactccctcgagactacaatctagtgccgtagttgccatgggtacctcgtttgcacggcgtgcgaattcagaagatggggctagaacgtacgatgttctccattgctgcccattgcaggtgatggctcgagcactacagtttacaatctcgcttataacactaacttctactagttccactgctcaatacggatcctaatagatcaatgatataagtctgcgaatgtacccgtgtgctgttcctagagagacatgctggttagcattggaagtcaaactagcaaagtctatcgctaaaggacttgactacaattcgtcaatcggtggcactcctatcaattttctataagctcagatattcacacataaacgaccgtatcctagcct

SEQ ID NO: 673576 - DNA, 667 bp, Homo sapiens
gcccacctccacctcccaaagtagtgggatgataggcgtttccttctctttcctcctttctttacttttctttttctttttctcctatctcttcttctccttcttccctcctcttgtcttccttctttcctctcttctccttttctctctcctcttctcttctttctttcacttctcttcttccttctcccctcttttttctcttcttcctcttctatctctctctcttatttctctctctatcttcttctttctttttctatcctctctcttcttctctcttcctctttccttcttcttttttctttctttcccttttcttttctcttatctcttctcctctttctctttttccttttttttatccttcttccccctttttctcccttttcccccctctttttccctctctttttctcttctcttcccttcttttcttctcccctcattcctgcctccttctcacttcccccttcctcctctctttcctctctcttcctctcttctcttccccttctcctccctctcttccttttctctcttctctttctctcttttcttttcttctctctttttcctctctttttctcttcctttcaccttctttccttctttcttctttctttttccatctcttctcctctttcctcttctcttccttttaccg

SEQ ID NO: 673577 - DNA, 141 bp, Homo sapiens
ggatcacttaggggtttcctggtttggtggatattataaattatgctgccataaatgttcttgtgcatgtcatttagtatgcatgggcatacatttctaatgggtatataaatagaaatggaatggctgctgtacagatca

SEQ ID NO: 673578 - DNA, 502 bp, Homo sapiens
cacgagggggctctcctcggtgaatcgacgatcagcgtcacgacacttggcgcgccattcattcgcggcctatctggacagtttgcgattggccagttcggcgggcgcaatgtcgttcttgagtggcaggaggcacagcagaacttcgtccttcgtggagccaccccagccgctactccaacgccacgcgcaaccacgacgccgactgctaggccaacctcgacgcggacgccgaggcctgcaccgactcctcgtccctgttgccgtgtgtgcaccaccggaaaggcgtgcggcaactcctgcatctcgcgaagcgacacatgccgcgtaggccccggatgcgcgtgcaacgggtcgacgtttgcggaggcctttccagcgcagggcggcccgctggccgaccttgcgccaagaacgcagcctccctgggagtaaagggagtgtcgctaatttttccttaccacggcctgcgctcagcgagaccacgacccgaggaacgagc

SEQ ID NO: 673579 - DNA, 146 bp, Homo sapiens
ggggggggggggtttttccttttttttgtgggggggaaaaagccctttttttgtttgggttttaaggataaaaagggcccccaccgggttgttattattccgggattttgttttttttatttttaattggttaattttggccctta

SEQ ID NO: 673580 - DNA, 955 bp, Homo sapiens
ggggatgtagtgtttctgttcaccttcgtttactatgcctgtgtcttcgttccaccacgctggggtcgtgtggatgcgaatggatcacgtagcacgaggatgacgtcgtctacccagtggcctgcaggacgctgcctagatagtcccagtcatgctcgtcttatgcacttaccactcctgccaatgtaggtgactgtccatcttcgtgccagagtcttctctccagggtgtcccgaggcgtattaccgtgtgtcctcggctttgtctcagtcatggagtgagtggtcttacagcactctttgtctgtgccctttcctgattcacctcacagcatctagtctattccagtggtaagcgctaggtccagcttcacgcgtcgcggattgacaacgttagtcgagaagcacgatgtcgcggattttcatcgcgttgatgcagttgagcgcttctggataaaccgcgtgggaacccaagggtggggttcctttgccatcaaattgggtttggctttaccctgccccattggcccattttggttaagacaatcggaaccttgccacctttgccctacaacaatttgccctttgtggcaccgttgcttccaggggcgttaaaaggaagccaaagcgtgctccctttgtggcaaaatcacctgtctgtgtggcacttttggtgccacccggcatagaaaaaaagaaccctttggacccctttggcctagaatatcgtggccttgtggcccctttgacgccgcgaatcccatctcaagggggttttacccacctgggtttagtaaacggaacgttccagaacatggggaccccaactgtggcccctttgacaaaagtgtagaatggaccccctatttaaagtgcctttgttggccttccagggtgaaccttcccatacgaaaaggcccttacctttggcggttccaaggtgggtgtcgccaagg

SEQ ID NO: 673581 - DNA, 143 bp, Homo sapiens
tcgactctacacggatccccccctcgaaacccagtactgactttgtgcaacctagcggcctggctccactgatccccactcatcgccctccgcgtcgtgtccaactctgttatcggtaagccaccgggtagcccgtactgccc

SEQ ID NO: 673582 - DNA, 154 bp, Homo sapiens
tggtagactcccacctaggccagctccccatttccaaacaggagctagcctagggtgccaggagagcccgagaactgggggagtagcaggccgaaggagaatacgagcgaggaagcagatcataggagaaggaggccaggctaagccggaatac

SEQ ID NO: 673583 - DNA, 544 bp, Homo sapiens
  misc_feature (3)..(3): n is a, c, g, or t
  misc_feature (6)..(6): n is a, c, g, or t
  misc_feature (9)..(9): n is a, c, g, or t
  misc_feature (13)..(13): n is a, c, g, or t
  misc_feature (35)..(35): n is a, c, g, or t
  misc_feature (47)..(47): n is a, c, g, or t
  misc_feature (91)..(91): n is a, c, g, or t
  misc_feature (117)..(118): n is a, c, g, or t
  misc_feature (120)..(120): n is a, c, g, or t
  misc_feature (131)..(131): n is a, c, g, or t
  misc_feature (134)..(134): n is a, c, g, or t
  misc_feature (145)..(145): n is a, c, g, or t
  misc_feature (157)..(157): n is a, c, g, or t
  misc_feature (191)..(191): n is a, c, g, or t
  misc_feature (231)..(231): n is a, c, g, or t
  misc_feature (250)..(250): n is a, c, g, or t
  misc_feature (261)..(261): n is a, c, g, or t
  misc_feature (282)..(282): n is a, c, g, or t
  misc_feature (318)..(319): n is a, c, g, or t
  misc_feature (328)..(328): n is a, c, g, or t
  misc_feature (330)..(331): n is a, c, g, or t
  misc_feature (335)..(335): n is a, c, g, or t
  misc_feature (349)..(349): n is a, c, g, or t
  misc_feature (355)..(355): n is a, c, g, or t
  misc_feature (362)..(362): n is a, c, g, or t
  misc_feature (368)..(368): n is a, c, g, or t
  misc_feature (422)..(422): n is a, c, g, or t
  misc_feature (462)..(462): n is a, c, g, or t
  misc_feature (476)..(477): n is a, c, g, or t
  misc_feature (479)..(479): n is a, c, g, or t
  misc_feature (515)..(515): n is a, c, g, or t
cancancantcanagcgctcggcgttcaggaaaangagcagcagcgnaggcggctgcttcagcggcgggcgggcgccaaaaaagccccgancgaaaaacctgggaaggccgccgaannanccccggagganganccaatccgaanccaaagcgccancgccgcaaaaacggaaaaagagcaacaatcgccnccaaggcccaatcgccggtggctgtccaaatgcctgggangcaaaaaaaaaaaactganccaaaaaaaangttcaaaaaaaaaaaacgcantgggaaaagctcatttggggaaattttcaaaaaaannaaaaaacgnanncaanaaatcgttgctaanaaaaanaaaaaanttgaanaaaccgaaaaaaaaaaaaaaaaaaatcaacaaaaaaaaaatgtcttaaatcaangtgaaaactcaaatgtaaaaaaaaaaaatgggtcaaaatnaaaagggtctaaannanggaaaaaaaagaaaaacctgggcggtggttcaacantggatcttcttcgagctggtccaattgat

SEQ ID NO: 673584 - DNA, 502 bp, Homo sapiens
gctgcgccgcacggtgtccctccgccgtcgaggcgcggcttcttttcgtatccttccaccgtgcccgggcggggtccaggcggctcaccgggggcggcgacgcggcggcggtgcgggcggcagggcagcggggcgatgaggtgaggacgcccgggaaccggaggcggcaccgcgcggcgcacggacctgggacgcggagtcctgaagccggcggacggttttcgtacgggcggccgtgcgcgaggcgaggagagaacattgaaagtattctctaagctatttgaagagcagtgcactaaatgcgacctgggggtccaaggctgggtcctagttagcgcgttcattgcacacggtgggggcataggcgcgccaagcaaaattccccacacgaacacgaattggggttggggttggcaccctttggcggcccagggacgcaccaatgcgtaagcgcccacagcttcgttcctcacttgcaccatccagccagagatccacgccg

SEQ ID NO: 673585 - DNA, 142 bp, Homo sapiens
cagttgtcacgtggccgttgtcagtgtacattagtgcgatgagtaggggaagggcgcctactagggtgtagaataggaagtatgtgcctgcgtacaggcgtactgggctggttgcctcactcgggtgatgatagccaaggtg

SEQ ID NO: 673586 - DNA, 132 bp, Homo sapiens
gtaaaacgggaacagaaccactcgacctaggtcccccatctgtttgtaaaccttcctgaagggacagggaacctcccaggcagttaaatataattctctatatttctagtaaagttttcgatatgtttctga

SEQ ID NO: 673587 - DNA, 123 bp, Homo sapiens
cgccttgtccctgagacactctttccagcccttccttcattggtttaggattctgctcgcatccatgagacagctcacatagcatcatgaagtgtgacattgatatccgcaagacctcgtatg

SEQ ID NO: 673588 - DNA, 118 bp, Homo sapiens
cagcagcagcaacagcagcagcagcattccctactgtctgcaccaggccctgcccaggccgtgtctttctcaggcgggctcccttcccgagagcccactgcaggtataatcctgttcc

SEQ ID NO: 673589 - DNA, 190 bp, Homo sapiens
gtcgttagcacctgacaagagcaacgttttccctggaatcacaaatggccaacaatgaatgaacagctctctgactgctccttctgctccagattaactatccagaagactagctgtcagaagcaccgcaaggaaccgccaccattactgacaccagcgttggttccgtctgctgcagttcctgccgcaa

SEQ ID NO: 673590 - DNA, 814 bp, Homo sapiens
caaaatggcgtcagttgtaccagtgacaggacaagaaacttctggaggtcaaactggggatagctgccaagctgggatcttgatgcgggacttcaggtcctaagtggcatttcacggagcgtttcacaaagaggtcactaccgggtactacaacaatgtacattcaatggtgcacgcaaggggagcatctcagggaattaccatgggtgcttgggcattgctaccgatggccctttaagcataactccttatacccatacagagcattctacaatgccacggagccgggattccagacaatatttacccagtttggaacgcagtgaccacaacttcttgcaagctctccttcaaatcctcacagtgaaccctattgggccctgaatggcccaattccgcgtagaagtgagaaccatctaatttcgttcaaaattccggtatacgcctcggaggctctcccatgttccacataaattcccgtaacgctaacgggccccatctcacacccatatcccaaaagatttacacgcacctctctttgcacccttggagtaacccgtgtttgacatatcacagacacatcctcatcgtagacagaacaaacaatcaccaccactttacttcatatcatagctctacactcggtgctcgcccctgaggcggaagtaggttgtgtgagcggggtgcccactgacaagaagaagaaaggaaggagcgccttatagtgtcagaagaaagagacagccacactatctgcaggtgcgatgtgagcggagctgctagcgtgtgagggtctcaccccaaagcattaggt

SEQ ID NO: 673591 - DNA, 333 bp, Homo sapiens
ttttttttttttaaaaaccgccaaaaacaaaaaggctatcccgccttttgtccggccgccgcccataaaactgaaaatcgccgggggcccccccctttttaccgggactgagggataatccccaatttaattgttttttttttggccaaactaagcttttcccccccccccggggcgggaaaactttggttttatttttttttttcccccccccttcccttcgggtggggccccccccaggccccccccctttaagggttcccccccgggggccaaccaaaaattttgggggcttggaaaaaaaaaaaaaaaaaaagttttttttttggccca

SEQ ID NO: 673592 - DNA, 501 bp, Homo sapiens
ggatccttacactgggtcgagttcgaacctggcaggtgactgtcaacaactcctccttttctcggagactgaggggaatccctgcttcttggacatctagtagggaataacctgcttgtagggacagactatggttcgctttaaaagctttgatctttcccgcacgagagagcccagcacactgtagctgcaggagcctggtggagctggtccctgtggtgtggggcatcgcttctctgcgggtgcaacagcagggggagcaccatcagcatcctccccagcaaggtttacaaacagccctgattccaaaatctgcttctacgacgttgaaacatgggcacaggtgaccgtctattgacttcaagacctgggacacaattgatcgggagagaagacgctttcctttaatgagccagagactaataaagagccccctctttgtgggatgagggactgaacaaattatgttcccgtgaaccacttctgggcccgagcgagccc

SEQ ID NO: 673593 - DNA, 456 bp, Homo sapiens
  misc_feature (101)..(101): n is a, c, g, or t
  misc_feature (118)..(119): n is a, c, g, or t
  misc_feature (139)..(139): n is a, c, g, or t
  misc_feature (144)..(144): n is a, c, g, or t
  misc_feature (250)..(250): n is a, c, g, or t
  misc_feature (270)..(270): n is a, c, g, or t
  misc_feature (280)..(280): n is a, c, g, or t
  misc_feature (429)..(429): n is a, c, g, or t
  misc_feature (442)..(442): n is a, c, g, or t
ttccctttgccgatttctctcacctcacctttcaaacctaaactcgagcccactgcccaccggcctagcattgctctcgccaatggctcctcagcgatgcngaccgtgcaaaagcagnnaaagccatatgatcggcttncattnaacaagaagccaatgagaaagcagaagaaatagatgccaaggcagaagaagagttcaacatagagaaaggtcggcttgtgcccacccaaaagcctaaacgattatnccaatattatgagaagaaangacgaaacangattgagcagcagaagaaaattcagatgtccaatttgatgaatcaagcgagactcaaagtcctcagagcaagagattgacctttatcacagaccttacttaaattgaaggcaaaacagagacttcagcaagggtggttaaaagattacnaccagggttaccnagttgctggttggt

SEQ ID NO: 673594 - DNA, 649 bp, Homo sapiens
ggcacactatctctactatcactgttgataaaatagcccacagagaacaagtacaggtcaaagtagactttgtgaaaaatgtattgaattgaactgattggaattcagccggcagtgggtggctcaaggggaggctggagaagaagccaaatgggaagaaggggaggtcacattgctgctggagagtggatcacttggcagtgagggaacagacagtcaaaatataagaaataggaacagctcaggagagcattcagcttccatgtggtgaaggaacaaatcatccttacatatcttagcagcttggaggctgttttacagtagagcatgatagctaatgtttaaattatgctcagtctactgtgaattattaagggaactctaaattatgctcaaggtatggtgttagaagagaaggaaaatttacaatatggcttagaaaactttccattagaaggagtaaggtaacaaatctatactgtatttatttaagccttaattatctagattaccactactaaaaaaacttccctaaaaattcctttgcaaaagtgccagatgacttcacgtacacctttagcttcctgacatgcactggaacagcaagttcctcatctttcagtggcaccgaccaagacgactcacctat

SEQ ID NO: 673595 - DNA, 324 bp, Homo sapiens
  misc_feature (34)..(34): n is a, c, g, or t
  misc_feature (124)..(124): n is a, c, g, or t
  misc_feature (181)..(181): n is a, c, g, or t
  misc_feature (208)..(208): n is a, c, g, or t
  misc_feature (223)..(223): n is a, c, g, or t
  misc_feature (228)..(228): n is a, c, g, or t
  misc_feature (261)..(261): n is a, c, g, or t
cctgtggaaagtttcactgtgtcgcccaggctgncgttcagtggtgcaatctcagctcactgcaaactctgtctcctgggctcaagtgattctcgtgcctcagcctcccgaatagctggaattncgggcatgcaccaccacacctggctaatttttgtatttttaatagagatggggttcnccatattggccaggctgatctctaacncctggcctcaagtgntctanctgcctccctcagcctcccaaagtctgggattncagacaagtcatcgtacccggccttcttttttgccctttaaagtaagggatgtgggtttgtac

SEQ ID NO: 673596 - DNA, 1748 bp, Homo sapiens
ggtacacgtcggttgcctaacaaccggccagcggactcctttggctcatggcctccaactttcaagaaggcacacaccatggccatcaagttctcagcgacaaaagacatgagccctaagcctgcagcttcactgaagcagccaccaagcaggagcatccgggcacagctttgtgatctttttcgcattgcggatgggcacactggcacccatcagcatggttcacaagaacactgcacagggtggccacatgcaggcgcccttggcgctcttgcaacccctaagcacacgcacagcacacatgtcagagcaacctatattggccatccaacggtggcaaacatctggccatcacaggccaagcgcgcacccggtgcacactcacattggcaacagcattcggtggcaccttctgcatcaaagctgggtggcattgcacccgccatgcccacacatgcgtcatcggcaggcacccggcatccacttcaccagagcgcacgctcacaacattctccgtggccacaacagacgtcgcttctctcagcaccagggtcgttccccttctctcggcacacgtggccactgcgaccttgccacaccacccgtggggcgcgtcacacggccacttcttcccagcgtgtccaccacaccacacttcactttggtcaacccaccggaacggattgggcccccacaagtgccaggctctagtcccgagctggacagtgacaccctcgttggccacctggggcaactggcacgcggccacggtcttcgtgccacatgcggcaaacacattcgcacatgcggcacactcggcacacagccgtcggccaattaccggcactcacatctgcgcgctagcactcggcgccaccaacggtgcgtccaagggtcgcaacgaccacacacgacagcgtgtacgctgttggccggtacacttgcgcacttcggcccacacaaacacggaactcctcacgcgccctttcgcacatgttacaagcgtcaattaccacgcactggtatcctcgtcgctcatgtctgaaacgctcaccgctggtgcctactggacaacgacaacttgggctatacaccggtacagcaacatctctgaagcgctcggcccgctggcccccagtgtgggctcagtcgatgcaaacaacagtctccgttgtggcgtccctctgtgtcggtaactgacacatgcatagcgacaacgccagctatgtgctacacccacaccaatcgggatcacgactatgccagctagttatgaattctcaacgatcttaccaagctacgtcctgtaaccctctgggcatggaccctatcagttacttacggcacgcgactactggggacacacgacggcaccaatttctgagcctacagttgcacgcgtgctagcgacttggtgtgacacaactgtgtactcttggcgacactctaccaccctgaaattacttcggaaacaggcggaaacactcatcgtagcgatcaaccttacacagcgacatcaacaaaccatggcgtcggatacagcgctatgtgaagcgccccgtggaacagtcagtgcgcatgaacactcattccaaccgtacgacgcagattacacacaatatacccacgcccagtgtcagggctgcgaatccagagcatgtaagcgcagtcggtcgcacagacgagaatacatacggggcagcgattgatagctagaagcactagattctaattcgcacggcaagccg

SEQ ID NO: 673597 - DNA, 156 bp, Homo sapiens
gcttgatcgaatcgagctctgtaccagtagcctgtgaaagcagccaggagcagtgctatacccttgcaagccacatggagttgatgctgccaaatgaccatgagaacccacctcttgcatcagtgtgacctggatgtgagactgtggattcaaatg

SEQ ID NO: 673598 - DNA, 275 bp, Homo sapiens
aaaaattttttccttttttaaaaaagggcccaaattgtttatattggagtttggacccccccaagtaatatttgaaatgggatttttattccgggatcggggtcgttatgtattggggaaaacccaggtttgaaggctttttgaattttgataaatgttcagctgaggccccccggggaatttttcttgccaacggcctaagaggcccccccagaatgagttatgcccttgggggtccgccgggccccgaggttcaaaggtttttctttccccaa

SEQ ID NO: 673599 - DNA, 183 bp, Homo sapiens
tcttgtttcctgcacttcctcctcctgttcatcatccctttcttcagataatgagttacagggataaacaataacctttcagatattatataaaacaaaaaagttcttactttattttcttttagaaatatgatagttctactgttattttttgtttcttatggtcctcttcttcctcttgtc

SEQ ID NO: 673600 - DNA, 109 bp, Homo sapiens
gtgtagacatcaaggagagatgtgcgcgttgtcttgcgccttcggtgtactggcatcctgatgattggtgcttcttgggcgtgtttgcttgcaagcattttcttgattg

SEQ ID NO: 673601 - DNA, 706 bp, Homo sapiens
gagtcgagatcgcgacactgcactccagcctaggggacagaacaagactccgtctcaaaaaaaaaaaaaaatctctgtggccccagttttctaccagtctcactttagtttctgaatatgcagcccccgtggtgtcttagtggactttaagggttcttatccaggccaattttggcttcccagaggatattgggtgatatctgggaagatctgggagatattttttcatgggacatcctagggggatagtaagggcattcagcaggtagaggccaagggtgctactaaatgtcctacaatgtacagggcagcctcccacaacaaatctagctaaatgtcggtagtactggaggttggagaaaccctgtgctctagctgggaagcctgggttgtcctgggctgggttttaccctgaaggagtcccagtggtgatgactggctggggagtgggacttgggtgacaggtggtgagagatacttgagcatgggagtggcagcagcacggttgggagggcaaacctccagggattccatgatccttgacgggacaaatattatcccaagttagtccaagggaagatcacacagagctcctggttaatagcaggggtgagctctgaaggccacccttttcctcgaccaggaagctcctagggtaatgtaggggccaggcattcctacctcctccaatccctgtaaccgtgtc

SEQ ID NO: 673602 - DNA, 332 bp, Homo sapiens
tgtttgcttcgagtcgctctcagatccccagcatctaacgtaacacatgtactgtagtttcattagggatttcatttggttatctttcttattactgatctactctatcttgagttaccctaaatagtccctcgtaccctcctcagatctcatactgaaccacccgctctggtttctctggagggatcaccgtctcgttcctctgtacctattattgtacggattacttgctttggtcccacaggctggtatacttgggtactacgttccccacccagctacataatatcatgaatgccaggaaaccgaatagctgctatctcataatatgc

SEQ ID NO: 673603 - DNA, 364 bp, Homo sapiens
  misc_feature (4)..(4): n is a, c, g, or t
  misc_feature (164)..(164): n is a, c, g, or t
  misc_feature (306)..(306): n is a, c, g, or t
cttnccactcgatgatgcttctataattttgccctttaacagaaactttcaaaagggaagagtttttgtgaatgggggagagggtgaaggaggtcaggccccactccttcctgcattgtttacagtcattgggaataaggcatggctcaaatcggccacagggncggtgaccttgtgccccagggttttgcccccaagtgcctccatttaaaagcattaaggccggtacggcatcttcaaaacagagggctggcattcgaggaaacccttgctgctttagtcccgatagggtatttgaaccccgcntatattttaaggcattttaaattctcttccccccattttattgactttgaacaattaa

SEQ ID NO: 673604 - DNA, 516 bp, Homo sapiens
  misc_feature (494)..(494): n is a, c, g, or t
  misc_feature (503)..(503): n is a, c, g, or t
caagaatcccaatttaactcatgttatcatcattagtgatctgtgttgtagaacatgagggtgtaagccttcagcctggcaagttgcatgtagaaagcccacacttgtgaaggttttgttttacaaatcacttgatttaacacactcaggtagaatatttttatttttactgttttatacccagaagttatttctacatgttctacagcaagaatattcataaaagtatcccttcaaatgccttgagaagatagaagaaaaaaagtttgtatatatttaaaaaatgttttaaaagtcatttgcaacagtcgtaccaagaggtacttgcctaaccgtttatagcacttcaggagactgcaatacgttgctagagcacttcttatcctggagtttaatccttgctcactttctacgtagacataatgattgctaggtgtaaaacttgtaaaaaaaggcggcgccgaatgtcgacgcgcgggtcgtaccagctacgnacgtcgacncgaggggggccgt

SEQ ID NO: 673605 - DNA, 1107 bp, Homo sapiens
  misc_feature (804)..(804): n is a, c, g, or t
gcttactgtactgagagccctcgctacatggtgagcgcctgtgatggtacctttgggatagcggcggtctctgcgtagattcgcgtgtttataccttcttcctgactcgaagccgagtccgggtgtgatcaaccggactagaaaggaccaaactgagcacatgagagagctgtgagagcatgccggtggcccagctgatgccctagagcctgagtgacgccgagagctggaggcaggcctcgtggccaggaagggacctgtgactagtcgtctatcaggacccatgggatataagccacattgtgagatgagtctgggcaccgaactcatgatgagaacgagcgagaaagagcttgacatcctagcccaatggggaggcagggtgtcgagaaatccaatgcgataaaactcaaactctgtcgcgttgaaagtttgggagctaagaaactgcggaagctggaggagaaaaccaagcgcgaaaggcccagcgtgaggcagaggaaggctgaacgtgaggagcggaaaccgaactcgagtcccagcgcgaagctgaggtggaaagaacggaggacggagcggcattcgacctggaagtaggacgcagaacaggaggaggaggagaggaatagacccggaaggaacaggcccatggggataatgaagaaagtacccagaaatgaaagggaggactatgtggtgagaggacggaacgcgtaggaaaaaccataactgcaggaaccagaccccagaagctatccagagcaagaggacaatcaataacatacaagcaggcaaggatggtgncattggagaaccaggataccctggttgaactaagctcagagacgccgtaattgatcaagaccctggtgtgtttgggctatacagttgtatagagacggggagttattaataccacaaagaaaggtgcggtgaaattaaccacacgatcgtattcattaggttacaatgcaaagtcatataagtgaccgacctacaaccatagccacaacataaagatggtacgtcagtaaccccctgagaggggacatagcgtgtgaaacaatttgagatgaatgatagctataaatataaaagagaagatat

SEQ ID NO: 673606 - DNA, 215 bp, Homo sapiens
agcggggccgacgcccgagactgccaatgtggacctgattcccgagattcctcatggctaacgagcacctggtgaaagatgctactgtatacacgaggtgcacctcgcataactgcgtacttctagacgcgtggtggcagggcagcttttagtctacgaaggcggggcgaagatctcacgaaagatgctcgatccaactgaagcacggaggcctt

SEQ ID NO: 673607 - DNA, 553 bp, Homo sapiens
  misc_feature (26)..(26): n is a, c, g, or t
  misc_feature (110)..(110): n is a, c, g, or t
  misc_feature (122)..(122): n is a, c, g, or t
  misc_feature (141)..(141): n is a, c, g, or t
  misc_feature (181)..(181): n is a, c, g, or t
  misc_feature (194)..(194): n is a, c, g, or t
  misc_feature (196)..(196): n is a, c, g, or t
  misc_feature (198)..(198): n is a, c, g, or t
  misc_feature (203)..(203): n is a, c, g, or t
  misc_feature (206)..(206): n is a, c, g, or t
  misc_feature (226)..(226): n is a, c, g, or t
  misc_feature (233)..(233): n is a, c, g, or t
  misc_feature (238)..(238): n is a, c, g, or t
  misc_feature (250)..(250): n is a, c, g, or t
  misc_feature (270)..(270): n is a, c, g, or t
  misc_feature (297)..(297): n is a, c, g, or t
  misc_feature (312)..(312): n is a, c, g, or t
  misc_feature (314)..(314): n is a, c, g, or t
  misc_feature (331)..(331): n is a, c, g, or t
  misc_feature (338)..(338): n is a, c, g, or t
  misc_feature (402)..(402): n is a, c, g, or t
  misc_feature (411)..(411): n is a, c, g, or t
  misc_feature (423)..(423): n is a, c, g, or t
  misc_feature (444)..(444): n is a, c, g, or t
  misc_feature (456)..(456): n is a, c, g, or t
  misc_feature (466)..(466): n is a, c, g, or t
  misc_feature (533)..(533): n is a, c, g, or t
ggagggagggagaggccctggccggngcccacccacccacagggcagacattccacttgcacagaggggagggggtggcccagccccctctcggcttacccctctccccntccccctgcggnatgttcacgggtggggganaattgaggagctcggagaggtaggaaggcgaacaccaacncaaaatcgcggcnancngagcntgnctaggtgatggtgaagtaancagaagnctttnccttcatgtgcnggagatatacgttacagcgncagctcccttccgggggctccgccatngggggactcaatcantncatgtggtaaccccgancgcagtnatcacaaaacatgcagctggtcgtcgttctcggaggttccgcacaggctgcaggatttgcactngatgcactnccagcggtaagnccgcacggcttccgttatgtncaccgttaattntaaatacgangcggtgtcctcatcgcccaagttccgcacaggagatgaggtcctcgggacaacccgtcttcttgganccccccaggtagaagtcaca

SEQ ID NO: 673608 - DNA, 901 bp, Homo sapiens
gggtgactgcgtgcatgcatgcctccggggtaggatggcataccgccaacagggtcactaccgatagcgcccgtgcagcccaagcacccttacctacccttcctgcctccctgaagtccagcattaatacccctcacccgtgctgacaccctggcagccccttacacccctgtgtacctcgcaggatgcagagatttgtgctggacccgggatccctgaaaaactcgcttcctgtgacatcgtggtggactgtggtggggctgatgtacgaccctcggagacacacctgatatgaccatacaccatgaggtctttcacagagaccatgatgctaccctgtacccctgggaatgcctgtggcagaccaagctgagcagttgctgggactcatctatctgcacttacgggcacaagcttgctggcccagtatgcttgggcactagtgaagaggaccagcatggttgggcaccctactatgcacacagctgtatagacaactattgtggaggaggtggcatgcttgtggaccaatgggatctcccagtgtgccagacgggggagcctcgcaaatgcaccatgaccccactaaccctgacgtgcacgcagtctgctacgaagtatagttcctacccgtgggacccacacccaggagcaagaacaccttgagggcagtgatacaactagcgtgaactgggatactggagaccaccaggagtatcttgcatagcaccttacgcattatctaccaaatctcagcctggagataccaaccccgcgccatgtctgtcaacactggaccttgacccaacgacactccagagtgaccccaagtggctccatttcgctacagtgggccagtcactcgtactgtagtagcccttaaccccttgactctggtttc

SEQ ID NO: 673609 - DNA, 568 bp, Homo sapiens
  misc_feature (185)..(185): n is a, c, g, or t
  misc_feature (566)..(566): n is a, c, g, or t
ttgggctcctttctcccacattttattcttatttaggcccggagaagaggaaaaccggggaatagcccccctcggggcagtcctgggtccttaaatatttcctaaaaaggaccaagagaaaaggggccggggggccaccccccccccctctttggaaaaaaaattttccagtaaattcccttatnttacggctgtggtggggactgggggttcggggacaaacccccttccttccccccccccctggtggtttttttcgcaccccccaaggaaaaaaaactattttttacttgagggttctccccttgccccggtgttatttgggttttcccctataaccaccaccccttactggggggggcccggatcacatttccaaaatccttttggggtccctctttccaagggggggtaaagaaaaaacacacagttgtcttttcccaggggtgttaaattttccccccccttctttcgggggggatgggagggggctcgggggtcatatgagaacacccccttggatgatttgcggttgcttagaataaaacttgctcctcgcaaagggnag

SEQ ID NO: 673610 - DNA, 191 bp, Homo sapiens
  misc_feature (40)..(40): n is a, c, g, or t
tttacttttagttcacattttttaatgtttaaaaactatnttaatcagagcagttatagaacagaacttcttatatatctttatttacaccaccctgaaaaaaaaaacccagttctattgattaacgtataatagcaagtttgtgacttgacgtcacttaatcaccactgaatcgattacaggtttacata

SEQ ID NO: 673611 - DNA, 218 bp, Homo sapiens
tccagacgagttgtccgagttacctccttttagaaaataatgctgtgtggttgtgatgtgtatgtgtttttctattttagggtggggtgttcccaaagggatgggttactttttctctaataaataatcctgacccacgttgttctcatcccaatttatattaggccctaacatgtaatgatattaatttccaatccatgcatactctatacccccta

SEQ ID NO: 673612 - DNA, 4496 bp, Homo sapiens
ggagagaaaggtcgctgagtcccacagagacacagttaccggttacgggatgagatccagggccagatggacgtgtccccgtgtagcctgacccaggacaccggacaccccagccccagccctgctggggtgagctaagcggggagtggcagcggcacccccaaaggcatggccaggagagacgggcgtgtagcctggggcgggctggcagcagcccggggcagggggtccctcctgtgaccggaagcatcagcccctcagagggttggagtcatcagggggttcaggctgcaagagaaacatggagacgggcttatctcgtcctcaccgggcccagccccctggccgggtgtcaccgtgaaacctccctcaagctcatcaaatgtgcaggcagcgttttcctatcaggaccttccttccttggggtgagaatgaggtcttggactccgaaaacggggtccatctgtccctgaccctttgtgttcaaaatctggcaacgcttgctgaaggaagctcagccttttcttttttaaaaaaatattttttaggccaggtgccgtggctcacgcctgtaatcccagcactttgggaggctaaggcaggtggatcacttgaagttaggagtttgagaccagcctggccaacatgctgaaacccgtctctgctaaaaatacaaggattagctgggcgtggtggcaggcacctgtagtcccagctactcagggggctgaggcaggagaattgcttgagcccggggagcaagagattgcagtgatcacaccactgcatttttctttttttaattttgggaaaagacacacataaatttatttatttgtttatttatcttaattgagacagggtcttgctccatcccccaggctggagtgcaatggtgtaatcttgactcactgcagccttaacctcctaggctcaagcaatcctccagcctcggccccccagttagctgggactacagatgcccacatcactatgcctggctcatttttgtattttttgtggagatagggcctcactgtgttgcctaggctggtctcgaactcctgggctcaggtgatcctcccgcctccgcctcccaaagtgctgggattacaggcatgagccaccgcgcccagtggtgttttaagcatgaggcatccgcgtggctgggagaggctttgaccatccttggctcttccaggttgtcctaccctctggcatccaccatagacgtttttcaaacagaaaatgcaggctggggagccgcggcagggcgggtggggctaccctgtgctgctgtgtgtacaaaattgttccatgatcttggagtgactctgaaggactctgggaggtgagacgttgtcccggagatcaaaacgtccgctcaaaacgttaccctgtcgctcgaacccgatctttttgcttttccacccccgtgcaacccaggacggctgtctgaggccgggagatgccttagacgcaggatgggccactcctcccagcggcaagtggaaatcgaagatgtcatggggtcggggggaggcttctgaaagatgactgcgtcctcctctgcggcacggacgggagcaggtgcagccacatcttccagggcctgccggcatcacctgcggccacacctgagatggaccccacgcagccctgatcgcaggaggcctggccgccccgaccccctccacggggctggcctagaagcaagtagtagaataaaactagcctagtcctgtccctccggccccagtggagacaggcgtctaagaacccgtgccgagagggttcctggacggccgcccaggtcctccgtgcaggcccgtgaggcggggatccctgcttggctcacttcctgagctggtgactgccagggttcccacctcgccaaggctagagggctccgggtgtgtgtgcaggtgtcgggggagtgacctccactcctcaacctcgggcagctcccacaggccacagccgggctccccacccccggcacccagctctctacggcaggtccgggagggctggggcttcggggagccctacccgccaaacctgctgttggcccgggagagccccagaggctcccggagactgcagcctcctgtggttgggctgggagccggcagggtttggggtgtgggcgtccccaccacgcatagcaggaatggcaggaagggacaaaagcctgttccagagaccctgggaggaccccaggcagggagagcccgcctgcctccaccctttccaacgagccatcttggtaactgggaacaaacacaccccaccccgtttttccttaaaagaggccttaatccccgagcccccgctgccagggcagagggaggagggggcacagctgtgccaagcccggccccactggtgtgtcctcacaatgtgaccccagaaatgccagcagggaacggaggctgctgcagagatgcagccccaggcagccggggctcctaggctggtgcagatggtggggttaaacgggctgagcgttccaggtaaactgaggctcggggaggggaaggacaggctggcctctccttcactgtccacagggccttgggttccctgagctgtccagaccccaccatctcccggaccccagggaggtggccattgccagaagcctgtgggtttctttctagcttgggggattaaaaaaaaaaattctccacttttttttttcttgagtagacttcagtgaccacactgtggaaaatacctttgcagacgtggcacccgagtgcacacaccgaccgccacatgtgcttttctgccgggaatccctggggtgaacgcatgttttatgggcgtttccaggagcgcgcgtgcacctccagacggggagctggcgggcgggggtggcagcagcagctctagccttggggggacaagcctctctcagctacgccaggggaaaagagagttaaggacactcacccccacccacgcacacacacaaggcagcgtcgggtgggagagagaaggccgtttctccttctgtagcctgggtctcccacgggccttccccgctgctgagcgagacaccagtagccaggtgaagggccacagcgggccaggccccgaccctgttgtgacccacctgggcaccttcccggaccagctccgcctcccctgccctcctctctccaggaaggagccagaaccctcacccctctcccaccctccccaggggtaaccccaggccaagcacagatagctcagctgcgacctctggcctctggggacataaacggggcggctgggccagggcggaaggtgctcctgtttccctccttctgcgtggtccctttgacgggccggccaccgtgtccgaggcgcaacgctaggcctccaggccacgcatccatctccaagttaacagcccgtcctgcccaagttctggggcaggtaggagagggccgtcacacacctgtccgcccgtgagtgacccgggggggcttccgggtggaggtggagccaccacgcccttcctcaaggggtcacttattaaaaagtccacggcctgaggccaggccctctgcacagaagccatatgcctgtccgcccgtgagtgacccgggggggcttccgggtggaggtggagccaccacgcccttcctcaaggggtcacttattaaaaagtccacggcctgaggccaggccctctgcacagaagccatatgccggccagccgcgcctcctcctctgtccacggaaccgctgcccatctaaccttcgtaaagacctgtctcctgtttccagccgccgcctgtggttctagcaggttctatgccatctgcattgggatgtctggttgtttttatttctgacttttttaaaattccaggtgtgccgcacccactttctcgcagtgttttaatattgtgtggagttgtcgataccacgtgaattcatacacaataaaaagcctcactctcccttttctcctggctctgggctgttccttctctctctggcccgggccttgctggggagggagctcctagcatgcaagcagatgccccaggcttggctccaggcatggggacccgcggccccacaccatcccgtccaccctcccttcaccggcccagggaagaggtaacaggaggggacccctggaggcagcaccacaaaccagggacgttcaggcccagtgggctttcggatttgtacttagaacatctaggaggggccgggcgcggtggctcaggcctggaatcccagcactttggaagcccgaggcgggcgggtcacctgaggtcaggagttcgagaccagcctggtcaacacggtgaaaccacgtctctgctaaaactataaaaattagctggccgtgatggcaagtgattataatcccagctcctcaagaggatgaggcaggagaattgcttgaacccaagaggcaaaggctgcagtgaaccaagatcacgccactgcactccagcctgggcaacagatcaagactccatctc

SEQ ID NO: 673613 - DNA, 657 bp, Homo sapiens
cataatagacaaggtagagttatcattttagtcctgaaaagaattagtaagtacatgtcctctgctgaagtctcctatatgtctttttattattggtttcttcctctagcagaaacaaaataattactagcaatgagaggtaatgtgctgttatttatattttagccatttccctttgtatgtgtgtgtgtgcatatatgtgcatacctacacatacatagtttcttttccttttggtgaaattgtagatttgctaaagaagtaaagtatctggatgaaggaaaattacacatagaaaaaaataagcaatttactggtgtacagttgccattgcatacagttaaactaaggaatctaaaaaaagtaagattttagaatgaaccgaagcctttctcttgaagataatttaaaaaaaaaacacatagttcagttgtgatttttttcaaataagaaaagcaacgatgcttattatggaacatttagaaaatttagcatgtttaacataacaaaggtaaaatcatattaccacaatgtcaagataaccctcatttgggtctatttattctcagtcttatttttttccttacacattttccccataattgaaaactggtaaagacaacttggtgcttttaaaattatcgttgtagtttaagc

SEQ ID NO: 673614 - DNA, 395 bp, Homo sapiens
tccccgggtttcctggacttctgaacagctgggcttccggcaccgccaccacgcctgggtactttctgtctttcatgtggagactcggattttgccctgttgccccggctggtctccaccttctggactcagagcactctgaccaccttgggctcccaaagtgctgcgattagtcttactacgatttaaaataatattaatatatacttgatcacacagattacgtgtgatccccgtcgatcttctatgaagacactggacacactgatcctcacactatacctggacatgccaaggaatcagaataactaaaataactttccaaaagaagaacaaaaatccagggtggctccttaatgaacgatgaaagaagagaaaaaaactcaagaaataag

SEQ ID NO: 673615 - DNA, 271 bp, Homo sapiens
caattgtgctccaaaacctcactaaaaaggaaacaaaaggtaaacaaaatatatttataaccagaaatgaggtctcactatgtagcccaggctagtctcaacctcctgagctcaagttatcctccctccttggcctcccacaatgctaggattacaggcgtgagtcactatgcccagcctggaattttttccttacacaggaatacaccacatggacaaaaagaaacgtagagagatgagaaactaccagccccctcttgctacacactgg

SEQ ID NO: 673616 - DNA, 186 bp, Homo sapiens
  misc_feature (73)..(73): n is a, c, g, or t
ttggtcaatgccaggtgggttattgtcaccatccatgcattttccaatttcagtgcatcatccttgtctcaanttatgttattttccagcagtcacctcatcattggcaataccaatcaacaacatcattccaacacatctttctatcaacaaacacacaacacacacaacacaacacaacacaca

SEQ ID NO: 673617 - DNA, 917 bp, Homo sapiens
ggtactagaaaagatctgattgctggctcctcctccgtatgcggtaggcaagctctgctgcgatgcctcggcctcatctcacactgcgtcgaacccaaaggagcgtgccgtcactgacccagccccccaggaaacagtgagacaagaatcaagtatctgagactgtggagtaatagccacaaaacagagggcgccgactggcacatgctagtatccaggcatgccacaggtggggacgaggctgagagagtcagtaggcagagccagatgccatgctgggcagcagcagtaggactataaaccaacaggtgtctcgcctcgaggatcccactcctttcctgtctgtgtggtgtaagttaacacactggagatgtgctccagattgagcagggtagcccagatgcaaggttcagatccagtgtagctaaggtattatccggcttccagatctatgtcaccagtaccaatcagtcagggtcatcaacatttcaggccccaagaaatctctgtgcaagagcatcaagaaagacctgcttcccagcccccaggatgtccagtgctctccaggcttcctctctttgtgattgtgctgtccagagtgtgcagctggtgctttctttctcttcagtcctctggagtacatctggtggtgtgcattagatgtgaggggttatgtctgatgatgcgcatcactccaaatgagctgatctgctaagaatgatgacggcatccttctggcgttctaggtactggctgggtgaccggaccaggacctgtgacattaatcagtgccgaggaactgggaaggggggcgcgcaatctcctttgaaaatatacggccttctgttgaatcggttaggcagtccgggaacccccaaaggctttttaccccctgggatccaggccaaaccaggggc

SEQ ID NO: 673618 - DNA, 142 bp, Homo sapiens
ctcccttatgcggtgccttcccgatcatcttcatcatatccatctcagacacaggtcctgacagctccttgtatgtggcatcgtctttcagcatcttcacggctacggtgacaggcttggtggccctggtccttgtcaaatg

SEQ ID NO: 673619 - DNA, 265 bp, Homo sapiens
ttttttttttttaaaaacccccccggggggaaagggggggggggggggggggggttttttttttttcccttttgggggggggggtggcccccccccctcccccggagagccctttccctttccccgggggtttttggggggggggggggcgcccccccccccccgggttttttttggggcccgggggggttggggggggccccctttttttttttttccggggcccccccgggggtttttggcccccccccccccccggggggga

SEQ ID NO: 673620 - DNA, 274 bp, Homo sapiens
  misc_feature (102)..(102): n is a, c, g, or t
  misc_feature (110)..(110): n is a, c, g, or t
  misc_feature (118)..(118): n is a, c, g, or t
  misc_feature (153)..(153): n is a, c, g, or t
acaaaatcaatgtacacaaatcagtagcactgctatataccaacagtgaccaagctgagaatcaaatcaagaactcagccccttttacagtagttgcaaaantaaataantaaataantaaataaaatacttaggaatacacctaaccaaggngctgaaagacctctacaaggaaaactgcaaaacactgctgaaagaaatcacagatgtcacaaacaaatggaaatacatcccatgctcatggatgggtagaatcatattgtggaaaatgacc

SEQ ID NO: 673621 - DNA, 556 bp, Homo sapiens
  misc_feature (25)..(25): n is a, c, g, or t
  misc_feature (29)..(29): n is a, c, g, or t
  misc_feature (51)..(51): n is a, c, g, or t
  misc_feature (75)..(75): n is a, c, g, or t
  misc_feature (213)..(213): n is a, c, g, or t
gggagcgggagactgagaaccaccnggancccagaccccaccggtgatggntgcttgaacagactggcggacccntcggacagcttggcctggaggcatagtgtattctcccgcttactaggctgttagctgcccttaggtctttggagtagatgcccctttggtaggtgtcccttggaatccgtagctctggcgccacagtcacaagggagngcaatcagggacttacgagcaggaactatgtggaagggatgaaaaaccaaaccgcccttccaagtctgcagccacccacccatcaaatgagtggactcaggcacgcaaatgaaggaaagtcagcagacccggacttaaacccagaatcctcatgtctagtgcagtgcttttcccgtcctgtccacggaggagaagcctcttccacaacccatggaaccatctcaacagtttgagaaactgaggctcaatatttttcttcacccaaatagctggaccgttgattctggaaactgtgttacctgtttgtctccctgcagcataatataactgtgtgtgtacattc

SEQ ID NO: 673622 - DNA, 222 bp, Homo sapiens
  misc_feature (136)..(136): n is a, c, g, or t
ttattacaacatttatggacctagctccaccataaataaatctgtacagagttggaaagtaagaccatggcatatacagaaggaaagagcacaggtgttaaaggcctccaggaatacagtaacaagtcatacaggntcagccattctccccacttttcaagtgcactaaacaagtgctggctggggatttcccactggatgtgtcaaccagcatgtattctt

SEQ ID NO: 673623 - DNA, 302 bp, Homo sapiens
  misc_feature (10)..(10): n is a, c, g, or t
  misc_feature (44)..(44): n is a, c, g, or t
  misc_feature (75)..(75): n is a, c, g, or t
  misc_feature (89)..(89): n is a, c, g, or t
  misc_feature (110)..(110): n is a, c, g, or t
  misc_feature (144)..(144): n is a, c, g, or t
  misc_feature (202)..(202): n is a, c, g, or t
ggtatttttnggcccgccctgatagccaaacacaacggataganactttggtggtctcttgaaagtgccattgcntggttggaagcaanccaactcagatcattacagcntctcatgacagattaaccctgatcccaggaaggntaagataatacctaattttacttcctgcaacgtcctggctaaccagaggtcctgagtntttccagaggcaactgtactgctggcataaccagcattggagatagccagtacaataaacatatctacaaccaaggactcttacagagtctaacttcaat

SEQ ID NO: 673624 - DNA, 183 bp, Homo sapiens
cggggtgaggtgctcacagtctagggacaggtggaggcctccattccagctgtacgcgaagtccagctcgctgctcaccaccatgtgatcccgcgttggtgaagtcgtagttaggagcggtggtcacacgttcccacacatggccacacactggtgccttttgtagcgagggagccgagcttg

SEQ ID NO: 673625 - DNA, 1228 bp, Homo sapiens
catatcacagtttggttacctatatgagttgaaaacgtcaggaagtaaactttgttgaaacacttactctggggacttcaaacggacacaaatcttagggatgattccctgattacgcactctgacactgtttacacttagtgaacactttgtacgctataatctggaaaattaccctagactctattgtaagagtattaacatacagaagtagatttattctctcagaaatgtgacctggtcttttcataacagcacactctatagaccaggattcatctacatgccacatccagaagccacacaccaggccacaatttcaaacttgggaccaagtaaattacgtagtgccccaattgtgtaacagggcaattccgtgcaatttcattatattcttatttcaatcagcaggccataggcgtcatccacgtagtgagttggccccaggcatgggatctagacaactttgaggggctacaagcgatacctccacaaaacggctggggatatacagtcaatagaagcccaccggtggccacagcctaaattcctggactttcgtcattataccaggagtctttccactgtgcatcagcgccactcagtcgtggtacgtaaactcaagatttggaatcatctttagcacaaaggtcagacagaacattccatttcggtacaccaggaacggtcaagggaacatcacaggaattaatccccaatacatggccattagcgtggataaggaaggccagaaaatatgggatcagacttaaagtggttcaaaatccataaagtagggaacacatacagtgggtataaacctggtccactcaagcattcatcagtcaaacaatttaatacacttaagtaacttgcgcaccctacctacagccctatagctacaattaccgggccggcccgtgcacacaactacgtcggcagacaccaaccatggggcaacccggtgctaccgaccccacctggcacgccccatctaaccacacaggcgcagagacggagcaaacaaaggttatcacacaaaacccaacagagtaaggcggcaggctcacaaagacgccccccaaaggaggaagaaaaaaacgagcgacaaacagcatatacaaaacaggctcgtgatacaaacacgacatgacaacccacaccagagggagggcagaaaacaccacacgcgatcccaacaacgaccgcacaactcgaaccagatcgc

SEQ ID NO: 673626 - DNA, 181 bp, Homo sapiens
gcctgactaccataaaataatccatactggagagaaaccatataaatgtgaggaaggtggcaaagcttcaacctatacgtaaaccttactacacataaaaaaatccatatgggagagaaaccctacaaatgtgaagaaggtggaaaagcttttaaccagtcctcaactcttactacacata

SEQ ID NO: 673627 - DNA, 405 bp, Homo sapiens
gcagtggccgcatctttcgtctgatccgtcgtaatcatagcagttcctacttctcctatgtctcccagtccttgctgttgcctttgttaaaagagtagcagagcgcaaactcaagagctagcttcttggatcccgcacggcggaggatacgcagttcgtatatccaacacctatgctgatgtttcggtcaccctgaagtttagtattcgttatcctaccatggcttcggaataatctcgccttattgtaacttactagtccggatgaatataaccatttggatacataggtatggtctgagctaagatatcaagtgggtacctagggttgatcgtgtgagcacaccatatatttacagtatgaataacgtggagcacgagcatatttcacctccgctaccataat

SEQ ID NO: 673628 - DNA, 1011 bp, Homo sapiens
tgaaagcgaaatagggggggcgcacaatccaggttttggtctcctttgtatttcgctcattacttttgtctctttctcactgcgcaagagtgatggccattacccagtatctcttctcacatcgtctattcgtttccgccgctctagcggccctgatgatcagagtctagaataggtgttctgctatgctaataggtcagtacagttactggaagccattcttacacccttcatgggaattgttcccccccagtttcttcttcccccgtgatcccacatcttatcctcgttggattcattaggtggccagaccaaatgcgtttttttgtatgttgttttttttttaagcttcccttgagagaactaaatggtatatggagagaactattggtaacaaggtcctggtttctcttgcgacacagtagctaaacttgcctgctttgtatatgcatttttgtacgggatcagcttggtagcacagtatttagccggagatacaccttgatcttggtctgcaagcccttctcccatcagtcctagattaggccctgttcagccatgacaggggtgttggtttatgcgtgctgcagcagtgggcataatgaatataatttacccagtgcacaaaggtgtgtaccaagtgaattctaaataattggtgtggatttggccagtagctaagtgggcttttaaagagtattgaagattgaaagggtgtgtcctctctcttcttttctgtgaaagagtataacgaagtagtgatctgtcagataatgaaagctagggtcttgccctcttcatgtccactctccttccaaatagttatatccggaactgtctgtccctctcccctatccttgtcccccctattagaaatagatacagggattgattaatgtcccgctcctgtagtacatgtaaaatttgtacaacaatatcttctagtgacaatgactttgtaagtctgtagacttattacctgggagatgtcttacacgtagaatcccatcc

SEQ ID NO: 673629 - DNA, 1108 bp, Homo sapiens
  misc_feature (849)..(849): n is a, c, g, or t
ttgggtgtctaggctaattttacttcataaaattgttcatagttgtatttctgagttttttcaatgtttaccctttttgttcgatcttaggggtatgatgttgttttggtctttcgtgtaagtggtactaatgatgagtttgtaatatggtctgttaagtttttctccaaaggtgttgttctttctcaaagttgtttatttttgacatggtctcttcggggcggttctattgttactattgtcgccgttctttaatatttcgatattccccatgttctttgccgcttgtctggaagcagaattttctgcctcagattgccactactcctcgtgtctagttgcctatttctgccctaggtctatgggttttattcctatggataggtatcatgatgttgaccatttgtcgtgttacttctgatactttatatcacacggtggctctctacttgtcctcgactcgctctcttttacctatttagtcgcttattatgctacttattgtcgtgcttttactcttgcgtgctgagacgtatctcaggtctttgacctatggtacatacaggaagcttctgaatatccacgtcgtgtatcttgaatgttctcataggtctgaatgttgtataagcttgtattagagctgttaactaagtgatggcgtatgtatagggctatgtagctcagaatatttgcttgcttttattactcctaggctcatggaattcgttattgtttaatagatgtttaggttatatattataacacgagctactagtatttagtctagtaagtatatatattaatattatgtatgtaatactctgaatctatacctctatctataagatnacgagtgcagatataatagatatatattagtgagctctttaatagggactacaattacgtattgaataaatgaacttggactatgtggttatgcgtttagatcgcacatcttagctgtcatttgttcagctctaacaacgtgatgttcatctttctgttaatgttccctctgcctaaagactacactgacagagaatgacctatcactacttatgatttgctgaagcctaactagcaagactgatttctgagacattac

SEQ ID NO: 673630 - DNA, 144 bp, Homo sapiens
aaaaggagcatggggccaaatctcgacaggctggcaaggcccccaaggggagttggggctggaaaggttatgttgcgtcaggtcctaaaacaacccagcttttgccagtagtaaaacccagtaaaattggtatttttttggcca

SEQ ID NO: 673631 - DNA, 469 bp, Homo sapiens
  misc_feature (430)..(431): n is a, c, g, or t
ctagagaaaagcgatgccgattctggcttcctggcggtgcggcccacttcggtgttcccagcgctgaggcgtcggcggcgagcgggaagaaataagaagcggggctggcggcgccttgctcaggagccgctggggctggaggttgaccagttcctggaagacgtgcggctacaggagcgcacgagcggtggcttgttgtcagaggccccaaatgaaaaactcttcttcgtggacactggctccaagtaccaggcacctgacatcgacgtgcagctgagctcggagctgacagactcgctcaggaccctgaagcccgaggacaacatccttcgagaccggttcaagagcttgcagaggagtaatatgatcgagcctcgagagagagccaagttcaaacgcaagtacaaggtgaagctggcggagaagcggnncgtccgtgagatccagttgtagctgccatcagatgccg

SEQ ID NO: 673632 - DNA, 306 bp, Homo sapiens
  misc_feature (132)..(132): n is a, c, g, or t
  misc_feature (230)..(230): n is a, c, g, or t
agagacagggttttgctcagtggcacaatcttggcttcttgtagtcttgacctcctggctcaagtgaacactccctcctcaccctgcgcttggagctgggactaccggcatgtaccatttctttcttctaantatttttaaattttttgtcaagacaaggtctcactatgctgcctaggctggtcttgaactcctgggctcaagcaatcctcttctctttggtctcccancctgctgggattataggcatgagccactgttcctggcccctcccagattgtttcagcacaatgctgtaagtagcca

SEQ ID NO: 673633 - DNA, 451 bp, Homo sapiens
gaaaggaggggcgtacgcggacatgatggcgtcgaccagggctggtgtgggccggctagtaggaggaggcgtcgcgggttcaaaggaccggtttgaagcgcgccatagcagggcagaaagacctgggaggcgcgaatgccgtacgacatgaaacggatgcgggacgccagtagtaccaagcatctggaggcagcactagagcaatggaatcaggggcagaaggacacgcagaagggcaagtctcatcgctcgaggagcctaatgtcccgggagcatgacgcccttgacgacacaggagggtcgtcccgagcgttcgatagacctgggccacgcgaaaaaggcaggagcacacggtgataacaggccaccgcacacgtggctagagagcggtcgaagggggtcggagcgccagtcgatgcagagaggagggtgtggagcctcggcgccaaca

SEQ ID NO: 673634 - DNA, 218 bp, Homo sapiens
agtaattagaatatcatgatgcgactgccattatcatagcacataggatcatcattagatgctagaactattatgtgaaaagttttgagggatgagatagtacccttgttgccaaagcaccaatgaatggattacttcctgacataccttcataaggaagagatccagtggttatcttaactaagtgaccaaatccagcgatcatcagcagacaggtg

SEQ ID NO: 673635 - DNA, 391 bp, Homo sapiens
gctatttttaataggtatctatctttttttttgtacacgtcactgacaaagtttttgaatatatgacctctaacctaattttcctcatgggtcttacggttcataatgtgcagttttccatagcacagtggttttcaggaatgcataggtggcattatagcagaactgactgcactttgccaggtggtgaaatttagtttcccaaccagacatcgtatgcctcttgatatgttgtaatgtgaactatacagcatcacctatgaagagtgattaccaaaaatcttaacctgaatctaaccacgcctttagatgtaatcttcaaggtaaagaaaaacagtggagagagataagttagatgacaccaagaggattattagattgctgctgtatg

SEQ ID NO: 673636 - DNA, 835 bp, Homo sapiens
acccggtaggggtgtgagaggtctgctcgctctagggagatctgcaagcaatcactatgtcaacggacagaggtgtacccttccttcgtatgaggaagagtcagggattatgaactcattcgaaatgctaaagaggcgattccattcgtagccgttgggacaatagcgggttgtggagccaacttgtggtggcagtatggagtctactagtagaacgtgtacaggagcaggggaggatagctaatgagtgtccagttcatctgatccacatgcgtgtggcttggcccgagggctttgtgtaaggagcgatgacttgtgggtgtgggctattccatgtatcgggaattctgggcataacggtaagccgttagaaggaagagatgctgtctgtgggtctttgtggaggaggcggtgctttgaggttagatgtctttagttattaaagttagctatattgtggaagatagagtaattttgtctgggtttagatggtaacatggcatttgagtattggttcctttcttgcgggtgactggcttggtgaccgaattactagtgagtagtttactagactaggtcatgcatgggacgtcacggttaccttcttcacatgtcatctaaactggcctgtgatggtgttggaaatgtccacctttcttacatttttgacgatgaacttagttctagaggcgaatacgagggcgatcctggaaggtactccctggttgatgccgaagtagatattgggtgcggcgaacgaggaccatttgcgccaggtgaattgcactttgttgctggtggggcgggggtctgtaaaccggcccagcgccggcgt

SEQ ID NO: 673637 - DNA, 604 bp, Homo sapiens
  misc_feature (248)..(248): n is a, c, g, or t
agcggtacttagccttgtccctacctctttactcctctggtaggcagctaattcttttaatcttttgcttgtctttttctgtttgctttaggtggtaacagtatcggcatgagccaagacgtgatcagtgaaacctattgtggatacatgtactccgggttcctatcatctcctccatgctgcatcagcgcataagattgtccatatctagtctattcgttacacggagcctctgccagtgaaccacnggggataagtgaaggaaacgaaatgttgttcgctccttcacagtgatcaaggtgcctaggccagggcagcgtttgttccaggcgctctactgtagaacgaatagagtaactgttcaatggatggcagcaggataggaccctacatgaacgaggttctatcatgattgggtttcactggagtcctatgtgggatcgaatagccttcagccttggcgctatgcaccttctttgctgtccactccaatcaagaacgggggccctcgacaactgctctcaggtatctagaaacaaagttaacatctcgagtgacagacccgagaataacagacatacaaagaattactcacgaggggttg

SEQ ID NO: 673638 - DNA, 520 bp, Homo sapiens
  misc_feature (227)..(227): n is a, c, g, or t
cgcggtggtgtgggtagcagggcacactgacatgattggggtcattgttcacggctgctggaggacaggactgatcgagggcccattaatcacatctaacccaacaggtttagcaacaggtacattccccaagtaataaaattggaaactccttgaacaaactcattctttaagcgctgggaattccacttggaaagggacatccacaagtttagagtggtccaggnagagtccatttaccaagcagcgggcattacgccgttcggccatgatcttagagcagatctcatgcaggctggtggcgatgttcttggcaggtgcctcacagcgaaacacgtggcacttgagcatctgggtcagcttatcacgagctacgtaggcaaagtcccttccactgtcccgcccgacgccccacacgcggatgctgatgatgggttgggcgtgcagcagtgcctggctctgtggctccactagctttagtgtctcatcctccagctgcagtagcagatcctttcctacc

SEQ ID NO: 673639 - DNA, 189 bp, Homo sapiens
tacggtctgtcactatgctctcttcccttcagacagaccattctgaattctctaaagggaaagggcttttgcatcgaatcacaatagagttgaaagagaggctaggatctctctctctaggtgctgagcctcactctgtcagctgagactcaatgtacctgctctctacatgctgtgtgatatggtgac

SEQ ID NO: 673640 - DNA, 361 bp, Homo sapiens
  misc_feature (215)..(215): n is a, c, g, or t
  misc_feature (310)..(310): n is a, c, g, or t
  misc_feature (326)..(326): n is a, c, g, or t
caggcatatgctaccacgcccagctaattttgtatttttagtagagactgggtttctccatgttggtcaggctagtctcgaactcccaacgtcaggtgatccgcccacctcggccttccaaagtgatgggattacaggtgtgagccaccacgcccagtctgaatcactcttaaagctcaagcaatcctcctgcctcagcctcccaagcagttganactgcaggcacatgccaccatgcgttgcaattttttttttttttatagaaacggtctcactgtgttacccaggctggtctcgaactcctggcctngcagtcctcccacctnagcctcccgtcctgggactaccacccccctggccg

SEQ ID NO: 673641 - DNA, 252 bp, Homo sapiens
ctgcctagaggacccgtactgtggtgtaccgtgcagcaaaaacgaaatatcacagggatttcactgatctcattatgcatgcgttggacacatcataattcacaggatacatagtaacatgttcctccttatttcagtctatgtactttgttccaaatagtcaacatgaaactaaaataattctttaaaagataagtcttaaatatttcatgatcagatttgtttattaggaaaggatcaacaaaatagatt

SEQ ID NO: 673642 - DNA, 563 bp, Homo sapiens
gccactcagcaaattaaccactctaagttacttgctaaaagggggagatttcaggggacattagctggaggcgatgggcaaacaacaacttctctatatttatttttctcccacccacattccttgcattagggcaattagttaagctagatggataaactaactgggtaacccactaaatttccaagtctttcacaacctttccttacacctggcaacttgtacaccatgtcttccgcattctgtgggctgcatagacctgccctgctacattgcggaaggggtcagcactaggtttaagtagatcatgggggtggcgaggcatcatggaggctgactaccaggtatgtcgaggtggaaaccatttctgttaataccttatctgaaagagtctcagcatttgtgatggaattttggcaaatttcctgctgctatgtcaacatcgattttgtcattgcttctccttctgtggaatggagctctaggatctttacataaactgcagtgtcaagaggcagggtgttgaacttctggtttcgtatgatcagtatcgtaatgtgata

SEQ ID NO: 673643 - DNA, 955 bp, Homo sapiens
ggagagggggctcaaggcgagcgcgccgggcagttgcgggcgcgtggtgctgaggttggcggcggtgccggcgcccgagggccggtggttgcgggcctcccgctcgaccgggctggggcagccgtggcgggcgcggggaccgcaaggggcggaggaaaggagggggcggtcccggcacgcaagaggagcagccgaccatgccggagacaacatggcctcctggatccaaggatcgccgccaggctttgccttcaccttccgggcagctggggcggccgcgagcgctcccggatcgcagaagcggatctggccgcgagaggggcctgattagcacgcggggttccccgagaagaagctgagcaaaggtgaaagagcctccgtggaccccaggttccgggcagcggagggactttcgaaacatttccgcccccgggcgaaggcgcccccacacttgcacgccgggtgccgggccaacactggccggcctgttacaaccttactagggggcctttcttacggacgcggacgggcatccaagccgggggcggctgtcacttggctccagagaggcggacacgtcattcccgtggcaacgacaaccggggattggcgcgcgactgccacaggggggtggacgcgccccggtgggctcaagctggcgggaccagctagaccgcgggcggggggacacgcgcgggggactgtgccgccgagacaacagatcgagcaggcgttgacgccccggagggaaaaccggggcgccggcatagcgagatcacggggcaggaaccccgaggccggggccgtggtctcaaaccggacgggacactgggcaaaaagaccacggagggaccgcagctcaggaatcaggccccaacaaccgaaaagaggggcaacaacagggggaccgcagccagagccccgtggacaccaagtgcgccaccccaccgttggc

SEQ ID NO: 673644 - DNA, 187 bp, Homo sapiens
cagctacattgcgtttgaatcttaatttttaaatcctattatgaaagatcctcatgaattaaatatttaatgcaattattatcgtttattgatataaaaaaaaaaccaccaaaattcaggcttgtaaaaactgacttttacataacgtgggtttcgaaatctagccccagacttaatgttggagata

SEQ ID NO: 673645 - DNA, 476 bp, Homo sapiens
aagctacatatacacggggagcgggcttgtgttaaaaactactgctggaatgtctgtcttcgaacgagcccgtaaaccgttaaagccctatggcgagccgccttgcccagcctgcttagctgggtattgtcccggatccccactatgcggggtttttgacaacaacgcggctgtggctaaaggaacagactaccactggtcccaagactccatagcgggctgtcatggccggaaacctttaggtagctctactactacgttgcggaaagcgatcatggcacctccctaggaagacccttttagctcaatccaaccatcccactggaactcggccgtgatgcacaacaacccgggccggtcagtaaaatgtttcccgcagtagataggttgtcgggcacatagatgaacactatctactcagcctttggggagtgcggaaggagcctaactttccatggagcaaatgcctagtgccg

SEQ ID NO: 673646 - DNA, 870 bp, Homo sapiens
gcagatggtatgcttgcggaccgcagcccagcatgccggtgggcccacagcccgagccagcccagagctgccggaagggccgcccttcccggccctggcggggtgctggacactggccattttcactagagtttgcctggcagggaccgatctctgccccctcctctccccaggcctctggctgcaaccccaccggacgggtggtcctggagggaggctggagcggggaggcgaggagggggctgtgagtcctcagaggccctgggcaccagatttctggcagcgtttcccagacaccgcctcgtgctaggccagtccctggatagcaagtgaattaacgttaagggcactgtgatgggaagccgttgcgccccctctttttgtaatggttgtaaatagtctggggaataaacccaagggtaaatttgggaatgattaaagggcgttcggtggaataacacagtggtcccatctacgggctgggcatcttagcaatccaggcgtcaggctctgccccttctccaggatggggtagccccgagtcgcctccccagtctgcacattccctgtggtccctgtcccatgcaggggttcccggggccccagggaggcccaagcttaagtcccagcctgactcggagagttggctaccttcaggactttgccgcaagtcagtcctgctcatggggtctaagattccccatccctcggatgggacgcaagaggtctactgagtgggcctgccttgcaggggcctggggggacccaagtgtgagtgtcatcatacaggggcctcaaagaagtggaggacggtgccaagagtagcggatggcatggtggtgcctccacccggacctggcctggggagga

SEQ ID NO: 673647 - DNA, 211 bp, Homo sapiens
gatccccttgattggcgacgagtactacctcatcctcagcaagtccactctggatgaactctgtctgccaacattcttcctgacgtggacttgcttgaggttgatgcgtagtagatcgtcgtcctcgttcgatgctctccagcgaacagcggagatgtgctcgtgaagacgactggcatgactggcagatgccgctagcctcgctgatgct

SEQ ID NO: 673648 - DNA, 521 bp, Homo sapiens
ttgtcatgtgcagcagttgcctccctccagttgtcttccccatgtcaggcaattgatagctagaggtaccttggtgatcttgtctcgtttctcgcagaaaatggtcatcctccataattggtaatggtgatatcctgaaatcaagttcacaggtgaacagatctaatgtccattttattgttcactaaagtttagggtcagttgagagtgggtgataaatatatgactcttcattcattatctctttggtatttatatttttgacttattttttcagaactccattggtccctattcaggaaatgctaaatttaaacagccccgtcctgttttgggaccagccacctagagttctcaagtgctaaaggcaacgacctccttcccatcctcactcaccagtaattccacagggccaggctcagtgagatctgtcaaggcaagaggggtgcttcagctgatcccatactatcactcaattctggttttctgactctcttatttgttttcaatccaacctctac

SEQ ID NO: 673649 - DNA, 860 bp, Homo sapiens
ggcttgtcagtcggcgccgcgtgcggtctgtggctctgtgtcagcgtcggtggaggcttccggaattatgagcggtttcagcccgagagcgcgcgggcaattctcgcttggagatacagagtggttcgctgaaggcattgcagaggggaccagtattataatctccattgcatggatatccaagtttactgcagataaggatgtgtccaccatgtaaggttgagttaccaggctggtctaattgcaaaagtggcaggattggctacaaaagggaacccttaaaaaccctttataaggcaagggattgcttggaccacactgggaaaacacttcggcataatgtggcagaattgtggtcccccggttataaaggggcatatacttctggcaccgtattggtgcccattccccatacaaaatttgggggaacgaaccctcatgtgggcgacatgttgtataacacacctattacttgcgctggtggtggggttgggcaccattgacccccattttgattggtggtcgcttcacacattgtgcacagggcaaggggttatttgtgccaacgaggcgtgaccactactttgtggggtgaaaatttaccaagggcatatggggctatgattgacggaaaggggaaaaccgggtgtggaagaggtacattgggcattaattgttggattgatcttgattgcagccaatttatttattgatatccagtggatgtaacgggttagaaacctgggtaattagagctactgtgactggttagaaggtataagggtcctggtggaaaccagaaaatggttggttaaggaaattaaatatgggttgcctgaattttaaggtatacattgaag

SEQ ID NO: 673650 - DNA, 142 bp, Homo sapiens
ttatttttttaaacttaaccaagtattcagggctattgaattttgaaataacatgaggcggtttggaaatattcacatgaatttatgatattttcagccatctatcataaataatatgagataattaaaaatgttgtttaca

SEQ ID NO: 673651 - DNA, 1172 bp, Homo sapiens
  misc_feature (612)..(612): n is a, c, g, or t
gctcaatgtgcacggtgttccatggtgtgcccagtgtggagtgactgccttccgctacatggcccaaggtgaagcacattgtgcaaatgtctgtcgtgcatggtgcttgctggagtgatgcctggaggcagtgctgaatgggggccaaacccaatgctgatgtctggccatctccaagaccttcttgccctggcccacaagatgctacatcatctgcttgtgtgtgtcttggtgtgtgcttctggcctgtgagtttggctgcagttgtgcttgatacatgctgtggtgtgtgcatgaaagctccgttgtttgacttcctcgctcctgggatcctggacatggctaccagtgcccaagcaatgtgtcctgcctgtgttgtgatgtgctgccagtggctgtacatgtgtgacagtgtgtcacaaccatgcaaaaatcatgactcaactgtggagtgtggggccctgggtgcctcaatttgcctgaaggctgtgctgcacgactatgtgtgccctgtggggctggctgtcttcaaccttggcctgtggtcttgacgagatgtgttgctggatgaaccagaaccccagagttcttccagtgactgtcatagcaagngcccaaggatacatgctgtgacacccttgaacctgtgacagggtgacccgagaggcgtgccctgaggctggactactttgtggtcttctcctctgtgagctgcgggctgtggcacttgcgggacagagcaactacggctttgccaaattcctgcatggagcgttatctggtgagaaaccgacggtcacagaaagggcttccagggcctgggcttgccagtgggggcgcccatcggcgaacgtgtgacatatgtgttgacaccgatgagcaccaaggacacggaacgacaagagggaacacgttggccaaggcgcatgtggtacattggcttggacgtgtgcgggaaccactttccagtagaaccacgcccacacgtgttcctggacccagtcttgggtagagcagaaaaggtgctgagctaatcgtggacggtgaaacacgagggcccggtgagtagcacgtagccccaatttggcctccctgagagggcatgacacacgagaccaactgtcgaagtgcgcgctcacacactacaagtagtagggcaaaacgcagtaacc

SEQ ID NO: 673652 - DNA, 827 bp, Homo sapiens
agcctttttatgctgttaacagatgtcagagtgattctcaccaaaaaaagttaaactatgtggtaagcagccaatgtaaatgtctatttggaaattccctatgctaagggtgccttagaatcatggtgtctctttatatccagcttatactttttgctccacatttaatgcaaaagactctgtgatgtcctaccaggggagaaagggggacatatatttcccttctgtgacactataatggggggcacaacaagactcgtctgaagagtatatctttccgctgctgatacggttgctgataaagacatctcaaaatgtttaccaatgttttaagaagctttgtgtgatattcttccaaatgtagttaccaaatataatatggtagaaaaggtaaatcatacttaatgagcaaaatgtgaagtaagcttttaaagtatattctcttgggggaaaggacaatggagacatgtgtgaatttaagtgaacattttgctcaagatgttaactataaaacacactgatacaaattttcttttcgtgaataacaaaatgaatgggtaatgtgttgcagtgatggtacagcaaaaggtcattaatttttgcctaattcattgtgaactaaaggtaatggttaacacagtgtttgggagttaaatatctcaaaacataagatctgggtccatgaggtgtatgtgggatctggttacaaaaatataacaggggttctttaacaggattccaggggacactgcaggacgttacttaagacatcccagtggtctggggctaagaaggaaatgagctgggtacgaaaatgttgtgatcaa

SEQ ID NO: 673653 - DNA, 998 bp, Homo sapiens
gattgaggggcggttggctttgttgggtgagcttgtatcagtgtccctgatgtggctggacgtggttggtgattggcaggatcctggtatccgctaacaagggtcataagtgcacgagtcattcgtgaaatacccgttatccgggcgaatggactgatcgactcactttgaggttggagccgctaggtgacagcctttcgaataggtgaagcgccaggcatccattgattaaggaaggcatttcctccgccgtaaacagctagaggcgtcgattctttgcattagcaagcaagctggatacgatgggccgtacatcttgtctgactacattacatcctaggaacggaagtcgaactccctgtcacacctgggtccttgcgctctgacacgggtggaatttgccagattcttatcgatgaaataggccatgatccgagtattagagccattacaacgcctgtacctctggagacccatagtgaccgtcttatcgtgaaatgtgctgaatgggcccatgattcccggtattccaccggaacgagccaatcacctgaccgaatcagtaccagagggctcaatcttttttggctgggatacttccagcttctgtgtaacgtataggcatcgaaacttctttttctcggacttcactggttatcccgtgcattggatgtcggatcatctggcaccctgtggtcactagcgccttgaaggatgtggggaattccccgatcctcgtcctgaggacagttgcaccctggggcaccgacttttggacacgaactatccttgtaacgtattgagtagtaccaacgcaatatatggtcgcaagggttttcaatggacggaaaatcctgcgggctaccaagtttgttatcctcctccggaaaggggacgtggtgcttctatctcttgtaaggctgggcaggatgcgaagattgccatcccgcgtttcctggattacagctgttgtgagacttgccgagtgcttgttcacg

SEQ ID NO: 673654 - DNA, 411 bp, Homo sapiens
  misc_feature (356)..(356): n is a, c, g, or t
  misc_feature (409)..(409): n is a, c, g, or t
tatcatgtgtaatctttcaaaatgaaaaaagaataaatcaataatatagtgattttgtttggcttcacgtaataatagcagggggatcccccaccgtgtgagtcattgatgtatagtcatacactgcagctgtgactgtctcaaatttagtcatttccaggcgaatttgcagttaaatgattaacctataggtactatgagttgccattaaaaagccaagcctctcctgatgtctttcctgtcctgggcctattgtgaagcctttaggtgggcatctaccttcagttcatcaagatttaaaaagacagtttggaccctttttgtccaaggctttcccggggtcttttcatgccccnggggaagggtcctcctaggcacgtgggcagggtggcattacttcttcaggcantt

SEQ ID NO: 673655 - DNA, 534 bp, Homo sapiens
gccccaacaccgctcatgggggaggtggatgctgactgcatggatgtcaatgttcgaggaccagatggcttcacacccctcatgattgcctcctgcagtggagggggccttgagacaggcaacagtgaagaagaagaagatgcacctgctgtcatctctgacttcatctaccagggcgccagcttgcacaaccagacagaccgcaccggggagaccgccttgcacttggctgcccgatactctcgttcagatgctgcaaagcgcttgctggaggccagtgcagatgccaacatccaggacaacatgggccgtactccgttacatgcagcagtttctgcagatgctcagggtgtcttccagatcctgctccggaacagggccacagatctggatgcccgaatgcatgatggcacaactccactgatcctgtgcgcgcctggccgtggagggcatgctggaggacctcatcaactcacatgctgacgtcaatgccgtggatgacctaggcaagtcggctttgcattgggcggccgc

SEQ ID NO: 673656 - DNA, 324 bp, Homo sapiens
gtttgtttgagatggagtttcactcttgttgcccaggctggagtgcagtggcgcgatctcggctgagtgcaacctccacctcctgggttcaagcgattctcctgcctcagcctcccgtgtagctgggattacaggcatgtgccaccatgcccggctaattttgtatttttggtagagacagggtttctccatgttggtcaagctggtcttgaactcccgacctcaggtgatccacccgcctctgcctcccaaagtgctgggattacaggtgtgaggcaccatgtcagcatagcttcttctcaacagcccttctgtcgtcttctc

SEQ ID NO: 673657 - DNA, 231 bp, Homo sapiens
agtgagccgagatcgtgcactgtaccccagcctgggggacacgagcgagacttcatctcaacaaaaaaaaaaaaatcagttgggcgtggtgttgcacatactatagccccagctaatgtgggaggctgacacgggacgattgtttaaccccaggagtccaaagtaacaggaagtaggaaccacccaactgcactccagcctgggtgacagacttgagacactgtctcacaa

SEQ ID NO: 673658 - DNA, 749 bp, Homo sapiens
ttaagtaggtatgagctcaattgtgaattcattttgtaaattgtgtttgtaaggttattatagaatcagatctagcttacttttagttcttattcatgtttatgagttagtcctggccaggcgcggggctcatgcctgtaatcccagcacttgggagtctgaggtgggcggatcacgaggtcaagagatcgagaccatcctggccaaaatggtgaaacctcgtctctgctaacaatactgaaattagctgggtgcagtgatgcgcctgtagtccctgctacttgggaggctgaggcaggagaatcgcttgaacccgggaggcggaggttgcagtgagccaagattgtgccactgtactccagccaggccacagagtgagactctgtctcaaaaaaaaaaaaaaaaaaaaggtcccaatttaattctctttaatccaggatgattaattttggttcccggggatttgggacagggagacggtaattgttgtaactaatatttgggataggtggagagaaggctccataaagcaggggacacagacggtttttctaccatcctttaatgttggggacgtgtagggacgtgggtaaacttcagaggggggtctttacgtgtggggagaaccagtgtctattcaccagggagtggtgggaacttgtggccgtggcataatgtttaggggagtggttaggaaccattaattataattcttggggaaggagttacgggtcctggagagagaggga

SEQ ID NO: 673659 - DNA, 1054 bp, Homo sapiens
  misc_feature (1054)..(1054): n is a, c, g, or t
tgtcgctccagcgtcttatagctcccggagcctgccggctaggttctgtctccctgatcgtctctggccggcgccctctccctcgcccggcgcgcacctgagcagccggggcgccgagcagcaccgtcccgagcatagcgccggccctgcccgcagcggcaggatgaatgatttctggaatcaagaatatggaccaggtagcccctgctggctaacagttacagagggacaactcaagcgccagccagccttagacacctttgatgggtccctgtttgctgtttttccttctctaaatgaacgagcaaatcactgcaacggaagtgccaaccaggcttgcgattcgcagtttctcatgacctccgcgcgaacgtgtgcaacttgccctattgttaaccgccgttgcagacaaggcatgtgactgacgctcaagcccttacacaagctaccttcagctggcttcacgcacaggaactagcggcgccttggcgcattcccacccgaacccctggctgtgcacgtgagcaacaggtatgccagctggccttcctctgggccaaccaatgcagcttcacgctctgctgaacgctgacatctgctcaaggcttccggccatgaactggccacactgcatgtgtaaactctgacaagcgaaacgacttcatggaccctgggcaccatgaccctccgtgcggctgacactcctcctgcacaaccatctgagaccacaatgaactaaccgacaaaaccacggcaacacgcacagcaccgactcccactctgaaagcacacaatacccacgcactcaccctccgcactccctccactcggcgcactaacccagcccaccaaccccttcaggctcctcgcacacccggccaccagcgcacccccatcactgcgcagctgcccccacccccgcacatctcccccacataggtgccccgcctcccctccgccacacccatgctcatccgcgccgtcccacaccccctcccgctcccctcacccactgccccccgccacctcccccatgtccccccccacatcaccn

SEQ ID NO: 673660 - DNA, 1020 bp, Homo sapiens
ctagttctagatcgcgagcggacagttctagatcgcgagcggcgcccttttttttcttgttttcccttgaaatctgccagtcagaacgggatttctgaggtaaatctggttctgttaatcctcaattgaggcctttatcatttatctactgattagagacatccatgaaagaagccacctgtatatccacaggggtcctgcgccattcagggaacagccaaaccgagaagtgcagaaagccagtaggatagcattaatgtagtgtgtaacataagcttaaacgtgggctgtgatacaatatcacagtgcctctggtggtccaggttggctgacatactgctcctttatagtaggggcaccagcaaatgggtggggtaggggactacaggtggagaaaagacctacgacgattatttgtggctctatgtagaaaatggcgactctataaaattcctgcgcctccgtggcatcagcgtcgatttcattctagaccttgtcggtgaatctatcgtccacgtttgcaacatagaacaacctcttatgccagagtcgattcctcgaggtacatctgagtaaaccctgggttggattccagaattgggtgctgcggtggggagttgcctattttgggaccgagtttatgtcaaacgcagagattgttccacgggacgagtcctggaactcaattggtcaaagtccgcactccagttgtgcttgaactgaggcctttcaagggtggtctacgaagaaagaaactgtctttgtccaggggaaagacactgaggagtgacaacactgggcggcctggggcttggatcctgatttgatcgagcgtgttaacctctgctctctgaaccttcgtggagtgatacccccggtgccttggggagcctcgcccgaagtcatccttagagttctccccagttaccgcaagagaacccacgggactcgcacagggtcctacacggtagaaggcagggcacccggtctggctctgaagacccaaggctcacagcgccc

SEQ ID NO: 673661 - DNA, 121 bp, Homo sapiens
ccggggttagtatagcttagataaactttcgtttattgctaaaggttaatcactgctggcccttacgcgcgggggtgtggctaggctaagcgttttgagctgcattgccgaagcttgatca

SEQ ID NO: 673662 - DNA, 162 bp, Homo sapiens
  misc_feature (12)..(12): n is a, c, g, or t
aaagactactgncaacgaagccggcctgcctttcccatctgctatctatctggtggcagggaaggaaagacttgcatgttggtggaaggaagaagtggggtggaagaagtggggtcagtttattttgatcacatttttattgcaaataaaaatttaaaaact

SEQ ID NO: 673663 - DNA, 990 bp, Homo sapiens
agtgagcgaggcctatgttccctgcagttgtagacctactgcgccggcagcggatcatcctcatgcttcaggcgtccgcgcctaggcccggccccgccttgtgccatgtcggactacagcacgggcggggggtctggacggggtgcccctctcagccacccggcggtaggctggcccggagaatccgcaacggacgctttcgccgactgccgtgcagcgtggcccgccagtattgcatgccgaaaattggaggcgatgctgccacgacagtgaataacagcactcctgagtttctggtataagggggccaaaagacgacaggttggaagcatggagactcaagccggatgagcaaggaagcgtggcattcccaggggaagactcaaatcagtgttcatcagacattgtgacaccgatccaatccttcgcaccaacaagggacttacaaattgagcagcagagcagtaacagagggtcccaagaaacggccatgggatgcgagccttggcatcccatgtgggccaaggagagcagggttggaaccaaaagagttaaaccaagatagtccccaaagacaagaggacatttcaaagggcattgccgaaaaggtgatcaacgcaagtttatcatccccgaggaaccaaagccaggggattgggcccagtaacacccgcagaaaggacccgaccaagcatcggatggagtaccaccgatttggtgaaaccaaataggcggcaagcgaccaaccacgccagaggggaacaaagcgatccagtaggggctccacccagagggtaaacaaagaagggccccccgcaaacatgaacacatgcggcaacgttggggcccgattggggcgacacgagttagggaaaacacgagtatcattaggggatgcggatacacggttacaacggatgcgagagggcgattacagcggaaatagagagaagagagaaggaggaacaccaacgcaccgacacacaacaa

SEQ ID NO: 673664 - DNA, 295 bp, Homo sapiens
tccccctaatgctgctaaattctgtatttttactagcagacagggtttcatcattttggccatgctggcttccaactcttgatctctctgcatcagtccaccccgacctcccaaacgtgctaaggattatatcgcattagccaccacacccggtccatctttttatttcttttccttttattaatctgaacactgattttatgtattctttgtcctgcctatggggcaatatatcttgcccccatatgcttgactcttgcccttcttaggcatgatggtttcgatttactaatct

SEQ ID NO: 673665 - DNA, 888 bp, Homo sapiens
  misc_feature (157)..(157): n is a, c, g, or t
  misc_feature (235)..(235): n is a, c, g, or t
  misc_feature (253)..(253): n is a, c, g, or t
  misc_feature (294)..(294): n is a, c, g, or t
  misc_feature (374)..(374): n is a, c, g, or t
  misc_feature (387)..(387): n is a, c, g, or t
  misc_feature (424)..(424): n is a, c, g, or t
  misc_feature (438)..(438): n is a, c, g, or t
  misc_feature (443)..(443): n is a, c, g, or t
  misc_feature (446)..(446): n is a, c, g, or t
  misc_feature (451)..(451): n is a, c, g, or t
  misc_feature (466)..(466): n is a, c, g, or t
  misc_feature (469)..(469): n is a, c, g, or t
  misc_feature (491)..(491): n is a, c, g, or t
  misc_feature (500)..(500): n is a, c, g, or t
  misc_feature (502)..(502): n is a, c, g, or t
  misc_feature (507)..(507): n is a, c, g, or t
  misc_feature (515)..(515): n is a, c, g, or t
  misc_feature (536)..(536): n is a, c, g, or t
  misc_feature (547)..(547): n is a, c, g, or t
  misc_feature (570)..(570): n is a, c, g, or t
  misc_feature (597)..(597): n is a, c, g, or t
  misc_feature (629)..(629): n is a, c, g, or t
  misc_feature (697)..(697): n is a, c, g, or t
  misc_feature (735)..(735): n is a, c, g, or t
  misc_feature (737)..(737): n is a, c, g, or t
  misc_feature (810)..(810): n is a, c, g, or t
  misc_feature (879)..(879): n is a, c, g, or t
gaggcggggaggtggccactggctccgccccgctcccctctgacccggtgtctagtctctccgtcttcctgttccaaaccacgtggacgcgtctgggctgctgtgaggcagccgagccgccgccgtcggtgtcgccgccaccaccaccatcggagtnacgagtcccgcgtctgtccgaagtcgccgctctcgggctgctcacgtctcttcggagagcgcgcacatggcgactcangcgcactccctcagctangcagggtgcaacttcttgcgccaacgtctggtcctgtctancctgagcgggcgccccgtcaaaatccgaaagattcgggccagagacgacaacccgggcctccgagattttgaagccagcntcataaggctatnggacaaaataacgaatggttctcgaattgaaataaancaaacaggaacaancttanatnagcancctggcctcctgtanggnggatctgtggaacatgactgtngcgtccttngnggcantgggtatnacctggagagtcttctttgcntggctccattnatgaagcacccgtgaaaaatagntctacgaggagtgaccaatgatcaggntgacccttcagttgatgttcttaaggcaacancactccctttgttgaaacaatttgggattgatggtgaatcatttgaactgaagattgtgcgacggggnatgcctcccggaggaggaggcgaagtggttttctcatntnctgtgaggaaggtcttgaagcccattcaactcacagatccaggaaaaatcaaacgtattagaggaatggcgtnctctgtacgtgtgtgaactcagatggcgaaccggattgtggattctgcaaggagcatcctcaacaagtncatacctga

SEQ ID NO: 673666 - DNA, 91 bp, Homo sapiens
ggggttgaccttcctccatcccctggtccttcccttccctttccgagggacaaaaagacagggcaggatccccgtgcccattgtggaggca

SEQ ID NO: 673667 - DNA, 116 bp, Homo sapiens
gtgtctagcagcttttgcaaaccagcagtcccattggcagtgggagttcagggagtgtagtggatgccaaatatgtttttcttcagtgcttaagagaactgtttcctgaagtccag

SEQ ID NO: 673668 - DNA, 84 bp, Homo sapiens
  misc_feature (3)..(3): n is a, c, g, or t
gtngacaacgaatgtaaaattctgaaatatccttgaaattcaaaagaggttcatgacatagacccaaaggtatttatgagttat

SEQ ID NO: 673669 - DNA, 721 bp, Homo sapiens
tatacttgggtgtttcacttcatgctctgaatactgaataaccatgaatgactgaatagttaatcccaaatttttacagaggatacttctatttttatcattattgggggttggaaaaattttttttataccccttctaattccctttatttctcaaaggcaaataattctctctggtgtagaaaatggtttccttttttaaatttaagggtgtataaaattccttggccaaatcatggtggatttcggctctatggcttttcacgtggtctggaaaaattggtgggcgtaaattggcgcttcgggtatgtgtccctagatggctctcctgttgagcacaaagtgagacgctgccacgtgagacagcccgtgccaggggttgcgtgttcacaggcggggcactcgcaagggggcctcccctggaaaccaagggcggggggcaaaggggcatgtgactccaggggttcccccagggggggctcagcatccagggagaggccacccaggttgggcagccccacctcttgaaaagccccccagtgccggctagcaacaagaggacccgggacccaagaaggacagaatactcggcggggggctgcgacaacacaagggctacaagcttcgcccggtggcaagggacattaaaccccggagtaaaaaccccggtaaggaagcgccgctcaaacaaaccaacagacacacaaacaaacaacaaggt

SEQ ID NO: 673670 - DNA, 1279 bp, Homo sapiens
ctttgtcgggtgagcttgtctgtgtccctgtggcgtggacgtgattggtgattgggcaggactcctgggtatccgctaacaggtctacaatgcacgatcttcgctgaaaagcccttaccggcaagaccatcacccttgaggtggagcccagtgacaccatcgaaaatgctgaaggccaagatccaggataaggaaggcatttccccccgaccagcagaggctcatcgtttgcacggcaacgcagctgcgaatgatggccgtactcttgtctgactacaacatccagaaggcagtcgacccttgcaccaggtcctgcggtcttgaaaaggtggtaatgcaagagtcgttcagtggaatgacctcttgtagccggcgaggacccagtctagaccgcgtaggaacgctggacgcccatagctgacatccattcagacaacatgtgagaggggccaacagaatccacctagtggcatacgaacgacacgggcaattacacgctaaccctggaagacgacagccaaagaaggtggctcctcactccctttgtttgccacacgtggccaaagcctacggcgtaggagaacacgggactgtgcgcccacgacactcttccgtgtttggcacttagcaccatgaaccccatatgcgactccaccgatgcgcaacgatggcaccgtctgcgaagcgccgccattgcgcaacgccctagcgtttccacacgtagactgccatccgcttggacaagaaagatcagattggtgtcaaacttggtccatacgaagtccactataccaagatgcgaacagtggagcaccacagttggtaagccaccgggaggacgaacccggtacacccgcagagtcagatcgcgttcccattcgacgcacgaggcatggagagagagcccacacagaaggacgggaacctatacccacactccagtcaacacacacagacttgttttcagaaactagtgtggcgccaacacgaaaacttcgccgcagagcggcatactctacaccacaacggtcagaaagcagtctaccagtttgagccgcctccacagccaagtgtagctgccccagtgcgtcaagcaggggaggacagtacagctagtccattgtgtcgtgaccttgcggccacaacgcaccgacgggatcgtgatcgtgtgaaacggaagatggcgcaacactaggccgacgcgcgatacgctcagtcgtcgatgttcgagccggaccatacacaggtgacttgccggcatcggaacagactcaccagc

SEQ ID NO: 673671 - DNA, 361 bp, Homo sapiens
ccccgggtttttgccaaagggaaaaccccccctgtaaaaaaaaaagggttttgccctggccttggggggaaaaaaacgggggggaaaaatcccaccccccgggggggggggcccccctttgcccctgggaaccccccgggacccccttttttttttagggcctttgggggtttgaaacccccccccggggggggggggggggcccatttttttggaacccccccattttttttttgaaaaaaaaaaaaagtttcccttttccccccatttcctttttgtccggggaacccaacccttttgggggccccttatccaatgggtttcccccccccccaaaaaaggtaaatgtggcccgccccca

SEQ ID NO: 673672 - DNA, 926 bp, Homo sapiens
  misc_feature (569)..(569): n is a, c, g, or t
  misc_feature (828)..(828): n is a, c, g, or t
gctgtgtcgtcctgcctcagagacgaattcatctatagtaggcctagcccctggcctgtgaacatacaaggaagaggtgggtagaacatcaactgagcatggatattgccagcggaggtctcattacagaaatttcataaagaaacaagtaaccatctggtactgctgtgagtggcgatgagttgaaactatggcactgagtttggactgagaggataagtgtatgcatcgagaacttgttgactcaacgaccgaaggaggtcaaaagtgactacgaaggtcgtgtgtatgaacggaccagccctttcgctgataactatggtcgtgaccggagctgattcctggaagatgctccggacaaatagatccatgctctgtgaacataccaatattggtcgggtgggttatttagaagtccactggtgaggtgatcccagccagactgttgcagaaggtagggtagtcaaagtcgggtatatctgggtgtggtcatgagtacgatacaatggggtcctgtcgtggcgggcccctgaaacgtggtgagaacgtgatctgagagcgtgcgactntactagctaatgaattaggatcgatgcttttgccgggatcataccctcttatcgagacgttgaaacgaaggaccggatccactggcctgagccgcgtaggggctatctgggaggctgtgcacctaatggtctcgtcgctttcatttctggatcatgctccagttggtgtccgaggcccacaggtacgcgtgatgtggcttcggaccacgctttgatgaatgtcggccttgctgtggttctcgccctgctcagtcgtgtncggccgtggatccaattgcttgccttgttctgcttatgtgcttgggcatggtcctcttgcattctcctgtcctggattttcttctccccggcctgcag

SEQ ID NO: 673673 - DNA, 1137 bp, Homo sapiens
ggtggggggaggggtgtggcgcgcgcgcgatttctagtcgtatttcaaagcgcctcgcgctgattctcatgggcccgagtggctggccccgcgttctgacctggcataataaagatggctcatccgcgtgaactggtaatgtgctggtcacagttcgacgaagaggaagaaccaatggattacttccagttgtagactcacacatgaacgacttacaagacactgatagaggcatggccttcccacgagaaggtggcagagagacttgactgaggcatatttcacgaacaggatctggtagccttatgtcgattcttgatgcacaggcaggcacatggagtagcgtcctcacggggacctttaatggaacgacaggtagctcttgtcttggtagctacagcccagtttcacatgggaaacagttcgactgtattcatcatggttcacgaaaacgaaacaacgctcgacagttcacgaaagtggtgagacagcttgactgcagaagaacccttaccaaggggccgagacgaacgtagcaaacaacaagcgtgaggatgccaaaaggtctgctatgaaaggttcccgcccaatgggctacccttgaacttgcagaggcggacagcattctaccgagccgctttgtccgtgtgcatgacagaaaagtgaggttttagtaccatccgcggagaactggataacgcccccgaggggaccaaggacgacgaaaccgttatggggtggtgatccgcatcccagttcaaggaaaacagttgtagttacagtccttggtgagcggttgcaagacgcctggacaaatttcgggcaaccgaggacagcaatgatgataggtacaagcaattaccccaaaggggaccttgtaatacttgcaagcgaatgggagggttgggacggcgcccatatcattaggacgaaatgagtatccgatagcgcgaacatgtgattcactccatacggatattatttggatagggcaaccctacttaggtctggggatgcaacttcaagaagggggtagatgcaactgattgttaccgcgttcattacttcgaacagggacatgcgttgacaaagcgttacaacccggataaaaacgatgatgtacaagtaattactgaa

SEQ ID NO: 673674 - DNA, 260 bp, Homo sapiens
tgcatgctttccattatatctaaccttaaagcttccaaagatgtgataggtacctggaaatgattctgagcccgattattcattttgttttctacgggaatacttgaaaaaaattagaatgggaagaaattccagcttgtttacaccttgacttatgttgttactggcaagatgacttacctctagtccaattgaatttctagccgagcttaatatttctccaacctgattagcttagagcacattaacctaatatgact

SEQ ID NO: 673675 - DNA, 656 bp, Homo sapiens
tggaccagcgacatttgcgagtgtgactgtcatgctgaacatggatatcaacaggagtcaaggggaagaagcttaagtttatattgtttgtgaaacatagatgtttgctatgatcatagaaaatctttttatatattccttaaatattttggcctggtggttcatacataaagatatgtgtacaggttcttttaaaaacacttagtaatttggcttactcaacaaaagatgagtccttatgtaaaatctttggggtcatttcataaacatatgtcttaatggtattgtttgcggataatgcatgacctgtcattttccaagtaatggatccctgatggattcaccatagttacatgactatgtcgtgaattatacatttcttgtccacatatttggaggcccacctgaggatagattattggataattgtcattattttctttcataaaatattgtcatttctccattttctttttcagcggtcttttgaagaatccaatcttccacagtgcttaaatgagcagcttttacaggtactatccgggcaaagcactcagcaggatgacccataatgggactctgcccgggtagccatctttgggtatttgaatagcaagcgctcttttttgagtggcgctgcttaaaaaccgagatgc

SEQ ID NO: 673676 - DNA, 629 bp, Homo sapiens
gacaggggttgtatcatctaggatttatttcagaagtgttttatcagtctctgtagagatctttcacttccctggttatctgtactcctaggtattttattctttttgtggctttgtgaatgggattattttcttgtttaggccctcagcttggacattattggtgtataggaatgctactgatttttgtatgtcaatcttgtatcctgaaactttgttgaagttgcttatcaaatctaggagctttgagcagagactatggcattttctaggtatagaatcatatcatctgcaaacaaatagtttgacttcctctttttctatttgggtgcctttatttctttctcttgtttgattgctttggctgtgactaccagtaatatgataaataggactggtgagggtcagcatcctcgtctagttctggttctctaagggaatgcttcccacttttggccattcagtatgatgttggctgtgggtttgtcatagatggttcttattactttgaggtatgtttcttcagtgcctaatttgtcgagggtatttaacttgaaaggatgttgaattttatcgaaaggtttttctgcatctattcagatgatcatgtggtgcgcgttatccgttct

SEQ ID NO: 673677 - DNA, 522 bp, Homo sapiens
atgtgcaccttagcccaggagttcaagaagcctgggagacatagcaaaaccctatctctacaaagaatacaaaaattaagccaggccacagtgactcacacctgtcatcccaacactttggcattgctgtgtgtacagaagtttgaggttgcagtgagctaagatcatgccacacacgtctgagcataggggacagaccaagaccttgtctcaaaaaaacaaacaaaaacaaacaaaaaaagacagaagttgtatccgaaggacaatgagacataccagttaagatgcaggagaattctgcgtgaaactacttgaaacaagattcagggagatgcaggtcaaaatggctgtgtggaaaccccacagggcttagaaccagacagacttggtttccaaatcccagcacactgtacagaaactgcacacctatctctaggagttgttcacgattagaaacacatttcaaagacttgcccaaggcgggcagtagtggctcacacctgtgatcccagtactttggga

SEQ ID NO: 673678 - DNA, 354 bp, Homo sapiens
tcggcccgtcgacgcgacaaataattctttataaaatagtgtaacaaactatatgatgtctcgacgatccagttgaacgacagaagaaggtgtcgaccatcatggtggtgaacatgaattctgctgacagagaaggacacagtggggacgagcgaacttgatgttggagtatccgccccccctcaacatactagagtgcaaagattggccgggtgtggtggcgcatcgtgtagtccaagctactcaggtggctgaggcacaggaatggcttgagcctgggaggcggaggttgcagtgagccgagattgcgccgctgcactccagcctgggcaacactgtgagactcctgtctac

SEQ ID NO: 673679 - DNA, 287 bp, Homo sapiens
  misc_feature (212)..(212): n is a, c, g, or t
tgctttcttaaccttttgcttgatgctggccacatcaatttgagtttcagtagaagctagacaaattaagagcacaacacatgtgatactttagattttaccaagtaaaacagagaatatatgtgtaacaaagaatatatgtgtaaggcagttaacttcagagtattcttataattgagtaattgagagatgatcacagtataagatataanggcacttgtcctaaagcagttagaaatttgcttcagattaagataaaacaaatcataaaatactttatatattag

SEQ ID NO: 673680 - DNA, 239 bp, Homo sapiens
gccaacatggtgttcaggcgcttcgtggaggttggccgggtggctatgtcttcttttgagctcattgccggaaaattggtgcgcgattttaagatagttattgatcagaaccaagggctttggtcgatgggaccttgccactcaaagtgaaggagacagggccatgccttttcaagtgcatagcagctcactcgattttcatacctcaaagtttcccgcacacgtgcccaccacgaaga

SEQ ID NO: 673681 - DNA, 97 bp, Homo sapiens
  misc_feature (29)..(29): n is a, c, g, or t
  misc_feature (54)..(54): n is a, c, g, or t
aattcaagacttctaaccgatgtacgggngacatggttgtggttaatctggttntatttttgttccacaagttaaataaatcataaaacttaaaaaa

SEQ ID NO: 673682 - DNA, 340 bp, Homo sapiens
  misc_feature (33)..(33): n is a, c, g, or t
  misc_feature (102)..(102): n is a, c, g, or t
  misc_feature (217)..(217): n is a, c, g, or t
  misc_feature (332)..(333): n is a, c, g, or t
  misc_feature (340)..(340): n is a, c, g, or t
caaatttttttttaggacgggaccttactctantggcccaggctggagtgcagtgatactatcatagctcactgcagccttgaactcctgagctgagttgancctcccatctcagcttactgaatagctaggactacaggcatgtaccaccatgcccagctatttttaaagtttctctcccttttttttttttaaagagatgaggtctcatttatantcgcccaggctggtcttgaactcctgaccacaagcagtcatcccaccttggcctgtcaaagtgttggtattacacacctggctttatattgtattcttacaataaagtaagctanntttattn

SEQ ID NO: 673683 - DNA, 153 bp, Homo sapiens
cataggcaaatcatttcaaatgtggtaatacaacattctcgtagtaccagtggctggaccatcatctccccatgtcatctgaccagggccgatccgatgtcacttcagtcccactggatcctttacttgcagcagcaaaattccatcatgaca

SEQ ID NO: 673684 - DNA, 100 bp, Homo sapiens
  misc_feature (1)..(1): n is a, c, g, or t
  misc_feature (24)..(24): n is a, c, g, or t
ntgaggaggagctgaagtggacancccgaatacttggggaaatctacattctagctccaaaatcggcagacttgtaacaggaaggcgatcttgactctgc

SEQ ID NO: 673685 - DNA, 495 bp, Homo sapiens
ctgattagaccaaatggggtctcgaagtcttagcgctcaagcagatctgccctgcctcagctgcccacagtgctggatgacgggtgtgagccagctcttatatattctaatatatagctcccttgctttccaaagacagaaagggaggtccattccgaggatggggagagtataaagaaacgtagattaggaaaagcaaaccatgagtctaaatccagaatcgtaaccagtcctgtaaaactgagaagcccgaggctagggaggacctcagcatcctaaggtgggaaggagagatgctaccattagaatccttcttccgctgaggctggcgcagcgagtcaggatgtcctttctgcatggattcccgagcaactgaggaactggagtgacacaggcagtctactacgttcgggcacatcttaggtgctgaccaggtcctgtgcttaggaacggaagttttcatcaagaagacgaggcatgcaagcattccatatg

SEQ ID NO: 673686 - DNA, 219 bp, Homo sapiens
ggacgggacaagaaatgatacactcatcatcgtctccacgcagaagcaagcaggctaatatactgatcatgctccgcgaaactttgccccgtggggatctgtgctcccgtaagcaatgaagatcaaactagtaacaacaatctcattaaaatgctcttccttgactgggcctggtggctcacactgtgtaagtcccaagacttggggaggctgaggtag

SEQ ID NO: 673687 - DNA, 331 bp, Homo sapiens
  misc_feature (21)..(21): n is a, c, g, or t
  misc_feature (27)..(27): n is a, c, g, or t
tttttttattctttattgagntggagntcgctctgtcgctcaggctggagtgcggtggcacaatcgcggctcactgcaagctccgcctgccgggttcacgccattctcctgcctcagcctctccgagtagctgggactacaggcgcccgccaccacgcctggctaatttttttgtatttttagtagagacagggtttcaccgtggtctcaatctcctgaccccgcgatccgcctgcctcggcctcccaaagctctgggattacaagcatgagccaccgcacccagcccacttttctttctctatattttggatctgtgtctcttgtcgacg

SEQ ID NO: 673688 - DNA, 272 bp, Homo sapiens
cttgggccgggggggggtttgccttttcccccgggggcccccttgggcccctgggcctttgccccggggttttcggccccccttttgggggggggccggcggggcccgggggggtcttcccgggccccccccggggtccgtggggggtcccggtggcccctgttgggccccttgcccccccgcctgggggtttgggcccgcccccttttctttttttttatttatttattaattaaaattaaaataaataaattaaataaactgaataaata

SEQ ID NO: 673689 - DNA, 1407 bp, Homo sapiens
taagtctctaaaccgttaatttctcccccaccaaaaggtgggggtgggggggcctaaaacaacaagcggggcggggggtgttcccggggtgggagccagcggcaaacagcgtgggtgtccctgggggctcttaaggcgaaaggtgggagatggttccagccccacatattgggccgcgtacaatgtcgtcaatcagttggactgataaagacccaggcggcggggagggagagggccgggacctcaagcgggggtggcactcaagcacccggaggccagggccggacggcggccggccgagcccctctcccccgggcccatcccggagacataccggagataccggtgctccggggcggtggagtgccgcagggcggcacggggcacaacacaggcgcgcagaacacacgacacgagctggcaggataaggacgcggagatccaggcgcgccgccccgccgagaatcctggcgcagaacagacgtggcgccacggccgtggcaacaaagacggcggcaacgagtgttcagactggagaagccggctcagaaagggcccatagaaacttggagctcccgggagcaccacgggtgagcaccccgaaagaagaggtacctcggggggggggcatagcacggggtgaggacctgaagcgccaaatatggcagggagatagaagctccggggaaaagggaaaaccacgttaccggagcagcgagaaagccgcacgaggggcacacgatgcgggtggtaacacaccgagagaaacactgcggcacttgaaacagggagaagaaacggacccaaagggaggaaccccgccagtcagcaaggggcacaaacacgaaccgcacgccacacgagaagaaagagtcgatgatacccagggaagcccacgaaagcacccgagaacaacgttaagacacacaaaaaaggtgcaggaaacacacagaaatacaacagaaataacacaaccaccacaggaggggggcatccgcggacctgaaaaaccccacaggaggaggtccaggaagcatgacaagggcgcccgtgaggacacgctgcgcagagcaaagcaccacgctagagaccccagggagccccagcgagaggaccatcaccaaaaccaccacggatgaggacagacaacacaacgtggggggacccggacagcgaccaatcagaaaagcctgggacatacaaagaagcaagcggtgcagcgacacggagacaagaagcacagaaacaccggagtaacaaacgagcacagaatacaccaccaacgtgcagaacaccccgagaggcaacacagagcagcaagaataaacagatgacgcgcacaacgagaagagagccacacacgacgaggcacacacgtcgcggggatcagcgactcagggtaaggag

SEQ ID NO: 673690 - DNA, 938 bp, Homo sapiens
  misc_feature (442)..(442): n is a, c, g, or t
  misc_feature (449)..(449): n is a, c, g, or t
  misc_feature (453)..(454): n is a, c, g, or t
  misc_feature (460)..(460): n is a, c, g, or t
  misc_feature (464)..(464): n is a, c, g, or t
  misc_feature (478)..(478): n is a, c, g, or t
  misc_feature (489)..(489): n is a, c, g, or t
  misc_feature (493)..(493): n is a, c, g, or t
  misc_feature (495)..(497): n is a, c, g, or t
  misc_feature (615)..(615): n is a, c, g, or t
  misc_feature (624)..(624): n is a, c, g, or t
catggctcctgggaggtgaaaggcgaaactacagactatactgatcaggtgctagattgatgctcgtgactgcccacatatatctcagagatctcagacagaatctgtgagcttctggggtaaccatgatgacagtcgggccctctatgccatcccaggcttggactatgtcaggcatgcaagacatcctacccctacgaggctccacgtgatcaggttcccatccaacatgaactctttgaaggatttcgttctgtatgaccagatagaagcacctccttttgtggcctcgggagacgctatagggcctgtcaagagaagaatctgcccgtggctggagctctcccgagtggttcatcgggaaacaattgaggaacatacgtgtcacttgtcatccccttctacatgggcgtgagggaagcccagaatacccacgtggtantggtggngctnntgtatncgtntggagaaccttganagtgatgtggncagntnnngtagcggcactggaggatattcagtctctctggcaccttggagacagtgcgaggccgaggggtagtgggcagggaaccagtgttatccaaggagcagcctgcgttccagtatagcagncacgtctcnctgcaggcttccagtgggcacatgtgcggccgttcgtttgaaagagctgatgggtccaggtggaagttcggatctcccttctcgctgggaagaatcaagatgtgaagaacacctcaggcttcactgtgggcagtggcccagttgccagcttgggcacgggaaaaaattctctcccaatgtggaactttcccctttagggcaggtcctcatgaggggggccacgggggggagggaaactccaacccgtggacccgggggcgcaaacggaactgacgccaagggtcagaagagaccggaggaaacagagtcacgcc

SEQ ID NO: 673691 - DNA, 271 bp, Homo sapiens
  misc_feature (9)..(9): n is a, c, g, or t
aattttttnctttttttccccccccccctgggggtttgggcccccgggccccaaattgggggcggggggtttttttccccccccccccgggggggggggctcccaaaaagggttcccccccccccttttgggggggtttttttttttggggaaacgggggggccaaaaaaaacctttttttttggggggggggtttttttttttaaaccccccccccggggggggggggggcccccccaaaaaaaaaagaaaagggaagccgggaaaacca

SEQ ID NO: 673692 - DNA, 265 bp, Homo sapiens
accagattgcgtgatcctttgattaacttctgaatactcaatcaagtcactaatccttttgctgctgtatctcgatgtcggtttgatactgttaacacaccaaaaagaatatggaagttgaaatgagctatctttataaccctgtgtgaattcgttttccgaaataacatccaattatgactgggtaataagtgtgaaaattttaatttgtggttttcatttattaatgtctgcccatctgtattgttgctcctacattcaaata

SEQ ID NO: 673693 - DNA, 229 bp, Homo sapiens
ccaggatctgtagtgtcggccatacgaattccagggctgtaatctgcctatattcctgtgatagtgttgctgttcatagataagcttcctccttgcctttcgaagcatctttgggcaaacttctttctcaggcgctgatcttcacctctgcgaaattccttcgcttttacttaagggtttctggcacagcaggaacctccttcttcttctcttctacaggggcgacact

SEQ ID NO: 673694 - DNA, 316 bp, Homo sapiens
  misc_feature (51)..(51): n is a, c, g, or t
  misc_feature (53)..(54): n is a, c, g, or t
  misc_feature (58)..(58): n is a, c, g, or t
  misc_feature (123)..(123): n is a, c, g, or t
cgcagtataatgccagataccacatctgacccccatgactgtatctctctnanncganccaagattcacttcatttccccatatttctttctttcctgttccttaccctgttcacacttggtntattgatggcagctccaccaggcctaatcaccactcaccagcaaaggcaggctatgctatagtatcttccacatctatcattgaggctaccactctgcccccctccactacctctcagcaagctgaactcattgccttaactcgggccctctctcttgcaaagggactacacgtcaatatttatactgactct

SEQ ID NO: 673695 - DNA, 386 bp, Homo sapiens
tggacagactgactatagttaagagttagggttagagtcatatgtgtatggttggtataccagggctgtatagcagctatcgccacattggtgctgtatatcaaccagccaccaaggttggtggtatggctggggtaagcatttatcgcttacacatcagagtaaactgggggcctggctcttaggcgatctaggctggcctcagttgggagctctgctcccttggatctctcatcccttttcttaggaccattcagctggttacagagatgtctttctcacagcaacattacaagatacagggaaagcgatgcagaaacagatgaaccttggaggtcgggtcttagcaactggacagtgtcattttcacttcattcttgtactct

SEQ ID NO: 673696 - DNA, 254 bp, Homo sapiens
agagctctacataggaggatgatgctttataactttcgtgttcaatagttggccgctgaggtgttgaggacctagagttctagctgaagttctagggactgacaggacccgtcaattcaagttagccgttaacagctagcatacctactctcaggcggccagtacgtgctagctacatgtgggcccttaacagcccatatgagtgacgataatcttaactcaggccgacgaaaatcttcgacgagtcagggttt

SEQ ID NO: 673697 - DNA, 312 bp, Homo sapiens
  misc_feature (26)..(26): n is a, c, g, or t
  misc_feature (49)..(49): n is a, c, g, or t
  misc_feature (299)..(299): n is a, c, g, or t
ttgctaccaattctatttatttcggnattacaagatagcgggaatcctntctgcaggctggaatggcaggctgtggggtgggcgggacacggctcttaacattttcagagggaaacgcgcagatgtccaaaagtctaaataaatgcattccagaggtttttggggtccatggccaagtggagttatcccagagggggaggtggggtaagtgcctccaggaaggcaggcagcctgccttagacttgcagcccggctgtgggaatgaatcattggagtaataaactacagtggttgatccncaaaaaaaaaaaa

SEQ ID NO: 673698 - DNA, 236 bp, Homo sapiens
acaacccagcattggttgccaaattgaagggtttccagcaggagaatgaagaattgaaagctgggatggccaagcacatggcaatttcaaggcagctttccccggagcaggctgttttgcaaaagtcgctggaaaaggagtcgaaagtcaccaagcgcctttttatggaaaacgaggagcttttgtggaaattgcccaatggggacctgtgtagccccaaaagatcccccccccta

SEQ ID NO: 673699 - DNA, 866 bp, Homo sapiens
cgtctctactaaaaatataaaaattagctgggtgtggtggcaggagcctgtaatcccagctacacaggaggctgaggcacgagaatcacttgaactcaggagatggaggtttcagtgagccaagatcacaccactgcactccagcctggcaacagagcgagactccatctcaaaaaaaaaaaaaggttagcggaaagaaagggattccctttagaagtgtgggaaagaaaattcttaaaattattggagctgtgatgtgccgtgatatttattagaaaattaaggggttttcttcgaaaagcgtgtcctagtgttgggcggtaattaagagtctaaatcactctctccttaagcgtggggagaaccaaggtcccatttggaagggagatacttcaaatatcgggtcattgagggttccgggtcaggtagaattacccatttggtggctacccacatttttctggtgaagaactggtttccagcgggttatcatcatattctaattataacctccccacatagttatggaaggagtacacctgaaaagtggcccttatgtgttggacctgaggattactcggtactttcgggtgacacgaatttacttctcagcggaacttctttacaagggtttttaccgttacacaaggatcactatgaattggcaacgtggcaattttaccctttctatataaccctggccatggtgggttgggcaccaacaggacgagtgctatactagtaagcctccgagaaagaaaatatcacagggcgggtcacaggaccgtacagacactccaggatgcacggcgaattgggtgaccctttccactttcaatggagcgcgccgttcggtatacccctcg

SEQ ID NO: 673700 - DNA, 1013 bp, Homo sapiens
gaaagcatgtaaaacaatgactcaaatgtaaatgaagaatggaaaagcatgttctggtgtcactgtacccatcaaatcatgccacaggccctacctaacagggagtgatcaggaggtgattcaccgactgggaaatctcctcgcttccgagtactctgctggcattggtgtccctttgtcaacttcttcagaggttccagaggtgacaactgtccaacattagtaacaaaaccaggtaataccggttttaagtacgtacaatcttaaccatccacctatcagattcgaattacaacttgtaaacaactgaacttcatgcaactctatccagctaaaagcggagagcagtgcaatgctgagagaaatagctaagtcagatgatggaaatatgctgaatgggaagagtaaatacaccaccacctggtatggcgtcctaaagggctgtatagttgcccatcttcactgagcataatctgctgtgaactcgaattagagtctctgatgaagactcactttttgcaacatgttcatcatgatggcaccagtgaaaatctggaacagtcaaacagatggaggggaagaccaccacgtaccagatctatgcttacatacagccgaattggaggacgagtcacgacgctcacattctgccgggtccactatttaggccataggattctgataatggtgctgtatccagcttcttgcaactagaggtttctaagctggccaaggtctccgtaaggttcaatccttttagagagaattgtcaatacgaaagaggacggagggtcggggattggctgactcacatctgagacagcggtatgtgctagccgggaaggactcggggggggaacttgggttaaccaaggggactacggatgtaagtggcctattgtgtttgtggctcacggtctgtgacacgcacactcgtgaaaggaatatgtagcaacacggaagcaaccagtatgatgtgtggggaggggacacacactgccgaacagtccgag

SEQ ID NO: 673701 - DNA, 1061 bp, Homo sapiens
  misc_feature (383)..(383): n is a, c, g, or t
aagtcggtctgggattgcctatctgcttaccgtagacgagaaatgctaggttatatagccaactacggcatgggcatcgaatgttgtgggcctccgtacgtgcctactacaacccttcgcgtgacgaccattataattcttcaccaacagagacccctaaatgtccgtgactagtctaccgatcacccgtgctacatcaccgtgccgtgaccgttagttcatcaccatcgtctgcgtttctacctatagaagcccccgctccagccatacctgacatgccacctggtgcaacacttaaactgactgtgttgctcatttgatccatagcacaacctctcatgccgttatacgatatttactttaagtagcgttgctttgtctgngggctggaagcgagtccatgactatgagatgttagctcgccgtgtatcatccatggcatgaggtaggcgggccaaacaggacatagcaaatcgtcttagttagtgtagatcttgagccgcatttactccagtcagagtactgacagtgagtcctaacaatctcaccatgaatgattttggtgcgtcctgtgtccatgcatctatcccaccagtctgagtcagacacacactggtttagaaaataccctaccgtgtagtaacacctttgtgtgcttatcgcactgaaggctggtttggctccagtactgattgttgttgcatcgtcgcaatccataagcctggaaaggatcaatgcgtaggaccctggcttaccccactttgggctgaaaggagtgtggggtccctgaaaagataagccccctcctggggcttggacaccaccagtcgaagactatttgtcgggaagcgcccccacatgaattgaacataatttgttcccatacgacgcacactatctcaggacactatgataagtgtggggaaagcccactagaccgcttagaacattgtccctaggcaagtaccatatagacgtaattagtgctcctgcattgtgctagctgatctttcttggggtctgccaattgttcgtacttttataaagactctcctgttacg

SEQ ID NO: 673702 - DNA, 437 bp, Homo sapiens
  misc_feature (108)..(108): n is a, c, g, or t
  misc_feature (131)..(131): n is a, c, g, or t
  misc_feature (160)..(160): n is a, c, g, or t
  misc_feature (172)..(172): n is a, c, g, or t
  misc_feature (203)..(203): n is a, c, g, or t
  misc_feature (264)..(264): n is a, c, g, or t
  misc_feature (422)..(422): n is a, c, g, or t
ggcactttatggcaattccaagaaggggctgaaagttacagcctggatgcctgtcaccaaatccctttgagcagtgacctgagccacctggtcgagaaggtacgagcnctgagagggcagctggagcaganattcaggggaacaattgtctgcgactccncttgcaacagcntggaggagcggtgctggcaaagcacttcaancccctcctccattaaccagaacttcccagccagcactgaccctggaaacaagcagctgctnctccaagattcagctgtgtcccctccagtccgggatgttggtatgaattccccagctctggtcttccccagctctgcttcctctacttctgggttcagaaacgcccataatcaacagagcaaatggctttgggttttggataatttttccagtaattnaagaccccttcccaa

SEQ ID NO: 673703 - DNA, 123 bp, Homo sapiens
tttaaaaaaaaaaaagaattttacccttccatggggaaggttttttgttccctgggggggaaaattttttcatttttcaaaatcccttttgtaagtcttttactttataaatattccagggga

SEQ ID NO: 673704 - DNA, 522 bp, Homo sapiens
tcgatttcattgcggttacgctggctctgtgaaagggggtaatgactagtcgtgtgggactacgcccaccagcacggcatacctgacgagacctgcaacaactaccaggccagacggaccaggagtgtgacaatgtttaaccaatgtcgtacatgcaacgagttcaaagagtgccacgccatccggaactacaccctctggagggtgggagacaacggctccctctctgggagggagaagatgatggcagaaatctacgcaaatggtcccatcagctgtggaataatggcaacagaaagactggctaactacaccggaggcatctatgccgaataccaggacaccacatatataaaccatgtcgtttccgtggctgggtggggcatcagtgatgggactgagtactggattgtccggaattcatggggtgaaccatggggcgagagaggctggctgaggatcgtgaccagcacctataaggatgggaagggcgccagatacaaccttgccatcgaggagcac

SEQ ID NO: 673705 - DNA, 150 bp, Homo sapiens
ttttttatcactgtactatatggccactctcactggtacactataaacattattaaaatggtaacatgtatgttacatgtatttcccacaataaaaaaaaacatttttaaaagagaagtagtagagtcctaggggatccttattaaaaat

SEQ ID NO: 673706 - DNA, 157 bp, Homo sapiens
ggccagacaacgttacagtgaaaacagaaatacgaagacagaaatgcagctagactgaagaaagaaaagagactcaagaattcctatttctaaaaatgttcaaaaatattcgaagtacattcaccagtcttctcgttctgcttcccattaacatctt

SEQ ID NO: 673707 - DNA, 442 bp, Homo sapiens
gtacaataaatagtataggcaggcatatttctcccttcaggcactcgtcattgatccggggcatatctttcggctgcctgatatttgattgcatatatttataatagttatatcttcatggtagaatagatgcttatttcattatataactatactttaatgtctcttgtgcacagtttttgacttaaagtcgattttgtctagatataaatagagccactcttgctctctttgggtagacatctgcatggactgcctcgttccatccctgacaggagccatcatagttctgctcttctaacagggcaatgattctaatgtttctctgtgggtcgggagaccaggaaacgacagaccaatcacagaaaatgtgacatagtgcactgccttaagaattcttttctgtccttgtagacaacgggaaaccccgggcatcctctag

SEQ ID NO: 673708 - DNA, 112 bp, Homo sapiens
tacccaagacctgcttctaacctccctggttcttatgaatcgaacagcatacccccgattccgctgcaaaccagtaacgctgcaaacaccgctgcaaaccagtagcaaacca

SEQ ID NO: 673709 - DNA, 1074 bp, Homo sapiens
gtgggagagagcctaactcctcctgacagagtctcaccgaggatggatgagatcatgcgagcgtggtgaatgcctacttggccaacccctcccccgagaggccctgcagcagctcttctcctccatgccaagacctgccagacgactcccctcgccagccagcgcccgggactggacgagccccagggcacagtctggctgcttgggagcagctgcacggactgagcctgccaagatggtcacgacttccactcctgacctgcacgcctgggcccaggactgctcatgacgatttgacgggaacacatggacccattatggccctgccacggaccacggcacatcccacacccaacgggctaccaactggcgtgctggctacacttcactacgtccgtctcttcactctcatctcgctacaacacacatcccaccccaccacctcacactcccctcactcccccccacacaccccccacaccaccccacccccactccccccctcctccactttcccccctcccaacgccatccccactctcatctccgtcgcccccgagcgccacatctccacacaacatgtcccccccatacactagatcactcaaccacactacacgacccggaccacacaccacactacctccccaccaccctcataccaccacacacacacccccgaacaccataccgccaccctactcacccacacaccaccccacacccccccaacgcacaccactccccaacctcactcccccacccacccacctacacacaacactcagaccaccccccccgccctccacacatacagcaacctccccacccccgtcatcccccggcgtcacacaccccccccccgccaatctccaccaaaaccaccacctccaccaacctcccacacaatcccgcccctccaatcactctaatacacaccactcaccacccccgtcccacccaccccctacacccccccccccccccctccctaccccaccaacccccccccccatacaccacaccacaccccccccaaccaaccccccacagacaccaccacctcacccaccc

SEQ ID NO: 673710 - DNA, 119 bp, Homo sapiens
tgttaacgctgaactatgtgtcacctgatggatcatacctgctccctgttgagaaccactgctcgaccctgctcctgtgacaggcactcacaggacatgctggcactaacatgagcttt

SEQ ID NO: 673711 - DNA, 481 bp, Homo sapiens
tggggccgaagttaaagaccgaacggatagagaagaggagggctgctggattggcgttggggccgccccgaggacctgtgcctatctgcccatggtcgaggagccctggcggagtgcagccgcgccgttgcctccaccgacatcgcactggcccacaggactgccactgctgctcggcttctgcgcccccaccagcaccacagccacccagtcccacaccagaccacccggcgtacctggccagagaggaaacgaggtacgacgaggctgagcccacagagaccgagacctccgacggaaccaacatggagacataactgataatggagggctctccagctgaatggcatgacgacgaccaacctccaggaccttcgcccccctaacagatgatctcacaacaccgcacagtcaagcatgcatgtccaccttgaagaaagagacacccaaatcgaacgcaccaactgcaaagcaaccaaaa

SEQ ID NO: 673712 - DNA, 255 bp, Homo sapiens
acgtactaaagggcaggtgattttacccaaattaggatagctttgatccatttatggcaagaacaaaaggggataagtatgccacttacctgtagatttgagcccactataaagcataaagatgtctcatatttttaagtctaaccgagttagcataaaccaaatcatttggacattagttggcagtattatgaaataaaacacaaaagtattctttccttttttattttttttatagaaatggattctcactct

SEQ ID NO: 673713 - DNA, 210 bp, Homo sapiens
tggtcacacaggcaaacgacgctcagactcttgtgcacataatgtctggagactgctgtgtgggtggcagtggctgtcactgtgctctggaatcatgattttgggactggtctgcctcctcaggtggaggagaaggaaaggtcagcagctggactaatgctataaccccagtcatgtgaatccttctaaaacatctgaggagctgtggtt

SEQ ID NO: 673714 - DNA, 433 bp, Homo sapiens
atactcgctgtatccttgaactcctgagctcaggtgatcctcctgcctcagcctcccaagtagctaggaccataggcatgtgcacaatgcctggctaattttgaatttttttttttcataaacagggtcttgctatgttggccatgctggtttcaaactcctggcctcaagctatatttcctcctcagcctaccaaagtgttgggattacaggtgtgagccaccatgccctgccacttagggagttgttttatttttatcttgattgattggtttttctttggggaaaagtattaactggataatttatgttgggtgattcatattttaatatttctggaaatattccatatttcgagtaggaaagttgtttttaactggaagtgtaaggaggaaaggattatggcccttaaatggaattttttttttccccc

SEQ ID NO: 673715 - DNA, 163 bp, Homo sapiens
tgtatctgggaggttgaagataccagggaatcatgacattccgggcatgcgttgtgccaaccctcggccatctgagaaagcgtgcattcataatgggtcttacttgtgttgctgattgtaccgattatgtcatgtcaaagcagatcattcaatgaatgcccat

SEQ ID NO: 673716 - DNA, 345 bp, Homo sapiens
aaataccgcagtgaatttctagtcagcgagctaatgcgtggaatagggaatagcagacaacttgatcatcagagtgtggagtcgattctagaccccaagctacagaaaatgaacttaaatctagttgactgtcgccacatactttcttgggtgtaattttgctggcagcgtcttcttccagcagagcagctggaacagaagcagcatcagtaggcaaatcaggatgtttgccggggggtccctgggatttcagcagcagtgcacagtcttcatgggaggttgaccatagggcagttggggtgatgagtccttggtgcagggcatccagtgtggccgccagccatg

SEQ ID NO: 673717 - DNA, 603 bp, Homo sapiens
atagtgatatttaagtggtagacaccccacctcagctggtcctgaagcttatctcgtataaataatcactggataaggggaagttgtcggtggctaagggatctcaaaccggccatccccaaggaaaatcatgtattagtatggctaaatgagggtcggtatcttcttggtttggaagggggctagatgttggcggtaaactggaaggggagaataatatccttaaagttacaccccctataagcctaaagccatttaattggataaacggagagagactattagatttggctctagggtataaaatccataatctgatcatatccctgacctcccccggattccaattaaaggtgctgaatcagcacatttagtgtggctaaccaagagataccggtaatggtgacatggattggctctaactacagcttcagtgatggggggaggaaaagtcccaacccaaggtgctcaaacttctaaggggtactcttctcatccccttatccttctccctcgacattttctccctctgtcttcccatgaccccaaagccaggggcaaaagatcagtacagaacgtggtcagagtagaacccctgaagta

SEQ ID NO: 673718 - DNA, 194 bp, Homo sapiens
attccccggtgcgggggcggggaaaggaacgggagtgactgcttaatgggctccaaagctcctcggtgggggatgaaagtgtttgaggagtaaacaaaggtggcggctgcccagtgtggcaaatgtgctacatgcccccgaaccccccttgttaaagtggtcattgtatgtggtgtgaatttcccctctgttta

SEQ ID NO: 673719 - DNA, 209 bp, Homo sapiens
attttttttgttttaaaaaatttccaatggtattttaaattaaaagggacatgggcaggtttgttacaggggtatattgcaaaaagttggggtttggggggcaaataatcccctcatggggggagggagcaaagaatccaaaagggggtttttcagcccattttccccctaccccccacccccgacatcattacggggttttcttttta

SEQ ID NO: 673720 - DNA, 871 bp, Homo sapiens
ccctagtgtggtttaaacagttaaaagggagcattgactatgtaaggggaacacaggggtttataaacattctcagaatgtgtacaagagtgtagaacgaccaatttcgggcgtataaaattggttcaaaagagatggcgattgagtcagaatagccgaggtgacaacacccacgagggtggtgggtagtagcctggtaatatattagttttctccagaattgtggtagtgatgccgcacagatagtctctcacttcatctgcatcccctgtttaatgtaggagtactaccgtggggcagcgcggtgcttcttcacacgggggcggtgctacctttttgctcgagagcatcaatattttgtgggaggaccggttgggagcaccaccagaagggtttgttgttctcgccaaggctagttgttgaccaccgcgtttgtcgtaaatagccacggcggcgccccgtattgtctctccgccccggggtgtctcccccggcgttgttagggcagctcgtagcaacaacggctgttgtacacacggtgtgcccactttttctcccgtgccggtgatagtaacccctcgtgcttatcttctttcgcctggtcatactctttgtacacacacgtctggactcgtggttgattgcctcccacttcgccacccggggccctctctttccatccattctggggggggtactccccacttcctcctgcatgcgcctgggagaccccccttcgcctgtgggtatcccacgccgcgccactattctcgcagccctgcccataccaggggccccccgccctttttttatatttttttccccccccccccgccccccgggggaataaaaaaacccccctttttttcca

SEQ ID NO: 673721 - DNA, 543 bp, Homo sapiens
agtactaaaaacactgatatgatttaaaaaaaaaaagaaatacaaaaaggtatgggcactatggaggaccagtctggcaatttctcaaaactaaacgtattgtgaccatataacatagcaatggggtcccttgacatttatacaaacaaggtgaaaacttatgtgcacataagaacctacacgagattgtttagagcggctttatccctaactgccaaaactggaaacaaccaagaggcctttcaataggtgaatggccagacaagctgcagtacttccagacaagagaatgttatccagcgataaaggaaaatgagctatcatgccacaaacagacttggaggattctcaaaagcataggattaagtgaaagaagccattctgaaaagcctacatactgtatgattccagctatatgacttttgggaaaaaagcaaaactagagacagtaaaattaccagtgatagctcggggtaagtggggtgaaggaagggatgaccaggtggaccagaggactttaagggtagggagactattctatgt

SEQ ID NO: 673722 - DNA, 825 bp, Homo sapiens
  misc_feature (232)..(232): n is a, c, g, or t
  misc_feature (544)..(544): n is a, c, g, or t
  misc_feature (658)..(658): n is a, c, g, or t
tggccatccttcggggaaaccttttttgggaacatgttctggatacacccgcgtgcgagaccttgtttatggaaagcatagatctgcaagcaccgtgccaccgcctctaggctatgtgttgtggggagcgcggtcgatttcacagtcgattgttctctctcatacaaagcaagctagcgcctcctggatacctttcccccgtggtgggagccactctcactggctatgtgcncatggcacgcgacgcgctctttatagatcgaaccatgctctgtgtgagagaaggtgatctttacataaatggtgcccacacacaccagtgactcttatctttctctgtgggatataatagacgatataaagaatacggtgaccacacaccctcgttgttattatacgagggctgttatctagtgccacaccccctctttcttcgttgagacatatctgtcctatagtgggagacacgacagacacaccgcacaccacaggtgtttcataggcgaggtgggttctctttggcacttaccgctttatgtgtctntctcatacgccacgtacatatatgatacaccacctcgggagagactacatctttatatacacaaaaaatgcgagatttatacacaacagccccccacataggttaactaatcanaattacactgtcctcgctaaacaaatgggctccatctccatccccattcatctacaataacagtcatagcccttttttttggatgacccccatgcctccctatcctttgatgcctggaaatcaaatttaaaaaatacattttattattcttcttcccacaatagtca

SEQ ID NO: 673723 - DNA, 168 bp, Homo sapiens
tttgggggatttcctggggggttcccccccccccttttcccccaaaggggggggggggggttttccccccctttttttccccccccaaggggccccggggggggggggcccttttccccccgggggccgggctttttttataaaaaccaggaaaatttttttttttta

SEQ ID NO: 673724 - DNA, 319 bp, Homo sapiens
atgatcaccgcgctatgtctggccaatggactgtctgtgacgtaatccagagtaagtgcctctccaaggagaccgctaccacggacctcctcactattctgcctgcgcacacagtgggggatgtgcaatgtgacatggaggtgagctgcccagactggctataccttgctgcctgtctacagtacgggggcctgggtgctgctgccctttttacccagtgctgtgtgcatgtgaggaccacactacactgctgtcgccgcggagatttacggtgtgacacggcacgaatttttaccgtgtgcaacagtgggccccaacc

SEQ ID NO: 673725 - DNA, 363 bp, Homo sapiens
gctattctgttcctcctaaagaggatataaagccattaaagagactcgagatgaggatgatgctgattataaacctaagcaacaattaaaacagaagataccaagaaggagaagaaaaagaaaactagcaagcaagaagcggatggtcaacatttgacaaaaacccaagaatcaagcattaagataaacaaagttcctgagccagataacaagaaaaagaagccgaagaaagaagaggaacagaagtggaaatggtgggcagaagagcgctatcctgaaggcatcaagtggaaatacctagaacataaaggtccagtatatgccccaccatatgagcctcttccagaaatatcacgggggtac

SEQ ID NO: 673726 - DNA, 608 bp, Homo sapiens
ctaatgagtcctctgagtatcacgaactgccagggcgaatgctgagcccctttcctgggagccgagctcgtcccatctgctgtcacaaagacctcccagcttctggcacgttcttcagaaggcggctcctgtgcatggtgggaggctcacagggcgtagtgcccatgttttctgtagcttcctattactgcagcacaagcaaaaggtcacttaggccccttcggcctcttttcatatggagtctctacttcatatgaaccctttacttagattgaagactttgaggtaatataaaggttcaggtgggtgacatgaatagggtagatagaaattactagagccagagtaaactggagagagggtggaggtttctcagctacttctcatagcccaaacccagcagacaggtaccgtgtgtcacagggcacggggacgagaaggtgagagaggagggcgcctgtctgctcagcacagatggggagctctgaaggccacaggaaaggacagggatggattttgttgtagctgctttttcgggtacggtaacgtggactttggtttgtaaacaaaagtcaaattcatatttttcccaccaaatctatgtaaaa

SEQ ID NO: 673727 - DNA, 1014 bp, Homo sapiens
agcgggacttgctttagcgtcagcagcgccggagccggacgagaaacgcggaagatggcggcggcggccgggaggccgtgaggagagcggcggctgcgagtggcggccgatggctggccgtggaggcgccctcggtaccacttgacgggtcgttagggcgctgacgtcctggtgcaggctatgtcgtgagcacgtgggagtcccgcgaagctccggggcccgggtccccaacgggcggcggcggcgggcccggcctgcccgcgctgcgggggccttcgtacccccaagtctcaagcacccaatcgccgctctattgaagcgtgtggcgctgaccgggcgtcttcccgatgcgcgtgtgttcttcgagaatgtgcttgtgtcaccctatttcgcgggctccttccccgtgccgccgttcctcgacggtctccttcggaggttccttgcggtgacttgctcaaggggccctgggtggggtgcggtctgtcggctaccctggggccgtatcattcccaacagtcgttcctttcgttgccggcttcgcgcgccattcaaaggttggcccttgggagggtaccgttgcgttggacctctggtgtgcgcggcgttgacggggcgttcccggcctggtgtggacaggtggcgggggacgatattcggaggccggcggcctgcgcgggtcgtatcccttgaccgaggtgccatggtgaaacattccggtacgggcctgtcgggggaggcctcccgcggggacgctggtgccggatggtgtagaccagggcaggtggattccccttgggtacacttgccacggtagtggagggaagggaggggaaaagaagccttggaccaatggggcaaagtgtatgggggagacaggtccaagtgcaaagtttagagactggtgaccactcggaagcccccaaggggggcttccatgccgggcgcagatagcaaacaaagtgccgtgcgagtgaggtcgcaggagttccccctttacgcggaaagcgagca

SEQ ID NO: 673728 - DNA, 288 bp, Homo sapiens
  misc_feature (96)..(96): n is a, c, g, or t
ttcttcacagatgagcgaggctccgtgacttctctgcgtatcaagctctgcactccttagcacttttctgtcagatgcctggaatactacctgggntttcttcaaagcaaactcgggcatcccgggaggtcagtctccttacccccggacaaagcacaaatacttccctaactgtatatgtaatttttgtctgatgaaaatactctcaggcacatttcaactttcatgctccaaagtccatattattccccattatgacgcacccactggttatttcaggccacgtgg

SEQ ID NO: 673729 - DNA, 621 bp, Homo sapiens
gtaccattggaagagtttacagcctaccaggactacttagaaggggatcatgtttatttggatatataacccctgattggtttgttttaaaaataaacgttattatgttagtgtcatacctcatggtttccttggaacattctcctctaatcctctttgagagagtgggagggagagattgtgaggggagagagaaatattaaacatacatcttcctaatgaagaccataaatcctaaattacctaaataacccacttaactatctccactccttaataacactatactaatatatcatacacttcattaaatcacaatttatctttcaatacaaatataaattctactccccattttcaacactcagttataactaacatcttatttacttatcactcatttatccttatccattcaaataatccctccacacattatcccacttatcacacaacatacataatttctaccaaccttttaaccttaccctctataatttccctcttacacctacatttcctacctataatcctttacaacttatttactcttattcctcattttctctttaatttaaacatacctttcccctttatcatcttatatcatttactacttcc

SEQ ID NO: 673730 - DNA, 155 bp, Homo sapiens
ccccctcccatcgcagattgctatcctgcctggcgctgagcatgtccctggtcggcagctatttcgccctagtggagcccttggtcgccatttttccggtgctgttgctggcctggctgcgctttggcataggagccatcgccatgctgcgatgg

SEQ ID NO: 673731 - DNA, 239 bp, Homo sapiens
gccggcatactcttacgacggaaggggagtgtgctccggctgctgagatgccaggaacggtttcagatagctggccacttgactgcgtttcacgggcctttcctgacagtatccagccccctgccaatctgtggcacccagaccactgctggcccccaaggatgggctcttgggtgcttcttttcatagatgggctgtaccttcggcgcgttacgacataccgcgtgtgggtaccgagc

SEQ ID NO: 673732 - DNA, 740 bp, Homo sapiens
ggctgcagtgagccaagattgtgccactgcactccagactgggtgacagagtcagaccctgtctctaaaaaagaaaaaaaaaaagggttcttggacaattggcttatagtttattagtagattagttttcatttaacaaattatgattccttaaattattaagaaaattttaaaacggcatttccttagtagaggcatttttaaaaggtgataccttttaaattagtattaccgagtattaatatttaataagcattctgattatattggattgcaatacctgaagttgttgcacctgacactgaaacataactctttttggttggttttccctgtggattgttaaaaccaatctaaaatgggaagttaaatctcagtggagctatatgattggtttaaaatttcccttagtggatggctcaaaatggatgggtttcattaatagggaagcttttatatcgaagtctaattcaaacttttatggttagctattgggtggctggggaagttacattggtacattggatgcaggattttatactactgggacacggtcactatagtggctggttgctgccttaaagttgcaagttgagtattcacatttggtaccgaatgtccttcaactttaaatggctgtttctaaaacatagggaaatgccttgaactattttcaatcttgtgtactactactattctttctaacaaatatcttggttgcttcctttattggtcatcca

SEQ ID NO: 673733 - DNA, 102 bp, Homo sapiens
agtgataaaatagggtaggaggccccgagagccccagcaagtgtagggaggcacccagcacatacgtaggtagcttcacaataggtagaggtaagacggggg

SEQ ID NO: 673734 - DNA, 306 bp, Homo sapiens
gaccccaggcaggccccaccagtgggagccactgcagaggaaaaaaatgagtgggaggctttgggtgtgggggttaaagccagggcctgaccttgtttgtttcaggagccggtggaaatagggctcccttgggtgggtggaggcccaggggaatgccagtgggcagttgggttgcaccctcaccccttttgttgctttgcagacggagaccctattgctgcaggcagagccccgtgccctgtgtgcctgttggccagcggggcattgaggaccacgttgctccgtgtgaataaatgcccagtggca

SEQ ID NO: 673735 - DNA, 268 bp, Homo sapiens
taaatcagcataggtgtgtataacttaaccttgatttataagggcttaagattatgactattcattgacatgtcatgagaagctttagaagactttctatttttaaacaccatttatatgtggacttctgttgccactgacttcgggctttatattcccatatagtctttatggaaaaaatagaatctattggccactctcggagctatagctgctgcacactttcaccctgatttattttgttgcttcttagctgtgatgttgccaa

SEQ ID NO: 673736 - DNA, 208 bp, Homo sapiens
ttgcacgccggttatgtcatgccatggagaagatgtaagtaccatagcaaggctgcaaacctgtcttccagtatggagccgggattgtaatggacacatttgggaagtcaggccaggaaggagagaagactctggtacaagtgtgctgctttgtcccatttgtgtgctatccaccttaaacaaagacatgtccttggagaaactatcc

SEQ ID NO: 673737 - DNA, 104 bp, Homo sapiens
cagatcgcgtaagtcatggcggggtcaggccataatgtctcccaagaggccctggccattaagcggatgctggaggtgggagcaccaccagtacaggagcacca

SEQ ID NO: 673738 - DNA, 151 bp, Homo sapiens
  misc_feature (130)..(130): n is a, c, g, or t
tcccaagctctcccatctcctagatctggggactgactgttgagcctgatggggaaagaaaagctctcacacaaaccggaagcccaaatgtcccctatctcttgaatgatcaagtcacttttgacaacanccaggtgaatataaaaactta

SEQ ID NO: 673739 - DNA, 108 bp, Homo sapiens
ttaggataatttctttcatattttttcctagctgtccctggcgtcctcacaacttttcttgagagacatggtctgcactctgtcaacccaggctaagaaggcagtggc

SEQ ID NO: 673740 - DNA, 344 bp, Homo sapiens
cgactttttttttttgagacgcagctcgctctgtcgcccaggctggagtgcagtggcgggatctcggctcactgcaagctccgcctcccgggttcaagcgattctcctgcctcagcctcccaagtagctgggactacaggcacgcgcaccacgcccagccaatttttgtacttttagtaaagatggggttttgtcatgttggctaggctagtctcgaactcctgacctcagatgatccacctgcctcatcctcccaaagtgctgagattacaggtgtgagccaccgcaccagcctccactgcacttttctttgacatagagtcttgctctgtgacccgggttgg

SEQ ID NO: 673741 - DNA, 360 bp, Homo sapiens
actacatacttccgtgcgattatcaaaaaaaaaaaaaaaacgcgcagccataaacccacaaattttagcttcgggggattgactccttagccaagcacatacaccaaatgtctgaacctgcagttcctctcgtactgagcagaataaccattacaacaactccttatccttaggggaaaactattctgaatcacgacggcctaatcccagctcacgttccctattagcgggtgaacaatccaacgcttgaagaagtcttctctacattttctaggatgagccgacatccaagaattaaaaagcgtttttgatatgaacactcccccgccacaagccatatatccctgtgatatctttgct

SEQ ID NO: 673742 - DNA, 349 bp, Homo sapiens
ccctttatgtgtatattttgttatgaaggtaggttgtagggaactgagtcctcataactttaaaaaaaaaactcgctttaagtcaacatttcttatttgccatatgacaagaacgtgaccccatacctcccacccttccattgtagtcccaggtaatggtgggaatagaacgattttgctaaatactttttaatggactattgataacttggggttatgagttaaccggggaagattccaccatttgtccatgtgtcttattttatattttttaccttttaacaaatgctaaacccaagcctaccttttagtctctacttttatcataatacaaagctgttgtacctgg

SEQ ID NO: 673743 - DNA, 428 bp, Homo sapiens
  misc_feature (322)..(322): n is a, c, g, or t
ggtcgacctatgaagaactcaaaaattatccaggcacggtggtgtgcatgtctagtcccagctacttgggagcctgaggtgggaggatcccttgagccttggaattcaaggtggcagtgagctatgatcacaccactgcacccagcctcggtgacagagtgaaatcctgtttctaaaaaacccaacaggccaggtgcggtggctcacacttgtaatcccagcactttgggaggccgaggtgggcagatcacctgaagtcaggagttcaagaccagcctggccaagatggcaaaaccatgtctctactaaaaattcaaaaatntggccggccgtggtggtggacatctgtggtcccagctacttagggggctgaggcaggagaatcgcttgaacgggggcaggtcggggcagggcggcaactccctctt

SEQ ID NO: 673744 - DNA, 235 bp, Homo sapiens
  misc_feature (22)..(22): n is a, c, g, or t
  misc_feature (49)..(49): n is a, c, g, or t
  misc_feature (92)..(92): n is a, c, g, or t
  misc_feature (125)..(125): n is a, c, g, or t
  misc_feature (215)..(215): n is a, c, g, or t
accctcctgtaagcagaaatcnctagggtccagacccttccctgagccnccacccccaccccaattcctgcctaccaagcaagcagccccangcctaaggggtcaagacaagggtgaagcctcantacagacttgtgccttgattggccccaagccttgggaagaaagaattttacttgttaacctggaagactactgaatcattttacccttgnccaattggaataggacctaa

SEQ ID NO: 673745 - DNA, 220 bp, Homo sapiens
ctcggacttgctctcctggttactccatctgaggacagctgcctcctgtgtatgatggcagcaccccaaaggagtcctaaattggtgtggacccatctttctcaaggcttcaaggctcacactttcagctcctaattagtgtggctattggtatgtagatggccataagtgcacttgtgtggctagccgtcctgtgttggctgctatcttgcacaagtgt

SEQ ID NO: 673746 - DNA, 795 bp, Homo sapiens
gccgtgatgcccgcgcgccaggacgcctcctcccgctgctggccggccggcggcctgactgcgctgctgctgctgctgctgggccatggctggctggcgggcgctggggcgcccgggcccaggaggcggctggcgggtgctgaggacgggacccccgcggcagactgtgcgaggacgtgacaggacccgttcagcaagcacactgtacacggccgacatgttcacgcacgggatccagagctgccgagcacgttcgtcatgttcttcgcgccctggtgtggacactgccagacggctgagccgacttggaatgacctgggagacaaatacaaacagcatggaagatgccaaagtctatgtggctaaagtggactgccacggccacatccgacgtgtgctccgaccccagggggtgcgaggataccccaccttagagcttttcaaggccaggccaagaagctgtgaagtaccaggtcctcgggacgttccagacactggaaaactggatgctgcagacaactgaacgaggagccagtgacaccagagccggacgtggaggctgcccagtgcccccgaagctcaaagcacagggcctgtattgaggctctccaggcagaggcacactttgagcctgcaccggttgcacagacggcggcaccacgtttatccaaggttactttccgcttccagtggatgtgagtcacttgcgaaggcccttggcttccaaagcgtggggagcagctggctcctggggcttgaacatccggagatggtcagattgccacggtgcttgtc

SEQ ID NO: 673747 - DNA, 200 bp, Homo sapiens
catacatacttccgggctggctgaaacagaccctgtaaacaatattgcaacattctacatggaccaatagcaggcgtctcaggccttctagggctcccataactgcctgaattacatgaggagatttctcaaacacattgggccatacatagttcaacaggtgattcagcgaatcttcacaaccaaatccataaacccag

SEQ ID NO: 673748 - DNA, 254 bp, Homo sapiens
gtggctgatctagaggatcccggtttcgagaagggtatcacgtctatagtccaggctgagtgcagtgggcgatctcggctcagtgcaagctccgcctcccgggttcacgccattctcctgcctcagcctcccgagcagctgggactacaggcacccgccaccacacctggctaattttttgtatttttagtagagatggggtttcactgtgttagccaggacggtctcgatctcctgacctcgtgatcctccca

SEQ ID NO: 673749 - DNA, 1430 bp, Homo sapiens
  misc_feature (277)..(277): n is a, c, g, or t
  misc_feature (417)..(417): n is a, c, g, or t
  misc_feature (1028)..(1028): n is a, c, g, or t
  misc_feature (1278)..(1278): n is a, c, g, or t
taaaaatcaagcccatttaatggtatctttgaaggtaaacaatatttggagctggatcacaaccccggtaggtatgccagagctagtgggtctccagaaacatgtgggtggtggtatttactcaacgagagtttcaaaagggctcgtgaactcttagcgtgtgtttaccagagaaacattaagtgcaatctcagtgcattctccactttagcaattttgtggtacagaaatcaccccagaaacacgagacaccccgcgagagagagagtctttctcnagagagagtgagagagaacagaaatctctacacctctcgcgtggtgctttctagagagacataaacagtgacaagtgaagagagagtgtcacccaaaacaaaattgtgtgtgtgtgacactatctctctcatactccaanttcttctctctctaaatatccaatgttctgatggaaagcccgcgatgagagagcgtgtgatctatatctctatattatctcgtcccaaaactctcgaccgagagcgagcgcggaaaagagtgcgtgtgcaagtcttcccaagaaatttgtggaggaaacatcgaagggtctctctcatattctccatctttctcccacacgttatatagaccaccccacacgagacgcaagagagagtgttgtcacgccgtgagaggggcccagaaagaacaggccttccttgtgagtggggggggctccacagccttttctctataaaaatatagagcccgatttgttttcaacgggtgtgtaaaacacagaaggaaaaccccccttctttaatagcgaggcccaccacccgtgagaattttactacagcctgtggtgggaaccgaaactttttattaccattgtttcacacacatgttttacaaccacagagacgctcgctaagtgtagtaaccatcaccacgtgttttggtacaaccattgttcagcccatccccttatattttctccactccccctctatttagtgctctttaaaacgagcttccacacgctctctntttatggtccccctaataaattgcattttaaaactccgttatatccgctccctagtggttgcccctttccatattattcccacaaaaaaatcccctattttagagaggccgcccatccatatcatttatacatacgcgtgtgtcgccatttactttttcactatctctcgtggcgacactccccacggggtggggagcagccacctcctttggtgcgtcgtctacgcaacaagcaggagttttcttcgcncacgtgggcgacaccccatcggggaagacgggtggtatctctcacggaaggcggccacaggtatatcatactcccacccactttctggtggtgagcttgtggtgctctctctgagcagactgaagggcggccggagtagaaaacacccctcc

SEQ ID NO: 673750 - DNA, 347 bp, Homo sapiens
  misc_feature (301)..(301): n is a, c, g, or t
accattttaaaaatgtatagtcctgtgatttttcgtatcttcagtgttgtacaactatcaccactatctaattccagaacatttccatcatcctctaaaaaaaaacatatacccattagcagatactcccagtcacccctactcccaagccactggcaatcaccagtctcctttctgtctctatggatttgcctattttgagcatttaatataaatggaatcatacaataaatttcttttgtgtctggcttctttcacttagcataatgttgtcaaagttcatccatgttattaccatgtnatcattgtattttatgggctagttaattccactgtaagggataata

SEQ ID NO: 673751 - DNA, 305 bp, Homo sapiens
aaggttataacaggccggcatggcaaaagctgaaccctgcctgccccgaggtgtgcacacaggcagagagggcctgatactagggctacgtcagagggttcctgtgcgcgcccctgcgcttgtgcccttgccctcatgtcactcagctgatcatttctggtttactttatttctctagggatggtgcaccaaaatgcgcctcctgagcccgacctatactccctgcacaggtaggagccactcacccagagatgatcaggtgcctgtcccagccgtgtgctgtcctgtctagcctgagtctagcc

SEQ ID NO: 673752 - DNA, 139 bp, Homo sapiens
  misc_feature (14)..(14): n is a, c, g, or t
ggagctgcagaggngcccagaggaagagaagaaagaatggattcagatcatccaggcgacgatcgagaagcacaaacagaacagcgaaaccttcaaggcttgtggtggcgccttagccaggatgaggactccgcctctc

SEQ ID NO: 673753 - DNA, 130 bp, Homo sapiens
gcatcctacgtagagtctgtaatacaaaccataatcacaggtcgttttaaaattaacacacgtatctgtcagttatcaaatcaaacttcggatgccggcatttatgtgaccatctgagtttagatacaat

SEQ ID NO: 673754 - DNA, 351 bp, Homo sapiens
ctcctacaggcagccagacacattgattacctgatagattttaggatagaagtcaccgtacagcacgttcacatgagcctgtgtgtctcactacatcatttacgtctatatcgttagatgccactacttctgtcgttacacgtttaccgactgccatgagctagaccaggcgttgacattagaacatggttcactagacatgtatctgggatgccgacattatatccataccagtcctatgcactgtacactgcagcagcgtgcatcctatgggacttagagggttgctgacatctgtgcatgtgtgaagtaccttgcttttctctgactgtgcatttggatgtgtgcttg

SEQ ID NO: 673755 - DNA, 483 bp, Homo sapiens
ctgctttgctacactatctctttgcttgcagcgacggatatactcatcagcgcgtgtgaggactatctgtacctggatcgttctctgtgttttcgactcttgaaattaagatgcattctgcccatatggaggatggcgtcacgaagctctgatacgagaagaaggcctgtctcagtcacagtagagatgattagaaagcatgggcacaaatgatttatgcgcaattgattgggaagatatactcactgagctgatgagaggctcacatagacccagacccgttacccagaagacttatctcagtgatcgagagagaaatcctagaattatatagataacatgcatctaaacatctagatctgactggatatgaagctatagactcgacttcccatacaggtgagatgcaaccagcgtccacactcgacttagcgctcaagaactcgctgtctttttgccatgatagttgtgacagctcctgtc

SEQ ID NO: 673756 - DNA, 808 bp, Homo sapiens
  misc_feature (3)..(3): n is a, c, g, or t
  misc_feature (65)..(66): n is a, c, g, or t
  misc_feature (72)..(72): n is a, c, g, or t
  misc_feature (82)..(82): n is a, c, g, or t
  misc_feature (88)..(88): n is a, c, g, or t
  misc_feature (96)..(97): n is a, c, g, or t
  misc_feature (119)..(119): n is a, c, g, or t
  misc_feature (130)..(130): n is a, c, g, or t
  misc_feature (142)..(142): n is a, c, g, or t
  misc_feature (164)..(164): n is a, c, g, or t
  misc_feature (185)..(185): n is a, c, g, or t
  misc_feature (201)..(201): n is a, c, g, or t
  misc_feature (204)..(204): n is a, c, g, or t
  misc_feature (227)..(227): n is a, c, g, or t
  misc_feature (261)..(261): n is a, c, g, or t
  misc_feature (264)..(264): n is a, c, g, or t
  misc_feature (320)..(320): n is a, c, g, or t
  misc_feature (329)..(329): n is a, c, g, or t
  misc_feature (342)..(342): n is a, c, g, or t
  misc_feature (426)..(426): n is a, c, g, or t
  misc_feature (443)..(443): n is a, c, g, or t
  misc_feature (603)..(603): n is a, c, g, or t
  misc_feature (663)..(663): n is a, c, g, or t
  misc_feature (672)..(672): n is a, c, g, or t
  misc_feature (684)..(684): n is a, c, g, or t
  misc_feature (725)..(725): n is a, c, g, or t
  misc_feature (734)..(734): n is a, c, g, or t
  misc_feature (738)..(738): n is a, c, g, or t
  misc_feature (799)..(799): n is a, c, g, or t
tcncatttaacttttttaatgggtctcaaaattctgtgaaaaatttttggtcaagttgtttccannaaaaanaactgatttnaaaaanaaaaaacnnaaaaccgccacacgcaaaaaanaaaaccaaagnggtccacaaaanattcccctttccttctgaaggntttacgatgcattgttaacantaaccagtcttttacnacnaaacttaaatggccaattgaaanaaacagttctgagaccgttcttccaccactgatnaanagtgggggggcaggtattagggaaaaaattcatttagccttctgagctttctgggnagacttggngaccttgccagcnccagaagccttcttgtccactgctttgaagacacccaccgcaaccgtctgtctcaaaacacgaacagcaaagcgacccaaaggnggatagtctgagaagcnctcaacacacatgggcttgccaggaaccaaataaacaatggcagcctcaccagacttcaagaatttagggccaacttccagctttttaccagaacggcgatcaatcttttccttcagctcagcaaacttgcatgcaatgtgagccgggtggcaatccaanacaggggcatagccggcgcttatttggcctggatggttcaggataatcacctgagccgtnaagccagcngcttccattggngggtcatttttgctgttaccagcaacgttgccacgacgaanatccttganaganacattcttgacattgaagcccacattgtccccaggaagagcttcactcaaagcttcatggngcatttcga

SEQ ID NO: 673757 - DNA, 209 bp, Homo sapiens
aggagttcccgactagccagacaggggcgacaggatagaggaacaggagaaggtgggaagaggagaagtggggaacaggagaagggagaggaacaggagaagcggggaataggagaaggagggaacagaaggggagacagaatgaagcggggacagtgagaagggggaacagtgagaaggggaactgagctgtctgggctagtctgggg

SEQ ID NO: 673758 - DNA, 997 bp, Homo sapiens
gggcaggcctgtgttcttatctcaggaatagtaagaaaagggggttgggaacagcggaaatccagaaataaagacttgagaaaggaacagagtgggtgatggcagctatgaagaaaaaacagatcaggaagaagcgtcctggcagcttaggaagagaaagtgtcacagacacgaggcctaggctagagagatggtgtaggtggtagcgtgctgtgaagaaagaaatgacaacgaggctggagctgttccctgataacctgtgggaaggcaagagagagctgcacagggcggctaccttagcttgtggagaaggtccttaactcaaggactgctgactttaagctggcgttaaccttgtccaagttccagatgaccactggaagcaccagctatagacgactctaagctctgtgccaattacccataggccttcagggtccctgggacctattccagtgatagtggtaccctaacatgaacccatttcagccactcagattgatagggtggcaaaagacagggcaaggtggtagcagcatgtgaagcaaacacgaggaaaagcagacgggtggcctgataatctcgcaggcactgtaagagaaggactacatagcgcctctgtactttggccctcaggagccccgctttcctagtaacgcttgcgacgtccagtactcggattcattccgagtggagaacaagtgggtcacaaacacgtgcatgaagatgccacgacgccatggggtagcagagcctcctagtgaaggtatcgtaccccgggcacgactcctgacgaagtagagctactgggttgggtccatggttcttagctattcccgcttcaggcaatgactggcgcataattgattttagcccctggtaacaaatcccgtcgaattacaagggaataagcactcgcacggataaaaggcttaccctgctgttggaagcaaggacacaaggaactgagtacacaccccccagaagacagacacat

SEQ ID NO: 673759 - DNA, 1910 bp, Homo sapiens
  misc_feature (1148)..(1148): n is a, c, g, or t
cggacgcgtgggcggactgcgtgggtcctggacgcgtgggaaaaaaaaaaaaaaccaacaaaaaaaacgtagcctttgaaacgttttatacaaccattaattctttcatacccacgaaatgtggaaggttgaaattttcattagttgagggtttaccccacccaaacaacgccaccaagggacgttgacgacggggctacgacagacgagaatttccagtgccaacgcaagtgggcacagagtggacaagcaatttgtggtccaaggcccagtgtggaccatttttcgcttcattgtgtggttgtggccgtgaaatatattattacgcagcacacttcactcttggggagaaacgacctccgagggcacagttacaaattaccacaacagagcatttgggagaacacttcttcgccacaggaagcgttccaaacacaacagatacgacggggccatttcgctttacattcacacacagcgggccacattattatccattgcacacgtttagggggccattcataaaattaactatacacaactccttccctaacccttatccccctgttggggggtgtgtagacgggggccacgcgggcacaccggccctacgtgaacacaggtttgaaggggatatccacctgtgcggggggaggtcaataaacaaaacatttcaatctttacagagcagaaattatacaaaacgttttataccacaaagtttatatacaaaagtagtagggagtacataaaaaacgctttaccacaagtgtgtagtgacaggatttatgagcccaaacgaggtacccagctgtggggaaaacacatgttgaccctagcggatggtagttaaaattaaacgttggaacacaattactaggagcaaggtgttgttaacaacggtgtgacagcacgcacaagagtgcagagtatgctcattcccaaacaaacgagaggaagtattatcacggagcattcaaagaggggcacaacgagaacacagggcacaaccagggcaaaaaagatgcatgattagtacagaacaagaaaatcttgctcctaatattccaaagacaaagccactttacaaatggtggaaacaacgtgtttagcacgcacgcgggggaacttatacacagacagacggnggtatgtattataccacattttgtgggacacatacaacggccacagcgagacagacacaccaggtgtgatgcatacgaaagaaaaaaacaaggaccatgataatgtgaaaccagcagttaactagaacagaaacagcatctatttaaagccgtgtagaggaacacatcaacagtcgcaggtcggtgaagacacactaatagttagtacggatgtaaacacggacacaatgtgggtgtaaatattcaccaacccacgttatgaatgtgctggcacacaatcaacaactgccaacaactagctgtgtgcaagacacacgacgggacaaaaccacacacacacgaacgtgatcgacagcgtgccaatcgatcagccacgcacacacaaagaccgcactatcaagaagcgaagcatcacgtggcaagcgaaccaagcggacatcatgctggtcgaaatcaccaacctatgggagcagacatccggaggaggcgaccaaccacgccgaacccacacagtaggcacacgcctctccacccacggtgaaacacccgctacctccaactaaaacaaaagaacggcgcgagctcgacgcccagatcaacgccaacgtcggctgagccagcacacaacaccgtgagtagatcagcagaatgacgctaacagccagatcaagaccgagacacagaacaaacgacagatgccatccgagaggctgcgccattgcatcatcgcacgcagcgcacgacccaagtcagacgcacaca

SEQ ID NO: 673760 - DNA, 435 bp, Homo sapiens
  misc_feature (52)..(52): n is a, c, g, or t
  misc_feature (156)..(156): n is a, c, g, or t
  misc_feature (408)..(408): n is a, c, g, or t
tggggaggaggggagagtgggaagcagggaggaggaagaagataaaattganctgacaagtgattcgttggggggaaatcgtaaaaacaaagcaaaacccgttatgagctgtacactgtgatggtgctggggaaacgacgtggtgactgaggattntcttaaaaaaaaaaaaatcactgcggacaaggtctccaaaaaggaaaaaaggtctcttcgcgtctctccctccctcctgctcactcgggttcttcggtgtgaggacagaaagtctacttctggctgtcacttgcaatattattcttcaataaccccgaaaacgcgcattgggaagccacctcgcctcccttccaatcacccccacccccctcgccaacaatcgcgactaatattaacaaaccttaaactttncccacagcctcgacccccaacgagggc

SEQ ID NO: 673761 - DNA, 861 bp, Homo sapiens
tcgaccacggcgtcgcccacgcgtaccggcccacgtcgtcgtgcacagtggtttttaattattttaggatgggtgggtagggtgcaagtgggcatcattatttaatctctactactatttttgcagtacctatttcagaatatctcaaactcaatcttaaccgttaccctgaaaatcgattccatatcttgcattacattcataccgttcattgattcttcttgactgcgcataattattatccaaccaccacctccatctcttccaactgacgttgcaaatatcaagaaggttactgacagatattccagtcaggttaactggaacacaagactagacgaaagattgtggaagtctatcagcacagttatatatctgaccgtcatgcagcaggcttactcagaaccttaccagggacacacagttaccagacgcacgccagtatccaggggcaaccattctgtgatgacgcggactcaattatcagcccacaggtggctgtcgacgtgcttgcacatgtggcctacgtctgacctgatctaactaccaatttatataaacttacttattttgacacacggaggttctacgctattgttcgacacacaagcttgccaatggcactaagtatgtgactcttgtcactccctatgcaatctcttgcctacccacggagaaacaacgccaccattactcatgcgtgcgactacagcatcttcaccaaagtactaatgtggcattcacaccgggtacaccacgatcaacaaaggcatcacgcatcaattctcagggacatctagcttacagcacagaaataggggattaccacacgattttcctccgtgattatgtcccgcaatc

SEQ ID NO: 673762 - DNA, 151 bp, Homo sapiens
tagaggatccccatcctcatcagtggtacacagaagcaggcacagccagctcgagtggcttgaggctgctggtgcatacagcacactcgcgcgtgcgcgcgcgcaacacacacacacacagtcgccttcctccaccctgggagccagcccc

SEQ ID NO: 673763 - DNA, 106 bp, Homo sapiens
cactaggtgcagttcagcctgcgatgtatcccactctacaccacgacgctaggtgcctcagtgtaggccaaactctggagtcactgactaggtttagactattcat

SEQ ID NO: 673764 - DNA, 310 bp, Homo sapiens
  misc_feature (14)..(14): n is a, c, g, or t
  misc_feature (16)..(16): n is a, c, g, or t
  misc_feature (84)..(84): n is a, c, g, or t
  misc_feature (291)..(291): n is a, c, g, or t
aggcaaagtgcctntnacatccaggtagtggcgggaaacgcatggggctgtgtcctgctgtcagagagaagctgactttgtcangtgaacctgggtgttctgctgaggggatctccagacagtggaaggtgcagcctggcctgtttctgctgcttatggtgaaatgtgagcagaagacctggacattcagctgaggagatctccagacagtggaaggtacagcctggcctgtttctgctgcttatggtgaaatgtgagctgaagacctggatattcagctgaggagatctncagacagtggaaggtgcag

SEQ ID NO: 673765 - DNA, 391 bp, Homo sapiens
  misc_feature (391)..(391): n is a, c, g, or t
agcttatctgtcaggtatatcagaatctcatattcatagtctcataagacttggttaaaagcagatctatcttaggtaggaaaaaatagtaatcgattatacttagctgcttttatctgtagtgtgggtgactttttataacctattatgttttataatgtcttcctgagagaatttcctaatttggtagttcatataagagaaatacaattttctagcattttctggaccttacaataaatcaattcatgacatgcatttttaagcagaaataatttaaagggtcaggcattaagaccgaagcaggaattcaaaaacgtggcgtatttactttacattggaatatcatgcaaataaactcagaaaatgtcaccaaatactgtgggctaan

SEQ ID NO: 673766 - DNA, 231 bp, Homo sapiens
ttttttccccttaaaaaaaccggggggggattttttttatggacccccaatcccttttaaattttttaaagaaaattttttggggggccggttttcccccccttaaaggggggccggtattttcgggtttccctttttgccccccaaggattgaaaggtttggtatttggtaaccccggtttggtatttggtttttttagatggtttaaataaaggtggttttttccttga

SEQ ID NO: 673767 - DNA, 299 bp, Homo sapiens
  misc_feature (113)..(113): n is a, c, g, or t
  misc_feature (221)..(221): n is a, c, g, or t
  misc_feature (237)..(237): n is a, c, g, or t
gagaatctttatgtctagctccgggattgtaaatacaccaatgggcactctgtatctagctcaaggtttgtaaacataccaatcagcaccctgtgactagctcagggtttgtnaatgcaccaatccacactctgtatctagctactctggtggtgctttgggaaacctttgtgtggatactctatctaactaatctggtggggaggtggagaacctttgtntctagctcagggattntaaacgcaccaatcagtgccctgtcaaaacagaccactgggctctaccaatcagcaggatgt

SEQ ID NO: 673768 - DNA, 212 bp, Homo sapiens
tagcctgagcaccaggtcctgcctgaggacatgcacgctgtgcttacttacaacgtgtatcaagtggtcccacgtaataccagagaggccaccatagagaagatcatccgctgtcctgcagggccgcttcctcacggcgactcatcatgcaggctctgacaccagatttgcactggtgctgtacccataggttccaaccatacccagatccc

SEQ ID NO: 673769 - DNA, 523 bp, Homo sapiens
tacagagggcaatcagccgggtttgaattggatgcaaagggggtctcgtgaaggcgtaacgttatcattatgttctttccaactgtgtgtcacctatgaccttttctgatggagatgcattttcttatttccaggcgtaaagcttcctaatgtgctgtgcgtgcttcctacccacccaccccgagcagcctgggcgggcagagactggggctccatggggactgtcacccctgagccctggacgggtgcattgcgctgggagcatgcctcagcagcgctgaagagtgggacggcaccgatgaatggcagaagcttggagaaggccgtccaacccgtgcactggctcctgcagtctgctgactttggctctgtcccattgttccatcctcgtgctcgtccagggctagctggacctctagcttcatgcgcgaccagcgtagctcgcctcgctcgccttgtctcttcccctctgttcccatggccatgttcgttgcccttgggaaccaggatgatcacaaggcca

SEQ ID NO: 673770 - DNA, 399 bp, Homo sapiens
ggtcgacgcttcatagaatgatttagggaggattcctctttatcttgtggaatagcgtcgataggattggtaccaattcttctttgaatgtctggtagaattcagctgtgaattcatctggtcatggcttttttgttgtcgttgttgttgttgttgataatttttgtattaccattttaatctcgctgcttgttattggtctgttcaggctttctaattcttcctgacttaagctaggagggttgtatcttcccaagaatttatccatctcctccaagttttttagcttatgtgcataaagctgtttgtagtgccttgaatgatcttttgtatttctgtggtgtcggttgtaatatctcccatttcctttctaattgagcttatttggattttctgtcg

SEQ ID NO: 673771 - DNA, 863 bp, Homo sapiens
caggcgtagcagagtggtcgttgtcttcataggtctcagcccggtcgtcgcgacgttcgcccgctcggctctgaggctcctgagaagccgaaacccatgttagactttcctccttcccgcccgtgccctgtagcgggctgttgtgtgccacttccgccaccatgtaccgaggcgcgccggtggtccaagggctccatcctcagagacaggtgttggaggcacctcaaggggaccctcatccaagggaaggcctgctggggaatatttaggctcccaggtggttgtaacccctgcagaggcgagtggcactcgcccacaaggttctctttggagtgcaagcctcaccccgttgcgggctcttgaaggggacttcgacaacacttaccccgtttgcagaacccggaaagctctgccactagtgggcgtagaacttccaccacagttatttggttccaaaacattactaaaatttgcgcccgggcaaatgaaagattatcatttacacataatggccccgaagatcacggcggaaataccttgggccgcatagttacctttgagcggccacccaaaccagggagcaaatgttccaagaccatatgaacaatggcaggtctgctggcctcaacgactggtggaaccacgtggggaaattccaggaaccagggacttacaagctggtgctagtacaagactgccttcctgggtgaaattagcaggttattgcccagagatcccaggcataatgggagatgcggcggaattcccggtgcaaacgacggatgtggaatttcctgccggggcgcacttggaatggcacttaattgcaccaacattagtccacagagggagctcgccccgag

SEQ ID NO: 673772 - DNA, 327 bp, Homo sapiens
tggtgctctgctgttaccacgccttcgtctccgagtttgcgactcgcggaccggtgtccccgagtgcgaagcaggtggactcgagattctgttgcctgcagcaatggctgccatccgggaagcaatgggtgatggtgggtgatggagcctgtggaaagacatgcttgctcatcgtcttcagcaaggacccagttcccacgaggtgtatgtgcccacagggtttgagaactctgtggcagatatcgaggtggatggaaagccggtacgagttggctttgtgggacacagcttgggcaggacagattatgactcgcctgaggccccctc

SEQ ID NO: 673773 - DNA, 324 bp, Homo sapiens
ggtccatgcttgtggaggcatgaggacagcaatggttgtatcaactatgaagttgtgaggcatatcctgtcggggtgacgggcccatggggcggagctcgtccgcatggtgctgaatggctgagtgaccttcccagtctccccagagtcctgtgcctttcccttgtgtgaatttttgtatctacgcctaaatgtttcccatagtgctttctatgtctcatgcaagctttcgccatctctgtctcgttctgcttgtagtgggatccatctagatgtctgaccttgcatgtgcatgcaatgcttgtgcacttggccagtctgtttt

SEQ ID NO: 673774 - DNA, 822 bp, Homo sapiens
  misc_feature (815)..(815): n is a, c, g, or t
tcccaaagaagcatctgaagcgggtggcagctccaaagcattggatagctggataaattgagacggtgttgttttgctcctacgtacattccaccgtgtccccaacaatgttgagacgagtgtctaccccctacatacattttgccttgacggagacagcacttaaagtatagcccctggacaaggacgactgaacgtaacagacagattttgcattgcacgcgtgtatcacttacaaactcgcatggcacaggtcctgacactgcatatacaccgtacacctggctgtgacttcattggactggtcattcagccatttgaccaacgacggtgacgagcaattttccggtcttgactctactgacacccaaggggtcgctattgcgtgtacagtcgctattacaccctgcaggcaggcccaagtacaacgttcgtgccccatgtggcgaacagaattctctggtggggcaccaaccaggcaatcccctcatactgtgtgacctcactgactgcgccggcaccgatccgggtataccccgaattgcgcctcactcacaggttgcaatgtatacgcacttcacgaatttgattctgggagaactgtgcaaagattacctagatttgcattcaaagcttcagacacctgggtagcgccggtgctctacggcgacatggacggttgcgtaccctacggaagaacttggtggtgcatcccaaccacgagacgaaggcgccctggtctattgaccgctggtcaccagtgacaggattgccaactggacccgccttatgtcacccacagctttccagcatanatagagg

SEQ ID NO: 673775 - DNA, 84 bp, Homo sapiens
  misc_feature (27)..(27): n is a, c, g, or t
aattcaagcttctaacgatgtacgggngacatgacgtaggattgtgtcacgtggtttcctagatatgccatccaaagtacaaga

SEQ ID NO: 673776 - DNA, 113 bp, Homo sapiens
  misc_feature (32)..(32): n is a, c, g, or t
atcacgaaaccctcatcacccttcatcgaaancctgtatacaagtagaccactacagccatttaggtaagggttgatgacagggtttaatgagggttaatgacagggtttgat

SEQ ID NO: 673777 - DNA, 325 bp, Homo sapiens
  misc_feature (97)..(97): n is a, c, g, or t
gcggagtgatgctgatgtcgatctagaggatccggcacatgtgcggatctggtggagcggacatcccctcaattccaaggctatggactcactttgnacaaactcctaccaacacgtaccaataaaagaaaagggtggtttttttcttttttttttttttttttttttttttttttttttttttttttttttttttttttttttttttttttttttttttttttatttttttttttttttttctatcccccccactcttttttttgaaaaaaaacggggttttttttttacaaaaaaaaaaaatttggtccccccaaagaggggg

SEQ ID NO: 673778 - DNA, 228 bp, Homo sapiens
agtggtacacacgaagcagcgtgacgttgtttacacaagcaagcaggctaggcatctacagataatccagtaggggctggaaactatagtgcaggaatcatcaactagattcagccgcgggccgatttgtttattgagcagatggtcggggggccaaaaatatttgtagactgcaaacagatatgtttggtcgacgcggccgcgaatttagtagtagtaggcggccgc

SEQ ID NO: 673779 - DNA, 1011 bp, Homo sapiens
tattgggtttataaacgccctttaataaacccctttttagaacaaaaaaaaaaaaaaagtttcaaaaaaaaaaaaaattaaacaaaaaaaaaataactggatcaatttttcccagaaaagaaaaatgatagtccaagggcggacaagctgcagaattgcgtcccacgaaaatcagcggctcatcattgttgacctgttatttctttcacacaaaaactgacaaagcaaagagatcacacatcccggggagactcagggcgcgtgggcacaagaaccacaacctgagtgtcgcagttctcacccagcaacgaattgttaacacttgtagagaagccaaacagccccactcgcggcgtgataatgttacgagccaacccgcgcaacactcccaggggtggagggcacaaaccatcacgagggcgcacaaatagtggataccccgctgtgcgccgagagaacgccatcaccgccgacaatctacacccgtcgcgagataacaccgggtggtgaccaacggtggggaccccacgctgcgcgttgttacaaactaccgcccaaccacgccttaaactattataaaaccgctgcggacgcccctgatcataaagaccgttggggcaccccagaccagaaagagaaaaattccatcatataatggatcgcggggacaacaaggagggtgccctggcccccaacgtgggggcagtcccccactgtggcgaagccgcggccttcgagaaaagaaaaacatgggcctgacatacagaaccctcagcgtggatccacacacgtgagaggaagagcctccagaaaccttccaaaaattaccggacgtgcacgaaacgaacttgacctggctgcccaaaagatcccgggaacagcggtgccattgggtccgcccaagggggggcaggccacacgtggtgcaaacgtacccgcccagcaagtgggatgcaacgcagccacagagatatgccacatacccgtgagggaccacccgatagagcgaag

SEQ ID NO: 673780 - DNA, 252 bp, Homo sapiens
atgtggataagaaagggactggaagaaagcaatcttttaagatatcattataggccaggcgtggtggctcatgcctgtaacccccgcacttcaggaggttgaggcgggcagatcacctgagctcaggagttcaagactagcctgggcaaccccgtctctactaaaaatacaaaaatcagccgggcgtggtggcacatgcccgtattcccagccactcaggaggctgaagtgtcaacgtgggtaccgagctcg

SEQ ID NO: 673781 - DNA, 220 bp, Homo sapiens
gctccagcagtccactggggcatgcaagctggccaaaggcagcaacatgtgcacaacacaggcttctttccgcaggttttcattcaatgtcaagaccttcaggcatgttgtcaggcaatggcagcagcaccagtggcagtggccccaagtgttgccacgcaaatgttcaaggtccatgcagcaggtgggttctggccaaggccagcgagggcatcctctc

SEQ ID NO: 673782 - DNA, 233 bp, Homo sapiens
gcgcttttacaacacagcacaagctcctggcagcgtgtcatccgggataacttggagcgagctcgtgctgactcgatacaattgatccgcaagcgggaaaaactcaacagggagacgatcaaggtacagaagattgccatgagagatgcaggcatagactccctttcctcaatccctccttccgcaagaaaccttgggagacaagctcccaaggaggaaaggacacaagggca

SEQ ID NO: 673783 - DNA, 315 bp, Homo sapiens
caaagaagggggaatgtgggaaatccccgatttattagctttgtcagccagaaggaccaggtcacaagtttgagggcagtcttggggactgagccaacaacctgtgtgatctgatgctgtctccaggtagggagtgtcagaactgagttgaattggaggacagtttcacccagggggtgtccatgcagaactacttgcttggttggtgtgtggggaagccccctccccacatttgctctcagaagacttctgtgttgattgttgtgttgtgagagcagaggaaaagtttgagtatttttccacaccatgatgtta

SEQ ID NO: 673784 - DNA, 122 bp, Homo sapiens
cacgtgatagtaggtgtacttactgcaaagtagagagtaatcccatagacaccagtttcatttgcatcagcgggcgttgcagcaggagtagcaggagtcacccctattaccagcattgctgg

SEQ ID NO: 673785 - DNA, 688 bp, Homo sapiens
  misc_feature (21)..(21): n is a, c, g, or t
gggaggccgaggtgggaagantgttcaagagcagtctgggcaacatggtgagaccccatctctacaaaaaaaattttttttttaattagccaggcgtgatggcacatgcctgtggtcctagccactagaggctgaggtgggaggatcactggagcccaggaggtcaaggctgcagtgagctgtgatcacaccactgcactccagccttggcgacaaaccaagaccctgtctcgaaaagaaaagaaaagaaacattaggcaaatcccaacagggggacactctacagaaaaaccgaccagccctcctgaaaacttcccaagtcatcaaaaccaaggaaagtgggctgggcgcggtggctcacaccttaatcccagcactttggaaggctgaggcgggcagatcacaaggtcaggagtttgagaccagcctagccaacatggtgaaatctcatctctaaaaatacaaaaattagccgggcgtggtggcaggcgcctgtagtcccagctactcgggaggctgaggcaggagaattgcttgaacccaggaggcgggggttgcagtgagctgagatcatgccactgcattctggcctgggtgacagaatgagactctgtctcaaaataaaaaaaaccaaaaaccaaaaaacaaccaagcaaagtctgagaaactgtcacagcctagaggaacc

SEQ ID NO: 673786 - DNA, 150 bp, Homo sapiens
ctgcagttgtcgtgagcagagatcgcaccattgcactccagcctgggcaacaagaacgagactccgtctcaaaaacaaaacaaacaacaacaacaaaaaaacagcctcccgacccccaggcctcacaaagctcctcacgacaactgcagc

SEQ ID NO: 673787 - DNA, 146 bp, Homo sapiens
tacttgctgttagcgcattcgccctgaagatggtgatcaagggcgaaacctatgagaacggtccccgatcacagcgagtgcgtgatgccgtggtcgcaactatcgcaaccttgtacggcatctggctcgttgttgccgcaggcgcg

SEQ ID NO: 673788 - DNA, 1767 bp, Homo sapiens
gtcactcgcttgtttgactctaccgcctgtacgaactacagataccctaccctaccatgacgatgatgggtcgtgccgtatcgtagatcgcttgtctgccccgtatgcatataggaggaatagacatggctagcagggaacttggtgagaagagttcgcagagcgaagagcagagtgtgggagtcccactgtatactaggctgcgtagtaccacatacgcgtccacttcccacacgatgcatggcaagacatcgtcacacagttgttttggatagtggcgtctgccctccgtgtagacgtgtcaagtgatgtcgccaccatatgaccttggcgaagagtattgtgctcacgtcgaagaggtgctcacaagcgaagactgtgctggtcctatgagctacattcttgtgccagacaggtgagtttgcgtggaagcatggggtatcagatgtgcctcaagtgttagaacgacgtaaacctatcaactgtgctcatatccacgagaccacccgcgaatggggtctcccctagaaattggctcctctgtgggtgcctttgggtatggactttagggcatggcgtaacgcccaatttttaggggctatatttaccccatgtgctagggacgttactttgctcgtcgattgcataaacgatagcttcgcctaggggtctccgtgcgcctttagtcacgttgcaagtacgtacgaatagacgtgcctaagtggggggagggccgagcggatcgtccggccaataaattgtgcgggggtaccttcgccaaacaacacgaagggaccacgccttgcatacgcacggccatgaacgaagtcttacctagggccacgaagggagcgacgccgctgtgagtacccctttggagttggtggggggtcccgcccccgcgggtggtagcggtagacagcccatttgtggtaggcacgccgtaggccaccgccgtgggaccagagtcgccttggcgccacgggatcaggcaccgctggtgttgggtgggccctgtgttggcggctatgggtgtggccgtgtttgtgcgttgccaagtttgccccccgcgtttgggctttgacacgtgcggtcagcccgacgccggtcaggcctgtcgagctttggggagaccgcgaattgggattcccataggccagaagtacattagcttggcgatggttgggcagatatgtggtcccccccccaagagcggtttggtgccccccattgtgcggcgccacgtggtttgaggagaggattgaggcgcacactcggaacgcgtgggtccattggcggcagcatcgcggcttgtgtgcctctttgtgtgcccagttggacgcaccgcgggataccaaccagtttggcacagaacgcccccgttgtggcggtgtgtatcagattctcatgagaggtccatctgcggcttccccctcatttttatggcgtcccgcgcaacatcccttataaagctgtccatgtagacccaaggaagtgggggcccacaggtagtgttgccctccgtgtgtggcagccgttccctagtgtcgccgccggtgtcacacctaacgggttcccagggtgagaccgttgtggtaactacccgcaggaagagtgacttattggtgaaccacaatcctacaattgatgcgccactgtacagtgaactagagaacgatagttacaccccacaatattgtgtgctccaccacaatgagaggcgagcatctcgtcaactaaccacagcagacaggaggagatacacag

SEQ ID NO: 673789 - DNA, 303 bp, Homo sapiens
  misc_feature (47)..(47): n is a, c, g, or t
  misc_feature (162)..(162): n is a, c, g, or t
  misc_feature (188)..(188): n is a, c, g, or t
ggcttttcccgggggggggggggtttttttttttagggccacttttngggccccccttggccccaaattttacctttgttttaaggggccgtttggggcctggcccggggggttttttttcccccaagggaaaaggggcccccccccccccccccggccccngggggggcccccttgggaacccgggnctttttttttggccccccggggggggggcaaaaaaaaggttttttgcctttttaaagggggggggctttttttttttttaaacccccccccctttaatatttttttttttttcca

SEQ ID NO: 673790 - DNA, 580 bp, Homo sapiens
tctgtagaagttctgaagatgtctgcaatggaattcgagtagggcacccctattggttccgaatcggaaacgctctcgaaactgtaggggaagccggacgctttagctaatatgaatctctataaacctaatatgggtcataattctcgtactgcaacttatgcttaagaggcccttaagagattgattaacgcgagaaacgatcctctgaccgaggcagcgaaacggaacgttataaactcgaacttaaaagggaacgaaaccaacgactggccgacccctaagtgggcctgggccttaacgtcggagaacgagtacttcgctaccgaaagtttaaggattttgctctattattaatcttaatgacctcctatctgggaagacgaaccggaaccgaccgttattaatgacgtgtttacgaatcagcttggatagcttttaaatatgtggtactgacgcgacgaccgactctagacctcgctcttcgggtactatgggacgatttacgagaaggaaatggcgccgtgatgttgtaccctaaaaactgcggtagccgtactatgcagcggggggagttata

SEQ ID NO: 673791 - DNA, 792 bp, Homo sapiens
ggggagcatcctggcgtggcgaggggtaccctgtgtgaggcttggcgacgatgagacgtgggtgtcatttccgctgcggaaccgagctagagtgctcgggctataggagacgcgcggctggcccacctggaatcctgagccatgcatccggggattgagattcgtgcctggtcttcagaaggctcgcgttatagcttccgggaggacgcttgtcgcacaccagatggcacctccgaaaggggaaggatagataccaaggaagacacaggtcatctagccgtcggacctccacggtggctgacaggagcaggaatgtatttggtgatctgccatagtctttgcatccttcaatgagcacttgttgtccatgatcgactgagtctgtatctgggcagaagagaacccagtctggccgtgttgactggtggcgatgaagcgtaaaggcagaccgagaatgtgaatctctcaccgatatgcatgcgtatgttgtgctgcccagggatgtggcaccgagaggtgcaaggagctgggtatcacctgcccgtacatatcgaaactccgggccacaggaggacaataggaccaagacccctggagctggggcccagtcaggccctcagagcccttggccgctcgggtatgaagatcgggcggagttgaggatgtcatccccatcgcctctgacagcgagctcgcaggaaggggggtcgccgtggtcgccggtctgtgaaccaagattcctcaacagatctgctggttcatacactttgcccttcatgttcgatcttggtt

SEQ ID NO: 673792 - DNA, 171 bp, Homo sapiens
caagcgatagcggggccgtggccgtgaatgttgatgacacttgttttccctggtctgtgctgttgcagtctgtcgtcaccagccttgtttttagtgtgtatatatgtcgcccccgtgatgcatatatacacaggtattaaatatatcgctctatataatattatatatgtg

SEQ ID NO: 673793 - DNA, 258 bp, Homo sapiens
aaatccatgtgctaggcaacctggatacagtaagagattgtgatgacatacagagagcacgattattgtgcaccgtcgcggtacctgtactacgtcagagtgtaaactaaacagcactatacttgccttataggatcatcgtgaagagtaaatgatcacatgcaatataatgtgagtatgtaacataggtaacatatgttcatcaatatgtggtagtcgtctgggagacagagtctcactctgtcgcccaggctggag

SEQ ID NO: 673794 - DNA, 167 bp, Homo sapiens
aatatgtattatgtgtatatattgtctgcagacattattgttcatgccttagaggattttagcatttcattttcgtctgaaggtgaatgatagctatacagtctgtacagtagattatcctctaccaccactgtggcgtctcctcaatcttggcagtgcctgccttt

SEQ ID NO: 673795 - DNA, 178 bp, Homo sapiens
aatatatctgactatatatactaccactgagtacacaggtcatatcaagagaattagtatagccagagcacagtggctcatgtctgtaatcccagcattttgggatgctgaggaaggaggattgcttgtgtccaggagttggagaccagcctgggcaatacagcacgaccctatctct

SEQ ID NO: 673796 - DNA, 426 bp, Homo sapiens
cacccaggctggagtgcagtgacatgatcatgctcactgcagccatgacactttgggctcaggttatcctttcacctcaatttctcttgagtagctgggactacacctggctatttttgtattttttgtagtgataaggtttcacgcctgtaatcccagcactttgggaggcctaggcaggtgggatcatgaggtcaggagtgcaagaccagcctggctaacatggcaaaactccgtctctactaaaaatacaaaaattagccaggcatggtggtgggcgcctgtaattccagctactagggaggctgaggcaggagaatcgcttgaacctgggagatggagggtgccgtgagcagaaataatgccattgcactccagcctgggtgacaacaacaagattccatctcaaaacaaaacaaaaaaaaa

SEQ ID NO: 673797 - DNA, 876 bp, Homo sapiens
agcaaaacaagaaactggggtcttcctctcccccggaactctccccagctagtcttccctctggttcttcctgcctccatccgcccgctgccagatacttgaaatctcgcgagactaggaactagtactgtacgataaatcttttttgtactgtatttattgtgtataacgatttctctcaaaggacaatctgtacatttagaactcttgtaaattaaaaaccgatcctttgtttaaaactgtccaagcaataaatagaaaagataggatcaacaccaatacaggggtggcgcgactcgaaaagggtacacccgccggagggcccccgactgactctcccccccaagatatttgaccagaagctgtccccggttgtcgaagccttcaaaagcagcacagccgaggagccagtggccagacgcgtgggagagcgaaacaaacgtcgggacaggggaggctcctcccccagaaagggaccgttaccatgtgtggcggggggcgaccttttctggcggaagaaccgcccctggcactttaaacgtctccacgacgggggagaacttatagagccccctcgagaagggcgttgacagcgggggctccgcagcgtggcctatatggccgcttcccggacacaattctgcgcctaggccgacaggtgttctcccttctccccggaatgcttcttgttcccccagcgaggttctctgttatttactgggcgccccggccggggggcccactccggggctagcgggtgattgatgcccccgggccgcccgggggggccgctagcagcaagcctagagggtagatagttccctgctgagggtagacgctggccctgctgttgcttgaactgaccgcctgtagccg

SEQ ID NO: 673798 - DNA, 148 bp, Homo sapiens
  misc_feature (3)..(3): n is a, c, g, or t
tgngcctcactttgaccagagacctctggtcccattctgggcctcaaactaaactggttactctggttccccctctgggcctcacccttacctggtgactctggtcaccccatgggcttcatttgggcctggtgaatctggtccttag

SEQ ID NO: 673799 - DNA, 814 bp, Homo sapiens
gtgtctgatgatgaagacgaggacgcaccccaacatcgagacgttgccagtctcttccgctggcggtatcatggcccgggtggaacgcatggaaacagttctcagaaggagaaggaggaactggtaccagggaggcgtgccgcgagtgcatcggcgcaagggggccgagtgccagaggaaacttgaatggagctgtgaggtggccgagtggcggcagaggcatgagctggaagcgcctgcatgccgagtgcactggctagctgcgtcaaggagtgagcggtagctgggaacgcagagagcgtgccaggagaatgcgcaagcaaggatgacagacgcttgcccgtggaacgtggacacgctcagcaagagaactggatcttcaggtccataggaagccaatggggttaaaagtagccgaaagcccgatgaagggacaggaagtgaggaatcgtcagcaggaagtgtgaggtgagcagaaacagaagaccttcgtggaagagttgccgtaggaaactagtatcaagcatctttggcatgctgcgtcgttgggatgacaggcaatgagttgctgtcatgatccacgtctcacctgtgtgtgcagaagtaagaacagccaatattagcttggtcatgtggtgcattgctctagaaggtggtgggagagatgttgcactccatggagcaggggggccacacagacgaatcgttgatgcaattttatcctggagctggacaggagccgtagaggttggacccccgtggctgctaccgggggtacttcactacagattaacgacagccgatcgccagtcat

SEQ ID NO: 673800 - DNA, 827 bp, Homo sapiens
ggtggggaggatcatatgagctagtacagcacgtacttagcacagcacctggtgtaaagtaaatatacatactgacaaaagctggggaagcactgctcaacatatttgcagctgtttctcttcagatagacatataagcctcctaagtgggtgatctccagcacatttaaacttttttacctcagttggagaactgttgaaaaccactgtgtcaaaaaaccgggaataaaatatcagaattctaaaacaaagcaacagtgatggtccttctgggcctaacaatgttgaccatatagcagaaagctatttccagagacaagagctgaaggcctgtaaaaagcgggggttggaaaatcatggaataaatgtaccggtggaatagtcctttgtaagaaccggaaagacatggtatagtggcaaaaacatggactgattctagagaacattatactagtagaaaaaggtctagatacaaaaagaggtacacaccttgttggatgccatgatatttaaagtgcaaaaacgagaaaatctaaaccatggtactggaagtcagacgcaggggccgcctggcacaaggcggtgcagagaaggggcaccaggaccgtgacagggccatggggacgagtgccgtaacgggcccatgagaactgggggacaagggtaatggaatggcctgatcggagggggcagaacggggggaaatatgcggaaagttcggcgtcaacctacaacaacggtggcatgtccaatacgttatacccccggaggcgacctcgacacaacaggccggattccccaaaacatgcgcccggactcgaaacatg

SEQ ID NO: 673801 - DNA, 285 bp, Homo sapiens
aggactctgaaatgcgtggatgggtctttggaactgcatgcgggcgcctacttggcattgtccattgtgacgcacttgtccattgtgaaagcaccaccggtcctcatcacggattggtggagagggagtataaatccccaggtttggtaaaggatggcccagaccgaataatgttcggtggataacagaacctttttgtctccctctgattgctcctaagcctcacgctcccttgccccgtcgtgtactgttgcttccctgatcttctccgtgacctgtagctaa

SEQ ID NO: 673802 - DNA, 110 bp, Homo sapiens
cgtggggcactggaatgtgcatctctccttattagcaagatcctgagtaagaataccctgatcgcatcatgaataccttcagtgtgagtgccttcacccaaagatgtctg

SEQ ID NO: 673803 - DNA, 211 bp, Homo sapiens
tcttctcccctgacagctattttgaaagttggagcagaggatctcgttcaaagaactggaaggggaggaatcagaacctcaggaaatggatatagatgaaatttcgcggttggctgaaacgagagagaatgaagtgtcaacgaagtgcaaccagatgaacttctatcacagtttaaggtggccaactttgcaacaatgtcaggggagaaga

SEQ ID NO: 673804 - DNA, 166 bp, Homo sapiens
tagctcggtaccccagagtccaaacagggccttatatatcaagagcaccatgggcaagccccagcgcctatattaaggcactgtttggactctgggcactgtttggactctgagcactgtttggactttgggcactgtttggactctgagcactgtttggactttg

SEQ ID NO: 673805 - DNA, 114 bp, Homo sapiens
cacgaggagacagcttgactttttgccagatttcttaagttccacctgtggccaaggggcccgttcgcccgcggacttcgcttttagctcctcgagtttcttctgctcctcttt

SEQ ID NO: 673806 - DNA, 399 bp, Homo sapiens
ggacgcgtgggtccggacgcgtgggtcgacccacgcgtcgccgacattgaggacagacacatggtggtgtcctcaatgtcgggcctattcatccaggatgaaggggatgatgtgtggctcaagcaggaagagcacatcactgtgctgcaccgtctccttgtagtcggggtgtacaacttcaccccttattttcctgagagcagaaacctgtggccaggtccatgtctggggagctagccataatactagtgggccagccaagaccgcctgctgctgtgaagcccttgtgccagggcaaaagccagctggccagcgccgatgaacgcccagcgctaccatgcatagaccggagaccccctggaccaaagcacccacagatggaccggctccctcagacgc

SEQ ID NO: 673807 - DNA, 851 bp, Homo sapiens
  misc_feature (25)..(25): n is a, c, g, or t
  misc_feature (62)..(62): n is a, c, g, or t
  misc_feature (72)..(72): n is a, c, g, or t
  misc_feature (164)..(164): n is a, c, g, or t
  misc_feature (240)..(240): n is a, c, g, or t
  misc_feature (258)..(258): n is a, c, g, or t
  misc_feature (275)..(275): n is a, c, g, or t
  misc_feature (279)..(279): n is a, c, g, or t
  misc_feature (309)..(309): n is a, c, g, or t
  misc_feature (327)..(327): n is a, c, g, or t
  misc_feature (330)..(330): n is a, c, g, or t
  misc_feature (340)..(340): n is a, c, g, or t
  misc_feature (373)..(373): n is a, c, g, or t
  misc_feature (384)..(384): n is a, c, g, or t
  misc_feature (391)..(391): n is a, c, g, or t
  misc_feature (395)..(395): n is a, c, g, or t
  misc_feature (408)..(408): n is a, c, g, or t
  misc_feature (410)..(410): n is a, c, g, or t
  misc_feature (413)..(413): n is a, c, g, or t
  misc_feature (427)..(428): n is a, c, g, or t
  misc_feature (450)..(450): n is a, c, g, or t
  misc_feature (452)..(452): n is a, c, g, or t
  misc_feature (471)..(471): n is a, c, g, or t
  misc_feature (473)..(473): n is a, c, g, or t
  misc_feature (479)..(479): n is a, c, g, or t
  misc_feature (513)..(513): n is a, c, g, or t
  misc_feature (556)..(556): n is a, c, g, or t
  misc_feature (572)..(572): n is a, c, g, or t
  misc_feature (625)..(625): n is a, c, g, or t
  misc_feature (677)..(677): n is a, c, g, or t
  misc_feature (792)..(792): n is a, c, g, or t
ctgttgctggtgctccacagctgcncagctccacctccggcatttactggtctcatcctganatgcattggntgcccactcactggctggatgctgggctggttcatgggtggcagaaccagggtataccctttggggatgtccctaacccctcaggaccagangcagcaccaagcagcatgtcacagccagtgctaggatcagctgcaccctttgctgggactctagctctcctcaganggcctcctagggccattncgggcactgtgggtggnaatngggagccccggttccctcattaggtcaganaccagtttggcggggttntgnaggcccagcnttgggccctgttacacgtagtccagaatttttntttccattttntttttantgcngttggatggtttnangtnctcctcctcctctnnctcctcctcctcatcctcctcntnttccccagattcgtacgtnancttctnttttccgccatcagccttggctgagctggaaaanagagcaggcctcttggagcggatggtctgccggatcatgaggnacatggtgtccctganctcgtcgctggtttttttgaggcaccacccatcccgttctgtgcaggaattcnctgccccgtcattgcggtgaatgatcttctgcaactcttccacattcaagtngcataactggtagaacatctgccgatagggtggcaaggccccttcccggaagatgtagacagagtccctcagtgtctgaaggctgaccttgagcttgtacttgctggaagctggntttccgagcaccactcgtcccccgacgggcccaggccctgcttcaggtcatgcatggtg

SEQ ID NO: 673808 - DNA, 1082 bp, Homo sapiens
gctactcctcattgtacccattctaatcgcaatggcatcctaatgcttaccgaacgaaaaatgctaggctatatacagactacgcaaaggcccctaacgtaagtaggcccctacagggctactacaagccttcgctgacgcattaaaactcttcacctaaagatgcccctattaacccgtccacaattctaccattctatcctctacatcaccgacccagaccgttagctctcaccatcgctctactacgtatgaacccccctcacccatacccaaagccctgtgacaagactcaacctaggagctcctatgtatactaaccaactctaacctagaccgatgtactcaaatcctctgactcagggtgacgcagtcaagacgtcaaagctacgcccgtgatcggcgcaactagcgagtcagtgagcccaacacatagtctcagatgaagtcacccgtagacatcattctactaatcaacattcacctacatacaatggctccttcaaacctctccacccttatcacaactacaaagaacactctctgactaactcctgccccatcaatgtaccctagcatcctaaatatgatcgaatgctccagcactagacacaagaccgaaccgacacccgcattcgagcttgccgaaggggagtaacgagctagtctcaggcttgcaacatcgaattacgcggcaggcacccttcgccctatactccatagccgaatacagatcactcacttactacactagtccaccctcaacacactaccaatctatcctaagcgaacaccataactaacgcaactcgtccccttgaaacctctacaccacaatcattttcgccaccaagcacgctatacatatcctaaacctacccttctcatctcctcaaattcaagaaccatacttaccccacgaactccgctacgacatccaagtccatacacctccctctgtcagaaacactgcctaaccaagtcaccccgtaccataccttaaaaagaactaagatacccaacaacccatttaacatattctcacaaaatccacacataaaatcattaacacacacaaccca

SEQ ID NO: 673809 - DNA, 539 bp, Homo sapiens
  misc_feature (28)..(28): n is a, c, g, or t
aatggttaatgtatctgccagctaatantaatggccccggagccgtgaagaaagggagttcgtgctccaacttggcatccttagaaaactgtatgaagctttcccagatggctgttcaggggctccagcagtttaagtctccccttctgcagctccctcatattgaagaggacaatcttaggagagtttcgaatcataaaaagtacaaaattaaaactatcccaggatttggttagtttaaaagaatcagatcgtcatagtctgctacacttccttgaagatgaaaagtatgaagaggtcatggcggtccttgggagtttcccgtatgtgaccatggacataaaatcacaggtctggatgatgaagatagcaacaacatcacagtaggatccctagttacagtgttggttaagttgacgaggcagaccatggctgaagtgtttgaaaaggagcagtccatctgcgccgctgaggagcagcccacagaagacgggcagagtgatgccaacaagatcaaggcaaaaggaggatggcagcag

SEQ ID NO: 673810 - DNA, 785 bp, Homo sapiens
agcgggttgaggggtggaaggtgcctactagccggtgcaggtcacttctagcgcgtgtgctggggtacctggtcgtcatggcaggcggtacttgaccgcaacgagcttgatgaggaagagcagctgcctgagaacggcatcgcaaagagaatgaaggagtttgcactgccacgacattcatgggcatgacatgaatgctgttcccaagcaatgacaagaagaggaaggacagcagtctcaccgaacgactgtggccacagttggacaaaacgaacactggacacacgacaatcactatcgagacgcgaacctggcagcaacttgacacgtctgactacctaccggaggaactaacgcactacgacttctgattcgctgcttaacactttcacgacctctggtcgctctgacgacactcacgccagcctcggcatacttccccacgccacatcaccgcacgacgcggaccccacgacaacgcatgcactcggcaacaacaggcagcgacgcaacgaaccgaactacgcctgcacgacttgcacacttgcacgaaactttacaacacgtgacgccaggcacgcatactgtgcaacacgtcgaagacaacccgttcgcctccacaacttactttggcgccacggcgtaacgacacaagctctccagacaagtctacacaccaaggaattacacaatcctaggactggtcccaacctggttattgtccctcaacccgcccacttagtccacgaactcagacctggacacagcacaatacgggactacga

SEQ ID NO: 673811 - DNA, 212 bp, Homo sapiens
cgatgaagagaagaagggttattggaggagaataaaatgttcaataaaaacagtagagtacttaagcggagggaggagggaagaatctttcaccagaaccaatgccacttgacacagccccatcaataagacctgttgtgacggtattatttgtaggagcattatgaggggccaaactgggcaaaaaaagacatctattaaagaaaagacaa

SEQ ID NO: 673812 - DNA, 1437 bp, Homo sapiens
tcgttcttttctttcttttttgtctctctttctcgtgttgttgtttctttctgtagttttgtttcgtcgttttttccttgtctttgttctttgattgctgttgtcgtgtgtgttgccttcctttgtttggtgtcgtcttttgtttctttattgttcttcttgttttgtgttttgtcgtttccctttttttttggtgtgtatctctttgcttctgtctggctttctctttttcttctcacttttcttttctttgctgtattttgtccttcgtttgtctctcttcctcttttcttgtcgtctgtctttatgtgcttctctctctctttgtgtctgctgtcttagccatctctcctctggtgtgttcatgtagtccctgcgttgttatgtactgggtgtttgatggttttccgtgttttctgttcttgtgtcttgcttactttgtgctttgggggtcctcttgtttcgtatgttctttatttctgtgcaatgtgtctttttcccggtcgctctcttatttgggggttagtcgtgctgttccattgatttgctgtctgtttgaacctttttcttgaactcatttttgatttgtccataactgtgcaatttcttttgaatcagttccatcggtgctctctgggtaatcaaaggattgcattttctgtgtcatattgctccgtatcactacgatttctacccatttcagtctctatccgtatcctatgggttccccttcccttgactgttatattgtgatgggagcattctgaggacgccatcgtgttgccagggatgtcgtcgtgtacgatagttatcatatatgtccggcacggtactgtagtgttttctgttcgacgatgatgtggttgtttcatgctcaatgtaatcgccccttggtagtctctaatcgccattgcaatcatgttatgagcgtctcgtggatggactgtatggggtctgctatgtggcaatgattcagcgacggctcgatcaagaagacaggtgtctggatcaagttgtcaagaggtcatctcgtggctggatcgtccaacaccttggccgagaatggacgatgtttgtagcattaagaggtaaggagctggagtcatgtgtgtgtaacccctatctattcagcggtatctgtatccagggtgccggtggtcccgggcctgggggcttcggggctcagggtcccaagggagggtctgggtcaggccccaccagtctgaggatggtagattaggggccctttccaagattgctgtttttgttttggagcttccagactttgcatcttcctagtatttctgtttgtcagttctcaatttgcctgtcgtttgacaactgctctgaaagttttgttggtgaagtactgaacgcgcttgttatccggtttctacatgcagtagatgaatttatactgccaagtcgtacgagcga

SEQ ID NO: 673813 - DNA, 474 bp, Homo sapiens
ataaaaggtaagtaaataaaagatcactatgctattaacaatttaataacttttcttttattggctgggtagaggtggctcacgcatagtaatcccagcacttagggaggccgaggcgggcagatcacctgagatagggagttcgagaccagctatagccaacataggcaagactccgtctctatcaaaaataccaaaaaattagctgggtgtggaggcagatgccagtaatcccagctaactcgggaggctgaggcaggagcatcgctagaacctgggaagtggaagttgcagtgagctagagaccacaccattacactacagcctgggcgacaagagcgaaactctgtattacatagaaaacaacgacagaaaacgtaatacctgagaattttctacaacaaataacaggtaccatgaacagattcgatagccgtattgaactgaaagaacccatatctaatcaattcctgg

SEQ ID NO: 673814 - DNA, 632 bp, Homo sapiens
  misc_feature (117)..(117): n is a, c, g, or t
  misc_feature (127)..(127): n is a, c, g, or t
caagctgatcagttgtgagcctcaagggtcctcaagttgagcgtcgaaacgtcggtcagtgaatgtactcgactcactatagccaatgtcggtacgtggcatggctatagttggtgncaacagttantatgcctggcgctatatgtatagttaagtctgagctctcaaacttaccttatatcagcggtacaggtggagctctagactagtgctcattgtcagcgcaacggctcatcgcgactgcagatgtcagtgcacgcatctccctgtgcatgtgctctcattaggtgatacactgggtgtcagcattgcgcactatagctatatgctatggatcaatcaggataacctccttaatggcgtatgtgtaatcatcatcatctcagtaataattcagctctctcagagctccctagtggcgttcagctcgctcctctgccagtatctcaaggcttcaaccacactttactgtgttcacgccatgatggacaggcttgccgtgagtcgcacccataggaactggacgcatgcgccctccgcggctaacacgaaccctatatacaacgtaaccttgcttggccctgtagcacagtcggcgcgctataccagagcgcgtgctgcgggcagcgctg

SEQ ID NO: 673815 - DNA, 754 bp, Homo sapiens
ctacttctacgatcgcgagccggccgtgcaacaggctctctcacaacatggtgctcatggaaacaacctcatttgctgttctagccaaatacatctacccaaaaaatgaccctgctttgccacgtcttgccatacagctgcatgaaaacgtctggccacggaggccccaacgtacagagtagtagcaaagtactagggcaatgatgcggcagcccagacgagatgccaatcacggaccgcgagtggcaagaacgcacaactcgagcgacagtgcgcactccacaagatcagagataaactacgagaacctacacattagagagccaaagggtagcacgaccccaagaccagggccatcactccgaaactgataagcattgataaccatggacacgataaacacggacctagcgccacggagcactgagacgtacacaagggaacaattacaaggagaccatagcggaactggttgagacgcaatgaacatcacactgacaaggaggcactggaacgcatagacaggacatatcaccacaacaagccacaagaatccgaataccctagggagacaagcaacacacaaatgactagacacaacagcatggcccggacaataagacccataatatatgacactagcctccaggtagagcaagagaatcaggcacggcgaacaagatggacaaacgccagagtcccatcccgaaacaccaacaacccgaaaagtaaaaaggagacaaactaaacaaac

SEQ ID NO: 673816 - DNA, 116 bp, Homo sapiens
cggcccgatatataatatactataatcttcaaaatataataaaatatgttatcattacgaaatatatctgataaactattctataattattaatagatgagatatagtaatataga

SEQ ID NO: 673817 - DNA, 121 bp, Homo sapiens
tgtcctagctctggtcataatttctttttttttgggttaaaaaaactctcagccagtagaagaggatcaagtcatatttcacataaaccaagtaaatatacaaccttccagatctacatac

SEQ ID NO: 673818 - DNA, 150 bp, Homo sapiens
cattcctgctcagatgtgctcagccctctcttggcccggctgcacgcctcccttcccccaacctgtggcctccaccccaggcgggatcagatatggtctttgtctttctgcctggttgctcccgttcaggggataaaggctctgtgtctt

SEQ ID NO: 673819 - DNA, 584 bp, Homo sapiens
ccttaggtggttgtgggtagcatggcactggggtaagttgggaggaaggaggaaggagagctatgggtaaaagaggagaaaataatggccctccattatgtctggttctctttcaagctaacggtgatagttatggtagtagcggctgcactgaaacgaaaaacatctctaaaaagaaaagttgagtgcttttatagaatctttagatcttacaagatgggatgagatctgggaggacctgctaccttgaacttgctcacaccttcaccttcactggtggaaatgaaggactatggttattaatggaatgatcaagagacccgaacctgggaatacccagtttattcttggcttccctatgctaagaagctaagaatactgtcatggtcaacaactatagactctcttcatctttatggaactctcaagtggctatgtcattgggaaagtcaccatggccctgcctactatgagtttaatatgcattgcttcaagccaatgtaagaccagagtttctcagccttgacattgttgacatattgggccagaaaattctttgtcgtgggggctcttctgcgcattgt

SEQ ID NO: 673820 - DNA, 368 bp, Homo sapiens
  misc_feature (215)..(215): n is a, c, g, or t
  misc_feature (292)..(292): n is a, c, g, or t
  misc_feature (357)..(357): n is a, c, g, or t
  misc_feature (367)..(367): n is a, c, g, or t
ccggagccgctgccgccgcccccagctcccccgcctcgggagggcaccagggtcttgctctgtcgcacaggctggagtacagtggtgtgatcatagcccactgcagccttgaccaccctgggatcaagtgatgctcccacctcagcctcccgagtagctgggactacaggtcactgcagccagaggggtccagaagagagaggaggcactgcctncactaacagcaactgcacccacgatgcagagcatcaaagtgcgtggttgtgggtgatggggctgtgggcaagacgtngcctgctcatcttgctacacaacttaacgcttttccccaaagagtacatcccccaaccgtggttncgacaattanc

SEQ ID NO: 673821 - DNA, 156 bp, Homo sapiens
tggctcacacgtcacgcatccagtccccgagtcgtcgacagcgactgcccgtcgcggagcaaataacgtcgaccctggtcgccgcactcccgccctctccaccttcccgcctccctccgttccctctcctcgccgctcctgtggcccgccctgggg

SEQ ID NO: 673822 - DNA, 325 bp, Homo sapiens
ttggatcccttataaagattatagcaaatgggtgtggtatttttatgtggcaacataagaattttagccctccaactagcactattttccaggaatgttgaagggggaataaggtatattgaatgagtttatgttgcccagaatacaaaaagtggaaggctgaataaaaaacaagctcctgttcaagtgacctccctgctttttgatgaccccccctggctatgccccatttttggtgctgaatggatgcccaacacgtccgtactcatttgggcttcgatgcagttgttcaatttgaaaagtaaaacagtcctttaatggtcca

SEQ ID NO: 673823 - DNA, 877 bp, Homo sapiens
agcgggtttgcgcggcacctggcgacaaaatggctgcccgagggagacgggcggagcctcagggccgggaggctccgggccccgcgggcggtggcggtggcgggagccgttgggctgagtcgggatcggggacgtcgcccgagagcggggacgaggaggtgtcgggcgcgggttcgagcccggtgtcgggcggcgtgaacttgttcgccaacgacggcagcttcctggagctgttcaagcggaaggatggaggaggagcagcggcagctggcaggaggagcctgcccccggggtccgcagcgaccctgaccagtcggcctgccgccgctgggccccgggggatccgaaagagggaatgggcggtccgggctccacacttagcttcgtgggcaaaacgcagaggcgggaacaaactagccctcaagacgggaatagtagccaagaagcagaagacggaggatgaggtattaacaagtaaatggtgacgcgtgggccaaggtacatggcagaagtgaaaacagtacaaagctcaccagtgcggtgacgatgataaaactcgggcccctggtgaaatgacgcccctcccccaacctgcccatggcctgggactctctgcggatgtacataactatttaatgcagcggcagcgggcgacagccttccctgagaggacttaaaagcagaaggaaaccgagatgcttcccgcagcgtggacgattctccaggactctttttttaccttgagcacttgcctcgtgagacttcatagaacagtggttacttggcccccttttactcttatttttgtggctctatgtcttctctttaccctcttccttcccttagcatcagtctggcagtaaaactgattatgcgg

SEQ ID NO: 673824 - DNA, 1822 bp, Homo sapiens
tgtcggagcaagatgtattcatacccacctaggctgggggtcactagtgacaatgcaattcgtttatcagtcaactcattatgtcccagaaatagaggttccagtcaagtggttctagcaggacacggaaagccaagtccgtgataggccactcgctacttagccaagcacatggagctttagaaaataaactggtggacaatgcacgatctcttcgtccttctgggaatggacaagattatgtacttcaaagcatactaagcctgattagaaaagtactagtagggatattgtatactgtggcagttgggagggtctttagccttcataacagtgcgtggatgctgacgtgtgtaaatgcttgagccacaaacttgtgagaataagtgacgcttggcaacgctggactatgctcattcataaggacagaaacttctgtctccataaattctctggaacaactgggatatcagttcctcattcataatcaggcaatttcttcctgaaccagatgtcaaacacagaggatagagtagcacataccactagcatacatgagcgtcagcacggacagacggggcacggcacacggaaatgatctacaggggagcattcccgcacaaaaggaccagtcgcgggcgaaggtgctacgccacgtcacctggtccggagataggcaagaaactcgagcgagacacgcgtacaatcaaagcgtgagccggtcaaaacgcaagggacccaggacgagtcagggcacagcagcaaccacctagatacaccagggaaccacacaatcaataacatcatcacctcttcttcgttccctttctcctctctctctatccttactactcatcaacacaaacacaagaacacgacacgaacaccatacaacaaccaaaaaacaactacaaaaaaacaaacgaaaacaccaacaaactacacaacatcaacaaaacaacaaacaaacaagaacaaagcacaaacaaagacacaatcagacaaaaaacacaacaccaccaaacaaaagcaagcgagaaaagaaaaagacaaagagcgcagggaagcgaagacaagagggccgctaaccggaaacacacgaagcactaagaagcagaacagagacaacaccaagaaaacacacgagaaacagggtcggagcacggaggagcgagcgaaggacagaacgaggaaaacggcaaacaggaaaggcacaccgaaaccaacgggagccgagagagccggacagaaccgcacacagaagaggcagacaacaaagcagcgagaacagcagcacgacacgagcaacaaccgatgagagcgggacgaaggaagcagggcgaaggcagcgaccaggacgaagagagcagacacgccacaagaaaacgagcaaccaccggcagcagcgagtgagagaagacaagcacggagaggagcagaggaagaggagaagcaaggaggagagagggaggagagaggaagacagaacacggaagcaacgaaggagcgggacggcgaacgaagaaagcagaaagagaggagacagaagacacgacagcagcacaaaagacaaagacacgaagaagaggcagaagcccaggcaggacacgacgggagacaaaggaaaagacggagccagaagacccaggagcgagacagagagcgaaaacaaaggaaagaggaagacgaagagaacggagaaggagaaagaccaagtaaaggaaaaaggaggaacagaagaagacacagaacgacagaaaacgccacagcacacgaggaagcacgaagccacaaagacaagtaaagagaagagagaacccaa

SEQ ID NO: 673825 - DNA, 445 bp, Homo sapiens
  misc_feature (12)..(12): n is a, c, g, or t
  misc_feature (63)..(63): n is a, c, g, or t
  misc_feature (74)..(74): n is a, c, g, or t
  misc_feature (80)..(80): n is a, c, g, or t
  misc_feature (83)..(84): n is a, c, g, or t
  misc_feature (92)..(93): n is a, c, g, or t
  misc_feature (171)..(171): n is a, c, g, or t
  misc_feature (186)..(186): n is a, c, g, or t
  misc_feature (258)..(258): n is a, c, g, or t
  misc_feature (296)..(296): n is a, c, g, or t
  misc_feature (334)..(334): n is a, c, g, or t
  misc_feature (341)..(341): n is a, c, g, or t
  misc_feature (348)..(348): n is a, c, g, or t
  misc_feature (351)..(351): n is a, c, g, or t
  misc_feature (353)..(353): n is a, c, g, or t
  misc_feature (366)..(366): n is a, c, g, or t
  misc_feature (375)..(375): n is a, c, g, or t
  misc_feature (385)..(385): n is a, c, g, or t
  misc_feature (443)..(443): n is a, c, g, or t
taaattcgtgtncaaactaacacgcacgggaacgggctccagctgcagctccctgggtctgtnaggccggggancggttntannggaagagnnggtacgtgccgtgtggcaggcgcccgctccttactcgacagggcggtctggatgtgctcatacgtgggcaggtcagtnaggatccagggtggntactgcggtttggctcggagcatcttagaagcgactctcgttcacatcttccggcttcacgttgcggatgancgtgcacagctcgtgcggtactttctggagcgagtggncagcacctgcctccccacatcctcgaagatcacaggcntggattncaggttnatnangagcattgatgtnagctgcgtnttggctcgtnccagctccaccgtgtccacggttccgcccattaaaataaactcctttgtgatgatttnta

SEQ ID NO: 673826 - DNA, 128 bp, Homo sapiens
  misc_feature (89)..(89): n is a, c, g, or t
tcaacggtcggcgaacatcagggagcggcacatgcgttgggagcggcacatgcgttgggagcggcacatgcgttgggagcgggcatgcnttgggagcggcacatgcgttgggagcggcacatgcgttg

SEQ ID NO: 673827 - DNA, 753 bp, Homo sapiens
cgacccagaggggaattgcaagtgcctgggggacggtggcaatgggacacgcgagccaacgcgcaccgtgagacgccaggctggctgggctctgcccgggtggcggccctgggagggatgtcgaacgaggtgccccgagatatttggcgtgccgacaccttcgagggccagccctgacaagcgtcgcccaggccgatgaaggataagccagagaccggcagaggaaggcgctcaactcgacgccccgtgcgggtcgagggctgcaggacaacaagcggggtccctgtcccaggccccgggacaatcgtgtgcaagcccagacgacaagatgctcgtcttgagaccccggtgtcgtcgtcggagtgagcccgacaccacgttctccccaaacagtccccaagccaccagctggtgatatccgcatgtgataaggcacttctgtccaattacaagtggaccaggccagaaagatctataatagtccccagccgcatgtggggatagatgaggcgcgacagaggccattcacggtcttgagggaacctggcggcttgtaatgtttatccgtgttgaaaccttttcgtcctatcctgggtacacgaagggaactgttctgcccacggagcctgagcctcaggctgttggagaagcatctgatagcccttttctttgctgggggtcttttacgtgagggtccttggcgttgtttaaggtcgcactccacccaataccagccacccgctggggccttga

SEQ ID NO: 673828 - DNA, 842 bp, Homo sapiens
  misc_feature (398)..(398): n is a, c, g, or t
  misc_feature (752)..(752): n is a, c, g, or t
gccaaaaattcaaaaattagccgggcgtggtggcaggcgcctgtaattccaggaggctgaggcacaagaatcgcttgaacccgggcagcagaggttgcagtgacctgaggtcacaccattgcactcctgcctgggcaacagaatgagactctgtctcaaaaaaaaaaaaaaaaaaaaaaacttacttcttctaattaagcgcctcaatatttaattttttaaccaaggtggggttgggtaccaggtattttcttttggcccattgcgggcaaattccttggtttgggccagcgcattttcccattaacttcttgggccaaaggtggtcccctttgattgtggcacaacggtttaacaggcttcttggcaaatgggttccttgggaggctcctttaaantcctattaaggagtggttttttaacacaacttttttaccattattaaatttcggtggccggtaattagcgctcttttaaaaaaagaaaaaaaaaacctccgagagggccatccataaggcacggcgggcgcgggaaaaaagagcgggtaattgagaatggggcgccatgggggcaatatagcggtggtttctcccgtggacccacaggtttctctttgtgctcaccaaggggcggggaaaaactccgcgcgggggccccccccaatatagtaggagagagcgcgcggaaataatatgccggaataccgccggggttaacccctggggttattgatctctcgcgctacgaaaaangtgatactaccacatgacactaaagactaacagccaagacaagcaagggatatataccaaagtgtgtcagaacataactagctagtctat

SEQ ID NO: 673829 - DNA, 1237 bp, Homo sapiens
  misc_feature (267)..(267): n is a, c, g, or t
  misc_feature (683)..(683): n is a, c, g, or t
acgaagttccacgaagtaggattgtggctccatatctcctgacgtcggccaagggacctcatcttcaagctggaggtccgcgacgtccataataaaggtgtgagtgcgcgcacacaatcgttccatgtctagtctactcgccttgtgagtttcaatgaggagttgcagcccacgagaaggcaacaccatatgacacacaacgtcgcgcgagtggtccttgtcagaggtgtgggtactagtctacttttccttctctctccctcctcncactctctcctgctctgtcactctcgagctggttgactgcaagcttggcacgatgtagcatagggtacagtagaacctgactcacctgttagcacattcgaagattgaaaggaatctcatgggtagtgaaccttcttggaggctccacccaaggggctcatggcgtacccatatcgacctgggggggaaccgagatggagagcgggtcccactgttggtgacatgtggatgtatcgcaccttgatttcttctatatacacgtaccaaaccaggcacacacatatatatacaggcgcggggagagacgtggcactctataataaattctctctccaccttaccgcgagggtaacctaagagttcttgaaggcgtgttatcacagagcgaatatttttagaagccacatagggtgagntctcacttaactagtgggcgagctgtaataataacataaggccaagggggccaagggagggaagagaaaggtttactgtggggaatcgggtgtggaagtacgtgggggtccaaatcgtgggagattgccttgtgggaggagatcaccggcgggtttgacagttgtgacacaggttttcaaacagtcacaggcgagggtgggtctgaaaacactcgtgggtgggggtccaaagatttttgacactttagtgagtagtattttacagaaagtggtttatacgggggtaaaattttaaataaagattttttttcaaaagggttgcttttgatcaagggcacgttctcaacatcctgggtcgagaaatttatcgtcacgcgttcgagatctggggaaaaacatttttggggataaaacacgagagtctaggcgaacctagggggaaactcacagagctttcaccattgcgccagcccacaggcgaagcaaacacaagagatattacgcacaagaagaaatatgaacttgtgcatattttgaaactttttaacccccgc

SEQ ID NO: 673830 - DNA, 235 bp, Homo sapiens
cactgctcggatggcagaccgtgccagtaggagttgaggcacacgatgtaggccattctagcagctccagccatacgtaggcaggaaggccttggtggtccagaactggcccagggtgtagatgctgtatgggacttgcaggatgggcataatcatcactgtccattaggctctatcccatggaccacggcggcatagtacaccaggatggagatgtcacccacccttctcccgt

SEQ ID NO: 673831 - DNA, 222 bp, Homo sapiens
  misc_feature (17)..(17): n is a, c, g, or t
  misc_feature (69)..(69): n is a, c, g, or t
  misc_feature (77)..(77): n is a, c, g, or t
  misc_feature (111)..(112): n is a, c, g, or t
  misc_feature (122)..(122): n is a, c, g, or t
  misc_feature (163)..(163): n is a, c, g, or t
  misc_feature (194)..(194): n is a, c, g, or t
  misc_feature (201)..(201): n is a, c, g, or t
  misc_feature (214)..(214): n is a, c, g, or t
ttttgcgccttcagcgncgacttggtgaccttgcaggcaccgccgctcttcttctccacgttcttaatnaagcctanagacaccgtctgcatcatgtcgcgcacggagaanngccgaaaagngggtactgggagaagctctccacacacatgggctttcccgnaaccatctccacgatggccgcgtctccaganttcaggnacttggggttgtnctccagct

SEQ ID NO: 673832 - DNA, 762 bp, Homo sapiens
  misc_feature (684)..(684): n is a, c, g, or t
aggggagcggaggcacatcgtggctgcagacgtgacgcttcaatcaaggtactatgatacctatatcagaaacttgtttgtgggtcacagactatgagaatacaaatcgaagccacagacatatgcagtcctgatgtgctaagccagagaatcagccacagctgtagtggcagctctttaagctcaagcaaatgttcggttatgcagacatgaatacattttcaaccttcaaattagaagattccaattctgaagtattcgaaacaccccaggccgtgggaaatatgcgaccttaatctggtaataagtcacggatcagtgtgtcagatagttcgaagttccagaatacacatgcatatcatagctgtcaaatgttcttttaactttgtttccaaaaaaatgatttgggggtgttgctaaggtggacaattcgttagtctcacctattgagacgcgcatcgtataataatgacaacacaaggactaggtgggatcattaacttgtacaacattaagctttaaaacacatatgcgggtgggggagatgaattctgccctgttttaaccccacaagaccggaggtataataccggttaatcgctctacgccctgtgaagggggcctcaggccaaatgcgcccagtgctagagggttttcccttaaaaggcgccaaatattaaccgngtgtacctttaaaaacccccgttggggccttaaaaggggggttaaataagtgacttaacgacatatactggtagacaa

SEQ ID NO: 673833 - DNA, 678 bp, Homo sapiens
tcctgaaatgggggcttgccctgtcgcccaggctggagtgcggggtatgactctcagcctcactgcagcctccgcctcccgggtccaagtgattctccgtgcctcgagatcccaagttagctgggactaagggcacaggccaccacaccgagctaatttcttggtatcttaagtggagacagggttccgtcgtgttggcgccaggatggtctcaaaactcctgacctcaggtgatccacctacctcggcctccgaaagtgctgggattacaggcgtgagccaccatgcctggcctgatattacacgacttcattgggggatcccttatatttaaaacataataatagtaattattaatcttccggaaataaggtcgtgtctctgtcaacccaggctgaagtgtaggtggcagggtatgtggcctcactgcggcctccgcctccgtggactcaggccattctcccgcctcagcctcccatgtggctgggactacgggcccaccaccaatgcccagctagttaaggaactcccagtagagagggggtacagcgccaagtggccgggccgggccttgaactcccgagcccaagtgacccgcctggcccggcctcccaaagtacggggaataccggcacgagccaccactctccaaccccataaaacaacttacaaagaaac

SEQ ID NO: 673834 - DNA, 403 bp, Homo sapiens
atccaaatcctagcaaaatcttgtcggctctaccttcagcatagacccccaaatccaaacccttctcaccacttctagctcgagctcctgaaccccactagtttccttcattctttgcccacctacagtctattctccacccaacaggcagaataatgcttttaaaaagttggaccagaccaggggaggtggctcatgcccaagccgggtggatcacttgagctcagcagttcaagaccagcctgggcaacatggcaaaaccctctctctacaaaaaattagctgggcatggtggcacatgcctggagtcccagccactcgggaggctaagagaggaggatcacttgcgcctgggaggttaaggctgcagtgagccgtgatcatgtcaccacactccagcctg

SEQ ID NO: 673835 - DNA, 212 bp, Homo sapiens
aaccaggctcagcttaactgatattatggaggtcagcacggtgctcacgtgtcgacggaacttgtacagggaggcatgcacctgcattggtgaatacacgtcgaccaggctccatctataacgatatttggaggtcagcacggtgctcacagtattgacggaactatgtctagggaggtatgcaaccgcagtggtgaatacacgtcgagctg

SEQ ID NO: 673836 - DNA, 111 bp, Homo sapiens
cgtctgagtgcaattggtcgtcgactggtataggggcgacgctatcgaacattagtagctgtacctccgaatttcctcaggtagctggcgctctcgcgaagctcataacga

SEQ ID NO: 673837 - DNA, 199 bp, Homo sapiens
gcttggatggatcacacaggactgtgtgtgtgagtgtggatgagatgcccgtactgttctttgggatcagtcaacagctcagatgagttaatgggagcctgagatcattgtctctgagacatgctgtctgaggagttggtggttcgagctgagcttcgagggattagaaatgaaggggaaggcaggttcgggactactg

SEQ ID NO: 673838 - DNA, 925 bp, Homo sapiens
ggagtatgctggccttgtgtacatcctatcatgtccagtcgtctcgtcacgggcgttggtggtggtggatagcaggtgggcgggctggtctgtggcggtgcaccgttgtggtcacgggggtgcaggcgccactatgtgcgggcgcctgttgatcgccgctgtgggcagttattggcactatgtgggtagcgtggctgccccataggttttggggccatgggggggcacaattcatttgcgtcgcatattagcccggcaggcgggtgccgccaccatgtgtgccggtgtaatggcgctcgtggctgttcccgcgctggggctgcacctttaaaagggtttctggtcccccggtttttgcgattccaggtgtagaagtgttgaggcgggattagccggtggcgagatcatagtgccgaagtggtggtgatgcgcaataagggttaatgcgttggaacaagagagagtctttctctgtccttgcaaggagcaaccaatcagctgggtgtaatattccccgtctagtggcagatagatgctgacaacacaatcagtggggcccccaaaaatagattgggaaatagtgtgcggcagacgacccactgctgccctgtgtaatacaggccccttctttgtcattgtgggacgtacaaggcacccgcctcgatttggtagaacttcgttgttgtgccaaggtgcggttgtgcggccgatcgttccatatagggacgttgtatatgggtcgtctctcccaccccgcaaggagttgctattttagcaaatgaccgctgcttttttaatggaccccgagtttgatttcaatttttcctctacgatgttacaatttgctttgcaataattctttggtctgacatcagacgatcccccccttacccgcggaaatgaaaatcataattttccacaaaac

SEQ ID NO: 673839 - DNA, 220 bp, Homo sapiens
  misc_feature (51)..(53): n is a, c, g, or t
caggagctgagaaaatagcgacgctatttgcattctgattttcctgctcannncattccagactgagcaatgacccgaaatatgactctttcctatggggaggtgtcctaacctgccaggcctgcctctccccaggacaagtacgccttggggacaattacaaagcaactgcagccttcaatctcttcatggttaaaaggaagaacaccacgccttcctc

SEQ ID NO: 673840 - DNA, 634 bp, Homo sapiens
  misc_feature (555)..(555): n is a, c, g, or t
tacaccaacgacatccaagctgagagccaaatcaagaatgcaatcctattcacaattgccacaaaaagaataaaatacctaggaatacagctaaccagggagatgaaagatctctacaacaaaaattacaaaacactgctgaaagaaatcagagatgacacaaatggaaaaacattccatacttatggataggaagaatcaatattgttaaaatggccatactacccaaagcaatttatagattcaatgctattcctatcaaactaccaataacattcttcacagaatcagaaaaaaaaagcattaaaatttatttgaaaccaaaaaagagcccaaaaagccaaagcaatcctaagcaaaaagaacaaagctggaggcatcgcattacccaacttcaaactatactacagggctacagtaaccaaaactgcatgatactggtacaaaagcatggtgctggtacaaaagcagacacatagatcaatggaacagaatagagagccccagaataaagctacacacctacaaccatctaatttttgacaaagttgacanaaatacgcaatggggaaagaattccccattcaggagggggactgggataatagctgccctttgccgagattgaaccgaa

SEQ ID NO: 673841 - DNA, 791 bp, Homo sapiens
  misc_feature (139)..(139): n is a, c, g, or t
  misc_feature (201)..(201): n is a, c, g, or t
  misc_feature (204)..(204): n is a, c, g, or t
ggatagtagtagattgagatggaatattttccagcctcatcctggctgccctctagactccagtcctccaagccctcagcctagtgggtgtcatggatggatctgggggtgtcagacaggctaccctgtgccagggagngggcagaatgggcctgcagcttcctgcagaggaagcaggactgggtagcagagccgggaagntgngtggcccattacaggggggtccccagggtgtcctctggcagggctgtgactgctgcaagctctgccttcaccagtagctggtgccaggacagagctctgggacagcaggcagaggccgagcctgggccacagctcagccactgacttgggtatcagtttccccttctgagaagtacagagtgagacttaaagaacccctagatccccaccagttcaacactccattaactgggaagcccagagtcctgtccggcctgccaagttcatcctggtggacagcgggaggcctccgctaactgttctcttcttttccttattaataaaacacacaatgcctagctggggggtcggaaggcaaatgccctagatggtggggtcacgtctttctccttctccttcctccttctgctggctgaagtgatgactggagctcagcaaccactttgcaccatgaggcagcactgagcacggtagggcagcctggtgagaggggcctagctcgctgccgacagaagtcactgcctacctcagggtccccttacctgggtgggaaataaatttctgctgtgttgaagctaaaaaaaaaa

SEQ ID NO: 673842 - DNA, 176 bp, Homo sapiens
aatgccctcgtcaacgtttcctgcttgactctacctctcctcctcccattgactgtgttcgaggtaactgtataacatcccagtggctataccagtagcacaactggaatattcaggcagaacggtgcggatagaagctagaatacagtctggagaccaggagagtatgtggcgaa

SEQ ID NO: 673843 - DNA, 667 bp, Homo sapiens
aaggacattatgctagtgccattactgtcaacagttggaacaagataaacggcatgcccaatctagttgaggattttggacaccgggcctcccactgggactccgccgagaaaccaggtctgccattgccacctccgccgggccttgctgtcttagcacagtaagtgcacccgaccgcgcccggagtccccctttcactcccacaaccaggcctgtggtgaggctcccgcttgtcatctccaccaggaggtgctgtcctgccgaaatgttggggtttttctccaaacttcctcctgttcagaattcgccatctcagtagtggcatggacatccacctggccacagctcacgcagaaacctaggaatttttgtgaacacgttgtgtgtcttactaatgtgtccactctccactaccactgtttcccaggccactagtatcttttgcccagactgctagtagctcttaacccatgtcccctaatccactcttgcccctcacacagcacacacatacaatccattctcaacacagacaccacagtgaggtttatgctgtctatactggccttccctttcggtggtcaaacgtgcctagctcctgcagccttggggtctaataagcattgctcttccttttgcctaaaaggctctggcctccctctgcatg

SEQ ID NO: 673844 - DNA, 557 bp, Homo sapiens
  misc_feature (13)..(13): n is a, c, g, or t
  misc_feature (43)..(43): n is a, c, g, or t
  misc_feature (63)..(63): n is a, c, g, or t
  misc_feature (66)..(66): n is a, c, g, or t
  misc_feature (86)..(86): n is a, c, g, or t
  misc_feature (91)..(91): n is a, c, g, or t
  misc_feature (108)..(108): n is a, c, g, or t
  misc_feature (114)..(115): n is a, c, g, or t
  misc_feature (119)..(119): n is a, c, g, or t
  misc_feature (125)..(125): n is a, c, g, or t
  misc_feature (128)..(128): n is a, c, g, or t
  misc_feature (136)..(136): n is a, c, g, or t
  misc_feature (139)..(140): n is a, c, g, or t
  misc_feature (165)..(165): n is a, c, g, or t
  misc_feature (174)..(174): n is a, c, g, or t
  misc_feature (195)..(195): n is a, c, g, or t
  misc_feature (204)..(204): n is a, c, g, or t
  misc_feature (213)..(213): n is a, c, g, or t
  misc_feature (221)..(221): n is a, c, g, or t
  misc_feature (233)..(233): n is a, c, g, or t
  misc_feature (246)..(246): n is a, c, g, or t
  misc_feature (250)..(250): n is a, c, g, or t
  misc_feature (252)..(252): n is a, c, g, or t
  misc_feature (271)..(271): n is a, c, g, or t
  misc_feature (296)..(296): n is a, c, g, or t
  misc_feature (304)..(304): n is a, c, g, or t
  misc_feature (307)..(307): n is a, c, g, or t
  misc_feature (310)..(310): n is a, c, g, or t
  misc_feature (329)..(329): n is a, c, g, or t
  misc_feature (332)..(332): n is a, c, g, or t
  misc_feature (341)..(341): n is a, c, g, or t
  misc_feature (346)..(346): n is a, c, g, or t
  misc_feature (348)..(348): n is a, c, g, or t
  misc_feature (388)..(388): n is a, c, g, or t
  misc_feature (393)..(393): n is a, c, g, or t
  misc_feature (403)..(403): n is a, c, g, or t
  misc_feature (418)..(418): n is a, c, g, or t
  misc_feature (425)..(425): n is a, c, g, or t
  misc_feature (442)..(442): n is a, c, g, or t
  misc_feature (447)..(447): n is a, c, g, or t
  misc_feature (467)..(467): n is a, c, g, or t
  misc_feature (481)..(481): n is a, c, g, or t
  misc_feature (550)..(550): n is a, c, g, or t
tcttctacttaanatttcaaaattttattaatcctttaaaaancaccctatttcttttgagtnaanatccccatctcgattacccncaaanatggcttagtttgattntgttannaaantctgtnaanaattattnaannaaatctacaaaaaattaaaaaaaantctagcaanaattaaaaacatgaaaaaaanaattaaaantttaaaccnaccaaaantcctatggcctnttatttagctgtnaatnanaaacgtcaggggtttaaanctgcccttttgactgtaagtaaaanttgctaangcnggnagcgaaaaagtgaaggaanacnggggttgcnaaaanantacttttttttttttttttttgcaaaaagcagtttacctnaaaanggtctcaccnaaaaggccccccccngtaaacncattaatttttctaaanaaaanttggggttttgaagaaaaangtcattagtctatnaaaaaagcatcaaaggacaattagccattttagacttgaccatattttctctttttagcatatagccancttgaaa

SEQ ID NO: 673845 - DNA, 267 bp, Homo sapiens
cccagtcctctcccaagtccccccagggggggtgatagcattgctttcgtgtaaattatgtaaggcaaaatttttttaattttcgccctaaaacttttttattttgttttattttgaatgatgagcctttgggcccccccttcccccttttttgtcccccaactttaaatgtatgaaggcttttggtctccctgggagtgggtgggggcagccagggctttcctgttccctgacttgagacccgttgaataaaagggccccccttta

SEQ ID NO: 673846 - DNA, 178 bp, Homo sapiens
atttgctgaccaatcaaacttgcttgaccccacaggacatcagctgtcaccaaagcccttccaagacagaccatctcacagaaaaggcctataccgacacccccaggaactaccctaaactccttccaggatggacagacctggacatcatgagggtgatccagagacttctccatac

SEQ ID NO: 673847 - DNA, 630 bp, Homo sapiens
  misc_feature (224)..(224): n is a, c, g, or t
ccctagaaatggggcacacaaattgttgttaccatcctaaaccataattattgccttgtccaaagactctcaagcggtggtcttaaccaattgtgtcgtatgcagtagaaaacggcagtaagtgcaagggtcaccaatgtttgcacggaatccatggtcaacagcctcccatgttattagctgtgaaagtcaataatcatacggtcgcaaagagttaatgctcnaacgttcactttccatgcgtatatatgcactctttctgggaaggatatccaaatcaaggtgcacgctgcacttgtttagcttgtcgcagcttttgtatacaagttctgcaagtctgactatacgtagccctgctttgcagaggagggtataaaacttgattctgcaagtcaacctgctttaggcttataccctcacatttgagagcgtctcagccttccttgagagtaagagaaagaatatgcagttcacaggcttgttcacctgtttttctttctggttggtgtaaagccaacaccctgtctaatcatcataaatttctttaatcttgttgcctcttgtcttggtgctgcccttaataaagaatgcatcgattctaaaaaaaagaaaacaatatctcgatactag

SEQ ID NO: 673848 - DNA, 128 bp, Homo sapiens
ccccttaacccccttttttaaaatttggttttttaataacctagggaccccccggtaaaattttggttttccaaaagggggccaaaggggggtttaaatcccccttataaaaataaggctttttttta

SEQ ID NO: 673849 - DNA, 1024 bp, Homo sapiens
tcgaccggttgcccgtcgggtcgctagactcgctcggtgcgcgtcgttcccgttcccgtgtcgctctctctgtgcggctgctggctctcgccgctggttctggccctgggtcccgtcgctatcctgaacgcggctcccgcgaagctctgcccatactcagctggtgctgcagctatatcaaaggctccgggggtcgcaggcgagtcaccggtcgcctgagcgtgtgtgctgtgcacgtatagggttagtagtccagctaactaggaatctatttgagcctactgcaaacagagcgtaccaagacggaaatgctcgtgtggcagacactcatatcatgttcactcttgcttacggacgtgcgtgggtcgctgggatattgacagaagggtccactgcgtgggaagaaagggctgttcacgagccattcgccttatgcgattattcctcgaaaaacgcttttatcgacgacgcacattggggaaggtcggatcgggagtctccaggctaccaacatcacacgttgtttaccttgctggacccggacacccggggatgaaagggctgaatgggactcttgaagcgaatgggacctgaggttcctgcggtgagagcctattcaggccggtccttaggactcccccataagacataaggcgaggggccttggttgtgcttcctttgggcacaagtctgtagagctgacgttgggaataactttccacctgggcgcttctaaggcaccttggcttgccaagcagtttgcaggccttgtcctcggaatgggccactacccgaacataccccaaatggattgggcatgcgcggcccgagaggcaggaaggattcaccgtgggaacctgatattgtgaagacgtgtgatacatcagcgcggtgtgatggaccccccttttgagtgcattccttgtgtggtagccccaagacatttgcccaaattgtattgccccatgggacattgccaagcgaccaaggtaattcccttagagatgggggagatttggctaca

SEQ ID NO: 673850 - DNA, 1967 bp, Homo sapiens
gcagcttcctaagatcatgcagtatgtgcatctaacagtgctcgagtagtcgaagaatgacgaattggatcactatgcccagataacagaaggacatcctgcttcaatgattacgctcgaccatggatatcctcgaccattctacgttgacatagacatgcgtagcgccaaccacagaagcaggtaactcttgacacctaagacttcccatagagtgccgtacgattcacatgcacggcctccactctagcatcgagcactcttcaatactactcgatgcgtaggctaacataacgccggggaagtgatgcaagacatacttctctagcctatgacctgaccttcaccaggaatttcttcgtactgcaacacaggaccctaccacgccgcacatacacatgccagaacatcagcggaaccgttagctatcgactcaaagcactagataccagcatgtggatgagccgctgttaatatatctccgatagggatcgaggtacaccaagacgacgacagtgcgtaatggtcgaaagcagcacgacggctcatatggtaccaacgacaggagtgcccgtctgacttaggacagaagtgatcgatactacacccacggcgtacgcctcattcgaccgtattaggtcgcacgttaacatagcacttttcctccactttagcagccaatacctcacatcactatattcgcatacagcctggacaatacaaccattatcccaatgtcaatcaagctacttcacacacatttgccacgtaagacagcaaataacgtcactagagaggcaaaacaacaatatcaccaatatatcaacaagcacccgacacacgagccaatataaatatatgtcacaaccacataataactcacactcaacgcatatatcaacaataactatcccatcacgacattatgacatcgtaccaccccatatgcctcatccaccaatccacgtatcaatcaccacaaatattaccatccactcacaaccttccgaccatatcacaacttaccaccagtcaacatcttacacacgcaaacattgtcccgaacacaccatactagctattacacactggacacattcatataatcgcctatcaaccacacacagtacaatccaaataccaaaaacaaagaaaactgatagacaaatataccacactattcaaacccacccccaatttacagctacatatgatatacctatctaaacaacaccccacaaagttgctttgtcgaattcgagatgtacgatcctaaacagcacagctacacagtagatatcaacaagacaacgcagtccgccccagcagtaagatcagcgcatcacagtatggacactcacacactcccacattacactcgagccctcacactgactagtctagacatgctgacatataagaatgcagccgacgcaacatgaccaactgggcacgtcgctaactctctgatgtacacacaacagagtaacataatataccaagcatacgctataggagcacctatatagccaacaccgtacagcaaacctcgactcatacaactctctacatacaagcaaaatcttaccaactatagatataacactaactccaccacacataagcacatattgacgacactccatacaagtcacacagactagcttaacaagacacccaaccgcctatacacaccacaccaaagaacatctagaacaacacaacaactagactaacatcagtaaaccaacaacacactcagaagatcaacacccacacacaaacaataagctactcatacacccacaccctcacacctaccctactcaccacacacaaacactatccacacacacgaccacattctacaaccacaacacctgacccacgtcactaccagacaccccaccaatcgctctaatacatacttaaatacaatataaagatacatcaatatacatacgaac

SEQ ID NO: 673851 - DNA, 122 bp, Homo sapiens
ccagattgtaactcctgccgagccagtcagtactatttcacgctggctcagaccccaccgctgtccaagtccaggtccagcacgcacggccagcagcaccaccagctccacgaccaccatcc

SEQ ID NO: 673852 - DNA, 207 bp, Homo sapiens
caaaccccctttttttggcttatagccaacaagtaataggggagttcttttaagggccccccttcgcttgcaatgctatcaaaaaccccccgttttttacacaaacatatttttttcccggcctgttgttttaaggctcttgattattaagttaataaatcaaataaacacagtgattaataaaaaaaaattatttacataactata

SEQ ID NO: 673853 - DNA, 976 bp, Homo sapiens
cacgcgtcgccacgcgatcgaatcacatggccgagcgggaaagtctgtgcgtgacattaaggatgaagctgtgctaccgtcgccctggacttcgagcaagagatggccacaggcatgcttccagctcctccctggagaagagctactgagctgtctgacgtgcaggtacattcaccatatggcaatgagcggttcctgagtgccctgaggccgctctatccagcctttccttcctggtgcatggagtcctgtggcatccacgacactacccttcaacatccatcatgaagtgtgacgtggacatccgcaaagacctgtaactgccaacacatgtgctgtctatggctggcgaccacccatgtaaccatgggcattgccgacaggatgcagaaggagatcaactgtccttggagcccagcacaatgaagcatcaagatcgatatgctcagtcactgagcgccaggtactccgtgtgtgagtcggcggctccatcctggcgctcgctgtccaccattccagcctgatgtggagtcaagcaagcaggagtatgacagagtgctggcccctccaatcgtccagcgaaaatgcgatctaagcggacatatgacatgagacgggtacacccattactgacaaaacacgaaaatgagacaaaagagatgagattggcatggagtatagtgaaacggtcacggtaaggggacaaagcgacacagcaaactgcgcggcaaaccgggaaaccaactggacacagagcaaaaggaccgaagcacacggccgcgagaaccacaggagagcagacgagccgagggcaagagtgacactccgagtaacaacacaaaaacgaaaacacgaacgaagaaaggaacgaaacccacattcacggagtacacaagaccacggcacgagggaacagcaagagacaacgaaacacagaaccgaagcgaaggacgctgacacagccacaagaacgaaa

SEQ ID NO: 673854 - DNA, 637 bp, Homo sapiens
agccacgagacactacgtctatttattcttggccataccgtatatacccataaagtattggcgattgatattgaggcccaatgcgaaagatctaatgccgcgtggagaagatgaagaaatttatgcacgcgttttttatgatggactttcacctatatcttcctgataaagggtactctttcaataactttgtaaggaaagcgctaggtgataggctcgcgatgccacaaggcttcttataacaggtgtaagagcgcacacacttatgtattaccacagtgggtagatatataaggagaagtcaagaaccatacggcctggtgataatgtgtgtgtcacgagaggaaagtagtgcacgtttatgtggcacactgccgtcaaagtattcgtgatatatcagcgtagaacaagagggcaggtcttgtaaacttgtgccttgggcgtaggaagagagacaccccaatgggctcaggcgtcaccactgggcagcggaggcccgcatccccctttaagaaaccacgattctgtgtctttccccgaatgccctaatgaccttatagagagatggtttttataaatggagatttctcccgtaagcgggttacaagagcttgcttctattcaggccaaattccgc

SEQ ID NO: 673855 - DNA, 1034 bp, Homo sapiens
  misc_feature (1)..(1): n is a, c, g, or t
ntgggatccagcgcgatacaaagcgccgccgggtgccgttccaaaattggtgcgccgtttgttccggcccgtaggctccgggttactattgtttgaaccgccgcttgtttcccgcaaacctgcctttgggacacatatggcttgtgaccccacagtactgcgggccaaaatgttgtcggcttataactagtgccacctcctctttaaatgcctttttccgcacgcctttatgctgtaactgctgccgcccttgtttttgctcaccgacagtgcttcaggaggttttcacgcgcacctcccgttatgtgtctggcccacccgactccaatgattcctgtcagccagcccaaaatctttatgtcggccgtccgtgatcttaataacaggactgggttgctgcggggttaaattcaaagagcccccctcctgtgaaggttgatatatgaggcccccctccccctttattagtgcatccagcccagctcgccccgtgatgaagatagtgttgttaccgccgtgttcgggcaagtgcgtcacgctattgccccaccaaggggcgaggggcccttctcaggaaactcgttactgtgagaagggaggttcttacaagattagcgacactatacaatatatactgcgcgttattctcggcgaaatagaatttctctaaatctggctgggcataaacgtctttcgtcgtgttggttgtatggcccgcacgccaactagatccatctcctctgtctctgttgctgatgtagagcgcataggtatgacctctgtttctacaagtgcccacagtggggtttgacataacactatataatcgagtgcgcgcagacagtgctctaagagtgttctgcgctccactaaattaatgcacgccttctttagtccttataattctgccctggtcagtcttcactaaatggatgttctccttatactatatctgcaaagcgagcaatctgaagcagttgggctgatccggtaagataagtaaagaaactattcaccccctgtcccacataaca

SEQ ID NO: 673856 - DNA, 173 bp, Homo sapiens
gcatctcacaccccgagggccctgaggagagggagctgtgggccaccctgggaggggccagctggggttactggccccgcatgagctcggccatctctccctcctcccctctccttgggggactcagggctccattctcggagggcaccacggtgatccaaccatctcagtat

SEQ ID NO: 673857 - DNA, 346 bp, Homo sapiens
  misc_feature (34)..(34): n is a, c, g, or t
ccccaggggggagattgtcttccaatgtttaacnacgtttaaaaaaaaaaaaattgaattttattgttcatttaaaaaaaatttgaacccctgagggaatttcccaaaccagttccaatttttagggcttttaaaattccaaagaaatttttttttaaaaaaaaatccaaaggaaccctttaaattgtagaacggaaattttttcatttaaaagaagaaaaagcctccccggggtttaaattgggaatcatcccccctttcaaatttgtttcaaaattgttaaatgaaaactatttttttggagaggttactgaagttgattgagcaaaaaaagtttacttaatta

SEQ ID NO: 673858 - DNA, 158 bp, Homo sapiens
  misc_feature (87)..(87): n is a, c, g, or t
agatgaaattatagccagcatatatagcaggactaaccctatacctctgcatatgattactagattacttgcagggcaagtagaccngtaacagagagtactagacagtaagagcaacctttagtagtaatagtggagatttagtagagcacaactac

SEQ ID NO: 673859 - DNA, 458 bp, Homo sapiens
tttgggaaggaatagctcctcactatcccaccagttcgtgatttaagggaggagacaaccctcatactgtcttatgcccaatttctgcctccaaagaaagaagtaaaatctaaaaggcagaaatgaaatccacaagcagacagcctggccccacatcctgggcctggtagttaaagattgacccatgacctatcgggtattgttatctatagattacagacattgtatagaaaagtaccatgaaaatccctgtcctgtcctgttccattctaattaccggtgcaggcagccccgagtcacgtacccgctgtttgctccatcgatcacgaccctctcatgcggacccccttagagttgtgagcccttaaagggacaggaattgctcactcggggagctcggtttttggagacatgagtcttgctgaagctcctggctgaataaagccctttcttcttta

SEQ ID NO: 673860 - DNA, 154 bp, Homo sapiens
  misc_feature (110)..(110): n is a, c, g, or t
  misc_feature (116)..(116): n is a, c, g, or t
cagagcatccaaactgtcccgcgccttccaggcgcacgtccagagccaaaagagctccatggcggcggcggcaagccaacaacctttccctggtagtgcacggaccgggngacttncgcctggagaactatcctatccctgaaccaggcccaaa

SEQ ID NO: 673861 - DNA, 202 bp, Homo sapiens
tactaacttcatgagctcatacatataccaatacatgaagaacaaaaacatcccaacattactacagaaacctgccaaactgaagcttgctactgccagaaaccatccaataatataatgtgcatgaaatgataacattaactgtgtggagatcctactagatgtctgacctagcatggcatagcaatgcttgtgcacttgg

SEQ ID NO: 673862 - DNA, 143 bp, Homo sapiens
tggcagttgcagcaactgccggtcagtgattttcagcacagcggggctcttgagcctgaggaatcaggtctcacgggtagcatgctggtctagcggagaatacttgtgttttcccggggctctcttgaccctcaggcctcagg

SEQ ID NO: 673863 - DNA, 399 bp, Homo sapiens
tgcaaactccacctcccgggtttaagtgattctcctgacttggcctcctgagtagctaggattacaggcgcctgccactgcacccgactaatttttgtattttttagtagacacagggtttcaccatcttggccagactgatctcgaactcctgacttcatgatccacccgcctcggcctcccaaagtactgggattacaggcgtgagccaccacgcccagccaaaaggctattatttctttacctggttaactgtcatctcccactagaatataggttttataagggctggactcagcatagtatttagaacagtgcctggcacataagtaaatattgtctgatggaatgcagcatacatgtgtgcatccattaactctaggaaaccagagatcataa

SEQ ID NO: 673864 - DNA, 465 bp, Homo sapiens
  misc_feature (220)..(220): n is a, c, g, or t
gcagcatggagaggactgcacacacgacactgctcttgaaagaggatgattacttgccttctaaactgacaggctgcacttgtctctccagcagaggtgtgacgcagggcagctggttctcactggtctttgaagttggcctttctctttaccacaaacgcggtcatcccttcttcccggtcatcagtggcacaggttgaatacaagagtttcttctccnaacttactaccttctgttaatgtcatttcaaaagctgcattcactgattctttgggcatcgctactacaattgtagaattgctggcaattttttctgcacactggatggcttcttccaccagtgtctcaacaggaccaatcttgctgacaagacctgaaacacaagaaagtcagtgagtgatgtgcagaaacagcacttgtctatcccttctcgagtgagtgtgcggggtacgcagctcgaattc

SEQ ID NO: 673865 - DNA, 1020 bp, Homo sapiens
tgcatttattatttttatttattattcttacactgctgggaaatatctgtagagtgaaggtatgctagtatctactcatagatttgttgcatcaaataatatgcacataagtgcttggcaccacacctgggacatagtaattatacaatcactgttacctctttttaatattgttgttcatactgtgtgttgtttctccttatgaaagcctttcagagctgagagaatatacagagggtctcacggaagccaaggaagacgatgatggggaccacagttcccttcagtctggtcagtccgttatctccctgctgagctcagaagaattaaaaaaactcatcgaggaggtgaaggttctggatgaagcaacattaaaggtaggtttcctttgtaagcatctgcagtaaccaatggcttattatggctgtgtggccaccttagttgggccagaggggaagtagcttgagtagcctgctcacatcagacccaggttgcgtcctgtgatggtgggacactgtagcacttgaccacagtaagaccttccatttgaagagagccttttagcttgtgaaccactttcagtagattgacttcttgcatcttcttttgtcattttataaatgagaaaggtaaggctcaatcaaggttacagaacctgggttttctgtctccaagttcaagttcagtgctgtttccacattccatgtgctgctgtcctggcatgtgtctgttgtgggatgctgtccattgtaaacaatgtgggttacaagagctctcacctggagctttcattatttccactgtgcatggagaggtggctgatcccagggctcacaagtcccccacgcttcagtcaagtcattctgaaagtctcacttcccatatgttttctgagcatgaccaaaggggtgtggggaggaagtggccaggctgagctggggccagcagtcaaatgagctcaggctcatgggtcctgccctctaggtgctccccaggcctccgtaggcttttggcactaga

SEQ ID NO: 673866 - DNA, 971 bp, Homo sapiens
gtttaaacgggggtatgtcctttccccccttgaggttccctctgtgagccttgaatcaagcaatctagtctgcagtagtgtggactaaaacaaccagaatagcatctagaaagccatgagtttgaaagtggcccattcagaggcactttcctacccaattacccaggtcataaggtatgtctgtgtgacgactgtatctctgtgtagtatcagcatatgacatcgacttgcacactagacactcacagacaaacagataggttggccactagattatatagtatacatatattgtgtgaaagagaactgcgtgtgttgcaaggcttatcacacattgctaggtctgaccacttagtccatgaaacacgaatcagcaattgcaacattaaattccgttgagactccatttgtggcctgcatttcaggacgactcgggatcacagaactagtatccctagttgccgtttcgtcaaggggcgcgagtgacttcttagaaaactgtgccctgctcggtgggattcggacatgtggttaaccctgacagagaacaaaaaagacgagagtttagcggtatggcacctgtcagagtaaagtttaaaatgggtctgtaccggagcagactacttgagagagtgtgtgtgtgatgtctgtgggatgcacacgtttctattttctggaaatcgggaggtgattgaagctgaagcgaaaatatgcgcagcaacaaggggaggagtgtcaatgctttttacagtttgctatggagggaggagggggggggaaaaccggtaagtggggtaaaaagttggttcgccatatgttttttttttcattacatcatatttattgggcaaaagagctacccaaattgttggcttaaaaaaaaaacattgggggcaaataaagggggagaaaaataagtcagcagagtccaaccgcgcatgtattttttacttctttttttcgattaaaaa

SEQ ID NO: 673867 - DNA, 3198 bp, Homo sapiens
  misc_feature (3185)..(3185): n is a, c, g, or t
tgcttaaaaaaacacaacaggattttcgaagaatcctttcttagaaaacaaacaaaaaaaccaaacaaaaacgtactttctccccactagtttacaccacaggaagcgagagagctgctgccactgctgctaccacaggaagacacagcagggagaagccctagtgcctctgccggctgcccaggacctggtatcggcccacagaccaagtcctccacagagggcgagccagggtggagaagagccagcccagtgacccaaacatccccgataaaacacccactgcttaagaggcaggctcggatggactatagctttgataccacagccgaagacccttgggttaggatttctgactgcatcaaaaacttatttagccccatcatgagtgagaaccatggccacatgcctctacagcccaatgccagcctgaatgaagaagaagggacacagggccacccagatgggaccccaccaaagctggacaccgccaatggcactcccaaagtttacaagtcagcagacagcagcactgtgaagaaaggtcctcctgtggctcccaagccagcctggtttcgccaaagcttgaaaggtttgaggaatcgtgcttcagacccaagagggctccctgatcctgccttgtccacccagccagcacctgcttccagggagcacctaggatcacacatccgggcctcctcctcctcctcctccatcaggcagagaatcagctcctttgaaacctttggctcctctcaactgcctgacaaaggagcccagagactgagcctccagccctcctctggggaggcagcaaaacctcttgggaagcatgaggaaggacggttttctggactcttggggcgaggggctgcacccactcttgtgccccagcagcctgagcaagtactgtcctcggggtcccctgcagcctccgaggccagagacccaggtgtgtctgagtcccctcccccagggcggcagcccaatcagaaaactctcccccctggcccggacccgctcctaaggctgctgtcaacacaggctgaggaatctcaaggcccagtgctcaagatgcctagccagcgagcacggagcttccccctgaccaggtcccagtcctgtgagacgaagctacttgacgaaaagaccagcaaactctattctatcagcagccaagtgtcatcggctgtcatgaaatccttgctgtgccttccatcttctatctcctgtgcccagactccctgcatccccaaggaaggggcatctccaacatcatcatccaacgaagactcagctgcaaatggttctgctgaaacatctgccttggacacggggttctcgctcaacctttcagagctgagagaatatacagagggtctcacggaagccaaggaagacgatgatggggaccacagttcccttcagtctggtcagtccgttatctccctgctgagctcagaagaattaaaaaaactcatcgaggaggtgaaggttctggatgaagcaacattaaagcaattagacggcatccatgtcaccatcttacacaaggaggaaggtgctggtcttgggttcagcttggcaggaggagcagatctagaaaacaaggtgattacggttcacagagtgtttccaaatgggctggcctcccaggaagggactattcagaagggcaatgaggttctttccatcaacggcaagtctctcaaggggaccacgcaccatgatgccttggccatcctccgccaagctcgagagcccaggcaagctgtgattgtcacaaggaagctgactccagaggccatgcccgacctcaactcctccactgactctgcagcctcagcctctgcagccagtgatgtttctgtagaatctacagcagaggccacagtctgcacggtgacactggagaagatgtcggcagggctgggcttcagcctggaaggagggaagggctccctacacggagacaagcctctcaccattaacaggattttcaaaggagcagcctcagaacaaagtgagacagtccagcctggagatgaaatcttgcagctgggtggcactgccatgcagggcctcacacggtttgaagcctggaacatcatcaaggcactgcctgatggacctgtcacgattgtcatcaggagaaaaagcctccagtccaaggaaaccacagctgctggagactcctaggcaggacatgctgaagccaaagccaataacacacagctaacacacagctcccataaccgctgattctcagggtctctgctgccgccccacccagatgggggaaagcacaggtgggcttcccagtggctgctgcccaggcccagaccttctaggacgccacccagcaaaaggttgttcctaaaataagggcagagtcacacgggggcagctgatacaaattgcagactgtgtaaaaagagagcttaatgataatattgtggtgccacaaataaaatggatttattagaatttcatatgacattcatgcctggcttcgcaaaatgtttcaagtactgtaactgtgtcatgattcacccccaaacagtgacatttatttttctcatgaatctgcaatgtgggcagagattggaatgggcagctcatctctgtcccacttggcatcagctggcgtcatgcaaagtcatgcaaaggctgggaccacgtgagatcattcactcatacatctggccgttgatgttggctgggaactcacctggggctgctggcctgaatgcttataggtggcctctccttgtggcctgggcctcctcacaacatggtgtctggattcccaggatgagcatcccaggatcgcaagagccatgtagaagctgcatcttgtttatacctttgccttggaagttgcatggcatcacctccaccatactccatcagttagagctgacacaaacctgcctgggtttaaggggagaggaaatattgctggggtcatttatgaaaaatacagtttgtcacatgaaacatttgcaaaattgtttttggttggattggagaagtaatcctagggaagggtggtggagccagtaaacagaggagtacaggtgaagcaccaagctcaaagcgtggacaggtgtgccgacagaaggaaccagcgtgtatatgagggtatcaaataaaattgctactacttacctaccacatgccangcactgtgctcag

SEQ ID NO: 673868 - DNA, 921 bp, Homo sapiens
  misc_feature (291)..(291): n is a, c, g, or t
  misc_feature (908)..(908): n is a, c, g, or t
tttgttttgttttacctgaagtcctacaacctgacttcatctcacactgtccaatatgctgatttctggctgacttcatggcactccccctgcccggctgtggacagggtgaatgagagaggaaaataattatgcttgctgctttacatacatttttttttcttctaagcttcccatgactcctgaaggtccattctttacagatgaggaaactgaggtttgaggaggtgatgtaacttggaggctggccaagctggggtttgagataacaaatcagtctgatgtcagtcngatgttaaattgttcatcctcttgcagtaaaatgtttttgaatgtatgtatttcctctgcagcaattagacggcatccatgtcaccatcttacacaaggaggaaggtgctggtcttgggttcagcttggcaggaggagcagatctagaaaacaaggtgattacctggggctgctggcctgaatgcttataggtggcctctccttgtggcctgggcctcctcacaacatggtgtctggattcccaggatgagcatcccaggatcgcaagagccatgtagaagctgcatcttgtttatacctttgccttggaagttgcatggcatcacctccaccatactccatcagttagagctgacacaaacctgcctgggtttaaggggagaggaaatattgctggggtcatttatgaaaaatacagtttgtcacatgaaacatttgcaaaattgtttttggttggattggagaagtaatcctagggaagggtggtggagccagtaaacagaggagtacaggtgaagcaccaagctcaaagcgtggacaggtgtgccgacagaaggaaccagcgtgtatatgagggtatcaaataaaattgctactacttacctaccacatgccangcactgtgctcag

SEQ ID NO: 673869 - DNA, 456 bp, Homo sapiens
  misc_feature (16)..(16): n is a, c, g, or t
  misc_feature (20)..(20): n is a, c, g, or t
gggccacatcctcttnggcnatttggggccagacatgagggggctactcagtaatttgtgaccccaagaatgtgtggctgcatagtacactgcatgagacgtgtttacatgcgcctgtgtgcaaacacgggggctgtatcaccccgggctcacttgaagcccagggcatctgtggcctgggagaggagaggatccctaacagagacctagtgtttttctcagcagcagaggccacagtctgcacggtgacactggagaagatgtcggcagggctgggcttcagcctggaaggagggaagggctccctacacggagacaagcctctcaccattaacaggattttcaaaggtgtggggtgtgtctggttctttgcgtgctctccagttgtgggcatgtggccaggcccccaaaaggcttctgggcactttctgggctatgcttgtttcccacaaccat

SEQ ID NO: 673870 - DNA, 123 bp, Homo sapiens
  misc_feature (45)..(45): n is a, c, g, or t
tccacgctcggtcccggaaaggtagctgtactgaatcataggttnagatcagtggcacaaatcatacatgtagaatattatgtaacatatacattgttaggtaaggagtcagagagtacagta

SEQ ID NO: 673871 - DNA, 295 bp, Homo sapiens
  misc_feature (72)..(72): n is a, c, g, or t
  misc_feature (158)..(158): n is a, c, g, or t
  misc_feature (174)..(174): n is a, c, g, or t
  misc_feature (266)..(266): n is a, c, g, or t
ctcgtgcgccaaaaacatcattatgtagtacatgactataccttgaatttcgatcttttcctaggctagtgntatgcagtacatgagataatcaatgcttccttacaaaatgggcttatgttagaagacttttgcccagctgcaggctattgtaagtnttctgagcacatatgngttaacctgggccaagctatgatgttcgatacgttaggtgtattaaatgcacttttgactgccatctcagtggatgacagccttctcactgncaggcagagatcttcctcactgggccacg

SEQ ID NO: 673872 - DNA, 3312 bp, Homo sapiens
  misc_feature (3299)..(3299): n is a, c, g, or t
gcccaggagagcccacccctcccagagagccgggacagccacccgccgctgagactgaagaaatcctttgagattttggtgagaaagcctatgtcctccaagcccaagcctccacccagaaaatactttaaaagtgacagtgaccctcagaagagtctggaagagagagagaactcctcatgctcttctgggcacaccccacccacctgtggccaggaagcgagagagctgctgccactgctgctaccacaggaagacacagcagggagaagccctagtgcctctgccggctgcccaggacctggtatcggcccacagaccaagtcctccacagagggcgagccagggtggagaagagccagcccagtgacccaaacatccccgataaaacacccactgcttaagaggcaggctcggatggactatagctttgataccacagccgaagacccttgggttaggatttctgactgcatcaaaaacttatttagccccatcatgagtgagaaccatggccacatgcctctacagcccaatgccagcctgaatgaagaagaagggacacagggccacccagatgggaccccaccaaagctggacaccgccaatggcactcccaaagtttacaagtcagcagacagcagcactgtgaagaaaggtcctcctgtggctcccaagccagcctggtttcgccaaagcttgaaaggtttgaggaatcgtgcttcagacccaagagggctccctgatcctgccttgtccacccagccagcacctgcttccagggagcacctaggatcacacatccgggcctcctcctcctcctcctccatcaggcagagaatcagctcctttgaaacctttggctcctctcaactgcctgacaaaggagcccagagactgagcctccagccctcctctggggaggcagcaaaacctcttgggaagcatgaggaaggacggttttctggactcttggggcgaggggctgcacccactcttgtgccccagcagcctgagcaagtactgtcctcggggtcccctgcagcctccgaggccagagacccaggtgtgtctgagtcccctcccccagggcggcagcccaatcagaaaactctcccccctggcccggacccgctcctaaggctgctgtcaacacaggctgaggaatctcaaggcccagtgctcaagatgcctagccagcgagcacggagcttccccctgaccaggtcccagtcctgtgagacgaagctacttgacgaaaagaccagcaaactctattctatcagcagccaagtgtcatcggctgtcatgaaatccttgctgtgccttccatcttctatctcctgtgcccagactccctgcatccccaaggaaggggcatctccaacatcatcatccaacgaagactcagctgcaaatggttctgctgaaacatctgccttggacacggggttctcgctcaacctttcagagctgagagaatatacagagggtctcacggaagccaaggaagacgatgatggggaccacagttcccttcagtctggtcagtccgttatctccctgctgagctcagaagaattaaaaaaactcatcgaggaggtgaaggttctggatgaagcaacattaaagcaattagacggcatccatgtcaccatcttacacaaggaggaaggtgctggtcttgggttcagcttggcaggaggagcagatctagaaaacaaggtgattacggttcacagagtgtttccaaatgggctggcctcccaggaagggactattcagaagggcaatgaggttctttccatcaacggcaagtctctcaaggggaccacgcaccatgatgccttggccatcctccgccaagctcgagagcccaggcaagctgtgattgtcacaaggaagctgactccagaggccatgcccgacctcaactcctccactgactctgcagcctcagcctctgcagccagtgatgtttctgtagaatctacagcagaggccacagtctgcacggtgacactggagaagatgtcggcagggctgggcttcagcctggaaggagggaagggctccctacacggagacaagcctctcaccattaacaggattttcaaaggagcagcctcagaacaaagtgagacagtccagcctggagatgaaatcttgcagctgggtggcactgccatgcagggcctcacacggtttgaagcctggaacatcatcaaggcactgcctgatggacctgtcacgattgtcatcaggagaaaaagcctccagtccaaggaaaccacagctgctggagactcctaggcaggacatgctgaagccaaagccaataacacacagctaacacacagctcccataaccgctgattctcagggtctctgctgccgccccacccagatgggggaaagcacaggtgggcttcccagtggctgctgcccaggcccagaccttctaggacgccacccagcaaaaggttgttcctaaaataagggcagagtcacacgggggcagctgatacaaattgcagactgtgtaaaaagagagcttaatgataatattgtggtgccacaaataaaatggatttattagaatttcatatgacattcatgcctggcttcgcaaaatgtttcaagtactgtaactgtgtcatgattcacccccaaacagtgacatttatttttctcatgaatctgcaatgtgggcagagattggaatgggcagctcatctctgtcccacttggcatcagctggcgtcatgcaaagtcatgcaaaggctgggaccacgtgagatcattcactcatacatctggccgttgatgttggctgggaactcacctggggctgctggcctgaatgcttataggtggcctctccttgtggcctgggcctcctcacaacatggtgtctggattcccaggatgagcatcccaggatcgcaagagccatgtagaagctgcatcttgtttatacctttgccttggaagttgcatggcatcacctccaccatactccatcagttagagctgacacaaacctgcctgggtttaaggggagaggaaatattgctggggtcatttatgaaaaatacagtttgtcacatgaaacatttgcaaaattgtttttggttggattggagaagtaatcctagggaagggtggtggagccagtaaacagaggagtacaggtgaagcaccaagctcaaagcgtggacaggtgtgccgacagaaggaaccagcgtgtatatgagggtatcaaataaaattgctactacttacctaccacatgccangcactgtgctcag

SEQ ID NO: 673873 - DNA, 2967 bp, Homo sapiens
  misc_feature (2631)..(2631): n is a, c, g, or t
  misc_feature (2638)..(2638): n is a, c, g, or t
  misc_feature (2643)..(2643): n is a, c, g, or t
  misc_feature (2649)..(2649): n is a, c, g, or t
  misc_feature (2663)..(2663): n is a, c, g, or t
gcccaggagagcccacccctcccagagagccgggacagccacccgccgctgagactgaagaaatcctttgagattttggtgagaaagcctatgtcctccaagcccaagcctccacccagaaaatactttaaaagtgacagtgaccctcagaagagtctggaagagagagagaactcctcatgctcttctgggcacaccccacccacctgtggccaggaagcgagagagctgctgccactgctgctaccacaggaagacacagcagggagaagccctagtgcctctgccggctgcccaggacctggtatcggcccacagaccaagtcctccacagagggcgagccagggtggagaagagccagcccagtgacccaaacatccccgataaaacacccactgcttaagaggcaggctcggatggactatagctttgataccacagccgaagacccttgggttaggatttctgactgcatcaaaaacttatttagccccatcatgagtgagaaccatggccacatgcctctacagcccaatgccagcctgaatgaagaagaagggacacagggccacccagatgggaccccaccaaagctggacaccgccaatggcactcccaaagtttacaagtcagcagacagcagcactgtgaagaaaggtcctcctgtggctcccaagccagcctggtttcgccaaagcttgaaaggtttgaggaatcgtgcttcagacccaagagggctccctgatcctgccttgtccacccagccagcacctgcttccagggagcacctaggatcacacatccgggcctcctcctcctcctcctccatcaggcagagaatcagctcctttgaaacctttggctcctctcaactgcctgacaaaggagcccagagactgagcctccagccctcctctggggaggcagcaaaacctcttgggaagcatgaggaaggacggttttctggactcttggggcgaggggctgcacccactcttgtgccccagcagcctgagcaagtactgtcctcggggtcccctgcagcctccgaggccagagacccaggtgtgtctgagtcccctcccccagggcggcagcccaatcagaaaactctcccccctggcccggacccgctcctaaggctgctgtcaacacaggctgaggaatctcaaggcccagtgctcaagatgcctagccagcgagcacggagcttccccctgaccaggtcccagtcctgtgagacgaagctacttgacgaaaagaccagcaaactctattctatcagcagccaagtgtcatcggctgtcatgaaatccttgctgtgccttccatcttctatctcctgtgcccagactccctgcatccccaaggaaggggcatctccaacatcatcatccaacgaagactcagctgcaaatggttctgctgaaacatctgccttggacacggggttctcgctcaacctttcagagctgagagaatatacagagggtctcacggaagccaaggaagacgatgatggggaccacagttcccttcagtctggtcagtccgttatctccctgctgagctcagaagaattaaaaaaactcatcgaggaggtgaaggttctggatgaagcaacattaaagcaattagacggcatccatgtcaccatcttacacaaggaggaaggtgctggtcttgggttcagcttggcaggaggagcagatctagaaaacaaggtgattacggttcacagagtgtttccaaatgggctggcctcccaggaagggactattcagaagggcaatgaggttctttccatcaacggcaagtctctcaaggggaccacgcaccatgatgccttggccatcctccgccaagctcgagagcccaggcaagctgtgattgtcacaaggaagctgactccagaggccatgcccgacctcaactcctccactgactctgcagcctcagcctctgcagccagtgatgtttctgtagaatctacagcagaggccacagtctgcacggtgacactggagaagatgtcggcagggctgggcttcagcctggaaggagggaagggctccctacacggagacaagcctctcaccattaacaggattttcaaaggagcagcctcagaacaaagtgagacagtccagcctggagatgaaatcttgcagctgggtggcactgccatgcagggcctcacacggtttgaagcctggaacatcatcaaggcactgcctgatggacctgtcacgattgtcatcaggagaaaaagcctccagtccaaggaaaccacagctgctggagactcctaggcaggacatgctgaagccaaagccaataacacacagctaacacacagctcccataaccgctgattctcagggtctctgctgccgccccacccagatgggggaaagcacaggtgggcttcccagtggctgctgcccaggcccagaccttctaggacgccacccagcaaaaggttgttcctaaaataagggcagagtcacacgggggcagctgatacaaattgcagactgtgtaaaaagagagcttaatgataatattgtggtgccacaaataaaatggatttattagaatttcatatgacattcaaaaaaaaaaaaaanaaaaaanaaaanaaaaanaaaaaagagggggngcgccgcccacaaaagaatccccccggggggcccccagactgacgcgctccccacccttctggtgcaccaagggggcccccacatggggcgaccgctctatattaaagagaacgcgcgaggcgccgcagggcgccgccgcgcttgattataacaacaccgtgccagcgagagagggggacaacactccgcgtaataccgcgcggggccaacacctcctgcgaggccaagagagacaacctcctctcatcgctccggggggagtggaccactaccgtgggcggccccacaaacctcctcccacaa

SEQ ID NO: 673874 - DNA, 2951 bp, Homo sapiens
  misc_feature (2615)..(2615): n is a, c, g, or t
  misc_feature (2622)..(2622): n is a, c, g, or t
  misc_feature (2627)..(2627): n is a, c, g, or t
  misc_feature (2633)..(2633): n is a, c, g, or t
  misc_feature (2647)..(2647): n is a, c, g, or t
gcccaggagagcccacccctcccagagagccgggacagccacccgccgctgagactgaagaaatcctttgagattttggtgagaaagcctatgtcctccaagcccaagcctccacccagaaaatactttaaaagtgacagtgaccctcagaagagtctggaagagagagagaactcctcatgctcttctgggcacaccccacccacctgtggccaggaagcgagagagctgctgccactgctgctaccacaggaagacacagcagggagaagccctagtgcctctgccggctgcccaggacctggtatcggcccacagaccaagtcctccacagagggcgagccagggtggagaagagccagcccagtgacccaaacatccccgataaaacacccactgcttaagaggcaggctcggatggactatagctttgataccacagccgaagacccttgggttaggatttctgactgcatcaaaaacttatttagccccatcatgagtgagaaccatggccacatgcctctacagcccaatgccagcctgaatgaagaagaagggacacagggccacccagatgggaccccaccaaagctggacaccgccaatggcactcccaaagtttacaagtcagcagacagcagcactgtgaagaaaggtcctcctgtggctcccaagccagcctggtttcgccaaagcttgaaaggtttgaggaatcgtgcttcagacccaagagggctccctgatcctgccttgtccacccagccagcacctgcttccagggagcacctaggatcacacatccgggcctcctcctcctcctcctccatcaggcagagaatcagctcctttgaaacctttggctcctctcaactgcctgacaaaggagcccagagactgagcctccagccctcctctggggaggcagcaaaacctcttgggaagcatgaggaaggacggttttctggactcttggggcgaggggctgcacccactcttgtgccccagcagcctgagcaagtactgtcctcggggtcccctgcagcctccgaggccagagacccaggtgtgtctgagtcccctcccccagggcggcagcccaatcagaaaactctcccccctggcccggacccgctcctaaggctgctgtcaacacaggctgaggaatctcaaggcccagtgctcaagatgcctagccagcgagcacggagcttccccctgaccaggtcccagtcctgtgagacgaagctacttgacgaaaagaccagcaaactctattctatcagcagccaagtgtcatcggctgtcatgaaatccttgctgtgccttccatcttctatctcctgtgcccagactccctgcatccccaaggaaggggcatctccaacatcatcatccaacgaagactcagctgcaaatggttctgctgaaacatctgccttggacacggggttctcgctcaacctttcagagctgagagaatatacagagggtctcacggaagccaaggaagacgatgatggggaccacagttcccttcagtctggtcagtccgttatctccctgctgagctcagaagaattaaaaaaactcatcgaggaggtgaaggttctggatgaagcaacattaaagcaattagacggcatccatgtcaccatcttacacaaggaggaaggtgctggtcttgggttcagcttggcaggaggagcagatctagaaaacaaggtgattacggttcacagagtgtttccaaatgggctggcctcccaggaagggactattcagaagggcaatgaggttctttccatcaacggcaagtctctcaaggggaccacgcaccatgatgccttggccatcctccgccaagctcgagagcccaggcaagctgtgattgtcacaaggaagctgactccagaggccatgcccgacctcaactcctccactgactctgcagcctcagcctctgcagccagtgatgtttctgtagaatctacagcagaggccacagtctgcacggtgacactggagaagatgtcggcagggctgggcttcagcctggaaggagggaagggctccctacacggagacaagcctctcaccattaacaggattttcaaaggagcagcctcagaacaaagtgagacagtccagcctggagatgaaatcttgcagctgggtggcactgccatgcagggcctcacacggtttgaagcctggaacatcatcaaggcactgcctgatggacctgtcacgattgtcatcaggagaaaaagcctccagtccaaggaaaccacagctgctggagactcctaggcaggacatgctgaagccaaagccaataacacacagctaacacacagctcccataaccgctgattctcagggtctctgctgccgccccacccagatgggggaaagcacaggtgggcttcccagtggctgctgcccaggcccagaccttctaggacgccacccagcaaaaggttgttcctaaaataagggcagagtcacacgggggcagctgatacaaattgcagactgtgtaaaaagagagcttaatgataatattgtggtgccacaaataaaatggatttattagaaaaaaaaaaaaaaanaaaaaanaaaanaaaaanaaaaaagagggggngcgccgcccacaaaagaatccccccggggggcccccagactgacgcgctccccacccttctggtgcaccaagggggcccccacatggggcgaccgctctatattaaagagaacgcgcgaggcgccgcagggcgccgccgcgcttgattataacaacaccgtgccagcgagagagggggacaacactccgcgtaataccgcgcggggccaacacctcctgcgaggccaagagagacaacctcctctcatcgctccggggggagtggaccactaccgtgggcggccccacaaacctcctcccacaa

SEQ ID NO: 673875 - DNA, 1248 bp, Homo sapiens
tcccagaaaaaaaaccctgtgaaagcaagcaacaaaacattacaccttgtgtgctcaaaaaaaaaaaaaactgcctttaccttattaaaagggcggaaaaatgtggaacacttattccctccaggggggattgtcgtgtaggaacccgtggtttatattctctcatacaagcccaccccgcaaatgtgtgcgcgccataacgcgagaaatatattttttttaaaggagaaaatataaaaacttatttagtttacaaaagaaaaaaaaacaaaaaaaacaaaaaaacaaggggggggcgaccacaaaaatcaccccacgagagagggaccacaaaaaaaataagaagcgacaacacacacgaaattatagtgagaaaagacaggcgggccacaatagtaggaggccacaataaaataaacaaagagagaacgagggaagagcgaacacaaaaagaacagagaagaaaggggagaacaagcacaggagcaaacaagagagcgacacccctctagcgcagcaagacgacacaccatacaccagaagagggcaagcacaaacaaaaacaaggagaccaacaccaccacacacacgcaacataacgaccgccacaaggacaacaaaaaaacaacagcctcaaacgatccatcacaccacgagcaaaaaacaagaagaaagaaaaaatgaaagcagcaagcactaaaagaaaataatggggcaccacaagaagaacacacaaaaaccctaacaaaaaagcatcctccaccaccagcgacacaacacactcaacaccatccacacaagacagcaaagacacacaagacgaacgaaaacaagaaaacaacaaaaaaaaaagacaaaagaagaccagaagtgttacaacagaacaaaaaagaaaaaaagcaaaacgacacgacaaaaagaaacgaaacgcaaagaaaaaaaaaaaaacaacacaacaaaaaaaaatagaaacacccaacacacaccgaacaacaccacaatcgcaggaagagaacaagaagaaagcaaaagcaaagatacgctcaaacccccgaaacacaaaaaaaaaaaagaaaacacgagagacgcagccaccgagaagcgcgaaataaagaacgacacaaaaagagaacaacaaggaacaggaaggggacaagcagaacaagctaccgagagggacacgaaggaaaaacagagaaaagaggcgctaccagagggcggtagcgccacaaaaagataacgacgaaa

SEQ ID NO: 673876 - DNA, 2033 bp, Homo sapiens
  misc_feature (291)..(291): n is a, c, g, or t
  misc_feature (2020)..(2020): n is a, c, g, or t
tttgttttgttttacctgaagtcctacaacctgacttcatctcacactgtccaatatgctgatttctggctgacttcatggcactccccctgcccggctgtggacagggtgaatgagagaggaaaataattatgcttgctgctttacatacatttttttttcttctaagcttcccatgactcctgaaggtccattctttacagatgaggaaactgaggtttgaggaggtgatgtaacttggaggctggccaagctggggtttgagataacaaatcagtctgatgtcagtcngatgttaaattgttcatcctcttgcagtaaaatgtttttgaatgtatgtatttcctctgcagcaattagacggcatccatgtcaccatcttacacaaggaggaaggtgctggtcttgggttcagcttggcaggaggagcagatctagaaaacaaggtgattacggttcacagagtgtttccaaatgggctggcctcccaggaagggactattcagaagggcaatgaggttctttccatcaacggcaagtctctcaaggggaccacgcaccatgatgccttggccatcctccgccaagctcgagagcccaggcaagctgtgattgtcacaaggaagctgactccagaggccatgcccgacctcaactcctccactgactctgcagcctcagcctctgcagccagtgatgtttctgtagaatctacagcagaggccacagtctgcacggtgacactggagaagatgtcggcagggctgggcttcagcctggaaggagggaagggctccctacacggagacaagcctctcaccattaacaggattttcaaaggagcagcctcagaacaaagtgagacagtccagcctggagatgaaatcttgcagctgggtggcactgccatgcagggcctcacacggtttgaagcctggaacatcatcaaggcactgcctgatggacctgtcacgattgtcatcaggagaaaaagcctccagtccaaggaaaccacagctgctggagactcctaggcaggacatgctgaagccaaagccaataacacacagctaacacacagctcccataaccgctgattctcagggtctctgctgccgccccacccagatgggggaaagcacaggtgggcttcccagtggctgctgcccaggcccagaccttctaggacgccacccagcaaaaggttgttcctaaaataagggcagagtcacacgggggcagctgatacaaattgcagactgtgtaaaaagagagcttaatgataatattgtggtgccacaaataaaatggatttattagaatttcatatgacattcatgcctggcttcgcaaaatgtttcaagtactgtaactgtgtcatgattcacccccaaacagtgacatttatttttctcatgaatctgcaatgtgggcagagattggaatgggcagctcatctctgtcccacttggcatcagctggcgtcatgcaaagtcatgcaaaggctgggaccacgtgagatcattcactcatacatctggccgttgatgttggctgggaactcacctggggctgctggcctgaatgcttataggtggcctctccttgtggcctgggcctcctcacaacatggtgtctggattcccaggatgagcatcccaggatcgcaagagccatgtagaagctgcatcttgtttatacctttgccttggaagttgcatggcatcacctccaccatactccatcagttagagctgacacaaacctgcctgggtttaaggggagaggaaatattgctggggtcatttatgaaaaatacagtttgtcacatgaaacatttgcaaaattgtttttggttggattggagaagtaatcctagggaagggtggtggagccagtaaacagaggagtacaggtgaagcaccaagctcaaagcgtggacaggtgtgccgacagaaggaaccagcgtgtatatgagggtatcaaataaaattgctactacttacctaccacatgccangcactgtgctcag

SEQ ID NO: 673877 - DNA, 379 bp, Homo sapiens
  misc_feature (52)..(53): n is a, c, g, or t
  misc_feature (89)..(89): n is a, c, g, or t
cattgaaacatctcagaatttgaattttgactacttctggtgttaacatcannaatgcatttcatgggccgggcctggtggctcacgcnctgagtgcagcactttgggaggccaaggcaggcggatcacgaagtcaggggatcgagaccatcctggccaacatggtgaaaccctgtctctattaaaaatacaaaaaattagccggcgtggtggcaggcacctgtagtcccagctattcaggaggcctcggcaggagaattgcttgaagccaggaggtagaggttgcagtgagctgagatcgtgccactgcactccatcctgggcgacagagcgagtttccatctcaaaaaaccaaaatcaaacaaacaaaaaaacccac

SEQ ID NO: 673878 - DNA, 1746 bp, Homo sapiens
  misc_feature (1733)..(1733): n is a, c, g, or t
gcacagggctggcctctgtgcacgagctccaatctaggacacaattatctttaatctttgttggcctaaaaatcctctagcattgactaaccggttcaatcctcctccagcaagtatgtggactggacttgtgtgatttctggtcctgacttcctttggtttgctcaggttcacagagtgtttccaaatgggctggcctcccaggaagggactattcagaagggcaatgaggttctttccatcaacggcaagtctctcaaggggaccacgcaccatgatgccttggccatcctccgccaagctcgagagcccaggcaagctgtgattgtcacaaggaagctgactccagaggccatgcccgacctcaactcctccactgactctgcagcctcagcctctgcagccagtgatgtttctgtagaatctacagcagaggccacagtctgcacggtgacactggagaagatgtcggcagggctgggcttcagcctggaaggagggaagggctccctacacggagacaagcctctcaccattaacaggattttcaaaggagcagcctcagaacaaagtgagacagtccagcctggagatgaaatcttgcagctgggtggcactgccatgcagggcctcacacggtttgaagcctggaacatcatcaaggcactgcctgatggacctgtcacgattgtcatcaggagaaaaagcctccagtccaaggaaaccacagctgctggagactcctaggcaggacatgctgaagccaaagccaataacacacagctaacacacagctcccataaccgctgattctcagggtctctgctgccgccccacccagatgggggaaagcacaggtgggcttcccagtggctgctgcccaggcccagaccttctaggacgccacccagcaaaaggttgttcctaaaataagggcagagtcacacgggggcagctgatacaaattgcagactgtgtaaaaagagagcttaatgataatattgtggtgccacaaataaaatggatttattagaatttcatatgacattcatgcctggcttcgcaaaatgtttcaagtactgtaactgtgtcatgattcacccccaaacagtgacatttatttttctcatgaatctgcaatgtgggcagagattggaatgggcagctcatctctgtcccacttggcatcagctggcgtcatgcaaagtcatgcaaaggctgggaccacgtgagatcattcactcatacatctggccgttgatgttggctgggaactcacctggggctgctggcctgaatgcttataggtggcctctccttgtggcctgggcctcctcacaacatggtgtctggattcccaggatgagcatcccaggatcgcaagagccatgtagaagctgcatcttgtttatacctttgccttggaagttgcatggcatcacctccaccatactccatcagttagagctgacacaaacctgcctgggtttaaggggagaggaaatattgctggggtcatttatgaaaaatacagtttgtcacatgaaacatttgcaaaattgtttttggttggattggagaagtaatcctagggaagggtggtggagccagtaaacagaggagtacaggtgaagcaccaagctcaaagcgtggacaggtgtgccgacagaaggaaccagcgtgtatatgagggtatcaaataaaattgctactacttacctaccacatgccangcactgtgctcag

SEQ ID NO: 673879 - DNA, 102 bp, Homo sapiens
ccgactacttctgtatgtggaatgcacaaatgtgtggtctgatgctgtaaggagtttaggttgtatgaattctacaacccatatataaattttactctatac

SEQ ID NO: 673880 - DNA, 469 bp, Homo sapiens
ggtggtgttcggcaaaaggtggccctggtggcattcggggagaaaaaggtggccccatggattctggtggtccccgtggaattttcaaaggtgcccctggtggaaacaaaagtggcttccctggtggcccgggcaaggaccaaggtggcttttgtggaaaaaaaaaaggtggccctggggggccccccggcccttttttggaacaaattggaggaaaaaaaggaggccctgggggcccttgaaaaattgataaaggcgggccccctccggagcccaaaaattggccctttttaattcaaaacccccccaaaggcgccttggccccccaatttttttttttaccccaaaaatgtttttaatttttaattcccttttttaaattttggccccccccttataatttttccctggtgggcccttagaatttttccccctttttgaaaaaccctttaacccagtttaatggtta

SEQ ID NO: 673881 - DNA, 823 bp, Homo sapiens
cgcctgcctgcctgccctgcggtcctggtcctggctgccctgcgcagaaccagactgtctagagctgccctgggcagctggtggtgatgcatgccgagctgggcttcctgcgagcctggatgaagtgcacatgtgcctgtccctgggtccctggcaggtctcgctgcgtctgttcccaagcgctctgcgatggcctaaaaatggagtgagcaacctgtccaaaatccctgcatggacatggaaaatggagtgggaaatctcgacatggaaaaaccctacaataaaaatgaagtgaaacctggaaaacgatggtgaaatgccacgaagatgaatgtagagcctgatgatgaaggaaagtcagacgaggaagaaaagccagactgtggaggggaagacagaatgcgagggaaagagagaggatgagggagagccaggtgatgagggacaactggaagatgacgggaagccaggaaaagcaggacaggtccgaaaggttgagggcaaggccacaatggcgagggcaaagccatgctcccagggcaaatgccagagagccagccgcgggccgcgaaaagcgcccggctgaggattatgtgccccggaaagcaaaaatggaaaaaactgacagggtggacggacgaattacccccaaggaactctcaggaggacttacaggaaatgcatctgagcagttagggagatattaaagactgtggcgatgtgtcagggctcaaaggactaggaaaaaccgaaacggtgtttcatggatcaaaagattcaggatccttcgccgaggacagggtcaggataagggagaaagcag

SEQ ID NO: 673882 - DNA, 3358 bp, Homo sapiens
  misc_feature (2258)..(2258): n is a, c, g, or t
  misc_feature (2263)..(2263): n is a, c, g, or t
  misc_feature (2267)..(2267): n is a, c, g, or t
  misc_feature (2276)..(2276): n is a, c, g, or t
  misc_feature (2287)..(2287): n is a, c, g, or t
  misc_feature (3345)..(3345): n is a, c, g, or t
gcccaggagagcccacccctcccagagagccgggacagccacccgccgctgagactgaagaaatcctttgagattttggtgagaaagcctatgtcctccaagcccaagcctccacccagaaaatactttaaaagtgacagtgaccctcagaagagtctggaagagagagagaactcctcatgctcttctgggcacaccccacccacctgtggccaggaagcgagagagctgctgccactgctgctaccacaggaagacacagcagggagaagccctagtgcctctgccggctgcccaggacctggtatcggcccacagaccaagtcctccacagagggcgagccagggtggagaagagccagcccagtgacccaaacatccccgataaaacacccactgcttaagaggcaggctcggatggactatagctttgataccacagccgaagacccttgggttaggatttctgactgcatcaaaaacttatttagccccatcatgagtgagaaccatggccacatgcctctacagcccaatgccagcctgaatgaagaagaagggacacagggccacccagatgggaccccaccaaagctggacaccgccaatggcactcccaaagtttacaagtcagcagacagcagcactgtgaagaaaggtcctcctgtggctcccaagccagcctggtttcgccaaagcttgaaaggtttgaggaatcgtgcttcagacccaagagggctccctgatcctgccttgtccacccagccagcacctgcttccagggagcacctaggatcacacatccgggcctcctcctcctcctcctccatcaggcagagaatcagctcctttgaaacctttggctcctctcaactgcctgacaaaggagcccagagactgagcctccagccctcctctggggaggcagcaaaacctcttgggaagcatgaggaaggacggttttctggactcttggggcgaggggctgcacccactcttgtgccccagcagcctgagcaagtactgtcctcggggtcccctgcagcctccgaggccagagacccaggtgtgtctgagtcccctcccccagggcggcagcccaatcagaaaactctcccccctggcccggacccgctcctaaggctgctgtcaacacaggctgaggaatctcaaggcccagtgctcaagatgcctagccagcgagcacggagcttccccctgaccaggtcccagtcctgtgagacgaagctacttgacgaaaagaccagcaaactctattctatcagcagccaagtgtcatcggctgtcatgaaatccttgctgtgccttccatcttctatctcctgtgcccagactccctgcatccccaaggaaggggcatctccaacatcatcatccaacgaagactcagctgcaaatggttctgctgaaacatctgccttggacacggggttctcgctcaacctttcagagctgagagaatatacagagggtctcacggaagccaaggaagacgatgatggggaccacagttcccttcagtctggtcagtccgttatctccctgctgagctcagaagaattaaaaaaactcatcgaggaggtgaaggttctggatgaagcaacattaaagcaattagacggcatccatgtcaccatcttacacaaggaggaaggtgctggtcttgggttcagcttggcaggaggagcagatctagaaaacaaggtgattacggttcacagagtgtttccaaatgggctggcctcccaggaagggactattcagaagggcaatgaggttctttccatcaacggcaagtctctcaaggggaccacgcaccatgatgccttggccatcctccgccaagctcgagagcccaggcaagctgtgattgtcacaaggaagctgactccagaggccatgcccgacctcaactcctccactgactctgcagcctcagcctctgcagccagtgatgtttctgtagaatctacagcagaggccacagtctgcacggtgacactggagaagatgtcggcagggctgggcttcagcctggaaggagggaagggctccctacacggagacaagcctctcaccattaacaggattttcaaaggagcagcctcagaacaaagtgagacagtccagcctggagatgaaatcttgcagctgggtggcactgccatgcagggcctcacacggtttgaagcctggaacatcatcaaggcactgcctgatggacctgtccccggganaaaantttnttgggttgntcccaactttnccagagagaacgattgtcatcaggagaaaaagcctccagtccaaggaaaccacagctgctggagactcctaggcaggacatgctgaagccaaagccaataacacacagctaacacacagctcccataaccgctgattctcagggtctctgctgccgccccacccagatgggggaaagcacaggtgggcttcccagtggctgctgcccaggcccagaccttctaggacgccacccagcaaaaggttgttcctaaaataagggcagagtcacacgggggcagctgatacaaattgcagactgtgtaaaaagagagcttaatgataatattgtggtgccacaaataaaatggatttattagaatttcatatgacattcatgcctggcttcgcaaaatgtttcaagtactgtaactgtgtcatgattcacccccaaacagtgacatttatttttctcatgaatctgcaatgtgggcagagattggaatgggcagctcatctctgtcccacttggcatcagctggcgtcatgcaaagtcatgcaaaggctgggaccacgtgagatcattcactcatacatctggccgttgatgttggctgggaactcacctggggctgctggcctgaatgcttataggtggcctctccttgtggcctgggcctcctcacaacatggtgtctggattcccaggatgagcatcccaggatcgcaagagccatgtagaagctgcatcttgtttatacctttgccttggaagttgcatggcatcacctccaccatactccatcagttagagctgacacaaacctgcctgggtttaaggggagaggaaatattgctggggtcatttatgaaaaatacagtttgtcacatgaaacatttgcaaaattgtttttggttggattggagaagtaatcctagggaagggtggtggagccagtaaacagaggagtacaggtgaagcaccaagctcaaagcgtggacaggtgtgccgacagaaggaaccagcgtgtatatgagggtatcaaataaaattgctactacttacctaccacatgccangcactgtgctcag

SEQ ID NO: 673883 - DNA, 236 bp, Homo sapiens
ggtcgaccacgtctgtaatcccagcactttgggaagcacggctggtggattgctcgagtccaggagtttgagaacagtccgggcaacatggtgaaaacctctctctccaaaaaaaaaagaagaaaaagagccgggcatggtggtgtgtgcctatagtcccagctacttgtctattctggacatttcaaaaagaaatggagtcatccgttgtgtgatcctttgtgcttggcttcttt

SEQ ID NO: 673884 - DNA, 305 bp, Homo sapiens
ttgtagtccagcactttgggaggcgcggcgggcggacacgaggtcaggagatcgagaccatcccggctaatacggtgaaaccccgttctctactataaagtcaaaaaattagccgggcatgtagcgggtgcctgtaatctcagttactccgcgaggctgaggcaggagaatcgcttgaaccctggaggcagaggtggcagtgaggcaagattgcgccatcgtactccagcctgggcgacagagcaagactccgtctcaaaaagaataggagacacagtgagacgaccattagaagccacggtcaa

SEQ ID NO: 673885 - DNA, 507 bp, Homo sapiens
tagtatatagccaaagtataataagtgcagtcacattctggatcttcagttgctcatagcagcaggataaaactaagacagaaaacagttgtattttcattcttaaaatgcaacaatatctaatgaaatgtataccagatccttaacggttcctcctctatgtaggataaatgagaacagattaataatagacaaacagggtaaactaaaggcattcattcatatttacatattaaaaccacttttgttaacaccaaatctttacatctagcaaaagatataagcatataaagaataaagcagacatcactaaagcagtatccatttacagagccttagattagcacctgaggaaaaaagggtacatggaaagctatgtaatttgccctcaagttaatttgttggcctggagattacaatgccttggaatatgcactgaaagttaaactaaattggaaaataaatgtttgtagttagtttaataaggctgtagaaaagagatacttg

SEQ ID NO: 673886 - DNA, 424 bp, Homo sapiens
ccacttactgcatgtgtcttacctgaagctttgacattctttagaatgttactggcagaacatattgtttgcggtttcacattctgtttccagtgtcgccatataattgctccctagctctgtagaaaacatatttttgttttggacgtgcacgcatgcacttgtctcaaaccaaacaactaacgcaggagtggagatagagcatgatctcttggacttcggtgtctagtgcagtagtagttagaggtcagagttcagaataaatgacttttgtgtcctgtctgggaatagaatttgacaacgtagtgagtaatttaggaagtggcaaagttgtgtttctgtctctaagtccagtattcactttcatagccaagaagctgtctgtatagtttagttcacaggaaggaaataaaaggatcagggc

SEQ ID NO: 673887 - DNA, 344 bp, Homo sapiens
cgggaaacgcacggagggaactcaacggaccacctgctcacggcccagcctggagaaaaagaaaagctacagcgccaggtctgaaggcagacaggtcggttagctctacagaagataaacatcctttctacagaggatcaggaaggcaggagcacacggcagcaaggggcaggctggaggtcacgagttagtgactcttctcagcagcgaggacagccctgaggtcccctgctggaagaggtctcgttacatctcaatgaggcgtgcagtctcacgctggccggacagtacagcaccgagtgtgatggaatagtacttgcggagggtggcctcaccggacaaca

SEQ ID NO: 673888 - DNA, 118 bp, Homo sapiens
aaagggtttttaaaacgaaaaaaaatgttaaaaaaaatttgaaagctttggaaaacccaatttggaaaatccttggattttttattaaaaggtttggaaaaaatttttaaattatcca

SEQ ID NO: 673889 - DNA, 458 bp, Homo sapiens
  misc_feature (64)..(64): n is a, c, g, or t
  misc_feature (182)..(182): n is a, c, g, or t
  misc_feature (228)..(228): n is a, c, g, or t
  misc_feature (278)..(278): n is a, c, g, or t
tttttttaaaaaaaaaaaaagggttaaaagatgttaattgtgtcaaagtaaaggcacttgtggntcctcctttggctgttttttccattccaggcaataataagggaacccttttgattgttttagaaatagggcttatgttcttagaagtattttttctggtggttatttaaaactttttncaccaatttatgagctatataattctttttccatttgccagtaaanctttaatatgtagacagttccacgcttttaaaattatgtagaatctcaanagttaatgagcatggttttgtgctggcaagagaagtcttttgttatgcattttctaaatcttatttttgtgtgtgaacatatttaaaaaaacaaacatcacttaccctaaaatctaagcctcagtaggaacgtgcttttggccctttttatttccattgaaatatacttaaattatctct

SEQ ID NO: 673890 - DNA, 155 bp, Homo sapiens
gcctgacccttacaagacctgtacccaggcagaagcaggaagcagcagaagcaggaagcaggcagaagcaggaagcgcttcctgcttctgccgcttcctgcttctgcccctgctctgctgcttcctgcttctgccccagtggtcttgtgtgagag

SEQ ID NO: 673891 - DNA, 160 bp, Homo sapiens
tagcagaggacacaaatttatttccacatttgtcagtcgccttacaagtatcctttgttcccccagaagtaagagaagtcctagttttttcccgatgtaagaaggtttgtcatgccctcgtgcactacacgtctctagatacatgtgtttctccagcgtg

SEQ ID NO: 673892 - DNA, 393 bp, Homo sapiens
ttacagatagaacttgagctcggtaccctcgataagggccaaagtccttcctcactctggctggtccaacacacaggaagtgaggtgtatcgggaatgggtaggggtatggtggagcatcagtgtgtgtcacgctgacgggggccgtggggacaggcgccaaggaggccagtctcacaaggtgcatctctgtcatggtgtgaaagatggtagttaggcctgggacacacccctgtccgacccttatcgggtgtagtctccatacatgcacgtcgagcctgcacattctggccgcatcatctgagccgcctcctctgagaggcagggcagagacagggccgaggggcagtggagatgggaacaggagcggggctcagaccatgaaaacattgga

SEQ ID NO: 673893 - DNA, 403 bp, Homo sapiens
agcgacggctacacggcagtatcaaggtgttgatcagagctacagtcatctcaaggctggggcaggggccattgcccagctcacttttggagcacttggagacctagacctcagtttcttggtgactactggccaaagtcatcaggcctgtaccatggagatctctctgttgtgcagctcacaacatggcagctggctcaaaaatgaaaagccattaggaaatgccactgcttaatgttcaccatactctattcaatgaaagaacactgtaaaggcagctataatggaaaaaatacaaatcattataaacagaagaaaaaaaccagtgagtcactagatcttatacacactcaaggggaggatgttccaccaaggctgcgtaggataaatttcccgggtaccc

SEQ ID NO: 673894 - DNA, 172 bp, Homo sapiens
  misc_feature (1)..(1): n is a, c, g, or t
  misc_feature (77)..(77): n is a, c, g, or t
nctgccgcatctctctttatttattcttttttcctgtggtgcctgcgaatttattcagttcttcattctcttcatcnctatctgcgctacggggggctgctgacatccaaaactatgtcccttttaggggctactcggagaaaattgcggcattcaaaagtcaggtgaccag

SEQ ID NO: 673895 - DNA, 491 bp, Homo sapiens
  misc_feature (26)..(26): n is a, c, g, or t
  misc_feature (162)..(162): n is a, c, g, or t
  misc_feature (243)..(243): n is a, c, g, or t
  misc_feature (380)..(380): n is a, c, g, or t
  misc_feature (447)..(447): n is a, c, g, or t
  misc_feature (481)..(481): n is a, c, g, or t
agcaacgaaggcccattttccaaacntcccccaaaaaattccttcaacttgccccgaaagattcggccttggcacggttgcttaaaaattcgcggctttgtttccttcccaaatgccagcaagtttccatgtaaaacttgttgttcggggaagaaccaggcntccgattgccgcgttcattttcaacccccggttgacacgtcggaaggtggtcttcaacagcaaggaccaagcttcctgggncgcgaggagcgcgggccgggcgttcctttccagcgcgggcagcccttcgaggtgctcatcatcgcgtcagacgacggcttcaaggccgtggttggggacgcccagtaccaccacttccgccaccgcctgccgcctgnccgtgcgcctggtggaggtgggcggggacgtgcagctggactccgtgaggatcttctgagcagtaanccaggcggcccggggccttggctggcaaataaangttagcccgc

SEQ ID NO: 673896 - DNA, 260 bp, Homo sapiens
tattcgcgaccgcgtcgaccgctgcaccagcggctcggccacacccagctcgttgacgcggttacggaccgtggtcaagttctgcttgatggagtattcgcggatttccgccagcttggccggggtcatcgccagacgcagtaccggctgctcgccgaggtcggccgttacaatgtcgaaatcgttgaagttcttgcgaatcagcgcacgggcctgttcacgggtatccgcgtcagcaaagcccaactggatgtcgacgc

SEQ ID NO: 673897 - DNA, 333 bp, Homo sapiens
cttttactaggaacaggttcattcccttaccctgttgaccaaatactgttgcatgtacacgtgtttaatctcgtctctcttcataatttccagctccacatccgttggctctgctttttcaaattccaaacactttggtatatctaggctgaatgttgatgcctttgatgatctagatattgaatcacgggttgtcaaatccccatcctttctagaagagagtttgaggaatcctccaactgggcctccagaccctgtctgttccactccgggggacttttcatctttacttttcatttgctgttgcttaaaatttaggagagtttcttcacc

SEQ ID NO: 673898 - DNA, 151 bp, Homo sapiens
cgagctgctaatctcagggcgagcagccaactcaggtgctgctcgcccctcagttaggtgcatggtcgcccctcatcttgggtgctcgcctctgatttgttagctcgggccttagtttgtctggtcgtcccctgagttaggtgctgctcgc

SEQ ID NO: 673899 - DNA, 404 bp, Homo sapiens
ctgcgtttcgaagattgtgtggcactgtatgtaatgagacatctacctgtagcatcagaagaactgatttcacagccagtttcgtgggtcagcatggttaaaacttcagcacggatcctgggctcttaggctatccacgacttagtaccccaggacagcaacagcttccaacgtaggaagaatcttgagtatcaccaccaggtcagccacattgtgtcctgtactcatagaccccttattatagagatcccacctgtcgaacttcttcaatatgcacttcaaatgtccctggagccacaatcagattctcaatcacatagtatattatggtcacaagagacaggatagatgcctgttcagcacaatagagagccaggtcatgatacctctacagcaaggcctca

SEQ ID NO: 673900 - DNA, 289 bp, Homo sapiens
accttactactatggctaggatctgataaagtatctgtttccatgtgtaatctcagcttaaataacctatggtgcattcagacgatggaatattattcagtgctaaaatgaaatgaattacacagccatgaaaatacatacagaaaacttaaatgcatatactatgtgaaagaagacaatctgaaaaggctatttaccttacggttgcgattatatgctattgaaacttctaaaactaggagttttagaagtttcaataagccctagttttagaagtttcaatagcaca

SEQ ID NO: 673901 - DNA, 263 bp, Homo sapiens
aaggcaaaattaccgaatgccctttttaaaagtatgctataaactatgctcctctcatccagggggcccattttttaaaatctccagagttgcttacatttagattatccagcccaatcataaagtgaatgcccacccctttgaatgaaattgtggcccaaaatctgtccaggttggtgtcccgtgtaaagtggggatggggtaaaagtggttaacgtcctgttggatccccaaataaaggttccagttttgtaacaaaaaaa

SEQ ID NO: 673902 - DNA, 116 bp, Homo sapiens
ggggcccaggtcccaagccagttttaaagtttggtttttttgttaaatttggaaattggttttggttttccctttgttaaaggtttacaatttttaagtaacccttttttttccta

SEQ ID NO: 673903 - DNA, 3850 bp, Homo sapiens
gacaaatccaactatggttaactgttctttacactaagcaccgcactgagagcaacacaaacaaaactgcaggtgaaggtgtctgcagcacacacagtgagaattcgccctagaaagtacaggatatgtaacatgctgcgggacagatgcagagaggccactttccctctgaagaggaatcacacaccttagcatgtgcctgacaaaaggtattcccttttctctgccagtcccggaatttaacattagcctccaccaaaaagccgtctgattcacttgactgagggcttcactgcttccactggacagaaaaagcaaactgaacatgaagcaaactcagaaatcaaacagctgctctgatggcacagccgggctccatcacacaggcatatttttgaagcataattaatatcaaacgtcaagggtggcaggacagggaggatttagttattctgctacttacactgtcattatgcgttttagcctcttcagaaatgaggtttcttcatcacgtcttttgaaatgcttcataccatcaggtatgatgttaaggaaaaacatctaaattggtttttgtttgaagcatgaaaaagggaaattcatgtttcaggaagcaaagtttttctattatcaacaggttaatgtgtttggtagatcaatgtggatttcggcaatggccggcagaaactccaaccagaaagacccctgaactttactgactttccctggaggccagaggaagtcagagccttggagccagtcagtgcaaaggtggggctggacagggcaaggtactgaaagcagaggtggcgggaaggggaaagctggagaaagacaggaggaaagagggccatgggagccggaatccgaggagaggtttaggctatagggaggcgagcaggtgagggccagagaaggggttctcaaactggggtccccagtggaatggcctgggaagcttcaaaactccccatgcctgggttccgcccacagggactctggtgtcactggcgtggggtgcaggaatttatcctgcctgcaggtgattctatgggacaggcaagttaacaacaattgactgtaagagaatgatgcaggcgtaagtggcagcccccacaagcgtgcctggaaaggagctgcaggtgaggacagaggccccagtgttcatgtgacccgcacaggccaatcctgcaaagcagatctgggataagaataaggaatgcctgaccccagagaccttctctttcaactgaagccctctgacagccagctcaatcccagagtgtcccatctgctcagagccaaaaggagcccagaggttcacagcgtgtgcccaggacagccgccagcctcctgtctgcagaaagatggagaaggttaaacaggtcccccacaacccttccagagcagggctgacagccctgaagtgaggctgcacacacagcttcccagtgatgttattaggagcagctgcacagcttcccagtggtgttattaggagcagcgcttatatttttccataatccagaaaaaaatgtcaataaataggtcttttatgacttggctttaaaatttgtagagggccaaacgccagtcatgatcatgccgtaccataccagtgtctgataaaaagagactgattctgccatccccccaagattgatggccctcaaagaaaacaaggaagaccagtcaataatgacctacttagggggcattttcaaagaaaaataatggtagaacttcatgctgttgaatgactcctatttttgtaaaaatggaatgctgaaataagtcacaaagatcaaaagactttttaacaaaatggcataacatttgaataatctgaatttgacacacagaaagcatttcaatgttatttaaaatagacgtctacctgcttaaacggtatttaaaatgcaatctaattgtgagaaaaaatggaaggaaaggcttgtacacatatttcagagtcagagaatgcattaaaactatcacaagaaaataaaggaattgttatttatcattactaaaaatcaactgtcagtcactcagacaactactgttgaagttgtcaaaacatttctttatataccttaactgggaatttttatcattgatttcaaaatgcagaattaaagataaaccctaattactgtataaaagatactatcaccttcagaaatgagtctgtgggagctttatgcacactccatatgaacttacagatttgcaaagtggaagatgtggccaagatgcatgtttttcaataaagatgttgttcttataaaaaaggtagaagcataacaatatgagctcacttgggaagaataaactgcaggtggaaaaggatgaaaaacaggcagtggatctaaatcttcccaatgtgccacatagttcattagatgccacatttgactgtgaaattaaattaagactaggcttctagctttcctttaaataataaaaactttagttacttgatttaccaggcttttcatgctcacttgaaccatctgcaaaactgttacaaaggtgagcttgaacttgagttccacgtgtcaaaacaattacagttactattttataagcaagttcttcagaagataaatcctctcgaataatagctaagatttatcttatccatgttgaatttctttgaattttaacttatttaaaaggaaaatggcagaaaaggttaatttggatgctgccaaacatgaacaaaaggaagacagaactgtaggaggggctatgacttcaaggaaggcggagcttcctcgggtccatgacacaatactttgagaagtcactgttcatttcacatacaagtttagatatcccaggattacattttcccctacaattagctgtgggctttatttttgccagtctgaaagtagaaactcctaggttcattctatgagaacgtggttacagaaaatgaatcttgcccaaaatgtattatggaaataatacacagatatcttccttattgaatactgacagcagttcagctttaaaagaaaaccaagtatgaaattggtcatgaggccatgaattttatttgtaaagatgatcaagtagaaccaaagttaagcaaacacctctgaccaaaagtagggccaggttttgacaacggatacataattgctcagacgtgagggaaccttcatataccactgggaggaatacaaaatgccacagttgttttggaaaacagtctgaaaactcttccacagatgagaagcagagtgaccatgtgacatagcaagcccacccaagtacatacccaagagaagcagaaactcaggtccacaccaaagcttgaacaccaccgtccacagcctcaggattcataacagccaagcttaaagacaaccagaaagtccatccctcatgagtggataaataacatgttgtagccataaaatggaatattattcagcaatcaaagaaaatgaagaactgattcatgcaaacaacaaaaatgaacccccaaaacatgatgcgaagtagaagaacccaaacacaaaagaccagacgtcctatgttatgtgtatataaagcatcagacgtcctatgttctgtgtatataaagcaccagacgtcctatgattctgtgtatataaagcaccagacgtcctatgattctgtgtatataaagcctcagaagtcgcaaatccagagaggcaaaaagcaggtccctggtggccagggactggggcagggagcatgcaaaatggctgtaaatggcttctttctggggtgatggaaatggtctaaaacctattgtgccaaaggctgcacaactctgtgaatataataaaaacactgaatcacacccttt

SEQ ID NO: 673904 - DNA, 94 bp, Homo sapiens
tcaaattagttatgacactatcccacactgaataccaccatttgccaatttattaatcataaaataacaataaatctctagcttttacaaaaaa

SEQ ID NO: 673905 - DNA, 145 bp, Homo sapiens
  misc_feature (54)..(54): n is a, c, g, or t
gtgtgagccaccgtgcctggccgtgattattgaggctttagctgagcgcagtgntgtaagcctgtggtcccagctacttgggaagccgaggtggtagggttgcttgaggccagcctgggcaacatgatgagaccccatcgctacc

SEQ ID NO: 673906 - DNA, 277 bp, Homo sapiens
ccttgcatgtactgcttatgatgccctagaaactgtgtgcttcctgggcctgttcctccaagcgctctaccctgaaacccataatccatttaagaaactggcaaatgaaaaatcttaacaactactgaatattattctgcctgtctgtgtatttatatgggttgtgtgtgtgatatgaaagcattttgattaacgtggtttaaaaataataggtgcttaaatcaaatattgtcagaaaagtaaaaagtataaatgccttttagttcatgagacttaa

SEQ ID NO: 673907 - DNA, 530 bp, Homo sapiens
aattttgtaacatacaaaaccactgtatggctaaagtcttactgagccaaaaagggaacacagcggtatctccgaattttacacctactgttccctcatctttacggatcattagtgatgaatgcagcagaatttgagaaagtcttcaaagcaagtagagtctatcagtgctttaaacatcatagaaagactttgtattccgaggtcatataaatcaaagcaacaagctttttaaacaaaacagagtaactgtcacaaaagcaatggtacaagcccaggaacaaacaatactttgagtggctctgtggggaatgagaagggaactgttccattaaccactcactagagtagggtttctccagctccattctcagttgtgaagggcagcagagttcctgggccccatggctgtacagacgcctacctcacagagtctgtgcacaggagagagcggaggcgtctcacaagctttgtgatctggagagtttgttcagcatttattctttggaataaaaatagtttatctaaaa

SEQ ID NO: 673908 - DNA, 725 bp, Homo sapiens
taggctaggtacgaggctcggttttaatcggccgagggaagggtcagctgggaggcctgagggcgccgggcgctgcggcaggcgggcccggggtccagccgagagggtccgggcgccaggcaacgctgattcccgcggggtgaacccggggagggggccggcctccccgttctgggacctttcgctcccctgggacctgtggcgccgcccacagaccatgctcctggggcgcctgacttcccagctgttgagggccgttccttgggcaggcgtgcgccgccttggcccgtctctggagtgctgggcagccgggtctgcgggcccctttacagcacatcgccggcggccaggtagggcggctctctccctcgcaagggggcccagctggagctggaggagatgctggtccccaggaagatgtccgtcagcccctggagagctggtcacgggccggtgtgtttctgtgccagacatgtgagtatcgggagagcggggggactgttgtgtctccagcgaaaattataccagtgtgcgacgcagccaatataggggaaggggccgagcagggggatgaaggcgtcgcggatgcgcctcaaattcaggtgcaaaaacgtgctgaagatccgcggcggaagatgaaccacacaagtaccggaagctggtgaaagaagacgcgggttcctgcggaggaaggtccagggagggacgccttgagacgccaaggc

SEQ ID NO: 673909 - DNA, 190 bp, Homo sapiens
tgggctggggaagagggctgggggaagaggggagacagaggcacggagagaaaggaatgtttagcacaagacacggcggagcgagaccttggttcactggtttatctgctgaccttccctccactatggtcccatgacccggccaaatccccctctgtgagaaacacccaagccctcttccccagcccag

SEQ ID NO: 673910 - DNA, 602 bp, Homo sapiens
cacactgccacaacgcctggctaatttttatatttttagtagagacagggtttcaccatgttggccaggctgttcttgaactcctgacataaggtaatccacccgcctcagcctcccaaagtgctgggattacatggcgtgaggcactgagcctggcctatttgtggttttttatattgggtttggtctctggttttggttttggagacggagtctgtgctctgtacgcccaggctagagtgcaggaggcgcgatctcgggctcactgcaaccttccgcctcccagattcacaccattctccgtgcctcagtcctcccgagtagctgggattacagggtgcccaccacacaagcccagctaattttcggagatctccaacgtcacagacggggttctgcaccccatgggttaaagcccagcgacggtctccacatcttccccgggacccctcggtggatcccacactggcactcgggcctcaccaaaaacaattggcggcgtacagaactaccaacgagaaacagcgaccctcacgacagtgtccgcccagagagggacacgcgcaagggccggacaaacccggacccccggaaacccccgc

SEQ ID NO: 673911 - DNA, 529 bp, Homo sapiens
  misc_feature (25)..(25): n is a, c, g, or t
  misc_feature (30)..(30): n is a, c, g, or t
  misc_feature (77)..(77): n is a, c, g, or t
  misc_feature (83)..(83): n is a, c, g, or t
  misc_feature (120)..(120): n is a, c, g, or t
  misc_feature (123)..(123): n is a, c, g, or t
  misc_feature (333)..(334): n is a, c, g, or t
  misc_feature (343)..(343): n is a, c, g, or t
  misc_feature (345)..(345): n is a, c, g, or t
  misc_feature (366)..(366): n is a, c, g, or t
  misc_feature (374)..(374): n is a, c, g, or t
acggttcttacttggaaaaccttcngcagngctggatacaggtgtgaccacacgctgtgaatgagtcttgctgtgtngcctangctggtctcgaactcctggcctccagcctcggcttancanagtgctgggattgcagatgtgagccaggagactcacatctcctgcatccattaaacatagcttacttgttgattgggagatgtgcacaatattctgctaatttgtacattttaaaaagttacatagatgctgttgttccaggggcactggagacagttatgccaggtacaactatgtacagtgattctatattagtttcagtgtatcatnnagcaacttntntctattaacaaattgcttganatatagtnctatagagcatgtggtttagcaaaattagggaataaaccaaaaaagagaaaagcttcgtgtccaggaaatggaggatcaaatattcatagaaaagtgaaggaacaggaagacaattgtgtgcctgtcttaggcaacaaccagttcacattggtgc

SEQ ID NO: 673912 - DNA, 184 bp, Homo sapiens
actgccttcacgggttgacggtgactgactggacggtggcgactttggtgcggggaacacttgttcacggtaactacgcttttctacgtcacggttacggtctaggacggagtacggcggcacggtttctggctcgtaacacacggcctagactacggggacttgtgcggtagtgtgactgcta

SEQ ID NO: 673913 - DNA, 349 bp, Homo sapiens
ttggggctttgggttaaaaagtaaattaaaataaaccttgggttttattaaaaaagaaaaggtttttccctttgaaaaaagtttgccccaaaaccaaaaaagttttaaaacggggggtaaggggcttccccccattttggagcaaataacccaaaagggttggtaaaaaaaaaataaaaataacccggtttaagaaacccttgttaacccattgtcagggccccctgtaaaaaaccctttttttggtttgtttggaaaaaaggcaaaggggttttaaccaaatccccttgaaaaggtgggatgggggatttttgggaaaattttcccaaaaaagggttaccagacccca

SEQ ID NO: 673914 - DNA, 206 bp, Homo sapiens
aggatcacagatgacaacctttaaagggttgtattaaccttaaaatatattttttaaacattggttataaaatttctaatactttcttttttggtgactcaggggaaaatataattcttataaaaagttcaaatgatttacagaataccaaaaagtggatggagatgatgagtgattaaagggaaggatattgctacatagatatg

SEQ ID NO: 673915 - DNA, 1160 bp, Homo sapiens
gatataacaattacacaaatgcaatttaatgaatatttatatgattatagtcaaaatcaagaaaatagaattcatttagatgattggactgcttttgatgaatattattatgaattattaaaaaaatatatcaaggaaaaagtcactaatactaatgaaaaaataagaatttatttcttgcctcattatgataataaatattatgcttttagacttaaatatgaaagtgaaaaagaagctgaaagagaattaggtaaagaagaatgatttaaaaacctaatgtggatttaggaagataatcaaattttcattttgaatttgacatgaagactattatccatttttcgctaaaggtttaaataaatgctactaatttaagaagcatttaaaaacctggttttaataatgcttaacaaatattgaaaaagaattaaggaatagtaaagaccaacaattgaagaaagtgagaagcaattggtttattttaaattaaacaattcatttttataaaatccatttcagtcctttacaaggacccaattgcttaaggcatttaattgacaaaatttaaataaaagtggatattttaagtattccaaaaataaataattgttgatttttcaagatacttaaaaattacaattttgaaattgtttcaaataaaagttttcaaaagttagcaaaagaaaaatataatgaattttagctaaatttcaagatttaaaaattaataaaatttttgctaaggatcttcagcttttttattcaagtaatgactgtgaaactataaagattttagaattctatatttatctttataaagcactttattgactttatcaagttttatatcattagcatatagtaaagaagatgctttaaataaatgtatcaacattaaagactattgtcacgagtattgaaatgaacaatttgttccatgttttattttcaataatcccaaatttgagttatttagtgatatttatacttctataacaaaagtattaccttatctaaataaaactaaagaaataagtgattctaaaactagcgatttagttaattcatttaaggttgaatcttattatgttttaggtttaactattgcattattgtcttatttaaaattcttaacaatttgtcaagttaataaagtt

SEQ ID NO: 673916 - DNA, 204 bp, Homo sapiens
ggccatgcccctgagcgagacgtcagcgccggcaacgtgtacgccaacaacgggacaactccatggcccgccgccggggctatgaccaactgcaacggcaacatgcgtggctgcgacgactacctgccaacaccttccctgcccgccagttggctggataaaccctttgccgactatagccaggaactggcaagcctcaagggc

SEQ ID NO: 673917 - DNA, 929 bp, Homo sapiens
tgtcttgacaaaaaaaaaaaaaaaaaagagaaaaaaagaaaatgctgttggtatttggtgggtctaataaggagttcgggatagcctgtggtatttggcctcatgccaggcccctgaagctgccttgggagaagatgctgattggtccttgtccagagtactggcttttggcacagtgacaggctgctgggacagattgtcctcctgtggcatcttggtggatgtttagtaccaatgatgacacgggaactcacattcacttgacaccgctcttcatcttcgtggtaagtctcttgaagagcatttttttggtacttcttggctgattgacctacctcttcataagccaaggtgaaaccaagtttgacgaactgcctaggactttccacgtgttggctcacatacattgagtgatttctgtcacgactctggggtgtccaaaacacacgtgactttaccagtgtattgtcagaacctccttagtgatcgcattgtccgtgacagttaagctgatggcaaacagactattaactatgtgacttggagcaaacgcttgtagtgtcagtggatatgtcctggagaaaatttctttacccactctggattggggcaggcccctttgactcaccgtgattcatgaccaggcaacacatttaatctgcccttatctgcaggaattccgtactggtgtcatgctaggagaatggggtccacgaatataggggccatccaggcagtatatacccgtctgaattgttaccacttgtcgcgcaatgcggcttaagacgtaagctaacaccactgggtactctttaacatgtgtatctttataacttcccaagagaggcacccccttgggctttccggattacgctttggtggtggctagatctataagtgggcgctattaggctgtgcacttagtacca

SEQ ID NO: 673918 - DNA, 217 bp, Homo sapiens
tctagaggatccctctgatgtgggctagagtcagatctcactgacagttggcatacaaactgtgatctttccaccgctggcataacggactagagcattgcaccgcaaaactacccgtgctgacatacccagtgcaaagccaatgggcaacattcatcgcagaacagccatccagaaccttcgcccttgttccttccagcgtggctagactgtgaac

SEQ ID NO: 673919 - DNA, 171 bp, Homo sapiens
cgcacagtgttcaaatgaagatgaacagtgcagtcagtcagctcatccatctggatcacccagcaacagctggcggcagcagtatatatttgtttgtcaacacataggataattgtagaaaaacccaagaaattgcctcccaataaccagagaaaatcagaaccaacacac

SEQ ID NO: 673920 - DNA, 175 bp, Homo sapiens
cacgtggctgaagcgattctgcctcagctatgtacagtcgctggaacattccagtgatgagattgcagctcatgaaggtctgagtgagttcttcagcaaaagcgacccaagaggtggatagtcttgagaaactctcagcacacatgggcttgccaggaaccatatcaacaatggc

SEQ ID NO: 673921 - DNA, 565 bp, Homo sapiens
gtccccaactgtctctcactgatcctattatcaaaaactgctcccaatgatgaacctgtcaaaaagatcagctaagctcccttggcgatctgcaggaacactagttctgactgggattactccgttgatctttgatgactattacacataacagcactctagcaccttttcttactggcatggacttcctcatggactgctacttcatggatgatagcttcattgctttgggtagggatttaaggtagtcaaggggaaaatacgcagttttattacaggtcttaacatcaggcaactttcaactttaaaaccctttgtgaaaaatgtggttatagcactatagctctgattttaggatggttaaatgttatattcattgttggcttaccttatcaaactgtgccattaatcctttcacagacataggtaaggaagagaacaaccagtggattcaggcgacaattatctatctccaaataataggcttttatttcttgcagctaactttttcagtgattctagcagatgccatctagtacatccttgatcttgtttctttcgtgag

SEQ ID NO: 673922 - DNA, 958 bp, Homo sapiens
taaccgctgagtctgctctttaatggacaccgcccatttgttctgcccctgatctgaggcgggaacaggaggggtcttgggacaagtggtgccactgtgggccgtgggttgccgcacagtcgtgcctccctgtggggacagaaacccagcagggttcgagcccgtgcaggccatctcctttccaggaagggccacaatatagcagccgccgtgccctcctcaagccccgaggggagggccaccacgaggctgtgggtgtggccacccagtgtggccaggcccctttagctgtgggcccgcaggcagcactgtggagcccgcctgtggaaggctccgaggtctccgtgtggaggtgtggggagagggggtttgcaagaagtgtctctgcgtggagaggctcaagaggtgttcaacaccctctccactattgtgtgggtgctctctctccgcgggaacgtggccgtgttgtggctgtgggagtctcgagttctccccccctgtgggctctcccgcgtctcttgcgttgggggcgggggagaccttgtgacccctgtgagagtctctgtggggtgtgccgagaggacacacaagtctgtgtcccccgagaagacatcttcatgtgggcgctgtgttggcgccgccgggagccgtcgtgggagaagctctccctttgtggcccccatattccaacaccaagaggagaaaatcttctctctacacaagaaggtgtgagtgtcgcccgctggcgcgcgtgagactccacgaggcggtttccccgcggggggcgcgctttatattgaggggaactctttgtgcgcgatggcgtgtggagaggttttctcacccgagcggggggaccaccgttgtgaaccttcgaggcgccccccctttcccggggggcgcatttttagcggcgtgcgcggttttcaacgagcactttcgggtttcccttttcccg

SEQ ID NO: 673923 - DNA, 732 bp, Homo sapiens
aaatacctacagaggtggaggtctggcgcacctttacccagttttccccaatggtaacacctgcgaagactgtagtaccagataccagagtgtcaactgacattgatacagttaaggtatagagcatccattcagtcacaaggatccctcctaataccttctcatagctacttgggaggctgaggcaggagaatcgctggaacccgggaggcggaggttgcagtgagccaagatcactccaatgcactccagcctgggtgacagagcaagactctgtctcaaaaaaaaaaaaaaacaaaaaaaaaaaaaaaatatatgtgtggaagagcgcatcagcataggacatcgagaaagagaagaggaaaaacaagggctgggcaccagcagcggcgcctccacctctcccacagccaccttctgggaagcgtcagaggaggggcaaaacatcactagtgtgaaaccccggagaggatttgagcagcacacccccgtgggagctacttatagtgggaccacccctcgactccctctctaacccaacaacactatttgtatacaaccagtgatcctgtgttgcttgaaagcaatatattctgtcacaaagccttacgtctacaaccctgggtctaaagagggggcgaagagaggagacatgtgtggccacggagggcacccacaaccatgcactccgggaaaagcgctttgaagaggtggaaaggacatcggctgcag

SEQ ID NO: 673924 - DNA, 689 bp, Homo sapiens
tatatcactcaacaaggttgtcagaaaacttacacagtcaaatcgagaaaacgagtgagttgaacggataacgacggaaaacacgagcttcactcttcttatgttattattgttacaaagagacgggaggtgctcactaccggtcaacccagggcgtccgggtgtcgccgcggcgtgccgtcgtacaactcactggagaaccctctgggatcgccggcggtccagatggcgatgtgtccggggcgctgaaggacatcaccggatgtacgcatggggactaacaaggcggcggccagaacactacgcggggagcataagtaaggggattgacaatggtggaggaagcggggagattttgacgcagattcggtggtgacaaagggtggtgttgataagtgacagactgtgaacttttgtcacaacgaggaattttaggggaaagactacagtggtaaatccggagaatcacaaattgtccatttagcaccattgcagcgaagtaagaaagtgcttgaaggtacacaatttaagaattcgggccaacaggagggtgttaccagtgagagttgtggggaagatagggcgaaggttcgaaggaatttataacttagcccatggtttaagaaagggggatgtaggtataaatcccatcaggagcagagtgtgggaaagagggaagatgtagatat

SEQ ID NO: 673925 - DNA, 148 bp, Homo sapiens
acagcatgcactgtgagaccattctataaaatacaaaaatagcaggctgtgtgccactgtggacagtactaggagctgagatggaggatcacagtcagggatcagacatctgctaccacgtgaacctgtctcaaaaaacaaaacaaaa

SEQ ID NO: 673926 - DNA, 320 bp, Homo sapiens
cctgtttgatgcctgctgagggacagttagactgattccatatcttggctactgtttatagcactgcagtaaacatggcatgcaggtatccctttaatatactgattttcttagcactggataaatacccagcagtagaattgctcagtgggatgacagagctattttcagttgtgtgagcgacctccatactggcttacattagtacctgcactaatttacattccaaccaacattatataagagatcccctttctgtgcatccttataaagatttgttacttcttgacttcttgatgatagccattttaactggaaat

SEQ ID NO: 673927 - DNA, 1038 bp, Homo sapiens
gatgcagacttgcgggacgtgaatgcgctcgagtctgtgagtgctgccgttcgttcatcttcccgtcgttagcagggacctctcaatgctcaccagggactacgaagtctagctactgcgtggcatcgagtcatcagctaggtaacatgctgtctcaggcatctgggcctcccaacaggcagtatgtagaagctaacaagctatgccgtagcagatgctgcgaactatggtggtgcatggggttgttggaatacatgctgctacaagaggtaagggtgatcccgtggaagcaaactaatttcattactttgcatgggggaatggaagacgtgtagtggagtcctatgggaagtcgtgagaagtacaaaaagcttatgaaagtcaatggtgacttgaaagaggtgcctatgacaataatactggaatatttgcatggccctcttacttcgcacatattcctgtcacctggttatcacccttggcgaccagatatgtgaacggacactctctaacctaacactcaaaacacactcacgacggggggaccacgagtcaaaaatacatgtcccacacgggggcgtgcaaaaacttccgaagggttacccacttgcatgcacggcttgggaatcttaagaatcgattggccatttcctaagaacgaaaggtgttgactattacttcgcaaattgcttaactaattggcctttatactatgtaaaaaccttggggcaaaatttagtgcggaaactggtaatgcgactggggattacaaatcttgaatttgaaaattccgtattatccagggtccacatgttcccctgggaaggcgcttttcaaaagaaagggctgggggggacacggaacatggttgacaaacctcaatccttccattggaaaggaacagggtttgaataggccgaggaagaacaatcaggagttgaaaggtccttttggcgttcctaagaggggaagccgtgaattaaaaggttggaggttccagacttcacctggatttacgtccttgaatatacaatttgg

SEQ ID NO: 673928 - DNA, 111 bp, Homo sapiens
cacggccagatttgggtaatatgtacatagtatatgggtgagcttattttggtcgttcttaactcatggtgtagtctaaaggtgggggaaaaaataaaatacaataatcag

SEQ ID NO: 673929 - DNA, 494 bp, Homo sapiens
ggtacaaatagtgcacacaaattagtagcactgctatattttacagtgaccaagctgagaattaaattaagggttcattccctttaacaatagcacaaactaaaataaaatacttaggaatatacctaaacaaggaggtgaaagacctctgtaaggaaaattacaaaacactgctgaaaaaagtcatagatgacacaaacaagtggaaacacattccatgctaattgatgggtacaatcaatattgtgaaagagaccatactgccaaaagcaatctacaattcaatgcaatttccatcaaaattctaccatcattattcacagaacccgtaaaaacattcctaaaattcatatggagccaaaaacgagccaaaaacaagactaagcaaaaagaacaaatctggaggcatcactttacctgacttcaccctaaactataaggtcatagtcaccaaaacagcatggtagaggtataaaaataggcacacagatcaa

SEQ ID NO: 673930 - DNA, 466 bp, Homo sapiens
gacaatttaaaaaatgagcaatgaaactattagtgaaaaggaattaaatttatcttcactgcttatggtaaagggcacagtggaacacagattgaaaactacaaattttttgatacttaaaccaaaacacagtgcccagataattttcccaagccaggaatttgtctattttttgttggttccaggagaaaaatggcatacgtttagcattccatatgtttagcattccatatgttatttgttcaaacatcttagtcacatttctactcctatatttggccaatttatcttaatatagtgtttttatttaatagatcaccacagaagaaaactaggcccttttctctagaaaaacgacaagacctggagctactgttgtagactgctgagaggttctatacaattagcggaaccattttctttacgttaaaacctctaagtcatggctttgacctgtgtttcagat

SEQ ID NO: 673931 - DNA, 194 bp, Homo sapiens
atgggtagctaggcatagagggtatatgggttgcctgccccattactgctgctatagctagaacagtcctttcccctatccctacgctgggcagcttggaggtaccctaacccaaaactactagtactactcctcccgccagatggctagacagtagctagtaggtagtcgtaggagaactatttctagcctct

SEQ ID NO: 673932 - DNA, 178 bp, Homo sapiens
accaatctttggagagaccacagcacctgcgtgctttgatcgtgatgttcaaggcaagttgcaagtcaaggacaagtgtcccagaggccctgggctagctgagtgcacctcgtgtttgatcttcccctgagtgatggacactcccagctgaccatccatacaccaggaaaacatccct

SEQ ID NO: 673933 - DNA, 885 bp, Homo sapiens
  misc_feature (738)..(738): n is a, c, g, or t
agagattctggtacattgtctctttgttttcattggtttcaaagaacttcttgatttctctcttaatttcattatttacccaggagtcattcaggagcaggttgttcaatttccacgtagttttgtggttttgagtgactttcttactcttgagttccaatttgattgcgctgtgatctgagagactgtttgttattacttcagttctttagcatttgctgaggagtgctttacttctaattgtgtgatcaattttagagtaagtaccatgtggcactgagaagaatatatattctgttgtttgggggtggaaagatctctagatatttatcaggtcccacttgatccagagctgaggtcaagtcctgaataactttgttaattttctgtctcgatgatctaatattgacagtggggtgttaaagtctcccactattattgtgtggaaatctaagtctctttgtgggtctctaagaacttgttttatgaatctgagtgctcctatattaggtgcatatatatttaggatagttagctcttcttgttgaattgacccctttagcaataaacgaaagtttaactaagctatactaaccccagggttggtcaatttcgtgccaccaccgcggtcacacgattaaccaagtcatagaagcggggtaagaggtttagatcacccctccccataaggtaaaatcacggagtgtcaaaaccagtggcacaaaagatacgaagggntgtacttctgaccccaaggtgaacaatgggtagtcccctgttagcgaaccacagtatcacaatggccacaagggcagtaaacaggcgcgggcaacccaagaggtggacacaccccgccgatcgccgggggcggcacgggagtggcgt

SEQ ID NO: 673934 - DNA, 235 bp, Homo sapiens
ctaagaaccacaggcataactattattatgccattattgtggagagaacagtctggagagaactgtgagaaccagggacgtaactcatggctgtcactgatatctcaaacaggtacctaccaagaggaaagatcctgtcactacaggtttcttggaacgaagtaaagaaaacatgcagcaaaaagacagaaatacacttgctattcttccagatagtccatgctttgtaagcacc

SEQ ID NO: 673935 - DNA, 194 bp, Homo sapiens
aacgaatggtccttcgctctgtgagcgtcgtctcagcagctccaaacttcagcagatggtgtggggatcactgtggtgctctcctcaatctgactgagaccagtacttgtctagctcgtctcggttcttgcgagccaggtcgtcatattgggcccggatgtctgccgtgatcttggtgaggtccgtgagatttg

SEQ ID NO: 673936 - DNA, 336 bp, Homo sapiens
  misc_feature (242)..(242): n is a, c, g, or t
agcgctgaagcaatacaacagagctccagcctaacctcagttcctcccactactttcagcctcaccttcaagatggagtctgcacgcaaagcatgggagacttctccaaatgtaagggaaaaggggtctccagtacttccacagcacctccaattgcaactggagtcagcagtcgtgccagtggaccaggcactgctaattacaatacgttctcaagtgcatccatgccccagattcctgtngcttcagtcactcctacagcatcactatcaggagctggtacatacatacctcttcttgagcacaaaattaccgtgggggatcctctaggtcacc

SEQ ID NO: 673937 - DNA, 229 bp, Homo sapiens
  misc_feature (192)..(192): n is a, c, g, or t
cagagattctatgttgtttgatacagagtactgccagcatgcccgctaataagtgtatttttaatagagacaggttttcaccatgttggcaggatggtcttgatctcctgagctcatgagtctgtctgcctcgagccctcccaaagtcgctgggacttatagcgcgtgagccatcagtgccctagctggccnaggtcacttctttgacggtggtggccacgcctatgcg

SEQ ID NO: 673938 - DNA, 908 bp, Homo sapiens
agcggggtccacatgcagtgaacacgtgctacggcgtacaggtaccttctgtcgtccttgactgccatgcgtaggcacatgatgcatacaggaaccggaacggtggactgtgtatggctttgtaggagcctggatccggggcactattcgctcgcatggatggttgcaagaccgtatatgcagtgatgtcttcatatacctagagcccttctggagcattatctctatgtagatcacggaactggaacgtgacctctctagaaatccacctggagaagatctacgagcaaaatcccagggtcaccagacacatcacattgcgtacttagagggatggacgtttgaagaagttacacatcaatcaggatccagaatgactgacgatgcggatctggaagaccttactcgagacacacatgacagacagtaaccgatgttttaccagagtctattcgcatatgaactctcagcagtagtgatcattccagtataagccggcgcgccgaacataggaatacgggacttactgtgaaacgcgatcgcttctattgatggcgtaccgcgcgagaacggactcctagtatcgaccagccagggtcgcctctttctccatcacaaattgtaggaccttctggcgaattgatctgggagctggaaactcctgctctatcgctgatgcataagcagaacctggaggagagaggccatgagaaagttgtgtccaggtaccttgagcacatcttgactgggacctggatgtcctaataggatccatatttactacgtggaaacttgaacgaaaggacgggagggactttgttgaggaggctagcaagggatgagaggaactccctggggtcaacccacacaatgcaacgtagaccctatcgatcccggcaagattcccg

SEQ ID NO: 673939 - DNA, 165 bp, Homo sapiens
gagacgagtaaacgaaggaggtgacgccggggtctggcatggggaaccagatgggtggtggtgccattcactgaaatagggagcactccactgagcagatcttctgagagcaggtccaatcttcgggatgaaaattatccatgaagctggttatccagaagaggt

SEQ ID NO: 673940 - DNA, 716 bp, Homo sapiens
cgcaacgggttctagcgctgcaggcagcgcgaggacccgcggacccgccccggctcggcctggcagatagcagaggcagcaggccggccgggggggcatgtcgctgtaaccagtggcccagggagatgttacggagtggacagttgcaccttggagggcgtggccccgcatgggcgtgataccatgcttgcagttggtctgctcgggcatcagtggatcatactccctctcgtgggtgttactgcgtcctgggtggagagacctagtggacgacacctggcgctcgagactaggaatgtcgcacgagtttatcaacttgcacgattggtcctctggctgttctgggatcgatacatgactggacctcccgcagagttggaaggtcgtgcgctatacctgctgcgagtctgatgcgtcacttggtggagatagcgcccttacaattgccggcttatgggaagcactccacaccggtcacttcatactggatcgaactaccagtccttcctatttggggtgccggtggcgggaagattgcacctacccggacagggggcgcccgtggcctaagattgttgcctgctaaatggcccttattggaactggttcattagttactgtccacagacgttgggttattcaacaaccctcccgtaaggattgttgctacggtgtagcaaggtatccatatggggtggggccccgggggatggggc

SEQ ID NO: 673941 - DNA, 113 bp, Homo sapiens
tgactgttatatacgtgctcagacggcagctccccgctacagcgcaggccctgttgcgcccacctccgcgagcaggcgctcacgtcgtacgtctgacgcgcctaggtggcgtc

SEQ ID NO: 673942 - DNA, 174 bp, Homo sapiens
tcatgtcgcttcacggtgtcactcagcgccgttgatgtgtgtgccacgcccctggcatagaacacgtcttccgccgcatacgatagcgatgtgtgtgccacgccccgcgcatagaacacgtcttccgccgcatccaggatgcggttacgtgtttccagtgcctcttccttcgct

SEQ ID NO: 673943 - DNA, 509 bp, Homo sapiens
agcggggtggaagccgccgccacgctcgcagcatcgcaggcgccgcgtagccgtcgccaccgccgccagcccgtgcgccctcggctgcgtacccgctcgcgctcccatccccgctcgccggccaggggcagcgctcggccgccccggacagtgtcccgctgcggctcagcgagcgatggcagacccaagatcgatcgaatagatggcttgccggcgcggcgtacaatcctggtgcgcgatcgcacggcgtacggccagtcatctgggtgacttttaaatatgacggctccaccatcgtccacggcgagcagggagcggagtaccagacacttcatccagcagtgcacagatgacgtctacggtagtctatgccttcgtgtcgcttcaccatccggggatgccatgcagcaagatggtcctaaagttggccctcatcacgtggtatcggtgagaactgtcatgcgggctgcagctgcgccaagaaccgggacggaccagaccctggtgaa

SEQ ID NO: 673944 - DNA, 225 bp, Homo sapiens
ggctcgtcccgcttcgtgaactcactcgaaaagcgacccgtaccactcctccataccgagaactcagcagaagcgcccgcctcatgtttcatcggttctacactagggcgataaggaacgataaagtcgtgataaccaataccctcgtcagtactagtccaaaactctatgaacacttctgccgtttctggtataggccgatcacccgcaaaccctaaagtcccc

SEQ ID NO: 673945 - DNA, 952 bp, Homo sapiens
cgtcaaacccactccagccttactacgcagagaaccgttagtccaagaccagtttagcccgaaatagagagtataggcgatgagtaagttgaaagcctggccgtcagatagatatagtatccgcagagggaaaaatgacataattataatcaagcatagtatagtcgaaggactaagcccatatacctatctgcactaatgaattaactagaatgtaatcttggctataggtagaaccaaagcatagatgacccccggaaatcgagacagatgtcttaccgtataggatccgatgggtaaagataggaagcacacccggtcatatattagccaacaaatacgtgtggaagattttattccggtggatggctgactgagactcctacctgagccgtggtgatagcttggtttggtcctggagtagaaatgttagtgtcatctttagatttggccacatgaacgccatcctaaaattcccgcgaagagtagagaagaaaaagcatacaatgatttattgagagaaataacaaacaagaggcgagggcttcaaaatatatatgtgaccccactgagggggaccgaacattttggaaggcacgaaagctctggcccccatatgggcggggcggagagacagagaacgttttggtaaaaaccacgaggaccgggggtggctatgagcagggctttccagccaggcgggcaaaaagcttatggccaggggccagccaggaagggaaacaacgaaaacattggcctggggcagggacgacgtggaggccagaagacacctgacagggtaatgctaaccgcgtgacgaacaagattagagaactcaggccaagccaccggggtgacaaaggcctaaattgctacgccgaagacatgtttctccacacagtactcctgtgtatgcacaatatacacagggggtcgagaaaaaagtgtaggt

SEQ ID NO: 673946 - DNA, 138 bp, Homo sapiens
ggcgtgtgaagatagaggacttgtgcaggtggatgatggcagaaagatgtatttgtcccaggctgtcctagttggagaagttacaatagggggtgtgctttataagatttgcaggaaaggcattcatgggtaccgagc

SEQ ID NO: 673947 - DNA, 496 bp, Homo sapiens
ggggacagggtctcactttgtcacccaggctggaatgcaggggggcgattttacttagtttactggggccctgacctcctggactaaaacaatttttctgcctaaacccttcaagtagctgggactgggggggcatgccaccatgccggggtaacttttggggtttttggaaaaagggggttttgccatgttgcacatgctggttttgaactcctgggctaaaacgatttgcccaccttggccttccaaaatggtgggattaccgggggaaaccaccaccccgggccccattgggggatttttagcatccccttgctccctgggattaaacataagagatgataacctctggaagaaaaaaaattttactaggcttgggatatttttttcctttttcagctttatacaggggatgggatctttagttttcctttaacggagaaaaaaacattgaagggaaatagtttccctggaattacagaaatacccggttcct

SEQ ID NO: 673948 - DNA, 621 bp, Homo sapiens
accaggagatagcaggatatcgaaaacgacagtcccaaggatctccagacttccagtgactgccaattatggtccactgggttactaatatgtgcaattccattactagctgctttttttttttttaattgggaaggttggcttataactcggatcagggccccattttcatccttaaccctcgggtggtctgctttaaggtcgggtaacttttggagctcttctcccatttcagatattcttctttctagagctcttcgtcccctttttcccattcccaacagtgatctatcagcaaatctttctggtctcgggggggcctttcccacctgtaattaaagatctgttagtcccatattggtatcatgtagcggtgcctccagctttccatttccagctagattgggtccataaagcttttaaaatgtcagtggagtcatcctcttatagccggctgctgtagggtttccttcctcctaagtacctggtatgatccagagcgacccagcagggaatcatatcgatcaccagttggtgtagaccgggttccatatctagaagtggacccggcggagtccttccttatgggcccctcttcggtgttgatggtggcctggccat

SEQ ID NO: 673949 - DNA, 405 bp, Homo sapiens
gggtcaccatcattagcggtgatatgaaaatctgttaatctgggaatctggtctgatgggttggggatagggactggcctgaatttacaactcagggaatctctttctgagttaaatggggtctgtattagggggttattatgggagtatctgttaataatggggcctcaatgatcgagggctggctaacaggggtctctactctggatgtgttcctgggaatctctatctcagggtgactcagggctcctcgggtgtcaggagatgctagtggggactctgtctctttgtcaggtgttcagggcctctaagactgcatctccggcctcagcatccaggtgaaccagcagcagaacagcaacctggaaatggagttctctgatgcaatgtcctttggggtccgga

SEQ ID NO: 673950 - DNA, 783 bp, Homo sapiens
cagagggcatggaagctctgcaccagcatgtatcgcatatctcagcctacgcatctccgtcatcgtagtatacgcttatgcaatattcctgtgtaataaagtcggtccaaaaaggccttctttcaaaccttccccaaagccgtatagtatcgtggaacacctaaaagactcaggcaaactttgaggatctagtcaacatgtaagaaagtacagactcgtactgctgaagtctcagaaattctctaaagtcataacacattcagatagcgtgacagtaagacgtttatgtttctcctttttccctagcatttgggctaaagtgatgatacgacaaactttctatccatcaatgagcatcaagaagcaatcccgaaatgagcaaaaactgctttgttgcaataaggtgtaaaagttaagcagcatggacagtcgacatttcaccagtggcgaaacatttgctgcatgcaaaaatgaactgaagagcaatgggtctctgatctgtcaccaggctgaagtgcagtggtacaatcacaagctcactgcgagtctcaaacctcctaaggctcaaacaatcctcccacttcaggcctcccaacgcagctgggaccacaggttgacatcaccacacccaggtctgctggaatttgctggaggtccactccagaacctgtaagtctggatatcaccagcagaggttgcagaacaacaaagatcgctgcctgttccttcctctggaagctttgtcccagaggggcacccagcaaacggcagctggagctcttc

SEQ ID NO: 673951 - DNA, 384 bp, Homo sapiens
  misc_feature (6)..(6): n is a, c, g, or t
  misc_feature (96)..(96): n is a, c, g, or t
  misc_feature (115)..(115): n is a, c, g, or t
  misc_feature (171)..(171): n is a, c, g, or t
  misc_feature (199)..(199): n is a, c, g, or t
  misc_feature (228)..(228): n is a, c, g, or t
  misc_feature (323)..(323): n is a, c, g, or t
  misc_feature (335)..(335): n is a, c, g, or t
  misc_feature (345)..(345): n is a, c, g, or t
  misc_feature (361)..(361): n is a, c, g, or t
tgactncagcccggcgccgctgctgtgcccactctgtcgccagcccacagtgctggcctcagggcagcctgtcactgacttgcccacggacactgncatgctcaccctgctccgnctggagccccaccatgtcatcctggaaggccatcaagctgtgccttaaggaccagnccaagagccgctacttctgcgcagcctngagtctacacgctggaccttggcccccancctgggggccagactgggccggccccagacacgggctctgcaccgggtctacgccatccttatcccagcaccactctttgagggagtgtttccgnaacccttagttncgcattttgnctacctgatggccgtnatcttaagtgtactctgtgctca

SEQ ID NO: 673952 - DNA, 117 bp, Homo sapiens
cgtatgctttatttcttgttggccaacagcttctttttaatgttctgtgaaaaattattttaagtgtcttaaataatggggcttttatggttattaaaaattgtaaatggtttccca

SEQ ID NO: 673953 - DNA, 897 bp, Homo sapiens
cgcgatggctcacgcctgtaatcccagcactttaggaggccgaggcaggcagatcatgaggtcaggagattgacaccatcctggctaacatggtgaaaccctatctctactaaaaacacaaaaaattagctggccgtggtggcacgcgcctgtagtcccggctacttgggagactgaggcaggagaatcacttgaacccaggaggcggaggctgcagtgaacagagacagtgccactgcaacaatcagcctgagtgacagagagactttgtctcaaaaaaaacaagaaaattttaattttaatgtagccggtctgaattatcttgtcctgcagtggtggctttggatgcttattaatcagagtgtgtcacagactattctacattcttctccgtgtaagctgtccagcttttcctttcatattgggaaccccttacacagggctgaaagtccagctggtacaccccgggtgtgacacccttggctgccatctgtccctcaccggtcagcacacttcttctaacttgggtagatgctgggctgtacggtggcctaatttgcccttcatttcccaacctttgagattgccctttgttctcaaggaggccacgggcaggaggatggctttgagccaggagttgagacccagccctgggcaacacaatgagactggctctttaaaacaaccaccacaaggggagacacgggggcaggtccaaaggccgtaaccccaaacttggggcgtcggcggggacaccgggagtgaaatcaaaggacctggctctgacatccacaccaaacacgcacggtgggggcgcactcactggggagagacctaccgagcgggcacacccctccgggcgagtccaaaaaaagcctctgcgtgtcgacccgtaga

SEQ ID NO: 673954 - DNA, 1148 bp, Homo sapiens
  misc_feature (299)..(300): n is a, c, g, or t
  misc_feature (325)..(326): n is a, c, g, or t
  misc_feature (331)..(331): n is a, c, g, or t
  misc_feature (333)..(333): n is a, c, g, or t
  misc_feature (345)..(345): n is a, c, g, or t
  misc_feature (362)..(363): n is a, c, g, or t
  misc_feature (373)..(373): n is a, c, g, or t
ttttattatatagtgttataaatgtggtggttgattattaagatcttaaagtaaaagtctgatttatttaattggaatgcgaaagacatgttaaacttagatttctcgtaagattatctttgagttaggtcagagagcttttacaactaccagtgttattaatctgagatttcatgtgtcgggagaactgtgaatccctctgaaatgtgcagagacttgtatgttaaatgcattttcaggaaggaatggttacatggctttctttaaagggatctgtttccagtaatagtattcttttnngtccacaaatcatagatgtccttanntccantngtcttctcagtngaatcttagagaaattnncttttgcaanttcgctttcctgttgaccacagtatccagtgccctttctttataatcttttgagctgagtaacaaaaacttttaagaacataacaggattctgtttagggaaactttgtgaactagatttgatttgatgtgagtcagggctaataaaaacgctatagacagaatttcgctttccaagtaagtaacaacatcctctggttcttacttaacggacaaacaactagctatgtcattaggtaaagtaactcgtgacaatacaacctggtacaacaacttgtaaaatagaagcatatttcaacctgtcaaggtgtcttctctctctaagacttcagcgaattcgtatttgacaccaaaagtctccaagttaaagtaagcccatacattatgcatggcattaacactgagacactcggcatctatttgcattcgaattcttcagtccctctttactgggcggttgatgcggacgggtttcaaaatccaaggagctatcaaccctgatgagctgcccacccgtggcctatcctctatatatcaacttcttaccaggatcattcgttacggggagaaattttcccaaaggttccggacaagaaatcttaaccaattgactcgcgattttccttacggtcatcttagacaataactgggacatacatgtgcgagccacacctttttctccttaagtccaatacaccgtaacataaaggcgtgtcactacgggctcatgtcgtctccacgagaattatacgagtggctaccacattggcccttaa

SEQ ID NO: 673955 - DNA, 273 bp, Homo sapiens
ctaaacaaggacaaaagttgaagcatggatctttttgggcagcagctgtgatttttgccccttttagctccctcgccgagcaccactccctcaaattttggtggcagagcaaggcagcattgtgagcagagcaagtcctaaaaagaacatgggttcaaatttggtttttgtcactgaccaacagactttttacctttttgagccttagttttttcaactcctgcttcatttcacattttaaaaagtagaaaaaagacaaactccatgttttta

SEQ ID NO: 673956 - DNA, 174 bp, Homo sapiens
  misc_feature (26)..(26): n is a, c, g, or t
aaggcaataagttgcgataagtcatncggttgaccaaggttatacagggaagagactgaagtgtacccttgaataggtttactgtagtcagagtacgaaactctaatttgggacttggacttacggattggggattgggataactatggagtgaagagcaatgatgggttgggc

SEQ ID NO: 673957 - DNA, 366 bp, Homo sapiens
acccgcggtgtggccctggaccagtgtgaacatgtcttacgaccagttaatccatctgcacagtgcgccacagcggcggcggttaaaccggggcttgcggcgaaaacaccactccttgttagagcgcttgcgcaagcccaaaaagaaggccccgcccatgaagaacccgaaagtggtaaacacgcacttgcgggacatgttcttcctacccaaaatgtgtggccagcatggtgggtgtctccaccggcaagcccttcaaccaggtggagatcaagcccaaaatgatcggccactacttgggcgagttctccttcactcactcctctctcaagtaatggctcagttaataaaggcgcacatgtctcc

SEQ ID NO: 673958 - DNA, 168 bp, Homo sapiens
agaaaagggtgtgtctgatatactcgtatgaaagttctgacaggtttatctccctaggaaggtgcagcacataccccaacacactggctctgccattgagccaatccaatatgatgcttgttttgtgagcaccctcacctaaatcgttaccctacctgggtacggagc

SEQ ID NO: 673959 - DNA, 395 bp, Homo sapiens
cgtcgacttttggtggtttaggtttcgttctgtcccttctgtgccatctttacccgatccattggttattgaacacatatgttccctgcaccacatctgatctccatggcaaccagaggtggttgctaagtgctggtttcattcaggctgtttggatgccaaatgctaagtaccccaccccgaccagctaaaaggagaaggggaggaggatgggagaaggattcttgggagagccaagatgtttaaattgctctcagctcctaaggataacagcatgctcaatgccctgccccgcccccttcactatcagttagcatatcaaagcacaccctgagctagcccacagacgatgctcctgggcaagtttggccatcttatttgggtttagtcgacgc

SEQ ID NO: 673960 - DNA, 178 bp, Homo sapiens
gggaaaaaaatacttcaaacccctttttcttgctttatttttcagggttttattgctttaagaactgtttaaccctgaaatccctttaggttatttattctggataaaaaagcaattccccttaaaactggactttggcccacttttttattttgcaattaaaaatttttttcccata

SEQ ID NO: 673961 - DNA, 120 bp, Homo sapiens
gtccgggctctaatggatgccttcaacttcaacaatatgggtgacgctgctgtcccagctgcccctgttgctcttcaccctacctcaactccttcctgtaccagtgcagcgctgggtcaa

SEQ ID NO: 673962 - DNA, 519 bp, Homo sapiens
  misc_feature (6)..(6): n is a, c, g, or t
  misc_feature (18)..(18): n is a, c, g, or t
  misc_feature (21)..(21): n is a, c, g, or t
  misc_feature (42)..(42): n is a, c, g, or t
  misc_feature (54)..(54): n is a, c, g, or t
  misc_feature (69)..(69): n is a, c, g, or t
  misc_feature (97)..(97): n is a, c, g, or t
  misc_feature (164)..(164): n is a, c, g, or t
  misc_feature (197)..(197): n is a, c, g, or t
  misc_feature (220)..(220): n is a, c, g, or t
  misc_feature (237)..(237): n is a, c, g, or t
  misc_feature (337)..(337): n is a, c, g, or t
  misc_feature (344)..(344): n is a, c, g, or t
gttggnccctttcaaagntcnggcttttccaacccctttttncccccctaaccntgtccccctgggaangcttgactttccctatagggactacatncaatgagcttctttccccttttgaggttatgaaatttatttccctactcccgtctcatgggtttgtncctttagctgactctgtcccctttgactgaagntcactgcttctcttaaatgtggnccctctcggcccgggtncggtggctacatgccctgtaatccccagtactttgggaggctgaggccggcagatcacctgaggtcgggagtttgagcccagcttgaccaaatggagaanccatgtntctactaaaaatacaaaattagctgggcatggtggtgcatgcctgtagttccagctatcaggagctgaggcaggagaattgcttgaacccgggaggcggagttatggtgagcagagatcacgccattgcatccagcctgggtgacaagagcgaaaccctgtctccaaaaaaaaac

SEQ ID NO: 673963 - DNA, 211 bp, Homo sapiens
tacatacagcggaggtgcgaacagtaatattgcagaacggcaaattttgctgtctgatccttcttctgaaagcttcatctcagaggggcacctggctgtatgaggtgtcagtgggcccctactgggaggtatctcccatttaggctactcaagggtcagggacccacttgaggaggcagtctatctgttctcagatctcaaactccatgct

SEQ ID NO: 673964 - DNA, 681 bp, Homo sapiens
  misc_feature (72)..(72): n is a, c, g, or t
  misc_feature (444)..(444): n is a, c, g, or t
  misc_feature (476)..(476): n is a, c, g, or t
  misc_feature (548)..(548): n is a, c, g, or t
  misc_feature (550)..(550): n is a, c, g, or t
  misc_feature (557)..(557): n is a, c, g, or t
  misc_feature (571)..(571): n is a, c, g, or t
  misc_feature (633)..(633): n is a, c, g, or t
agaggacccttttgtatacagcttcattttagatgagcattcttatttttgttgtttgccccatttcctttngtgttttatagtctatagcattttaaaactgctgatgttgttgcattatttacaggctaaaaacttagtagcatagagctgtctgccacagccttctgacaaagtttacagttattaaagttgcagtatccttttaaatgctagtaatcagcactctttcttttttttttttttaaatagagacggggtctcgcagtggtggcccaggcgggtctcgaactccgggcatcaagcgatcctccggccttagcctcccagagtacggggattacgggctctttctttttaaacataaaagtttacactgggtattaactctgtactcggccctagatggtttaagcttctggttctggtaatcatgagttcggntgggagatattctccatagatgatcttctacnggaaatgcctaaagaagtcccaggcgggcttcggtttatccagggattttttaaaaaggtcaactcagaaangngatacgnagcttcttcaggtntgtaacagcatattaaacgggagacagggatgaatcagttacaagggtaatatgggtttaanatcaggtgtaagatagcggcttaaggggtatccatatggcaggctttg

SEQ ID NO: 673965 - DNA, 951 bp, Homo sapiens
  misc_feature (19)..(19): n is a, c, g, or t
  misc_feature (24)..(24): n is a, c, g, or t
  misc_feature (86)..(86): n is a, c, g, or t
  misc_feature (704)..(704): n is a, c, g, or t
  misc_feature (727)..(727): n is a, c, g, or t
  misc_feature (824)..(824): n is a, c, g, or t
  misc_feature (867)..(867): n is a, c, g, or t
  misc_feature (914)..(915): n is a, c, g, or t
  misc_feature (951)..(951): n is a, c, g, or t
tctgagacagagtcctgcnctgtngcccgggctggagtacagtggcatgatctgggctcactgcagcctttgcctcctgtgatcangtgatttctggctagtttttgtatttttagtagagacggggtttcaccatgttgccaggctggtctcgaacccctgacctcaagtgatccacccgcttcggcctcccaatgtgctaggattacagatgtgagccactgctcccagccattctattaacttttgactagcatatgattatttgtgagctagatcaaccttaagtagctatcaaatggatggtactactagtaaagagaaatcctccataagaaaaagagattaaattagagaagaccattatataacaatgtaaattctactggataccatggaaattgaaccactgaagagagtaaatttaaccaacgtgaataactgtgttgctgcggaaaaatgcctctaaagaatgttccatacaatcctttcaggattttctaagtcgcttttaattggaaacaatatttaacttttttgtgtgaaaagcacattggcgaggttatagagaaatcggaaccccttttacattgcaggcgggaatgtaaggtggtgtaaccactatagaaaacagcctagtggtttctcaaaaaattaggcataggattaccgtgtgatccagcaattccacttggattccacanaagaatccaaagcaaggactcanacaaatatttgtacacccatgtttatagcagcactacatataatagccaaaacgtggaagcaacccaagtgtccatcgatgggtgaatggataatanaatggtgtatatacagcagtggataatattcagcctttggaantctgggtggcacagtgctcatgcctgaatccagcacttataggccanngtggtgatcactgaggccagagtcgagacgctggcn

SEQ ID NO: 673966 - DNA, 309 bp, Homo sapiens
  misc_feature (256)..(256): n is a, c, g, or t
catcttagaggatcccccatttgatgcccctttatgccacttgaagcccctggatgccagcacctgaagtactcacgggcagatgcaggggccgcctgcgtaaaggaagctcctattctagaacagatcatccagctaatttgggcgcttgtgtgctctaaggtcaagcttccctatatacagcctcatttcactgcctttcgaagtcctcagagtagagggattttagttcttcaggttcacccagtattaacgngaaagtcgtgtccctcctgtctgccattgtgtacatatgcagaattcgctgcg

SEQ ID NO: 673967 - DNA, 300 bp, Homo sapiens
tgtgggtagcaagcaacctagggtcagtttgcaggtggtaaagccatttaccaagatagttgtaggtaagaagggcagatttattagagaaattgtgaaaatatgttgcagtgggcagctcagcagagaaggggctacctgcaaagaggcaagggctggaggaaagttttatagggtcctgctgaagggtgctacgtgtggaatgaggtcattgtgcccgcaggttgtttgtgattagctgtctctaacaattgttcatacaataattgttcattattgttctcaacttggggctctccc

SEQ ID NO: 673968 - DNA, 1031 bp, Homo sapiens
  misc_feature (429)..(429): n is a, c, g, or t
  misc_feature (432)..(435): n is a, c, g, or t
  misc_feature (443)..(443): n is a, c, g, or t
  misc_feature (446)..(446): n is a, c, g, or t
  misc_feature (448)..(449): n is a, c, g, or t
  misc_feature (451)..(451): n is a, c, g, or t
  misc_feature (453)..(453): n is a, c, g, or t
gtctgaacttctatgtccttacaacaaggtaatctagaaaattcttccaagagagaatgactgtttccccttgagaaacaattttatttccaaacccctttctagattgttttcatgattcaggtgtgtagttgaagcagaatgtctcctctacatactacatgcttgattttgagaatactttcttaatatcttttggcttcggttttctaattataaaatagttgaaaatgctttatgattttataagtatataaaaagcattaggttcaaaacagaggctataagtgtgtttagccaactattagacacaatgaaacttcccgtgattaattagctacaactacactaagcagttcatcaaaatgtagggattagaaatgatgctgaaagggcaagaataggccggggtggcctctacctgggtcnaannnnctgtctgnctntnncncngctcctgaacacccgcaccaagatgtcctgccagcagaaccagcagcagtgccagccccctcccaatgtcagctccggaggctgctgtggctccagctctgggggaagctgtggctccagctctgggggttgctgcagttctgggggaggtggctgctgcctgagccaccacaggcgccgtaggtcccactgccacagaccccagagctctggctgctgcagccagccctcggggggctccagctgctgtggcggggggagtggccagcactctggaggctgctgctgaagtggaccctgagcctagaagagcagaatccaggaccgcaaactgccaaggacatcccccttctcctactaggcctgcctgagaggctcacaggtccaagggaaagctctgaacttgccaagagcatatcttttccctggagtccagaaactcagatcctctcctggatctccattcactggccttggacctcacctttgtggctaccctcccacgctctgtctaagcccctagcttactcaatgtcatttgcagcgtgcatctgctgattaaaggactaaaacaagaa

SEQ ID NO: 673969 - DNA, 408 bp, Homo sapiens
attccatcagaggtaggtcgaacagctagagctggagctgcaccggaacggctattacttccgtcacacagtatgatgtggaactctatccagcgcatagaacacttaattgggaagaaactaccaggtctatccaaacacaggatgatgaggtcatgatgctgacagaacgcgtcgctgaagcccacaggttggcccgaatggacgtgcagggacgcatggagaaaagaagaaacgctcgcgagaggatgctggagataatgatgacacagacgggtgctattggtgtcaggaacaaggtggctggaggaaaaatgaagaagtggacaggccgttaatcactttactgaaggctcgagttctcccaccaaactactaacatcatcatcctctgagctcccagggtct

SEQ ID NO: 673970 - DNA, 1121 bp, Homo sapiens
  misc_feature (429)..(429): n is a, c, g, or t
  misc_feature (432)..(435): n is a, c, g, or t
  misc_feature (443)..(443): n is a, c, g, or t
  misc_feature (446)..(446): n is a, c, g, or t
  misc_feature (448)..(449): n is a, c, g, or t
  misc_feature (451)..(451): n is a, c, g, or t
  misc_feature (453)..(453): n is a, c, g, or t
gtctgaacttctatgtccttacaacaaggtaatctagaaaattcttccaagagagaatgactgtttccccttgagaaacaattttatttccaaacccctttctagattgttttcatgattcaggtgtgtagttgaagcagaatgtctcctctacatactacatgcttgattttgagaatactttcttaatatcttttggcttcggttttctaattataaaatagttgaaaatgctttatgattttataagtatataaaaagcattaggttcaaaacagaggctataagtgtgtttagccaactattagacacaatgaaacttcccgtgattaattagctacaactacactaagcagttcatcaaaatgtagggattagaaatgatgctgaaagggcaagaataggccggggtggcctctacctgggtcnaannnnctgtctgnctntnncncngctcctgaacacccgcaccaagatgtcctgccagcagaaccagcagcagtgccagccccctcccaagtgcatccccaagtgccctcccaagtgcctcacccctagatgccccccaaagtgtccccctaagtgtcctccagtctcttcctgctgcagtgtcagctccggaggctgctgtggctccagctctgggggaagctgtggctccagctctgggggttgctgcagttctgggggaggtggctgctgcctgagccaccacaggcgccgtaggtcccactgccacagaccccagagctctggctgctgcagccagccctcggggggctccagctgctgtggcggggggagtggccagcactctggaggctgctgctgaagtggaccctgagcctagaagagcagaatccaggaccgcaaactgccaaggacatcccccttctcctactaggcctgcctgagaggctcacaggtccaagggaaagctctgaacttgccaagagcatatcttttccctggagtccagaaactcagatcctctcctggatctccattcactggccttggacctcacctttgtggctaccctcccacgctctgtctaagcccctagcttactcaatgtcatttgcagcgtgcatctgctgattaaaggactaaaacaagaa

SEQ ID NO: 673971 - DNA, 845 bp, Homo sapiens
  misc_feature (396)..(396): n is a, c, g, or t
  misc_feature (398)..(398): n is a, c, g, or t
  misc_feature (403)..(403): n is a, c, g, or t
  misc_feature (418)..(418): n is a, c, g, or t
  misc_feature (658)..(658): n is a, c, g, or t
  misc_feature (796)..(796): n is a, c, g, or t
caggcatagtcccttggtccgagtggcttatgatcgaaagtttctacacctgggctccgaaaacaatacaaagaagttctaccaccccatgtccacaagggggaatttgcctcagtactccatgggtggccgaatctaaagtgagtgaggggctttggtgaaaaagacagtctttccccatcactttatattgcacaacaagaaaagccccttcctttcttcctttattttataaaacgaacggccactgtgtctgcctgggcttgaggcagggcgcgatacaactcaatcaacctcgccttccgggttcagcatttctcctgcctcagcctcccaaccagctgagattacaggcacccaccccctgcgcctggataatttttgtatttttagtananggggntttttgccatgttgnccaggctggtctcgaactcctgacctcaggtgatccacccacctcggcctcccaaagtgctgggattacaggtgtgagccatcacgcccagccggaaagcctctttttaaggtgaccacctatagcgcttcccgaaaataacaggtcttgtttttgcagtaggctgcaagcgtctcttagcaacaggagtggcgtcctgtgggctctggggatggctgagggtcgcgtggcagccatgcnttctgtgtgcacctttaggttccacggggctattctgctctcactgtttgtctgaaaacgcacccttggcatccttgtttggagagtttctgcttctcgttggtcatgctgaaactaggggcaaggttgtatccgttnggcgcagcggctacatgtagggtcatgagtctttcaccgtggacaaatt

SEQ ID NO: 673972 - DNA, 281 bp, Homo sapiens
agtgactctaaggatcgccccagctactcagtgaggctgcggtgggatgatcagttgagccacggagtctgaggctgcagtgattgaccactgccttctacctgggtgacagagaccctgtctctttaaaataaaaacaaaagaagaagaagaacccaagatgttatccctctatcttgggattaacatgggggtcttcataactcccggtactttaatccttcgagaaaggaggatgtcctttgcttgttacctcgtggttgggctcctgagtagctggg

SEQ ID NO: 673973 - DNA, 604 bp, Homo sapiens
  misc_feature (502)..(502): n is a, c, g, or t
ggcatgaggggagatttgggtgcttttctttccgtggcgcctcttcattttgtaaactgctgcttaatggaacaagagcccagcattgtcccggcctatcccccaggtgcagtcacacagtaggtacagtcctggacttcattctcagcaggaggggcaacaagaactcctcaggaggtaaccacgatgtcgctccctggctaggtgctgggaagcccaattaggatagttgtgagtgctctctggggtctgaaagtgttctgtttctcccttgggattagaagagtgcttgcaaggcgtctttttgggtgatggccattgctgagctgtgctgtgctgtgccggtgactgacaggttcctctcctctaacccagccaggccctcatggacgagagtgcactcaggtgtactgcacccccttccatcctcactgcagccctgagctgggtggggcagcatgtgggagtgagccaggaagatggggcacaggggcttcccggngactgcagggcaggcggcagcagggagggcatcgggaggaggtgagctcctgtggacttccatcagctcctcctcgaacccgcatctgcaccgtgcgtgcct

SEQ ID NO: 673974 - DNA, 679 bp, Homo sapiens
agagacgctttcctctgaaagtgcgactgtcactcttgtgctgatgctgctcagtctgactgggtataccaggaccagttcagattacgcagtgcagcgactactgagcatgggaagaggggatgaaagcacatacatcatgcgcaaactggctctggatttatgatgtgtgacgcctggatatgattagaggattgatgctgagagtaccttttaagggtaatgatgtgtaaagatattacctgtgggaacggttatgggtgtatggataattgataagagacgttatttattatgaatatgagattttctgatgcggggatattgggtcgttggacagcgtagtgtggtgtgtactgcacttactctttggctaagggactatttcagaatgagagacagacacgtagttgaatggtttattcggattgctctaatatggtgatgaagatgtggttgggtctcggaaattctcatggtgagcaagtgaatacttcgctggactaaggtgcttcaagaatttctaggtgatgatgggacaacgatgccattgctgatggaaaacaagaaggctgttgcttaagtcgggcaaagggcttggcagagagggatgtgaggcagaggcattgggtccaggaagtaagtcttaataaagtgtgggggattaccctggtactaa

SEQ ID NO: 673975 - DNA, 697 bp, Homo sapiens
  misc_feature (217)..(217): n is a, c, g, or t
  misc_feature (248)..(248): n is a, c, g, or t
  misc_feature (274)..(274): n is a, c, g, or t
  misc_feature (375)..(375): n is a, c, g, or t
  misc_feature (377)..(377): n is a, c, g, or t
  misc_feature (395)..(395): n is a, c, g, or t
gctctacttagagtttaattctctttgctccagttaaaaggctccttgtatctgtgttcattgagttaaaattctaactctagctgccatttattaagtgcctgttatatgcaaggaattttacatgcattttctctgttcttcacaaggcattttttccattctgtagatgaggaaacaagctcaaggaggttaagtaacttgccccaaatcctanaatcactaagtgatagagcctttggagtctntctgcctccaaaagctttgcatcttntcacagtggttggtctctgttcctcttggggttaggaactgttgtcattatgccagccccttcctgcagtggctctctcctgttctaatgtcgtgttcccntntcttcatgacagcagaancaagtcaccaaacctgttggaggtaatggaaaaaatattggcataggaaccaaacgacctggcttctagccccaagctgggcatgtggccttaagcaagcccttggctcctgaaatttagagccgtacttcttccctgcctaggatgggcatttatcacgaatgtgtgagaatctgcatatgctccacccacataatgggtactgacgaaattatgtttgggacgtaagcacataactgtttttttttctgatgcatatagatgctattgtgattaataaattggaaaatgtgaaaaaaaaa

SEQ ID NO: 673976 - DNA, 1149 bp, Homo sapiens
  misc_feature (256)..(256): n is a, c, g, or t
tggcagaggcgatggtgggaatgcgcagctcgaaccagcgatgccgattctggtttccatgggggctgcggtccacttcgtgtggtagcccagcggctgcatgtgcggacggccggggatggctcctagagcatatactatacgcaatgctgtgcggcttgcggctggctgggcttgtctcgagtgcagcccgttggtggcatggcagcgtgtgatcaggttgcctggcatagacgctgcgagcctagcacgagangtcgcatcgcatgcggctaggacgttgatatgatctaggaccgagtcaccatacaggtgatagacagacacttcattactctcgtgtgggatacagactgggtcgtccaaatgtgaaatatacacaggggcatgaactcacaccgagaggacgtacactcatagagatctcaagtaaagaagaggtgcagcatggcatttctttcacaaggaaataccccacttgtcgagagtttgaaccgtcaatcgctacgtgagatagcgagcattctcaaagatacgcgctgtgccctcgcaaaagaacgctgcgctcgatcgcgagccaagtgtcaccacaagcggccgaatgacagcatcaaggggcgggaaacagggacgcgacgcatattggggcagaaagcgttggccaagagccaagggtctggacggctggcccccccggtggaaggtggcgctagggcgacacatggtccgcacggagtgctgttcaagacacttcatgcaagagcaagggggcgcaaaggccctgggtccgacaggaagatgctgctcgaaagctggtccgtatcttatcgtaaacctctggagccatcaagaacaagaccccatgaggatcaggagccggttgggtttgagccacggggaactgaaggtcttatgccctgggaagcgaaaactcaatgaaggaacagtgcacgtgcaacgcgggtcaaagctaacggtcctggagagaaacctaaggcaggtactccaagagcatgcccgggcagtggaccaggatggaagacctggccgagaagctctccgtaaacacttcgccacccttttgtgagagtcgacaaaagcctggatctcaagggaccgacgaacggtggaattaaagcgggaacaacg

SEQ ID NO: 673977 - DNA, 941 bp, Homo sapiens
ctccagcaggcggagcgtaattgcagcggtgagcggcggcctgtggccgcggctgggtacggcccggttacccgccagagccccgacgcctgtgccggatccacccaccgatggatagaccattgtgagggcggagccgcgctgctctcacgatgcctgctggcgtgacccgattgccctcccattccttggagatgggtgagcgtggtgaggttgctgggacaggaatcctctaggaggcgcaggcccggagagttgagaccgacctcctagccaactccggaggatccgtcggttcaggtatgatatgttagcgcgtttgccctatcccaaaagcttgcttgctgagtacctatcctgtctcccgcattaagccggtggtcccacccaccttgtgttccgcgggcgcttgcattcctcccgagaccactccgtggtgccccgtcccctgagctcccgtcggacgaggtgggcgttctcctattcactaacgctgatttccctcacttgtcctctcatatcactgtgggtggaatatcgtgtgtctccgggtggcctgcttgtatgtggggcattcacccttgggacgcacttccttggggtaggcttttaaccctgggagactcccatgacttcggcggtaatgggtagtactcgggcacggcatgtgttggcacggataggtgacacgggggggcttggaagggcccggttggcggaattccacccccactcgaatgctatcgctgggcgtgcaccgtttccgttccagacgttcgtcccggtaacccaggttcggtctcgccctttccacattccttcaggcggccacgcggtcgtgctaacatgaagcggcccgcaccctgtttttgacacgggtttaacgggcttcccggggccttgcccccctatatacaggccacactgttggtgtttccgta

SEQ ID NO: 673978 - DNA, 196 bp, Homo sapiens
  misc_feature (131)..(131): n is a, c, g, or t
gcttaacggggtgaagctgggctttctcccccctgtgactggagtgcatgttgacaccagcactttttctgcacatgtatcttcaattcaacaagggcgtttttttaatgctgagtaacaaggcaccaagngggttcttcggtatatttttttcagcaacttggcgcagtgtctttttttacacttttttacaaca

SEQ ID NO: 673979 - DNA, 916 bp, Homo sapiens
  misc_feature (916)..(916): n is a, c, g, or t
gcctggggctccgagatggtcagaggatgggagaaggggcagtgaaacaaggcttcttgtatcttcagcatgcagcagacgtttggaaagaaatggcgccgcttcggcgcctcactgtatggagggtcggactgcgccttggcccggctggagctgcaggagggcccggagtaagcctcgtctgtgtgaggctgcccggaaggtcatccgcctcagtgactgcctgcgggtggccgaggcctggcggagaggccagcagcccccgggacaccagtgccttcttcctggagaccatggagcgcctgtacctcctggcgtgccctgcagcggcagcgcggcgactgggtgcaggccatctgcctccgtggccttccccggtgcagaggaacggacgctctcggggccagagggaccacgcatgagcctggccctgtcatggaaggaataactcgacttgtacagcgagcgcaagttcacgagtacgggcccgctacaaggaaattttgctgtgcaccatgagacctacagaagccgagttgagaggtgccacctgcgggtggtcctataccctccgggctggggagagtgccctgtgagctgtgcgggtgggcccgagccagggacccagctgtacgactggccctagcaggtatctgcggccgctttgggcgggacacggtataccttgttcctttgtaggcaggccgtcgctgcgtctctggagaggggcaactttgagttcgagaacccggcaaggcaatgagatcttcttgggcccctgggaagaggccatgctctgcccagaaagaatgttgaaccctgtaaacccaaaccgaggccatgcaaaataccctgctacgtgcccggattgatagccctactctcgagccgatgatcactgcggcggctaaccacn

SEQ ID NO: 673980 - DNA, 414 bp, Homo sapiens
atatatatatatatatatatatatatatatagatagatatagagagagagagagagagagagatagagagatatatatagatcctgtatatattataatttaatttttattttttcttacttaatatactgtcttatttctttgtactcttattcttttatcctctgtctctgcttctctcctctctcgcctatctctggatctccttccctcctttcttgtccttctcattctttcgtccgtccttcctccatttctatgcccttcacctcatccttcgctccgatgtccacatctactcatctttccccttgtcaccctctcctctgccttttcttcctgctctcttccctctcgttctctcctttccttcgtttgtcacttgcctccctctttttccctctgcccctttcc

SEQ ID NO: 673981 - DNA, 388 bp, Homo sapiens
  misc_feature (25)..(25): n is a, c, g, or t
  misc_feature (57)..(57): n is a, c, g, or t
  misc_feature (381)..(381): n is a, c, g, or t
  misc_feature (384)..(384): n is a, c, g, or t
ctccccccccaatttgccctagcanggtagaaatccagccagggatagccttatttncccctatgggaattcctgttttggaagaggcaggtccttatagcagggcagacctaattaatgtgcctgaacctcattcccctccctgccttaagtgaataaaaacttttatttgactatggattataaagattgcctttaaggagccttgtttattttggggaaggagaatggatattttgtaggagaaaaagactttatatagtaaatgaaaagtctatgggctgggtgtagtggctcatacctttaatcccaacactttgggatgccaaggtaggagtattgcttgagctcaggagatcgagaccagggagactgcatcanaanaatt

SEQ ID NO: 673982 - DNA, 545 bp, Homo sapiens
ataaatatagaccaatgtgacttaattaaaataaagaacttctgcacagcaaaagaaactattggcagagtaaaccgacaatctatagaatgggaaaatatattagcaaattatgcatctgacaaaagactaatatccagaatctataaagaacttcaacagatcaacaacgaaaaaaatcccacaaataatcccattaaaaatgggcaaagtatatgaacagacacttatcaaaagaagacatacaagtggccaataaaacataaaaattggttcaacaacaattggctcaaactaaatttactttcttaatttgtttaataaagtgtttttaaacacattaaagaacgaaaacagaattttttgtaagcgttttcaattggtatcttttgacattgtttatatttcttatatataattcttcttaaacttaaaattattgatatgatagaattattatcttggttaaattcacgatatggaataataactattcaccacatgaccaagctaaaactaaagtgtcatattgttataatcaatga

SEQ ID NO: 673983 - DNA, 245 bp, Homo sapiens
atacagcaatagcagcaggatggccgcccgagctccgccgttcctccggttcaggccctttctgtcactcagggaggtcaggctggtcacgttcacaacaccagccaagaaccagggtttccacgacctctgaccccacgggcccaggctgaccaggtgcagcaagcggcgggcaatgtacaaaaactctgcgatggtctcctgcagccccaggggggtgggggtcgcactcagctcctcgtgat

SEQ ID NO: 673984 - DNA, 958 bp, Homo sapiens
aatcagagaaaagggtctttaactccatgcatttagcgacccaaagctaatgattctaatgtctaaactagttctctggttctttcagtggggaagcagatttggtgtaccacccatggttattgactcacccatcaacaatcgctatgtattgcgtacattactgcgcagtactcatccagtgaattattgttagcggttaccataagaatatcttggaccgaacctgataggtacataagaatacccaatacctaggatcgaaagatcgcgccgctccattcgatgctatacagagcgagtagcgagcaattgcaaccgctcagattatttgacacagtcagatctgcataactccgagaagttcaaccctctccacgcgcaattatgtgagtatcactaaactaagaaccgtaaccgcagcacccttagaccaggtaaccatagctatcagtacaatgtacatgttagccgttacactatgacatcacttacaagtcaataatccgcttcttcagtgcctcgattgggattgacctcgcaccatcatgagtagggtgtccacattgtgacctagctcgagtacctgccgttgagaatcgaattatccgcgtcactagaagaggtgctaactctacctcgcgtcctgggcgccataatgacttaggggggtaggcatttaaggtgaaaccgaacaattagcatatctacttaacacagcactcaatgaacctgtttgggccacagcatgacgtgaccgtaaagaccttgaaatggcccaaacgggcattcgggctcgcggtgcacctcacaagtttgatcgtgaacaagggccgcctttcacggtggtgactccgtggaatgactggcgagcagcccaatgtgggactgggttttaccaacccaacactgaagaaatccgggcgtggcacagctaacccacttgctcgtgaattcg

SEQ ID NO: 673985 - DNA, 926 bp, Homo sapiens
  misc_feature (680)..(680): n is a, c, g, or t
gagtcggacgtgcgacacagcccatcccctcgacgctcgcgtcgcatttgggcgctccctaccgctccaagcccagtcctcagccatggcatgcccccctggatcaggccatgtgcctcctcgtgccatcttccacaagtactccggctgggggagggttgacaagcacaccctgagcacgaaggagctgaagggagctgatccagaaggagcttcaccattggctcgaagctgcaggatgttgcaaattgcaagcgtgatggaagacttggaccgggaacacggacccaggagttgaccttcccaaggacgtatgtcacccctttcctgggggacttgggctttgattctaccaatgagatgcctcaaggggcatggacaaatacaattacgggcactaattggtcgaccacccctctgggggagtcctcttctgagtccaaactccacgttgtgtgcgctacttgtcgcaaccacatttttgtgtggtaccacattcctacgagactccagcagacgcacactaacacacacgctcaacatattttggtgcgaccgcgtcgtgggcaccctcagagaaagtctttgagacccactatgtatgtgcgcctgcccgagccacccctgtcggcgactgaggcacacggagcacacaggcgttgcacaaagaagagccccgnggcccgacacacgcgagcgacgagtgactcctacagcaaataaaaccggccgggcggacaacgcacgctgtgtgacaaacaactacaagtgtagtgtagaggaccaacgagggctacacacagcggggacccagcgaccctggataatacatatagccccgcggtgggtggacacaacgtgtagcaggaacatacatacagtcgaacagatgcacgcgtcgtgcaatgcgaccagcatgcaaagca

SEQ ID NO: 673986 - DNA, 644 bp, Homo sapiens
gggggtcagagacacctccaggatacagatcagtcgccccttcagtcgcagcccatgtccaggactccttacatctcgttcacgcaagtagctcaattcaggttcatacctagcacatcggaacgaagtgggcaatgcatgatttatacacatgtcgtgatgggcgtgagttatccgcgcaggagtcgtctacgagaaaagcgataaaatcatacccctagcgagtggggtccaaaggggattgggagcgccctctagaaacctcatagcacagaaagcgcctagctggggagccagacgagcagagcggtcgctagtctatggggtcttgtgcaatcggtgggttatgaccacgaaatgtttcaaactttcaccaaagaaacaaaagcgtaccgtggggcacccaaatcccccaatgtgtttccatccacgcattttctatctcctagtgggaaaacacacgttttgcggacgggcgttggccctggtttggggcccgtagagtgcatggggtactttggcacggggggaatgtcttccgccggttagaacagggaaaacaagcttttgtggggctacctatacgcgcgggagagagccgtcatcatcgccgaaatccccccccaaattgcgattccttcccg

SEQ ID NO: 673987 - DNA, 846 bp, Homo sapiens
ggagtaccgtggataactgtagcgttcgacaacgaggccctctatgatatctgcttccgcactctgaagctgaccacaccaacctacggggatctgaaccaccttgtctcagccaccatgagtgatgtcaccacactgacatccgatttccccatggccagaccgtcaatgctgaccatccgcaaagattggcagatcaacatggtccccgttcccacagtatccatttctttatgcctggctttgcccatctcaccagaccgtggaacgccacgcagtatcgagctctcacagatgacaggaactcacaccagacaagatcattcgcatggacaagaacatgaatggctggctggggaagcccacggacaaaggagacgcgatatacttctaccaacgcggtgcgtagtgtgtggctctctagcaggtagtgcgtcgagtagtgatcacaatgacagagggagagtacgaatgacgcacaagaatgacttaacacgttgctagaaagaacgaaacaggcagacctacctttgattgggaactgggaatcaccacaaaacaaatgttcaaggaacaaggaccagttcttgatgaaaccaattccacaaccctccgatgggacctcaaaggaatggacaagttcaacccattataaagatgtgagacacaataagacaacagaccaatccccagggtagcttcagtttcaaaagacgacaattatccgagaagccacgttcacattgcccatatgttaccaggccgggaaggacatgtccattcaactgggtcacaacacggcgaaggtgattggcggcacgactggagattacaccgagcgactga

SEQ ID NO: 673988 - DNA, 759 bp, Homo sapiens
  misc_feature (333)..(333): n is a, c, g, or t
  misc_feature (528)..(528): n is a, c, g, or t
gaggctgacgcttgaaacgctgatgaactgcatcagggtcaactaaaaactctcggcgcatctggaattctcctctatcgttgccttgtgtggtagtagttcccgttagttgtatcccatttgttaagcggtgcgtttgaataagagcgagttctgaagagtatggtggagtactgttagtcctcggaatttaatagacttcataaagttcgatttcatcaatcattaatttctccgatcagtagcgaattatgatgttagaaaatgaggttccatgaaaatgtcattagagattaataatcgcatacgaatcaattgacatgcgtaataatnatccacatagccaatcgcaaggcaggtgactgaggccccgtcataagagcgaatctggtcgagaatagattatagataggctgcaaataattatatatcaatgttcattgatcggaacgagtcgatctggttagcgatataatagtcatctacaattctgattaatcattctagtagggagatttgagaggactnctttgacagcgtattttcaagtatgtgtttggatattcccagaacctataatatgcagagttggtcttgagcgactcattaaggcggaggacgtgtgctctgctagatttcaaacctgattttaaagctacagtaatttaaaaacagtagtaatggtgtaagtattcataaatatatcaagtaaaagaatacagattcaaacaatatgcccacatatgtacagtatcgatt

SEQ ID NO: 673989 - DNA, 755 bp, Homo sapiens
  misc_feature (287)..(287): n is a, c, g, or t
aagcaagcgactgattgccctgcccaactcagtcttgaatgactgcgactcattgacttcaataagatctctaacgccttctagtatagtcaattgagacttgaaattgctaaagactatttatataagcaagttacagcaatctgagtaatgttgggttcagtactcacttactcgcacacgtcgtctaaaagaaggcgtcggacagagccctcggcgttggcgttgtgtggtctgtctggctatctctacgcaatttcgctcattgcaccttatcgtaggacatncaacccttcggaatgcgggagaaggagtaggattaaatcccatgccttctgattacccaagatgcaggtcgctggtgcacacctagtcgcatattatagcatcattcgccacgaaggttaaaagccagcgggtccctagtcttagtgcccagcctgcttgtgtgggctctggcctggactggtggctggcccagggggcacgcagtgcttagagcattctgcgaggcattctcttgtttacacaagctgcagtcagacaatgccatttcgtccccaccacggaacctttccatctaagatttcttccaggtaatgccagcaatcaggcagcacccagctgtgggggcagtgcggtgggggagacccacattgatgacttttttaattttctccccccggaaaaaaaccaaagaaaggttgtggaaaggacctgcccattgaaaaggataggcaagatggttgtaaaca

SEQ ID NO: 673990 - DNA, 255 bp, Homo sapiens
  misc_feature (18)..(18): n is a, c, g, or t
  misc_feature (26)..(26): n is a, c, g, or t
gggaagcctcaaattagngggagatngatggggaacggctgtcctgtggagcagtcagaacacacacctacatttatcagttaatttcgtcgtcttatatggacatggttcatggcagccctggagcaattacaacagtaataccaaagatcaccaatcacagatcaccataacagatataataataataaaaagcttgaaatgtgagaattaccagaatatgacacagagaccccaagtgagcccccactgttg

SEQ ID NO: 673991 - DNA, 212 bp, Homo sapiens
gctccagaggcacaaggaggaggcagcaggggtctgcattttcagcagtttcccagtttttctggttctggttttttcccaagcggggatttgggtcttcttatctgggataagcacaggcagagaggggctggggtagtgggcgggtttctggatgcagctgcacgcgggctggacttagcactgcagctcctcctcctgggggcctcggg

SEQ ID NO: 673992 - DNA, 322 bp, Homo sapiens
gttatattcacagagatagtatgtgacccattttatcagtgttaatattactttacactctttattttgtgtaggtgctctgctgatagcacatttgccagtcttacaagctgggaccctgtctccctcttgacttgtctcgtgtgtgagaaccctgtggagcggtagcctcagattcctcttaccgtaatgaatgtcccagggcagaaaaagaggatacacagatgcttccaaatccttcttccaaagcaatagctgatggaagaggagctccagcagcagcaggtaaaagaaaaaaaataaaggctcctataagtagata

SEQ ID NO: 673993 - DNA, 254 bp, Homo sapiens
gttctagaggatcccagaaactgacactcttaaacactgatggtggtaaagtaaaatggtgcagcagttatagaactaggtttggtagccaccaggtatacagaaatgaaaacatatgtctacacagaaacatacaagaaataatatagcagcattgctcatcatagctcacaagtgaaagcaacccactgtctatcaactgatagatgaatgcccaaaatgtgtttctttccgtaccccgatacagcgaccaa

SEQ ID NO: 673994 - DNA, 1438 bp, Homo sapiens
ctggtggatcgccccgtgtccgcgtggtgccacatcgggggagcgttggcgcgtctattgtgttgtgattgtggcgatattgggcggggttttggatcctacatgggtgcctgttttgtcgcacccgtgtgtgtgtcgcgctgggtgtgtcagccctgcctcctcgtggtgtagggtcccgggctgtgggggggagacgcttgtttggtcagctggcagcttgggggcgtttcgtttttgcccgcaaccgcagccgctgtttataggtgtcctctccttgggtcttgttgtgtgcctcgggggccaccgcttagggtgaaatatcccccctctagggacggtgcgttggaccccccgtttgttgttgccaggttgcctgcgcccatttgtctgctgagtgtcacctagggggcgctgttccacttgcgccggacgtggtgtcctcggggggccaccccgtgaggttgttgctttacacccaacgtgctaccgcggggttcccctggttcgaaaagtctggcgtttggcacttatggcgccacccccaagagtatgttgtttcagtttgggagggccaccccctctgtggttgggccccaacagggcactttatctaaccgctgagcttcgcccccccctattgtgtggggtcttgaagaaagagataatgtgtttttgagcctcggagggtatgtgagaattttctctgccccttgtaaacccccttccgcgtgccgttgtctacgagaccctgggtggtggccacctgagccacatgcactgtcgcgcgctccccaggccatcgccccccatagacagcgcgagagcggggtaagggctctctgtgctcacgccacaaccacagagtggggccacatgtcacacacaggtccccttgtggtgggccccccacctgccccacacacatcgtgtataggctctcccccctgtgagagcggggtgctcccacagttttgagagagacacgggggggctcgggcggtgttatcccctcggcgcccacacttctcccacgctgtcgcccctcgctggctgtgtatacctctccctctggcacctctcagtgtgttctgcacagaggtgtgttggtctccctctgcgctcgctctctgagtgatacagtgtggctctcttcgtgtccacatagcctctttggtggcggagttcactgttgtgtttgtggaggcattttataggggaacccacattgcacactggggcacctgccccatggccctgcggtatagcgagcactttcccacgccaagggactggaaggagagtttccgctcgcctctcacgccccgaactcgaaatgtcacgaaaccagcccgcggtgcttcaccctcttggggataacttgtcttaattttttaataaatagttcccggttggttttccagagaaaaaaaaaaaa

SEQ ID NO: 673995 - DNA, 718 bp, Homo sapiens
cttgtgactagtacacatctggtaattaccttcatcgtggtatagtatcgaaccattggtagaacattcctaatatgaatcccactacgatcctgtaatacatcgaattcgaatactctgttctcgacttatctgggaagaagagtcgtaacgtgtctctacaccctataaactgctagttattcccccacctctacgcatcatgtacggtagaggggagagaaagtgctagctcacgcgaccttgcacgtatgattcagtacgaaaggcacgaacaaccatcacgcccccatcggatgacctcacgcctcgtgagtacacatctacactctagtgtgcttgtacagaatgtagctatcgtaagaccagcaaaggctgattccaggagtgagttggcgcgaagtcaactaacgtaagacgaatataaatagtgctagtatcacagttgctcagctttgatgcatcatcttagcgatagtgtaatttctattttttatttttttcattagaagttacccaaattacagcatggtcaagacctcgtgagaccaaaattttgtcccatctctagcccctcacaactgcttacagaatggatcatgtcccccttatgttgaggtgaccacttaattgctttcctgcctccttgaaagaaagaaagaaagaagactgtgttatgccactgatttagccatgtgaaactcatctcatcaccctt

SEQ ID NO: 673996 - DNA, 743 bp, Homo sapiens
  misc_feature (540)..(540): n is a, c, g, or t
gcaaggactaacccgctataacttctgcataatgaattaactagaaataactttgcaaggagagccaaagctaagagcccgcgaaaccagacgagctacctaagaacacgctgaacagagcacacccgtgctatgtggcaaaatagtgggaagattgtcataggtagaggcgagaaaggctaccgagtcctggtgatagctggttgtccaagatagaatcttagttcagctttgaatttgccgcacagaaccctctaaatccccttgtaaacttgtaactgttgagtccaaagaggaacaggtcttctggagcactaggagaaacaatgcttgtagcagcagcagtaacaatacacttgtagagcatccacactaggtagggcctcaaatagcgaggccgaccgaagttcacagcaaaagcgattacaaggctcagactagcgcgagtacctgaatcataagtccctgaaacatatatactgtaatctcctcaacaacgcgcagattgggaccggaatgcgtattcagcccctgattacnataggaaactaaatggtatagctgattacacgtaagcatgtaaagacatgtgctccgtgccgccactaaagcctggcgtctagattgaaagacagctgatactgagcaattaacgatgccaagtatctacaaatcaatccaatcaagtgcattagttaccctcgagctgtcaacccaacacgaggcagtgctcataaggaccg

SEQ ID NO: 673997 - DNA, 710 bp, Homo sapiens
cttttttaagttcaaaatataacaccagttagaattggcccctaatctcgaaaattaagtgggtggaaaccggcaaaccttgaaaatgtaggttgtgtttccagggtttaacgtgtagaccagattaatggtgtgcatggtttatttaaggggttgagatttggtttaggacctttgttggcagtccctttgtgcataacgacagtatttttcttgccgcccaaaagtgtcgtggtagccttatcttttctgcaaagttcccggttgttatgaacctaatattgatcccagtcttgtttgcctcttaattctttaaaggcgccaggggttgtgtgtcccaaaaaaaaatgcaaagaaaggcttgttgccccttgaaagatttcaaggcatcgccttaaagtccaaagtcaaagcacctgaggggggtggctcagtgtgcatataacgtgctcattttttacggaggtggatccggtaacaaaatatgtgaacacgggctcctgagcctcctgttaacccatggaaaaaccgtttttcatgtatttggggagtttctttttgttctacagtgtctttttaaaggaccttggcatgtaggagaaaaaaaggtgtggagacttttatttgtatgaccaacattgaccacgtacctccggtgtatggggcagtcaaccgaaagaaaaaagtttctttgcctttcaaaagaatgt

SEQ ID NO: 673998 - DNA, 235 bp, Homo sapiens
gatggatagatggataggtgcatggagtggtatcactgatggatggatggatgtatgcgtggatggatgaatggataggtgcatagatgtgatgcatgtaatggatggatggatggatggatggatggctggataggtgcatggatcgatggatggatgggtggatgggtgcatggatggatgcatggatgggtgcatggatggatggataagtagctgggtagatgggaggtag

SEQ ID NO: 673999 - DNA, 317 bp, Homo sapiens
tggaatgtgtggtgtatggaactttagacatatatccatgtcttcttgggtctttgggcacattttcttactaagtttaaaattgctagcaaaaggtgtactaactggttttgcattgtgcatattaaatcttttcaacaccttttgtatgtactcattctgagacaatgtttgtttgcaatttttcctgtctctagttattctcataccaaggatttgttttgcagctcccaagtccttcattgcaaatgaatttgccaattttcttttgagcacatttatttcctgcatgttagaccctacaacataacaccaca

SEQ ID NO: 674000 - DNA, 855 bp, Homo sapiens
  misc_feature (1)..(1): n is a, c, g, or t
ngtcctacccactaacgatgagggggaatctctgcgtgggagaatccctaaagtccgctcgttgtcgccccgccgggcttgtgttcactatgtgggtgtgtagaggcgcagcgcccaggttgttggtctactacgcgtgtgtagtccagtctaataagcattggggggagtccgccctcctctgcaaaggaaaagtgcgttcgaggagccacactccattgtttccgccgacaccatagtgagatgaaagggacggtgtgtctgctctacccacgacaggttgtttgtttggtttattcaatagaaggaggtgagcgcttacacagaggtgttacagatatagagtaacccggtgggtaggacaagacaaggagagatcaattagacttcctctctctctctctcttctgcgtgggaagatgttatatcagtatccacgaacaaaatgtgatggattttcaaagaggcgcatctttctcgtgcgatccaataaagagaagaatattatctactctggagagcctcgctcgagtacagagtatatctagggaagaaacaatatctgggtgggatagagggagagtaacataggcctacttaaacagagagttttgggatttctacccgaagaaggataaacgcgtgagagggagttgtaattaaaacacacgcggtagtattcgtcttgatacaatacagttttcacaaaatcaccgtgagcccacgaaaactacgtatcaggtcggcccagagggagaaaggatatcttgtttattaaacacacatgtattttttataaaaaatacggtcctatgatgagtaaggagggaaaatgtcggcgccgcgttaatatta

SEQ ID NO: 674001 - DNA, 203 bp, Homo sapiens
  misc_feature (27)..(27): n is a, c, g, or t
  misc_feature (32)..(32): n is a, c, g, or t
  misc_feature (42)..(42): n is a, c, g, or t
  misc_feature (59)..(59): n is a, c, g, or t
  misc_feature (71)..(71): n is a, c, g, or t
  misc_feature (156)..(156): n is a, c, g, or t
ctgcgaacattgccacatcagaggctnattgnggcaaccgancggggtattttctacanaatgcagcaggnggtgccagataaagagttactggagcaccaaccgcagtgaggggtgcaacctgtccgcagctgcgcgcatttgtccgtggatggncatgaatggccttcaggccatcgcagaggcattagaacagggaggga

SEQ ID NO: 674002 - DNA, 535 bp, Homo sapiens
  misc_feature (34)..(34): n is a, c, g, or t
  misc_feature (68)..(68): n is a, c, g, or t
  misc_feature (88)..(88): n is a, c, g, or t
  misc_feature (90)..(90): n is a, c, g, or t
  misc_feature (92)..(92): n is a, c, g, or t
  misc_feature (109)..(110): n is a, c, g, or t
  misc_feature (123)..(123): n is a, c, g, or t
  misc_feature (126)..(129): n is a, c, g, or t
  misc_feature (135)..(135): n is a, c, g, or t
  misc_feature (138)..(138): n is a, c, g, or t
  misc_feature (142)..(142): n is a, c, g, or t
  misc_feature (157)..(157): n is a, c, g, or t
  misc_feature (160)..(162): n is a, c, g, or t
  misc_feature (167)..(168): n is a, c, g, or t
  misc_feature (178)..(178): n is a, c, g, or t
  misc_feature (185)..(185): n is a, c, g, or t
  misc_feature (191)..(192): n is a, c, g, or t
  misc_feature (207)..(207): n is a, c, g, or t
  misc_feature (257)..(257): n is a, c, g, or t
  misc_feature (281)..(281): n is a, c, g, or t
  misc_feature (370)..(370): n is a, c, g, or t
  misc_feature (410)..(410): n is a, c, g, or t
  misc_feature (415)..(415): n is a, c, g, or t
  misc_feature (422)..(422): n is a, c, g, or t
  misc_feature (424)..(424): n is a, c, g, or t
  misc_feature (433)..(433): n is a, c, g, or t
  misc_feature (470)..(470): n is a, c, g, or t
  misc_feature (522)..(522): n is a, c, g, or t
cagctgacagtcgtgctcagagagtttctggatnctcggcttatctccacagaggagaacacacaagnagcagagaccatgggaaccntntnagcccctccctgcacanngcgcatcaaatgnaannnnttactnctnacancatcacttttataanttnnnaaaannaaaaaaaagnaataatntttttnncaactaaacaaaaantaacgggaaccccctttcctgcggaggttttggcgaattttgggctaaancttgagggaactaggatgagcctnattcctcatttgcatcctaagagtaaagggattgtatgaggggcggcggctactgttttgtttgggggtgcccatgcttttgttgtttnccctttttcatttgtaattgcttgaaatcagttgaatctngctanaatcctncncacattctntagtataatgtatatgatgtttccctctgctgctctngtttcttcgttagctttcgtgtataaggataagggataagctcctagaagtncatagaatgagaa

SEQ ID NO: 674003 - DNA, 821 bp, Homo sapiens
  misc_feature (684)..(684): n is a, c, g, or t
gcacacgggggagagatcattagtgagtgagtataacgggtgtggccgggcctttcatcagggcactaaccaatcgtgtacccgtcacattctgagtcacacaggagatcccccgttagttagtgcaggcccatggtggtgatcaagaattccacagaggatctatgctggaagaaacattgagaacgcaatgcctgaatcatcggtaaatgtgatactatatagtgcgagctgtgtattgcacatgcatcttgtgacagtagagagcctcttagaataaacatcagcgaggcgtgacaatgccatttcacttgccagaataccagtgaacctctattcaagttgtacccaggaaggatgtggcaaaacactttggattctacccaagcatggtctgaacatgcgatcactgccaacggtcccagagtacgggtctactgttagtgctcaagatagagggcagtggttgccctgtttgctggtcgaaacaaacgaatgaggatcgggactctctactgaagacctctgtgatgaagacaaacgccattgacggaggacaatgactactgttgacacgtgataagctcgcgtagaagagccattgtgtacatccggcgaaacagggattcacctctaagtcgaccattattgatataatcttctattgcactctcaccaaaaggngatgtgattgtccgctagtccaaagaagaaaggcttgttgggaaggcaccttattacaaacttgttgttttaatctccaaatatgcctatattccctcttccttcccattgagggaatagccggaccttttaagtgt

SEQ ID NO: 674004 - DNA, 460 bp, Homo sapiens
aagagttcttgcatgggacaaaaagagatgatggccaagcaagtatccctacagaaatttcaggaaacagccctgtgtctcctaatactcaggataagtcagtaggtcaatctcctcttagatctcccttgaaacgacaagcctctgtctgttccacccgtcttggaagtactaagagtcttactgctgctttctatggggacaagcagcctgtaacagttggagtccagtttagtagtgatgtctctcgaagtgatgagaatgtactagactcaccaaagcagaggagaagttttggttcattcccatatacaccatcagcagactctaattcatttcatcagtatcgatcaatggattccagcatgtcaatggctgatagtgaagcctacttttctgctgctgaggaatttgagcccattagcagtgatgaaggccctggaacttatccgggtagaaa

SEQ ID NO: 674005 - DNA, 473 bp, Homo sapiens
aagagttcttgcatgggacaaaaagagatgatggccaagcaagtatccctacagaaatttcaggaaacagccctgtgtctcctaatactcaggataagtcagtaggtcaatctcctcttagatctcccttgaaacgacaagcctctgtctgttccacccgtcttggaagtactaagagtcttactgctgctttctatggggacaagcagcctgtaacagttggagtccagtttagtagtgatgtctctcgaagtgatgagaatgtactagactcaccaaagcagaggagaagttttggttcattcccatatacaccatcagcagactctaattcatttcatcagtatcgatcaatggattccagcatgtcaatggctgatagtgaagcctacttttctgctgctgaggaatttgagcccattagcagtgatgaaggcccggataagttccagggccttcgtcgacgcggccgc

SEQ ID NO: 674006 - DNA, 177 bp, Homo sapiens
tacgatcgagctcggtacctattccaatcagagagcgggataaagacagatgtagaaatttcaaactccggcacatcagaaaatattacctcattaagtttttatcttctgatggaatcacgttcaggaatctgtctttccgtaattccggaacaagctacagcagaatactaagca

SEQ ID NO: 674007 - DNA, 241 bp, Homo sapiens
tcatctcctgtcgcttcctcagtgacagaaccctgacacactaacagagatctcatcccccctctgacatgctctcatagcatcaccaaatacctctcactcctgcccccattcgtagcaattatcttatagctggctgcggtatcttacactacacagctaggtccattaggacaagaactgtgtctcccctctgatatgtccaaggcatggccctgtgcctaaaaagttgtaagcaatc

SEQ ID NO: 674008 - DNA, 333 bp, Homo sapiens
ggaacgtcactggggacaggggaccactgggccaaccttgcttctccccactgctgtggaggctcagtgaaaggcagattttgagtctcttctacttgttgaggggtggggcttgcccagaggtgggtaacctgggtactcttttaagggagcaggcacttgaaagcaattttccattgtttaagcaagaaggttcaaacaaggaaaggtccgttgcccctttcctttggcacttgttttcttgcaggaacaggttgcttgtgtagggcttggactttcccccttccttgagccccggagaaacttgtgtttggtgtcctggtaggtggaggc

SEQ ID NO: 674009 - DNA, 516 bp, Homo sapiens
tgattgctatatcgtcgagcacgcctcgggctgatctagtggccggtagagtaactggggtccttggggcgcccagctggttccacagccaccactctggccttgggtggtggcattacagggatgagggaggtccactgtgggtggccacagggctatggccaagcgtccctggccgtcttcctctggcctcagctttgtacctataggctgccgtgccgtgggctgaggtctcgccgccgcttgatccctgaggtgtttccatgctgcgggtggtgcttccaggcagagtgggtgggggcccaccgggcaccgcctttcttccttgtcctgctcactctgagagccttgggggtctccaccagtgcagacaagggctacattctccagggccgggtcttgtccctcttctccgtggtccacgcttgtgcagctacttggtattgggcctgccttctgcctcccttatgtgatctgtgtttccagtgatacattgttggtttctgtggagtgctc

SEQ ID NO: 674010 - DNA, 484 bp, Homo sapiens
  misc_feature (45)..(45): n is a, c, g, or t
  misc_feature (48)..(48): n is a, c, g, or t
  misc_feature (55)..(55): n is a, c, g, or t
  misc_feature (106)..(106): n is a, c, g, or t
  misc_feature (116)..(116): n is a, c, g, or t
  misc_feature (163)..(163): n is a, c, g, or t
  misc_feature (166)..(166): n is a, c, g, or t
  misc_feature (188)..(188): n is a, c, g, or t
  misc_feature (269)..(269): n is a, c, g, or t
  misc_feature (334)..(334): n is a, c, g, or t
ttcacatgggtttttttcagcccttttgaatagatttaccccttnccntctgggnccgtaacattttttaggggagaagctttggtggataggctaaattggtgtntcttttgtcntctgatgaagttcagtttttctaatgcgccttttcaaagtcttactntgnctttaacttctggtaatttgantagcacatgtcttagtgtaattttctttggattggtcttgattttttgagcttcatgaacatggaagtccatatctctctnaagatttggatagttttaaggcattatttatctaaagaagccttttgcttctttctttttgtctnctttttctgggacttctatcatgcatattttggtttggggggaataaaagtgcagaggtgtgtgtgtgtgtttggttttcataagacatatcaaacattttatagttttaacagtcttttttaaactgataacatcctcgtccgaattcc

SEQ ID NO: 674011 - DNA, 446 bp, Homo sapiens
  misc_feature (232)..(232): n is a, c, g, or t
  misc_feature (367)..(367): n is a, c, g, or t
  misc_feature (387)..(387): n is a, c, g, or t
gagaccagtctggccaacatggtgagaccccaccccccatctctactaaaaaaatacaaaaaattggccaagcatggtggtacatacctgtaatcccagctactcaggaggatgaggcaggagaattgcttgaacttgggaggcagaggttgcagtggggcaagatcgtgccactacactccagcctgggcaacagagcgagactcagtctcaaaaaaaaaaagggaggganggggaagaaaacagaacagagaggaagcaatgcaacaaactgagaagcagagcagcaagagacaagtttacaaaaggagatcataaatgacacttgtggctgggcgtggtagttcatgcctgtaatcccaacacntgggagggcaaaggcaggangatctttaggcccatgagtttgtgaacagcctggggcaacacagggagatccccaaaaa

SEQ ID NO: 674012 - DNA, 269 bp, Homo sapiens
ccgggtcgcctagttttagaagtttcaatagcacatagtgttgtataaaaatgcacgcaaagttgctagagagcatacaatttcagaaatgtcggggttatggttatattcagttttctaaggatgcactccaatcaagggaaaaatgcagacattatgcaagatgtcattatcttgggtaaaagtatgctcattatttggtctcttcacagtattaactctgatatccacttggtgcagagtctgctattgaaacttctaaaactagg

SEQ ID NO: 674013 - DNA, 707 bp, Homo sapiens
tgtcgaccacgcgtcgcctgtggcctgtggttgtcccgccatggacactgtcgcgggggctgccccgagagcctgtctgaggcggtgagccgggaggccgtgtgctaggtgtgtgtgcggcgagacgaatcggatgcgagctcctcaagaatactcatgctcaccggtttctcccacatcgaactgattgatctggatactattgatgtaagcaacctcattttacagttatagtttcaaacgaaacatgttggaagatcaaaggcacaggttgccaaggaaagtgtactgcagtgttaacccagaaagctaatatcgtatgcctaccatgacagcatcatgaaccctgacgtatactgtggaatattattccgacagataatatacatgtgttatgaatgctttagataacagagcatgacccgaaaacatgttaatagaatgtgcctggcagatgattgtaccatcttatatgaaaagatggaaacaagcatgggtatcttggacaaggtaacataatatcaacaaagggatgtgaccggagatgtaatgagatgtcaatcctaacgccggcaccaagagacaccattttccctggcttgtacaaattcgatcacacacacttcagaaagcctattacaatatgccgttcggtattgggcaacagatacttggttcaacacaagttgtatcggggaacagacaga

SEQ ID NO: 674014 - DNA, 216 bp, Homo sapiens
cgacgccaaggtatcatttgtataaacttttaattagatctgtggctggtgcgggcctccaaagcgctggattacaggtatgagcactgccccagtctgctggctcttttcaatggtctgggctaaggaaattatttggaaacctgtgcggttgagtgatatatactgggcacttccacatggtccatgtaaagggagatggttgggcgtacgggg

SEQ ID NO: 674015 - DNA, 125 bp, Homo sapiens
gcggccgcctactactactactgctcgaattcaagcttctaacgatgtacggggacatgagtcttctgactctgttcttttcactatgcaatacgcaaacaataaaatgttatacaaataaaaaa

SEQ ID NO: 674016 - DNA, 190 bp, Homo sapiens
agtccaagaagaggcccggcatgagccattcgatgatcggcgtaacatccaaattttccaccgtgcagcttgtcagcacctcgaccagtgatgtctaggccgttgtcggtttgctggacctcaacgcccaacttagccagttcgtgctcgagagcggcaaggcggtctgtttcgtggccgcgaatatgcg

SEQ ID NO: 674017 - DNA, 354 bp, Homo sapiens
aaggacatcctccataagaagtctgtcccattctctaaccaggtgctgaaattggtgtctgatttgtaggaatctccctgttgccactctgatggactagctggtgcaccccatggtgatcagctctgatgacccagctatgttaggtggcaaaggcttgttcttagatttctatgtaggtcttcatgggcacttggggggataaaggttgatctgtggaccctctatacagttggcctgtgaacttctatcatcgtacggtaccctgtcggagagtgataaaactactttcgtggcaatctggagggaagagatgggatcagttcattgcagatgtggttaccaagttgtgat

SEQ ID NO: 674018 - DNA, 332 bp, Homo sapiens
  misc_feature (138)..(138): n is a, c, g, or t
gccctttaaaaacttggggggaaaatttgtaaaaaaaaaaaacaggtttggtggggtttaacccccccaaatgggggggaaagtacttcgggcccccccccttttggtaacacatatgcaggggggggggcccccccntggtacctttttggtccccttgggtttttcccccccaatttaaaaaaaaacttttgaaaaaaaaaaaggggtttttttttaaaaaaaggtttccccccaaaaaaagggtttttgaaacccctttttttccccccccattttggtcccctttaaaaacccctttttccaaaaaagccctttggtttagattttta

SEQ ID NO: 674019 - DNA, 332 bp, Homo sapiens
  misc_feature (159)..(159): n is a, c, g, or t
cttagaggatccctcgaatcgacggtttctcattctgttgctatggtgagtgcagtgtggcacaatcatacatcactgcagcctcaaactcctgggctcaagcgggtccaaattcctggcctcaagtgaccctcccacctcagtctcccaaagtattgngattacaggcatgaaccaaagtaactttttttttttgggagacacgtttccattctaatgtgccaggtgggagtgcgggggtgccatctgggttcataacattttccacttccagaggtccaggtgatattccaacttagagcttctgtgagcggtgggaatacgcgggttgc

SEQ ID NO: 674020 - DNA, 106 bp, Homo sapiens
tcctgctttgatcccaacattttgggaggcgagttggtatggatacgaggtcaagatatcgagaccatcctggccaacatggtgaaaccccgtctaggagcgtaat

SEQ ID NO: 674021 - DNA, 397 bp, Homo sapiens
cccacccaggctggagtgcagtgacacgatctccacctcccaggttccggtgattctcctgcctcagccgcccgagtagccgggattaccggctcctgccaccacgcccagctaatttttgtatttttagtagagatggggttcaccatgttggccaggttgatctcgaactcctgacctcaagtgatctgcccgccttggcctctcaaagtgctggattagaggtgtgagccactgcgcccagccacactgtgttggttactgtaactgtgtagtaggttttgaaattagacagtgtgagtcctccaactttgttgttgtttttttttttccccaagattatttgggctattctagtttccttacatttccacatgaattttaagacggcaagcgg

SEQ ID NO: 674022 - DNA, 182 bp, Homo sapiens
  misc_feature (55)..(55): n is a, c, g, or t
  misc_feature (75)..(75): n is a, c, g, or t
  misc_feature (116)..(116): n is a, c, g, or t
ctgaagagctgtaacatgaaggcctggaagtcctacagcgccgtggatgtgctgnagaccctcgaacattgtggncctggaccctcaggagcccccgagatgactgcagggggctnaaatgcaatgaccccctctgtcctcctgaggagaggctgtagctgtgcctgtcgccccctaccttc

SEQ ID NO: 674023 - DNA, 152 bp, Homo sapiens
tgaccactttcgtcgtctctcacggagccaaacacagccaggacatcccgtaaccagctttgacacgtcaatgtgtgccttttagtttgatacgctgcagttcatcttccaatcaccagctcgtcatctgggtgtatagtgacgttcctcat

SEQ ID NO: 674024 - DNA, 426 bp, Homo sapiens
gaaatgggggaagtatgtaggagtagaagattagatccgcgtagtcggagtacatcgtaggtacagtaccattgtgtggcaatatgatttgatggtaagggagggatcgattgaactcgtctgttatgtaaaggatgcgtaagggatgggagggcgatgaggactaggatgatggcgggcaggatagttccagcacggtttctcatttcctgcagcgtctgagcatgttagtcattcagttcagtatagtagtgcagtgttaggaaaagggcattacaggacttaggacagccagataaggaccaatgcattcatgcaggggcgtgcatccatgcaacaggtgctacgctcttctcatgcatcaggggccgtagcgtcttatagaactacttgcgctgcattgtggccatacctagtgcgcctata

SEQ ID NO: 674025 - DNA, 268 bp, Homo sapiens
gcggacggcccccgaggcagacggcgaggacggacaggacctcgacagcaagcacctttacggcctattttaacgcacgggatccagagctccccgcacttcgtcatgttcttcgcgccctggtgtggacactgccagcggctgccagccgaccttggattgacctggggagacatatacaccagcatggaaggatgccacagtctatgtggctaaagtggactgcacgcccactccgacgtgtgctccgcccagggggtgcgaggat

SEQ ID NO: 674026 - DNA, 526 bp, Homo sapiens
atctcagcacttgggaagccaaggcaggcggatcacctgaggtcaggagttcaagaccagcctgaccaacatgatgaaaccccgtctctactaaaaaaatacaaaaattagctgggcgtggtggtgcatgcctgtaacctcagctactcaggaggctgaggcaggaaaatcgcttgaacctggggggcggaagttgcagtgagccaagatcgcgccactgcactccagactgggcgaggagcctcagtctcatccttaaatagaaataaaataaatgtctgacccatgctattgcatggatgaacttgaggacattgatgctaagatgcaatgcttcggctatggaaggaggttatgactgctagctgtacgaggtgtctagaatgggcaaattcatggagacgaaatagaaaggtggtggtcaggagctgggcaacagagaggaacagggaattgtggaaatggggagagagtttcagggcgggatgatggaaacttctagaaatagatagtgattgttacacag

SEQ ID NO: 674027 - DNA, 116 bp, Homo sapiens
ctcaagcgcttgatacattcaatctttaacatcagaactatatgcacacacagtgtgcacacatcactatatatagtacacataaagtgtgtgtagttaaataaaccatgcatggt

SEQ ID NO: 674028 - DNA, 286 bp, Homo sapiens
  misc_feature (176)..(176): n is a, c, g, or t
  misc_feature (232)..(232): n is a, c, g, or t
tttttcttcacaattctaacctttgaaaatattataactggatatttcttcaaaacagatgtcctggatgatggtccataagaataatgaagaagtagttaaaaatgtatggacagtttttccggcaaaatttgtagcttatgtcttggctaaatagtcaaggggtaatatgggcntgcccccccccccaccttcctaaagagcacttttgtattgtaatttattttttatnacgctttaaacactatgtaaataaacctttagtaataaagaattatcagttata

SEQ ID NO: 674029 - DNA, 634 bp, Homo sapiens
ggtaattgtgaattacttaggatgagaggccatgagataattcattgcgtggtgtttggaaaataacaatgcatcctatggaatagagtgtgcccatttatatctatatgatagtggttgcaaggtgatgatgacatctgatattgcagctagcagtgaagtcgatgatacctatgtcgcactggtaggcacccagatcatgtgctaaatgagcgatgttgtattacatgaatatgttccgaggttatagcggtacttagtaaggctacatagtttacctggggaatatatttgctatcgtcttatgagactcttagctatggaccgtaattgctagctaattgggccgagacttttctggtgatactgacgtattcgggctggagtcacgcttgttggtgctcgcctttaggtgtcctgccttggagtcccataagacccaggggcctcatttccaacgcgggcattaggtgcaaataggtgggggaatcatttcaaacgagagtggttacttcatggactgaaggattcttctaaagaggctgtagattagagaggcacattattaggtaggatacaattatgtgaaaatcgtagaggctatagtatacaacaacgagacagaaggagtagg

SEQ ID NO: 674030 - DNA, 128 bp, Homo sapiens
  misc_feature (61)..(61): n is a, c, g, or t
  misc_feature (99)..(99): n is a, c, g, or t
  misc_feature (103)..(103): n is a, c, g, or t
agaaacggcgggagaagaaggcggcagaaggttgcaaaggccagggacccggggaagtggnccccaaggtggccctgtaggggtgcaccccccaccctntggnccagtcaaataaaagccttcaggcc

SEQ ID NO: 674031 - DNA, 152 bp, Homo sapiens
aagtgtttgagtggcgaccccccaacatccctatcgacgcaatacatcctctctcctcctctgattaggccaaggagctcagtgtcttgtgaagaattggtatgaagagtgtgatgagttggattgcatccctttgaaagacacattcaaag

SEQ ID NO: 674032 - DNA, 1213 bp, Homo sapiens
ggccgtgcgcggtggctcacgcctgtaatcccagctctcagggaggctaagaggcgggaggatagcttgagcccaggagttcgagacctgcctgggcaaatatagcgagaccccgttctccagaaaagaggaaaaaaacagaaaaaccaaaaggacaaaaaaaaaaaaagggaaattccccatcagggaaactctcaaccctccggggtccacgcgcgagatccccagggctagaaggccccccaaggcagagcagggggaacaagagggtacggtggccacaaagggcccgggccaaggtttagggcaattaaaggcaagaaaggggagagattccgaccccatgtgtgtgggcacagaggcggggaccgtggaaaacctcggtggaacctccgagaggtgaactccaaccacaacacttgcgggagactcccaaaaggaggccaagaggcacacaaaggcgccttgagaccccacaccgcgcggtctcaggggcgccaggggggcccaaaaagccagtgtgtacaggaagcgggacaaaacccacaacacttactgcacaagttgcaaaagacagggaggacagctccacacgaacacggtggtgcagcacaggggccacaaacggccaacagggggtgagctaccaacaaacgggggaaaaccccaaagcaaaaccccggggacagaagagcactagaggggcccatcatccgagccgggggaagcaaaagagaacatagccggaaaacaggtaccaaaaaagaagtccacacagaagcaacaacacaatctacgagtggcggacccatctcgaggaagacggcagaagagaagggaaaaaaagcgcacagaaaaactcctgtgtgaaaagggacaaagcgctgtgcaaagtagcaggcacccgagaagatgtgacccacaaggaggacacaccagaggacggggcggcaacacaaaaggtgagagaaaattcgcacgccacaacaacaacagcgcggcggagcaacgtgtcccccacagttgaataaaccacaccaaggccagagaaagcagaggaagcacagagagagaggacagcaacaaaaaaatagttgggccacgggaggacacagtgctacaccaaaggcgcacatcgggcagcacaaacaactcggggggggaaagaagacccagaggagggaaagagagcaccgaaaatacaggcgcagat

SEQ ID NO: 674033 - DNA, 113 bp, Homo sapiens
cggatccccagtgagagcagaggcccacatgtgaatactccgactccatctatagaatattaaattagtccagacatggtgtcggacttctgtcatctcagctactcgggaga

SEQ ID NO: 674034 - DNA, 129 bp, Homo sapiens
gcggaccgcctggcttctcctggtagggcacctccctagcccctagccgtcccaggagagatggtgctctcctgtgcccggcactctggcccttccctgggccgcgtgccccatgagccatgtgcactt

SEQ ID NO: 674035 - DNA, 552 bp, Homo sapiens
  misc_feature (552)..(552): n is a, c, g, or t
gggggctctgcgctcgtccggccggccccggcctcgccgcccgcgcagtacccagcccggcccgctcgatccgctctctacgtgccggctcctgcgcccttcccctgaggtgctggatgacttggggcctggtttctgcctctgcaaaaacgggtggacaccgagctgaccgcggactcggtggatgtggtgcgccgtgcaatggttgcatggcacctgctggcgtgcgggacctaccagctgcggcggccggaggaccggctgtccggcccccagaacaaggtgtcacatcccggtggcttggacatgccctcttgggcttgaggagatgccagtggatccatagcaaaatgttccgcctggtggaatcgtgagtagaatgagccatcgtgctggagccattgtccagccttgccctggaggagcagtgtctggcttgtccctagatgtgttccactgggaataactggaagggctggggacctagccttgaagatctatcagcagtgactccacaagggcaagctccacgctcctgattggttgactgcn

SEQ ID NO: 674036 - DNA, 809 bp, Homo sapiens
  misc_feature (32)..(32): n is a, c, g, or t
  misc_feature (86)..(86): n is a, c, g, or t
  misc_feature (196)..(197): n is a, c, g, or t
  misc_feature (202)..(202): n is a, c, g, or t
  misc_feature (229)..(229): n is a, c, g, or t
  misc_feature (247)..(247): n is a, c, g, or t
  misc_feature (262)..(262): n is a, c, g, or t
  misc_feature (274)..(274): n is a, c, g, or t
  misc_feature (280)..(280): n is a, c, g, or t
  misc_feature (365)..(365): n is a, c, g, or t
  misc_feature (586)..(586): n is a, c, g, or t
  misc_feature (591)..(591): n is a, c, g, or t
  misc_feature (594)..(594): n is a, c, g, or t
  misc_feature (606)..(607): n is a, c, g, or t
  misc_feature (641)..(641): n is a, c, g, or t
  misc_feature (685)..(685): n is a, c, g, or t
  misc_feature (736)..(736): n is a, c, g, or t
  misc_feature (795)..(795): n is a, c, g, or t
gggggggtggtgggaggtcccggccagcacanagggtcaggggcccttgttcccggccccacccagcagccaccaagtggacaganatgacattctctggttccagtcaggaagctccttctagaagagaagtgagaggtgagggaaagcaaattccagaaaaaaaagaaaaaggaagaaaagggttactaccagnntcggnggccctgccccgacgccacccaagaantggaagatcatattatanaagcttcaaaaagtnacacagggtggnaacaanatgacccaggaaagggaagggaaggaagggtggggggggctgaagatggaacctggctgagtggaatgggggggcggtggccttntgagaccagcacagaccagcagagggaatgtgagcagggtctgggagggaacgggaagacacctggctggtctgaagtggctcatgaggctgagtgtagcagtgggtgccagactgagggagctggactgcggtggaggaggtggccagagagtcccttcgaggggagaagctgagagtgaaacaggaacaggggatgctccgtgctcccagaagagcccnaaaanaanaaaaaaaaaaanntgggcagcactgtgggctccgggctggcatgggnagctgggcggcacctctcccgaggccgggggccctaatgtcccncaatgctagttcctggtaattgtttatgatcagacctggagggagaacaangcgccccctcccctccccaagccccagcacagccccgatgggaggggtagggtagaganatgagggtgggagg

SEQ ID NO: 674037 - DNA, 336 bp, Homo sapiens
  misc_feature (296)..(296): n is a, c, g, or t
  misc_feature (323)..(323): n is a, c, g, or t
gcggcctcccaaggtgctgggattgcaggtgtgagccaccgcccctggccagaaaaaaaagcttttaaataaagtaattgtcagcttaggcaacatagcaagaccctgtctctacaaaaaaaagatttaagttagccaggcatggtggcactgacctataatcctagctactctggaggctaaggcgagagtatcacttgagcccaggagctcaaggctgatcatgccaccatactccagcctgggtgatagagtaagaccctacttttttttttttttttttaaaaaggtaaccntcaagggcaatgaaaaggaaatggtcntatttcccattcc

SEQ ID NO: 674038 - DNA, 325 bp, Homo sapiens
tggatatggagtctcactctgttgcccaggctggagtgctgtggtacgatttcagctcaatgcaagctctgcctcctgggtttaagcaattctcctgcgtcagcctccccagtaggtgggactacgggtgtgcaacacaacatccggctaatttttgtatttttcgtagagacagggtttcacatgttggccaggctggtcttaaactcctgacctcagttgatccacctgcctgggcctcccaaagtgctgggattacaggcataagccactgtgcccagctgcattgttgctgttttttattgttagttaagagaggtcgacg

SEQ ID NO: 674039 - DNA, 153 bp, Homo sapiens
tgttttattttttaaatgctatgcttcaaaatcaatttgtgttttatgccctttcccccagtattgtaaagcaagtcttgtgttaaaagcccagtgtgccagtgtcataatgtagtagtgtcttcctggttttttaataaatccttttgtata

SEQ ID NO: 674040 - DNA, 167 bp, Homo sapiens
tacgactgtataagtatcttccgcttctctcaatatgacactttcaagatgctggtgcaatataatctagaaatgtggatttaagataaagaataattcaaaaaacaggccacattaaagtgggtagcactcctctatcccatacccctgtttacataatctgtaac

SEQ ID NO: 674041 - DNA, 162 bp, Homo sapiens
cgatcgggcagatctgtctccaaggtcgtgttgagtctactgagggctctgtgttcctgagggagcagatctcgtagggccacaaggtaagagttccgattagagtttagaatcccctgttccttgcctagtccacgagaactccctctcaaaacgacagtt

SEQ ID NO: 674042 - DNA, 129 bp, Homo sapiens
cccggcaatcgcacggagagtggagaccccgctcatggagaccgacaccaggtacttgaggtccccgtgggagaggacagacagcttgagtgcgcggaaacagatgtctgaaagtgcctcgttgacgat

SEQ ID NO: 674043 - DNA, 419 bp, Homo sapiens
cccccccccttatttttttttcaaaaccccccccggggttttttttttttgggggggcccccccccccccgtttccctttttggggttcccccccccccgaggggagggggattttttccccccccgggcccggggttttggggccccccccttttttggggggggaaatttttgggggggggggaaaaaaaaaacccccccctcccccccgttcccggtggtttttttattttttttttcccggcccccgggggggccgggggggttaaaaaggccccccccccccttttttttctccacccctcttttttttggggggggccccgggggggggttttttttttggggggggggggggggggtcccggggggccgggttttttttttttttggccccttaccttttttttttttttta

SEQ ID NO: 674044 - DNA, 661 bp, Homo sapiens
  misc_feature (93)..(93): n is a, c, g, or t
  misc_feature (114)..(114): n is a, c, g, or t
gggtgactagagtaagcaggtcaaatcatcattaatttttcaaaaggtaaaacatgggtatacacgcatccagtgaaagcttcttagccatanaatcagccgcaaagttgtggnatacattcattacgtctcagagcaaccataaacagccccctcccaggtgcgtccagtcagtagcagcatagggtttatgagaggtctgtaaagcagaaggtacccctaggataacgcttgtgccacatgcctcatgacaacatagcagggaagccatcatggtgtcaagccgtcctatgacttcgaacgaagaatccacacctccatcggtcatttcctttagcacttcctggatgggtttcttgtagtcttgagggttaatgcattcagtggcacccaactgtttggcctttgcaaatttgtcctagttgatgtccaccgcaatgattctggctgctccagctgctttacagcccataacagcagataggccgacccctcccaggccaaacacagcacaggtagagcctggggtgaccttggcaacgttaactgcagacccataaccagtcgagaatccacagccaatgaggcagacttctccaggggcaaggctgcatcaatcttgcccactgcattctcatccaccaccgtgtattggtagaag

SEQ ID NO: 674045 - DNA, 965 bp, Homo sapiens
  misc_feature (1)..(1): n is a, c, g, or t
nctatcctagcaggtagagggagtatgggtgggagtgcgcgtgcaaacgcctccttcaatacccgtgctgcgtatctcgtagtctggtgctttcgtgcgtcacccagtgctcggtgagccatttccccgggaattcttattttccgaagctcacataatggccgactttccatacgcgcgttgtccttgtacgcgagtgttccggcgggacaatttctggctttcggccccagtgttaagaacgggggcattctttgggttattgtcgcgcgccccgcttccccaggcctcttcccctggaacattactgcgtggggactcccagataggtgtcgccgcgcgctgtatcttaaaagagtggtttccccagcccatcgccaatttctgtccaaccccaagtttttggtcaactttatgaaccccccgtgttgtgtgttgaaagatccagaaaccccctgcggcgaacccccttttggaagcccccacttgatacgcccccccctatattttgaaacgcgccctcaaagtaagaaacccccaaaatcggtggcaagacatccccacgacatccccacccccttggttctcactcgccatataaataactattacagagccaattcttgtccgtgtcgtcccccgtcaaacctgaaaccaagtctaagcccctttaattgtaatctcactcatttcgaaaactctcgtcataaaaacagtgtgacacctctcaaaagccctcattacttctttacatacaactttattcagacaccatacttggtcgccaaacctttcaagagctttatgacaactgcccccgaaccagtcccccggtgatctgacaacctctcccctatacctcctcctccaccctacgccaggtcttcttgttccctccccccccccggggaaaaaaaaaattttttttctgcggcccacaaaacaaaaaaaacagaacataaaaa

SEQ ID NO: 674046 - DNA, 1081 bp, Homo sapiens
ctcccaccaccacgcccggctaattttttatatttttagtggagactgggtttcactgtgttagccaggatggtctcgatctctttacctcgtggtccacccgcctcagcctcccagagtgctgggattacaggcgtgagccaccgtgcctggccgacgcatataacttattaaagaaccaacctcttggctactcacttaatccctacaattgtcccatattaattacatattctagttaattcttcctttctatctcataatacgctatgacgtctctccctcttcgaatcctctcttctatacttatcacgctaaccctatcacgaattaacgccctatcacagttacattcgcatcctctacccaaccgtcttaatctatacacccattcaccattcacttcccaccaggcctcatacccacttctttccttctccctcaacgcccactttacctatatcaccctcccgcccccaccccttctatacccaccactctccctaccttctacttggtaccgctcacttctctacaatcaaaaatttccaggctcatcattacaccttcccgcccccctactccccacctcccctttcacccttcctccctgcgcaccgaaccgcgcacaccttacccccggccatccaccgcgctcgcgcccccccaagggcgcccatagccacgctcgcccccagcctgcagcctcccccgcaacctccttccacccacaacccaaccgctgccaacacaacccaatccctgcccccctctcccctagcgccgcttcccccaacaccccacccaccatctccattcccctacaacacctcttcacgccccccataccaattcacaagaactcaacccccttagaccccaactacccacccacccaccctctccccaaaaacacccacccccaaataccccccttgcgccccatcaccaccccccccccccccgccaccaccccccaacccccaccaccacaaaccccgccaccccgcacacaacccgccaccaccacccaacacccattcccgagccccccacaaccgcccagggccccaccccacca

SEQ ID NO: 674047 - DNA, 964 bp, Homo sapiens
  misc_feature (45)..(45): n is a, c, g, or t
  misc_feature (106)..(107): n is a, c, g, or t
  misc_feature (109)..(109): n is a, c, g, or t
  misc_feature (121)..(121): n is a, c, g, or t
  misc_feature (273)..(273): n is a, c, g, or t
  misc_feature (276)..(276): n is a, c, g, or t
  misc_feature (318)..(318): n is a, c, g, or t
  misc_feature (426)..(426): n is a, c, g, or t
  misc_feature (442)..(442): n is a, c, g, or t
  misc_feature (445)..(445): n is a, c, g, or t
  misc_feature (479)..(479): n is a, c, g, or t
  misc_feature (488)..(489): n is a, c, g, or t
  misc_feature (491)..(492): n is a, c, g, or t
  misc_feature (498)..(498): n is a, c, g, or t
  misc_feature (500)..(500): n is a, c, g, or t
  misc_feature (507)..(507): n is a, c, g, or t
  misc_feature (509)..(510): n is a, c, g, or t
  misc_feature (515)..(515): n is a, c, g, or t
  misc_feature (525)..(525): n is a, c, g, or t
  misc_feature (527)..(527): n is a, c, g, or t
  misc_feature (532)..(532): n is a, c, g, or t
  misc_feature (536)..(536): n is a, c, g, or t
  misc_feature (541)..(541): n is a, c, g, or t
  misc_feature (548)..(549): n is a, c, g, or t
  misc_feature (562)..(562): n is a, c, g, or t
  misc_feature (572)..(575): n is a, c, g, or t
  misc_feature (578)..(579): n is a, c, g, or t
  misc_feature (583)..(585): n is a, c, g, or t
  misc_feature (587)..(587): n is a, c, g, or t
  misc_feature (592)..(592): n is a, c, g, or t
  misc_feature (594)..(595): n is a, c, g, or t
  misc_feature (599)..(600): n is a, c, g, or t
  misc_feature (609)..(609): n is a, c, g, or t
  misc_feature (611)..(611): n is a, c, g, or t
  misc_feature (614)..(614): n is a, c, g, or t
  misc_feature (620)..(620): n is a, c, g, or t
  misc_feature (624)..(624): n is a, c, g, or t
  misc_feature (629)..(631): n is a, c, g, or t
  misc_feature (739)..(739): n is a, c, g, or t
  misc_feature (947)..(947): n is a, c, g, or t
atttggggacagggaggcacatggagaaaaaaaaaaaaaaaaaanaccaggcaattgcacaaagcctttccctggaaaacccaggctctggggatggtgggggtcnngncacatggctgcnccccctccagccctggagctccggctttgatggtcgaggcacagatggggattcatcccattccccacatacgagagcagtctgggagcgggagatcggctgggtgtgtgtatatatgtatgtatgtgcatatagatagatctatttatatnttntaggctatattagaaaatcctctctatgtataaatataaaanactggtatccaaacatgacaccaacagctaactaaagtgcttgacaggagccgggcccgggtaagctcgatggtaaaccgctcatcctgggcgctggggaagcaaaanaatgggggaccccttnagnagggggtgctgcaggaggaaagtgtgtgctggcnaagctgggnnannaagagnanttgggcnanntgggncttctgggtntnaggantgtntggtnaatgaannataaaaaatgtgnataatatttnnnntannttcnnnantgcgntnncgtnnatgaggagnanagngctggngagntaggnnnagggaagagctgttccacaggggactgatcatttgaaaaaaatccctccccctcaaccatcactcctccaggtcaggccctgcccgcactcctcctgggcttcctgcntgggtgggggtgggacgagggaggggagagaggctttgtggaatctgagggcagccacctttcacctgtaggccccaagcaaagcattagcacctccaccaatccccaaggcccatagaaatgcccacaggcaagtggtcaacagagctctagggagcagagggggcccagaaggcagggaagaaggcccccaaaaacacagtgctanaagaaggggttggtggt

SEQ ID NO: 674048 - DNA, 1870 bp, Homo sapiens
  misc_feature (316)..(316): n is a, c, g, or t
  misc_feature (464)..(464): n is a, c, g, or t
  misc_feature (970)..(970): n is a, c, g, or t
  misc_feature (985)..(985): n is a, c, g, or t
cggtgggttgatttttctacccaatctattctactccggccttgtaggtgcctcctaagtaacgttgctctcgaagaaggacggtgttgtcgctgctgaattctcccccgtcgtttgtgtcaaccgatcccgtctggcgggtacgtagttacacctggtgggtcactacaccacaccagtctgacgaccaccgcgtgttggctctaatacacacgggtattatagagaccgccttgttgtttgtccacccgaaccagctgtggtccacaaaatagacctagcacccgggggggtgccgactacccagcgtgccgtntcttaccacccgccccccccaattatgcggggcgcttttctgtcttggcggcaggagaattggtgaaacccttctgttggtagaagaagatgtgcgcccccccagctatgtaggtgatcgctaactagaaaaatgagtttgctcacgnagggagcaccacacacccgctgtattaataagggatgcaccaccctcgcctcgtccggtgcaaaagaagagatataagtgggggctttttctaatcggcgggtgaatatgattagaatggtagttccctcgggatatgatgtcctccctccacacaaggcttgctttgtatatcctccgggatgtaaccaggcgaatcgggtctaggtgactaataatattagattgagtgctgctgccgatttgtgctcccacccttcgggcttcctctctctgtgtatgtgggtgagtgggttatactatttgtgtgatctctgtctaatattgtgtggaataccctccgcgccgctctttggggtcctcttccctgtggagggtgcgcccctctaacgggttccccacttagggagtcgcccccctcttcgtgtgcttgtcacacccctgtggccccacgccatcgggggggtgacccacccttttctgttgtgtgtggggagtatcgcatanttttgttattatggngccgccccactgttattatctttccccccacttttgtgggggagaccacaccacactcgtctcttcttggtgggcgcacccttcgggccccacttattttgtgtattctcgtcgggagagacaccctccttcttggtatatattatagggagacgcggccctttggtgtcccccctctttggggtgattatcttctcaccggagagttatttctcgccgcctcttttccgcctcgtagtatagtagaatcttcatctcttctctacggagaccctctttcacttgtagagcctccgcacaactattttgtccactcgtcacactcctggtgagaatatagttgtttcccacaacgcagaagactttggggagacacacagctgctgagagcgagaagataatatcgcccctttttcgtgcccacacagtggtgtggcaatactccctcttttttttgggagaaccccacccacactaaagagcacagcgtcgcccactttctctgtgagagtcttgtggtctttctccgaggggcccccaggagagcgtgtgtcccttttctccctgtagggtccacagagattgtgcacaggctgtgagactatacagagaggtctacataacacacacatggccggagataacctgtgagatccctgtgcacagcgagaggaggaacccacgaacgctggtgttcgagagagtactcttttcctcgggagagggggcctctccacgcaatgtgggccaaagcctctcacattcacggggccagtatttttcaccagtggacacttcttcttgccacttcacacctatgcttgcctcgcacccttgccctcttaagggaaatgggggtccatttaaggaaactggaccttgtga

SEQ ID NO: 674049 - DNA, 962 bp, Homo sapiens
  misc_feature (570)..(570): n is a, c, g, or t
ggtggggcgtgcggtccctgctggacattcctccaggcgacctttgtctgcgagctatgtaaggcgcgagctgattctcagactcacgaaaggccgcagcgattcgtagaggcaccagttcttagcctcaatatgtgactctgcgtaacaagtacgggcaccgtgtgccgatggtttatactgttatctgaccggcgcgtggtctatcggagaacgttcagctcagtgttcagtcaatgcagtcatctgacgaagctccaatcctggtagcccgtgcgactgtgtccatgagaccaccaggatgctgcgggtgtccccctggatcggccttcttcacgcacccgcctgattcgagggccgcgtgagcaagctcggggtttgaacgtactggagaggcgcttcgtgtggagcagtcacggggccacgtctcttctggcgtgcgcgacatgcgtgtctcgcgccgcaagttgccgcgcaacgtacgaaggtcacttcatactcgattcgtgcgctggcagggagaaagacgagcgttacatttgacgaagttgcgacacccttgagtctatnaagcctagtatatccttgtaacgcccaaggcatgtctcctctggtacctaaaagttgcgctcatgagtcctaggccaggtgctcctcgtaattaagtggaagctcgtgacttaaggagtccgactaagcccaggttcactgcctggcacttcatactgagctccggggccaagcaacgaacgacacacgcggtgcctgtgcattccccagaaggggcgggacagaccgcttggttggtacaaacgcagccgcttgacgagggaagcaccccaaggaaaacggaccaattggctgggacaaggccgaacgaggacacaggaagcaaggattgaggggcagggaacagagcaccaagaagttggggaggctccacggaagtccaccaaggaagc

SEQ ID NO: 674050 - DNA, 682 bp, Homo sapiens
gatcaaaggaggcaaaagaatttaggaggcaaatgacaagcgataggcgtatagcagagctgagaatagagaactgctccttcatcgtaaatttagaagaccaagtagataatggaaccaaagtgtgacttttttctagtagttatttttcctgttctctttctgtgtacctctacagagaccaaaactcattctcttaaagagattttatgggggctactggcagataagaaataggacacaatattgaaaggagctacagaaggaagggagtcccatctcaaaaaaaaaatgaatggtatgccatggcaattaggagtatccaatgaaaggagacagttgagagtcaggacagaaaagcttccataatgtgaagctagattacataatagtatttctagaaaaagagatattgtaagatggtatgccactttggtttaagaagctgtgctgtgatcacggtagttaatttgggttgaatctgtggcatatatccttcagtgtcgtacacatttcagaagttattgcctttatttaccgatgtaggcgttggtcagcatttctcagtgtacacgaaaagtaccagtgcccatccactcataagcttggtcaccaaaaacttctctgggcagttactttggaaagcttcactcgtgctgtctgtataaagggcaggcctgtg

SEQ ID NO: 674051 - DNA, 416 bp, Homo sapiens
  misc_feature (41)..(41): n is a, c, g, or t
  misc_feature (122)..(122): n is a, c, g, or t
  misc_feature (134)..(134): n is a, c, g, or t
  misc_feature (139)..(139): n is a, c, g, or t
  misc_feature (154)..(154): n is a, c, g, or t
  misc_feature (163)..(163): n is a, c, g, or t
  misc_feature (214)..(217): n is a, c, g, or t
  misc_feature (273)..(273): n is a, c, g, or t
  misc_feature (304)..(304): n is a, c, g, or t
  misc_feature (311)..(311): n is a, c, g, or t
  misc_feature (316)..(316): n is a, c, g, or t
  misc_feature (319)..(319): n is a, c, g, or t
  misc_feature (322)..(322): n is a, c, g, or t
  misc_feature (331)..(331): n is a, c, g, or t
  misc_feature (343)..(343): n is a, c, g, or t
  misc_feature (409)..(409): n is a, c, g, or t
gcttcattgtggcagttccaatggccatcatatcaatttcnaaaatttaaaatttaacttttaaatcctacatcttttctgaaaatatctatcttcaaagtgctccaatactaacactatangccctttctttngctcnaacatctaacacaangggcacacngtcccattaattccacatgcactttacaaagcaacttcacacacaaatttnnnnaatccagaaactacataatgatcactttatattttgctacaaaattaatgaaggcngcatgcgggggaaacattagtagacacgganttctagntaacngtnggntctcaaganctgatggcctgntgtggaaaattaatatgcttatttagcagaagtagctaaagtacatgcatcaggggctggggtcanttagaat

SEQ ID NO: 674052 - DNA, 547 bp, Homo sapiens
  misc_feature (8)..(8): n is a, c, g, or t
  misc_feature (21)..(21): n is a, c, g, or t
  misc_feature (43)..(43): n is a, c, g, or t
  misc_feature (52)..(52): n is a, c, g, or t
  misc_feature (124)..(124): n is a, c, g, or t
aatcctgnggcattggggggnaacccctgttctcaaaaaaaanaaaaaaaanaaaggggggattatagggcaaatacattagatttgccaaattttccttcccccttgcccaccacttgagcangaacatttgctacccagatcccagggagttctcatatcctttcacccagcccatgggagcccttgtcttctctcttccagaaagccattatttctattagcatcccaatcttcatcaccaaacaccgtcaagaactgagaagagtctgaaattttactctactttggaagctaacaagttagcctcccacagttttatagatacaggttgagtatcccttatctgaagtgctggggatcggaagtatttcgggtttaagattttttttttgattttggaatatttttattatatatactttccaattgagcatccaaaatctgaaaacttgaaatctgatacccagatctgagcatttccttcacacatgtcagtgcttaaaaagcctcaccagcttgggcaacataggaaaatcttgttact

SEQ ID NO: 674053 - DNA, 1114 bp, Homo sapiens
cggcttagagggaggggctatgtttcgcctatacctactgtaggcttctccacggtagtggaccctaaaggctactgctgctactacggggctagacagtgactgtctcagctctaggatgtgcgtacttccactagaagctcttctgagggaggtaagttagaaaaacagtggaatggaaaaacagtgctgtagtcatcctgtaatatgctccttgtcaacaatgtatacattcctgctaggtgccatattcattgctttaagctcaagtcgcatcttcactagtgcaagtcattctgcccaatgcaagcaaaacaagtcatgcatcatcttccaactactgtgcacatgtgtgctccagaactggtgcaagctcagtcttctgtgtgcttgtgtcattctgtgttatcacaagcaaagatcatcaaagtcagcacaatttgaaatatgcttcctggcaaggcaattctctgatttcatgaagtggtccattccttggcttgcttatatagtcctggataagttgatgggtcttctatgtcccgtccctatcttcaagcagaccatggctgtaatcttctcaaataatagcaattataacaacagatcttctatccaggatagtgctgaagaggggtcttaactgggatccagtggggcttcccctcctggacttcataatagtctaatggtggccttgacatggcggggacttaaaaattattacaaggaacaatttggccagggacgtggatatcacatcacggcagggccatattcagagccttccccagtccacggccgatcctaatcagcacagggaagggtacacagacaaaagaacgatggatcacagcaacaggcaccgtgcacacagtgccggaagacaaacggggaaaccacaacagaccgagagagaacacagaaaccaactcgcgactggtacgcgggccaagagcccgatatacgaacacaggagacaacaccagcaaggcgcacacaccacctaagcaaaaacactgaccacgagagcaccacatgctcaacgccaaccacaaacgaccaccacgacgagaacacgcaacggcacgcaggtcaacacaacagcgatgac

SEQ ID NO: 674054 - DNA, 936 bp, Homo sapiens
tgggttataaccccggccaaaattttttaatttcttaaaaaaattttggacttgtcccccggggcccctttccccccgggctctcggtggggcccccatttttggttttctctcttttacaaggggggggagggaggaatccccttcccggcggggaaaaagaaacctcgagggtggggctgcccctggccaaaataccacaatgtgtcggcaaagaccgaagtagcaacaccagcgtgtggcccaggagcatccttcacggtggaccccgtgtcacaaggacctcggagggggggctcctcctcggggggggaccaccaccaatatctctcctgaggtttagcccccccagtccccacataccgcgggtgccccccgtcggtcgcaccctgtgtatgaagaacccgagatcactctcggcggccgagtctccacaacataccactgcgaagaggggtgacatcttccccgctgtgagaggagagggcgtcacgcggggcaacacgaaaggggcgcggaccaaccaaggagtccccagataggagggggaccctcttgggggggcccacgaaagaattttttccattgtttgcaccactggtgtgctgggccccccccaggggtgtacacagaatcgctccccacgaaagcagcctctgggttgtcttacgatccaacacggagaaattcctcccccggagtgggaaacgggtagacaaccaccccatggaccccgacggagggagtggaaacatcacaggggggcctgcaccgagaattaagaagagccgggggagaaactccttaatcacactcggagaagagacaaacgtgtgtcccagaaaaggagggggggaccccccacacgggggcggcgggcgagcgagaccccgggaatactcgcccactgggggcccgcaattttgtaacagtgcg

SEQ ID NO: 674055 - DNA, 124 bp, Homo sapiens
ttttttttagccttatgatgaatttgtttgaagggcattttctttatgaacaaaggcttggatgcatatcctttctttctgtgaatgggatagtccctgattaaaagttgcacagtgaaaccag

SEQ ID NO: 674056 - DNA, 193 bp, Homo sapiens
aatggcgcgactacgaggagctgggccagccgatcgcgcgtgcggtcatcgccagcgaggatgccggcttcgtcgagcacagcggcgtcgagtgggacgcgatcgagaaggcctgggaacgcaaccagcgcgccgaggcggtggccgagcgccgcaacgagcagctcgagcggcgccagcagcaggcgctggc

SEQ ID NO: 674057 - DNA, 411 bp, Homo sapiens
ggcgggtctaccccccctagatttctttgctcgaggttccaccaatgtaatttttaatagttttgtgtttgtttagtccgtagacacatggaaaaccatgtgtgtcaccctttggcacattctagcctccggtatacccggcgcgggacacttcaccctacccacgtcccggaatcttccatgtgttaccgcccgaatgttaggaaggtcacaccggggagctatggctttcaccattttgtgaataacaccttctaccatactttcacacataacctaggtccacaagaaatatttggcgggattccggtcctctggcggtcatccaccccccaaaacggcgatatttgtgccccggcgggtctaccccctatatttcttcgctctagtcgacgcggccgcgaatttagt

SEQ ID NO: 674058 - DNA, 120 bp, Homo sapiens
  misc_feature (27)..(27): n is a, c, g, or t
  misc_feature (37)..(37): n is a, c, g, or t
acatatacaatcagccggtacccaggntcttttcccncgtcaaagctgcgcagagcactttttattcctgttaattttgaaaaatttcttttggttgaaacagctgcgtttcacttccga

SEQ ID NO: 674059 - DNA, 720 bp, Homo sapiens
  misc_feature (46)..(47): n is a, c, g, or t
actcttattctaaatatatatttttttctcttgagtttgtgtctgnnccgctgttggccacagtaatatttgattcccctgcagtgtctagcatattgccttatctgtatttgttaaatggggaagagtgagggaacattatgagagcagagaaaagacaaaaaacttgtcttccaggtgtcatgatacagctaatacttactgagtaaagggtcctgaagctgatacagtttgttcagtctcttataagaactaatattaagttatggatacataattgctggggcttctcctctaacattgaaagagttctattctagtgagaaatgctgaaggttaagcttcattagctatgtataactcttcctcagattcagaaaatactatgtccaggcactgttctaagtctattcttgtttaaacttaactctaagagaatttgacaaaaaaaaaagaacacaaagagaataagtaacttgaccactgtcacaaagtttagccttatgaagtgtggtaattgtaaatgaggtaggattaatccatgaagggtcttgaatgccctaaacaatttgtatgacagtcagtgggaagttgtccatgtaagttttggagctagagactcaatacgatcaatgtaagaaaagtaggcaaatatgcttagtaagtaaataagcttgtgtaaattatgaaaaaaaaaaagtcgacgcggccgcgaattta

SEQ ID NO: 674060 - DNA, 287 bp, Homo sapiens
tactcgatcgcctgcaagaccctgatgagcacagtgcctggtggccgatttgcgtgatgcgtgcctgtatcaccgaggacgtgctgcagagcttcctgcaagcactgcccagcctcgaaaccaacaagcctgccacgccactgctggccgccctctccctggccatggaggacctgcaagctggcgacgcgctgtataccgaagctcgtgcagaagcagtgcgtcgcgcgcccgatcacccctggatcacccgcctggcagccgtgcacgacgctgagcacggcctg

SEQ ID NO: 674061 - DNA, 603 bp, Homo sapiens
aaaaaataaaattgtcttccccttataaggaagcacattcttgggttattttttccaattttttaaattctgcgatggcattgctgagtaataaaattaatttttttacccgtataaacaaaagatatctggaaaaattatttttctatacgccaattctaaattattaaattttccggccaaatataaataaattttggtttaactgcattaaaaaattatttgtactgccatcacacactttgttgtaaataaccaagttttgccacaccaatatgaaaaaaatgtgtttaaggaaaggaggggttttttagtgtggccaggaacacaaattcttttttttgccttaacaaagttttccctaccgtcaagtcttttaaagacaagctatagttgttttttttctggcaagggaagaaaataactttaataagtgccctgatttaaaaacaaaattgtttttgtttttaaaatttccacagtgggttgcaataacaggcgagcaccgggtttttgataccttggaataaggccggtttaaacaaaggcccacattttttcccccgcggtttgggtattttccctgtgggaactcctttttcc

SEQ ID NO: 674062 - DNA, 109 bp, Homo sapiens
tgcggtgccttcccaatgcacagaaaacttcctacttgacgctcatcgacaggtacaagagatggaaggcgagcagagccatgacgactcgagctccgaggattccgac

SEQ ID NO: 674063 - DNA, 197 bp, Homo sapiens
aaacctgggggaattttttccaaaaccattttttgggtccaggccgatttgtttttttccccccccaaaaaagttttttgggccatttggggcccccaatttttttttccccccaaaaaaaaaaattttttcttttccgggttcccctccccaagtttttttttttttttttccataaacccctcctttttagggga

SEQ ID NO: 674064 - DNA, 155 bp, Homo sapiens
gagtctttaggtttttctaagggtaagttcatgtcatctgtgaacaagggtatgatttctttctttcccattttaggactctttatttttttcccctgcctaattgctcttccagggcttccaatattatgttaaataaaagtggtgaaaagtga

SEQ ID NO: 674065 - DNA, 1426 bp, Homo sapiens
  misc_feature (1123)..(1123): n is a, c, g, or t
gttctagatcgcgagggccgccctttatttatttttttttgggtccagcaaagaaacatacgggtttatgggatcctgtattttccttaacttacaaagaacagccgtgacacagaacttcaaacgtttcaccttttaacaagtgacaggctccccgtgtagaaagaggcgtgcaccgtgtgacctccttacgagtgtgccgggtgtgcgagggttacccagtccgcaggtgtggacacgtgcggaccacagcgttctttcagcggttatacgtgtgccagaacgcgacggggaagtggcctttcgaggtgtgtgttctcttctcgggtgaagtgtgtagaaacaacaagaaggagcgcgaattgttgtgccgcggaagcgccacagcggtgtaacggagcgcgcgtatctcctttctgtgcgcgggagaccccccctttgtcttcacatatcgaggcgaaacgtttcttgtgtgtctcaaggtgaacttctcaatagcgcgcggagaagtccttccaaacgccggcagaggtgtaccacatttctcagggccgagggtttctccccatataaagggcgggggccaattgtagattctccctatgaaggggccaacacgaaagattcttcgagggtgttcaacgcgcgggtgtttttctacacaatgtgtacatttaagaccgcgagtggccatttatgggggggcatttatattatttggggacaaccaaatgttaaaaatattcggctgtggcgaggaagtattacacgtcaatatagcgggtagtatatataaaggccaccacttataaatattttgggttcacacgtaagttgggcccccaaggaaaacgggcgggctattaaccagccaaaaaaacccttatacccctgttggtaaacaaccgaggtataacactttcaatctcttgttgaaaaacaccagaccaaaaaaagggcccgaaggggggtccgttgaacggccaatttttaccaccccgtcgtgcggccggtattatataggaggcgcacaactatgggggggctacatcccccatatgaagagcaacgttagacaccaccgacccaacagaacggaagtgtggtggcctcaacagagacngcgcgattactctggtggggtatgacaaccaaccaacaaccttccacatactcgctctatatatacaaccgtcgtgggaacaccacaatatatatgtttattttctaccccacccccttaataggcggcgcttgcgccaactgtggcataaatcttaccacccgacaagtagccacccgtatgtgcacatatacaacttgtggttgtcggcccggccgtctggtgtgcattacacaccccatattcacgcgccttagcatgtgtggtctaaactacacacacgaggagccctcccggtggcga

SEQ ID NO: 674066 - DNA, 735 bp, Homo sapiens
gccaagaacctgatgtacctgaagcagatcctgtatttgctggacgaaattcgtggctgtgctagggggggaacattagtgcaaaatcccaatacacagagtctgtcgcagacagggatggagctgagaacgactatcaacgactttctcttccagagccagatcgatcgacatcaacctgtccaaagtgcagcgatactgtgagacgagcatgatcagtagaaagctcttttggcttcatcgtgaacggtacggagcagtgttctcatccctgggagcagacccaaacgtggggtgggtttcagcaattccctgcagagcctgcagcccaggacgactgagagcgtcttgcagtgctctgcagacgagagtcaggccaggcgatcccgcaaccagcttccccactgatgcacatcgaaggcttcctggcagatctcactacggccaaccacggacgggagggtcatcctgagccggcaagggcagtctcagtcagagcaccctgaagatttttgctccgtgaactccagctgtgacactttgccccacgtggtgaaggagatgccgggcagtggtcattgccggggggaaccatgcagccggtgtcctgacttccgggcagagctgctgggctgtgccggggtggaagctgagcgcgtggtggaagttttcctgtgtgtctttacggacacctggatttcaagttcggccctccctggtttacaggtactgaac

SEQ ID NO: 674067 - DNA, 589 bp, Homo sapiens
  misc_feature (9)..(9): n is a, c, g, or t
  misc_feature (17)..(17): n is a, c, g, or t
  misc_feature (36)..(36): n is a, c, g, or t
  misc_feature (50)..(50): n is a, c, g, or t
  misc_feature (80)..(80): n is a, c, g, or t
  misc_feature (102)..(102): n is a, c, g, or t
  misc_feature (106)..(106): n is a, c, g, or t
  misc_feature (116)..(116): n is a, c, g, or t
  misc_feature (126)..(126): n is a, c, g, or t
  misc_feature (218)..(218): n is a, c, g, or t
  misc_feature (244)..(244): n is a, c, g, or t
  misc_feature (271)..(271): n is a, c, g, or t
  misc_feature (299)..(299): n is a, c, g, or t
  misc_feature (307)..(307): n is a, c, g, or t
  misc_feature (321)..(321): n is a, c, g, or t
  misc_feature (324)..(324): n is a, c, g, or t
  misc_feature (395)..(395): n is a, c, g, or t
  misc_feature (401)..(401): n is a, c, g, or t
attgggccntaaaggangaattaataaattttgtgngagacttttttatnaaacaaaggggggttcaaaataggggtttnaggtaatcttttcccccagttnaaangaaacaaaanatgccatttngtatttttagaatagaccaatttttggaattccagatttttcataaatttcatgtaggactcaccacttcaaattaaaccaaatttttttancccttctttttccaatcccttcaacntaaactgttttcatttcctgtattgcntatttcaagtaccatccaagagccatcntgagttcntcctccagcctttnttntcttgtctagttagtcagcaagtcttgcagattctgcctcctcacctgaagttttcaaacagtaccccttnacattnttgaaaattattaaagatccagagaacttctgttatatgggttatagctgttaatatttgtcatattcgaaattgaaataagattttaaggtattttaaaataacagtacaaaaccattgtattttgacatgaataacacttttatgaaaataactatattccaaaacaataaaattaccaaaaagtt

SEQ ID NO: 674068 - DNA, 335 bp, Homo sapiens
cctgggagcctccctgagacctgaaggatggatgaggagaacgagtcaagacacagattgggtttttctttggaaggaagaaaattccattcccaagtgacctccctcttccctactctctccacagtgtgggacaaagtccctgcagacatccgaatcctcgccatcaaatccaccacgctgcgggttgaccagtccatcctgacaggtctgctggcctgggtgggaagatgcatgggggtgggacgtggggaggaagaggcaacaagggggaggtgagtggaaagacagagaaccctcactgtctgagcaacataaagagaccctgtctctac

SEQ ID NO: 674069 - DNA, 137 bp, Homo sapiens
ttctccgcggacagctccccttcaatggcgggtacaccttcagtggggtcagctttctggagcaggtgcatcacatggtcctctgtcatgttgccactacttggtggcattctgcatggccccacagatgagagcgt

SEQ ID NO: 674070 - DNA, 630 bp, Homo sapiens
gagggatgcccatgtcgtatgggccgttgtcttgcggaggtcactgccgagcggtggtagactggatccagtcaggacgatgggtcgtgtgcacgaatccatcaaccgttcactgatcgttgggctgaagatcagcactaagagcgtgggccgagacgagcgggaggatatcacccagcacctacaaatacccagaggggtcctcagaggagagggaggccttcacaagggcgaaccaccgtgaacaatactgggccgcagaaggaggacgacagggatggccatgcggatccgtgtgggccagagcatgaacatgggcagctgactcacggaccgtctttgaccacatcaacaagcaacagcgctgagcgagtacgtcctgccgcctcctgctctgtgcccgcaccgatcagctacaatgggatcttggggcccgagtgtggcacccaagtacctgctcaaacctcaactggagccttacgtctgagcaagagcgtacctcttgggcatcggtctatgagcaaagtacccgtgactgcctatacaggagaccccaacactcatcacaggtgcggggccctcactacgctggcagccaggctatcaaccagcatacctgctgggtgcgag

SEQ ID NO: 674071 - DNA, 569 bp, Homo sapiens
tgaggaccccctgatatgctggacatggatcctactggtaaactaggtaaactttttttttctaacaaaaggttcgtgattggggttctcaggttatcggtggagggtttagcataaacttggatgttttctttttggtaaactcggttttaaataatctgatttagctgtttttccagggttaggatgttggcatcatttatagttgctgaataaaatggggtggtaaatgtgttacaataactaatcagaaaactattttaataccattctccctaagtagacaaggtgtagacctaaagaggtttggggccaaacctaatttaagcggataaggtgacagaataattaacagtacagtgtggcttccttctagtagaatcggtttttaatttctaaattagaagaaataaagagaaaacaacaacattgctaatttggaggtacgtgcctgcctcagggaaatgcgaatggggaaaaaaacatttggtacaccctatttcatagtatgtgtcagtagccctaaagatactgtacccttagaccgagtaatcccagaaatatcgagg

SEQ ID NO: 674072 - DNA, 464 bp, Homo sapiens
tacccccaccttatgccggggctgctttgtgttagttaacaagtgttaatactgacttatggcttcctgtgcactctgcactgcagttggtattataggggtagagagggtgtaagtgggagggaaacagaggaccatggcaggatctctatcgtagtggagtgtgtatgctaatttcaagtgtctattatggaaagtctggcatgaggacataaccgcttgagctaactccaatccgtcaagtgtctatcatgagtcaaacactatgccaggcacttttatgtacgtcatctcatttaattatgatagtaattggcttacatgttatagttacgattttgcccctgttttacggatgagaaaatggagagtcagagaggttaggtaattggttcaaggattggttcaaagatggcttcatgacagaggtggtctttaagccctgatgagtcatgaagttagac

SEQ ID NO: 674073 - DNA, 589 bp, Homo sapiens
  misc_feature (496)..(496): n is a, c, g, or t
  misc_feature (551)..(551): n is a, c, g, or t
  misc_feature (567)..(567): n is a, c, g, or t
ccagaagcgggctttgtctgtccacctgcacagtgacctgcagggcctggtgcagggctctgacagtgaagccatgatgaacaaccccgggtatgagagcagtccccgggagaggagtgcgagagggcattggtacccgtacaatgagaggttgatctgtatttactgtggaaagtccttcaaccagaaaggaagccttgataggcacatgcgactccatatgggaatcaccccctttgtgtgcaagttctgtgggaagaagtacacacggaaggaccaactggagtaccacatccggggccatacagatgataaaccattccgctgtgagatctgcgggaagtgctttccattccaaggtaccctcaaccagcacttgcggaaaaccacccaggcgttgctgaagtcaggagtcgcattgagtcccccgagagaacagatgtgtacgtggaacagaaactaggaaaatgacgcattcggcctcagagatggggcntagatttcccggatgggaaatttcacacagtgttttgatggttcccgatttaagntgggtaaaggaagttncacccaaacaaaggcactttat

SEQ ID NO: 674074 - DNA, 525 bp, Homo sapiens
  misc_feature (5)..(5): n is a, c, g, or t
  misc_feature (157)..(157): n is a, c, g, or t
  misc_feature (213)..(213): n is a, c, g, or t
aaagntcgggcccgtcaccgcacccctgagtgttatgtgtgcactgactgtggcaccaacctgaaacagaagggccatttctttgtggaggatcaaatctactgtgagaagcatgcccgggagcgagtcaccccccctgagggttataaagtggtcnctgtgttccccaagtgagccagcagatttgaccactgttttccagcaggcctttgntgcagctttttctctcagtgttttggccctctcctctcttgaaagttttctgcttactttggttttccctctgcttgtaaaacattgagtcccccccctgccttggttaattgactccccccagctgtgcgatgcccgcttttacaattaaaggaaaactgttgtgttcagtgtccccttgtcaacaaccctgtgtcccttcgcccccccgtttttttttggggcatttggacatcagccaaatttgaacccaatcaaaaataacgtgtttgcccctgattttgtttttacccaataaatgtataggcccca

SEQ ID NO: 674075 - DNA, 180 bp, Homo sapiens
  misc_feature (75)..(76): n is a, c, g, or t
acccctaataaaattaattaaccgctcattcatcgaccttcccaccccatccaacaatcttccgcaatgatgaanncttcggctcacttccttgggcctcctgcctgaatcctccaaataacacaagggcctatttctaggccatggcattcactcaccaagaggcttaaacccgccttt

SEQ ID NO: 674076 - DNA, 1074 bp, Homo sapiens
gttgtgcccgtccgaactgagtctgtgatgaggactagcgcgtaaaagcccggagtggcaaagagaaatcatcatatcaacgattgtcgtgtattgcgtccagtatgacttgctaggtagagtcgagcactactggcgggtcttactctattaaatggaggtggctcgagcaaaagagtagaccgatttgatccacagtagtgagaatggaagcgtagttcggagacttgcggaacccgtgagcaccttgacatctcatgcctgcgtgcctctgcgatcgactgcacaagtctcgcactggtgacacgcttcgatatttacctattgactatctccttatggagagctttgacgtaccagctgagtactagtgtgaccttcgattgcatgcgcccaggcacactggaggactaacatcaccgaagcaatgatgacagcggacgatcgtcgagagcgtgacttgtcgctagtcactcgcatcagttggttcgatcggtcgatatcggaggacctaacgcaagcttggtgcatctcccccaaaaatcggcgccacgatcgcagagcgacgctgattgcctcgttcgtgattacacactaggtcgtccttgtcgagagacaaactacattcgtcgagttgttgaagtagaaagcttgggatttccgacgtcgtaagcgcacccctaaggtgggcattcatcatcattgtcatggaaccttgtccacttcgaaggtacagttacctttgcatcaagggaaaatgggttacgatgcgccggacactggaggtcgtttgcggcgacgctctgggttagctagtggtgaccacctgctgggagcctatctcctaacgtgcccgggaccgcggaggtgccttgctggcccgtgcagtgtgccattgcctgtgccactccgcccggtgtccgggctttgtctttgcgatcctatgctcacggtgtgtcgtctgcgtgctttttggctgcccctcgggatgtcgactgagggcggcgtccggacaggtcttccccggctgcagtgtggattagagaggcttgtggcccttgcccgttctgtcag

SEQ ID NO: 674077 - DNA, 304 bp, Homo sapiens
gacctatatattttaagtgtttgttgtatggaaaatctatttttaaattgttattttacattctggccgggcgctgtggctcacgcctgtaatcccagcactttgggaggctgaggctggcggatcacgaggtcaggagatcgagaccatcctggctaacatggtgaaaccccgtctctactaaaaatactaaaaattagccgggtgtggtggcacgcgcctgtagtcccagctactcgggaggctgaggcaggagaatggtgtgaacctgtgagacagagtttgcagtgagccgagatcgtgt

SEQ ID NO: 674078 - DNA, 618 bp, Homo sapiens
gccttgttcgcccgtaaccgccatcttccagtaattcgccagaatgacgaacacaacgggaacgaggagaggcacccgatatatgtctctaggccttgtacgcaaaacatggacgtgttcctttgatcacatatatgcgaatctactataggaacggtgatatggtccacatcaaggcgaatgggtactgtcaaaaaggaatgccccagcaagtgttaccatggctagaactggaacagtctacaatgttacccagcatgctgtgggcattgttgttaacaatcaagttacgggcaagattcttgccaagagaattaagtgtgcgtattgagcacattacgcactctaagagccgagatagcttcctgaaacgtgtgacggcaccatgatcagcaacaaagaaaagaatgccaaacgagaaaggtacctgggcttcatactaaagcgccaggcctgctccgacctcaggagactgcgcacctttgtgagaacccactgggaaggagcctgagctgtggaaccctattctctatgaattcatggccttctttggttgttcacgcaacctgattactgcctctgggcttagaaatctaaatggcaactttttgtgggtgc

SEQ ID NO: 674079 - DNA, 901 bp, Homo sapiens
ggtctgcgggagcctcggtgcaccatgagcgatggtggtctatcgtgaaggagggttggctgcacaaacgaggggagtacatcaagagctggcggccacgctactgcctcctcgaagaatgatggcaccttcattggctacacagggagctggccgcggaggatgtggaccaacgtgaggctcccctcaacaacttctctgtgcgacgcgatgtgccagctgagttgaatgactggagcggtcccgggcactcagtcaccttcatcatccagtcgtggcgctgtcgatggtggcaccagctggtcatacgatagcgcaaccttcccatgtggatgactcactgtatggagcaggtgatggagtggtagcaaccgtcatccgagactgtggctgacgggctcataagaagcaggaggagtgaggacgatggactatccggtcggagctcacccatggtgacaactcgaggggcatgaaggagtagtggaggtgtccctgggccaagcccataggcaccgcgtgaccatgatacgagtttgagtacctgagatgctggtgggcaagggcactttcggtgaaggtgatcctggtgaaggagaaggccactagggcggtactacgccatgaagatcctccggaacgaagtcgatcgtgggcaaaggaacgagggtggtccacacagtcagcgagtaacagagttactggcagaggtccaggcgaccctttcctgcacaggcccttgaagtacctctgccaagacgcaagaaccgggcttctgcttttgtccattggagtacgcccaacgggggcagcttgatcctccaactggcccggaacggggtgttctcccgggggacggccccgttctcatggggctaaatgggtgtagcctggctaactt

SEQ ID NO: 674080 - DNA, 120 bp, Homo sapiens
  misc_feature (14)..(14): n is a, c, g, or t
cagcttagtgaaanagtgggcatcctttggcagatattgaatttgctaagggtagaggaacatttccctgtgatatttctgtccttgatattcatcaagatttacactggaatcctaaag

SEQ ID NO: 674081 - DNA, 268 bp, Homo sapiens
atgaggaaagtcagtggggatcattgtaagtgacgggctcgtcaggagctggtaacgcccactagatgaccgccgtactacacagagcttgaacaacaaacaggctgtaacgacagacaagctgtacaacgcaggacagatcgctcacctctcccctaccatgcttacagcaaggctgaatggctgacactccacctgctctgcagctgtaacttccccggctacgacactcgctgacttagcgggacctcctcctagcagctcgacc

SEQ ID NO: 674082 - DNA, 973 bp, Homo sapiens
  misc_feature (973)..(973): n is a, c, g, or t
gcgttcttcccaggtgctacctgcagagggttccttattgggcgctggaatcctgatcgccgttcgtaagcttaggaggagaatttttcacaactgtcctggagcccttggatgtccgtgcaatatgaaggaggaggatgtgcttaagttccttgcaggaggaacgccatgttagtgtggcacgaatcttggactgtccagagtgcaatcagtacgatgctataaagaggaacggtgatggacttctatatcataaatctcaagaggacttgggagaggctctctgtgggcatttcgtgggattggttggcatggagaagcctgtgatgtcaagtgttatatcctcgcaaggaatacgtggcacagagcgccttaggagttcgcatatctgctggtttggcaattgggaggccaacctccagatttgtaggggacagattcagttccttgagaacttgtgcattgaagcgaagatccaggatagacttccgggcacccacgggaattccttgtggtccagtagatacccaaggggttgaccttaccaggtcgtctcacttggaggggctctcgttggttaagacctaccctgaccatgtgcgcttgtgtaagcacggatttgtcctctggtcgctattgttggagagtatgttatcgcgatgcaacatatagggaggcacaactcaggtggggcagatgtgtggcatgctggttcggggacgtctgcgcatggggtgtccacattttccggtgacacccaggtgttgggcagcctgtgttgacttaagagagaggcctggataatggaaacgagggcgggccgtggtgtaaaggcgtgaccaaggagggcgtactgcgcgagggagtgtccgcccttgtactgggtacacccagtgtgtgtggctggggaaagacgccggggctggaaaacacatatgggggccccggaggggtgtccctcggatgacaggcn

SEQ ID NO: 674083 - DNA, 711 bp, Homo sapiens
  misc_feature (360)..(360): n is a, c, g, or t
tgtggtggctcacacctgtaatcccagcactttgggaggccgaggcgggtggatcacctgaggtcaggagtttgaaaccagcctggcaacagggtgaaaccctgtctctactaaaaatacaaaaaaattagctgggcgtggttgtgtgtccctgtaatcccagctactcgtggggctgaggcaggagaatcacctgaacccgggaggcagaggttgcagtgatcctccgacctcagcttcctgagtacctgggactacaggtgtgtaccaccacacatgataatttttatgtttttgtagagatggtattttgccatgttgttcatactggtcttgaaatcctggactcaagcgatccgnccacctcagcctcccaagtggctgggactgcaggcgcccaccactacgcccggctaatttttttttaggtattgggtatttaagaaaagacggggttccaccgggtgggccaggatgttttccatctcctcatttttgtaatcccaggcactgtggaggcaaggggagtggatcacctgagggcaggggtcaagaccagctatccggaatgtggaggcccgttgtctaaaaattaaaaagtggcgggatgtggtgctggtgagtccactacttgggggtagggaggaatcgttgaccgggggcgagttgcaaagcaggtcggcaatgtcagcggtgagggaaggtcttctt

SEQ ID NO: 674084 - DNA, 100 bp, Homo sapiens
cccggagcttaccctcagcctaacctcacattgggcaccctctaatcccttctctctgcagtaactccctcaccctgcttaggctctaacatcgaactcc

SEQ ID NO: 674085 - DNA, 294 bp, Homo sapiens
caaagtcacatcttacgtgccggcaggtgagggagaatgagaaccaagcaaaagagatctccccttgtaaaaccatcagatctcgtgagacttattcaccaccatgagaactgtgtgggggaaaatgcccccatgattaaatgctctctcgccaggtccctcccacaacacgtgggaattacgggagctacagttcaagaggagacttcgaagtgaaagccaaattcatgggagttcaaatggagacttttatgttacattatcaggacctgctgcagctacagtatgaaggag

SEQ ID NO: 674086 - DNA, 1010 bp, Homo sapiens
  misc_feature (19)..(19): n is a, c, g, or t
  misc_feature (62)..(62): n is a, c, g, or t
  misc_feature (68)..(68): n is a, c, g, or t
  misc_feature (82)..(82): n is a, c, g, or t
  misc_feature (100)..(100): n is a, c, g, or t
  misc_feature (107)..(107): n is a, c, g, or t
gcatcaccttaacatggantacaaagatgatgatgatgttgttgtgtcttttgccaaatggntgagcngcttctgggccacngctggagagaggaggatnagagagnactccgggaacgccaccgactgcaagccaccagtcacaggaaaacctccctgccctgcccacttcctgtgcttcccagaattccatcatctgactgccatcctagaaggcattctcatgaggaccaggaattccgatgccgatcgtctgaccgtcttcctagaaggcattctcatgaggaccaagaatttcgatgccgtagccacgtacgggattacagaaaatactcagaggatgggtcattcaaggagccactggaatcaaaaggaagatcccattccaaaattgagaaattttcagagtcctttgaacggcaactgtgctttagaaccaagcgttctgcctctttgggacctgaaagcagaaaggagagaaatgaaagagaatgcctgaggatggagataaaatcccgaaagaaagtagaggaagaaaggagctctaggaaagaagaacatggagaagcacacatggctcccctgtttgaaaaagggcctgaataatactctgcttctgcctcatgacatcagatgctactgttttggtttttttctttgagccccaattcaccatttcaggatgtggatgggggcggggttgggggtaaaaacagctataaaaagcaactgcagatgctgactgactgcagtgggcagggtatgtagctgctccaagatgacttgcatcataccccaattactgctggcatcttagttgagagtataatctgcttggttgcctttttatgggaataaagagaataaaaggtattttaatagaataaagaaaaatttgaaaatataatggaaggtatttaaagagccacccacatagcttcaccaacccttctcacacatcaactcataaatcatcttaaataaaagtcattggtatgactcttgagttt

SEQ ID NO: 674087 - DNA, 292 bp, Homo sapiens
atatcattcggctgccatctacatgatactagtcactctgtcatgactatgtgtgtcctcttgaaaactttacattatccacagatacaccatgtttattctatacaggattctcataattgtgtaaactaagtatacatagcctggtagatctggaacagaaacaataataattcatgtggtagggtgccaaatcagtggataacggagttccatgaaaacttgatgtcactttcgtcataacgttttccgcgttgcagcatattgtttttggagagattctcccatcttg

SEQ ID NO: 674088 - DNA, 726 bp, Homo sapiens
gctgcgccccgcgccatgtcaaagaaaaaaggactgagtgcagaagaaaagagaactcgcatgatggaaatattttctggaaacaaaagatgtatttcaattaaaagactgggagaagatggctcccaaagagaagggcattacgtgtatgtcagtaaaagaagtccttcaaagctatagtggatgatggtatggtgtgactggtgagaggatcggaacttctaattaattatgggggcttttccaagtaaaagctcttcatgcagggaaacataagtgggaggttctggaatctcagtggtctgagggaagtcaaaagcttgcaatgccttacagacaaagctaatggagaaagctaaaatggccgattgtgaacgggaagagcgaaccaggctagcaaaagagctttcttcatttcgagaccaaggggaaccagctaaaggccagaagtagaaaatatacaaaagaattgtgatccgcaagttggtgggaacgaaataccgcaaagcaaaataacagtagccaaagaaggctggtaaacagtatggactgataacaattattcggcaataaaaatctgtgggcaaaaagacacatgggggttgtgaagaaaattacacatgtgattagaaccttgtgcgaatcccagaagacttggattaatagaataaaattatccaatgggggtgaagggtgtacacgtgggtgaatatgtaattttcaact

SEQ ID NO: 674089 - DNA, 858 bp, Homo sapiens
gaccccattctataccaagacctattctgatttttcggtcaccctgaagtttatattcttatcctaccaggcttcgcgaataatctcccatattgtaacttactacatccggaaaaaaagaaccatttggaatactatacggtatgtgtctgagctatgtatatcaattggcttcctagcggtttatcgttgtgagcacctaccttatagtttaccgataggcaagtagaccgatatactcacgagcagtattatcactctccgctaccttaatcatcgcgtattttccaccggcgtctaagttatttagcgtgaatcgtccactgttccacgtgaaacgccacatattgacacattgattctgtcttgtcagtgctttctgaagtccctaggaactccatctttcttttcacccgctcagtgtgggctctgcatctggccatttgttatttagcaaactcattcaggtagcaacatcgtacctacacgtacacgtactaccgttgtatgcctcaacttcgcagctaatagtcctatcatgtagcgagctagtcatttcgccactacatatgggatggctttcatctccactgacttgtaccctctaattactcgagggctacactccgtagacacaaacctacgccaaaatccatttcactatcatattcatcggcgtaaatctaactttcttcccacaaaaactttctcggcctatccggaatgccccgacgttactcggactaccccgatgcataacaccagatgaaacatcctatcatctgtaggctcattcatttctctaacagcagtaataattacttactttccatgatttgagaaggcttcggttcgaag

SEQ ID NO: 674090 - DNA, 362 bp, Homo sapiens
tgactgagactcgtatatcaaagttacgccccggcactgtagtaaaatgtccattcatctgatccacatgcgtgttggcagcgcgcaaggcgttagtagtaggagcaatgagtggaggtatgggctattccatgtatcgggaattctgggcaaaagataagccttagaagaagagatgctgtcttggatctgtgtaggagggagcttgacatagtaggtatagagtgtcattagtgaattaaagttacctaggtattagtaggaaagtaaactaattagtatgggtagaagatggtaacatggcattttgaatattggattccttacgttgcaggcttgataggcttggtgaccgaataata

SEQ ID NO: 674091 - DNA, 384 bp, Homo sapiens
  misc_feature (33)..(33): n is a, c, g, or t
  misc_feature (359)..(359): n is a, c, g, or t
aaaaagagcctagcaagctacgaaaagacatgnaagaaaccttaaatcccacattacctaagtgaaacaaatccaatctgaaaaggctgcatactttatggttcagaggcaaaattatggagacaaaagaaaatagcccaggagtttagaggagtaggcgaaacacagaggattattgggacagtgaaacggctctttatccttctgtaataatgcatacatgtcattattcatttgtctcaacccacagaatgcacatcaagactgaaccctaattaaaccatggactttggccgatagtgtcaatgtagtctcatcaattgtaacaaatgtaccactctgaagggggatgttgatgntgggggaggctgtgtatatgtgagg

SEQ ID NO: 674092 - DNA, 104 bp, Homo sapiens
cacactcgtgtgtgaacatccagcactgtccacagcattccgctgaccatcaacaaggaagatgatgagtctccggggcgtctactgggttgctgacatgtcat

SEQ ID NO: 674093 - DNA, 260 bp, Homo sapiens
  misc_feature (5)..(5): n is a, c, g, or t
  misc_feature (9)..(9): n is a, c, g, or t
  misc_feature (108)..(108): n is a, c, g, or t
  misc_feature (116)..(116): n is a, c, g, or t
  misc_feature (197)..(197): n is a, c, g, or t
  misc_feature (248)..(248): n is a, c, g, or t
ttggnctgnacaccaccatttcccccagattccagattctgctgagggaggttgttttcttgagagtagatccagagtgtcaaggatctgttagatcctggaattccntttttgcnatcccatccctccctggtagctaggtcccgatatactcctgtcttgtgagattgtcgagatgagatgggggaccactcttnctctgttccttcctctctcctttcctccatagcaaggacgaactttcctgntttcaatgccca

SEQ ID NO: 674094 - DNA, 1063 bp, Homo sapiens
  misc_feature (742)..(742): n is a, c, g, or t
ttttgctgtctagtcatcctcgtcggtcttctgcttcttggtattgaacatcgcatcctcgatcatcgtcagctcgcccgcatgacgcgtggctcgatcgcaccgcatctatatctccatcctccacctcagcatcacttgtttacactcgtgtctcatggtgcccactcaggcgatacatctacaagcggcgcgcccctcctgaccaacaggaattttaacatgatgaagcagatgaccatagcaaccaaggagcgcagaaaaaagagaatcagcacgacccctgggctagccagaacacttgcctttagacaaaaatagcaagccaggagcaaagaaaaaaagaaccgtgcaccgaagaaagacgcaagaaacggtgagaagacgcgaaacagcacctatgaaagcaagacaaaccgctggacgcagcgccagaagtaagacggcacaaacgcgcccatcatgagtaaccaggaagcatgagccacaatacaacaaaaccgagccgcctacggagaagccaacagcgacaacgaagaaaggtcgcggagcggaagcacagtagagcgactgacagaagaaaggaactcatggcttaccccgtcggacaacatagaaaaacgacaggccgggacccccgaccaagtgagtaaagtctaaaatgaggactcacagaaacaactgtctacccaagcagtagcaggacgcaccagaacgaactaataacaaagaggagggagcnggccccaaacgaagtatctgcacgcagacactatcgagtacgacctaacaaagacagccacagtctcatctgcaaaaacatcgcagcaaaaaaaccgggctgagaaaagctaggggattatccccccgtagacaaacacaagggagcaagggggagaacacaactatacgcgcgaggaacaaccccagggggaggggagcccccatcaaagacccgaactactcaacacgccaggcgaaacgccggcccataccaaaaacaagggacacactagcactcaagagacacaccacaagacacgacacaagcgacacactacac

SEQ ID NO: 674095 - DNA, 115 bp, Homo sapiens
ctttcaaatgaaagtctcatgcagtgcttctgtgcctgactgatcatgacagcagcatttcaacccccaggggacttgcatcagccagcatgcactcatacgtcccactctatat

SEQ ID NO: 674096 - DNA, 562 bp, Homo sapiens
gtataatctggtaagatgcaactacttatccacagaaaaggaggttgaggtaagaagatccctggagcctaagagttctagtctagacctgggcaacctagtgagatgaacatccacagaaaaacccacttttacagcttatgtagagaataaaatttttagaagggccatagcattttcttttttaattactaagattctttgattcggacctacagtagaacactgggattactagtggctatacgttgttcattttcttcccaattgtagggctttgtcagcagaacatgcaattaagctcaaagtggaaaggtgggccatgtaatagccagactgttcatcaacaagacaagaaatttatcttgtcaaaagtgtgtctttgcacgtaagataaccataaaacagactgagcactgatattgactagatgctttacaataagcagaaggggcagagagtttcaatatttagattagttcacaatgttagcttaatagtagtgtgccattgatggagcattcctggaacatgtcttctctgcttgtttaaacagctgacc

SEQ ID NO: 674097 - DNA, 349 bp, Homo sapiens
  misc_feature (337)..(337): n is a, c, g, or t
  misc_feature (342)..(342): n is a, c, g, or t
ctggatctactggttgaaaaccctggtcttttctaggtgcatgggttccagcagtacttgagataaaataggtgatctcaaatagtggttctttgctaactcatgccaagctggccctcctgccaaggcaagcaaggtaggccatggcaatagtatcagttagggaccgtgtgatggctcacgtctgtaatcccacactctgggaggccgggatgggtggatcgcttgagcccaggaagttcgggaccagcccgggctacatggccgaacccggtcctctacaaaaagtacaaaaatagccaggcgtgcttgcttgtagtcccagctacttgggaanttgangttggga

SEQ ID NO: 674098 - DNA, 251 bp, Homo sapiens
aaccaaataaaaagtcagacctatgattctatctagaaacacagcgatcaccaggtccggtaggtaagtcgcctgtacctataaatcttcccactgatttagatacatagacgggtgtgctctttatagctgtgcttagagtagctcgtctggtttcgggggtcttagctttggctctctctgcaaagttatttctagttaattcattatgcagaaggtataggggttagtccttgctatattatgcttgg

SEQ ID NO: 674099 - DNA, 1856 bp, Homo sapiens
gggttttcctcttaaaaaaaaaaaaaaaaaaaaaaaaaaaaaaaaaaaaaaaaaaaaaataaaaaaaaaagggtgggggcgcggctgaagaaatgatttcctggagaggggggaggcgatagttgtaggggtcataacagcgtttgtttatggtgacaaaggggggcccactaatggagcggaggcgtgtatatatataagagatagagagcggggacgggggtgtctaatagaagacgacttgaccgactgtgaggaagaaacgtgggaacgttggggagaccttgtgtggcgaagaggggacacactgtttatattgtcggggggggggggagagaggacacatattgtggtggcaacagagaatttcactctttgagagagggatatatttcaaacgcgctctcataagaagggagagaaaaacaatatatgataaagaatgttctgtagcagagaggggatgctactaaatgagggggggtgatgatcagaacaaaattaacacgcgcgagcgaaatgatgatctggccgcgcgaggagagagcatgaaagaaaaaaatatatgtgcgcggccaaaaaagtgtgtggagatacatgtgacgacattgtgtgaagtgagaccaaatatttgtatactcatagagcggaggggagaggagggaaaacatctgcgctcggtgtataaaataaaaaacaaagtggttggcaagagatggggtttctttggaacgacaacaagggtaagttagaagagcgaaactgttttgggtttggtataaaggacggaattctttgggcaagaaaagcagacccaacaacggggggggattttgggccacaacccgagggaggaggtacttgagaaagcacaaaagggacattcaagggcaaaatttgagccaacacagagatggacacccacacatgagaacggagagacaacaacgccactagagttacattgaggaacaggagcagcatcaacagcatccgacgccacaacaaacgaccacgaggacttaggagagcatccaccggggaaacacgctgtctgaaaaacaaccaagcacacgagaagaacaacacctataaacacgaggaggtggccaccaaaagaacaacatctggggacgaacaacgagggagggctacccaaagacacaaaggagcgaaaaacggttggggacaaggacccccgaagcaggagttagcagatcagcattccgaagtaagacacaaagaggggatgataagtcgagccaccacggacccacatagtgtgagccacccaccaaacagtgtgagagacgaacaattacacagcgattattcatgtgggaggtcccaaaattcgaggagaggtgacatcacccagaaaggttggggtgaaacaatatttacaccttgtgacacagtcaaacacgtgatttgagtgcgaataaataacgtttgagtgtgtcaaagtgtttgagccagctattaaaaacaccacttagaaggagaagcattattgagatcagttggagataacttacgacagtggttggtagccaccacagagggagtgagaaaaagaagaaaagaccgggccaagttagacccacaccagtaatcccacaaagaagaagagtccaccgaagacacaagacagcgaagcaaaaagagccagcgtcaacacacgagccaaaggaacagagcggtgagtgctgtgagcgaccccagaacaaaggcagcgcggagagaaagttggagaggagacaccaacaaaaacagctggagcgagtcaagacgcagaaaaaaaagccgcacggtcgcgacagcaagaagcactagacagcaaagagggatgcgag

SEQ ID NO: 674100 - DNA, 409 bp, Homo sapiens
tctgtctgtgctgtggtgtgctgtgctgttctgtctgtgctgtgctgtgctgttctgtctctgctatgctgtgctgtctctgctgtgctgtgctctgctgtgctgtctgtgttgtgctttgctgtctgtgctgtactgtctgtgctgtctgtgctgtgctgtctgtgctgtgctgtgctctactgtatgtgctgtctgtgctgtgctgtatgtgctgtctatgctgtgctgtgttgtgctgtgctgtgctgtctatgctgtgctgtctgtgctgtgctgtctgtgctgtgctgtctgtgctttgctgtgctgtctgtgttgtgctgtctgtgctgtgctgtgctgtctgtgctgtgctgtgctgtactgtgcgtcgacccgcccgcgaatttagtagtagtagtagacc

SEQ ID NO: 674101 - DNA, 139 bp, Homo sapiens
ccacaaggtcatactgttttcataataacactacatttataccaatagtaccaaaagaatagtgagtaaaactactgttgctgtagaatgaagcaaggcagtgatagtccttgtactctccatggccacgaacttggag

SEQ ID NO: 674102 - DNA, 214 bp, Homo sapiens
gtcgggctgcaaagtgtcacatacttgtctgtccttttatatgaaatttccagaacaggccatctgaagagatgtatagtggacttggtggcttcagcagctgtggggaggtgggactgagagagcgactgctaatcaggatggggtttcctcctgggaatggtaaaaatgttccggacctagatagtgatgaaggtagcacgacactgtgagt

SEQ ID NO: 674103 - DNA, 472 bp, Homo sapiens
caaaactacagtgtgagaacctgactcagggggatctaaaaacaggtccagcttctttgttctttccgctgaacaactcttcttattttgacctcaggctagagataactacttgttatctaatccaaggaaccatgttaattagaattgctgttttagtttttatcctccttgcgtgggggagaaaatcagatgttttggtttaacctttttgagggctatgggaataaaagtaagcaataacaatagtttacaagcacttattatgtactaggtgcagtgctaagccctattactctactttctcttttgggccatttaccaactctgtgaggttggttattattccatattacagatgagaaaattaggcatagaagttgggtagcttgctcaatgtttggctaggaagtgttatagtcagaattcaaacccagatctttttaatgtttaagcttcttatttttaccag

SEQ ID NO: 674104 - DNA, 889 bp, Homo sapiens
  misc_feature (734)..(734): n is a, c, g, or t
  misc_feature (736)..(736): n is a, c, g, or t
  misc_feature (739)..(739): n is a, c, g, or t
  misc_feature (742)..(742): n is a, c, g, or t
  misc_feature (744)..(744): n is a, c, g, or t
  misc_feature (754)..(754): n is a, c, g, or t
  misc_feature (757)..(759): n is a, c, g, or t
  misc_feature (763)..(764): n is a, c, g, or t
  misc_feature (767)..(767): n is a, c, g, or t
  misc_feature (769)..(769): n is a, c, g, or t
  misc_feature (781)..(781): n is a, c, g, or t
  misc_feature (785)..(785): n is a, c, g, or t
  misc_feature (793)..(793): n is a, c, g, or t
  misc_feature (798)..(799): n is a, c, g, or t
cggggcgcgcgccgaaggggccccagcggccgtcggcgccgacggtcttgcggtgcacgggctcgccgagccgccggcccgtggccggatcgaccgtgtagaccaacacctgcgcgccggccagcgactggttctccgcgccgatcgcgcggccgtcgagcaccacgttggcctcgcgaatgatctccaggctgcgtggcgcctcgcccgtgaggaactgccaggtcgccgcgaaggccgcgggcgagaacgaggtctcgcggtggtccacgcgcggcagcacgatgttggtcgcgcccttgagcgccgggccgtcgaagccgatgttcgtcggcttgccgggcgagccgacccacaggccgtcgggctgggcgaacttgtcgttgttgtccgagcgcagcgtgagccacttcacgccgggcgtcacctcgtcgccgttcgggcccttgggcgcgttgagctgccgcatgaagggcgacagccccgagaactcgttgttctcgcgcaggcccggcacggcccagatgccgtgcgccggattgccgccgagcaccacgtggctgacgatggccgcgccgccgccgttctgcacgtagttgcggatggtgttgccgccgcgcgagttgccgatcagcacgaccctggccgcgccggtggcgcgcagaactgctcgaccggtccttgaggaaggcggccgattcggccgtggagctgcgcccggcctgggccacgcngncgncgncngcgcgcccanggnnngggnnggncnaacggaacagcngtcnggcggcanccgtnngatcgaagcccagaagtggcgccaagcacggacaataccgttggcggccgaaacaagcggcggcacacaccacgcatgggcgccacataa

SEQ ID NO: 674105 - DNA, 264 bp, Homo sapiens
ctctggttcctccagtagtactacttcccggtctttctttaccatacaaaaaatagctttcccctaaaccaacacagtaagcaaactttaaaaaactgaggtcctattacaaaccaacgcccagcactaactgctttaaaattactgcataattagatttagttgaatttcaccattaattaggcagccgcactgcagggagcctttgaaatctgagaaaatgggaaaaatcatctgagccacgttttttaagcccaacttcat

SEQ ID NO: 674106 - DNA, 568 bp, Homo sapiens
gtgaacaggaaattaatgtttaaaactaacataaaaaatataacaccctctcttaaatcccacaccacctctaaagcctgcaactcactcctcaggcagaatttcttcctcagggaaacccctaactctggtctttaagcctataaaacaaacaagacaatccttcccccgatcccttccaaaacgcctcccccccccaaaaacaaaaaccaagcccaattaaatcaacaaaaaccttcccagcaaccacctcactaccggccacaaacaaaaaagcgacacccacactaaataaattcccccccccatatactacaatcttcctaacaagtaaccccctaaacaaccaaacaaccacccccccacacaacctccacaaacccccccgacaaaccaactctcgctctccttacctaaatcccacccccccataaatatcactctgcccctccctcaaatcaacacgtaccaaaatgaaaccccccctcaaacctacccccatacataactccaaccccctcttactactccccccggaaaaccagcaacaccctcacaacgggacacg

SEQ ID NO: 674107 - DNA, 1419 bp, Homo sapiens
  misc_feature (523)..(523): n is a, c, g, or t
tgttcactttcatgccaattctttatttccataataaaaaatcttttatttccacctttaggggtcccctggtaaaataagatggaccacaaaacccaggccaaaaacgtgttctgggtctggccgggaacatgtccaggaggcactggtcctggcatggctggggagaatgtcgccctggatctcgggagagagaagggcgaccacgcgcaggtgggtatatcagtcctggccgcaatgtaaccggggctggtttctccaaactattggtgagcacttgggctaacatggaggtggggagataacctgggttcgcatgtgggcgaatctctccaagatattcctcttctgtgcggcaaaagggaacgcgcgtgagactttatgtgggggtgtggtcctctgtggcgcgagtgatgaagatctcgccgctttgttaatgtctcccacaggaacaaactctctccgatgcggggagagcggtggtcacgagtctcctgtgggagcacatctgcgcgagaaacanatttttcgccaaagatggggaggcctctctcgacaaacacagcgttttatatatataacggggggggttaggtgggagctcgcgagaaaccgccagagatggggggctcaccgtgtgctacataagccgaagaacttttgtctgcgtgcgtcgtaccctgcaatcacgagagtaggacacacatttccaagagacggggggggcgactccccgggggtgtgaatacaacccgcgtggacaaacccgcgctatacgcggtgggctcccaaaatacaggcgggcccgcgtggacaacaagaagggggggacttcaccaggggaataaagcgtcactttaaaacaaccccaagggtcgcgtccaaaacacgtggggcgtgtggccccaaagctgttgacagggtgtagcagtttccacatcttccccaagggggtggcccgccgaaaaatcttcgtggttgatattaccccacgagaaggtttgatctacggctgtggtcccaacccaccagaaattccacaacttccacacatatacagggggaggcgccccctggtgttgtggcgtgcacatgaattagcaggggtgtgtctccacacaacgggggccaccaaggcgccggaggagaggggggccacaagggagaaattggggggagtaggcagaagcaacacaacctctcaaacgatgtgtacgccaggaagaaatccacaggcgggcgacgacgaagacacctgtggaacaagcaacacacaaccaaagccggcggggggggagacggatggcccctaggaacgcaagatcccacaccacgagagcggggcgagcgagaaaacgaagtgagaaaacacgatggacagcgcgccagccgccgcctagactgcacacccactgtgca

SEQ ID NO: 674108 - DNA, 440 bp, Homo sapiens
agcgtagggtaggcgagatcttaaattacctccttctctggcccacagtccggggaatgcgtatgctggcgctacgattggctacaccagcagaaaagtcgttgatgttggaggtttcatggaatccagttagacgtcgggcattgtccaggcctcccttgggatcataggcacgggattggtactggtgccgcttgcttagtttctcaatggcctcctcgatgttcctagagtaaacagaaatggtggcagtccaaccttgtctccaggtatggagccaagaatggagtgcaccaaaatatgataccagtagaacaaatacttcatgagggcagttggtgcaacttcttacctgtgttgtctcagtggtgagaactgtgcccgacaagcagtacaaagttgctgtttgttgaaaagattaatcctttgaaactttctcc

SEQ ID NO: 674109 - DNA, 770 bp, Homo sapiens
ggagtctccttctgtcactcaagctggagtgcagtggcgtgatcttggcccactgcaacctctgtctcccgggttcaagtgattctcctgcctcagcctcctgagtagctggaactacaggcacgcaccaccacgcctggctagtttttgtattattagtagagatggggtttcaccatattgaccaggctggtctcaaactcctgacctcatgatccacccaccttggcctcccaaaatgttggtattacagttgtgagccgccacgcctggccctaaatgttttcttaaattaaacacttataaatcttccagatatcaccttttgtcaaaattcaataattatgaatggaccttactatactgatgctttcttactaagctcctctctaccctgaatgcaagagaccctcatagttaggcaagaatatcatcaccccattcaacctgaaaaagctacagaagatggatcgacatccctctgcaaccctcaggattaaggattgtttgataaaagggagagggaaatgtgagagacatgtgaaccaaagcatctccatcttaaataacagctgggtaaaatgaggctgaaagctactggactgcattcccacacggatgacgtactgtaaggcgtgaagtgtcggcgacacacaggccataatgaccttgctgatcacacaggatggacgtcaggaaccaatcacacccaatatggtgacgagactgacctctgagcagctcactggtacgtaggatgggcgcgtgac

SEQ ID NO: 674110 - DNA, 288 bp, Homo sapiens
agtacacaggctcaagatggagacacaggctcaagatggataaagcagcagcactagtggaggtctgcaccttcctgcttttttacctatttagcttctaaaatttttcaacactgattttaagcaaggtctcgctcctgttgcccaggctggagtgcaatggcacgatctcagctcactgcaacctctggctcactgcaacctccacctcctgggttcaactgattctcgtgccttagcctcccgagtagctggggttacaggcacccaccatcttgagcctgtgtc

SEQ ID NO: 674111 - DNA, 852 bp, Homo sapiens
atgggaccctgtacacgtatcctgaaaactggagggccttcaaggctactcatacgctgctcagtacagcggggactcaggtccgcgtgctactccgacacacaccccactataccatttcggtccaaaccaaccgcacccctaggaattatactaccgacaaactttcctagccggcaaggtacccagacatatatgacgggtcgatagataggatatctagtagattgtattagaggagcaagcgaccataattgcacctaactaatgtagacgcaatgagagagctagcgagaggacacgataccatctccataaagggcaatgaaatgacacacacggttgggatgcaagttgcgtcgtgatagccattatgcaatggaattcccggatataatatgatggcgccacacaaggaacaaagcataacaccttgtgaggtgataaaccccacaaacacatattgagagcaaatcaattggccaaacaccaacaatatccacacacacaaggggaccccaaccatggaatgaaacacttgccatcaaaaggggaacgctggacacgcgttggacagcggaccgtcacaatatatcccctgaggaacggcgcactatggacagttgggagaaaacttgccattttcaccttaatgacatcaaggacaacggaacagggcacacgtatatcaacacgatagggagatgggagcgaccgaacacccagaaggattcaccctaacatatggggccttgggtcgcacatccaacaagaggatatggatacattaggcaaacacgccataggaacaacggatgggcgccctacactaaccttcacgccaaccgggag

SEQ ID NO: 674112 - DNA, 187 bp, Homo sapiens
ctggaccggatctgtgccatggtggataacaatgcctacgggaagctgaccctgcaggagtaccaggaggggtccaaggcatacccgcacattgtgcaggcgctgtacctcaacgacgggctggtataggcccaggctggagctggaggcatgggaaccgggtaccacactagatggaggatcaagc

SEQ ID NO: 674113 - DNA, 193 bp, Homo sapiens
ctactctggaggctggggcaggagaatcgcttgaacccagaaggcggaggttgctgtgagccgagattgcgccattgcactccaacctgagcaacaagagcaaaactccatctcaaaacaaaacaaaacaaaacaacaaaaaactcaataattatcagagaaaaacactgtaatataactatattgaaagaat

SEQ ID NO: 674114 - DNA, 467 bp, Homo sapiens
tgcagcggcatgtgcctgtctcttctggggtaggaatgttcttgatttaagcagcaaagagcagagggattataaaacgcaaaggtggccagtgtgcagtggctcatgcctataattccagcactttgggagtgccaaggtgggcggatcacaagctcaggagtttgagaccagcctgaccaacatggtaaaaccctgtccctactaaaaatacaaaaatcagctgggcgtggtggcaggcacctgtaatcccagctactcaggaggctgaggcaggagaattgcttgaacctgggaggaggaggtagcagtgagccgagatcacgccactgtactccagcctggatgacagagtgagactccatctcaaaaaaaaattataataactaacataaataaataaagcatctatccttcagccatttgctaagaagctgctgtattccaggcactgtactacgttaacg

SEQ ID NO: 674115 - DNA, 278 bp, Homo sapiens
  misc_feature (161)..(161): n is a, c, g, or t
  misc_feature (206)..(206): n is a, c, g, or t
ggaccggatgagatagcacggtgtcgtggagtttgtacggaaagagatatgacctatgcagttcgaaaactggataacactaagtttagatctcatgagggagaaactgcctacatccgggttaaagttgatgggcccagaagtccaagttatggaagatntcgatctcgaagccgtagtcgtagcagtttccggataacaatctnaacacaggagtcgcagtaacatcaccaaggaagaagtcagaggatcacgcctattctccccgtatagcctgt

SEQ ID NO: 674116 - DNA, 100 bp, Homo sapiens
aggagagctccaattggatcttcagcaggtgatgccatctggtccagggtctctcttgtcttgcactgtggactttcagcactggagaattctttgcctt

SEQ ID NO: 674117 - DNA, 767 bp, Homo sapiens
ggtccctacaggtctgctcccgacgggcctcgggcctgacccgtccacacagggccgtgtcaacagcagcgactcaagggacgtgtgtacatatgtaaatgagaaatagagacgtgtcaacagatgcattcatttctcttggaatgtgtattgtttttattttgcgaaacaaaacaaaacaaaaaaaaaagctgggaactccatcacgtggaaaaactagatcctgtgggttatagcattggtgagttctccacgtctggtctctctcgctcatgtaatatactctgaccctgagtggaaaggggttttggtcctggtataattttacctacattgtactagtacactgaagctaaatagtacatgtagggtgctatggaaatactgaaaagaaacggggattccagaagaaaatggtaaccaaattcatacttggtctaacttttggatatcatgatcacaggtgattcacacgtaccacacataaacacacccaccagtgcagcctgaagtaactcccacagaaagcatcaatcgtcttggtacatcgtatgtacaaggcaatcaatttcatactttaaactgggtcaaaaaacctaattggggattgctaagtctggcaaagctgtatgtagttagatgatggtgacaaccttctaagtattaatctaaattagatatggtattccacactgaaaaccctgtatattagggtggtacatggtgggtaattgaggaatttaaaggatccaaattgattgggagta

SEQ ID NO: 674118 - DNA, 479 bp, Homo sapiens
  misc_feature (362)..(362): n is a, c, g, or t
  misc_feature (407)..(407): n is a, c, g, or t
ggaccggatgagatagcacggtgtcgtggagtttgtacggaaagagatatgacctatgcagttcgaaaactggataacactaagtttagatctcatgaggtaggttatacacgtattattttctttgaccagaattggatacagtggtcttaacagtggaatttcaaggtaaggattcaggcaagctcgtccaagtaaattgccagatttctggttttagttacattgtattcattcagcatgtgctgaagatagatgtaagcttagatctttctatggatacttctgtctatccgattgtgggagactactttcatacaggttaaagttgatgggcccagaagtccaagttatggaagatntcgatctcgaagccgtagtcgtagcagtttccggataacaatctnaacacaggagtcgcagtaacatcaccaaggaagaagtcagaggatcacgcctattctccccgtatagcctgt

SEQ ID NO: 674119 - DNA, 175 bp, Homo sapiens
cacacacgcaggacaggagacagagagaagagaacgtacgagagtcatctgattagtccatgcatggggatcctgcgcccgcatttgccccggtagctgcttcggatccacgaggtctgggggactcgggtgtctgagcatacagtactagcgataaccccctcgttcactaaca

SEQ ID NO: 674120 - DNA, 444 bp, Homo sapiens
taatctgtacttgcgtgctactgtctcccaaagtgtgtcttccctccagatctataaagcctgcttctccttccattcctcctcatctccagttttagcacccccataactttctgagaatggttcccgctatctggcagacacatcctatttctgtctgtgcttaatagaccctttgaatgttgcaaggtcacgcccaaagctattctcctttcatgcaccgtctctgaattctagagaaaagcgaatttgtctaccgtaatactcccattgcatttatagtccaatatcatacagttgtgcattatgattattccctaggtaggtttctccgttgtatagtgtagttcacctcaagagaaacataaacattgtaatctacaaatttctttagtaattctgtttattccctgctccttgcgtacagattagggtaccgagctc

SEQ ID NO: 674121 - DNA, 254 bp, Homo sapiens
gaaaaaaaaaaaaaaggaggaaaaatttttttatttcaaaaaattgtcacccacatgtggaaaaaaacatttttatcctggcggtattttttcaaatgggaaagggttaaaaaatttaaaagtccaaggggtttccgggagagggtagttttttgccaaaattggccccaccaaactttttgtttttttccaaaaacattttttccatttttagggaactgcttttaaatttttccttttttaaaaccttttcc

SEQ ID NO: 674122 - DNA, 241 bp, Homo sapiens
aaattgtcaggcagttagtatgagcctgtccggtacagtcccacatttatatagacctcatgagcttcatgtcatggcagcatgagtcaaagcagagtatggagcttgcagcggtccctcataagtgtcaccattgcaccacattgaccctggcatgtgcatctaagattccatgaacagcatgtatcctcgatagttctagctcactttagcacaaatacagtaaatgtgagcatttgcg

SEQ ID NO: 674123 - DNA, 116 bp, Homo sapiens
gttctatttatatagggcaggtagtagagaaagaactatcctacaagtatttcgtgtttactgttttaacactaaagatatcgattgtaaaagtttcagttgaacagtgagaagag

SEQ ID NO: 674124 - DNA, 357 bp, Homo sapiens
atagcatgatttggaagacacacacacacacacacacacacacacactgttttttttttgggcaggcagggtaagccgtccttctaaggtgtggctgtgtatccgttagggatgtaaagctgggggcccctttctgtattggtgtcagtggccgtggatgaccattgctcagagccattatttcatttggggtgtacaaaaattgtgctgttgtaattctgtccacctcttcatttattagtgggactattcctctagagagaacctgcccctcatctattattcagttatcctgagggtactggctcttttgaacttgtgtttgccttagaaatgactattgaaccggatagcttg

SEQ ID NO: 674125 - DNA, 111 bp, Homo sapiens
  misc_feature (103)..(103): n is a, c, g, or t
cggctatctgtgacagctgctagccaaacagaatctggttatgaagttatctcttgagaatggcttgattctctatgccaccaacagtattagtctgggcagngttccctg

SEQ ID NO: 674126 - DNA, 649 bp, Homo sapiens
taaggattcaggctccgtcctaacgaggccgtggctgaggctcaggccccccgccctccctctcagccacagcgtactcccagcccgagctggacgccaccttggacaggttttccacttcctaaggacgagccccagactgaggagaggtccgaggaggtgggcgtggatctttggaggaccctggcggctggcccgggggaggcgggccgatggctgtgctggcggcgcgtgtgcgggggctgacatggcggagtggagctggacctatcggatggtggagctgagccccgtgggctcggaggagccccgctgcctgtccccggggaggcgcgccctcgctaggggcccgacggctggccgggtggccggatcctggtactgcgagccaagggcggaggcccaaggaggaagattgggacaatcggtcaagtgaaaggagcaagctaggattgggtggaaggcaggaactgatgaagcaaggttacacacggtgatgaatagcgagagggggggtcagcgcagggtgctccagcgagagctagagaatgtaaaggctagatggcccattggccaggtgccgcgtagaacggcgccatgaaaaaacaatcccgcaaagtaatcggacatgaaaaagccttcatggagg

SEQ ID NO: 674127 - DNA, 663 bp, Homo sapiens
gtcaagtgactgtgtcctgtggtggagaaggacgttccgtgccgctgggttctgagccggagtggtcgctgcctgggatggaggcgaccttgtagcagcacttgaaagacacaatgaagaatccctccattgctgaagtcctgagcacagattcacaaggacttaatctgcgttgccgcgggaccttgtcagatgagcatgctgtagtgatatctgctatagcccagcaagcagctaagctaacctctgaccccactgatactcctgtgtcgtgctagaatcacatattgccaaccttatgacccagcatcaccgtgccatcactgtggcagtccaccgccctctttgatgctcatatctggccttcagcagcctgcctacgcatctgtacccctactaagctaatccccttaccgcacccctatcccctcaacctcctagcccactaacttaatggcccattcaccacttctctcgtcatccccgcctcaccccccttccacccctccacctccgcacttcgcccctacccaccaccgcctcaactctccaattcaccctcctcttcggccttcctccactaccaccctcccccttctcctcctcatatctctccctctccacacccacatccttcctcccactctgcctcacacccctcct

SEQ ID NO: 674128 - DNA, 1166 bp, Homo sapiens
cagcggcgggaggcaattaagcgtagtagaggctgtgtgttaattcggccgagggcggtgcagaggaggtcagctgcgggagctgtttcctggggactggtgcctgccatgagattgaccccgcgcgcgctgtgcagctgcctgcccagtgcctgcctgtgcgtggatgaacttccccctgttgctggtctgcgactgtggctgctgctgtgttccctgtggccacatggccaatggtgtgctgaaggaaggatgcatgatgcatgcctgaatgcttggtggacttgtagtcatctgatgggtccagctgagtgcccgtgatcccagctttcatgtgcctgcaacccttcttgtttcaggtgaaagccccttgtgcgcttaagtgcctcgacttggctgtgtcgctcagacaaggattgggactttgtgcggtgatcttacatgatgcaggcagacagaagttagttgcagacactttaaggaatgtgacgaagtgtgcctagaagaacattgtcaatttattaaccgaagcttgtggttaacacgggatcggagacaattgtcgacaggcgagcattcattccctggatcgggtcaacttggacacttgatctgggcgagcagagcccaacactggcattaagccaacgctggagacacaggaggcaaccctttgcgcatcgtaacgtcgtaagttcagttgggtccattttggcggtgtccacgcaaagctggttgggtgcaaagggtccagtcgcctacagttcaaagcttccgcgtccggtgatgggcatgcacccgtacaggggacacagggcgcaaagggccccacgcaagggtgcttggggctgggccggaggcccttggggcattcaacccaggaggccttggtgcattgttcccaaaaatttcaggggttcctcgttgaagcgggccccccctgcagttgctgccgtgattcggtggaccaacttcccttgggccgttgcctggcttcccttcggggctttggaccggttgtggcgacgaccatggtgccttgaaaggccttgggccccgtgtggtggaaaccgtgtgcctggacccaccgtgggtcggcgccaccgcagacccattgggttgactaaccttgctgtagagccccttcaaccagagcatccagcgga

SEQ ID NO: 674129 - DNA, 675 bp, Homo sapiens
gcgcacgaaatatttattaatgcggtggtgggttgacagagctaacataccaaaccaagatgaattgccacttgggccgaaagcacatcattctacattataacccactggtttctgctagcacattgggcaagcaagttgctcagtctgtaagggagcatctcaaaagatccacgctacatatcactttgctcctaagtacctaatcctctgcttactgcccgtctgaggcctggtcaccagcagacaagaggcaactaaggggggtggaggtcgggatagagcttattgaccaaaccggtgacactggcttcatttatcaatgccccccagctgtaataactgaaacgcctactgactggtgaacgccttagccaactgcatttttatacatggtgcgctacgccctagaaaaagaccaaaggtttgatactacctcaacaacgcagaatccccagaatgtatgcttaattcataaaccccacccctggggagaagtgccgccggaggccctttatacgccataaccgaccgggttgcagggatagacttcaggtgccttggttccccaagcgggggaaactactactggcttggcccacggcgccagacaactggctggcgccaaaaaaaaatattgtattttttgtgtgacggagtttcacacgattttgg

SEQ ID NO: 674130 - DNA, 1957 bp, Homo sapiens
  misc_feature (1483)..(1483): n is a, c, g, or t
tgtgggcgctttagtgcctccgtgtcagctccactgaggaaggagctggacccctgctcctctcagctgcgctctgttctcccgatgaggcttgactggacgggcgagcagttcagcaagaactcaaaacaacgggcacagctctcacacggattccagtactcactgaacacggctcagcacataaaaagcacagagtcttgttgaatgccactgggagacaaagccggggagggaggtgcaggcagtttatagaggttccagaaagggaagtggttggcaacggtttgtccttttacgtgcttgacacccaatgaccacagcaggcctgtggccagcggggacacagtccacaagtgggggtttttaacagcttgttcttaagagacgcgttcccataaccacagagtaactgagcactcaggtgtctcaggcccacggaggatttaatagatgaaaccctggatcgtcgtcgaagccgtggttgttaagaagctttaaatatattgaccggaaaacggggagaaaccagagggtggaagagccgctcgcactgcggtgcgatccctgagggctcggggcagggactggggaccgagcaggagctggcggggtgagctctgcgaagcgggcgtgagaccgagcgcccatgggccggtcactgccgggtgcccgctcaccccccgacgccagcaggagcgcgcgcgcaggccccgcggggccgggagggcggcacgggcggggcccccgtgctctcaccgccccggggtgtggttcccgcggacaggccgggcggggcggcgggtttaaggcgccggccggcccgacacggctcactcgcgcccttgccgctgccaccgcaccccgccatggagcggccgtcgctgcgcgccctgctcctcggcgccgctgggctgctgctcctgctcctgcccctctcctcttcctcctcttcggacacctgcggcccctgcgagccggcctcctgcccgcccctgcccccgctgggctgcctgctgggcgagacccgcgacgcgtgcggctgctgccctatgtgcgcccgcggcgagggcgagccgtgcgggggtggcggcgccggcagggggtactgcgcgccgggcatggagtgcgtgaagagccgcaagaggcggaagggtaaagccggggcagcagccggcggtccgggtgtaagcggcgtgtgcgtgtgcaagagccgctacccggtgtgcggcagcgacggcaccacctacccgagcggctgccagctgcgcgccgccagccagagggccgagagccgcggggagaaggccatcacccaggtcagcaagggcacctgcgagcaaggtccttccatagtgacgccccccaaggacatctggaatgtcactggtgcccaggtgtacttgagctgtgaggtcatcggaatcccgaaaccctgtcctcatctggaacaaggtaaaaaggggtcactatggagttcagnggacagaactcttgcctggtgaccgggaaaatctggccattcagacccggggtggtccagaaaagcatgaagtaacgggctgggtgctggtatctcctctaagtaaggaggacgctggagagtatgagtgccacgcatccaactcccaagggcaggcttccgcggcagccaaaattacagtggttgatgccctccatgaaataccactggaaaaaaggtgaaggtgctcagttataacctgcgaatccatgagcctctgtagctaaaggtgctctcagacagccgacagctataaccctgctcttgcctgacacacttctcttaacctaacccactaacactttattacagccagctggttttacacagagaaatcaaagataacacatcaagactatctacaaaaatttattatttacagaaaaaagcacatgtagctttaaacaaaacaaataaaattcttatcacaacagt

SEQ ID NO: 674131 - DNA, 187 bp, Homo sapiens
cagtgagccaagatcacgccactgcagtcagcctgggcgacagactgagactccatatcaaggaaaaaaaaagctctgcttactattgtgaatatttccaaccactagaagtataagcatccatattctcatcacctggaatttgacagttcacaatctaatctatgcggatgactggtcaccttgt

SEQ ID NO: 674132 - DNA, 1158 bp, Homo sapiens
  misc_feature (684)..(684): n is a, c, g, or t
aagagtcgtatcaacgcagagtggcattacggccggggactcgcgccttgccgtgccaccgcaccccgccatggagcggccgtcgctgcgcgccctgctcctcggcgccgctgggctgctgctcctgctcctgcccctctcctcttcctcctcttcggacacctgcggcccctgcgagccggcctcctgcccgcccctgcccccgctgggctgcctgctgggcgagacccgcgacgcgtgcggctgctgccctatgtgcgcccgcggcgagggcgagccgtgcgggggtggcggcgccggcagggggtactgcgcgccgggcatggagtgcgtgaagagccgcaagaggcggaagggtaaagccggggcagcagccggcggtccgggtgtaagcggcgtgtgcgtgtgcaagagccgctacccggtgtgcggcagcgacggcaccacctacccgagcggctgccagctgcgcgccgccagccagagggccgagagccgcggggagaaggccatcacccaggtcagcaagggcacctgcgagcaaggtccttccatagtgacgccccccaaggacatctggaatgtcactggtgcccaggtgtacttgagctgtgaggtcatcggaatcccgaaaccctgtcctcatctggaacaaggtaaaaaggggtcactatggagttcagnggacagaactcttgcctggtgaccgggaaaatctggccattcagacccggggtggtccagaaaagcatgaagtaacgggctgggtgctggtatctcctctaagtaaggaggacgctggagagtatgagtgccacgcatccaactcccaagggcaggcttccgcggcagccaaaattacagtggttgatgccctccatgaaataccactggaaaaaaggtgaaggtgctcagttataacctgcgaatccatgagcctctgtagctaaaggtgctctcagacagccgacagctataaccctgctcttgcctgacacacttctcttaacctaacccactaacactttattacagccagctggttttacacagagaaatcaaagataacacatcaagactatctacaaaaatttattatttacagaaaaaagcacatgtagctttaaacaaaacaaataaaattcttatcacaacagt

SEQ ID NO: 674133 - DNA, 907 bp, Homo sapiens
ggtagcgcgaggctatcagtgtggactgcaatgagctattcctgacggcagtccccccggcactccccgcaggcacacataccctgctcctgcatgagcaacagcattgtccgtgtggaccagagtgagctgggttatctggccaatctcacagagcatggacctgtcccagaacagcgttttcggatgcccgagactgtgatttccatgccctgtccccagtctgctgagacctgcacctagaggagaaccagctgagccggctggatggaccactagtcgtttgcagggctggtcagtctacaggaactctatctcaagccagtaatccagctctaccgcatcgctccccagggcctttttctggcctcaggcaacgttgctgcggcttgactctcaactccaaccgtcctgagggccacttgacatgccgctggtttgaaatgctgcccaagttggagatactcatgattggcggcaacaaggtagatgccatcctggacatgaagcttccggcccctggcaactgcgtagccttggtgctagcaggcatgaacctgcgggagatctccgactatgccctgtgaggggcttgcaaagcctggagagcctctccttctatgacaaccagctggcccgggttgccaggcgggcactggaacaggtgccgggctcaagttctagactcaacaagaacccgctccagcgggtagggcgggggactttgccaacatgcttgaaccttacggagttgggactgagcaacgttgagggagctggtcttcatcgacaagtttggcctgttgaacctcccgagttgaccaagttggacatcaccaatacccaaggtgtcttcattcaccccgggccttccaccactggcccagatgagaccttctgtcaacac

SEQ ID NO: 674134 - DNA, 236 bp, Homo sapiens
gactagaggatccctgatccttaaaacactttgttggctgttctcaggtagaactcagtacgtctggtagcctccaggatgccgcttagattattaaacaacatgtcagtggttggaagagtcaaatgttatttttgatttttctggtatggtttcggttttaaactgcatgttggcggataacttgccgctttctattcatctcccatacatgacattcaaagtggcatgcaaac

SEQ ID NO: 674135 - DNA, 1609 bp, Homo sapiens
tgtgggcgctttagtgcctccgtgtcagctccactgaggaaggagctggacccctgctcctctcagctgcgctctgttctcccgatgaggcttgactggacgggcgagcagttcagcaagaactcaaaacaacgggcacagctctcacacggattccagtactcactgaacacggctcagcacataaaaagcacagagtcttgttgaatgccactgggagacaaagccggggagggaggtgcaggcagtttatagaggttccagaaagggaagtggttggcaacggtttgtccttttacgtgcttgacacccaatgaccacagcaggcctgtggccagcggggacacagtccacaagtgggggtttttaacagcttgttcttaagagacgcgttcccataaccacagagtaactgagcactcaggtgtctcaggcccacggaggatttaatagatgaaaccctggatcgtcgtcgaagccgtggttgttaagaagctttaaatatattgaccggaaaacggggagaaaccagagggtggaagagccgctcgcactgcggtgcgatccctgagggctcggggcagggactggggaccgagcaggagctggcggggtgagctctgcgaagcgggcgtgagaccgagcgcccatgggccggtcactgccgggtgcccgctcaccccccgacgccagcaggagcgcgcgcgcaggccccgcggggccgggagggcggcacgggcggggcccccgtgctctcaccgccccggggtgtggttcccgcggacaggccgggcggggcggcgggtttaaggcgccggccggcccgacacggctcactcgcgcccttgccgctgccaccgcaccccgccatggagcggccgtcgctgcgcgccctgctcctcggcgccgctgggctgctgctcctgctcctgcccctctcctcttcctcctcttcggacacctgcggcccctgcgagccggcctcctgcccgcccctgcccccgctgggctgcctgctgggcgagacccgcgacgcgtgcggctgctgccctatgtgcgcccgcggcgagggcgagccgtgcgggggtggcggcgccggcagggggtactgcgcgccgggcatggagtgcgtgaagagccgcaagaggcggaagggtaaagccggggcagcagccggcggtccgggtgtaagcggcgtgtgcgtgtgcaagagccgctacccggtgtgcggcagcgacggcaccacctacccgagcggctgccagctgcgcgccgccagccagagggccgagagccgcggggagaaggccatcacccaggtcagcaagggcacctgcgagcaaggtgggcacagagcgcttccctctccaaccctgcgccggtcggcccagcgaagggcacatccgacggggcgtccgcggcggcctcgccccgggctgctcactgcgattcccccgggggcattcccaggagccagattgggaggggacaaccagttgcgcagaccgcgtgcactgcccacggagcctgatgtggccgacagccacccccttcatctattatctggccgcgatttacttatggacgaggtaagatgcgtttcggttcg

SEQ ID NO: 674136 - DNA, 1052 bp, Homo sapiens
  misc_feature (578)..(578): n is a, c, g, or t
gcctcttctagcgactggtatgagagcaggtggtaaggcttctagtggttgatggcccttgttgtccgtggagctccagaatcttcttgtcatccttttgtaggtatattggtaggagtactcgaaattctcgggtgcacgttcctctttcagagtgttggatagccagaatacaacgcagagatccctatctcccgaagcccagttcagtagtcttctgctggctgcaataaccatccgtcctggcccaacaaagccggggtctctccagagtgggaaaagatagttgcgttcctgctaatctcaggcagcagcaccgcgtccacatccatttccacacgtgatccgagcggctgccagctgcgcgccgccagccagagggccgagagccgcggggagaaggccatcacccaggtcagcaagggcacctgcgagcaaggtccttccatagtgacgccccccaaggacatctggaatgtcactggtgcccaggtgtacttgagctgtgaggtcatcggaatcccgaaaccctgtcctcatctggaacaaggtaaaaaggggtcactatggagttcagnggacagaactcttgcctggtgaccgggaaaatctggccattcagacccggggtggtccagaaaagcatgaagtaacgggctgggtgctggtatctcctctaagtaaggaggacgctggagagtatgagtgccacgcatccaactcccaagggcaggcttccgcggcagccaaaattacagtggttgatgccctccatgaaataccactggaaaaaaggtgaaggtgctcagttataacctgcgaatccatgagcctctgtagctaaaggtgctctcagacagccgacagctataaccctgctcttgcctgacacacttctcttaacctaacccactaacactttattacagccagctggttttacacagagaaatcaaagataacacatcaagactatctacaaaaatttattatttacagaaaaaagcacatgtagctttaaacaaaacaaataaaattcttatcacaacagt

SEQ ID NO: 674137 - DNA, 435 bp, Homo sapiens
  misc_feature (371)..(371): n is a, c, g, or t
  misc_feature (413)..(413): n is a, c, g, or t
  misc_feature (423)..(423): n is a, c, g, or t
caaaaaattgggtgggcatgatggcactggcctgtagtctgagctcgggaggatcacttgagcccggggggttgaggctacagtgagccgtgattgcaccattgcactccagcccgggcaacagagcaagaccctgtctcaaaaaacaagaaaaatttggttctttttctttttttttgagacataatctcactctgttgcctaggctggagtgtaatggcacgatctcggctcactgcaacctccacctcctgggtttaagtgattctcctgcctcagcctcctgagtagctgggattacaggtacatgccaccatgcccagctaatttttgtatttttagtagagatggggtttcaccatgttggtcangctggtctcgaactcctgacctcgtgatccgcccacctcggnctctcaaagngctgggattaca

SEQ ID NO: 674138 - DNA, 641 bp, Homo sapiens
  misc_feature (74)..(74): n is a, c, g, or t
  misc_feature (283)..(283): n is a, c, g, or t
tattcgaataggagaccttaaacctacaggtgaaattcctaagcaggttaaagtgaaaaaactgaagaatctanagactctggattccaaacctggagtttatacttcatataagccatatttaaatagagatgaagagatcataaaacaattacagaagggtgtacaacagaaacgtccttctgaggctcaaagtgttattcttcgacgctattttttggaactgacacaaagtttcatcattccattagaaagatatgtggcaagcttgatgcctttgcanaaaagtatttccccatggaagagtccacctcaattaagacagtttcttccagaagaatttatgaaaacacttgagaaaacaggacctcagctaacctctagaataaaaggcgattggattggactttaccggcatttcctaaagtctccaaattttgatggctggtttaagacccggaggaaggaaatgacccaaaattggaggcactccatctagaagctctttgtgcacgaggacttacttctctggatacagaaaaacacagaagtagaaacagtagaccttgtcttgaagctgaactaataagctgttgcaggatgatcgagagcacttacatgtgaacgctgcacatatggca

SEQ ID NO: 674139 - DNA, 588 bp, Homo sapiens
  misc_feature (74)..(74): n is a, c, g, or t
  misc_feature (283)..(283): n is a, c, g, or t
tattcgaataggagaccttaaacctacaggtgaaattcctaagcaggttaaagtgaaaaaactgaagaatctanagactctggattccaaacctggagtttatacttcatataagccatatttaaatagagatgaagagatcataaaacaattacagaagggtgtacaacagaaacgtccttctgaggctcaaagtgttattcttcgacgctattttttggaactgacacaaagtttcatcattccattagaaagatatgtggcaagcttgatgcctttgcanaaaagtatttccccatggaagagtccacctcaattaagacagtttcttccagaagaatttatgaaaacacttgagaaaacaggacctcagctaacctctagaataaaaggcgattggattggactttaccggcatttcctaaagtctccaaattttgatggctggtttaagacccggaggaaggaaatgacccaaaattggaggcactccatctagaagctctttgtgaagaggttcgaaaactgtgtgtttgtgtaatgattaacaactgttgaaaataaagataattatgcttagaagttgaa

SEQ ID NO: 674140 - DNA, 926 bp, Homo sapiens
  misc_feature (398)..(398): n is a, c, g, or t
  misc_feature (556)..(556): n is a, c, g, or t
  misc_feature (572)..(572): n is a, c, g, or t
  misc_feature (660)..(660): n is a, c, g, or t
  misc_feature (759)..(759): n is a, c, g, or t
  misc_feature (799)..(799): n is a, c, g, or t
  misc_feature (802)..(802): n is a, c, g, or t
cttcaagatcgtttgagtgaccgagtcggagaccataaacgtctaaggtcgtgggtgacatagagaacggctgtgactacctcccttcctcagatggggagtggtgacaagcccctgttcggatccctggcacctttctaagtcgcatgatgcgttgtcgtatcacccgctgcgatgagcacacgcaaacccaggcctcattctacttcaccagtcgcaagcctctgattcaggctggagcagtcgagctcagggcgggactgacctatgatgcctggccctgcaggacatgtaccatgacctcatccgaacgctggagatcgtggcatagcccgctgctatcgttcattgacattatgaaagacactacatggcatatgtcactaccaagcattgtntttcacagcgtctagcgtgttgctacgaatagaatactaacgatcacttgttgccttgtcacttcctcacgaggcgttgccaaggtagaagttgtgactaagggccgagtatggggttatatgtaaatgaaatgattggatgccacaaggccctaggnactgccctgttgtggnacatgcgagtgtaggagtcgcgcgatccagtaagatgttgctaaggtatttgcaaggagtatcctaagactagtaagaattaggtggnctatttatctggacgtttctatccttccttcgctcctttccctgaatttcacaagaaacggaaatagcaattctacccgctaggcaaggtccctacccntgttaccgcatattatgtcttatcgtctaatagagtgccnganatcgagaaatagctggtccacttgttcttgatgacccccccagaaatccggggaacgtgagtcgttcatgcatgctggccctgagtttgtgagcgcgaaatcctaggctttaacgggaaggcaa

SEQ ID NO: 674141 - DNA, 413 bp, Homo sapiens
  misc_feature (173)..(173): n is a, c, g, or t
  misc_feature (242)..(242): n is a, c, g, or t
  misc_feature (275)..(275): n is a, c, g, or t
  misc_feature (286)..(286): n is a, c, g, or t
  misc_feature (334)..(334): n is a, c, g, or t
  misc_feature (350)..(350): n is a, c, g, or t
  misc_feature (388)..(388): n is a, c, g, or t
accagcctgggccacatagtaagatcctgtttctaccaaaaaaaaaaaaaaaaaaaaaaattagctgggtgtggtggtacatgcctgtggtcccagctactcaggaggctgaaatgggaggatcacttgagcctgggaggtcgaggctgcagtgagtcctaattgagccactncactccagcctgggacaacagaaagagaccatgtttcaaaaaaaataaatacaggttgtagtgggtatnggtatgcataccagggaggcccgacctcgtctnagaggggagtngtcagaaaagattttcttagggatttgatgttttttaatccactttantttaggtattattttntaccttaacccactgccatccctttttaagggattttnttttggcccagtttttaggttccta

SEQ ID NO: 674142 - DNA, 100 bp, Homo sapiens
atcccatgtgttcacccatgcttgctcgcagtttgctccatcaccaaatggttgcttaaccccaaatatctgagcagcaacttgagctgatccttctggc

SEQ ID NO: 674143 - DNA, 223 bp, Homo sapiens
aggtggcgcgtctcagactagcggacctttaggctttcgagctgctcctttatctctgcacacctgtgcccaccagcccggtgtgtgtgtgtgcttgtgtgtgtgtgagcgtgcgtgtgctcagtcaaccagacaggtgtgtgtgtgaacatgtatgtgcatgtgtgtctgagtgcgtcctcagggaggactcagcccaaccagcgaggtctgtttgtgtgcg

SEQ ID NO: 674144 - DNA, 1105 bp, Homo sapiens
  misc_feature (7)..(7): n is a, c, g, or t
  misc_feature (452)..(452): n is a, c, g, or t
  misc_feature (695)..(695): n is a, c, g, or t
  misc_feature (718)..(718): n is a, c, g, or t
tcccccncccaggagaagatacgagaggaaccggaaggagaaggaaaaagagacgaggcgggacgaccaaagagggtatgtggcgtacacagcagggtcacaacctcaaaacagccaggctttaagcccacacagtgggggggctccaccaatggcaaagccagctggcactcccccaggtgcccagggtgttcaatggggcttctcccccgctgcgcggaaaatatgggggaccacaaaatggtggcgccaacaccagaaaggggcaccgccccacggtcctaatgaagaacggtgtgtcaagggtactgcccggccgcccaggtgtccctggtccgcccctgtaggggcgccacacgtagtgtgtggaatggggcacccccccgacggttccccccaagggccccccttcctgcaggccagctgaacggtgtgtttttcctggaatgaangtatcccgctcagccaggcccccggcgttttctgaccccatccccgccgcgttcccctgagagcgtcttacgacgccccacttggcccttgtggccccaagctggcgtggcgttctcctggagcctccaccagagccccgggaggttccccgggagcccagccttcttttgtctttccaaacacaccaacgatggagagaacccctctcgtggtgggacccaccccggttatcttctcagccnccttggattggtggagattttcncagtccagcccctctcaggagggttgacatttcctcacacattggatgaagggacacatgatcccaccatcgccggacacacccaggtcgccccaggcgcgttaatggggatattctttcatcccgtgctcagatccccaccaaatattgaggaggcgtttaatccgagaccctgaagaagatgggcaccagcagacccttgatgataattccaccaccaccattccagggaccctgttttgatgtattataggccggaagatgtttttgctaccctggaaccccttacctagatccagccctccagccctgtccaactccagtttaccaggttaagggccgaagtgtttccagtgggtctccagtaaaggatcctttggggcccag

SEQ ID NO: 674145 - DNA, 366 bp, Homo sapiens
agcttaagataagatactcattggtccaaacacacgcatttagaggttacttcgtgactagcagagcatgaaattgacatgaggccggatgcggtggctcacgcctgtgatcccagcacttcgggaggccaaaatggcaggattgctttagcccacgagtgcaagaccagcctggccaagataataagatccccatctctataacgaaatcagagatcgtccatctaccaaataggaaataagactgtataagtcactctgaatattactgtaggccacctgaggagtcactctcaaatttcatctaatctaagacacttattaattggcacatatcacttattgtatatcttaagactggtcctg

SEQ ID NO: 674146 - DNA, 664 bp, Homo sapiens
  misc_feature (63)..(63): n is a, c, g, or t
  misc_feature (172)..(172): n is a, c, g, or t
acaacatttgagctgatttcaagaatgagcagtgatgacattagaagtaggggagtcatactnatggccagcagagacgaatagtcagcagcatacagactgtacgttacacaatgatgcacatacaggagaagggatttcatgtatgaaagtaccacaagcacctgtgttntgtgcctcagcatttctaaaatgaacgatatcctctctactactctctcttctgattctccaaacatcacttcacaaactgcagtcttctgttcagactataggcacacaccttatgtttatgcttccaaccaggattttaaaatcatgctacataaatccgttctgaataacctgcaactaaaaccctggcccactgcagattattgctacgcaatgcaacagctttaaaacctatctaggcccatgaatggaaaacaaatccaaatccgatccttgaaaagcaaaggctctaaagaagctcttcagaagagacggtaaagaatgaattcttttacttatcacccaaccacatttcttaaaaatgtgttttggtgtcttttcctaccaaatttctgctctacaaggcagtcagttaaatctctcatttcataattttcactgtgatagatccttgctctctcctcttttaataaatttaataaaactttaa

SEQ ID NO: 674147 - DNA, 136 bp, Homo sapiens
gggtgcgagataactcacttctcatggctcatgtgtctccagagtctcagatctgtggggcactgagtgggctctgggcttgggtctaggggctggccaactcatcaccacattcctcttctggctcatcctcctc

SEQ ID NO: 674148 - DNA, 883 bp, Homo sapiens
  misc_feature (37)..(37): n is a, c, g, or t
  misc_feature (110)..(110): n is a, c, g, or t
  misc_feature (122)..(122): n is a, c, g, or t
  misc_feature (124)..(124): n is a, c, g, or t
  misc_feature (135)..(135): n is a, c, g, or t
  misc_feature (137)..(137): n is a, c, g, or t
  misc_feature (142)..(145): n is a, c, g, or t
  misc_feature (147)..(147): n is a, c, g, or t
  misc_feature (157)..(157): n is a, c, g, or t
  misc_feature (164)..(165): n is a, c, g, or t
  misc_feature (190)..(190): n is a, c, g, or t
  misc_feature (204)..(204): n is a, c, g, or t
  misc_feature (212)..(212): n is a, c, g, or t
  misc_feature (224)..(224): n is a, c, g, or t
  misc_feature (241)..(243): n is a, c, g, or t
  misc_feature (261)..(261): n is a, c, g, or t
  misc_feature (267)..(272): n is a, c, g, or t
  misc_feature (282)..(284): n is a, c, g, or t
  misc_feature (292)..(293): n is a, c, g, or t
  misc_feature (300)..(300): n is a, c, g, or t
  misc_feature (302)..(308): n is a, c, g, or t
  misc_feature (333)..(333): n is a, c, g, or t
  misc_feature (336)..(336): n is a, c, g, or t
  misc_feature (339)..(340): n is a, c, g, or t
  misc_feature (347)..(347): n is a, c, g, or t
  misc_feature (353)..(353): n is a, c, g, or t
  misc_feature (356)..(356): n is a, c, g, or t
  misc_feature (359)..(359): n is a, c, g, or t
  misc_feature (361)..(361): n is a, c, g, or t
  misc_feature (379)..(379): n is a, c, g, or t
  misc_feature (388)..(388): n is a, c, g, or t
  misc_feature (398)..(398): n is a, c, g, or t
  misc_feature (404)..(404): n is a, c, g, or t
  misc_feature (417)..(417): n is a, c, g, or t
  misc_feature (422)..(422): n is a, c, g, or t
  misc_feature (445)..(445): n is a, c, g, or t
  misc_feature (551)..(551): n is a, c, g, or t
  misc_feature (590)..(590): n is a, c, g, or t
  misc_feature (763)..(763): n is a, c, g, or t
  misc_feature (853)..(853): n is a, c, g, or t
tttgtacacaggcaaactttactgtggaaactaaganatcaggagctctctccactcccctggccctccagggtggggtgaggagggagtagaccttgggggcagagganaggaggggagtnanagctgtaggangnggggnnnnangttggacggngcgaatnnacgttttctttaaaaaaaaaattanaaaaatctatttanacccgganaaaaaaaaaggnaagaagagacgggctgnnntgtttttatttacaaggnaaaaannnnnngagggggtcnnntttttttnngggtttngnnnnnnngagggggccaagggggtaggaggtnttnatnnccccaanaccctntcnttntnttccctccccaaaaccanttaaaatcntcttaaaaancccacnaaaggggtgaagntggtnagggagggactggaggtgggganagggactcatttacctctgccctctagtctaggggcccagccagggcaggagcttgatgggctatggccccccttcccagcccctcttggggctcccaaatggaantggaagggtgtttggtggggccctcaggaggagttattnagggtaggtgtggcatcggtcgactgccagtctgagctggtcggagtctcagttaaagctttttaggacggggtgagggtggtattgcccgctggggacctcaagtgaggagggatgagaatggcgttgagagacggttggatggagagttcaccagcactgaagttgaaganagggggaagtgggcggttgttaggcagctgggttcccagacatcgcagttcatcaaagaagctgtgcgcacaggcctctagtggggagancttgaggatggggtgtactccagcaggcta

SEQ ID NO: 674149 - DNA, 201 bp, Homo sapiens
ggacttcttaaaactttatttgggctgggtgcggtgtctcatgcctgtaatctcagcactttgggaggtccaggtgggcggacagcttgagcccaggagttcaagaccagcccaaataaagttttaagaaattacttggccaggcctagagagtcctttcgcgaaaaacatagcttttctatgagaagatgatcaatattt

SEQ ID NO: 674150 - DNA, 525 bp, Homo sapiens
actctgaggaccccaactcgacggacggcatacagagatcaacttcttcctggtttagtcttgggagagtgtatgtgtcgaggaatgtatccatttcttctagattttctagtttatttgcgtagaggtgtttgtagtattctctgatggtagtttgtatttctgtgggatcagtggtgatatcccctttatcattttttattgtgtctatttgattcttctctctttttttctttattagtcttgctagcggtctattaattttgttgatcctttcaaaaaaccagctcctggattcattgattttttgaagggttttttgtgtctctatttcctccagttctgctctgattttagttatttcttgccttctgctagcttttgaatgtgttcgttcttgcttttctagttcttttaattgtgatgttagggtgtcaattttggatctttcctgctttctcttgtaggcatttagtgctataaatttccctctacacactgctttgaatgcgtccgtcgaagttg

SEQ ID NO: 674151 - DNA, 919 bp, Homo sapiens
gccaccgtgctgaagaccccacatgggacggccagaaacgcagactttgcccacctgcatgccctcgacccgagacccagacccagaacggcagctatgtgggccagcactcccagggaccatcgagcggccacatacagcggactcctacctgaagcggaagaggatttactaagatggctggcaccagagataactcaaagggccatgacaaccaaaatcagcattctgggagattctccctgactgctaatagatattatgatgctttattattctaaagccaatatatatctcgtcatattcgagataactagacagaaacctctcatgaaaagacgacacttataccatgacccaaaaatcaagcccgaggaagccaccccaagggacgcaccaccaaacggcgcgaatgcatgcggcgagaggaacgacatcctgcgacagagaccacgatcaacctctaaattgacttcatccctcgggcgcccatatggccaatccacacgacaaaacagggcccatggcaacaaacaccaccacaatgcaccaaaggaccacactcctcaccacccaaacgacacggcacgacggcgggccccccaccgggaacccgtggaccgataacaaaaccaccaaaccgcacaatacaccaacaaaaaacactactacacacgacaccacgtaaccagaacgatggccagaacacagcagaaccaactaccacaccaaacaaaagaaaaacccaacgccatggcacaactacaactacggccaatccccagcataaaccacaaaaagagaacacatacaaccgccccaacgaccccacctggcaaagacgaaagaaccaacataacaccccctacctcccgaaaacaagaaacaacaaacgaagggaaccaggcaccaacacatg

SEQ ID NO: 674152 - DNA, 120 bp, Homo sapiens
acactttttttgttgtttaattttttaaattttattttccataagttattggggtacaggtggtatttggttacatgagtaagttctttagtagtgacttctgagattttggtgcttaaa

SEQ ID NO: 674153 - DNA, 169 bp, Homo sapiens
  misc_feature (37)..(38): n is a, c, g, or t
  misc_feature (104)..(104): n is a, c, g, or t
  misc_feature (119)..(119): n is a, c, g, or t
  misc_feature (156)..(156): n is a, c, g, or t
attaatgtaacccatcatatcaacatactaaagaggnnaaaatcatgattgtattaataggtacaggaaaagcatttgacaaaatccaacactcattcaagatnaaagtgctcagtagntcaggtatgcatgtaatcccagcacttttggaggccnaggcaggaggatc

SEQ ID NO: 674154 - DNA, 1748 bp, Homo sapiens
acaaggagagggaaaagaaaccactaaattttgctttgtttccttgaacgaatgtggcaacactagtttttgtgattttattttgtgcagtgtcatgcacaccagcttcttgatacaatgggcagataaccaagctattgcgggccctagtttctttcttcttttctccacaaaggccattcctcttacagagcatagtggtgacaatatttccgctcgtgccaacctctctgtgttcaccgagtagacaattacccacctgtgcgcgcctgtgcatcatactcccatatcttgtctcacgccctctcacacgcagtcgcctctccacccgagagtgggcttactcttctctctaactcatcacaaagttgagagagagactccctgcggcgtctacatctgaaactatcatgcctccacagacgtacaacacccggcggacacacacacgtagaacccaaacacgcacgtggcgcgacgaacccccgtaccacactcgaaactggcctaacacaccgcctcttagacaacacaagcatcgacccttacactcacgagcccccatcgcgctggcactaccttcaccccacggcttccccctgcctcgcaacgtcgtccttagagaccaaaatgtaagttctcaacacaggaagaacaacaatcaacgttagcaacatgaaaacgctgccaacgcgaagattgacactaacaagcacacacaacaagccaccacaacaacacccagaaaacgacaaacacagagaagacataaaacaaacaagaaactagaaacataaaaaaaaggaaaaaaaagatcaaacctaagtagccaacaaacacccagaaagacgggaaaaagcaaccaacgacaggccgcgggctgagcacgtcggaggagaacagagagcacagcacaggcagaatccgaagctaaaagaaagaccgaacgccagcacgacaacaagacgacacgagaccgggccacgggcgcgaagagtgaccaacaaacacaggcgcgccgaagcaacgccacgtcagtatggagcgtgtcggggatccacgggggcgcagtgtgacagccactcgaataggggagtagagagagagaggagcgacgaagataaaaggcgagcgtttggtgcaggacgcagcatatctgccatcgactgaaggaacaaacgaacaggctgcagtggaataggtgacgacaaacgatgaagagcagggtgaactgacatgtgtcaatacagacacatggagtagcagagagaaacggacaggagcaggggcggagagcgcgagggtggagtggtcgatgcggggggacgggggggaggcaagctagcagcagggcgaacataccgcagaagaagaaacgagagacgcaacacggacgggcggggccgaacacgaagataacggagagacagggaagcgtgacaacaagagggggaggacagaggagaagaagcggaaagtgggggaccacagggaagatacaagaacaaaacagagagagtgatggcaggacggagcaaacgcagcggccgcaactcgccgagagaggtgaagaaagggagggcggacggaatcgcacgagaagggagcggatcagcgaccggacgaaagcaaagagtaacaaaccgcgagagaaccggagaagaagaaacagaagaggcagagacagagagagaacgggagcaacagtgagcgagcaaggaatagcgaacagatgaagaacagagcgg

SEQ ID NO: 674155 - DNA, 421 bp, Homo sapiens
ctggagccggtgtttctgctagattatcactgtcgtgcctgcccagttcttccagcccacttcttccttcaccaacatgcaagttctttccttccctgccagcctagatagatggacagatgggaagaggcaggcgcggccttcgttgtcagtagttctttgatgtgaaaggggcagcacagtcatttacacttgatccaacctctttgcatcttacaaagttaaacagtctaaaagaagtaaaataagaaggcaatgcttgtggtatgtacagggcatattggcggtgcacgcctcattacgattcgcctgcttgcttctcctgttcaatcgtttctttggaaggcaggggatttttctcttgcgtctctgtcttcttcagtttcgacttatcgaatttctcgatctcagccatatcggg

SEQ ID NO: 674156 - DNA, 685 bp, Homo sapiens
gcagcctccccgaaggcggggattaaggttgagaccctggccgtggcaaaagaagtttttttttgtttaaatgtaaacccctgctttggggaaagccccatcctttaaaatttattttttcccaggggccaatccaaaatccttccaaaaaggtgttccaaaaagtaaaaacttcccccccctccctgaagttattgagggtggtaagaaaccataacgggtaaggttttttgagtgctaactttatgccaatatttgttctatggaccttatttaaacaattaactcgcttagttctctcaacatctctgtgagttggctactgtcatttatccttatattacaaataggtccagaggggttagtcatcttgtccaggatggtggaaccaggttaaggatcgggcagtttgggctgggcatggtggctcgcatctgtggttcccagcactttggaaggctgagttggcagattgcctaagctcaggagttcgagaccaggcctggcaagcatggtgagacccccgtctataccaaaaatacaaaacattagccaagcgtggtggtgcatgcctgtggtcctaactactcaggtggctgaggtgggagaatcccttgagctcagaggttgcagtgagccaagattatgccactgcactccagcctgggtgacagagtgagaccct

SEQ ID NO: 674157 - DNA, 114 bp, Homo sapiens
tgatctagaggatctccacactgggtcgagttccaaatttgaatctttgagttaaatctgttttttaaaaacaaaactgtctgggcgtgatggctcacgcctgtaatctcagca

SEQ ID NO: 674158 - DNA, 186 bp, Homo sapiens
tgaggttcaccgcgttcacactactaacccaagcttaatagaagccggacgtaagagtgttttagatcaccccctcccctactaaagctataactcaccttagtttgtaataaactccagttacacaaaataaactacgaaagtggctttatacatatcttaatacactatagcttagacccaaac

SEQ ID NO: 674159 - DNA, 902 bp, Homo sapiens
tcttaaaaaccccggtcctgggggggttgggggtttaaacctaactggaaatcgattccattcccgggggaaggcccttgggaaattagcccttattcccctgtgtccttccgaacagggagaatatttgaagtaaataaaaaccggaccggggataaccccgggtctgagaactcacgatcccactgtcacggacttcaaccggtgagaacaaacagaccctctaaataacgcgggttgcgccccatcggggatttgcccggagacccaacatcagagggcctgtaacccctattggcggcgacatgggcctctagaatcaggagatcggcgctgcgtaacccctaagagggtacacttggtcgccggtggggggcccaaactgtctcatgggcgacacacatgggagcgtcactagcgccagtcccgcgttgagacctgggcgagaagtcctccaacgcatcggtccctgggcccgagagtgtacgcggtgtaccttgcgcccccgagaagtgtccgccccaaaaccaagaaaaatctcaaaaatgcgcaggctaccagggaaacgtactaaagagaccctgggaggaatccaaggaccacgagacaccgagtcgcgcctcaaacaacaaacattaagagcgccccaaaaagggcccataccgccgaagctgagcagtggcgtacacagagccaccgccctctactaaaggggcggcaggcacacactccccccgtgcgtacaacacgaccacagacgaccagtctaacccccccctggggaagcccacagcaaaaacggggccccctaaataaagggacccaagcggactaatggccacccgttgcccacggccaaagcgcccgcggcccgcgaaaaacactgtttcacctggcgcggc

SEQ ID NO: 674160 - DNA, 467 bp, Homo sapiens
tatttctccattgtaacagtactttttttcccttttatataaatcagcatataattcttatgctaatacatgaagctgagtaaatatccattttcttcccatagcctgtcacccaatagttttagcattgattatttttgcttgaataaattattcctttggcagttggaaaatggtaattttctaacatttcttccacatttatttgcatttttatataaagaagagcattcgttctctgctcccactgcttcacttgactaaccctaaaaaaatatatatatgtgtgtatatatatatatatatatatatatagagagagagagagagagagagagagagatagagaaacaggcaggcatggtggctgatacctgtaaccctaacactttgggagtccaaggtgcgaagactttgagcccaggagtttgagaccagtttggacaacatagcaagacctcgttcct

SEQ ID NO: 674161 - DNA, 100 bp, Homo sapiens
aagagttgaaattaactcagacaaggaccaaaaatccaagatgaaggattagtaaaaagaaaggtgaggaaacgaaccaagaccaattaagagacaaaag

SEQ ID NO: 674162 - DNA, 521 bp, Homo sapiens
  misc_feature (411)..(411): n is a, c, g, or t
  misc_feature (521)..(521): n is a, c, g, or t
ggtagtgcacccagcaagccagccagccatgtgatgggtgcacttaccctccttggcttggtatcttcatttgtactaggaagtgggtagtagattggccaactctcttcttactggaggctatataaataaaatgtaagacttcagataactttgtaaattaaaaagcagagactaagaatgaagaaaagaagcaacagcaaagaaaaacgagaaaacaaaaaaaaacaaaacccggggtgcgtatctattattggctgggcagcacgaacgaaggtgactatgtacgaactgcatgctaacagactgcagccaaagaggtacgttatcccagagcaccagcatcgattgttcgtcgaaccacgggtgaggtaaaccattgcggcggacgccacccacaagaatagctanggagcaccgctaataatactatattaacatacaacaacagacggagttttcgaacccagcttattaaattattatactactaatgcgttctggaatgcatccgacacaan

SEQ ID NO: 674163 - DNA, 279 bp, Homo sapiens
cttagaatcaaatgtgtctgttatcccttataaatgctgcgaatgtttcagagatggctgatatctaaacaacaagaaaactcaaattatcattttcttatgtgctcataagagaaacgcattactaagaaaaagagagaataaatataactctaaataaaataaataccagccgacttaagtaaattacaatcaatattctgttagaccgcttacacctgctataaattcatgtagctgctagtgagtgttgcacccaatagcgtgagcaccacagta

SEQ ID NO: 674164 - DNA, 107 bp, Homo sapiens
cattctgcggtcgactctagacggactccccctgctggggtatgttgtgttgagctccgcttactgatgctccgcttactgatgctccgttactgatgctccctatg

SEQ ID NO: 674165 - DNA, 337 bp, Homo sapiens
cggcacgaggccatctcaaaagaaaagaaaaaaaaatgtttctagagcttaacctttgggcatctcccgctccctagagggccctgtggaacagggtgggagtttccatgtagagcctgctcgcaccctccagttcccctcttttttctcgaccatgaggttccccattctataagcagcttcctagtctctcctgtaggggacacttagttagaaactggaactagggatgtaaaaggcagggcagccagcctgcagagagaggaggcccggccctgaaactctggggaagccccggacggtggagaaaactgatctgagtctagaactggttcag

SEQ ID NO: 674166 - DNA, 737 bp, Homo sapiens
tcgtgctgtacgagctggcgcagtacgcctcggagccctcggagcaggagctgctgcgcaagatggcctcctcctccggcgagggcaaggagctgtacctgagctgggtggtggaggcccggaggcacatcctgtgccatcctgcaggactgcccgtccctgcgtgcccccaccgatcgaccacctgtgtgagctgctgccgcgcctgctaggcccgcttacgtactccatcgccctcatcctccaaggtctcaccccgaactctgtgcacgatctgtgcaggtggattgtggagtacgagaccaaggccagtgccgcatcaacaagggcgtggaccgaccaactggactgcgggccaatggagcctgtcggggagaacggcggccgtgctggctgtgtgtcccactgttcgtgccgcataggtcccagattccgcctgcccttcaaggccacccacgcctgtcatcatggtgggccccggcaccggggatggcacccttcagtaggcttcatccaggagcgggccatggcgtgctgaccagcagggtcaaggaggtgggggagacagctgctgtactacggctgtccgccgctcggatgaggactacctgtaccgggaggagctgggcgcagttccacaggggacggtgcgctcacccagctcaagtggccttctcccgggagcagtccacaggttctacgtccagcactgtaaagcaagaccgagagcaccgtga

SEQ ID NO: 674167 - DNA, 433 bp, Homo sapiens
gcgatggaacctcactacaggacgtaattaacctcaccttcaaggggtacaataatagagtagaggcagccaagtagcaacatatttctgagttgcaatcctttgcctccactgtgagacaaaccccagccacatctccagcacacaagaactccaaacgcctgaaccgcagctgccaggggttcctccagaacctcctccccgaggagcttgctacaagtgccagaaatctcgccactaggccaaggaatgcctgcagcccaggattcctcctaagccgcgtgtcccatctgtgcaggaccccactgaaaactggactgttcaactcacctggcagccacttccagagcccctagaactctggcccaaggctctctgactgacccttcccagatctcctcggcttagcaggtgaggactgacactgcccgat

SEQ ID NO: 674168 - DNA, 477 bp, Homo sapiens
cacgaggtggaaccccgagaagtaccacgacgagtaccgcgccgagctgatgaactggatccacaagcggatcaaggcgggcgagcttgagcacccgccggagccgccggaggagccgaaggacgagcacgcgccgatcaacttcatggaggcgctcaagaacagcctcgcggcggtcggcaagggggggcacaagcccgccgcgggccgggcggtcacgcccaccccgccacggacggcaaagaccaacaagaagaagccggcccggaaggcgtcgccgcgggcaccgcggaaggccgggtgatctcggcggggcggcggtagactgcccgtgtgatgcacttcctccgcgcacggtcgcccggcttgttggctgtggtgctgaccatcttgggaaccgctgcctgccagccggtgcgaagggacggccctgagcggtcttcggccgcatcggcgctgcaagagggatggtgcgac

SEQ ID NO: 674169 - DNA, 936 bp, Homo sapiens
  misc_feature (732)..(732): n is a, c, g, or t
cggtgattgttcactcgtgtgttggttgccgttatgtagtgactcaagcacgcgatataacccctggtgtgccaggccgcgattgggggccgtccctttgtgcaacacaagtttctctgtgtgccggaaggccgatgtccccttgccgggtcaaacacagacggggttctggaaaacactggttcgtttctcgccccggcgacatcgcgtgttgtgccctcgccccggtttcttatgagcttccccgatggtacacctggcgggttcctctgagaacatgatgtgtggggatcacccccccgaggttgtctccgggtgcgcccccccctgtcgactgataggagccaccccccccttgggtcaacactcaagcgagccccgtgggttcggtcggtttctctacgccccccgccgcgtttgttctctcctggggcggcgagcactctcatctttttgttccccggagggtccccaaggtggtggcctggagcatctgcctgttacacgccgcgcttggaccaaacccaccccactggggaccatctctcaccacaccataagtgagcatttcttcttatacacacgaaagacccccctccggagtatctgcttattggagcccgacgactccccgtctcccgcgggagagtgcttaaccgccgtccccatcccgcacctgtcatattcccgtggcaacaataccaagcacagccggacgctacacccaaatanaaggtggtcctcccccgcgcatcccggaggtcacactatgggcgcccccccaccatcgcgagacgcctcaggggggtactccccgcaaagaaagggcgagtagttttcgccacaccagatgggtgcgacgaagcccgtggctaactacatatgggaaacaccggggcccccccccccctaaaaaaatgtcggcccaacaaaaca

SEQ ID NO: 674170 - DNA, 333 bp, Homo sapiens
tcgacgccaaatatgtaccaaaattttggacctttaaagtaatagttgggactgggcacggtggctcacgcctgtaatcgcagcactttgggaggccaaggcgggtagatcacaaggtcaagagatcgagaccatcctggccaacatggtgaagccccgtctctactaaaaatacaaagattagctgggcgtggtggtgtgcacctgtagtcccagttactcaggagactgaggcaggagaatctcttaaacccgggaggtggaggttgcagtgagccgagatcaccccacttcacctcattgcctgtgcgacagagggagactttccatcta

SEQ ID NO: 674171 - DNA, 127 bp, Homo sapiens
ggcgaggctaggtgtgtgtgtgcggtgggccgaaggctaacttaagaaggagcgcgacagtaggacgggaaggcaaggagaggcatgtgtctggccgagaagagggacgcagctgacggccagtgaa

SEQ ID NO: 674172 - DNA, 471 bp, Homo sapiens
  misc_feature (20)..(20): n is a, c, g, or t
  misc_feature (32)..(32): n is a, c, g, or t
  misc_feature (87)..(87): n is a, c, g, or t
  misc_feature (93)..(93): n is a, c, g, or t
  misc_feature (456)..(456): n is a, c, g, or t
  misc_feature (459)..(459): n is a, c, g, or t
  misc_feature (471)..(471): n is a, c, g, or t
cttccccccttccccccccnccaaaaaaaatnaaagcggggcacgccgggtgccttaccctgtaaacccctagcctaccctaagagnctgacncgagaggtctgcccctgggtaacagagcaagacactgtcctaaaaacaaaaaccttttgttcgattattaaagactgaagaaagggcccaggcgcaatgggtcatgcctgtaacctcagcactttgggaagccgaggcaggaggatcacttgagccccaggagttcaagaccagtccctggcaacacagtgagaccccatctctctacaaacatttaaatattagccatgcatggtggtgcatatctgtaatctcagctacttgggaggctgaggtggaaagatcacttaagcctgggaggtcgaggctgcagtagccatggttgtgtcaccatattctagcctgggcaacagagcaaaaaantanactcaagaaaan

SEQ ID NO: 674173 - DNA, 409 bp, Homo sapiens
  misc_feature (8)..(8): n is a, c, g, or t
  misc_feature (366)..(366): n is a, c, g, or t
  misc_feature (381)..(381): n is a, c, g, or t
gaacgagnctgctactcctgaacatgagcagaaccaaaaaagcaagagaccacaccttacatgagaagtcacctttaatacattagctgtggctgttagtgagttgtggcccaatgagtgtcagtggctcccggtcagtaacagtgaatgggcagtggggaaagaaagaaagcagtttcatctcactacccctcttgaaaatgttctcagaagatcctttctttgtcgaaacaaacaaacaaacaaaaaactagaagattcctactccaaagatgggggaacaagggccccctagagtaaatgtgaactcaccctgaaacttgtaatcagaaaacggacagggccacccttaacttaaattttccngttgggaaaatggantttgggcacaaccccaaggggctttgtt

SEQ ID NO: 674174 - DNA, 655 bp, Homo sapiens
  misc_feature (335)..(335): n is a, c, g, or t
  misc_feature (365)..(365): n is a, c, g, or t
acgatcaggatgcccagcctctcccgccgctgtctcgtgcccaggctgcgctgctggagtctggagcagcactgggagggactgcccttccttgctctcaaaagacacctcctaaagcgtgttcttctttctctgctcctcgtgtgctccctgcttggctcccacgtccagatccctaacctgggattagaagctctgggattcgaagtcctactgggtagccccagcctgcccctctgccactctctcccgatgtggcctctgcagcagcctgacctgctcaccgtccgttccagtctgcacggtgcctttggcataggtgcttccctgccttnccccgcctccaggctcaaacccagttctgncccattccccttgtgaaactcaagtgctacctttgccataaccaaaagagatttatccctcctctaaataatttgcgtttagtataatccatcttcttattcatttatccatttgatccccaaagaaatgtatatttcttaggccctgggtctggctcttaaacccggggagagaaccaaggtgattgatcactggttgtacggtgaaccgaatggctgcaccttggttagataggtatgatcagagagacgcaagcgatctagattcatcaatgggcgtcagctgcctc

SEQ ID NO: 674175 - DNA, 512 bp, Homo sapiens
gataaaacctttcttcccacatgttactggaagtccagctgtaagacaggctctaactacgcatgtgatccaatcactggatcagtaatgtcctcaggggctgggtgctgtgtgctcatgcaggtaatcccagcactttgggaggccgaggcaggtggacttgcttgaggtcaggagttcaaaaccagcctggccaacgtgtatgaaaccctgtcctgtactaaaagagagacttaggccagcgaggtgtgatcatgcctgtaattccagcacctttgggcaggcaaatgcggtcaaatcacttgaggtctgtaattcaagagcagcctggctcaacatggcgacgaccccatctctactaaacaatacaaaatttagccagctgtggtggcacatacctgtaatcccagctacttgagagactgaggcacgagaatcacttgaaccgggagatggagtttgcagtgagccgagatggtgccactgtactccagcctgggtgacatgagcaa

SEQ ID NO: 674176 - DNA, 183 bp, Homo sapiens
taactttgttcaccctgtaaaatctgatctttttacttcttaatctctgctttgtattcattggtatgagcttccatcctcctcagctcttcatatttatccattaggtcttgactcagctgattacacgttgcactcacagattccaaacttatagcttctacagtgacgagacgcagaagg

SEQ ID NO: 674177 - DNA, 533 bp, Homo sapiens
atatctggggtcaggtgtcagagggtcagggtgggaggtcaggggaggggtcaggaataaggaatggggggttagacgggtgaggtcagatctgtggatcaggggtcagggggtcaggcctaggggctgggcatgggtcagggatcagaaggggtcaggctagacctctctcttcctctgtgtcctcaggtggagaagctgggatagggctctcggaaaactgcgggggctgggtctggcccgtcaggatgcaggaaaagggaaaagtcactctcgccctgaagggtgagcgtcgggggggaggtgagaatgtggtatcccttcccaggggggcagatctccttgaacgcaggggtgccatcggtggggcagcgctgacaccgcgcgccccaggccttgccgacactggcagagcagagctggcgggtcaggcgggtggccagggggtgctggactgggtgctcagggctcaccaggcggaaacacatggctcttctcctccggggttggtctgcattgcactgtgtacggca

SEQ ID NO: 674178 - DNA, 547 bp, Homo sapiens
  misc_feature (295)..(295): n is a, c, g, or t
tcgagaggttcttggtgaggtcatcacggaaacacggcaacggataacgttaggcttttggacccctgggaccaggtttttgtttgggttggaaaggattctcaaaaagaagaaaagacaaaagccttgacttctggtaagcggtacattgagacggacccagccaattgggattgggggacgcccatccccgtggtaaagcaagggtttgagcctccctcctttgtggggtggttccttgggtgggaaaaaaaataatggtttgtggaccccttggacagggccatggtttaantggttgccttaggaggggcagggcccccccatgttaccggtgagggcccttttggaattgtccttccctcaaaaaggccttaaagggagcaaagcagctttgctaagagggggggggggggggggggttgttttttttttttttttttacaggatcccaaaaaagccccgcaaaaattcagagtccctgcaaaattgtttaaaatgtcagggtttgggaaattaaatccaataaaaaccttttgaagggtga

SEQ ID NO: 674179 - DNA, 239 bp, Homo sapiens
atatcttttaatctagccatctttctaacatttagctcaatattcaccgcagaaatgcagccagcatctcgcaaacataaatccattctttaaaatactctctttaggaagctgcagacatgccgactgcgtgcttctctgcaccagtctccagtgttagttctacataggctcccttctgtgcttctgtctttgcaaagacctgtttaaactaaaaagaaactttccaaacaacaaaa

SEQ ID NO: 674180 - DNA, 192 bp, Homo sapiens
ccctacgacactgaggaagaactgctggagttgatgaacaacacgccttacggcctgagcgccacgctctggaccaacgatttgagcaaggccctgcgcatggtgccggcgatcaacgcggggacggtgtgggtgaatatgcacacgatgctcgacccggcggtgcgtttggcggcaacaagtcttcgggtc

SEQ ID NO: 674181 - DNA, 270 bp, Homo sapiens
gaacagtcaggaccgggttgaccacgaggagtggaaatggtgcctaggcattcatcttggggggatgttggtgtgggtgcagtcttaaggctccagtgttaaacctaaaccagggaatggacaatggaggaggcactttggtggaggcaagaggtcagccaaggtccatgggaaaatggaaagggtagcagttatgcctccaggtttcagcaaggttagtttcagggtccaggtccattattccacaagcacttatgtccaattcattca

SEQ ID NO: 674182 - DNA, 197 bp, Homo sapiens
gggtgcttgaggatccaaagtgatagagtagacactcacaggacaatacaccaagggagaaggaagggaagaaataaagaaatcaggacctggaggagagctttgtgcctgttgctgcaccccctaggtcatccaagagagctgcagaagtactccaggtgattcttgagagcccccagaggaacttggcaggtggt

SEQ ID NO: 674183 - DNA, 902 bp, Homo sapiens
gctctctctctctctctctctctctctctctctctcgagcgctaacactgaacgctcctgcccctcctaaagctgaagccagagcgagagttaaaggccaagaaggcagtgtagaagtgtgtaccagcagacacaaaaagaagaagatccgcgatgtcacccaccttccccggcggggcgaagactagtgagactccgggagacagcccataatatccctcgggaagcagctgctccccagagagaacaacacatgcttgcactactcattgctcatcatccaagttctcgcggtgcaacagtagttgtcgtgccatgaaaaatgatagaagacaacaacacacgtgttgtacatgtgtggtgattgttgagcacgccaacgaagccaccatattaaaacggggtgatagaaaacatctgtcgatcacattatgagtgtgcgccagaggaacaaacacctcatgatcttcggcgatcatgataggagagacagaaggggctatatggtgcgaagtggcctcctgaataacgactgctgtggtagtgtttcgccaacaaatatttgggcatcatctaaatgtgatggtccagctgtcataatttcgtgaatatatttatatatatatctttctatcacgcaattaaagaagcagaaatactagttcaaatatactgtggaagacatataagcacgggggtgacagcacaacagcagagcaaaagcaagagggaccctagtgacacatgagcttgtacgggacccgcagatttttgcgacccaaggggggaaacaggcgggaggcccccatatagggagccgaaaaatagagaaaagccaggtaactcgattagaacaagagcacagcaaggtaagcgacagcaaacacgacgcaagaggcgaa

SEQ ID NO: 674184 - DNA, 124 bp, Homo sapiens
gtcgtgtgacatcatgggtgtgccttgtgtgcggttctgtacagacggatgactgtgtcctttcacttgggtacaccttagattttgaccaaggtggataaaggttcacctaatgcttacttgg

SEQ ID NO: 674185 - DNA, 616 bp, Homo sapiens
cctgagcggagagctttggggggtaagcagccccatagttcccgcgattatcctctcgaggtgcgtacctccttatggttcctatacatctccgaggatcgtgtggggtgtagtttttcgatttcgccgctcgctgcgcccgttttttgttgggtcttctctaagaggtgcgctgcttgctccccggagagacacctcaccacaccacccacctgcgaccgactcccctgttgggtccggtgaccctctcgcctccgccccaccacgttgggccccgccctccgagcggacgcccccctggcgcgcaaccgattgattttttgccgcccgccccctcggtccctctccgtgggtgcgacgcctgccggcgtgggcgccttttcccactccaggtttctttgtgccccccaccccccgcgcaggcgctcttctcttgtcgactcccccgggcgcacacacactagagggcaccacgcgacaacgctgtggtcgttgagagcacctctttctggccccccccccccccccccccgtttttttttttgttttccccgggccccgccaaggggcccgcccccttttttttttttccggggaaaaaaagcccccggaagga

SEQ ID NO: 674186 - DNA, 1744 bp, Homo sapiens
  misc_feature (1)..(1): n is a, c, g, or t
  misc_feature (1170)..(1170): n is a, c, g, or t
  misc_feature (1492)..(1492): n is a, c, g, or t
ntctcgctggttgataggtgtgggtggttgcttcgcaccgcgttgtgtgggggtggttgttgtctcctggtggtgtgcctcttgttttgtgttgctcgtttgtcggggcgtgtgtgtcctcgggtgggggtttggtagcggcggcgtcccctcgtcgtggtggggcccctccctggtgggggtcttcttcgtgtggggatgaccgactacctgcttgtgctctttgtggctggcggctagagcttggtgggtccgacacctcggtggtgttgggatccagctatgtgggttccgcacagacgagatcgtcctctttggggccttggtcctttttgtggtgcctgggggctcacgtagtctccaccgcccgcccttctgtgggtgggcacaccaatgggtgggcaccacccaaggaggtcttagtagaggtgcccccaaaggggattgatagtatgtccctcttcctgggggtatttctctgtgctccccctatggagcccgtgtgtttttcgccgttgttttctttggtgccctgaccccaagtgtttgggactgactcgccccttgccggcgccatcccttgtgggcactgctgtggtcatatgatctttttctgggggaccccttccacggtgggcccccctgcttcgcgaggggccccccccgggtgcccagggggtatgtttcttcgcgggcgcttacgtggtcattgggggttacaccctcacgcgccccaccccgggttggggcacccccgcgccggtgccgatggttgccctacgggcacacggcagtctctcgagggggcgttggagccctattgtcgtctctttcccccccgtggcccccgctctggggcgcacgccccccccgcggtttgcgtctagtagggtgccgcgcccggaggggtttctggcagcgcttttccgcacggtggtgcgcccccaggccccccatcatctggcactaagggggccgcccctgcgcgcctggcacccctcgcggcgcgctgtggccacacaggcggggggtgtgcccccgaggcgcgctctctctgtgcgggagagggagtcgggcccccccatttccccttgacgacagactcccacttctctctcccgcggtgtactctctccgccctcctcgcgggtgtgcccttttcgttgcacnccgcgtgtgctcgctacggttggtggccacgccggcgaacgacttgcgaccatcgtcgacagcagagagcgcgtccactttctccacctcgtctctccccgccgcgctgttttcgcgtagggagcacaccccccctcgttcacgcccccaccgcgtgacacgagaaggtcacacccccgcgcacgtatcgcgccgcgcgcctcgccgcgcgctctcctgcggggtgtgcttcgcagcgcgctccccggcagcgccccttgtggatggtgccacccccagggtgtctcaacacggcggtcccagggtcaccgcctctcgatangggaggtctcccctcgcgtgccacgtacctcgtgagccctctcgtcccacatcgggtcctgtacgcgtctgcccacaccttcgggtactccccgccccccggtggccctcggaccctctccggtgtcgcctcacggcggcaacgcgctcgtcgcgtcgctcccattacccggtcgatcccaacaccgtgtgtgtcccccagcctccgggtaacccgccgtgatagtgttctcgtctatcgcccagcccagtg

SEQ ID NO: 674187 - DNA, 386 bp, Homo sapiens
  misc_feature (4)..(4): n is a, c, g, or t
gaancattgcttctagttgccatgacattgggacagatctactacctgaagagattttttgaagtccggaggttgtttaaaaggccttttcctgttgatcccaaattcatgatttacttgtttaccaaacaccttggtcataataatgtcattagtttatacatttttattttctgaacgttcatgacttatgtttctttgtgattagtaggtgttggggaaaacctgtttaagagagttagagtgaaaatttgacatttgattggcctataattcttacttgaaaggagccccattatataggcccttccaagaatccagaggctgttaatgctgtatgggactatggtctttattatgtttttacctttggttttcataataaa

SEQ ID NO: 674188 - DNA, 555 bp, Homo sapiens
ggctgacctagagttacccccatgctgtcttcagcgatggtgtgtcaacaggttcactaatatttgtcatgctgtagcatttgtaagattgtaaatgatgaaattcaaagaaaactttttctattgctaggagcctgccagaacaaaggccaatatataatgttgtgacatcatatctgataaccagaggtctggtatctacactcctggtgccccatcagtggttgtctccataagtcattttgcgttatgaaaaaaaaaaaaagaaatcctgatgtggacattatagcacactgctttctccacagagatgctgatatcaaaaacttgaagatacagtgaagttctgaataatgttacaaaacgtggtacctgtatcagagacccatttatgcaaaattgttaaaaaaaaaaaaaccccaaaaacaaaacccgggacgagacaccaattgaccctccggccccaataaggcctctccgggggttcttcagaggaagcgtcctctacgggatattggattggaagggcgatggccagagtacttacaataaaca

SEQ ID NO: 674189 - DNA, 304 bp, Homo sapiens
ttttatacctgtatacgcgcttctcttattccatatagtatctcaattcatccaaaaccgtatccaggccatcaccaatcattctatacaacaaatgtttcttcttacatccccacaatatcaccctttaccacaagacctcccttcagcttaatctctcccactctaggttcccacgccgcccctaatcctgcttgaagcagacctaagaaacattgcccattctctctccataccaaccccacaaaaattctcgacgccccaacacttcaacactatttagttatgtcttattactctaaga

SEQ ID NO: 674190 - DNA, 740 bp, Homo sapiens
tgggggtggaacactacattctttttagagtctgattttatggattggaatattgggatatctttctttcctttatttatttgaaataattagtgtagtgattacaaaacagtcataaatttttaaaggccttttttctctctttttttttttttagaatagtatttttttttaaagctcctttatgtaacattccagataagtgttgatacgggtcctcttgtgaagccacccgtgttaaacctttttagaagatttgacagtgtgggtcttggactctataagtgcttgttggacagtcgcgagcgtaaatgctgtcggtgtgtctgtgtgggacaaacacaatctggtaatctacagcaaagtactttctacattccgttcagggggcacacccaggggaataagaataaaaggctattatgactaagtggtaaaccctatgcactatcccttgcatttggggcaactttttaaaaaaaaagaacacggatttttaattaataataatcctgtagtgacaatgtgttcggtaatttggtgctccacattacactttggttggtacaggtggggtgggggagaatggcgggtttacaccatttcagatcgcggtgggtctaacgagtattacggtttcaaattacgcacaacgaacatgattttaaaatctggtatgtacatctgtttaaaaggcccccattttttacgacaaaactctggtgccaattgaaagaaac

SEQ ID NO: 674191 - DNA, 1435 bp, Homo sapiens
gtgcttcctgaggtgaagctgtagaaacgattgctatctagcaatgccgaattctctgaatctagcgtgtcctgtactagttggactctcattagtctaagggcagtaaacaggtagagatgtgctgttggctgaaacaggtatatggcaaaagatagggcttccattccaagtaacattatcgtgtctaactctttggcggattatctgcgtagtgtctactgtgcttgggaagcataggcgtgattacgtgtgtggttgtgaggtcgacaagtgggatgtcaccgtcttaggaatagatccatagcgccgcatcgcctggcgactttcgcataagcaaggcagtatgacactagcgtatgagaacacagagatcatcgtaagaatgtgacatgacactagaggaatagtggtcggcgttccttgggctaccatgggcgtcctggcctagcgtaacacgtcagttttggttgagctctccagggtcccacgtaatgtgcttaaggctccgtcggtgggagttcccatgactaagaaacatacggagaggcataagggttcacgtttagggatcacgatgaggatgacggttggctagggcacacgttgggatgacaaatggggctcttagggtggcttccaatggcctgcgaaggggaagtcgaacttgcattgggaaattaccacagatgcccgtaccgacgagctcgtttggcgatagccatcgcgatagtccgccaaattgccgagagaggaaccttaggtgcggcaagccggagaaaggcgtcttacggagggcaaaaaagcgtagggtggcaatcaggaggagtagacactacaaggtgcgacagacaagggcccgttggtccaatgactagggagaaaagtgaaccccggtaagacggtaacgtaaggaacgaggcaaagggaacgtcccggaacgtttgaagcaacaacaagggagtgggggtatgccaagggggggcactcccgagtggaaggatgcccagaatgagcgacaacaagacggagttgggacaaatacggccaagcgccgttagtctgatacacacagagcaaacacggatggcagggacacgtgacacaggagcgaggggttaccaccgaagagcggcacagaacgggcacaggcacaaagaggcacagttagttgggcgcactaaggggacgttccgatgtggacgaaaaagaggccgccacagtgtgggaagagccaggaaatcaccgagacgagcggtaacagagaacctgggacgcattgggcagccatgggagcgaccagagctcgagaaaggtcggacccccaatattcgggagacagggacacgaaaggacacgcacggtgaagcatccgcggcgaaaggcgcccaagcatattgaaactgcagcacgcacatatgggcgaaaagcgacg

SEQ ID NO: 674192 - DNA, 365 bp, Homo sapiens
gcgagctgcggtactctaagatccgatcagtgcattgtgcagatgcaagttcccttactcatgatatctaacgtaattctttccgggcttggtgatggttgtctccttgtgcttcaactggcttgtttatactaattggagagccttgccaagctggtgcaaagtaacccagtatacgtgtgtcctcctcatttgattgtgggcatacaccatgtcttactcatctttaaattcctagcactgattacaggactgggcacctaaaagatgtgtgctgaaaagcatactgaatttcataacgaactcttatccatatcctagtacatattgactgatgccacccttttcccacaatggcagtggat

SEQ ID NO: 674193 - DNA, 232 bp, Homo sapiens
catgctcgctggtcgtctctacaggtatccccgcgtttcgcctgtttcccaagctggtctcaaactcttaggctcgagtgcaactgcccgcctcaggcctcccgatagtgcttgggattacagtgctgagccattgtcattcccttatgcgattctatcactcagctagtatcccaccttgggggcctgcaggtttctctcgaccatgggctccctgctttgctagagttcc

SEQ ID NO: 674194 - DNA, 593 bp, Homo sapiens
atacaggaaatcagctatgccaggaaatagctctgaacaggaatcgcgtataaccatgaaacagctatcactaggaaacatcgatgacctggcacctgttctacctgtcatcgggatgatccatgaaacagatcatcctcgtgctcatcataatctaagtacgagaaatacattagttattaatttatctttatttgagacagggtctcactctgacgcccagtctggagcgcagtggcgcaagctcagattactgaaaactctgcctcccggcttcaagcaattctcatgcctcagcctcccaggtagctgggattacaggcattcgccaccacacccagcaaattttcgtattgttagtagagacagggtttctccatataggtcaggctggtcttgaactcctgacctcaggtgattcacctgcatcggcctccatagtgctgtgattacaggcatgagtcaccgagcccggtgcatttttgagtattttgaatgaagacaggatttcaccatgtaggccaggctggtcttgaattcctgacctcaaatgatctgcctgcctccgcttcccaaagtgctgggattacaga

SEQ ID NO: 674195 - DNA, 323 bp, Homo sapiens
aagcctaaggaaatggggtaaatcacaggacaatctatcttcccaacaaacaaacgttgctatgtcggtaagtgtttgtcctagagggacaaacacgctgaaatttacattagcagtgctgtgcaagattcttacctaattcaagacctaaacacagcctgcagtgaaggtaacagtcctctgtacaggtgctttagaacagaagccataagctgatgagcctgacagggaaaaggaggcagtgaagacaggtgacaggcacctggccagggaagaaggattcaaggaatgccagactccttgaaatcgcctgtggttaagag

SEQ ID NO: 674196 - DNA, 169 bp, Homo sapiens
gctgctgcagccggacctatttggccatacatcgggctctcacgaagcactgggtgtagttcagcccaaatgcatcccaccttgtcccctcagcagacaagacctgggctgcttgtgtcgtgagcgattttcagcggtatgttacggctccgtctccactcctgacgaa

SEQ ID NO: 674197 - DNA, 1285 bp, Homo sapiens
agcgtgagagcgcggcgcgacctggacgctgcgtggcggggaggaggatggagactgtggcgtccgctgcaacgtgttggggctgcggcgtgagaatgtgtggctggtgtagtgcacctgcgctctggggaatgtgcttggctgtgctggctgtgcctgagccatggctgggatgacccccttctctggtgctccctgaagtctcgtgggagcctgtgacccatgggatcgttgagcagccgggtgctgctgccagccaacgaccatgcccttgacccagaccaggctgcatgtggatgccagtggctgtgggggctcgtgccctggatgtgcctgtgacatctggatgactgattgcggcggtgccactgggattcttgttacatgtgctgggcagcacacaatgctgcaagctggaggccacgctgcggtcctatcttgcgtaacatagtcaccacttgatctcagagaatcactgggacgacggactcgacgtgacgcgacgcgcgggaccgaagccaggccacgcctggctccttcaagcaccaccatccgcaaacgggagctgacacatttacacccggacggctacacttcttacacactacttattctctcactccacgcacccagtttacttctctgctcgacacttgcgtcgacaacacccacgttgcagccacttccgaccgactctttggttgacctcgtacgggccagcacacgcaacctgcgcacgcctttacacacccaaaacgatacttctttctacagtcgctccagaattcctggaccataaccatttagtactcacgggataacctggttacccacggctgggatattccttctggtgcacacacgcacattcccagtccacgttgcacagttaactttacgttcggaaacccttggcgacgcgattttcccggtggaagccaagggaagaaccaatattggactggattaagccacacagccacaccttgcacacagggcatgtgggcacagttattcggggacaaccaacgatgtataaattccggagaggaaatctggcagttggttctcgttttggatctatacaagtggcccccacgagctcagaaagctattggacaggcccacactcgatagaggcaccacatagcagagcacccagtggacttatgtggcgttagcgcagtggtgctggtgaaccggagggcttctaaagtgtacacgtaggcgcgaagctcagtgtggaagtgacagaagccagatgatgcagaagcagcggagacaa

SEQ ID NO: 674198 - DNA, 177 bp, Homo sapiens
tttctttcgcccagggctggcactggccattgtcacggaggaggagacggaggctgtctattggatgctccctcctactgccactgagggccctgagcaccaaatcctgtgcttatggctcttgctggagggtcctgggtgcatgagggtcctccgcctaggcctcacctattggca

SEQ ID NO: 674199 - DNA, 303 bp, Homo sapiens
tatcaagtagcttaaaaaataaaataagctgggtgtggtggctcatgcctgtgatcacaccgctttggaaggctgaggcaagaggatcacttcaccccaggagtctgtttgagacgatcctgggcaacatagtgagactctgtctctacaaaaaataaattagccaggtatgagggtgtgtacttttaggtcccagctactctgagatggaaggatcgcttgaccccaggaggtcaaggctgcagtgatccttgatcgtgccactgcactccagcctggatcacagagcaattccctctctca

SEQ ID NO: 674200 - DNA, 228 bp, Homo sapiens
ggaccggacatgcctgtatctcaacgatattgattctttgggctgtagtcagtattggattatgatcaatattatcaccattagtagctccacaatggtctgtcggttctttggctggtcaatatttcccaacatgtcttctacaagagagagttactcatctcgtacatggtcatatctgatagagttggttgctgtggcaaatgcttccgttgagatcaggcatgt

SEQ ID NO: 674201 - DNA, 375 bp, Homo sapiens
gcacgccctagggaaccttcctcctcagatacataacattctggtatttgtagttcttgcctgttagctctacctcctagggaacattcctcctcagatacataacattctggtattcgtagttcttgcctgtttgctctaccccctagggaacattcctcctcatatacataacattctggtatttgtagttcttgcctgtttgctctacctcctagggaacattcctcctcagatacataacattctggtatttgtagttcttggccgtttaattctaccttcctagggaactttcctcctcacatccttaccatcctggtattggtagtccttgcctgttaactctacctccaggggaacattcctcctcaa

SEQ ID NO: 674202 - DNA, 821 bp, Homo sapiens
tgatagcgcccggcgctgcatttcctggcgacacctcgtagtcatgcctgtggcttgcgcacccttgatagaacagaccaggggcctatcgatagagaccggtgcaggcctaggggtagtctacctgtctggacagagcaagagcacaaaatgcagagacactggctcagtaagtgccttagacaatacggtttcggctttggctacagcaaacaactggatatgcttcatggagggatcataggctatgtaaaagctaggcagcgtgccgatctcctggctgccaggcggctagcctctataggacaagatctagccggcctggagtgcttacccagcatgtctacaggatccaaggaaccgtcagggttagaccatagtctacgatcttggtaacattggctggagataatgggaatgaggattctaccactctggaaaaattcatgcctgcaggtttaattgacaaggtgacagtaggctgatgggtcgaccaaagtcggagtaagatatgtttacaaacaggacccccaattacgcacgcacgtcatggtacccaagcgttaagacctgcatgaacgaacttcaaacaatctggcatcctctccaactaattttccactcatattcaagaagcaccataaagctgcacgccctagagcgccagtcctgaaccatcggaaaccatacaacaacagccgcaccccaccacgtgggcccgacgacggtgggaagcagccctgctcatgacttcacaagccctaaccagaagggcggcgcataatctccacaccacgacgactccacacagaaccggcatc

SEQ ID NO: 674203 - DNA, 109 bp, Homo sapiens
cgaggaacagcacttgcctgccttttgattcaaagcaacttcagaaagatcccgtgtgtccatttccacatactggttatttgaacatttcctaaatgacttcctcatc

SEQ ID NO: 674204 - DNA, 397 bp, Homo sapiens
ttaagagttcgaggtcggtaccggcatgtgctgtaggccagcgttgtgtgtaaagaggctgacagtgatgagtgtatgatttgatatcgtgattttgtattctaacatgttatagtttagttgttcataatagttgtatatatttatggggtacaaaatgatgttatgattcatgaatataaagtggagcaattaaatcaagctagttaacatatctatcaccttatacttattttttgtggtgagaccacttgaaatttactcacagcgatttttttctgttttgcttttgagacagtctagctctgtcacccaggctggagtgcagtggcacaatctcggctcactgcaacctccacctcccgagttcaagcagttcgctggcctacagcacatg

SEQ ID NO: 674205 - DNA, 520 bp, Homo sapiens
cctcgcttagtgctccctgggatgtcagctccttgagtgtttatgggagacagtgctgagtcctccactctacctgtgacccaggctccctctgccctcaggtttcaccctcaacagccaggtgcagcagaccattgccctgcggtatgcgtgcagcaagcttggcatcaactttgacagcttcgtggcttgtatgatccgcctggagaccctcttcaaactattcagccttctggacgaagacaaggatggcatggttcagctctctctggccgagtggctgtgctgcgtgttggtctgacccggggtttcggacatcagtgacactccctgccccactgcttgcttcttgtcaccccttctctacaattttgtgaacatttatgctccagtggcattcactggttgttcatacctttcttgccctgggtctatttcagcagcactgagctatgagctatgtaagccgacccggtgggcccagtggagggaaagcaatcaattaaagttgtgagccaga

SEQ ID NO: 674206 - DNA, 464 bp, Homo sapiens
  misc_feature (94)..(94): n is a, c, g, or t
ggtgactcatagaggatccctggcgatgtcgcgtgcatgtgaggcaggagagcatcaatggtgaaagcacaccagcccctgagaagccaagacncaatcttgtccctttcctttgcagtggctgtgctgcgtgttggtctgacccggggtttcggacatcagtgacactccctgccccactgcttgcttcttgtcaccccttctctacaattttgtgaacatttatgctccagtggcattcactggttgttcatacctttcttgccctgggtctatttcagcagcactgagctatgagctatgtaagccgacccggtgggcccagtggagggaaagcaatcaattaaagttgtgagccagaatggtttccacctttctctcgtgatatgctatctgggctgtatcctgggctttttatgctttgggaaagaagatgttctcgggacatggcacgcgaatcgcca

SEQ ID NO: 674207 - DNA, 883 bp, Homo sapiens
cggggcccggctctcttgtcgcaagcgcgactgttcggttcttctgttcggatgctctggggtggtaaccactttccctggctggtcggcggcgatcaccgtgagcgtaccggacaggggtcggcaagagatcgctgtccgatcgcgcagcgaggtggtctcgatgggacttataccgttggtatcgcggtcgtccgttgtgttatcggtgagcgtcctgcgagtctctgggcaggccaagcctaggggcgccagagcgcctgcgcgcgtacggcgggccggcaaggggctagaggcggctccctgggtgacaaccgcgcgccccaacgtttccccacgtggccgcgaagaccggctcatggagcatctatcgggctgcacgccaacatctaagcacaggcgaagatggtctccaagcgcattgcccaggagacctttgatgcagcgtgtgcgcgagaacatcgagggacgtagcgatggggccagaggaggcagtgacaagaggccgtggagcagttagaagtcgcaagggggttgatctgagcaacgattgtaaatgacggctacctaaagtctctgcagacggatcccaggagcccacatatgacatcctgcagatgctcagttgagctccagggagtctgtggccagctctcgaccccaggagggtgtcaggatacctcaacccggcgtctgcgcaccaggtgcaaaacagagacaaaggcctgccgcattcatcgcggccccagaagggggcctacgccattcatcttcactggcatggaagcttgtgcacttgcaggtgaccagtgaccttctgctccagtcctcaatgcctggtcggtgctgactgcatggacagacacgacctcctggatgcccg

SEQ ID NO: 674208 - DNA, 681 bp, Homo sapiens
ggtgttcaggcgcttcgtggaggttggccgggtggcctatgtctcctttggacctctagtgccggaaaattggtcgcgattgtagatgttattgatcacgcacatcagggctttggtcgatggaccttgctctccacgtgaggagcactggccatgcctttcaagctgccatgcagctcacgtgattctcatccttccaagtttcctgcactagtgcccactcagaagtatgtcctgatcgaagcctggcgagataggcaggacgatcaatacaaaatgggcagtccacacgtatgggccaaggaaagattcgaaggcctacgcagagaaggagcaaagcccactgattgacatgattttgatgcgtgtctaaacgttattgagaggcaaatgcaaacatgagtgacacaggaataatcaacgcacatgatacgtcaagaagcttcaaataggcagctctcctgcaaatgcttctcccaaaaaatgcacctggtacctaatgggtactgctgctgctgctgctgctgcgtgctgctgcttgcttgcttgctaatggttccatgcaaaaaagtatcaccgccgcgagtaagaaaggctccagcccagaaggttcctgcccagtaaagccacgaggccatgaaagcagcgcctgctccaaaagctcagtaacggtctaaaagc

SEQ ID NO: 674209 - DNA, 344 bp, Homo sapiens
ccagcccacatctgatctaacgcagaacatgaaagaaggattcagacttcacagccttctggactaacaaggatggcatggttcagctctctctggccgagtggctgtgctgcgtgttggtctgacccggggtttcggacatcagtgacactccctgccccactgcttgcttcttgtcaccccttctctacaattttgtgaacatttatgctccagtggcattcactggttgttcatacctttcttgccctgggtctatttcagcagcactgagctatgagctatgtaagccgacccggtgggcccagtggagggaaagcaatcaattaaagttgtgagccaga

SEQ ID NO: 674210 - DNA, 1022 bp, Homo sapiens
  misc_feature (81)..(81): n is a, c, g, or t
  misc_feature (84)..(86): n is a, c, g, or t
  misc_feature (364)..(364): n is a, c, g, or t
caagctcacaagagaaagaaatctgtaaggcatgtagaatttggactcaatcatgttggtctttaatgtgcctagagcaanggnnngggcactttgggggcggtggaattcaagacgctctggctgaagattcagaagtatctggtaactctcttttccttctgggcatcctctcctctgttctaatcctcccttacactcattcctggtccattgtattctgaccacatccttaatcatggtcaaaactattgagtcctgggcacattggtcatgaaggaacaagaaggcaatgagagactctcatgccaaccactgccctgaaagccctgctgttcagacagcaaaggggccagcactggcnaagctcttatgcttgctctgaaaccttcttgggaggagtcaatagggtctccttttgaaagtgtccctggccttttgagaaagcagtgtggtggagggagatggttctggcaggggccgtgaatggttgttttctacttgggatttctttcctgctttaggagatctattgggaaactgattataaccactcgggcaccatcgatgcccacgagatgaggacagccctcaggaaggcaggtttcaccctcaacagccaggtgcagcagaccattgccctgcggtatgcgtgcagcaagcttggcatcaactttgacagcttcgtggcttgtatgatccgcctggagaccctcttcaaactattcagccttctggacgaagacaaggatggcatggttcagctctctctggccgagtggctgtgctgcgtgttggtctgacccggggtttcggacatcagtgacactccctgccccactgcttgcttcttgtcaccccttctctacaattttgtgaacatttatgctccagtggcattcactggttgttcatacctttcttgccctgggtctatttcagcagcactgagctatgagctatgtaagccgacccggtgggcccagtggagggaaagcaatcaattaaagttgtgagccaga

SEQ ID NO: 674211 - DNA, 642 bp, Homo sapiens
  misc_feature (81)..(81): n is a, c, g, or t
  misc_feature (84)..(86): n is a, c, g, or t
caagctcacaagagaaagaaatctgtaaggcatgtagaatttggactcaatcatgttggtctttaatgtgcctagagcaanggnnngggcactttgggggcggtggaattcaagacgctctggctgaagattcagaagtatctggagatctattgggaaactgattataaccactcgggcaccatcgatgcccacgagatgaggacagccctcaggaaggcaggtttcaccctcaacagccaggtgcagcagaccattgccctgcggtatgcgtgcagcaagcttggcatcaactttgacagcttcgtggcttgtatgatccgcctggagaccctcttcaaactattcagccttctggacgaagacaaggatggcatggttcagctctctctggccgagtggctgtgctgcgtgttggtctgacccggggtttcggacatcagtgacactccctgccccactgcttgcttcttgtcaccccttctctacaattttgtgaacatttatgctccagtggcattcactggttgttcatacctttcttgccctgggtctatttcagcagcactgagctatgagctatgtaagccgacccggtgggcccagtggagggaaagcaatcaattaaagttgtgagccaga

SEQ ID NO: 674212 - DNA, 1125 bp, Homo sapiens
  misc_feature (81)..(81): n is a, c, g, or t
  misc_feature (84)..(86): n is a, c, g, or t
  misc_feature (364)..(364): n is a, c, g, or t
caagctcacaagagaaagaaatctgtaaggcatgtagaatttggactcaatcatgttggtctttaatgtgcctagagcaanggnnngggcactttgggggcggtggaattcaagacgctctggctgaagattcagaagtatctggtaactctcttttccttctgggcatcctctcctctgttctaatcctcccttacactcattcctggtccattgtattctgaccacatccttaatcatggtcaaaactattgagtcctgggcacattggtcatgaaggaacaagaaggcaatgagagactctcatgccaaccactgccctgaaagccctgctgttcagacagcaaaggggccagcactggcnaagctcttatgcttgctctgaaaccttcttgggaggagtcaatagggtctccttttgaaagtgtccctggccttttgagaaagcagtgtggtggagggagatggttctggcaggggccgtgaatggttgttttctacttgggatttctttcctgctttaggagatctattgggaaactgattataaccactcgggcaccatcgatgcccacgagatgaggacagccctcaggaaggcaggtttcaccctcaacagccaggtgcagcagaccattgccctgcggtatgcgtgcagcaagcttggcatcaactttgacagcttcgtggcttgtatgatccgcctggagaccctcttcaaactattcagccttctggacgaagacaaggatggcatggttcagctctctctggccgagtggctgtgctgcgtgttggtctgacccggggtttcggacatcagtgacactccctgccccactgcttgcttcttgtcaccccttctctacaattttgtgaacatttatgctccagtggcattcactggttgttcatacctttcttgccctgggtctatttcagcagcactgagctatgagctatgtaagccgacccggtgggcccagtggagggaaagcaatcaattaaagttgtgagccagaatggtttccacctttctctcgtgatatgctatctgggctgtatcctgggctttttatgctttgggaaagaagatgttctcgggacatggcacgcgaatcgcca

SEQ ID NO: 674213 - DNA, 1376 bp, Homo sapiens
  misc_feature (81)..(81): n is a, c, g, or t
  misc_feature (84)..(86): n is a, c, g, or t
  misc_feature (364)..(364): n is a, c, g, or t
  misc_feature (878)..(878): n is a, c, g, or t
caagctcacaagagaaagaaatctgtaaggcatgtagaatttggactcaatcatgttggtctttaatgtgcctagagcaanggnnngggcactttgggggcggtggaattcaagacgctctggctgaagattcagaagtatctggtaactctcttttccttctgggcatcctctcctctgttctaatcctcccttacactcattcctggtccattgtattctgaccacatccttaatcatggtcaaaactattgagtcctgggcacattggtcatgaaggaacaagaaggcaatgagagactctcatgccaaccactgccctgaaagccctgctgttcagacagcaaaggggccagcactggcnaagctcttatgcttgctctgaaaccttcttgggaggagtcaatagggtctccttttgaaagtgtccctggccttttgagaaagcagtgtggtggagggagatggttctggcaggggccgtgaatggttgttttctacttgggatttctttcctgctttaggagatctattgggaaactgattataaccactcgggcaccatcgatgcccacgagatgaggacagccctcaggaaggcaggtttcaccctcaacagccaggtgcagcagaccattgccctgcggtatgcgtgcagcaagcttggcatcaactttgacagcttcgtggcttgtatgatccgcctggagaccctcttcaaactattcagccttctggacgaagacaaggatggcatggttcagctctctctggccgagcggctgcgctgcatgtagccctgacccggggcttcagatatcattttttttccctgccccactgacggctacctggcacccccactttttttttttggnacatacatgctccagcgacatacactggttgccagaccctcccccgcctgcaaccccgccccccgccctgagcccagaggtatgcacacccgacccgccaggcccaaaagacgcccagccgcaaccaccgacgcgagcccaagaacaccctatccgctcttttgtaacaataccacagaatcgtatcccccacaccgcttagacgacgcgcactcccctccccaccacaccccacgcgtcccttcttcgagaccccttgacccacccccctacgccccaccccacagcgctactaccccccaccccccccgccccccctatccacagtatcaccttcgccaccctccccacccaacacgacaagcgcacacagccgcacgcacacgccaaaacacccaccccgccgccgctcagatagagagaacaccagaggcccccacataataatagcgttccaccgcgcgcgtttacaacataaattactataataacaagata

SEQ ID NO: 674214 - DNA, 923 bp, Homo sapiens
cctgacccaatacgcaaaataaccccctaataaaattaattaacactcattcatcgactccccaccccatccaacatctccgcatgatgaaacttcgcgctcactccttggccgcctgcctgatcctccaaatcaccacaggactattccttagccaatggcacctactcaccaagaaaggcctcaagccgccagttttcatcaaatcagcccaaaatcactcggaggcacgtgaaataatggatggaattcaatccgcatacctgtttcgacagcccaatgggagccatccaagtatacctttaatcatgaccatcttccatacaacattcggggcgagaggccacaaatactaacgggatcaatatactctacagtccagaagcccttgaaaacaattcgagaattaatccctctcttgagttgcaaccgtattagcacacaaggcctatcaataagcgcatagtgttcacatccacgtgagagccaacatcattcattacctgacggggggacaccaggaaactttaacagaacatttaacatatcgacgccagtccacaatagcaatatggagactagacccatatgtgtccactgaaagtctgaacggaaggcatactacaaggcagaaacaagacccaccactacagcagagatgacctataagcatagcactgcagaacttgaccccttcaatcattgaacgccctaaggcagacagttccaacttccatattttgtcacgaaaagggaattaaacaaccccttggaaatcgctcgcgaatcggataaaatgcacctgacacccttacgtagcaagacaagaaggccacggaaaacgtagcgatactctgctcgtaaggaatgtaacaatctagcgaactcatgtgaccgaaagtgtccaagccaacttaacacca

SEQ ID NO: 674215 - DNA, 545 bp, Homo sapiens
  misc_feature (16)..(16): n is a, c, g, or t
  misc_feature (38)..(38): n is a, c, g, or t
aaaatacatatttatnttgtaacaagatttatgatttntaaaaatgtgtcgacctatacagccatcagaaataacaatatgcgatatttcatcttatctggtctttgggtaaaattaaaaggcaaataagaacggcatccaaagcaagggcatgactgtgtatgcagggcacggtgacaaggccactgcctacaatggtagtgttttaacaatctgaaatcattcagatttaacaggggaaaaccttcagaatgaaacacaggctccaggttcctgagatttcctaatagagaagctgcaaagagaaatgcgggttcattactcagccaccgtgctgcactcagctatcctgcacatagcaattagagtggaactcagggcaccatgtgcactgcatacaaagccagccaccctctgagaggaaccaaaatgcacaagaccccacagcatagaaagcagccagctattaagaaaagtttttccaattggtacattctcggcaaacccttgcccacaatttcctcaggaagcctctgtggctatca

SEQ ID NO: 674216 - DNA, 125 bp, Homo sapiens
  misc_feature (25)..(25): n is a, c, g, or t
ccaggctttcatgccgccagtttgnttcattgtactgacaacctcagctggcatcatggaccatgaagaagcaagacgaaaacacacaggaagtaaaaccttttatttttggcatgataagctct

SEQ ID NO: 674217 - DNA, 488 bp, Homo sapiens
ggtggcgacgggggtctcatgggtatctagtttcagttttggggaggaacctccatactggttttccataatgggctatactaatttatatccccaccaataataaacaggggttcccatttctctacttccttgccgacacttgattttctggttttttggataacagttattctgacagatgtgaggtgacatctcataggggtttggatttacattttcctgataagtgatgtggaacatctggttcatataccagtgggccacctggtatgtcttcttgggaaaaatgtctatgcagatccttggctcatttttaaatcaagttattcattggctggctaatggagttggcattccatatatatttaagatatggaccatttttcagatgtatagttggcaaatattctcccccattccatgggcggtctcttcactcggcggatggtttccttggtggtacagaaggtttaagttaattaaac

SEQ ID NO: 674218 - DNA, 1558 bp, Homo sapiens
gctctgtcgtgacgttggtgtgacctattgtgcgtttgctggtttgcatactatcttgatggtagcaatcgtcactgtctgtgtcgaacgtctctgttctgtcgtgcgattgtagttgtacgtccttttcttggtttattactttacgtcgttcgtgctgttgtgtaacttgtgtatttgagtcggtttctattgctgtcgtctcgttgcttgtgtcatgggttgttctctttcttgtcttcgtcatgtaccctctgtttgtggtccccctacgttctctgggtgtggcatgtgtggtcttgctgtcaatttgtgggtatcctcctccctcgtgggttttacctcgttgtttctttctatgtgtatatcgttcgtgtaagccattgattggatctcttcatgtggtttttatcgacattatgtgaaatcttgtccgatcccagggatgccaggttgcccgttttggaccgatataatgtggcctaagatttattgcaggtgaatgttgttgcccgtgtactcacctggctcgagtggtcttgtttttgttccgcctatataattcaaggtgggtattaagttgggggggcccaagtgtggtatgatgcatatggcaatcgggcacaccaaaggatggcctggcccaagtttggcaactatgtgtgcatagaagttacttcaatgtgattggtggctcgaaaccttatgttaggcaatatggctgccatggcatggctcttttttgtcattcagtgatgttccatgggcaaccctttgggtgatcccttgccgttggccgaattgtccctttgtagggtctctatcctgtaagtgttgcccaattaatggtatatccctcgtattgcacgggcttcgattctcacgtgtcgttgtaacgtaatgggatgtctatataccagtgtctttcagatggggtcttttcgcgttgacaatcttctcatagacacactatgactatgtcgcgtatgacaggtgcacgcatctgttgtagtttggtatgtggtgagtggaacagttcatcacttggtagagccaagcttcgctgccaatgaatgctcctggtcaccggctgactaataggtcccatggaggaggctccataacacggtggccattaggagtgacgattggttgctagcaccagaataggctggaaccagggccttcacccagtgttctcccctggtacctatgctggaaatgttgcgcagccctgtaagtgctccctgcattttgcatatctggggtgagcaaggagagacatgtcattgacgaactaccatgataccaccgagaggattgggatctggagctcacgacaaggaatcccctaacccttgtggagagcttcgtggatgtggaggacattgggttcccatggtgcaataaggttctagactttaaaatttgacataagagtggagaatagggcgtgtgtggctacagcctgtggtcccagcactttgggaggcaaaggcgggcggatcacgagatcaggagtgtaaaaccccgcggtccaatatggaagctgtttctt

SEQ ID NO: 674219 - DNA, 449 bp, Homo sapiens
agcgctgagcattacgccggccgttggtggctggcaggacacgtggaataacaagacgctgaatctggggtgcttgggtccgtaggtttcttaccttcttaatttaagggctttcttacaacatacgggcggacatcatcttctttagaagagatggaaaagttggcggattctggctagctctttgggggcccaggcggcgaggcacggtagtatcagtcagtccaggaatatccttctctcctttttttacaataaccaagtggagaacgctcagattggcttccacggtggcaaccacgaacggatttcctctttctttctccagtcctcctgggtctgtaccaggaatgccccttactcagtagcaggcggacacggccatgggtcaagacacccggcttcatggggaaacctggtttggtatggctcagcgctgggtaccgagc

SEQ ID NO: 674220 - DNA, 477 bp, Homo sapiens
  misc_feature (460)..(460): n is a, c, g, or t
aattattggtgatttttcataatcgatgtggtctactaagaaagataacaatttgtgctaaaatgcccatgtttacctgtattgaccaaagctttcagttgttcttcattctgtgctcaggattgaaatgctgcgtagacgttgtgttgttagtgctgggcacggattctgggacggtgagctgttgatttcctaacagaaagatattttgatctattttcctatggaattgtttctattattatcttttaatttctttttttatttaatagtaatagctcctttctccttcctctgatttttatatgctgctaaatatattttaaatatactgtgtttgcacacactggtagctatgtgtttgcacacattggtagactgttatcatttgtggtgggaaccatgtaaataagtagactgtaaagagagactatcttgcattatgactgtatgaatttcnaagtgctgtttgattgg

SEQ ID NO: 674221 - DNA, 154 bp, Homo sapiens
tcggcccttgttatgggcccgaaatttcccatgctatttacctctcacacaggcacagcctccctcatcatcagcatcccccaccagagtggtatgtttgttacagttgatgagccgacattgacacatcatcacctaaagtccatacgtttac

SEQ ID NO: 674222 - DNA, 788 bp, Homo sapiens
  misc_feature (405)..(405): n is a, c, g, or t
  misc_feature (432)..(432): n is a, c, g, or t
  misc_feature (434)..(434): n is a, c, g, or t
  misc_feature (444)..(444): n is a, c, g, or t
  misc_feature (538)..(538): n is a, c, g, or t
  misc_feature (581)..(581): n is a, c, g, or t
  misc_feature (589)..(589): n is a, c, g, or t
aaatcactttgattttagcgctagtgatgaggaacagtaaacgtagatgttgccatccatgtcctgccgacaaatgcatcatagcaaaagtttttctggtcatacacaaatcaaaagctgggacatgaagccattagcagaagtgtagaagggacctcaaattcagctggaaaagttgcccccattcaacttgcaatttagtagtactggaaacatttgtcacccctgagcagaaagatcattctccactgtggcagaggtggaggggaccatccttgtgttttgtttggagaagacagaatatcttcccccaaattgggcagtgattcttttgtaaatttagtctctttcaaagtaggttgaggagcctgctcgtttaattactggatggtgcaattaaaaagnaatctgctaaagagatctaaaatggtntntatcaagttntctttcttagtgtcttcatcctgagcaatgagcaatgtttgaagtcctcaataggccactgccctggaccctttcattgtttcaattggttgancctaagtgtaccagctctctgggtctgggcagccacttttttnttcttttngagacagagtctcgccctgggcaacagagtgaaggcttcatatcaaacaaaaaaagataaaaataagacatataaattttatttctcaacataagcttcatcaagttcgagacacttttgtaagtaatgataacaaacatttagtccatcctcaaagaactgagggtcctaagaagttaaccatgtaaatgcaggacat

SEQ ID NO: 674223 - DNA, 521 bp, Homo sapiens
  misc_feature (13)..(14): n is a, c, g, or t
  misc_feature (17)..(17): n is a, c, g, or t
  misc_feature (446)..(446): n is a, c, g, or t
  misc_feature (514)..(514): n is a, c, g, or t
  misc_feature (521)..(521): n is a, c, g, or t
ttttgagacgganngcntctgtcgcccaggctgcagtgcagtggtgtgatctcagctcactgtcacctctgcctcccgggttcaagagattctcatgtttcagcctcctgagtagctgggactacaggcatctgccaccatgcccagctaatttttgtatttttagtagacatggggtttcatcatgttggccaggctggtctcgaactcctggcctcaagtgatccacccacctcggcctcccaaagtgctggaattacaagtgtgaggcccctgtgccggctggttttgtgcctttaactaatctctctggcactagagctttgaaggctggaggcagtggagcatgcagagacctgggaagggcgcccggcgtgggcaccacctgtgccaaggccctgaagggttgcacgtgggggtgctgggaaggccaaggtgcttcgaanccaaggggtggggcaaggcaagcgtcaagagccctgggggttcgtgttcccagcgtaaggcctgaganaagattn

SEQ ID NO: 674224 - DNA, 939 bp, Homo sapiens
gcttagaatcattgcttggactgagtccagacaattcccttatgatgaccctagcttacgagtaaagtccatgaaagacttattatacagatcagtaggaaaatgtaaacatgttaggttcgttactcaaatgtgtcagccagactttgagaatacttcagtgcagaaggttccggagccttatcattgagagcgtagtgatgtgatgcaacagatgaccgtaatcgtcgtaggaacaggatgtgtgtgtgacgctgtttcatggagaacagcggtgcaagggccagactggtgctggtgaacggcacgttgttcattggggacggtgtgagcggttcctggtatcagggcgtgggagggctatccttctccgtgggagtctcatcgtgcctagtgtcatgcttgtgtgcccgtcattggggcctctcctgacagtgccctttgtagcggctgaaatgcctgtccctggctagagaccctcgtggcgatatgagctttgaccaagctctgctccggcagttagcagagcctaagactaggatctggggttgggagtcgagttctggatagggttagtcaccagggctggaattgataggccagttattcaaaatttagtgatccatttattttgctactcgagtatgagaatgtagttgggaccaccgaaatgagggcatcattgggaagagtaaagggactgggtagcttgtgcccgggattgtacgaagaagcaggaagtagaagaggccaagagaggagatagccggaagaaaccggtggcctacacccagatggcggtaatttgtaattccccctaatcagagaaggcccccagaaagaatgggaggggagaactactacaactcgaacacgaagagaaaagagaagggagaagacccgcagaacgggaaattggcccgggctaacgggcaacaa

SEQ ID NO: 674225 - DNA, 906 bp, Homo sapiens
cggacgcgtgtgacccaggtttggtagtcacttgactgtgtttatgccatttacagtgaaatagaacttggacagatagaaaataaagattaggtacatatgactggcaacctgaataagagttgggatgcttcgggtatatcacccgcctgtgaggttattgtgactctcctaagtatatatagttgtacacgatactatagtgtaaacaggaatctgcgaaacccatttaggttatctcttgaggtaagctctgatttagcatgtaatcctgataaaatctattacatcatgggatactatataaagcagacttaattctagtgcgtgttagtcattcaatagatctcgaatgttgactcgaatgtctataaaattgtgaggtccggcctttgttcaacattccagtgttcactgcctctggccattgcctttaacaaggcaccgggttacttcatcagctccttacacactaaaagtgctgtttattgtgcatcaagctacacaaataggcccgctgcgtaacgtgagtgctagatactctactagacttactcccccatcgctggatacggaaccctcaagaaggtacaggcgctgacgtgtccgataatactgccctcccttcatccctagtgagagtctgctacccctataagcacaggaattcctataccaggaaacaaagagcctgctcgataccaacccgtaaagtagggacaaccatgcaccacggctacgtggcataactaacctttacacctgccctgctccggccactgcccccgttgccgcccaataaaccccctgacacatactggccacgagtcttcccttcttccgcacaccaattcggctagcggctggctaaccttccccgcctcccctgctcaaacaacaccctcc

SEQ ID NO: 674226 - DNA, 140 bp, Homo sapiens
tgtgctttgggacgggcgtacgtgcttgataatcaccaggtattctatttcttttggaagaggtccaatcttccggccggaagataggacctctccggaagattgtgactccccggaagattggacctccccgggaagat

SEQ ID NO: 674227 - DNA, 240 bp, Homo sapiens
gagacgtgtcaacatttttggtgaagacttgaaagacttcttaagagaaatatgaagggcactgtatcctgaaaagccatacaaaggatcggggtttagatgtatacacataggggagaaagtggaccagtgattgaccagcatccaaggagagtggtttggcacatagatgatgtgcgtggcattctcacacaggactctgagtgtttggatcgacccatttgaggtctctcaccacat

SEQ ID NO: 674228 - DNA, 138 bp, Homo sapiens
  misc_feature (1)..(1): n is a, c, g, or t
nggtggtgatctagaggatcccaatgacatcaagatttggcacaatctggtcagagtctagctgtcctatctttcataaacaataaaaatgcagcatcttaaggttgccatggagtggcagccatggagtaaatggca

SEQ ID NO: 674229 - DNA, 880 bp, Homo sapiens
  misc_feature (24)..(24): n is a, c, g, or t
  misc_feature (63)..(63): n is a, c, g, or t
  misc_feature (76)..(76): n is a, c, g, or t
  misc_feature (78)..(78): n is a, c, g, or t
  misc_feature (87)..(87): n is a, c, g, or t
  misc_feature (218)..(218): n is a, c, g, or t
  misc_feature (230)..(230): n is a, c, g, or t
  misc_feature (242)..(242): n is a, c, g, or t
  misc_feature (252)..(252): n is a, c, g, or t
  misc_feature (258)..(258): n is a, c, g, or t
  misc_feature (264)..(264): n is a, c, g, or t
  misc_feature (267)..(267): n is a, c, g, or t
  misc_feature (270)..(270): n is a, c, g, or t
  misc_feature (278)..(279): n is a, c, g, or t
  misc_feature (433)..(433): n is a, c, g, or t
  misc_feature (462)..(462): n is a, c, g, or t
  misc_feature (481)..(481): n is a, c, g, or t
  misc_feature (490)..(490): n is a, c, g, or t
  misc_feature (495)..(495): n is a, c, g, or t
  misc_feature (500)..(501): n is a, c, g, or t
  misc_feature (504)..(504): n is a, c, g, or t
  misc_feature (506)..(506): n is a, c, g, or t
  misc_feature (537)..(538): n is a, c, g, or t
  misc_feature (552)..(552): n is a, c, g, or t
  misc_feature (569)..(569): n is a, c, g, or t
  misc_feature (592)..(592): n is a, c, g, or t
  misc_feature (607)..(607): n is a, c, g, or t
  misc_feature (625)..(625): n is a, c, g, or t
  misc_feature (679)..(679): n is a, c, g, or t
  misc_feature (687)..(687): n is a, c, g, or t
  misc_feature (689)..(691): n is a, c, g, or t
  misc_feature (712)..(712): n is a, c, g, or t
  misc_feature (734)..(734): n is a, c, g, or t
  misc_feature (794)..(794): n is a, c, g, or t
  misc_feature (796)..(796): n is a, c, g, or t
  misc_feature (811)..(811): n is a, c, g, or t
  misc_feature (853)..(853): n is a, c, g, or t
acataacacacgctcttaggccantttaggtgatgggcaagtcagaaaagtcatgatggatanaactgatatcaanantccaaagcnaaagaagaaacagacgatggactccactggagatcagacctctcggtccttgtcctgctcactcaccatcataagctagtgacaaatgatacgcactctatgcaacctacgatgatggtaatttgcaagtnatcagactgcanaaaatcagctgntcgactgatncaaaanatggangcnacnactgagcnntgtacagactattttcaaatatgcttgcggaggctaggttgaaacgtaatgtcattcccgagacacagactacccgttacggcaaacttatgacattttaagagatgaactaaaagatcgtatttgaaagatgtccttcaagaacacaaaaaantgaaaatatagtagcagtgcagaaagcanaaagcattgtacaggtctngtataaatnaatcngcaannganancagaagtggagacctctactcaaactgttannagacatatatgggnggccaatagaaccaganaactgggagcaaaatatggtgcntcttggacagctganaaagctattgcacaactnaattctaaatatgggaaaaaagtccttattaatttgtttgttggcactgatganaaaaaaanannnaatcatgtaattcatattgancaacctcgacttggcctccctntctagagattactatgaatgcactggaatctataaagaggcttgtacagcatatgtggantntatgatttctgtggncagattgattcgtcaggagaaagattgccatcgatgaaaacngcttgctttggaatgataaagtatgga

SEQ ID NO: 674230 - DNA, 202 bp, Homo sapiens
  misc_feature (89)..(89): n is a, c, g, or t
  misc_feature (123)..(123): n is a, c, g, or t
  misc_feature (189)..(189): n is a, c, g, or t
  misc_feature (199)..(199): n is a, c, g, or t
actcagaagtgcctagctgccactccatttatatgaggcaagacggcttcctggctcatcccagcagaacagaaggctgtatgtttganaagggccccaggcagttttatgatgacacctgtnttgtcccagaaaacttcgatggagacataaaaacaagagcccggactgtatcgggaaggacccacntaccaaaggngag

SEQ ID NO: 674231 - DNA, 138 bp, Homo sapiens
agcagtcgttcgatgagcagaggtggtgaggctgatggggttactgattacagaacaggctcgtctagagggatatgaagcatcgcacaggtccttagagcttcatgcgggggctcgtagctgttctggcgagcagtt

SEQ ID NO: 674232 - DNA, 934 bp, Homo sapiens
  misc_feature (142)..(142): n is a, c, g, or t
  misc_feature (171)..(171): n is a, c, g, or t
  misc_feature (186)..(186): n is a, c, g, or t
  misc_feature (202)..(202): n is a, c, g, or t
  misc_feature (207)..(207): n is a, c, g, or t
  misc_feature (209)..(209): n is a, c, g, or t
  misc_feature (218)..(218): n is a, c, g, or t
  misc_feature (263)..(263): n is a, c, g, or t
  misc_feature (275)..(275): n is a, c, g, or t
  misc_feature (311)..(311): n is a, c, g, or t
  misc_feature (343)..(344): n is a, c, g, or t
  misc_feature (390)..(390): n is a, c, g, or t
tttacacacgcttgtgtttgcaacactaggtctggatgggaggtgaggggtgtgcgtatggctgccatgccagtgtctgtgcacatccctgtctgttggtctccatggccactgtggaccgggacccttgggggaagcctgnccatgtcgggctgtgggaggctgatcagngcgtgtgagagtggnttcccttctgcctgantcccnantccctgacntgccccttccttgtttttcctcctactggtctccaccaaggcttngttagcccccancctgcctggtgtgcagctaacccctcccatccccanagccagaggaggccacagacccctcaggggannttccgcgctggtgtctgggctgtgctccctcactaaagggaagganaggaagctgggcgtccatccgggccccccaacacacagtcccatttagaccactgaacagcggtctccttccccataagccagcacatgctgcctccctgagagacccgggcaaggaggcatgcctggatggaggcccgagacaatggcgcctgtgctgaggatttgtgctgtgatatggggcaactcattccaggtcttagggcccttcaccccccttggtctcctaagttggggaccactatcgacgatcccacaaagacaccacagagggccttgcgccactcagggtgccacacataacaacccataaggggaaatggacacagacctgaggcatatccacactaaaaaggttaggacccttaagaggttcgaaggcgacataaaggcaaaccggcgaaagatccctcagggcaacttggacacaccccaaggtgcgacaaatcgcgaggaacccatccatacgccccgcaagtggccgatactcgcccatgaccataagatgaaaccaagcgtggaacggggaatcccactcacatccc

SEQ ID NO: 674233 - DNA, 150 bp, Homo sapiens
gtgttgcccaggctggtcttgaactcacagagtcaagtgatcctcccgcctcagcctcgcaaagtgttgggattacagatatgagccaccatgctgggcctgaaacatagtatcctgcaaatttgtttgttacagcaacacttgtcattg

SEQ ID NO: 674234 - DNA, 614 bp, Homo sapiens
ggtgcatctgaccccaaaaggttaagcttccatcagagtggtgaagtggccagtgtgtggcgtgagtcccagcagtggacagcacacgaagtggagaatctggttgggatggctccggggagagaaaagtggttgtggtggacaggagcagggtgccctgagcgacggctccgtctaggggttagagggcctctcccttctagcaatctgaaatacagtaggggtgtcttgcgtgttgacgacgctgcagagggacgaagtgatgagtcgagtgggacacgcatcgaaggggtcgccagtggtgggacccggagcgcccttactcgagccaccatcgtacaaaagttgcttggtccgcgggcgcgctcacgccggtcggcgactttgctacgtaggacaaacagagaacacagaacgcacacagagaacgaacaagcgcagaaggacaatacagccagaagagcacagagggcgagcgcaagcggccgcgagagacgagcccggaccaacagcgcacaggagaggaggaagcaccgaacggcaagagaagcacaccgaacaggacaaccaaaggcgaccacgcgaacgacacaacgagaggaagctgacgagaa

SEQ ID NO: 674235 - DNA, 395 bp, Homo sapiens
atgtgaggtagtcatactttcattattctgcaggtacatgtgcaggggctcagcctctgggcgcagtaactcagctactatttgtggctttcttcatggcttgttttgtgggctgcgacgcccatctttatcaccagaattaggaattcatggtagttatctgcaccatcagtgttgacatccaactctttgaagcacatgtctgcaccgtttttcctgatataggaggacactcggtctctagcaatttcttcaggtcatccgttgtagacggcatggatattcccctttatcagggagtatttgtggcatccgtggatgatagagctaaaggctttatccagatcggtcaaagcacgctcccgggcatgccccatcaggtattcggtcgacgc

SEQ ID NO: 674236 - DNA, 499 bp, Homo sapiens
ggagtccccggtctgcggaatttgcccataaacaaaagccccgcactggtgaggtgcggggcttttgcgtttaatgagggctcaatgcgcctgcgccaggatctgggcaagcccaagcttgtcccggcagaccttgacgagatcccgccggaccgttgcgcccgctgcgttgacgatcagcgtcttggacttgtccttattgatccgcgcagtgacgaacggcgcgaacagctcgccgtcccgtcgccaatccagacgcgcaatggcggcggcgaacttgttgacgtcggccggtcctttgcggagcttgaacgccatgtcatggtagaggatgccgatgacctgccagcccggcgatgacagatgcatgttgcttctgtcatcccatagtggaccgaaggcagcggcgagcgcatccaaaaactcggcgatgttggaacgaatttccggtgcccgctgcaccgtcagattcggacgctcgatcgtagcgttgcggccg

SEQ ID NO: 674237 - DNA, 147 bp, Homo sapiens
gcagagcttaaattatattgaactatttcatcagaatcatcttattgtgaaggttcctccctatcatgacccacatatatctctgcctgtgatcagtgggatatatgtggtgacaatgctggaggtctctggtgtccaccttccctt

SEQ ID NO: 674238 - DNA, 143 bp, Homo sapiens
  misc_feature (9)..(9): n is a, c, g, or t
  misc_feature (11)..(11): n is a, c, g, or t
  misc_feature (62)..(63): n is a, c, g, or t
agtaacggnanggcgatcatctccaataatgtacatcctagccaccaacggggtgatccacnncattgatgagctactcatcccagactcagccaagacactatttgaattggctgcggagtctgatgtgtccacagcctgca

SEQ ID NO: 674239 - DNA, 392 bp, Homo sapiens
  misc_feature (1)..(1): n is a, c, g, or t
  misc_feature (185)..(185): n is a, c, g, or t
  misc_feature (291)..(291): n is a, c, g, or t
  misc_feature (359)..(359): n is a, c, g, or t
  misc_feature (368)..(368): n is a, c, g, or t
  misc_feature (389)..(389): n is a, c, g, or t
natcacttcacccgtcgttacgtcgaccggctccgcttcaacacattgcaccgcaagaaccccgacttcaaatgcagcttatccgccagcgccttcgcccacttcgacccccgaaacgccttgaacaaccccttcgccgcagccgtcatgttcatgatcggcggcccgccaccagcaccggccgncctgccgaaatcggaacgattcaccgaactgggcatcgacggataagtccgatccgtatgcgcgctgttatgcggaggcggctccatcccgatcgaccagcaactnaacgcctccagcgccatgttacgacatcggatcattgttgggcgagcactgtctttgctggcccatgnaacgatttncccgttcgtttcgaaggtttnaaa

SEQ ID NO: 674240 - DNA, 1267 bp, Homo sapiens
gggttgcatattagaagccactatggatgtgccggatctctatgggggtatattaaaatggcccgcaattagggcacccccccgctttgtttgacgctatattccataaccaacggtgggctgctccgacaaatgatccggtcgttaccacaactcacggtgaatactggtgcgggatatgacgccgcttttcttacataattcttcccggggggtatcatcgggtcaccaacacaaagtgggggaaataatatgtgccacaaaactttttgcttgggtaataaacagtgtactacagatgccccgccgcgcgtgctcgttgttccaccggaaagcgcaatggtgactttccccccgaagttagtttctgtgaacatgtcttttttatggcgtctgacacgaggggggatttccgcccgggtcgcccgcgtatgttaagatatatatatggaggcaggcatattgtgtaacagaacatgggcgcgtgccaaattgtcaatgggggggatttgaatgggcttttcttgggagtgttcgccctctctcaacccagaaagtacaggtaagggtgtctctaggtccccgagcccccactaggtttatcgtgtaaagtatctggggggacaatagcccgggggagaccaaagagtttccccgaagccgttcttttggataaggagttttttccgccacaatctgcgcacttgtttctcacaggatcatagggcggccccggcccacacatggggttctctccacactggctatagccccctctgctgtgccgcttctacgccagagggttgtccccgcgtttctctctgagacctagcgcagcccatacgtgtatggcccaccagcgcacccaggttccccggcgctgatttcagccccttccacgccttttccccttgggacgtctctcttttttaagccaaggtgcccctgcacaggccgggtttttccccccagggctgcgccccctttccaagaggcccctggagcaatccccaggactgggccacacgggtttctccatagacagcctgggggcaacgtttgcacgcttattctccgcagccgttcctgtaatggggtggcctggcccccttccttcttgcgtttataggatgcccctttattgatgcccctgagtcctccatccccgggacccccccgggctccgggccagcccccagggaggttgtggacgggctgtaattgataagaattgattattgggaatttaattggggacagacttcca

SEQ ID NO: 674241 - DNA, 600 bp, Homo sapiens
gccgggcgtggtggctcacgcctgtaatcccagcactttgggaggcagaggcaggcggatcagttgaggtcaggagttcgagacaagcctggctaacacagtaaaaccccgtctgtactgaaaatacaaaaaattagctgggtgtggtggcaggtgcctgtagtcccagctacttgggaggctgaggcaggagaatggtgtgaacccaggaggcggagcttgcagtgagccaagatcgcgccactgcactccagcctgggtggcagagcgagactccatctcaaaaaaaaaaaaaaaaaaaaaaaaaaaaaaaaaaaaaaaggataaaaaaaaaaaaaaaaaaaaaaaaaaaaaaaaaaaaaaaaaaaaaaaaacaaaaaaaaaaaaaaaaaaaaaaaaaaaaaaaaaaaaaaacataaaaaaaaaaaaaaaaaaaaaaaaaaaacaaaattgtggtccttttggcaatattccctatttgggaagggcttctataataatctggcttctttttaaaaaaactctgtctgggaaaacctttgtgtttcctccttttatagtgtggtaaataaaattctttttgcaaatttttttatcggc

SEQ ID NO: 674242 - DNA, 412 bp, Homo sapiens
cctacaggatccccagcaagaatggcattagagtttacttaaaaaacatcatggtactgagtcagagctttggctaggaatgatttggaaaagaactgaaggcattattccacaggacattcacacgttgtgtgctagcagacagagaggagcaggaaagtgttttataagcatttgcggtgtaccatgcaaggcccggcttcatcgtattcctgtttgctgatccacatctgctgcaatgtggaccgagaggccaggatggagccaccgatccagactgagtatttgcgctccggaggggcaattatcttgatcttcattgtgctgggtgctagggccgttatttccttctgcattctgtcggcaatgccaggtttcattgtgatgcccctctgatatgccattcttgctg

SEQ ID NO: 674243 - DNA, 287 bp, Homo sapiens
  misc_feature (151)..(151): n is a, c, g, or t
ggggggggggggttccccccccccggttttttccttgggtttttggcccccccaagaaagaaaacggccccccccccgggccccccctgccccccccccccaagggggggcctgggggggcccccccccctttcccaagcttggggggggnggctttggggcggggaattatgggaaaagggggggcccccccgggggtttccccccccccccttgggccggcccggggggccgggggtttggctcggttttatactggggcccaaaaaggttttttttgggcccca

SEQ ID NO: 674244 - DNA, 206 bp, Homo sapiens
gtggcagtgggggcgccatcggcgacgtgggcatttggtgggcgacgattgagcccaccgaccgatccgtcagtggccgctgccccagggcatggggtctgcctgggggtgctgggacctctcctgacagccccctggtctgacagttgtgctgctgaaagtgcggctatggacgggcgcggggaccggtgggccgggcctcgggc

SEQ ID NO: 674245 - DNA, 738 bp, Homo sapiens
tcaggtaatggcagggcacaggtttggtggctggagaggttgtgaggtggatgcgctgccgtatttcgatcaaggttatgaagcccctggtgtgctggtgaagcggatgtagtcgctggtggaggaggaaactcgcagataccgacactaactaagaactacctgagctacctgacaggcccggattattgctgcctttgaaacatggacataatgagaaatatgaatttgatagactggctgctcgacaaacaattgaatgctcagtatggaaacgatcatcgagcttccagcccccctcctctggtcgagaaaaatgacattaatgcatggcgaagaaatgtgtagatacaattcatatggcccaattagagcatcaagcagtaagaattgataattctggaaataatgtacagagaatggatgtgattgactggaaagtataaatgagaatctagttcatactgattgatcgaccgacacagaaggaacctccagcagaggtaagaaaaaccatattcaagatgcagaagtggcacgaaaaagaacatggaactcaccggtggaatctacattgagaagaccgtggaggtcctgatgggtatcctggtccagtacgaattatgaacatgacggactactgttcacgctggaagatgaactcttccacttagcatgcacaatggcaggcacgcacgaaacttcgggaaagagtctgacagacatagccgtcgacaa

SEQ ID NO: 674246 - DNA, 159 bp, Homo sapiens
ggattagacagtcgaagggaatgtccgggctccagccgtccagcatgtctcagcccaacaaggacagtggagtggaggggaagggaagtcatactaaagagtccaaagtcagtagcgccacatctggtttataaagtaagagatccagtgggcacaatg

SEQ ID NO: 674247 - DNA, 837 bp, Homo sapiens
  misc_feature (11)..(11): n is a, c, g, or t
  misc_feature (61)..(61): n is a, c, g, or t
  misc_feature (67)..(67): n is a, c, g, or t
  misc_feature (73)..(73): n is a, c, g, or t
  misc_feature (82)..(82): n is a, c, g, or t
  misc_feature (92)..(93): n is a, c, g, or t
  misc_feature (102)..(102): n is a, c, g, or t
  misc_feature (112)..(112): n is a, c, g, or t
  misc_feature (114)..(114): n is a, c, g, or t
  misc_feature (120)..(121): n is a, c, g, or t
  misc_feature (154)..(154): n is a, c, g, or t
  misc_feature (163)..(163): n is a, c, g, or t
  misc_feature (182)..(182): n is a, c, g, or t
  misc_feature (199)..(199): n is a, c, g, or t
  misc_feature (205)..(205): n is a, c, g, or t
  misc_feature (212)..(212): n is a, c, g, or t
  misc_feature (231)..(232): n is a, c, g, or t
  misc_feature (239)..(239): n is a, c, g, or t
  misc_feature (252)..(252): n is a, c, g, or t
  misc_feature (259)..(259): n is a, c, g, or t
  misc_feature (265)..(265): n is a, c, g, or t
  misc_feature (268)..(268): n is a, c, g, or t
  misc_feature (300)..(300): n is a, c, g, or t
  misc_feature (342)..(342): n is a, c, g, or t
  misc_feature (351)..(351): n is a, c, g, or t
  misc_feature (427)..(427): n is a, c, g, or t
  misc_feature (439)..(439): n is a, c, g, or t
  misc_feature (443)..(443): n is a, c, g, or t
  misc_feature (592)..(592): n is a, c, g, or t
  misc_feature (825)..(825): n is a, c, g, or t
gctcgcctggncgtagacatcctccacaggaacagtgaggaaagctgggcgctggcttccncctggncctggnacggggggnggtgggaacnnacccctgcnctgcctcaancnctctgnncagccagctagcccggcgcgacccgctggcagncgctgagtnggaaggggggggggggggngatgaaggtggggtgtngttgtnggcctangcatccccgttctccatgnngcccagntgctcctccaggngggaganggggtngcnctggtccttgaccagggccctcagggcccggngctcctgcatcacctcctccagcttcccagcctccccggctntggccaggntgccgctgggggtggcatcagcagcagtggtggtggaggcgggggcccctaggtgggaggagcccggggccatggngggcgggctgtnaganaacacgttgcgccggctgatcttcaggtcccgctgcttgctgggcacgtaggcctcccgcagtgagatgaggatcgggtcggcatcccgcccgctcacccactcctcagcctccagggctgcctcgggcccggctgtgtcggggtacanatcatcctggaagaggtccgactttcttggcacagtcatgacgatgggctcacacttgcgctcatgcagtttgtagaaccgggcgatctcgcacttgctgacctccaggccccgcttgggcatgctgcccataccccgctgcggctccttgctggtgaacgtgttcaggaagtggatgtagggaggctcctctgtgatctcaaagtaccggatgctggagtcacccttgccgnagacgtagacca

SEQ ID NO: 674248 - DNA, 770 bp, Homo sapiens
gggctgtctcctcaggagatcgcgtggttagtgagctagggttggggatttctcatcaaattagaaaacgcgctggtggctaaacgagctgatgccatgtacacaaataccatgatggacgttatagagtgtcataaacttggatctatcaagcaaggagtccaatgcgagttccagatatgcaatagattacgcgccagtcacagtgaccatttctggagtttctgccataaccccactaagttgtctcgttaacagccaagttctcatggagtgtcccaagtgaagtggttggactttcttttcctttccaccattgggcacatttccacttcgtcccacatcttgcgcatgtaagaacatacagcatttgacataacttggaaaacatcctggatcttctgatgccaaacgggttacaagcttccttggatctcatttcagttgatataccagccactattttattctcgatcagtgagactttgggccacgtgtccagggtactgaccatcagtgtcagcattagggtataggttaagtatcttatgggtatttctttaatggcacatgtgaatcttgtaagtgtaaaatgaaattactttctcttgttcctctgatgatgggtctacaattcaaaagagacatccggatataggtatggggatgatccaggatcatgtgtgactgatacatattagtaccttgtgctataaaaaaaaatagaattttgtacaaggccaaaaaacaaagaacacaattaaaataac

SEQ ID NO: 674249 - DNA, 141 bp, Homo sapiens
atcccctgtgcattcgcaaggtccaagtacctgacgtagggtcacgtctccgataggtagctttttctatatcggtggttcatcttgcatatcctgcaccacgtccgctgccttacacccctcctcgcgcctgtccatatg

SEQ ID NO: 674250 - DNA, 244 bp, Homo sapiens
actacatacttccggggatgtatggatgttattggcatttttaagtgtttagagttttttggggttgggggagggttttttttcctggttttccttttttcctcttaatgggaggcactgacctggcccaggaaatgaagagattcttttttgaggctattaccaatgttatcataaggtgacggccacctgtaacaaaaaggtggcacgagacatgatcactgaggttttatttgcacctcaa

SEQ ID NO: 674251 - DNA, 240 bp, Homo sapiens
tgggttccaaaaaaaaaaaaaaaaaacttccggaaggcggcggtttttttttcccataaaattctattccaggatgtcatggttgcgggagggctcatatttattggtggttttggtttaggacccccctggttcataatatccagattactaaaaatggggggaagggcttttaatctttttttcataatatctttggcccctattacagaagaaataaatttctttcctttttattta

SEQ ID NO: 674252 - DNA, 821 bp, Homo sapiens
atgtggtggggctgcggagtcgccgatccgccggaagcgccagtgacaatggggacccgtgtgactgacgagtacgactacctattcaaagtggtgctcatcggggactcaggcgtgggcaagagcaactgctgtcgctgcttcaccctgcaactgatgttcaacactgtgagacgcaatgagcaaccattcggctgtggagttctgccacccgcagcatccagagtggactggcagagacccatcaaatgggccgccagaatcttgggacacctgctggccatggatgctgctacctgctgccatcacctcctgcgttaactaaccctggttggggatttggccaatcgttgggggggacctggccactttgacttggaggttggtaccacgaacaatttcagtacaaaaagacaaccctagacctatagagaacctgttgtgagcatgctaggcttgacacgcgagctcgctgggaacaccaaacggcaaaggaaacctatggcgaaagcaattacagggtcccaagttcctaaattgggcattggggtttgtggcaacacgaaaagggaaggtttgacaccttggtgtcccacaccttgatggggcgcttggttgcccctaacttgaacagaatgtgacccaggatggcacatattctagccatgaaaacaaaggatacaatagctttgtctcctttccaatcagaaggaaaacttctaaggaccctatgcggatttacaccaacttaaaccggtacgtagggaaacggcattacataggaaagctattcctacaacgaggaagaatactaaaccagg

SEQ ID NO: 674253 - DNA, 213 bp, Homo sapiens
caggagtttgggaccaggcctgggctatatagcaagaccccaatcactaccaatttttacaaattagctaggtgtggtggtgcgcacctggggtcccagctactcgggaggctgtggtgggaggattgcttgagtccaggaggttgaggctgcagtcagctcagattgcaccactgcactccagcctgggcaacagagcgagaccctgtctcc

SEQ ID NO: 674254 - DNA, 231 bp, Homo sapiens
cggtatgatacatatgaagccagtgatttacattcatcagatggttatgggcctgagtactgtcctttggacggggaacttacgagggatcgcattcgtgtcgcaagctctatcgcaagtacaacctttctgcaccggcgaccatgtccatggatccttccgatgaaggtgacgacgactcagatgatctaatgggggtcccgaggcgcgagttactcgctcaaatcttcg

SEQ ID NO: 674255 - DNA, 1023 bp, Homo sapiens
cagatcacaaggtcaagagatagagaccatcctggccaacaatggtgaaaccccgatctctactaataatacatagaaaagttaggctggtacgtgtgtagcgagcagcctgtaatcccagtctactcgggaggctgaggcgaggagaatcggcttgaacccaggaggctagaggttgcagtgaggccgacagcacgccatggcactccacgccgtggcagaacaagagaagagatctccggtacccaaaaaaataaatgataatgactaacaattaggaagccgggtgtggtggctcagcgccttataatccgcagcacttctgggaaggactagcggcaggtggactcacctgaaggatcagagacagttcacagggaccacgccctggcctacattagcagacacctcatcatctagctagacacacagtacaaaacatagttaggcctggcgcattggctggtgctactgcctactaagccccagcactactttcagcagcgctgacgcaccaggcaccagactcgctctgcccatcgcagcaacggcgcagcacatccgctcgcagacagccccagggatggcaacggccacacaaagcaactcaccatcccgccccgcgcgacccaccccgcgcactcacgcgcaccactccgaaccggcgccgcccgcgcgacccacagcgtgcacaaccacaccccacacacaccaccgcaacccgacccaagggtcccaaacacctcccacaagcggaccaaaccgaacccccacctggacggcccccgcaacccatccagcacaaccacccgccacacggaacaacaacttcccacgcacgcccacacacatcccacccaaccacccgaccccacacaccccacaccggccagccgccgcacacggctcacaacacccgccacgcatccgctgccgaacaccaccaggcacccagcccaacccaaccaccgcgcgacccgccgacccagcacatccacacccacacgcaccacagccggcacc

SEQ ID NO: 674256 - DNA, 478 bp, Homo sapiens
cgaccggtcctgtatggtaactccttacagatcaaactccctgttctactctttccccccttctcattaccacactaaactagtcttcaacacacacacacacacacacactctctctctctctctctctctctctctctctctctctctctctctctctctctgtctctctctctcttcctgcacccactccagggccaagatgatctgcagtggggaaattgtggcagtcaagggagagattctatcagtgctacatactctcttctaaacagcagtagtgggaggggaacctctctcaactctttttatagagccatctttccccctatatctaacccaagcaggggtcttataagaacagaactatacaaatcctatatccctcatgtatatatgtgtaaaaattcctcaacaatatattagccagagacactggaaaagtgggagttaacatggcagcgctggggggatcctc

SEQ ID NO: 674257 - DNA, 280 bp, Homo sapiens
ctggcagatgtggttcgcgctctcctccacgtgccgtgccattgccagcttagggcactgttggcagagccccaggccatgggggaagggaggagagttagtaggaacaagtccagggagaggggaggagtgggtacagggtggcgggcacctagctctgaaggagaaagacagagggcactaggaggctggagctggccagcagcgggaggactggaggcttcagagcagcagagcagggatcactaagggctgaggtctgaggcatatgggctggcat

SEQ ID NO: 674258 - DNA, 473 bp, Homo sapiens
tcctgtggtgctttgctggatgactagataatcagtaaagacagaattcaggaaatcgggattgacagatgtgtcatggcggaggagacgcacgattgaaagaatgccttgtgctaggccagtgctgagcattttctataagtcagttccccaagtcctctgaagaactcaaatccttcagcacatgtttgttccgcacaggttagcagtggtcacaggcaggccctgagggtggactgcctgcccaggttcctgtgctgtggctggcgctgggctttgctcagaggagtcaaggagaagtcacttggccccagctctaagaagacttgctgtccaggacaaagattgtcaagctgtttctctaaggttcatagtgagaaatccgttttatgttgcaacctgtaggaacacattagtcccacagtcagaagtaaaacatttcatctcaagaaaaaccagagaagacaaagaat

SEQ ID NO: 674259 - DNA, 711 bp, Homo sapiens
tgggccaaatctcgtggtgtttcgcagaaaaaaatccagaaaaatttcaaatgcagttgagtattcttttttaaatgcagattttcaaaacatatttttttccaggtggtctttttggtgtctggctttgctgagtgtaaaatgttggtttatctgggacgatctggtctctctggctccaaagaatatttgggagtgatgtgggcagtacctagcgccagcctcgcgggacactgtgttggtactataagcctctggcagtgctcctctggtcaactgggtgggggtattatctggctatggtttttattctacagacaaatataaccagcgaactatttatttaaagaagaggattcttactcaccgtgggaagccacatgtgacacccaactgagctctcaaggtgctctgaggattatttttacaagacagttaacaattatattgaggtggtcttgatgctgacaggtgcaaggacaagggggagcccaagggggtgtggttgggtgccctctgggtgtccccagggctatttggcccccggcgcgctcttgagaaaaatctgtggttgggggaaatattggctgcctgaggatctcctctgtggtgagaaagcgcgccacccacggccccaaaggtgtttttgtgggcgctctgagagggggggaagggcccttgtggcttgggggagaccctctgagaatatcg

SEQ ID NO: 674260 - DNA, 219 bp, Homo sapiens
cagtggctcacacctgtaatcccagcactttgaaggctgaggtgggaaaatcgcttgagctcaggagttcaagaccagcctgggcaatgcagcgagacattgtgtctacaaaaaaaatttaaaaattagccatgcattggtgacacgtgcctggagtcccagctactcaggatcaggaagccgaggtgggaggatgcttcagccaaggaagtcaaaact

SEQ ID NO: 674261 - DNA, 199 bp, Homo sapiens
cctaaatttcgacgtggaaaggagacagtgcggcagctgtcaccttagtcagtcacagcttaaggagaatagatggtagtagcaaagttgagcatcacttttagaaaggtggaggggtggtgaggggtgcttgcagcatgagaggcacagcagggcaatgctgcttaagtacctctcacatacaagtgagcaaatacat

SEQ ID NO: 674262 - DNA, 122 bp, Homo sapiens
cctgtatcatcactgagctgggctctcccctaactctcaggagaactatccttgccgtatgccttttccaacttcacctcatcgaggtaggtgattaatgatcccagtagtcactgatagtt

SEQ ID NO: 674263 - DNA, 366 bp, Homo sapiens
ggactcaagcaatcctcccacctcagcctccctagttgctgggaccacaggcgtgcaccaccacatttggctaatttttttatttttgtagagacaggggtcactgtgtcacccaggctgatctcaaactcctgggttcaagcaatcgcctacgttagcctcccaaagtgctgggattacatgcgtgagccactgcgccctgcctgtttgtagtaatttttaggcaccaaatctccctcatcttctagtgccattctcctttctgttcaggtaaatgtcacactgtgcccagaatggatgaccaggaaccttaaagagtggctgaaaagattgcagagttatcataataaattgctaacttgggta

SEQ ID NO: 674264 - DNA, 3033 bp, Homo sapiens
gcctcagcatgtacatcggtatctggttcatggtagattttcaatgaatctgagtgaatgaatgatggatgaatgattttgtatctccttactaggcatatgttccttgagggcatggaccgtgtctaatgggtggctacctagtgtctcattcttggtccgttgttagtggtgatttttgtcctcttctttgcactcatcattctaggcttgtattagggtaaattgttagcataattctgccttgtttcccaccctgcccccgcctttttttttcttttgaaacagagtcttgctctgtcacccaggctggagtgcagtggcacaatcttggctcactgcaacctctgcctcccgggttcaagcaattctcctgcctcagcctcccaagtagctgggattacaggcacccgccactacgcctgactaatttttgtatttttcatagagacagggtttcatcatgttggtcatgctggtctcgaacttctgacctcgtgatctgcctgcctcggcctcccaaagtgctgggattacaggcttgtttgcttttaaacagtttgtgggcagggatggtattttcttatgattctattcctcacagatcctggcccagagccattagcagagaaaattctcagtagatgtttgctgacctaaacttcattccaccacgtttgccttccttttgacttttcacctcctcttagaaggtaccttatatgataatgtcacctatgcaataaagaccacaaagtaaatttaataaaatagaaggcatgcttccctcttttctaaccccacacttttttttttttaagatcaaaataacgttgcatttgtgtgtgccctgcttttatttatttatttcttttgtagacacgaggtctcactatgttgcccaggctctctccaactactgagctcggtgatcctcccacctcggccttccaaagtgctaagattataggtgtgagacaccacacccagcccagccctgctttcacaaaaaacaaaataatgatgaatatattgtactaccctcactgttttcatcattattttgttttttgtgaaagcagggctgggtagtacaatataatgatgaaaacagtgagggtagtacaatatattcatttgtctgtgaatgcttcttattttatcaggaaaaggaaaaatttctgtttcttgactgtaattgttgaaatgtattttcaaagttttttactttatttttggactgataccataaaatcgtgtgaaatgatgtgaggattttctaatggagaaatgacttagaatatcccttggatgtcctatctgctttttaattgttttatcatcccagacatgtttctctattcctgtctattcttttatctgtaaaatgaggttattgaactagatgctgtctacaactttttttttttctttcattaacattaaatctctggtacctgagaacattgggatcaggctgatatgtctaggtgtctatttctttggtctacccttcaagtaggaatgaaaacccatagaatttctgtaattatcagcctcaataactttctaaagcctttaggaagcagataccctgcaatttatctcactaatttgtttgtgattaacactctctgccccttctcatatcccaagctcagtgttttgatatttaattacagggaattctttcctcttcatagatgatatagcaattgtatttcatttctcttatctgaaatctctgctgactttccatgtcttatgaatttaaatagtctaaatagggcatgagatcttaaatattccttccagtttctacatttgctattcagcaacaacattttccccggaaaagggtgaaagcctgtgagtcccccacagggcaggagcactgaatacacccacattttcctaccatctgacatagatgagacacaaagtagggactcagatgattatttaactgaatcaactggattccttaattctcacaatattatccttcctactttgtaaatagggaaatggaggcttagtcacacaaaatatcttgttcgaagttactaatcaattaagtaacttaataatttattgacatctgaggcatttctctctttctacagcctcagaccagaaatgatgggatttcagccttcttttcttagagattggtgagccaagacctggagagagaactctggttgtcttaagtcacccagatgaactattaatagaaaaagaattctactcagtcagtacttaaaagcttgacatgtttgtgtggagacctgtgtgtgactgagttcagatcactctaatttcctgggcctcacttgacccatctgtgaaatggggcaatgagctcttttcggcatgaaggcaaggaactgtccagaagacctctggagaattcttcttaccctgagatcaagggttctgtgagtagtacaactcacacccaaagtcttagttgcagggcactttagtgggaaaaaaaaaaaaaacgctgaggctatttttagagccttcatctggttatagactagttggtaggagagcaatacctttgaaaagttaagaaatagttttatacactgtgttaaggatgttgtcaaaactaatactcgtgtatgcaaagactttaacatttattaataattttttctatagattggtgaaattggtttgtaatttttgtcatttcacttttgtggaaattgagcaaaggtgagagataaaatgatgtgatcaggctgggtgcgttggctcatgcctgtaatcccagcattttgggaggccaaggtgggcgcctgaggtctggagttcaagaccagcctggtcaacatggtgaagccctgtttctactaggaatacaaaaattggctgggcatggtggcacatgcctgtaatcctagctacttgggaggctgaagcaggagagtcgcttgaacttgggaggtggaggttgcagtgagacgagattgcgccattgcactccaggctgggcgacagagtgagactccatctcag

SEQ ID NO: 674265 - DNA, 531 bp, Homo sapiens
  misc_feature (494)..(494): n is a, c, g, or t
ggcacgagaagaaaatgaagagctctctgggttccaaaatgctgatgttgaatacatgatatatatgcacacatataggcacttgcatgttagcatgttcatgtctgtgactgtcttttgagttatataggagtggcagagattgtgtcactttaacttgttgtcgacttagcctgaaaaccttactagttcagaatcatactcctgactgtcttctggagcaacagggaactgcatggccaacttaaagtacttgttataaatgaaccagaaatctgattttaaaatacatttttcattttaattgtttttgcattttgttttgttaatccttaaaggatggattgtgcttttaagaatgtaagtgttatgtatttgtcatgaatcaacaaaacagcttttaaaaaagactaattggaacaagtgggtggcactggcttaatgctgttaatgtttctaaacgattttacatttagattatatatccggattcntattgagatacctcccaagcactggttttatagaaga

SEQ ID NO: 674266 - DNA, 152 bp, Homo sapiens
ggctccgtaacttattccttttgtgatctcctcatcgaagggcgccaatgtcgaaggcgtcgcaggtgtcagctcccctcttggggggatcagcgggggagggtacttcttgcaacatgaccatctgccattccagggagcggagcattccc

SEQ ID NO: 674267 - DNA, 951 bp, Homo sapiens
  misc_feature (631)..(631): n is a, c, g, or t
gtgtctgtcagagtcgtgctacttgccagacataaatgaatcgcattcggtgtggcccttagaaactataagtggtagagttggaacactgttgatggtgtgatgttttcccagtagacgtgtacacgctactatgagaacaacaacgtcctatatatacgtgcactactaatcgctaggggcattgttacaccgtagtctacatgggacccacgttagaacatggtaagcactataccatggggccttctctactgagagtttctgtgtccctcatgtccgtacatacgcgtgctcgtcaggtagagttttgaagaccctcttgtgagacggatagggtgaaaattgcaatagaatctctctctaaggggcggaatatctattctactggtaaagtccgcctagcgcttaggaacacggcggtcgttggagtcgttctctaggtgtctgtggacggaatagttcatcaagtggcgacatcacttatgctgccgttagtcgttacgtgatcctctctggaagtctgtgtgtcgttgggtgaacccaggcgacaaattaaccgtatgtagcgtgtctacggtggctaagaacttatcctagtatcggctatcgaccagcaactcctatcttntcacctgttgcataacgagtccagcaagtggcagattaagttgtactttagtactatgttctaatactcttggaactgtgtgtccgcgcttttgggaataagctggagtgccgcaataaccctagcgaggagcgagatagtttgattcgacgcgtaaccaaagtcgaccgctttttggagaccatcgagaccgaactcgtaccccccagaccggggcgctccgcggggactggggtcaactttggtgggttcgaaagacgaaagttgccgccaagaagggggtggccgtttttactaaacagctcgcttggtgatcttcg

SEQ ID NO: 674268 - DNA, 1226 bp, Homo sapiens
gccattcggaacctgaaaccctcatccccctgtgtgcagattcccataggccgagtaaggtaggttcttctcggagaccacaagcaggtgaggactgtggtcaacgcaatgacgcggtgcaaaagctgggtctggaccggtctctgttcgagcggtacccacgagggactgcgagcgatactgctggatcagctcatgttaccgcactgtcagtgaggggcactctgtgctcttcgcgccatctgctggcggttctaacaagaagcatagctgaacgactgtggcatggggcctgacgcgatggcactgatctcgagctcgtcgcgtgaggcccagcggctggggcaaagggaaggaagctaggccctggttcattctttggggcccaacggttttagagcgcccccaagagatccggggaagacaccgtgcttgaaggtgcgcatctgtgaacagagagggacaacagtggaaaaacttccgagggggcgaaacccctggggagtggcagggtggggtatgaaacgctcgcggattacacggattattccactgcgagggccaagcattgaacccgtttgggagagaaggctgaccccgtgtaagcacgccaaacccaaggggaaagcaattcggtccagttacccataggaggggcaacccataccacacaactggcgagcgaagggccccctttccttggacggcaacttctactcgcgcaaaagagacgcccggtaaccaggggggggaaagaaacggcgcgcctattagggccccacgagggaattgttagctccgtctagatacccaatagccgaaatccgaaagacaatagggaggccccaaggggtggaaaggccaggaaggtatgggccggcctaatagatatggcgtgcggcaggaaggacaagcgctgtatacccgggctaaacccttggttgagccccaacagaaaggccgaaactcctttggggatcctccaatactgggggtcgcaacccaaccagaaaggcgtagtaggctatcaatggaacaggtttttcgtggggagacatatcagcattggttggaaacccccctaaaatccaaaaagttgaaaccgatgtgggcctggttcacacagacgatggccccccaccgcgaggggggacatcctatgccctggactcggggagtaaacaagagcattacccttcgtgcagtacttgcgtggcccccccatt

SEQ ID NO: 674269 - DNA, 848 bp, Homo sapiens
tggggagtccctttgtggctgcaggctcataccatcctaactctgtaagcgactttgggtgataggagtctgtgattgtagggtctcccttgatctgagaaatggctacctctcgatatgagccagtggctgaaattggtgtcggtgcctatgggacagtgtacaaggcccgtgatccccacagtggccactttggtggccctcaagagttgttgaaagttccccaagtggaggagcaagggtggaggaggccttcccattcagcacagtttcggtgagggtggcttatacgtgaggcgacgtggaggctttggagcatcccaagtgtttgctccggctgaatggacgtcttgtgccaaattcccgaactgaccgggagaatcaggggtaacccgtggttgtttgagcttgttagaccaggacctagggacattttctggacaaggaacccccaccaggtttgccagccgaaacgatcagggatctgatgcgccagtttctaagaggcctagattcccttcatgccaatttgcactcgttcaccgagatctgaagccaagagaactttctggtgacaaggtggtggaccagtcaagctggctgaccttgggcctggccagaatctacgagctaccagttggcccttacaccccgtggttgtacacactctgggtaccagaggtcccgaagttcttctggagtccactttttgcacccctgtggacattgtgcagtgtcggctgtatcttggcgcagatgtttcgtcgaagggcctctcttctgtggaacctctgagccgactagtggggcaaatcttgacctgattgggtgctccgaggatcatgcct

SEQ ID NO: 674270 - DNA, 631 bp, Homo sapiens
ccgcgcgcgtacctgtagccatggaagataccgcccagtcagcccgcattaaggagtgcggcctctgcctgttagacgtggacgtaaccctcacgccggctcgacagatcgcagaggcggacggatatgactactgtaagatatctgagcagctgcctgacgacgatgaagtcattgacacgttggagtatgtgcttgacgagaacggcatagtgcgagataagtacggacgactgatgtccaagcagaccatccagaaccaactgctataccagcatcgtcaagagcttgaacatctgtgccttaattatgtgcatcttgataaccatgctgctcatcgtcataccagtgatgagcttccagatctaatgctggacatctagcaatacgtgcggacatgagctctggacatgagcagcgagctactgtactctagctacgattcatagcactgcgccagaagtcgagtcatgtcatgagcctatagtctgatacgctgttctacaatgtctatcaatagagagcacgagtttctggcgaatacccgagggctgggacaagcgctactgcatggatagcccggaccacgatgcttctataccgagcactattggtcttgctcgcccttgcg

SEQ ID NO: 674271 - DNA, 214 bp, Homo sapiens
accagttgggcttttggtcttcctctccccatgcaaactggtaaaaggcctcaggatttttgagttgtcctcagccccctcctcttgtttcattttaatacatgttttctaataacccagtttgtctcttcttactttcagaccatcaaactccaaatggtcatgcagccaaagtcttgaagtctcggacaatgaccccttctgtcgtcttcta

SEQ ID NO: 674272 - DNA, 275 bp, Homo sapiens
aatagaagttccatgaatactatgattgtaatgggcccttttggaactcttgtgggagagaaaccttatagatgcaatgaatattttaagccttcttttttgaagatatccctcgtttaccgtagagatctcacaagaagaatcattggccaggcgcattggcccatgcctgttgtctcagcactttggggggctgaggcgggcagatcacttgaggttgggagttcgggaccggcctggccagcgtggtgaagccctgtctctactaaaaatac

SEQ ID NO: 674273 - DNA, 123 bp, Homo sapiens
ccccgtactagctccgacagcccccgtactagcccgacagtccccgactagcccgacagtccccgactagcccgacagtccccgactagcccgacagtcctacttggataacacgttcgcgag

SEQ ID NO: 674274 - DNA, 373 bp, Homo sapiens
tgattacactgggggcaggtggctcatgagctcttgagttgtgctgggtcctgcgttcctcttcaccatacacaggcttctggctgcgcaggatggctgctgagcctgcgtgatggctagcatgcgcaagtctggggcggaacttgtacttgcttgatcatgtgtctgatgctgatgagcgtggcacgagcattcttgttgatggtggtcctgcacatattgaggtggcaggcttccagcatgagccgagatctccgcttaatgaccaccacgacacctttgccgtcggctgctggctccacagcccacagtcttagcggtagaatcagtccgttgtagcggaatggaattgcgggccttcaagttatatggg

SEQ ID NO: 674275 - DNA, 135 bp, Homo sapiens
cctgtgacaactcactctgggggcgggttacggagtgttccattagagcagctaggcatctggagataaacaggtagttcggttgatggtggagaaagacactgtcacggaccagccagtcacaagccagatcca

SEQ ID NO: 674276 - DNA, 625 bp, Homo sapiens
  misc_feature (481)..(481): n is a, c, g, or t
atgtgattgagaaagactgagtagctcaggcctaggcttagaattcgctgcgtttgtggaataaaagaacaaaatgatacattagcctgtcatatcaaaaacatataaagagagaaattatccctaagtcaagggcccccatacagaatacaatttcttattaagggtcattagatgtcgattgaatccttttcactagtgcagtatgcaaaaccaaaggtgaacaaacactgaagcacacgcaactctcacagcgacatattctgacccacgaatgatgccttgggctgggcaacacgattgcactgttgtggagacacttcggaacgtacatgtcggatgacgggacggagctgtccttggcacaggtcgagccaacgcattacaggatacctcctcttgaagacaggacatcactaagttctaatccacatacccacgacaggccttcacagcaaactgtccacacactctgcgccanggaactccatcaaactgcgttgtgctgtctagaaatagcaacattatccatggttgaacgagacaggcgccaatgatggtaccaaataaggccacgaccctcgctattattccggactgcgcgttacactaaatcgacatggtg

SEQ ID NO: 674277 - DNA, 106 bp, Homo sapiens
  misc_feature (59)..(59): n is a, c, g, or t
  misc_feature (75)..(75): n is a, c, g, or t
aactttgcaagaaataaatttttattttttttcattatcatacagcattcaagttttanttggcttttttgaggntccaaatctgagatatctatgttatttttat

SEQ ID NO: 674278 - DNA, 378 bp, Homo sapiens
gacggaactcatttacacatggatattataagtatcatcctggtatctgtgcttgataatgatcagattttgtgtagatattatgttcatatattaaattaaaatcccacatagtaaagttggtacaatttgtcctgaagctttgtgttctggctgcacctgcataagctgctacaaatagaataaagaatttcatagcctgtatctatcattaagatgcatggaaagaaatgggctttgcacacaatgggcttggcgctgactgggaacaatggaaaaaattacattagctgtggttgtaaagtttttttgtttttggtttagtttattttttcttttttcttttttttttttttcccatcttggtgaaacgcactt

SEQ ID NO: 674279 - DNA, 338 bp, Homo sapiens
ctttcattggcaaggccaaggtggaaggactgcttgaggccagtgagttcaagaccagtctgggcaacatagcaagatgctgtctcaatgacaataataatgatagtaaggagaagaaccagactaaagaacttgttgaaccaaatttaggagaaattgtatgagtttttttttgtgtgtgtttattttaatgcaacaacacatcaagcctagaaagtgacaatgaataaaaaaccttggcagggaaaaagagactgcaatcagatatagtggcgaacaaggtcaggactactgtaagagctaggaaggcactgtctctacagcaattgcaagacaat

SEQ ID NO: 674280 - DNA, 518 bp, Homo sapiens
aatactgcactatgagaaaaccaaaacttaccgctataatcaaaagcaaagtcaggaaactatttgagatttacatagattagggggagctggccaatgggttctagaattctttatagaaatctggacttttaaagaaaactgtgctgttcacttacatttacaactatttgactacttgggtgggcccctctctgaagataaattcatggagccacatatcctccaaatgtacataggttgtagatttcaagtggtgtaaaatgtcctagatccttatgaacttaaacacaatcacagatgttctggaatgagggaaaaagtcatgtttaaaaacgctagcaggtagagcagtcagtttaaaactaaatggagtcattttcaaaaactttcttgctttgttcttagcacctcattcccccccattccccttcctttaacaaaagaaaaaaaaattgaagtgtttatgtaatgaaagatatccctatgatattaaaaataaaattgtttctcgagag

SEQ ID NO: 674281 - DNA, 225 bp, Homo sapiens
cagggtaatgctttcatttatgtgtgtatatatattatatttatgtatatatattatattatgtatagatttgtgtacatatttatatatttatatacatatttatgtatatatatatttatatattatgtgtatatatatttatgaatatttatgtatattatgtatatatgtatatatatttatattcttccatctatattcacttaagtgggtagtcacaga

SEQ ID NO: 674282 - DNA, 587 bp, Homo sapiens
gggtggcagagaaactgcttgaaaagctgccatccttgcagctggctctgcctgtcttcctgcgcagagctgggcattcaggacttcacagtccccttgcccctttctttctattgactatgggtggagcctgaaatctctgctgtttcaagcagaagatgtgattaggacccttcatctcaaatttctagtgagaaagagggaatgtagcagggatgtgtgtgttgaggggcaggggttagaattcctgcccttcatccacatctgagtgtagtcctgtctttagggagtataagccaggaattctttccttccccagtacacagagggctcctgctgccccctctccctcaattcctcctgaagttatggcagagatgcctctgattagagcaggattgaaggtattgtgacctgctactgaatagcggacaaaagctctagcctgtaaatccctatgaaacttggggaaggaacccccagaaaggaccagtgatgggcaacccgctcgggtccccttctacgctgtgggagctttgtcattttgctcttcacaataaagcttgctaccgctcaaaaaaaaaaaa

SEQ ID NO: 674283 - DNA, 363 bp, Homo sapiens
  misc_feature (250)..(250): n is a, c, g, or t
  misc_feature (342)..(342): n is a, c, g, or t
aagagtgcggtgatggtgtaagtgtgtgtgtgtgtctgccagaaacctgattgggtaggtgatgttggctgtggtctgaattggggtctgagtgtaagtctgcaatgactgtcattggcccatgttgtgtcggatgatgatgggacagagtttggaaagctgaagctggaggttctggagggtttctgggagatgggttgagttgtaaaggtcttgcctgacaatggtgctgcttggaggggctggaggngctgtcccccttgaactagctgaggctggataagaatttgttgctgctgtgtctgctggttatgctctccttctttttgctgggctgcttgnaatgaggctccagatgtctgg

SEQ ID NO: 674284 - DNA, 197 bp, Homo sapiens
cgagcaggtggtgttgggaactaatcttatctacaatcaccattttaccaaaaaacacactggttcaacccacatgaggaagtgggagggattaaccctgccctacatagccccagcaagattgtttgacaagcaaaattgcccaaggccagaccaaggtcctagggttgatgtccaccggacctggcctaaaggag

SEQ ID NO: 674285 - DNA, 119 bp, Homo sapiens
cagaagcaggggctgagatagcacagggcaggtgggggcccaggtgcgtctaagaccctcccaccccatcaccctgcaggatcaggcacctgaaaggggatctatgcccagggggtctc

SEQ ID NO: 674286 - DNA, 402 bp, Homo sapiens
  misc_feature (82)..(82): n is a, c, g, or t
gcggccgcctactactactaaattcgcggccgcgtcgacgtagatgaacagtgtcaggtaaagtgctgtgaaagacgtgttntatatctgtgtgtctgaattatccagaagcacttgaatcactcagttttaaccaaatacgctgtaatgagacttgcctcttctcatatgaagacacatgtctttctgctgtcactcaggctaacacaaagggggaaaaaacgcttgaaaaggctttcaagtcttgtaaggcactctccttttatgatagtaatgcactatacattaggaattggtcctgcaggattatttcatgtttctagaatgagggctgaggtcacagttctctctttggagctcattcatgaaagtatgaaaatgtgtgaaaaggtgtcgacgcgg

SEQ ID NO: 674287 - DNA, 433 bp, Homo sapiens
  misc_feature (11)..(12): n is a, c, g, or t
  misc_feature (368)..(369): n is a, c, g, or t
ttttttgaganngagtgtcgctctgtcacccaggctgcagtgcagtggtgctatcttggctcactgcaacctccacctctggggttcaagcaattctcctgcttcagctcacaagtacctgggattacaagcctgaaccaccacgcgtgctaatttttttgtatttttagtagagacggggtttcaccatgttggtcaggctggtctcgaactcctggcctcaggtgatccacctgcctgggcctcccaaagtgctaggattacaggcatgagcactgcgcccggctctacattttttgctgagtggtaaacatattgtagtgggtaaaagaaattgagacaaagaagcctttcttgtcagtttgaannttctctggctgagaattagctataggtattggaggttcaaagctcctctgaggctcttgctttg

SEQ ID NO: 674288 - DNA, 285 bp, Homo sapiens
gccaacatggtgttcaggcgcttcgtggaggttggccgggtgctatgtctcctttggacctcatgccggaaattggtcgcgattgtagatgttattgatcagaacagggctttggtcgatggacttgcactcaagtgaggagacaggccatgctttcaagtgcatgcagctcactgatttcatctcagtttcgcacagtgccaccagagtatgtcgacagctgcagagcagacatcatacaaatggcagccacagatggccagagtttagcagaaaggaagccag

SEQ ID NO: 674289 - DNA, 245 bp, Homo sapiens
gtatatctggttataaagaataatagagtgacacatggttctgtgcttggtacattgaaataagtcagggcagaaatcggggggggcctcattaccttacggtttatatgtgtgacacaaagcggagggtagggagtagagttaaaagataccaggttagagagaataaatgtcatagcacagaggggtcacttaaatatctggaaggtcagctcaccttcctaggaaaggtaacttatcctaag

SEQ ID NO: 674290 - DNA, 372 bp, Homo sapiens
  misc_feature (38)..(38): n is a, c, g, or t
  misc_feature (232)..(232): n is a, c, g, or t
acaaaatggcccaagaccccactgctgctggaggcaantgaatttatggcagaaaaaagtaatgaaaaattttggcaatttttggaaactgtgcaaaaattagcaatttataagcaaacagaatcagattattcttattacaacttaatcctaaagaaagctagacagtttctaaacaatttacacatcaaccttttaaagtttgctttctctataaaggcatactccccanctattcagatatttcagcagattacagctaataagccaccaccaaataattataatacatttataattattcataagaaacacacctataaaattaataagattaaaaagctactgaagagagctacttcaaagactaga

SEQ ID NO: 674291 - DNA, 248 bp, Homo sapiens
gaggaatcgaacaggctgttcagagccatgcagttgctgaaggaggaggccagaaaagcccaccaacctctggctttcagtggaggcattaaagtacagcatgaggacctcatctgcagaaacacctactatccgctgggtagtgcggttgaggccatcaaagccaactgttctgataatgaattcaccaagctttaaccgcagctatcctccagagtcctgacccgtgggtgtacagtaaggacctt

SEQ ID NO: 674292 - DNA, 176 bp, Homo sapiens
ctcaggtgatagataggccattggtgtgaggagtcagttatatgttgggatattttaggtagtgcgtgttgagcttgaacgctttctttaattggtggctgcttttaggccctaacaatgggtgtaaaattttttactctactctacaaggttttttccttagtgtcccaaagagc

SEQ ID NO: 674293 - DNA, 414 bp, Homo sapiens
agaaaacactaattaactgataattagcaggaaggtgaaagatcatacttagatttacatgttgccttcttgttcgaagaatgcgtcagcatccactaattaatccatcagcaaagaatgctgcctccatctctccatcattagccagtcttcaaaagaagcaagaggacctatccagaccacctttgtggagggtgaccagttgtctgtctccggatgcccatgactctcttggttctagcgtctgaaagcccaagagtatcagttacccctgagtcctgaacaatccagtaaagtttatgaagtagtggcacttggaggacgactcccgagtttgagaagatatgtaccttccaaagctgaccactttccaagctcttgctgaacttctgaatagtgtttttctaaaattga

SEQ ID NO: 674294 - DNA, 104 bp, Homo sapiens
aagctgattcatctcagctccagagccgcctctcttctgcagctggaattcagccggctggagcccacatgctgcatccgaaagaagctggtgatcgttgggga

SEQ ID NO: 674295 - DNA, 928 bp, Homo sapiens
  misc_feature (330)..(330): n is a, c, g, or t
taatattatgtaacataaaccacttgctactgatttgggcatattacagactacaattactagttgctttgaatgcattggcactcttaattattgcaaaggagaattgaaaagtagtcttgtggtcctagttaatttagctttgggcaaactaagtggcttttcttctgtcctcttctcaaaaggccttttaagcagcagagactgggctaaatactggaactgaattccacttttctgcctgctcatttgctgccaaagaccacttggggctccttgtctagaatgctctaagacgaaatttggccagacacagggttccttgattgntctgttcaactaatagagaacctacattttgccttcttaatatcgactttcttttgtaccaggtttttctttctttcttttttgccttaggagcttagctcaaagttcagctaacctttgacactactagtgtcattggagtaacagtaatctttgacactactagtgtcatttagggagcttagctcaaagttcagctaacctttgacactgctagtgcgttcaagaaagggtagggacatgaagtacccttaatgcagggtcagcaaacttttcctgtaaaaggccagataggaagtattttggcttatgggctgtttgcttttgctactactactgtgggaatgaccatggtcatggctgtgttccagcacaacttgatttaccaagacaagctgtgggctgtatttggtcctcaggctgtgggcttgtagcccctgctctaatggatcgtgttggcggcaatggcaaagattcccttgttgagaacatgcggatgaataacctattggcggggatgcagaaggaaaaagtctgtaggaataagtggtgtttccctttgaaaattctgggttgttacattgtttggccgggtgtc

SEQ ID NO: 674296 - DNA, 429 bp, Homo sapiens
  misc_feature (190)..(190): n is a, c, g, or t
  misc_feature (215)..(215): n is a, c, g, or t
  misc_feature (294)..(294): n is a, c, g, or t
  misc_feature (309)..(309): n is a, c, g, or t
  misc_feature (311)..(311): n is a, c, g, or t
  misc_feature (318)..(318): n is a, c, g, or t
  misc_feature (416)..(416): n is a, c, g, or t
ggcctgaggaggcctcggttggatgcgaaggagctgcagcatccaggggacaagatgccaactggcaagcagctagctgacattggctataagaccttctctacctccatgatgcttctcactgtgtatggggggtactctgcagtgtccgagtctaccactatttccagtggcgcaggcccagcgccangccgcagaagaacagaagacctcanggatcatgtagaactggggggctttttctcctgagcagagaaagaagcatgctgtggagagactcaactgccaccattncagtcaacagactanancgttganggtttcaaacctgttggagaatgcccaggttctctggtctgccattgacattaaggagcttttgaatcgtaatagcattgaggtgaggacactacagncttttgccggtct

SEQ ID NO: 674297 - DNA, 401 bp, Homo sapiens
gataaatttttttgagatggaatctagctctgtcgcccagcctgaagtgcagtcgatgtgtttcatgcgcgtcgcgtgtgaagagaccaccaaacaggctttgtgtgagcaacatggctgtttatttcacctgggtgcaggcgggctgagtccgaaaagagagtcagcaaagggtggtggcttatcattagtgcttacaggtttcgggatagggggtgaagagccatgtattgcaggcaggggtggatctcacaaagtacattctcaagggtggggagaattacaaagaaccttcttaagggttggggagattacaacgtaccttcttaagggtgggggagattaccaagtacattgaagagttagggtggggccgaaacaaatcacaactggtggaatgt

SEQ ID NO: 674298 - DNA, 947 bp, Homo sapiens
agctggtccaagctacatgcataccaaatgtgctcttatatattattatgcactcgtgtcctttttaattcaaatagcactgttgttagcttgtattatagtagctttgctgtaagaatgtcactagcttagtctttataatcgtactatgacacttcttaagtcatgctttcaacattgtatttaacaaatcatttcgtattaggttgccattaacacaggtgtcactttcctttcgcaaatagggcacacggcgattatccactttcatggaattctgacacatatgaaatgtagcatagtgtcatctaaaggcgagaaaatagttcggacttggtacttgatgacaatactaagtaatggttctctggagaggattatgtttagatgttgcacagatggcgagtggctaccctgttgtacttcaaattatcattcaagtcagcagtgctaagggaaaatttcacacaaatattacaagcataataacatggaaatgtgtgcctttcagtatacaaactcttgcttggtggccatactgggtaatcagaccatttgaattgcctgagagcatgtataatgttctgtggagtgcccacatatggtaaaacaaactcttttaatgtgcaattaatattctagagtaaaatgtctgttatgtgagggggccctttcctgttgggcttacctactatctctaaactgttcacatttctactggttagttaaaatgccttcataatgtcctttttgactgttgcctcttttaaaaggcaacgccatctgctaggtcttacgattacctcagcactgagcctggggtactcactaacatgtgggctgaagagatactagatccggttaggaaacacacaatctaaaagaaatagcctgcataagaaccacacatttactgcttcgggcataaaggggctctacaaaggaca

SEQ ID NO: 674299 - DNA, 625 bp, Homo sapiens
ttacacggctttgtcttgtgaggccccgctgcggagatgatatttatcccttggtctgaccccgtcatggtgggttgagaattgtcaaccgccccgttagtggtcatggggttcccatgtgggcagcaacaatcctttgtggcaacaggcagcccagtctcttcatacgctggcgaggttatgaggtgaaacaaacggcttgcacccacagaagtgtttatatagtgggacatgtacctccttgctcactcggaattaatcatgcccgcacttgttcagaagcgaagaaccacattcagggggtctgggtaaatatgaggccacggtatttccacagtggaggcgttcaaaatcgttcgttttgctgccactattcacatagagcgcccttgcgggtatgagaacgctaccacctttaaaagtcttcttcctccggccccactcaggagaaagatgagtgaacaagcattcaactgatctcataatgctaattcgaagcggtgcacatcctccgtggtaggggttgaaaacccgaagacccgttgtaggaaataaagtttgtttaaaactttccccttttttttgtgggtccaactaaaaaaaaagggaagaaaccacaacaaaa

SEQ ID NO: 674300 - DNA, 352 bp, Homo sapiens
attgagatataattcacataccttacaattcacttattttaagggtacaatttagtggttttagtgtattcacaaagttgtgtaaccgtgaccacagtcaattttagaacatttcgttaccccaaaaagaaaccctgtacccttgagcagtcacctctcattttctcccagtgcccaccccatccccgagcccctggcaaccactaatctatttctctctctgtagatttgcttattctggtcatttcatataaatggaattctacaatattcggtcttcttgggactggcttcccaaatatgatttgctatatggacgtgagaaaatgcttctcatcttgagaactcttat

SEQ ID NO: 674301 - DNA, 277 bp, Homo sapiens
caagccagttaatagactcaaagaacatgatgtgtggttaaattagaagatgggtgacctgtcagatatgggggaaggagggatagggaggattttcgatgacttccattttctggtctagtgagtgattttaattaactgtctttttgtttcagagagacaagagatcggttttggtggggaatctcccttatagtaagtttgtttaaacaaagtacagttaatattactaaataaataacaaggaaataagaactgagtctgtattaactgcttg

SEQ ID NO: 674302 - DNA, 256 bp, Homo sapiens
tctcaacgctctatacttccttcttcctttttctccttctttcctatcttctattctttttcttcttcctcttcttatactttctatctccttctatcagtaccttattcatctttcttctttcctcctcttacttcttcttagtactatcctcttctttccttcttccttctttcttcttcttttactttattctttcttctttccttcttattccatctcttcttctccttcttcttaggtgttgcaggggcat

SEQ ID NO: 674303 - DNA, 515 bp, Homo sapiens
  misc_feature (163)..(164): n is a, c, g, or t
  misc_feature (232)..(232): n is a, c, g, or t
ggctgtattgggggaaggcatcctgctcgtgtaaccttttttttggcacgccgtgggcagaaagggtccctcccccggcctgaaatcccaaaaaaaatttataaaaatggccaggggtccctatccagggcggccaagtgttcaaaaaaaaagccccccctgnntaatacccattttacaaaaacaacaaccccttgggggggtttttcccctatggggaaaggacccaaanctttttccttcttaaaaggtgtgggggtggaaacaaaaaaaggggggtccccccccccaaatcccttttggggcaaaaaaaaaggcggggtttggaaaaaaattacccttagtttttttccacccccccccaagttgggcctgggcgctttccaacccagggggaaaaaaaaaccttttttgggccccttaaaaaaaaccccatttccaaagaaaaaaggggtttaatcccgggaccaatttttccggtggggggggttccaaaaaaagtttttttcccctga

SEQ ID NO: 674304 - DNA, 265 bp, Homo sapiens
catgcaagcggactttgtattgtttattcatcaaagacacttgtgttatagacttcaggtgaactctgtattaatgcagtcgtgtgtgtgcaaacacctggttcctgatcgtagggtgctgagctggcgctatggctcggttgtgaaatacagcgtagtctgcccttacgctcagtgtagaaacccacgtctgttaggtcggtcttcgtccatctgcttttctcttacatacactacgagcagccacaaaactgtcacctcgagg

SEQ ID NO: 674305 - DNA, 736 bp, Homo sapiens
  misc_feature (71)..(71): n is a, c, g, or t
  misc_feature (80)..(80): n is a, c, g, or t
  misc_feature (84)..(84): n is a, c, g, or t
  misc_feature (86)..(86): n is a, c, g, or t
  misc_feature (88)..(88): n is a, c, g, or t
  misc_feature (91)..(95): n is a, c, g, or t
  misc_feature (102)..(103): n is a, c, g, or t
  misc_feature (159)..(159): n is a, c, g, or t
  misc_feature (231)..(231): n is a, c, g, or t
  misc_feature (236)..(236): n is a, c, g, or t
  misc_feature (244)..(244): n is a, c, g, or t
  misc_feature (249)..(249): n is a, c, g, or t
  misc_feature (272)..(272): n is a, c, g, or t
  misc_feature (276)..(276): n is a, c, g, or t
  misc_feature (286)..(286): n is a, c, g, or t
  misc_feature (288)..(288): n is a, c, g, or t
gccaggaggaagctgctgagccatgggcgcctacgcgcgggcttcgggggtctgcgctcgcggctgcctgnactcagcangccntngnccnnnnnccgcgcnntgcggccaccgctcccgcctctctgctttttccttttgttgctggcggctgccggngctcgggccgggggatacgagacatgccccacagtgcagccgaacatgctgaacgtgcacctgctgcctcanacacntgatgacntgggntggctcaaaaccgtggaccagtncttntatgggatantnggcagagatgatactaccaagcgacgcgctggtgctagcaacgtatcactcgctaggacctccggtccatctcttgcctttgcttggcagaatcccagcccgtcgcttcatttacgtggagattgccttcttctcccgttggtggcaccagcagacaaatgccacacaggaagtcgtgcgagaccttgtgcgccaggggcgcctggagtacgccaatggtggctgggtgatgaacgatgaggcagacagccactacggtgccatcgtggaccagatgacacttgggctgcgctttctggcaggacacatttggccaatgatggcgcgaccccgtgtggcctggcacatttgaccccattcggccactctcggagaggcaaggctcgctgtttgcgcaagatgggcttcgaccggctatcttctttgggcgccttgattatcaagcata

SEQ ID NO: 674306 - DNA, 280 bp, Homo sapiens
cccccttaaattggacccttgcctttcttagaattggaaggcccttttgaggaaaatgagggggctttggagagtaaggcagcccagttggacgggttggaggccaggatgggcagggtgtttcaagccttcaatttgcgggtgcagttttacaacccctgccagtgacccctgcccaaggcctaccccggtttctagcattgccccaaatgaatgtttgcttatgcattgaagggtttttggccgggcagggcccccaataaaccggtgtgaaccccca

SEQ ID NO: 674307 - DNA, 856 bp, Homo sapiens
gaggtggccgtgtgtacttggactcgtgcttggtgccccgatgtggatgctgcatctgtgtgggaacttcactcgggctgccaacctgctcacctacctgctggtgtgccagttgctgtggacccctgtggcctggctgctgctcaatggctgatgtatcttgcttgtgctgtgctgcatgcctgtgtgcaatgaattacaatcatgctgccatgtggagctccagctgggaagggaccatgctccagcagaatgatcatgtgcccctgtgtggcctgtcaacctgtcttgacttgcatcacccaatgtgtctctactgtcctggcatgtgagttgcatgaaatgcatccacctgtgggatggtctccacctggtgaaccttacttgtggtcatccttgaagtctgacactaccatgtgcctgtctccttgccttcagtttcaccatgggcggacaatgcaagccacttcaatctcatggtgtggcaactggacctgcctgtggtgcttggttttggggtgcctcttgcatgctgttgcttgctttgcctgaacccccttcccattgcagtttcctgtgctgcccatgtgcaagcgtcttgtgtctcatccacaacagccttcaccacgaattacaacgtgaagccttggcactttggcgggcttctcgtgggtgggcccacgcttggggcccctgacgtttggcacacaccttccattctcggtgggaaccatgaagtggtgaaagctccttgggcagggacaccatccgatcggacaggctgttgctctctggaccctaatttagctgttgtcactcattggagtgacccatgacctgcttagcgcacttttcc

SEQ ID NO: 674308 - DNA, 446 bp, Homo sapiens
  misc_feature (169)..(169): n is a, c, g, or t
  misc_feature (199)..(199): n is a, c, g, or t
  misc_feature (209)..(209): n is a, c, g, or t
  misc_feature (236)..(236): n is a, c, g, or t
cctgcaaatcctgtaagtttgagtttcccttttcagcccctggtggcggcggggtgtaacacctttccgaggaaaatccgctgccgaccctgcctgagggcgggagccttaggaccgggtggaggcggtggggacccaaccgcgggccgggagggctccccggaattanccgccccacccaccccaagggtggagccgntgcaccctgntgtcccttttcaggccttggcaatgangatcccccaaaaagcccgtttgcaccccagacccagggcctcaggcctccaggttttgggatccgggagtccattccggcccagcacccccagcatccccgtgtatggcccccctgcacctccttgttttatccccgaagatccgtccccctggcccctcagtgtccatgttttgaggttaataaatgggcatttggttttttcctttga

SEQ ID NO: 674309 - DNA, 283 bp, Homo sapiens
acccaagtagtgccttacaggttacggcacaaaccagatcataatacataaataagtagagacaaggtatcaccacgttggccaggctggtcttgaacttctggcctcaagtgatctgcccgcctcggcctcccaaagtgctgggattagaggtgtgagccaccgcgcccagccaggatctcattcttttttatggctgaagagtatccattgtgtgtaagtaccacattttctttgcctggtcatctgctgatggacacaggttgggtactacgctttggca

SEQ ID NO: 674310 - DNA, 133 bp, Homo sapiens
cgaggcctgggagcaggtagaggaagaaggactgaggcaggcgctccaggaggaggttgagctggcggaacatgccctccaaagccttgcaccactgacaccaggccatacttgtactggcggaagctatgga

SEQ ID NO: 674311 - DNA, 117 bp, Homo sapiens
gtcgtctgaattatctgcctgcatcatactagtcctcattgccctcccatccctacgcatgctttacataacacgacgagttctagtgatcgccatcgccttagcatcgaaatcaat

SEQ ID NO: 674312 - DNA, 533 bp, Homo sapiens
ccaagctaggagagacccggaccacggagacagagaccccggcatcgcgacccccgaggacctcctctcctcgccctgtggcacccactagtcctgggcactcagtcgcggagagccgccgagccccgcgcgcccagcccgggggagcccaccttcctccccgctggcccgccctgggccactgcctcccccggggcatgcgggatgagccccagccgggaatccggtgaatcgcggacgccctgtgcggaccactgttatccgggtctgtgggcatcgcgggacgtgggcttgggcggcctttgcgtgatccgtctttcgcgctgccttcgctgctcacgcgtgttctgcacttggctgctgcaatatgcccggggcttgtggctggcgcgggcccgcggggacctggggtcccgggatcccgccttagctcggtggaacccgcgggattccctggcgggagtcgtggcgcgctgtgagcagttctcgctgctgctgtgctgcgcggcagactcggtgcgctggcgccgcac

SEQ ID NO: 674313 - DNA, 354 bp, Homo sapiens
gtatccccgcgcacgacgctgcggccgtggtggctgcggccgttgcaggcctgatgagtggtcgggagctgtgtgtgtctccctgggtcggggggtggcctcctgtctcccgggcggtcaggccaggctccacttctggcaggactacagcctctccctccttgggcccctctccagcccgcaggctgcaggtcgaggcagctgtagcctccaggccggtgagttctggagcacttgcgaatagccgtcaggagctgcgtgtccttccaagtggagcgggtctgctgtgacgaggtgatatcttgcaacgcacctgcacctgagccggagaagttgtcagagtcatcccccgag

SEQ ID NO: 674314 - DNA, 191 bp, Homo sapiens
  misc_feature (140)..(140): n is a, c, g, or t
  misc_feature (163)..(163): n is a, c, g, or t
agttttctttttttttgtgtattatgcgcttgtgtttaattttagaattgtctattactgtgggtgggctgttgatatttcatcaagataagcatatctttcctgaggttccagggtagactagaggaaagagccacaanaacaaaacacaacaaaaccaaancacagaatcatctttaacccaacttttt

SEQ ID NO: 674315 - DNA, 160 bp, Homo sapiens
ttattttctttaacaattacttagtaaaattattattactcttgttcctaatttgattgatttataaaatttatacttattattctttattaaccgctaaaaaacattttaaaacatgtcattccaaaaatagccaggtgtcaaaaacataatttctaat

SEQ ID NO: 674316 - DNA, 578 bp, Homo sapiens
taggatcccaaacagtaactggtagctttcatgtggtgttaagcgcaggcacacaaagggcaagaatcgtggatctgggcagcctcggcctagatttcagaggacatatggaaaagtctgttggtccaggcagaagcctgttacaggggtggagcccttacaaagaacctctactagggcagtatagaggggaaatgtggggtgggaggctccaacagggtcaccgctggggcactgcctaagggaactatacgaagtgggccactgccctccaggcctaaggatgatagatctaccagcagcttgtattctgcaccgggaaaagccacaggcactcaactgcagcccatgagcgcagccttggattctttacccggcaaagccataggggcaggactgctcaaggccgggggagcccaccccttgtaccagtgtagcctggatgtggaacatgatgtcgaagattattttggaactttaagatttagggacttccctactgggttttggagctgtgtggatcctgtagaccctttcttttggccaatttccccctttttgggatgggaacatttacc

SEQ ID NO: 674317 - DNA, 227 bp, Homo sapiens
  misc_feature (78)..(78): n is a, c, g, or t
  misc_feature (220)..(220): n is a, c, g, or t
gttggaggtgtgagagctggactgacttctgcttacttctttgtgtcatctgggcttcatttaacagtttatcactgntggaactcagggtttaagcttttcttgggagatctttcctttatcactgtctggagggcagattcagatgcactggcagccctgtgggctgcgtcctcggccgctttgatggcattgaggatgtctctcgtaggcggtggcnggcatcc

SEQ ID NO: 674318 - DNA, 548 bp, Homo sapiens
  misc_feature (12)..(12): n is a, c, g, or t
  misc_feature (61)..(61): n is a, c, g, or t
  misc_feature (134)..(134): n is a, c, g, or t
  misc_feature (294)..(294): n is a, c, g, or t
  misc_feature (300)..(300): n is a, c, g, or t
  misc_feature (302)..(302): n is a, c, g, or t
gaaccatattangggattttgatatatcgcagggatataattatggactgggggttattangatttggtgcatgttgttgtcaatataataatatggtttctaatttcctccaatggacaagtgaagttctccnagacttcattttcctgtcttgtcttcacagagtctcatggtttgggtcctaaagtgtcctctcctattcttccatgttccctgattttaggcaattagctgctgctgctacataataataataataataataataataataataataataataatattcntccctntncgaattcggcacgagtctggctcctagcaccatgaagatcaagatcattgctcctcctgagcgcaagtactctgtgtggatcggtggctccatcctggcctcactgtccaccttccagcagatgtggatcagcaagcaggagtacgatgagtccggcccctccatcgtgcaccgcaagtgcttctaggcggactgttactgagctgcgttttacaccctttctttgacaaaacctaacttgcgcag

SEQ ID NO: 674319 - DNA, 947 bp, Homo sapiens
gatgtggtctcctgactcccagttcgctgtttctagtgttagatgactgtctagtggtgcgtctgcgacagcgttggggcgaaactactcgtttcggaggcgatgttgtccctctcccccacgagataactctgtcgcgggccaatattgctggggtgcggcccacttgtcgtctccccctacaaaatgggcccccacaggtgtagtatgtcgcccctcgcttgccgcccaagctcttcgcggctggacacaatttggggcccaccctcgtgggaaaaccagttgtgcgcggaaccccacataagtctgtgcccgggttcgcatcatcctttatttgccgtacttacatggctgtttattttggcggctcaaacaggatttgaatcatcgtgcgtcggcgtatagccccccccgcttcagttgggcggccgcatccccccccaacggtgccacaaatgcgggcgcaggcaaacatctgcgggtccccccaataggagtgtgctgttaaacagccggtctccgcagaattgtgcggtccccctgttggaccacggaagatccctctccccattgcgtaacacgcccccccccctgttgtcttcatgcgagaacatgggcggcatccgtcgtctccacaatccccaacccacgggggggtgcaatacccaaccgtcttctgctaagattacagctgaagccgcaacaccgttgtatggttgttccgccgtaaacgtgggtcaattctttcggcccatgctgttggaacagacggtccactttgcgccgccccccgttcccgccctgtggtgccccgcccactagtagagacaattactagttagaacgatcttggcgtcgcccttgtggacgggcggcaggcacccgcccgcgggcaccctcccccacccggggcccaccgaaaaaaagccccccccccaacataacaa

SEQ ID NO: 674320 - DNA, 460 bp, Homo sapiens
cctgacgcccagttcatcactattggcaacgagcggttccgatgccctgaggctctttcccagccttccttcttgggtatggaatcctgtggcatccatgagactacattcaattccatcatgaagtgtgacgttgacatccgtaaagacctctatgccaacacagtgctgtctggtgtaccaccatgtacccaggcattgctgacaggatgcagaaggagattactgctctggctcctagcaccatgaagatcaagatcattgctcctcctgagcgcaagtactctgtgtggatcggtggctccatcctggcctcactgtccaccttccagcagatgtggatcagcaagcaggagtacgatgagtccggcccctccatcgtgcaccgcaagtgcttctaggcggactgttactgagctgcgttttacaccctttctttgacaaaacctaacttgcgcag

SEQ ID NO: 674321 - DNA, 88 bp, Homo sapiens
ggatttgctggtgcagtacaactaggcttaatagggaaaacttttcttaatgcaagtgtatacatacacaaacatgtttttaaaaaaa

SEQ ID NO: 674322 - DNA, 139 bp, Homo sapiens
atacgactccgatatgcgacacctcaatgcagaccaagcctgagtttgatcaagtgctccatggcacggatgccagcataaagaacaagctgcctggtcctcatcacttatcctatggagaccatcgttgcctaatagc

SEQ ID NO: 674323 - DNA, 131 bp, Homo sapiens
ggtgctcttgtggatccccgcgcgtaccacgttgcggtacgacgtcgtgcggctgtgctggtgatgtcctgtaggcctgctccttcaggttctggttgggggcacgtggaagcgccggatgcctcctcgct

SEQ ID NO: 674324 - DNA, 114 bp, Homo sapiens
ggggggcaccacctacgtagtagtcttgtgtacgggctgtagacgcgcaccggggtggagtttgcctccagcagtgctgacattccatgctagggcatcatccttggtctccga

SEQ ID NO: 674325 - DNA, 370 bp, Homo sapiens
gattttttttgacaataataaagtaggtgcattaaaggagaggacacactagtggctcagaagagcaaatgcaagaaatagctaaaaaatgatccaggaattaatctagcaaaaatatgtaagatctttatgaaaaaattaatctttattaaaggacataaaagaagaactataagagattgatatactcatggttgggaggactttattatcaactattctcaacctcatcaaattaatttggaaaaacaatacaagttcaaatgaagtcacttcatgatttttttcacacagctcccctcccctcttcccgaataacaccatttatttgtgttgatcaatgatggaataataaaagatttggtaaacc

SEQ ID NO: 674326 - DNA, 1026 bp, Homo sapiens
  misc_feature (915)..(915): n is a, c, g, or t
  misc_feature (917)..(918): n is a, c, g, or t
  misc_feature (924)..(924): n is a, c, g, or t
actccccttgcgcccacaccctttactccccagcccagagagacgctgcttttaccaggaaagactattgaaagatgttttattttatttttctctgacctttccatccttgaaaaaatggggaaaaaagaaaaaaaaagacaaaatcgaccataaaagaccaaaaaaaaaaaaaaaattcagaaaacccccacctaatccacagaaagtaatgtctttcccctccccttggaattttggtttggttttgggaaataatatttttttaaaagttggccttattggtggagcgggaatctgaaatacccaaatgcctgttttcctcggtgggagtcaacccgaagagctcccaccttctctggatgtgcctggggctgggactgggctagaatctttctctgggactgttggcatgtacggtgcctccatcctggaggcaagagagttggggagtgggctcgaaatcagagccgtgcccaagatatccctgctggttgcatcgtttggaagctggacgtcctggtgtctggtacactggcttgccactggttggtgtcctcgctctggcttggctggtggcctcacgccaggccccggtccttgccgatgacaccctttcatcctaccctgggaaccccaaaggccaagtgggttcaaactggtgggagaacagagtgggcctgcatctgggaacacacttggtcctcagtttaccatctcctcaaccccagagtggaacggtgaacacctgcagctgaggctgggaaacgtttctggtgttggccctgaaaaatcttggagacctcagggaggctctgtctctcttaaaaggtggcgaaaagatgccattctctccctaggtctggtggagtctcccattttggattacccttctggaagccatctatttctctnannctccanttgacccgctgggaacacggggatggcgggcgggcattgggggctggggggaatcttggcgattggtgagccttgtggggcaaggttttgtggccttggttc

SEQ ID NO: 674327 - DNA, 338 bp, Homo sapiens
  misc_feature (328)..(328): n is a, c, g, or t
ctagaggccccatctcagaaataaaaaaagaaatgatcttgggtttcggtgagaggacctgggtggaggcctcggcccggagggaggttgcagggcaggaaggttccagtggacaactggatttggggctgaagtcttaggggcacttggctatagagaagggcccaggcactgagggaggccaccgggagtgatgggcatagtgctgggaggtgtttgtcggggatctggggaggctgaccgtgcctgagcggtggggctggcaggcatcaggaaaagaggtcggtgctgagggggtttgtgggtgaggcctctagcggcacccggngtaccgagct

SEQ ID NO: 674328 - DNA, 196 bp, Homo sapiens
  misc_feature (133)..(133): n is a, c, g, or t
  misc_feature (145)..(145): n is a, c, g, or t
  misc_feature (166)..(166): n is a, c, g, or t
actccccttgcgcccacaccctttactccccagcccagagagacgctgcttttaccaggaaagactattgaaagatgttttattttatttttctctgacctttccatccttgaaaaaagggtggctccctgangaatgttgacanactcgcccatatttgaccaantttttttttccgaatctgaatacccccacc

SEQ ID NO: 674329 - DNA, 193 bp, Homo sapiens
ttgctgatgtctggtttaacttgacccgtggagttctgaggcatttatcgtagtgggaacaagggtgcttttccttcctccccttcttttcctatctcttctttttttgtcttggttttcttctccctctctcttgtcccttctctttccttctttccttttcttgtctcatgccaaaataagagcactccct

SEQ ID NO: 674330 - DNA, 351 bp, Homo sapiens
cggcacgaggtggaaacaaatgtccctcggtgaggtgctggattacttaagtttaataaatccaaactgtggagcagtgaaaaacgatgatggagaagttatgagttcggaacgactgctctgatgcgtagtgaggtgttggggggcagggtgggaacaggttgcatctacattagcctagttttcaaaaaaacaaaaaacaaatagtgtgttttcccaggcaacggtgtaagaaaattcacaccgccatggtcagcagggcgtctctgtgcagtgatgttataggtggcctagtttcattttacttttttgttgtgctaattttgtatgctaggtatgtatttttcagga

SEQ ID NO: 674331 - DNA, 150 bp, Homo sapiens
tacggcggccatgctgaggtgaccagccaaactcggcgcaggatgaacgtagctcaccaggagtagcctaggattaatgataatacggccctggaagactgctatgtctctgcagtctaaggtgacgaccacacagggctcatggccaag

SEQ ID NO: 674332 - DNA, 238 bp, Homo sapiens
  misc_feature (20)..(20): n is a, c, g, or t
  misc_feature (22)..(22): n is a, c, g, or t
  misc_feature (35)..(35): n is a, c, g, or t
  misc_feature (42)..(42): n is a, c, g, or t
  misc_feature (45)..(45): n is a, c, g, or t
  misc_feature (50)..(50): n is a, c, g, or t
  misc_feature (65)..(66): n is a, c, g, or t
  misc_feature (84)..(84): n is a, c, g, or t
  misc_feature (124)..(124): n is a, c, g, or t
  misc_feature (136)..(136): n is a, c, g, or t
  misc_feature (138)..(138): n is a, c, g, or t
  misc_feature (146)..(146): n is a, c, g, or t
  misc_feature (149)..(149): n is a, c, g, or t
  misc_feature (159)..(159): n is a, c, g, or t
  misc_feature (169)..(169): n is a, c, g, or t
ttgtctagactgggtttaantnccccctaaaaaanagatatnggngaatngggagaagtctcttnngtttggaaaaaaaaaaanggaatcttcagcctagatcactttcttatccggactgggntattaaatatangncacattcnggngtttattggngcgagactgntggcgcaaacggtacgctgagctgccccattacggcgggatggacggagtagggggttccgcttccatg

SEQ ID NO: 674333 - DNA, 725 bp, Homo sapiens
tgctgtttcacgtgaatcagcaaagcttgcatgtttctactacagactgtcctcgatcttcccagccttgcagtttcacggcatctaagcacgattggttagcttctgacgatctaatccttacagccatgctgtgtgcatctcgttacttgtcgacgtccagacactcctgatctgcagcatcagcctcatgagctgagtcagttctcgttggcgatgctgtgtataacatgatagtcagtctcagtcgtgtcaacgctgtgtacatgggcattacctctcagttgcagcaagtcgcagatacgtccatcatgtgttaaacgcgacgatctttctatcagctttccctacacctccatctaactgcttatgaccaagtgtcatcatagttggttattatcctacatctatgtcctgctgtaattgagccaggttcacatttagatcccttaataacctgtcgcagaatcactacgtatgaggctcttccaagtcttgatgtgtgaagtctacatgggtttagtccgtaagcagccccctcgcagggccccagtgtcttcagttcccctttggagcagctcatccatctctcaggtaggggtccttggtcaggcagcttcctctgtggcgctcaggtgggtcctgagtgggcacgctcctttagaagtcaggcaggccagtcagagggaagacacaggctgagctcgcgacctcctctcggagag

SEQ ID NO: 674334 - DNA, 444 bp, Homo sapiens
cagtgtaggaaaagcatgaagataccaggggaaaaaacgtgtgctgcaaacgcccgtttcactgccctccaaaaaaactgccaaaggagagtggtgaaaaaccaaaggtcaaagacacactcagggtggcttcataacttcccaatgtccccatctcctggttagaaccaatgtttatgtattaactgaggacacacacacacccagagaaagtccaaaaaaaaaaaaaaaaaaaccacatagcaatgcccagaaaactaccccaaacatgttcctttcaaagctgccaactgaggagccctccctgatcagtcggaggcagatcagacctgtttcctttaattgcaacttccacccttctagaatttctactcctctgcaggtccaggccacagagacattaatccctattcaagtgaaacttcaaggtttttccttctatta

SEQ ID NO: 674335 - DNA, 527 bp, Homo sapiens
gcacgagccgatattatcaagaaatcattggaaagtttgcaaaaacgttggctccagtttttctttttcttttttgacgcttgagaagtagtggagagtgaagatgacgattgctctgttagttggttgaagttgggaccatattctccactagacttgccacatgatactagttgaggagagttgtccttcggattaatcgaataaatttcccacttgtgttcagtaattagagcaaatttggtgcaatcgggagaaatgctttggttgatggataatttggatttcgtccctaggaatttggggtgtgtgttgaactgaaatttttttctgtacatggggaaacagttggcaaaaaagtactccttttcttcgtccagatcatgtgcactatttgtttggtagtttgctgtggatggtattgtaacgtccgtagacatcaaagaggagttgttatctatcggcacagttcttgtgttcgaggcattatccaggattttccagttcgcgtggtcgtcatagttggg

SEQ ID NO: 674336 - DNA, 99 bp, Homo sapiens
atctatgtcctgggaaatgggtactgaaggagacgagaatttcatgttggacgaaggcttcaccactgttatggacctgctcctggagtatgaagtcat

SEQ ID NO: 674337 - DNA, 346 bp, Homo sapiens
  misc_feature (10)..(10): n is a, c, g, or t
  misc_feature (314)..(314): n is a, c, g, or t
ggaccttcgntgtgggctcgagaaggagaagatcctgcggaaggatatgtttttgctgactccaaagtaagtgacagcaaacttctaaagtgggctgtgaggtagggaggggacacaagcgttttgaggctcgctgtgtgccagggagtgtatcattagctcactcagttcccagaacaacccatttcacacctgggaaaggtgaacttagagaagttgaggaccacgttccaggttggcctggatttgagccatcactgtctcaggagtagggaggcttcccactttgcccagctgcctcccagcctcgagcnacatccctgagtgtttcacatctacacagtca

SEQ ID NO: 674338 - DNA, 322 bp, Homo sapiens
  misc_feature (269)..(269): n is a, c, g, or t
gcagtcttgtcctcctgggctcaagtgatcctaccacctcagcctcctgagtagctgggactgcaggcatgtaccaccatgcccagctaatttttaaaatttttttgtggagatggggtctcactattttgcccaggctagtcatgaattcctaggctcaagcaatcctcctgcctcggcctcccaaactgctgggtttataggcatgagccaccgcacctgggcccattctaaatatttcttatgcttgggacagatttgtaattatncaagggatcgtctaggataatgctggttggaacaaccttctgtctctttcagt

SEQ ID NO: 674339 - DNA, 287 bp, Homo sapiens
cgtgtttatctcaagagtctagtatcccaatgtaaaacacaactcacaacagtcctcatcctaattacctccaaacactgatatgagaaatggataagtcacagccataaaacagaatgaaatcatgtcctttgcagcaacatggatagagctggaagccataatcctaagcgaattaatgcaggaacagaaaagcaaatgtggccgggactggatgactcatgcctgtactctcagcactttgggatcacaggcatacgggggatcctctacgacgtcgaccctgc

SEQ ID NO: 674340 - DNA, 216 bp, Homo sapiens
agtgatccccaactaggaagactctgaggacgcaggcaatctgttgaggctcaggtatatcttatttgcttagtagatcttgctgtctttcctttcaaagagcacacagtcacataaggcatagtattcatctgtcttgtttacctctctaatttagaaatctgttgtccgtataactggaccaattcatcacaactatcatttgccctcaatgaa

SEQ ID NO: 674341 - DNA, 622 bp, Homo sapiens
tccccacagccccgagcttttggcaagcccttggggagaagcagttgggagctggttgggttgggtaattctgggccaacagctgacgcaaggggttttgcaggcttatgttgtcctggccagtttctggggctaaagaaagagagaacctcttcggggatggttgaaagacacttgggcgccaacgccaaacagtcccgggactgtcttggatgccttcgagagtggtgcgacgccttcttgtgatgctctctgggaagctctcaatccccagccctcatccagagtttgcagccgagtagggactcctcccctgtcctctacgaaggaaaagattgctattgttggactcccctccgaaggactccggggtcttttgggaggtttctccccccccccattccaacttttttttggattctcgctcttgcaagcctcccccgtcctttttcccctgccaggtccctggggacagttaccagctttcctgaatggatttccggccccatccctccccccccccctccctttccatccgtttgaaaccctttggccccttttttggcagaaccgtccctgtccctgtaaagttttttagatccataaagtccgtggctttcca

SEQ ID NO: 674342 - DNA, 336 bp, Homo sapiens
gctcgacggtcaacctgtgcaatacggcggcggccgctggagcatccggggctggtgttcaaatgtggcgatgtgcgcagtggcgcgaggaactggaagtgatgatcgccttgcatgcctgcgatatcgccaccgactatgcgatccacaccggtatccgctccggcgcggcgatcatcatgtgctcgccgtgctgccacaagcagatccgcttgcagatccagagtccggtgttgctcaagccgatgctgcaatatggcctgcacctggggcagcaggcggagatggtcaccgacagcttgcgcgcactgttcctggaagcctgcgcatacggtc

SEQ ID NO: 674343 - DNA, 109 bp, Homo sapiens
tgggtggatgtgcgggcttgatatacgatgtgggacggctgcagcagagactccctcaggtaccacatgatgactgcgagggaagggagtgaccatgttcagagagggc

SEQ ID NO: 674344 - DNA, 461 bp, Homo sapiens
  misc_feature (1)..(1): n is a, c, g, or t
  misc_feature (182)..(182): n is a, c, g, or t
  misc_feature (195)..(195): n is a, c, g, or t
  misc_feature (207)..(208): n is a, c, g, or t
  misc_feature (219)..(219): n is a, c, g, or t
  misc_feature (232)..(232): n is a, c, g, or t
  misc_feature (314)..(314): n is a, c, g, or t
  misc_feature (458)..(458): n is a, c, g, or t
nagccagtggcatcgtccgcattgccctgtgcccacaagcaacagtccacagcccttggtggcttctgttccttgtcccctcggcttctcttcgcagccatcaggactaggtttgtgcaggaaggtgatgcccactggaactctcctcacacctggcagcttcatggatgttgtatctgaantactagggaccanaggctgcaaaanntttctggttcntaaggtgtccttnaggaagaaacagaagcacaaagactcaagccaagaagttctctttaattccctttgatcctcccccaaggtgagggcttagncagctgtagaaccccaggaaagaacggaaatcccaagggcaaatcctggttttaagaagaacccccccaacttccaaaattttaattcccttttttcctttttccttttcccccttaaaggaatggttttttccaagggggggnccc

SEQ ID NO: 674345 - DNA, 403 bp, Homo sapiens
tagaatatgtccatcatacttactgggtggagcatcccaaatcccaaaatccaaaatccagaagactccggcaaaagctaaaaactaaaaattccgggcaggtggggggggttcataggggtaatcccagcacttggggaggctgaggggagcagatcacttgatgttagcagttggagaccagccgggccaacagggtgaaaccccgtctctactaaaaatacaaaagatagcggggtgtaggggcatgtgcctgtagtctcagctactggggaggctgaggcaggagaatcacttgaacccaggatgtgggactgacccaggatgttggagccaggatgtgggactgacccaggatgtgggactgacccagggtgttggactgacccaggatgttggacgg

SEQ ID NO: 674346 - DNA, 409 bp, Homo sapiens
cgtcgacgtgatatgtgaagcatcagttccaggtagtaggctatgtgaagcatcagttccaggtagtaggctatgtgaagcatcagttccaggtagtaggctatgtgatatgtgaagcatcagttccaggtagtagggtatgtgatatgtgaagcatcagttccaggtagtagggtatgtgatatgtgaagcatcagttccaggtagtagggtatgtgatatgtgaagcatcagttccaggtagtagggtatgtgatatgtgaagcatcagttccaggtagtagggtatgtgatatgtgaagcatcagttccgggtagtagggtatgtgatatgtgaagcatcagttccaggtagtagggtatgtgatatgtgaagcatcagttccaggtagtagtgtatgtggtcgac

SEQ ID NO: 674347 - DNA, 119 bp, Homo sapiens
cgtctaccttctgcctggcgtatcatcaactgatgagcaggaggaagagcaagcaggccctgagggactataagaaggttcagatccagctggagaatctggagagcagaaggtcgacg

SEQ ID NO: 674348 - DNA, 944 bp, Homo sapiens
aaggtgcaggcagaaattggagatgttagtattatagtcaaataatgctggtgtcagtctataccatccagcattttgtttgctacacaagcatcctccagattgcaaacagcacttttgcaagttcaatgtacttgcacatttctggactacaaaggccatttcttcctgcaatgcacgaagcaataacccatggccatattgtcactgtggcttcggcagctggacatgtcatcggtcccctatcttactggcttactgttcaagcaagttagctagctgttggatttcataaaaactttgacagatgaactggcatgccttacaaatccctggagtcaaaacaacatgtctgtgtcctacatttcgtaacacactggcttcatcaaaaatccaagtacaagtttcgggacccactctggaacctgaggcacgtggtaaacaggctgatgccatggcgattctgacctgagccagcacagctgcattattactaccatcgttctaatagccttaattaaacaacattgggaacaggatccattcctgagcgtatcctggcagatataacaacggaacaaatcagtgtaacagctgtcgaacggccagatcaatgggaaatataaccactgtcacagccgcaacatcagccacctaaagtgtcacctgaacacctgcatataacccaagggatcaaggctcgcatgagtcaatccctacaattagatggccccaagaaaccttttaccaacgggttataggaacacattcaccaggaatttgacgaccctatagttatatggccccaatatacacactaaccacaactcacatatatgtgatggcgtctatgaggcacatcccctcaagttacactacccaagctggatctcatatgaggccaaacacgccggcattcccactcttggtccttaaccccagca

SEQ ID NO: 674349 - DNA, 490 bp, Homo sapiens
gaaggtttctttccttctctttcagcacttgcttggcttttctcccaaaggttcaaatccagacattgaacatacagaaagaggaactaaatacggacctgtaccacatgaaacgttctctcagatactttgaaggtgggaatctgggcaccctgtcatccttcaacctggcactttgacaggtcttcagggggagtcctttgggccccatctcaactctctcattacagaaaagtccaaggatctggctgtccgcctgcaacattcattgcagcgtaaaggagagttagagagtgttctctctaatgtcatggccacacagaagaggaggcaaaccaggtgagtgcaaccacctgtcccatcccctgggagcctggctttgcagatggaggagtgagcctaaaggccctctgcaggatggagtgtctgcccagaggcagcatggccatttcttgctacttttttgtatggtttttagtggcagcctggg

SEQ ID NO: 674350 - DNA, 1420 bp, Homo sapiens
  misc_feature (525)..(525): n is a, c, g, or t
tgggctctaaagggggtaaagggggtgctatagggtaaatacgggccctatttcaaagattttaaggggaattaattctaggacgagtgggcattgaaacgtggggttggcctccacagattttcagagcattgtgaccgtagttataccccgcggtcggtgtagcgggtgaaaggtggttgggttttagagcgtctcggggaaattgtgcattcgtggttttataagcccttaagtggtggggacagccctcagtaagtgtgcaagaaggttctgtgggtgagtggtaattatatatacgaaagtggggggctttaaactgggggagaatacataacctcgcagtggtgtccacacgtctcagagggagtctcgccgaggtctcgccgcgggggtctctatgaggaaatctagagtggggcggacaaaagttatgtgtgtaggaagtttgaaaagaaatattagactcgcggcgcggaaagactgcggggtgtatacctcgagtagggtgtctcagtatacccnatgtggggggtggccccaaatgtgtgattttgtgaagtgggatagagggggcagggaactccggtgtgaaaccctctcgctgcggggtctagtgtgtacaggggggagtggcgataagggaagtgggcaagagggcgcgaaagtgaggggaccataggaatgtaagtggcggcgggccagagaatatagttctcagacagcggggtttcacataaatcttcgcgtggaaggcgttcgtgggagaaatgtgtcgaggataatagaaggtaaagaaatagggggggggaggaagggtgtttttaggggacacagacgggcggcaataaccacgcggaccttcagggagaaacgaccaaggacatcacacgcggcacacacacgtggatctcacactcaggacagggggagcgggtgagactcccactctggcaacaccggcggggggcgggagaacacgccggtggggcggtcccgaccagaaatatcccccgcgcgaggatatatccgcgggaaccggggtaccccaagaccgcgctatttgtgggtacacaacaccactttggcttgccctaaatatagggggtggtaccccccataaaaaatttagaggcggaccttaaagtggcggccgaaatacacggcgtgggttcccccgtcgggtgtgtgaacaccacgcgggcggtagactacccgcggcgcccccccgggggcgcgcccataagagggggctaaaaaagattccagggagaaggggctgtagaacagctcggcggcccccgggcggggcctccccatactgcggggcggcgtcaaacacacacacgaggcgggggaggggggggctaccacgagcgggaaaccatacaggaggggcacacaaaaaacaagcccggta

SEQ ID NO: 674351 - DNA, 338 bp, Homo sapiens
tgtaggtaaagaagagagatcagactgtcctgtgttatgtagaagggaagacataaagactccattgaaaaagacctgtagttaaacaattgcttgctgagatgttgttcatttgttgccttgcctcatccactttgccccagcccctttgacccaacttggagctcagaaaacctgtgttgtataaaatcgaggtttaggggatctagggctgtgcaggatgtgctttgttaaccaaatgtttacaagcagtatacttggtaaaagtcattgccattctctagtttcaataaaccaggggcactatgcaccgtggaaagccaaaaaaaagtcgacgc

SEQ ID NO: 674352 - DNA, 478 bp, Homo sapiens
  misc_feature (419)..(419): n is a, c, g, or t
gcgttttttgtgatgaaacctgacgtgggttgtcatgcttccaatctccgtctctgaatgattcagctgtagaactgagctgacaacagacagcttaacaggaaaggaaaaatatatgacacaggcataaacatgggaaccagctgagcaatgacactgctagaaggtccggatggctgatgcttagagagcaccctctactgaggggagagggatactagactggagatgtcgtccatcatagaggggcagcaaatgatttttcggggaaatgaacgaggccaaggaacaaacaattggcctgagacaaagttcctgtgaggtcactagggacgaggtgacaaactgccggaaggtgaagggcagaactgcactgcgtttcatgatgcagagaaagccccagagactcttagaactgncctccaagagaatcactgaaaagtgtgtctgggccgggtaatattgaatgacatcattc

SEQ ID NO: 674353 - DNA, 838 bp, Homo sapiens
ccgcggccaggggcccccctcgcccgccccgtcaggttgttatgctgaatcggcaccgcttacctgtcttcaagactggtcaggtactacaatgccggcttgccttggattaccgttctaaattgtttgggtcgggtccggcccttgcacaagcctcctgcgacacactccctggcaattggccatgctctcaccgtgtaccaccttgtggtttatgcttaaatggaccgtgttcctgctggtaaaaggaggaaaactgagaggtttcctcagaccgcgggcccctccttttggagacggcacggaggcctgaggcgatccgtagctcagacgtcccggagagacgcctggcccgagagtccaagtgctggagattttcccagaagccgcctgtgtctctcctctgtcctcccccgaggcaccccctgccctcacggggggttgaaatccctctccccccggaggccctgctgctttgcttggtggtagggcaggagagccacaccacaccagtcatggtctaaaacacccacatagcacatttgctcttaggtcaccatgtaaaattttagatttcttaaaaccggtgggccaatccattttgaatacatgttctgtgaccctgactgctagttctgaggaccactggtggctgtgctatgtgtggcccatcctcccaagtcccgctccccgtaactgctctgtttagacacggacagacgctcaccccccggggaagtcctcaccctgtccccgcccggtttcccttcgcaaatgtgtataactcatgataggtcagaaagtgtatcccctaccataaagttctggcctttaacta

SEQ ID NO: 674354 - DNA, 1174 bp, Homo sapiens
  misc_feature (1174)..(1174): n is a, c, g, or t
gggccggtgagggcccaggctggtcagggtcccgttttgcacacgcaggggtctccctttctgctggagtcccctgtgtcctcagctcattcccaagaagggtttgctggtccctccttttctcctcccgtcccatgaggtccacctggagccagaccccttgtgctctgacttctgctggcagatgcagcatggtgcggcacctggggccttgggtcgcgagtgagccgggtgtctcctgcgcccgtatgcgcaatggcctcccgtacggcccctgggagttcaaccccagtgtctcgtggaatcttgagtgccgtcaatactccggggcgagaatgtcgcggctcaatgagtctcagccatagcgacgctaacctccagatgcacgcatcgacgggaccaaggggtatagcataggccgaactatactgttgcccaagcattgcttggccccggttgggtgtgtcgaccgaagtgcccccactcgttcaaatgttcaccttgtgctcaggacctcaggataagggccctcgggtcatcagaggggccccgatggcaaagaagcatccccttattcaatcgcgaaggaatatcacgggaaaatttcagcgcaatggtaaacaacattctcgttatccggggacgatcacacctttgtaaaaggtgcgctaaggaccgtaggagtagtatcgcacagtcatgacaacgagagagacctgtggggaaggactagaaaaggtgaggacgacgaggatggagaggtgcgaccagacatggcgttgtaaaactagttgacttcaccaaaagaatcctttgacacaccgcttatgcctccccatttatagagggccgcgtggtgcattccggaacgaacatagaggggtagtttcgggcatctacagaattgggcgaaaaggcaatattgtgaaccataaggcaccctgtcgcaaattttatgccgttgctgaaatcaattcggagcaagcaacgcgaaaaaattcccttggcccaaattcagttacctgtcgatatcccgaaggagaaagggggtgtggatcacgagacgaaagaatgatactgcaccacaaaggtcggtatcgagggatacttaggctggacatttgggacaaacgccccaaagaatcgtattggtaatcactgttaaaacccccan

SEQ ID NO: 674355 - DNA, 502 bp, Homo sapiens
aagaccaggtaaggaagtagacgtggacagatctcaactacactagcaagctccgcctacctgggttcacaccatatctacctgcctcagcctcctgagtaagctgggactacaggcgcctgcaacaacgcccggctaaatatattgtataataagtagagacggggtttcactagtggtctcaatctcctgacttcatggtccgcctgcctcagtctcccaaagtactgggattacaggtgtagagccaccgagcccagacccgtatataagattttttatttgaaaaattgccaattctaaaaagtgtattactaaattcagatttatgaatttctattatctataaagctatctataaccttactgcaaattggtaaagcagactatagtagaaccaaaattataaacatttacttttgctccctaacagactgccacagaactgggcaactatacatgagtatacatatgtaaatggtaattcagttatttgcaccag

SEQ ID NO: 674356 - DNA, 694 bp, Homo sapiens
gggcatggtgacgggcgcctgtagtcccagctactcgggaggctgaggcaggagaatggcttgaacctgggaggcggagcttgcagtgagccgagatcacagcactacactcagcctgggtgacagagctagactctgtctcaaaaaaaaaaaaaaaagatcagcccaggcaagtgtagttgagaccccggttctctacaaaaaattacagaagttagtcacatgtggtgggtgttagtgccgtggtggttcccagcttacagtgggagacttgaagcggagcattggcctgtgagcccgtggaggttcagggctgcagtgaaccatgtgatcaagccacgtgcacttccagcctggggttgacaacgagggaacgaccttggttcccgcccaaaagagaaaaacatttagtttcagtcaacacccacgttcgttcccttaccatggtgtacgctgggggacccttacacacggtgaaattggcctctgagccagttggcctcatgtaaaactgagattgaccatatttaagtaggggccatcgaaataactagtggtgggttacctgggccggtttaagtaattggggtaagaacgggtttacccgacccaaaagaagtgggcctagggagagccttcataggaagaaagggattgagtctctgggttcaaaggtgaccaaatgagggaataa

SEQ ID NO: 674357 - DNA, 133 bp, Homo sapiens
tgagatgacctctgaaaagtccacaaattgagcttcatacattattgtgtccaaaagggattactagatcgtggaattcgcttctcttaatgtttaggtgaggaacgatgaacagggagcagagggtctggga

SEQ ID NO: 674358 - DNA, 865 bp, Homo sapiens
aaaaactaataaaggggcccataaaagggtacgaggctgggtttgaatcggagagggctgcgtcctgctgcagcaaccggagctggagtccggatcccgaactgcaccctcgccatggactcgtgccctcagcgatcctgcataacggcagtgccggaggcaggcgtgcccaccaacagcactacgcggcctgccttccactgccccgagggcatcgctgctgtgcctacggacaggcctccatgcgtcataggctgcatgccttgcccagttcccattattcccccccaactacaggatttttttatccggggaggacctgccctgctgctccggatactggctttgctgccctgcgggccaaaggaagttgcttcatggacaattgccttgaaaccaatccagccaaggccgggggatgccggcgccgtgcattcccccatgtcgagttccggccaaggcctttgcacaccacgtcttttggagtggcttcttaacgcgtcgttttttgtccaacaaaattaagtttcagttcccagtggggaaggttcaccgattcaagacccttcgcgtgcttgtcccagatgggtagtttctcttttctgattgccttgggggaaagttccttgggggccccgtggtcccccaaggcagcgccattcaaggtcgcgcgctttcaagtgacactagagcttgttatttccaagggcccaagagcattttcccccagagcactccgaagcaaggttttagccccaaggggtcccttgggcccgttcggttttccgaaccaccccaagggtgccattattcccttggggggggcgcgcaagtgagaacccaaagggggaaccacggtaacgca

SEQ ID NO: 674359 - DNA, 808 bp, Homo sapiens
tgtggtgacgggcgcctatagtcccagctactcgagaggctgaggctggagaatggcgtgaatgcgggaggcggagcttgcagtgagctgagaccgtgccactgcactcagcctgggcgacagagcaagactcgtctaaaaaaaaaaaaaagggaaaaaatttacttgcgggagaaaaatggtttaggaggattttcaaattgggtggttaacacagttggtcatcccattggtggtctttggtaaggaaggtctggcaatcaattttggttaacagattcattaacactctttatgattaaaggatgggattcattccatctaatcagcagaaatttgagtggttacctggccctttaaattgggtcaaaataagggctggtggagggaaggattggactttctatgtgtttggacacactgtgtgtccaaaattcgtgtggtcttaaaaaatcgtgggagatatgggaataagggattctctcctaatttttgctgaataatcccataaactaaggagtgcaagtggaggaaaaaacaaggatttccaatactggggcgtacaggcaaacttatgttccacaagggggaataacggagggaggttgacttaaagtagaaagactgggtgtcaaccttgagtgttctctaataatttggattatggcccaatttggtaaggggggaagttaagggctatggcggaatgggggggaaggagggagaatcaatgcaggtggggcaagtttaagggggaatatattaggagggggactgcccttgagggggggttgggggaaacggaact

SEQ ID NO: 674360 - DNA, 427 bp, Homo sapiens
gcggagtgttacctttttcccccgcctttgaaggaagtggcttaaacgagtgtgttacccttacgtgcttggcacccggtttcaaccccaaaggaggtgttggtttcttggttgcaggggttccaggaatttccccccaaaaagtcctttttttgggtattccggcgggagcccaaccagggcccccccccttttttttttaccagaattttgggggtggcacccaggggttggaaaaagggggacccttttttttggttggtgggccccagggcccttccgttggcttttccccaaaagacctttgcccgtttggggggttaacccccccatgtcaatttttttttttttttggggggggggggggggcctttttttttagccgcccccttgttccccccctttatttaatttcttgtttccccca

SEQ ID NO: 674361 - DNA, 207 bp, Homo sapiens
cgattgatcgccacactcagtacaatatcttaaatgccaagacttctggaaacagaaagtcagaatcacaggtcctcacttggcaatgaagtatgtggacacttcccactgagagtttctatctttactactttttatctactttcccatcatgtgctcagaaaggaccttagttcttaggtggtggaaagaagtagaaccttatta

SEQ ID NO: 674362 - DNA, 154 bp, Homo sapiens
tggaaagggagtttggctctggtggcccaggtgggtctaaaattcgggggttcacacttgccattcatctcagtttcccagagggtggggatacacgggtgtgagataccaggctgggcctcaaggaggctcacggggcaggggggctcacagg

SEQ ID NO: 674363 - DNA, 264 bp, Homo sapiens
ccccccccccgggggggggggtgttttttttttaaaacccccctcccaccgccggggggggtttcccttttttttttttcccccggggggggtttttttccccccggggggggccccctttttccccgggggggggttttttgggggcggggggttttttcgccttttttttgggggggttttttctttgggggggggccccccccccccccccttttttttttttggggggtttttaagggggggggggcccttttggggcca

SEQ ID NO: 674364 - DNA, 228 bp, Homo sapiens
gagacgttttcacactcaccagaactgttctgagcgggcatctattgatgatctgagtcacctggactcaatcgatcagccagtgtgcacactctgtagtattatccgcatgctgtgcccagcacaatataattgccactgtcgtgatggacaccagtttgggccaacatagacatagtactctagggcagatttcctcaaagctgggcatttgttagcgcgtgctgt

SEQ ID NO: 674365 - DNA, 280 bp, Homo sapiens
gtgggctgggtgcggtaccttatgctattgggaggccaaaacaggaaaattgcttgaggccaaaatttgcagccgccaaaatttgcaacagtttgcaaacaaggctttaaaaaaatttaaaaaaacacctcaattctacaaaaaaaatttaaaaattagccagaattactggcacacttttgcagtcccagctgctcaaaaggctcagtgaaaggatccctcaaccccagaatttggaggctgcagtgaattataatcaccctactgcctaaatctcgaa

SEQ ID NO: 674366 - DNA, 427 bp, Homo sapiens
  misc_feature (105)..(105): n is a, c, g, or t
  misc_feature (114)..(114): n is a, c, g, or t
  misc_feature (129)..(129): n is a, c, g, or t
  misc_feature (141)..(141): n is a, c, g, or t
  misc_feature (146)..(146): n is a, c, g, or t
  misc_feature (186)..(186): n is a, c, g, or t
  misc_feature (206)..(206): n is a, c, g, or t
  misc_feature (209)..(209): n is a, c, g, or t
gcatgaggtttcaaaaataaaaattgagtcccctctccccgtacacacacactggggcacttcaggaggtcagttttccccccttcctcgatggggctttaaagntttgggganaaaagctgctccccnctcatgccccanagggnctgtgaaaaggcttcctgtgacctccgatgggggcccctnattggccaagggccctgtgnatnttttgtgggaggcagcatggccccgtggaaagggcagtaaacgtggagccggcccctttggtttggattccccttaaaaccagttgaggggtttcaagcccttaacctctgtaagcctgttttttttttgaaatcccagtaataaagggtcgtaaaatggttgggaaaaaccaaaggtgacttatgcaaaagctttataaactgtaaagttcctgcca

SEQ ID NO: 674367 - DNA, 935 bp, Homo sapiens
gatatgttggagaaactcttttattagccctgtctgagacgcccccttcgctgccgcgtggggataggcgcctcctgtactcggccgctgggcctcgggaccacccgagtagcacggtccgggggggtcccctcaaaaactggccggcccgagttggggggccggggacccaccactttctgcggcgacgcgtgttggcagatgcatcctcggggaaacacgtcttattgtggtaggcacgacaccgggaagtcgtccagcagaggctgtagcactccccggggtcgagtcttgcgatgtccgcccggcgacagaaacaccaggttgcccgcggcccctacagcccacaagacaacacacccagccaggggggcgtggccccccttagagggactccaccgcagggtcctaataggccctatcctggagagacaattcctcgcgcggcaaagaaaactcgcccaagccaaggggcagcacacagtggtacgaccgcccacggtcctgaaaggctgtgggacgagacacaacgacgtcggggcgacggcgcaagaggggctgttagcagacccccgcgaaggagttctcgacggacgacgacaacttgggaaaccccccgcgagccgcaggcgcacaagcccaccagaggggccaacaggacattctgcgggccaaaccctccggcaggccctacacagccaagtacggacattccaccaggaacacccaacatagggccaagattcgggggcaacaccgtcagatagcacgtcagcgccgcgtggagtgccaagtcagggcaggagatcacacccgctgtcaagagcaggggagggggagagcgcgaaagagatcgccacggcaagaacacataagagaaggacgggtagccaatgttcgagaaaatggggggaggaagcgccaaaaatgacgca

SEQ ID NO: 674368 - DNA, 175 bp, Homo sapiens
  misc_feature (13)..(13): n is a, c, g, or t
aagtacgtacggnccacacgcacggagaaggttacctatcctctgtggtcaatctattatccatccacctatcgtctcttatctgtcaatcagtctgtcgatgacccgtctatcatctctatggctatgctgtgtctctaccatctctccatctccccttctccggtggcgtggt

SEQ ID NO: 674369 - DNA, 1164 bp, Homo sapiens
tcaattggcagaagcaggaagcaagggtctggtgggggcaaagcaggaagcggcagaagcaggaagcagaaggagcggcagaaacaggagaaggagcggcagaaacaggagaaggagcgggagaaggagcggcagaagcaggagaaagagcgagagaagcaggaaaaggagcgagagaagcaggagaaggagcggcagaagcaggagaagaaggctcaaggccggaagctttcgctgcgtcgaaaggcagatgggcccccaggcccccatgatggtggggacaggccctcagccgaggcccggcaggacgcttacttctgacctctgccctggggctggactgcatggcccccctctttccctcagccaagaacaggcctggcccaaggtgccaccccctagcaccttgtcaggctgtcccttgctggggaaagtggcttggttccccatctcctcgccagctgctgatccctacacgggcaggacagatgggcagctgcaaatgagtctggagcctctcatctcccatgaggctcagctggggtctctgtcgctcctgccccagttccctctgggtcccctcctaggtgctgtcctgaatggcccgttgtcatcccaggggtgactcctggtgatgggagtcagcagtttcagattcttacactccatagctccccttaccatgaggtggagctggcttccttttccctgtcttcagccctccctgtctcccccacttcctggccagggctctcattctggacctgtgttgtaattgtgtacagaggatggcgttggcctggggtgggggtgctcgctttgtcttctgtcctttggttctccttccataatgctcctgtacccagtttatttaaggggacatgcactggaataggaaatgtcccccatctcccttcctgcaccctgctgtgctccctccaaacccaccttgctctgtgttctcaggcccccctgcttttgtctcaccaggacccatacctttcaccttgttcccttccacccctccagttagtccctatctgggtaagggtcttcccttgagctccagggggtggaacccaatgtttacattctcttctgtctctgcccccaccccatgcagcgctttgaggaattggaaaagaacctgctgttgtacctgga

SEQ ID NO: 674370 - DNA, 393 bp, Homo sapiens
  misc_feature (381)..(381): n is a, c, g, or t
gtttcactttcctgctcttgttgagggatcctgcatttcattgtctttgcctataccagatacaaccccaatagtcaggatcctcagccccagatgctcactacagtcaagtggctgatggctccctttagctgaattacactagaaactctaccagattaaataagagttcttttggggcttcctatatgcagtcatacttgagaacagtcagtctagacttctagcttgagaatatttgagaatactaagctgcaacagagactcatctcttccaagctatggagtgtagagaatgagttgataaacctgacttggcatactcctctccaggaatccaggttttgtgacacagaactacattttcctctcaaagtcaantggtcccccagc

SEQ ID NO: 674371 - DNA, 682 bp, Homo sapiens
  misc_feature (150)..(150): n is a, c, g, or t
  misc_feature (155)..(155): n is a, c, g, or t
tcccccagttcgcggcgcaccagtaaggcagcatccagtaagcggcagcggtccgcctgctggggtgtatgttgtgttggcctggggtgggggtgctcgctttgtcttctgtcctttggttctccttccataatgctcctgtacccagtncttcngacccaggctcagagagattcttacactccatagctccccttaccatgaggtggagctggcttccttttccctgtcttcagccctccctgtctcccccacttcctggccagggctctcattctggacctgtgttgtaattgtgtacagaggatggcgttggcctggggtgggggtgctcgctttgtcttctgtcctttggttctccttccataatgctcctgtacccagtttatttaaggggacatgcactggaataggaaatgtcccccatctcccttcctgcaccctgctgtgctccctccaaacccaccttgctctgtgttctcaggcccccctgcttttgtctcaccaggacccatacctttcaccttgttcccttccacccctccagttagtccctatctgggtaagggtcttcccttgagctccagggggtggaacccaatgtttacattctcttctgtctctgcccccaccccatgcagcgctttgaggaattggaaaagaacctgctgttgtacctgga

SEQ ID NO: 674372 - DNA, 320 bp, Homo sapiens
  misc_feature (8)..(8): n is a, c, g, or t
  misc_feature (47)..(47): n is a, c, g, or t
aattaccngggaaggaccaggattatttcattattccggtgataacntttgagaaatcatttaccgtaacggaacttaggacaatgatttacaaggatgttccagagaatttacataagatggcagagcataatctcttgcttcatttgagaaaactagagaaagatgggaagatattctacacaacaactcctgtcaagaaatggaaagccgtcctttagttacagatcagtgaagttctgtcttgttttgcttttagaagatggtattttcttttagctatagattatatatttatagaaaatattaaatgcacaact

SEQ ID NO: 674373 - DNA, 1249 bp, Homo sapiens
  misc_feature (97)..(97): n is a, c, g, or t
  misc_feature (143)..(144): n is a, c, g, or t
  misc_feature (153)..(153): n is a, c, g, or t
  misc_feature (157)..(158): n is a, c, g, or t
  misc_feature (161)..(162): n is a, c, g, or t
  misc_feature (165)..(165): n is a, c, g, or t
  misc_feature (221)..(221): n is a, c, g, or t
  misc_feature (615)..(615): n is a, c, g, or t
gtgaactctctgaactcccttattacctaaagcttgtctggctcccaggaagcagccttatagagagagaggagtatggtattgggaagaagatgtnactgaactattgactgaaagtaaatttagataagatacagcttttnnccttatggncatnngtnnagncaaagtcatcataaactaggtatgcatgctatccgtggatacgacgcttagctctnaaaagatttttatgtaaactgttgaatatttgaaatagtccacttcaccttaatgggtcttgtctatcttcattagtcttcaaagaaaaaccatttgctaccaaagtaaatcagtattttgaatgtgcttctcttgttttggtttattagctagttcctgtaagcatttccaccagaacttgaggcaaatcgtaaggaagctgtttcttttaaaacacaaaccaccaccaaaaatttaaatgtacatattgcttaagtatttggctgtttttattttttaaaaggtataaacaccaaaaaaaaaattaccatggtatgaagatggaaaataagaagatgcactttctgtaacttggtctaaggatttaaattactaacttatgaactccaattntgaatggaacttaactatcggctttcttacgggtaaaattatatggtttattttaaatgcgtacatattgaccaatggcctctgaaaaagcacattttagatactgaaattgacggaaagaaaatgcatcttcaaacatttttgggaatctcaccacatatacttggttagattgggtattggtagggtgtggagggatctcgtatggtatatgaactttttttaaatgtgacagttaaacacatctttaaaagcatagtcacagacaaaagcatacagtataaaaattccttgaaaatcctacaatatatatttggaggcagttcagactgttaatggtggtagctgcttgctgaaggtcttaagtgggtaataaactccaagagaaggcaggcctgtgtaatattcctaaacacttggttcactagcatttaagtttaagaatagcccagtacgacaggcacggttttgactcttagtcttcatgattatatatccgaactgaattactacctagcgggcaacttcattttgcattccggggtaaaacacccttagtttttgcccagaataccagcgcggggaaaacgaggttttacacattgtcccaaaaaagtgtggcgccataaagggg

SEQ ID NO: 674374 - DNA, 962 bp, Homo sapiens
  misc_feature (74)..(74): n is a, c, g, or t
  misc_feature (128)..(128): n is a, c, g, or t
  misc_feature (145)..(145): n is a, c, g, or t
  misc_feature (176)..(176): n is a, c, g, or t
aaaattccccaacggattccttcagcctttattaacatttttcccattggtgccttgccgacttgtggccccgntcctttgtagtattggatggatggaccatttgaaaatgaatggtccttgtatantcaggataaaagaaaanaaaacccaaaaaaagcggtctgaatttaaanagtgtttataataaaaattttaaaaatgaccctcatagcacgcaaaacaggatggggagtttcccctcttctttctgtgacaatgcgcatcattcctgcattagtttttaacaccagactacctacattcatcatttccctcatttttcttttattttcttgcatttgtgaattagttcaagaatgctagaaaagtgtcgagttgtgcacatccatttcttgtttcacaatgtttaaaagtgacagtaattcatttgtaaactaaaaaaaaaaaaaagggtgggaatcagtgagcataataggtacaacctaacacattattatgtttattaacttggagacccagaaataaattcttttcttttctggattctgggctcttaaaaatacaaaaaaaaaaattgtttggtttggggtaatttcggggttgggtcacatgggggggctttttaaatggtcagggattatgatctggcggtattttctccaatatgtttcccaggtgtctgtgaccaagatgactggcgcagaggagtcgaacaagtaggctggtccttctacttggctcaaaaattcagttaaggccaaaagcgaagatcaagcccatgttgatgtctcgtgctcacctggttatccagagagtgtgacctcatgcagtccccttgggagaacacttcaacatccgggcacaatacttcctcccctttaacacttcttaaacatttccaaaaaaggtttagccccaggggcaaccttttaatggctaatcgggaacgggtatggagg

SEQ ID NO: 674375 - DNA, 455 bp, Homo sapiens
atcaacgtgtacttagcttggggaactgcagccccgcaggcgcttaacaacactagggtgtctgggatggcctgggctaatgtgagatcggcatggttgagatcagcattgtgatgaccagtgttctctggatatttgcaccctccttgcgctaaggacactcgtcgcgcaaggcatttggagctgagctagtcgtacatgatattaccggaaaacttgtgtgtgattccctatcattcataggattcgtggacaggaatactccatctctcagcacttactcacctcataatgctggatgtttcccaaaaatgaatgaactcattctagtataagcaatacaatatattttaacactggtaccgatgcgtcacatctgatagctcgcttcatgatatgcccggattggaaaggctggttagtccctgatttgctcataagtctgcatgcagctg

SEQ ID NO: 674376 - DNA, 158 bp, Homo sapiens
tgtgctgcggtactctaaggattccttattcgtgttgcacgccctgtaattcccgctacttgtggaggctgaggcacgagaatctgcttaacccgggaggcagaggctgcaatgagctgagactgtgccactatagggcgaccgcgagactctgtctc

SEQ ID NO: 674377 - DNA, 508 bp, Homo sapiens
caggtatttcacgtagacgatggggtatcaccgtgttggccaggctggccgcgaactcctgacctcaggcaattcacccgcctcggctcccaaagtgctgggattacagtgcatgagccaccgtgtccagcccaaaactgtgctttttaaaaacagtatttggttaattttccagaccttacctctgttttaaaagtgtgtcatgttggattacaccctgggattcccttctcatctgtgggctttggccatgctttccaaaattacacaggagaatcattccactggaaatataacaatccagtcctcaaaattgaaagtggacaggttgagggacttccctttttggcttcactcagattacggccgcctgtgcagtggccatggtcaacatatatgcatatttgcactatctgcttcatgagcaaatctgtgtccacagtttctgatgacatatggcattggtgtgtcacattgtactgtccctagtctgtggcatcgatacaca

SEQ ID NO: 674378 - DNA, 408 bp, Homo sapiens
tttggcacaaggcaagcccccccctgtcccttgcaaggtgacaggccccttcgggtttgtgttggtaagccttatccctgcacccagggggactgggattgtttccgcacctgtgcctaaaaaaatggtcataaagggtgggatcgaagaatggtacccctcaggccgggggtgcactgcccccctggggaaatttgccaaggcccccttttatgccatttttaaaacctacaggtacctgacccccgacctttggaaggagactgtatttcccaagtttccctatcaggagtttactgacccccttgtcaaaaccccccccaaagtttccgtgcaacggaatcagggtccaacggtgggttcaacaaagggtttttatacaaaaaaaataaagtgaattaagggtta

SEQ ID NO: 674379 - DNA, 132 bp, Homo sapiens
acgtctaagaccccccgacaagccagacgcgactgctaccctacacgacaccacgctacacacacgacgcaccacccacgtcctacgtgtacgcacgacgagcgtacgtcgggacacgacttctactactgg

SEQ ID NO: 674380 - DNA, 121 bp, Homo sapiens
cgtgtgctcgctttatttttcatgtgcaaactgttcttgtctaaagctttcagaagaacgtgtcagacaccctgcagagacgatgggtcatgactgtgccctccgggctcctgtggtgggg

SEQ ID NO: 674381 - DNA, 350 bp, Homo sapiens
gcagactggaacacctgaccttggtctgagaaaacatggccccaggggcagtctgcagccctggagagtccaaagagcttggtgtggcacagatggtctggggtaacaatctggctctgagggatgtggaggtgacctgtgcacccagtctctggaggctctcaggggctacggagatgtggagtggcgcagatggtctggccccaggtcttggcgccccagaatgtggagctctgtggcgctccatgtgaagacagagagcattgtgtggggggtgtgacacagtgcccagagccccgctgaagacaatagtagtttgtctcctggcctggaggacagacacccttgga

SEQ ID NO: 674382 - DNA, 286 bp, Homo sapiens
ctctagactctccctctgggctctattcaggttgcaggcagcagcctcggtcgggccctttccagcactgtgcccggctcttggtggcaccaggttcttcttggctctgccctgttgctctacaatggctgggctcgctgcttggatggcggcagcatgggctcaacttctcggatgggctcccctccagtgccctcgaatccaggcccagccagctccccaggggggggggggtcactcagggatttcttctggggggctttgccagcaatccttgtcgtccacc

SEQ ID NO: 674383 - DNA, 100 bp, Homo sapiens
tgttaagaaaaaaaaatgaactaaacaaataaatttctccaacaccaggggccatggccctgaatgaaataaaggggccatccccttttcttcagaacca

SEQ ID NO: 674384 - DNA, 348 bp, Homo sapiens
actattttgggcttcggctaccgtctggccctaaacgtttaccagcatggccttaattgcttcctaggccaagtgacccgcttcgtggtcgacttcattctgcatcaatgcatttcccggtggatttcaaaaaggggtggctgggttgcaacccttaaattgggcaattgtcccatcctgaacgtgctggtggttttgggttttgttttattggcacaacctagggttttgggggtcaggggggaaaaattttttattcaaccaaattcagggggggggggcagatggagcccataggcccccccctttcctttgagtttttggaaataaactgtgcaatcccctcca

SEQ ID NO: 674385 - DNA, 1559 bp, Homo sapiens
taagaagcccactgtaaaataatatttagcagtcaaatggttatatacttgctgtaagtacctagtaagtagctatagtttagaggtagtaggtatactcatctacctatgagagtgcataacgactatacctaagacaggctttgtttaacaaaagatacaagataacctaagactataagtaaccacagggaatatgacctacagagatggtaataggagtcatgcgagatcacagagagatcacatcacaataatataagtacaaataagatggataacacgaagaaccacagaacgacgagacatgacatacaatacagagaatgagagcacagaaataccaaagagcagacaacaagataccaaaaacacagaagtaagaacatggaagagacaacgtaggagacagcacaaagataaccctaagagagtatcaaggaactcacggtaggaactactaagcacaacggaacacaaaataccccacaacaggacagataacagccaaggcgtcaaccaggacaaagtcaagtaaaaagaacaatagaaccacagacacatgaccaagaagacgacacacactactaacaagacaacaaaaaaacacagacatgatacaaagaaccaacacaaaacaagaaacaactaaagcaatgaaccactcacaaaacgaggaaacaacaacgacagggacacatgtatcacgaaggagtacatacccatactatgaaacagacaaatagatcacaaaaagacagagaacaatcaaatcacacacacacgacacacacgaaaaacaagaagcacgaaagagcgaccattaaaacacaacaagagacaaaaccgaaacaaaagagaacaaggagacaatataggcaagagcacgcacaaacacaaccaacaaaccaaacacacacacaggggatggacaaacaacatacaacaagacaaaaaaacacaagtcacacaaacaacaaggacacacaaagaacacagacaaagacacaacgaaacgacgtcagcacaacctggaaacaatacactgaaccaaacagaacaccacaaaaaagtacacaaaaaaacaaaggaccaaaaacagaaccacaaagaggacaaaacaaaagaggacaaggaagatagaaaaacaaaatacaaagaagacaacagacacacacacgaagaggtgagagaaaacaaacaccaagcaacaagggataataagcaagcaaagcgacaagcaagaccaaagagaccaacagaaagcacctagagcaaccagaacacgaacgagaagagaagaagaaacgaacgagacagagaaacagatcatgcagctgactaagagcaatgaacaacaagagaaaaaccgaagacaagatgctagcaaacagacaagagaaaaccgacaagaagaggcagcaacaacaagaaaagacaagcaagatcaaaaacaaaaaagacaagaccacaaaacaaaagaacaaaaaaaagacagaaaacagaaaacaagcaaaaaagacaacgacacagagacaagatatacaaacaagaaaaga

SEQ ID NO: 674386 - DNA, 320 bp, Homo sapiens
  misc_feature (179)..(179): n is a, c, g, or t
ctttttttggggaattccaaccaaaaaaacccttttatgttttaaggcccaaatttggggcccccaggttctggttcaaaacccctccggggccccccttaaaaaaaccccggtttggggggaaaatgatccccccccaacccgttttttaaggccccggggatggaacctttttattnccggttccccgggctacctgggttttgcccctaataatttttgcaggggaaattccccctttcctgggccaaactcccggtaaaaaccgccaattttttaaccattttttttgtttattttttaaaaaaaaaaccttccca

SEQ ID NO: 674387 - DNA, 191 bp, Homo sapiens
cagagtggcatagagcactctcaccccaaacggccaagttccaaaagaccaaggatgccttagcatgtgactcctgaagggaaggcaaaggcagaggaagttggctgagttcaacggccatgagactatatccctggccactgaaaagctttcctgacaataaaaatgttttgaggctttaaaaagaaaat

SEQ ID NO: 674388 - DNA, 390 bp, Homo sapiens
agtggtagatagaggagccagatggaggatctctgacctctcacggtcagtgtgagtttagaagtcatatggctaaattggttatctcaccaggagccatccgacagcagttggcggctttcttagaaggcttctatgagatcattccaaagcgcctcattatccatcttacactgagcaggagttagagctgcttatatcaggactgcccaccattgacatcgatgatctgaaatccaacactgaataccacaagtaccagtccaactctattcaggtgagctgctgctggaatccctcctcatatggtcctcttaccctaggcaacgctagtaagtgtgataccaaataaaccagtagtactcttagaggaagttgcatgtcgaagac

SEQ ID NO: 674389 - DNA, 250 bp, Homo sapiens
gtctctgtgattctagaggatccctccagcgatgttgtcagcacttccaaccagaaatggcacatatgctactgtggtcggggttgtagccaattttcttaatgtaagtgctgacttccttaacaatttcctacatatgtctatctggcctggtaggagatgagtccatgagcatacctgtgagtcctcttcgtccaggaaatccgacttgatgggtcccttcatgtccggggtaccgtaggctcgtaag

SEQ ID NO: 674390 - DNA, 1813 bp, Homo sapiens
  misc_feature (1431)..(1431): n is a, c, g, or t
taatcgcccggtgtgcaataaagacacaacacaatagaccatagactacaaatagaaataataacaaaaaaatcactcaacacagtcagccatacaacaataatgcaacccacacaacaagttacataaaaatcatcacataacaccagaaaaatccacataaacaactgaaaacaaacactcacaccacgctaataaacagaaacaaaactactacaaaatcgactaagaccttccaccaactaccgatacaccaacacccacgcacatacatcatttcaatacgtaaacacaactataattaaagaacaaacaaaaccacaaatactaatacacaaaagcacacagacacaacatacaacgacaaacacaagaatacaaatacacatactaacacatcccatcgaaaacaacctaaacaactaacacaacatcctcacacacacactcacaaatccgcactaccaactaaacacaatggcgtaactacaacttaaactgagcgaaaagacacacacgtcaaacataacactgacggcaaacatacaggcacactcaccacaatggcaacgtgaaataacagccaaagcggaccacaaaaagtgcacgccacacacgaacaacacaacacatataacatatcaaccgacatgagaaacatcgaaagcacacagaactgagtacacaccagcgagagcaaaacacccataggtgagaagcagcagccgtatacagcaactaaatcagcagcaggaaagaaaccactacaaacgacacggactcgatgattcccaaagaatatgagccatgagccacagtggtgacatgacgacacatcaaccaggaccggccagactagaaaccagatgcatacacaacacaactaagacgagagtgagaagcaacacttgaaatgaaacgaagaatgacggcgacaagaaatgaaggcgagagaatcaacaagacataggagaaccaacgaccaagcacagcaaacacagcactagcatgtgcacgacgatagacatgagaaaaaggagaacacgtacgagtcgccagacacggaaagcaggcagacgagtaaggcgcagcgcgagctgaggctaggatctacgagcgcgtagcatgaagacgaacgcatgcagaacacaacgtagacaccacgactcgggaatgacagcaggagagagcgccagggccacgagaacggacagtcacaaacacagtaacaggatgacacaagagagcgtagcgataactacaagacggcaactctgtagccgaccacagactagacagcgtaacaggtaggatactaggtcagacgagaggcacgatactcacgacaagacggacagacggcgtgagacgcacgtataaacgacgcgatagcacagtcctacacagccgcacgcacacgctactacgcanctgcagaagagagtacaacgatgaggacgtgcagtagacagaaggaagaactacagagagagcgagaagagaagacataggcgaagagtaaggggacgacaattgacgacagaaagaaggagatgcagaagctagaatgactagcagcgcaacagcgaacagcgagcgagaagggacacggaagctcagagatagaaggaacgcggaagcaagtaacaccgtagcaaacgaagcgacgccaaactagcagacgaaccgaagcaacgacggaagaagagcgcgagaaagcaacaagagaagtaaacgacggagaaacacgcgacgaagaagaacatgaagcgaaatacgagaagtgcgaagagagacagaacaatacagacag

SEQ ID NO: 674391 - DNA, 204 bp, Homo sapiens
ctgtctggagtgcaatgtgatcaatcttagcatcacgttgaagccgtttaattcctgtgcctgaatagatccctccacctgagcctcctttatagccattcatgtgccagcctgcctagctattcttttttttgtttttttttttactttttgtagagaagggatctagctattttgcccagtgcttcaggggtaccgagctcg

SEQ ID NO: 674392 - DNA, 618 bp, Homo sapiens
tagtggttttgattgcatcccctaattagggatattaagcatttttttcttatgtttcttttgaaaagtgttcatgtccttggcccattttttaatggggttcttttttgcttactaagttccttatagattctggttattaaacctttgtcagatgcacagtttgcagatgttttctcccattctgtaggctgtttactctgttgacagttccattttctgtgcaggagttctttagtttaattaagggttatttggcaatttttggttttgttgcagttgcttttggagtcttcatcatgaagtctttgccagggctgatgctccaaatgggatttcctagggtttcttctagtattttcatagttttaggttttacatttaagtctttaatccactttgagttgattttcatatatggggaaagataggggttcagggtcattcttctgcctatgggtatccagttatcccagcaccatttattggatagggagttctttccccattgcttgttattgtcgatttggtcaacgatcagatggtgtcaggtatgtggctttatttctgagttctctaatctgctccattagtccatgtgtctggttttgtaccagt

SEQ ID NO: 674393 - DNA, 917 bp, Homo sapiens
  misc_feature (17)..(17): n is a, c, g, or t
  misc_feature (41)..(42): n is a, c, g, or t
  misc_feature (51)..(51): n is a, c, g, or t
  misc_feature (54)..(54): n is a, c, g, or t
  misc_feature (57)..(57): n is a, c, g, or t
  misc_feature (73)..(73): n is a, c, g, or t
  misc_feature (79)..(79): n is a, c, g, or t
  misc_feature (86)..(86): n is a, c, g, or t
  misc_feature (104)..(104): n is a, c, g, or t
  misc_feature (122)..(122): n is a, c, g, or t
  misc_feature (149)..(149): n is a, c, g, or t
  misc_feature (153)..(153): n is a, c, g, or t
  misc_feature (171)..(171): n is a, c, g, or t
  misc_feature (193)..(193): n is a, c, g, or t
  misc_feature (199)..(199): n is a, c, g, or t
  misc_feature (207)..(207): n is a, c, g, or t
  misc_feature (222)..(222): n is a, c, g, or t
  misc_feature (225)..(225): n is a, c, g, or t
  misc_feature (231)..(231): n is a, c, g, or t
  misc_feature (234)..(234): n is a, c, g, or t
  misc_feature (248)..(248): n is a, c, g, or t
  misc_feature (250)..(251): n is a, c, g, or t
  misc_feature (285)..(285): n is a, c, g, or t
  misc_feature (294)..(294): n is a, c, g, or t
  misc_feature (348)..(348): n is a, c, g, or t
  misc_feature (359)..(359): n is a, c, g, or t
  misc_feature (371)..(371): n is a, c, g, or t
  misc_feature (378)..(378): n is a, c, g, or t
  misc_feature (395)..(395): n is a, c, g, or t
  misc_feature (401)..(404): n is a, c, g, or t
  misc_feature (417)..(417): n is a, c, g, or t
  misc_feature (419)..(419): n is a, c, g, or t
  misc_feature (429)..(429): n is a, c, g, or t
  misc_feature (446)..(446): n is a, c, g, or t
  misc_feature (449)..(449): n is a, c, g, or t
  misc_feature (455)..(455): n is a, c, g, or t
  misc_feature (457)..(458): n is a, c, g, or t
  misc_feature (467)..(467): n is a, c, g, or t
  misc_feature (496)..(497): n is a, c, g, or t
  misc_feature (503)..(503): n is a, c, g, or t
  misc_feature (530)..(530): n is a, c, g, or t
  misc_feature (534)..(534): n is a, c, g, or t
  misc_feature (536)..(536): n is a, c, g, or t
  misc_feature (556)..(556): n is a, c, g, or t
  misc_feature (781)..(781): n is a, c, g, or t
  misc_feature (797)..(797): n is a, c, g, or t
  misc_feature (876)..(876): n is a, c, g, or t
ccgcccggtccgctgtngcagcgctcatccgcgccgggagnncttggctgngtngcncggcagccgcgggagnatttcntgaagangtagtcatgcagcacgtnagcagctcccagagcagncagcgccatgtccagtggcctggggcntgcnccggcgcgggcgaggagnagccagcgtgctcccagccgtncctgcncctcacantgccatcccccagcnacnaactanagnagctgatggtccananncagagtcccacgcagcccagtccggggccggggnaggccttgnagaatgtgcgtgcaggtgcccctggccctgggctgggcctctgcagcagcagcnctaaagggganttcgtggatgcnagcgtgntggtgaggaagataagnttgagnnnntccagtggtgganantttgtgtttnaggatgggtaagggctnacncagatngnncagggagcncaggttcagctccagcacccgcggtacgnncataanagtccgagagcggagaccctcccagcnccananacagtaagggggcacacatncacacacctggggaccccagagccctgcagccgcgggtggggccggcctgcagcccctggccagcccaagccacatcaccacggctaacttgccaccgcagatcagcagcatcatccagggccagctggttcagcagcagcaggtgctgcaggggccgccgctgccccggcccctgggcttcgagaggacacccggcgtgctgctccccggggctgggggcgcangggggtttgggatgangtcccacccccgcccaccagcccttccaggactgccgtgccccaggcctttccagcctcccactcacgtctgtgggganacgggaatgaagaaggttccaagaagtagaggagattcccc

SEQ ID NO: 674394 - DNA, 129 bp, Homo sapiens
aatttcggggggggtttaaaaggggttggggggcttttaaaaaagtttttttttgggggggggtcccctttttaacccccggggttttccggggggtttttttttaaaaaaaaaaggggccccctttta

SEQ ID NO: 674395 - DNA, 235 bp, Homo sapiens
atgacatgtgagatgattgcctactctgcatccaccatgattgaaagctccctgaggcctcctcagaagccgagcagaagctgtcatgcttcttgatacagcttgcagaaccatgagccaattaaacctcttttcttcttaaattacccagactcaggcatttctttgtaacagtgcgagaacggactaatacataagggatatggtattcagtgtgcttgacactgcactgcca

SEQ ID NO: 674396 - DNA, 1545 bp, Homo sapiens
  misc_feature (408)..(408): n is a, c, g, or t
  misc_feature (558)..(558): n is a, c, g, or t
  misc_feature (614)..(614): n is a, c, g, or t
tcatggttaaaaactctttacttgatgtacatgttttaataaaacaaataaccaaaaaaatatcacacaaatccataagtttatttaaaaacacttaggattttaaaaaaactatgtcttataaaatatcacacacgttaaaggcagttgggaaatcgctatttggtcactatttctacaacgtccataaatatttcccttggaaatataacaatatggttcaatcttcatattcttataaaatatcaccactggtgcactattttaacaaactggtgcctaatattataaggccaccatcttccacatatgggcatctggtgggggtttgggatacccgtggatggacaatatgggtatctctaataacatattctccaaggggggagaaagggtggtgaattatgnggtatgtgtggatgttataaacactttattaaatatatctatgtttagaaatataaatattaatattcttgagaacgctatcacgatatttctatcacaaatatttcttattatcaccaacgtgtcaccacgcaacatctgggtcacacnaagacccccagagttttaatatcactatttttaataatacacgagattgtcacccnagggggtttaaggcaaaaccccgtagtatagagggaaggcgaaggaggcaatataatcaacgtatttcttcgcggatattttattttaaacgctattaaaagacattttcctggaggaatgagcttagaaaggaaaacacaaaaatatttggaacaaaaaacaaaaacaaaaagtttcacataaagagaggaggacttttttcaattcacctagtggggggaggtagggaaagaagctttttattagtaacaaatttaacacaaacaggttgtgggcattattaatattaccaacaccaacacgctattggggcaaaccccccccgcttataagaaattctacagtgaactattttgtggaggaacctcgtataaaaagtcctataagaggaaaaatggtgcgtcgtacaaagaagcacaccccagcacagcagtggtgactagtgcgcaagctagcagacacttaacaggcggcgaaagaggggcagctacactctgtatactccacaacgagcacaattatagggaggggggagtccaccccccaattaaagagagaaggagtgcgcgagcaccacacaccattaacaccccaagcgatgacctgtgagaacaaaccaggggggggcgcgacaaacaaaaaggagagaacaacagaaagactagataaaaggaggaggaacatcagaaggcaggctagacagaagaaagaataaaaactaaacaggaccaaccaagacaggaacagaacaagagagaatatatgtgccccaacagaagagacataagtatagcccgcggcagaaagtaacagatactaccaccgccacaatgagaagacgagcgggaaccactcatcatagaggaagacaaggacgaacgacgcactgaccacaatagtcaagaagacagaatagtagcaagagcagac

SEQ ID NO: 674397 - DNA, 200 bp, Homo sapiens
cccaccgagggtgacacagtacctttactttctgcagatgtctaggcaggaggagggcttctgcctgttttgcaaagtcccaggccagaggccaagggatgaggcctgactcggctccttccgtccataataagccaagggcatcagaggttggccagggcggggtcttccttgttcgtttttggcgagcctaagtggca

SEQ ID NO: 674398 - DNA, 1541 bp, Homo sapiens
  misc_feature (1155)..(1155): n is a, c, g, or t
ttgtcgatgtagtacggtcagtcatacgctctactgtcgtgcagcgactgttggtggtgcttcgtgttttgtccctccaccctacgaactaatgttggcttgtttgcggctttcgactgctgtgggctgcataaggtggttgcactgccggtcccagtagtgtattattttctccgccgctgtgttgtgatcaactgttggcgccgcctcgttgcgggatctttcccagtatgcgtctttctgccagccgctgttggtggcgccccatttttggtggggcctctggttagctgtgcctgttcccccccttgggtgtgacaccacccctgtttaattagttgatattccccaccggcctttcttggggaggaggcacgcgggggctttcctccgcctccccccccgtgtgagttaggtgatttgtgtcgttgcgccgccgcacagggcgcttttcgcccgcatggttggcgcgcgcgtggttgcgacctgttcgttgttctgtgtgggttcccctccacgtgtccccgcaaagtttcagattacccgccccgaattttctggggggaattgtggttctgcctcccccttaatatccccgtcccgagcccccgggttgatatttgggccccccacaacctgtggttacccctgggggaacttgccgtcaacactctcttggtgtggagaagtcacggttcccatatgcgcccgcggtaccacctcggatgacaccgtttcccttgagcccgcgtgaatttggggcccccaggtgtttaattgacttggcttaccccccggggtgggagagacacgtggttaaacaaaggcccacgatatgaatagccctggaaaatttttcctggccacggaatttttgttgtggtggcccctctcctgtgtacctcgcgaaggaatttaatcgtttcgcgtatacacacacagaggcttataccacacgcgaaggggttttgtctcgaaaggccacccactcgtggccgctcaaatgttcacattgtcttcgaatgaggttttcacgagacacacgtgggctgtaaaactcgttttgttgcgctagactgtctttcacaatggagaagcgagattgttccctctaagattcttttcccacccacttcaccacacactgagaatttngagaagagtgataaaaagagaagctccacgttggcctcactaaccacacactgcactgttcttgtcctgtgtctatattatatcgggcgaacacactcacgaccgctttctgaggtataagagataatatttctccacatggcacatataagtttagaatatatatacctgagtattggtttaaaatcactggtattgacacatgccatgttataatcacgagttaaagcaacggaccaccacttttgtgtactcgccttcttcttataatcgctgagaatgtaacctgttaatgtataaagtccacatttaggttttatatgtttctaaagaactatttgctgcaactcccagattttcagtaaaatagtattactagtacccca

SEQ ID NO: 674399 - DNA, 442 bp, Homo sapiens
  misc_feature (81)..(81): n is a, c, g, or t
  misc_feature (115)..(116): n is a, c, g, or t
cgactccaccgtgagctctcgagagtgcctgcctgcctttcgccgggggcaggcgggcggcggggcaagaggaggcgccgngcgctggcccaattctcgactcggggtaagatgnntccgctccgaactcgccggcgcgaccacacgcacagcctctcccttcccagcctccgtgctcgggcccggagggtcgcggaggctgttggcggcgcggagccagcccggcgcgacctcaggcggcgcagcgggagcgagtgcgggtctccgagctgcccgcccgcagacaaagctgacaacatggctacctccgctcctccgctcaaacaagttcctcgcaagttgagcccggcaggcgcctgggctgcggcggaaagccgcgcgcgcctcggcggccgtcgtccatcaacttcaagtttccctccgcagagcagcccgcggccgc

SEQ ID NO: 674400 - DNA, 724 bp, Homo sapiens
ggctgcaggaattcggcacgaggagagagagagagagagagagagagagcgactttctcctggggcgctggcgtctgttttatgtgcccccgtcctttaaaatattttctttaggctttcctgctgtaagtcccgctttcctatctacctcttataaaaaggggtcactctttggcacgttgtttttttaagcacacatgcgtattgggaccttaactgtattcccgattttttacaaccctatgtggttacattagtccccagatccccaaccctttatttttaatgtttctttaaacaaaaatttacagttctgtaatgtatcacctttaatttcacttgggctcatatatccagggcatgctaggttatattttggaaagtcctgcatccattattccatttgagtgccaactaaccgtctttggttttgggcccttttaatgcccttttcccggtaatttacatttggacaccggacgattttttttcctcaatttgaaaaaacttttagatcttttccccatttttaactacttttatcctgtgcaaataggttttattttccttcttctaccgggggcacaaaaggcctcccctggtatacaatctttcctatattccaatctttcggtatttcgaggcgttctcggctataggctctcactctttttctctccaccttttcatcattccaccaccttatacgttgccctcttccccg

SEQ ID NO: 674401 - DNA, 499 bp, Homo sapiens
  misc_feature (44)..(44): n is a, c, g, or t
  misc_feature (51)..(51): n is a, c, g, or t
  misc_feature (58)..(59): n is a, c, g, or t
tagggcgggacagaaagtaaagggactccgccaatcctaccccngccctgnttacaannaacattaaccttttagagataaccggttttaaagggccccgcttcccaaggccccattttttaacggcccgggggcccttaccggggaggggggaaaaacccttttcccttattagggccccctttaaaagggccccccggggggaacctttttttttttttaacccaaaaaataccccccccccgaaagagggggttttccccccggggggagaaccttttgggggtgtttttttttttttttagcgaggggtttttaaaaaccccgggggggggaaaaaacaccctgttttttatttattttgggggggggggggggcggggggacaacccccccccggggggggggtgtttttttttccagaggagccttttttttttttttgcccccccccccccccccggtttttttttttataagaaccccccttttttttttt

SEQ ID NO: 674402 - DNA, 806 bp, Homo sapiens
  misc_feature (44)..(44): n is a, c, g, or t
  misc_feature (63)..(63): n is a, c, g, or t
  misc_feature (72)..(72): n is a, c, g, or t
  misc_feature (74)..(74): n is a, c, g, or t
  misc_feature (88)..(88): n is a, c, g, or t
  misc_feature (91)..(91): n is a, c, g, or t
  misc_feature (98)..(98): n is a, c, g, or t
  misc_feature (105)..(105): n is a, c, g, or t
  misc_feature (113)..(113): n is a, c, g, or t
  misc_feature (115)..(115): n is a, c, g, or t
  misc_feature (118)..(119): n is a, c, g, or t
  misc_feature (135)..(136): n is a, c, g, or t
  misc_feature (164)..(164): n is a, c, g, or t
  misc_feature (180)..(180): n is a, c, g, or t
  misc_feature (183)..(183): n is a, c, g, or t
  misc_feature (245)..(245): n is a, c, g, or t
  misc_feature (265)..(265): n is a, c, g, or t
  misc_feature (267)..(267): n is a, c, g, or t
  misc_feature (290)..(290): n is a, c, g, or t
  misc_feature (325)..(325): n is a, c, g, or t
  misc_feature (361)..(361): n is a, c, g, or t
  misc_feature (363)..(363): n is a, c, g, or t
  misc_feature (369)..(369): n is a, c, g, or t
  misc_feature (382)..(382): n is a, c, g, or t
  misc_feature (386)..(386): n is a, c, g, or t
  misc_feature (389)..(389): n is a, c, g, or t
  misc_feature (396)..(396): n is a, c, g, or t
  misc_feature (404)..(404): n is a, c, g, or t
  misc_feature (424)..(424): n is a, c, g, or t
  misc_feature (455)..(455): n is a, c, g, or t
  misc_feature (465)..(466): n is a, c, g, or t
  misc_feature (468)..(470): n is a, c, g, or t
  misc_feature (476)..(476): n is a, c, g, or t
  misc_feature (496)..(496): n is a, c, g, or t
  misc_feature (519)..(519): n is a, c, g, or t
  misc_feature (650)..(650): n is a, c, g, or t
  misc_feature (745)..(745): n is a, c, g, or t
  misc_feature (772)..(772): n is a, c, g, or t
agaagagtacagctcacccccagcagtggagggggtaaatctcngggacaaggtggggcagtngggatagcncntccgaccctatggngtntaccttnaagtagnaaggctgncnatnntgtgtagaaaggtctnnacttctgcctgagttttgccaaacccantggtctatagggatgnggnaaaagaatgacctaccgcagtgtgattatcagtgttttttaaaataaagagcacagttttgnctttaaaataattcacatcnanggtatttgggagaacatggagcnggcataacattggcgtaggaagcgggggcgcaggnccacccacggggccctcgtgtggggacgggtgcctnancccctnagtccctcgaggntctngcnacgggtngctgcctntgtgtcttttttctcgtctntctcaccccgagaagggagttgaacaatgtntttgttgttnngnnnaagtgngtggtaatggcgtgtgcgantggtagctgtgcttcagcggtgntctacaggctgatgggggcagggctgctcctggctttctgtgggcagggcttgcctccagggaccccgagtgcttgcacgcgctcggtgacagtggctggcaggtctaagtgctgctgctggatgcacatncctttggtagacttttttttttttaagaaataaataaaaacaatttttgggttggcacctgaggtaataagttaagaataagcaccaaaatggcncttcctggcacgcgcgggctcacaggntcttcatgcacacatggcagcggctgatgtgtgt

SEQ ID NO: 674403 - DNA, 1094 bp, Homo sapiens
ggatcaggctcatagaacttggcatgtggagaaggctgtatcaagaatcgtaatgtcttcgagagagaacgagagagaagattcgtctggtcattcagcccaactgcaaggaacatgctcgggggctcctcctcaacaatcaccaggtactcgagcaacacgtgggatcctcgaggtacaggcagccgagctccgttccagaagagatccttacaaccaggtacaaaaaaatagacatgaatctcacgagatctctctgggacgaagtccgagctgacgatcgctttggcctgtagcaacgagggtaaacgagaccatttgcggttccgtcgtgggcgtgggccacgtgttgccagtgagtcgtgtaggaactgcttggagtgtcacctttacccacatgctggtgctcgtctcatgatgttccatcggtggtccatgtgtactcaggggggccctggaagtggtggttcggatgatgatgttgacatgaaaactctataggatacagaggcaatgagatcgtgacatggagaaatcgctctaatgtgattgaagataggaagagcgagagaattgtggatgagagtatgggtctactctgggatgatattaacctggtgcgatgtaattgatagtctatgacgtggtggtattatagaatcagaaacagtgcatcatggaggactgaaatggagtactctatcccttacgaggggggatgcatggcaggggagtggattaagccatgacccggcctgattgtagaacactccttgaaatgctgtctagagacagacatgggcttggacagccacaacgaaggaggtggggggcgtgctgaacaaaaagacgtcaccctgtgcatgaagaccatgaactgaccagatgggaagcggagagagcacattgaagaggaccccctggggcgggacatggaagacaaagggggctctttcagagcacaaaatgggaaacgagacatcactgatcgaaagattaacatactctctgaccaatctcctagcaaggacagacaaacagataaatcaggagacgagacaaacagacaggaaaaaacacgagaagtgccaagg

SEQ ID NO: 674404 - DNA, 208 bp, Homo sapiens
atattgaaggatgtcaagttcctcatttcccatacaaaggaatggtggaggattcatctttcttggaatctttggctaaggtggttggaagggggacttttggcatcttttcagggagggcctataattggggccctctaactaaaaaggtctcctatgccccttaggataggatgagattttttttttgacctgtaccacacatgtg

SEQ ID NO: 674405 - DNA, 214 bp, Homo sapiens
ccctgcagctgggggcaaggcagctctctctttccctcaccatgacgtacggtcctctgccgctgctgcgtgccttccagaggcttcgatccacccccatgaggctgtcttactctttcagtgaccacaactgtaccttcattagccataaggctgctctcaccaaggtagaagctggcagcatacaccctctctgtcacaacggcacgtggca

SEQ ID NO: 674406 - DNA, 930 bp, Homo sapiens
  misc_feature (705)..(705): n is a, c, g, or t
taggacttagtgttgcgaagatttataggaaacaaatattttatatagaagaaatcccggtatttttaacatcacaagaaatgggtaaattactagatgagagtgttgttttttttcctaagattccagagggaaacataattccataataagaattaaaatgtggatcccgatatttaatttaataatttgaatcggtattggattttaaacattctaaagtcctgggtcccaggaagtagagatcatggaacataatttatagacagtaaagggcaatcatcgtatatatgggatggaaagaaaaatacagcatacacggcttcaaaagtaaaggtttcttaagggatatatagtatatacgtggcatgaagtaaatacaaaggtgggtatcctgtgcctgtatggattttcctcctcaagtcttccttggccctacctagtgtgtactagagaacattttctacaaatttcaatcgcaaaagaggaaaaattacacataaagccaagggccaggacagggaagtgggacagtcgggagtggctactcatttcgggtaagggttataataacatacaaatcatatggtctactatatccgtaaaaataagcgatacctcttaggtgaattataaacccttctggtgtaaagtcaattggccatagcaaagtgagtttggtgttgttcacaagttcggaatatnggcggcccacaagtgaggccagattgcatagaatatagaatggtctaaatgccaccaacatcagaagggaccttcctcgggggggctaacaaccaaacttgtaagcaacggaagacatcgggaagccaccacatgagttgtataccaccccataacacctgacacagttgaatgaactgaaaccacctaataacatatcaatcctaccgacacacagcacaagtt

SEQ ID NO: 674407 - DNA, 132 bp, Homo sapiens
gggatgcaaagcttacagccagtggcaacaatgattaatgagacaaacacagtaagtacagcatggagtaggctaggatacggaagtataaaggtgctgcagtgcccaggtacagtaaacacccaacctggc

SEQ ID NO: 674408 - DNA, 228 bp, Homo sapiens
gagagcagcacggtggctgtggctgtgcggtggcagttgctgccgcagcagccacagctgcagcagctgccgcttgcgtgaatgtcagtggagggtcttgcagcatgtgatgtgggatggcccatggccccccgtggcctgcctgcataccctggtggtgaatgccgggggccccatgggtagcccccgctggctgtacactgccttgctgcacgacagcccaaaact

SEQ ID NO: 674409 - DNA, 174 bp, Homo sapiens
ctcgataaggccaatggtgagggaggtgaagtgagaggtatggttctgagtagtcctcctatttttcgaatatcgtgtcattgtgtaaggttggtggatgatggacccggagcacattagatagtatggctttgaagaaggcgtgagtacagatgtgcaggaatgctaggtgtg

SEQ ID NO: 674410 - DNA, 269 bp, Homo sapiens
tgtacaaaaagaaaatagatatatacagaatgcagaagtatcatggagttaacaccaagaatcagtcatggaccatatactacattaatagaattatagacgttgaactttctgatataaaaattggactgagttttgaacttttggtaagaaataaaagccgattaagcactggccgacccgcggctggtacccaatgcccgagtcactgtggcagcattcgcactggtgtggggagtcctttcaactcaaggaggctgggtttctgg

SEQ ID NO: 674411 - DNA, 204 bp, Homo sapiens
tgatctacgatccttatgcgcgcaggcatgattgagaagctggttaaggagggcgcgcctggagccctggtggacccgcgcagcgtgcagcgatccaccagcttcggggtcccaatgccaacagcatcaagcagatgctgctgcacgtggtgtcagagccaagaactcgcggctacgaagcactgtcgacatccgagaacttct

SEQ ID NO: 674412 - DNA, 162 bp, Homo sapiens
ttatcagcactggctattgacaaggttattttgtaacatttgtcttactttttacttgttataagctttgcctcaggttggctaatcttcattttatgctgccattattgttgctgcttattcaaatttcttgtaatttcagtagagtgtgaacgactttca

SEQ ID NO: 674413 - DNA, 377 bp, Homo sapiens
tgtgtgttcagaaagcggtctgggcttaagtttgggcttggtgtctgctccttgacactcaggatcaggcagagcgacctagagactgccttcacggcgcgtccatgtctaggtgtgccccgggtcacggctggggatgtgggggccatttttccctgagcacaggctgggagggagtggcgggatgagcaggatgggatggtgctgtccctcgaggtttggtatatttgctcctagagcagtccaggaggcatgtgtgggtctagacgcatcactcaattctgtccctgctcttgatagcgccattcgcgaaagatttcccaaagttactacgccttggatggcccatgagcgtaccccaaaacaaattgcccttg

SEQ ID NO: 674414 - DNA, 728 bp, Homo sapiens
atcatccagcgccatcggcctggcgcttcagccaacgcgggagtggatgggccccttcttcttcgcagacatgcgttcggcctgctgccctgggctctaggctgcggccggacggcccagtctggatgggttctggggctgtgagtgccctgggggtggtgctgctgctgccctgtgggtcctggcctctcactctgctcccctctcgtccgcagccgcagggccgtaggcagccatggctgcccagcctggaatggcatggtcttgaagccccacttccacaaggactggcagctggctgcgtggccactgtggttcaaccatgccgtgccctgtaatgatcctgcagactgtaatgtgccctggcaatgccaatggctgctgcctgcatacgcccctgccgcccctgcgtcgggtcccatcctggcccatctgtgctgctgccccacggttcggtaccacactgaatggtgcgctgccggccgcggcttcagcctggatggagctcagggtgtgccggcattcacaagaaggtggcccggaccatcggcatttctgtgtgatcctgaggaggcggaacaagtccacggagtccctgcagaccaaccgtgcagctggctgaaggagtacctgctccaaactcatcctcttcccaggaagccctcggcccccaagaaggagacagttctgctgaagaactgaaactggcaccaactgaacggacggca

SEQ ID NO: 674415 - DNA, 332 bp, Homo sapiens
  misc_feature (56)..(56): n is a, c, g, or t
  misc_feature (100)..(100): n is a, c, g, or t
  misc_feature (109)..(109): n is a, c, g, or t
  misc_feature (115)..(115): n is a, c, g, or t
  misc_feature (155)..(155): n is a, c, g, or t
  misc_feature (181)..(181): n is a, c, g, or t
  misc_feature (185)..(185): n is a, c, g, or t
  misc_feature (228)..(228): n is a, c, g, or t
  misc_feature (235)..(235): n is a, c, g, or t
  misc_feature (243)..(244): n is a, c, g, or t
  misc_feature (250)..(250): n is a, c, g, or t
  misc_feature (271)..(271): n is a, c, g, or t
  misc_feature (284)..(284): n is a, c, g, or t
  misc_feature (289)..(289): n is a, c, g, or t
tctgtatcaaaagtagaggctgtgaattggttatggtactcttgcctgagtgtggnctcagaatccaacccatataccacactctagcagcagcaaaatncatcagagntggctncaagcggaactaacgggcctgtgtgtggcctgtgagaganccctattccacatctatattagagcnctgnacagtgtgagctctatacccagcctcgagggacaggtataggnaagagangtgtgttnncagggnaatctcattttatacacaatncatatcggttaanaacantatttactctatgtcacatcacggtctaagcccttattgagtt

SEQ ID NO: 674416 - DNA, 1070 bp, Homo sapiens
ggagaactagtctcgagttttattatgtttattggcggccccaggtcattgaaatgggacactttattgaggctccagggccacgtgggcctgggcaggatggctgcccttcaaggaaaagaacaaccttattggaccttcttcttgggacgcaggttgttggtgtgaccacacttcttcttgcggcagttgacagcacagagggtagaaggcgagcatagcacttgctggagatcatcttgtcgcagtagtatttctggagcaacgctggctggagaaggaagggctcagattaatgccacctcgaaggcgcaaaaccatggtgcagggtgagactcttcctggatgtggtagtcgtgacaagaagatgtgcggcatcctccagctgttagccggcaaatatcaaacgctgctggtcaggtgggataccctcctgtatcttgaaatttgggcttatgacattctcaatggtgtcacggggctcgacctcaagggtgaatggttttgccagtgagggatctacacaaaggatcgtgcaatgttggcagtccgaagagacctgtcgccgaattagatcttcaagattatatatattaatattgtataaatataattattaaaaagtataaaagaaaatagggaaaattttatgaaagagggaatatgaaaaaaaacaaccacaaaagacggcgtaagaaagacgcaggagagcaacctccagagaaaaagaggtgcaacacaagtgagcacacgacacatcaaaagagaaacacggcccgataaaaaagacgcggcgcatcaacaaaaaacacccccaaggggtggacccagtgagacacagaaaaacaccccgataggtgtatgacaccagataagaaagaaaagaaaacaagaagacagacaacagcactgataggaggagagataaaacacagggagtaataaacagataaatgaggtgggatacacaccccatgttaaggaagaaaaaatttattacacacgagaagacacgataaataacaagaagccgatgaaaatgtgttggggtgatagaaaaaaggacaaac

SEQ ID NO: 674417 - DNA, 299 bp, Homo sapiens
acgcgagcgccataccaactatatgacattccggaaaagccaaaattatggagacagtaaaaagagcagtgttttccagagggaggaatgtataggcaaatttttagtgcagtgaaatgaatctatgtaatactatagtggtggatccatgtcattatacatttgtccaaacacgtaggatgtaaccaccaatagtgaaccctaatgtaaactatggggtttgggtatcagaatgcatcaatataggtttatcagttgtaacaaatgtaccactctggtatggtccctcggcgtgtgca

SEQ ID NO: 674418 - DNA, 331 bp, Homo sapiens
cacctccagcccggtttcacccatggtccagtttcccagcagcagcaacatccccacgcagccccccagcaagtcttttggcaagccggaggacgcagcccccaagaccaggggacagggccagaaggaattgttgaaacagcctgccagcagggcctcagtgcccgagttggtcccctgccattccgggacctttttggagtacacttgggagtccccccccgagatcacctgcagctggccaccccacaggcccccgtgcctgcagcactattggtgcctgaaacccctggcctgttaggaggttccaataaagctaacccggaccaga

SEQ ID NO: 674419 - DNA, 295 bp, Homo sapiens
gatagaacgatcagagagagagaaagacccgagagagcaagctgcagacttaaatgtccctgtctgacagctttgaagagagtggtggttctcccagcatgcagtttaagatctgagaacagacagactgcctcctcaagtgggtccctgactgccaggtagcctaactgggaggcacctcccagtaggggcagactgacaccccatatggccaggtgcccctctgagacgaagcttccagaggaagaaccaggcagcaatatttgctgttctgcaatatttgcttgtaccgctg

SEQ ID NO: 674420 - DNA, 808 bp, Homo sapiens
tggagacagagtcttactctatcctccaggcgggagtgcggtggcgcgaggtcttggtcacgggaagctcgtggctccggggttcacgcgattctcatgcctcaggctcccgagtagctggagtaacgggtgcccttccaccacacccagctaatttgggtatgtgtagtacaagacggggtcgcgccatgttggccaggctggtcttgaactcctgacctcaggtgatcctcccgcctcggcctcccaaagggttgggattacaggtatgagccaccatgcccaggctaaaataaaattattagattactcttaaatatatccaggggcgataaatactacatacagccaaaagtgagtgagatacctagtggctatctggttaaacaatcacgggaaaaagctcttcttaggcaggcagaaattgtgattatgtcatccctttctactcttggaccatatatttgaatatgcctcagaatttcagccgaaggtaatatatcttaggcttcacgagtatgttaatatagcggggcacagtggctcacacctgtaataccgcagtgcttagggagcgcaaaaggctagccagatcacttgagcccagggttggaagaacaagctggcaagcatgtcggaaccccatctctactgaatatacaacaaagttcaggcaaggtgtggtggcatacacctacagtgcccagcaaccaggagccgagggggaggacactggggcaggacgcgaggtccaggacaccggtccgacctggacttgagcggggagacagaacttctcaaatcagcg

SEQ ID NO: 674421 - DNA, 138 bp, Homo sapiens
tgcgcttatccgtacaggtagtgtcgacgcatccgcccaacttgtgctccagctgttggaaggccctgtcggcctgtgcattcacagtgtccagttccagctggatggcctccagtagggtccatgcggacgagcctc

SEQ ID NO: 674422 - DNA, 192 bp, Homo sapiens
atgctgttctagaggatcccactgtctgagcagtatgtgagctctcaggaaagggaggaaaaagatgttgataaataaggagtgcaatttcttgaggcaggtgacgaggtagggaggcttactatttttaatgccctcagaccccagtactctgataatcagatggagaccagtgtccaagtcttgcaatca

SEQ ID NO: 674423 - DNA, 159 bp, Homo sapiens
gctgaaaacgtatatcgttgagtatccttaatcttgaacatcaaaatcagagactgcttgtgagtgctgagcatgacaccaatgaatgtggagacattcgacatctgatgtcatgtgacaggtcacagtcaaaactttgttttgggtcgggcatggtgg

SEQ ID NO: 674424 - DNA, 309 bp, Homo sapiens
  misc_feature (31)..(31): n is a, c, g, or t
  misc_feature (263)..(263): n is a, c, g, or t
  misc_feature (284)..(284): n is a, c, g, or t
  misc_feature (305)..(305): n is a, c, g, or t
ttactttcattactgcctcagccacttgtgnaagcatttttccggtgttgtggtattgttacattttatggacaatgtttttgtgacgatggacaaacctgagccccaacacttgaaaacaaaattatgttttcagggctgggcgcggtggctcgcgtgttaatcccagcactttgggaggcccacgtgggtgaatgacaaggtcaggagattgagaccatcctgcctaaccgtggtgaaacccagttctctacccaaaaatncaaaagatttggcccggggcntattggctcacacctgtgatnccaa

SEQ ID NO: 674425 - DNA, 448 bp, Homo sapiens
ctgacctatcagggatggggaactttgtgaccaaccactcacctaggctgcgtcaatgaccggaaggagcagctcaggcagctgttccgatcccttcaagcgcagaggaaagcccctagctgacccccagtcagaagaaatgaggccctggcaggtgccgccctggcctctggcagcgcgattccagcacagcgcacctttttccagtcttcacctttttccagcatggcagctgtttcactggacaggaccagcttgtacttggaccagactccctggactccccactccagccctgtgcatctttgaaccaggaacagccaatctttggaactgggtgggcttatccttgactgattggcaactgggcccaaagaggccaagcagcaagttccactgctcagagagcacgtctaataccacatctaataaagcacaggcttagagc

SEQ ID NO: 674426 - DNA, 104 bp, Homo sapiens
ggcgaatcacttataaatggcgccaaagcaggaccctacgcctaaattccaggagggcctagcgagctcctatctctcatgggcctatgctctatgaagcaaag

SEQ ID NO: 674427 - DNA, 282 bp, Homo sapiens
ccatatttactgatcttttagaaaaatgtttcaaaccaggctgggtgcggtggctcacgcctgtaatcccagcactttgggaggctaaggcgggtggatcacgaagtcaggagatcgagaccatcctggctaacttggtgaaacctgtctctactaaaaatacaaaaaaattagctgggtgtggtggcgtgtgcctgtagtcccagctacttgggaggctgaggtaggaggatcatagtttcaaagtgtggcacttactggttctccactcactccctcctg

SEQ ID NO: 674428 - DNA, 296 bp, Homo sapiens
attcttgtgttaactgccccttggcctgaaaaaactcattgtaagcctgaaaaaaaaaatctttccccctgttttttttgcctgttgtaagaatccaatgaaataatgtatgtgaaagccccttgtaaactgtaacccatcaatgtaaaatgttaagggggggtggtatttccttaattacttctttgtttagaatggaatttcctatgccctactgtagctaggaaatgctgaaaacaactgtgtttttttattaatcaataactgcaaaattaaaggcccttcaatggataaga

SEQ ID NO: 674429 - DNA, 430 bp, Homo sapiens
tgtcgtatagaatgatgtgagcggatacggttttggatgatttgagaagctaaatggaagatacaaggtccgaataaaaggaggagaaaaatgggtattaaatgtctaagaatagggaggacctaggacatctgattagagagtgccttaggagattcagcatagtcctgccagcaaagattatttacttcaagagttaagagtggcagtttggggatagcaccaggagatatcagctgtgatggcttggagaaacagtgtaaaccggcagtgtaaacaagagcagggcatgtatgagtagttgagaacggtgaataggagtatgactagacagaagatagtagggatgacaagtttgtgggggcacagtctaagtcggtctggtgtcccaaaaaacttgtcaagcccaaatttcatcctcatctgttac

SEQ ID NO: 674430 - DNA, 277 bp, Homo sapiens
  misc_feature (109)..(109): n is a, c, g, or t
gggggggggcccccccccccgggtttttttcccccggttaacccccggggccccccaagggggggggcggggggggaaccccttttttttagggggggggggggccccntttttttaaccccccaaactttggggcccaatcccccgtccaaaaaaccaaaaggggggggttttttttttttcccccccccggggcccttaaaggggaaatggggggttttttttttttttcccccgggggggccccccccccttttttttgttttttgggggggga

SEQ ID NO: 674431 - DNA, 684 bp, Homo sapiens
  misc_feature (10)..(12): n is a, c, g, or t
  misc_feature (19)..(19): n is a, c, g, or t
  misc_feature (55)..(55): n is a, c, g, or t
  misc_feature (103)..(103): n is a, c, g, or t
  misc_feature (116)..(116): n is a, c, g, or t
  misc_feature (680)..(680): n is a, c, g, or t
cgagggattnnncagcctnccccttgagccctcgttccgacgtcgttcccctgcngcttttccgcacgcgctgcgcttcgcatggcgttcaccgagaaaggantcgttcgtatgtncgtatccagacctccctctttcgacccctttgctgatgcaagtaagggtgatgacctgcttcctgctggcactgaggattatatccatataagaattcaacagagaaacggcaggaagacccttactactgtccaagggatcgctgatgattacgataaaaagaaactagtgaaggcgtttaagaaaaagtttgcctgcaatggtactgtaattgagcatccggaatatggagaagtaattcagctacagggtgaccaacgcaagaacatatgccagttcctcgtagagattggactggctaaggacgatcagctgaaggttcatgggttttaagtgcttgtggctcactgaagcttaagtgaggatttccttgcaatgagtagaatttcccttctctcccttgtcacaggtttaaaaacctcacagcttgtataatgtaaccatttggggtccgcttttaacttggactagtgtaactccttcatgcaataaactgaaaagagccataaaaaaaaaacaaaaaaaaaaaaaaaaaaaaaaaaaaaaaaaaaaaaaaaaaaagnaaga

SEQ ID NO: 674432 - DNA, 210 bp, Homo sapiens
gcggccgcctactactactactgcttgaattcaagcttctaacgatgtacggggacatgtagctagctgtagagcttgcaacttaatagcagcagctgcccaatgccatgtgaagtaacaaactggtttttggtttttttttccccttcagttttaatgttatgtgtaatgtatttaaacccttatttaaataaaacttgttttcagaaa

SEQ ID NO: 674433 - DNA, 339 bp, Homo sapiens
tctagaggatcccttgcaggagagagaactgcttgaacctgggaggcagaggttgagtgagccgaggtcatgcactgtactccaggctgcgcgaagagcaagattagtttaaaaaaaaaaaaattcctaggcttggttaaattgtagtttctaccaaggagacagagagtaaacagggaatatcttatacagtatgataagtactttaaagaaagagaagccaggaacagagctagagagaggctggggttgccaccattttgtggaacgaggtcaaggacaggtgtctctgaagagtttgtgggaagtggatgtgaccctgtttgggaagaacagccc

SEQ ID NO: 674434 - DNA, 1356 bp, Homo sapiens
agcgggccccagtcactgagccgccgccgaggattcagcagcctcccccttgagccccctcgcttcccgacgttccgttcccccctgcccgccttctcccgccaccgccgccgccgccttccgcaggccgtttccaccgaggaaaaggaatcgtatcgtatgtccgctatccagaacctccactctttcgacccctttgctgatgcaagtaagggtgatgacctgcttcctgctggcactgaggattatatccatataagaattcaacagagaaacggcaggaagacccttactactgtccaagggatcgctgatgattacgataaaaagaaactagtgaaggcgtttaagaaaaagtttgcctgcaatggtactgtaattgagcatccggaatatggagaagtaattcagctacagggtgaccaacgcaagaacatatgccagttcctcgtagagattggactggctaaggacgatcagctgaaggttcatgggttttaagtgcttgtggctcactgaagcttaagtgaggatttccttgcaatgagtagaatttcccttctctcccttgtcacaggtttaaaaacctcacagcttgtataatgtaaccatttggggtccgcttttaacttggactagtgtaactccttcatgcaataaactgaaaagagccatgctgtctagtcttgaagtccctcatttaaacagaggtcaagcaataggcgcctggcagtgtcaagcctgaaaccaagcaataccgtcatgtttcagccaagcccagagccctaagattacaaacaactatggccggaacctcctcagctctccctctgcagagttccctaccctaagagaatgttaccacctgaacagtcctcggtgaatctgagaggagaggatggggtaaggcagaagcaccagctgtactactagaagggagcttttggtggtagatcccctggtgtctccaacctgactaggtggacagagctcaaagaggccctcttaccgctagcgaggtgataggacatctggcttgccacaaaggtctgttcgaccagacatatcctagctaagggatgtccaaacatcagaatgtgaggccaaccttctatcagagttaaacttttgacaagggaacaaatctcaaactgatccatcagtcatgtagctagctgtagagcttgcaacttaatagcagcagctgcccaatgccatgtgaagtaacaaactggtttttggtttttttttccccttcagttttaatgttatgtgtaatgtatttaaacccttatttaaataaaacttgttttcagaaaaaaaaaagtcgacgcggccgcgaatttagtagtagta

SEQ ID NO: 674435 - DNA, 790 bp, Homo sapiens
cgtaccccctggaatcttacctaagcacacgcttcccatatgctaagagatgtcgccaccatcaagcccccacccaagactggcctgactctcagcacaacaccagagctctaagaaaggaagctttcagaccatttaaacattccatggccttttgaagagacgttactctctaagaagcaatctgcctagtggttggcccttctataaacccctggatgcttctgcacatggccttgcatgacatacccatgacatcccttaagcacccccatggacactcagcaccatgtcaagcggaagatggagaaccgtgattaccgggatgcacaggagatttgctgctgatgtacggcttatgttctcaccactgctataagtaccatccccccagatcacagatgttgtggccaatggccaccgaaagctaccaggatgtatttgagttcccgttatgcccagatgcccagatggacccactagaacccgggccctttacccagtcatcgtacatgcccatgccccctggcttggcccaaatctgtcttccagagatcctcccagtgaggaaagtagccagtgagagctcctctgaggaagaggaggaggaaaatgaggaggacgaggaggaaaaagagagtgaagctcagactccgaggaagaaagggctcatcgcttacgccagaactaccgggcccagcttcggcccgtaccatgaccactggctgctctgtccccgggtcccattatcccagccccagaggaaaagagagtacaacaataaaaaaaa

SEQ ID NO: 674436 - DNA, 1281 bp, Homo sapiens
agcgggccccagtcactgagccgccgccgaggattcagcagcctcccccttgagccccctcgcttcccgacgttccgttcccccctgcccgccttctcccgccaccgccgccgccgccttccgcaggccgtttccaccgaggaaaaggaatcgtatcgtatgtccgctatccagaacctccactctttcgacccctttgctgatgcaagtaagggtgatgacctgcttcctgctggcactgaggattatatccatataagaattcaacagagaaacggcaggaagacccttactactgtccaagggatcgctgatgattacgataaaaagaaactagtgaaggcgtttaagaaaaagtttgcctgcaatggtactgtaattgagcatccggaatatggagaagtaattcagctacagggtgaccaacgcaagaacatatgccagttcctcgtagagattggactggctaaggacgatcagctgaaggttcatgggttttaagtgcttgtggctcactgaagcttaagtgaggatttccttgcaatgagtagaatttcccttctctcccttgtcacaggtttaaaaacctcacagcttgtataatgtaaccatttggggtccgcttttaacttggactagtgtaactccttcatgcaataaactgaaaagagccataagcaataggcgcctggcagtgtcaagcctgaaaccaagcaataccgtcatgtttcagccaagcccagagccctaagattacaaacaactatggccggaacctcctcagctctccctctgcagagttccctaccctaagagaatgttaccacctgaacagtcctcggtgaatctgagaggagaggatggggtaaggcagaagcaccagctgtactactagaagggagcttttggtggtagatcccctggtgtctccaacctgactaggtggacagagctcaaagaggccctcttaccgctagcgaggtgataggacatctggcttgccacaaaggtctgttcgaccagacatatcctagctaagggatgtccaaacatcagaatgtgaggccaaccttctatcagagttaaacttttgacaagggaacaaatctcaaactgatccatcagtcatgtagctagctgtagagcttgcaacttaatagcagcagctgcccaatgccatgtgaagtaacaaactggtttttggtttttttttccccttcagttttaatgttatgtgtaatgtatttaaacccttatttaaataaaacttgttttcagaaa

SEQ ID NO: 674437 - DNA, 360 bp, Homo sapiens
gtttttttgggttggggttttggttttgtttttgttttttactgagaaaggaagggccaagggattaggtgggaaccgggccctgggggcgccccaaattaaagcagagactcccctcctgggggccaagccccaacaagggggccggtccggcccaagcttttttttttttttttttttaatttttataattggggcccctgggggggttacgggggccatgagaaccccctttaccccccgacgctggggccccagggttggcccaactctggggtccctgactggtttgcctttcatacggggaatatgcctttgggctgggctggtcatggaataaacccctctctctttttttta

SEQ ID NO: 674438 - DNA, 307 bp, Homo sapiens
gttgaactcgctgaggacgtttgtcagtggagtgtgtagaagccgggatggtagacttcaaagtcttctgagagagtcccctgcgtctggccctgcgtccctagtgtgaattccagcacagcagtgaggtggaggacgtggagggcaacgctgagagaccagatcccatccgtagcccaggacgagggcccagcaagactcagaaccagagtccagctggcgcccaggatcgatgggtgcagtaacattcagaatcagagcccagccggcgcccaggacgagggcccagcaacactcagaaccagag

SEQ ID NO: 674439 - DNA, 2026 bp, Homo sapiens
agcgggccccagtcactgagccgccgccgaggattcagcagcctcccccttgagccccctcgcttcccgacgttccgttcccccctgcccgccttctcccgccaccgccgccgccgccttccgcaggccgtttccaccgaggaaaaggaatcgtatcgtatgtccgctatccagaacctccactctttcggtaagctatgggaaaggtcgcgggcccgggtggggcagcggggccttccgggcccggagacgtgttccgggaagttgccaagcgctccgggccttcgtaagctcgggcaggggaaacttgaccagggtcgcagggcagcgggatcaaggcctgggccccggggtcggaccctgagcgcgaccggaaggagcaggcggtaggtcagcccttgggcgggcccggcgtctcagtggcgcatttactaatggctcctgggcctcctcgggccacacccgcccctcccgtcaccattgcgtcacgtccgttacgtcaccacccgttgtcacggatccggagggaaaggcggtgccagccctaagtggcaagcgggtgcaccaatgggggtgggaggcttagccccgcctcgggagctcgggttccggcgggttgcatcagctgggtgcggcacgagtggcagcccggactcccccgacatgtgatcggcttcccagggagggcgggaggcccgggcgttccccgagcctggggaagctggccgtcccggactgacctgctcggggagagccagcaaaggacacattcggcctggcccaagccctgacgatttcagtgttgttttctgcacgcgcaaaacacctggggaccgaggggatggcagtggcatcctatctttgacagctctgaacgagcttaaccttttttttcagacccctttgctgatgcaagtaagggtgatgacctgcttcctgctggcactgaggattatatccatataagaattcaacagagaaacggcaggaagacccttactactgtccaagggatcgctgatgattacgataaaaagaaactagtgaaggcgtttaagaaaaagtttgcctgcaatggtactgtaattgagcatccggaatatggagaagtaattcagctacagggtgaccaacgcaagaacatatgccagttcctcgtagagattggactggctaaggacgatcagctgaaggttcatgggttttaagtgcttgtggctcactgaagcttaagtgaggatttccttgcaatgagtagaatttcccttctctcccttgtcacaggtttaaaaacctcacagcttgtataatgtaaccatttggggtccgcttttaacttggactagtgtaactccttcatgcaataaactgaaaagagccatgctgtctagtcttgaagtccctcatttaaacagaggtcaagcaataggcgcctggcagtgtcaagcctgaaaccaagcaataccgtcatgtttcagccaagcccagagccctaagattacaaacaactatggccggaacctcctcagctctccctctgcagagttccctaccctaagagaatgttaccacctgaacagtcctcggtgaatctgagaggagaggatggggtaaggcagaagcaccagctgtactactagaagggagcttttggtggtagatcccctggtgtctccaacctgactaggtggacagagctcaaagaggccctcttaccgctagcgaggtgataggacatctggcttgccacaaaggtctgttcgaccagacatatcctagctaagggatgtccaaacatcagaatgtgaggccaaccttctatcagagttaaacttttgacaagggaacaaatctcaaactgatccatcagtcatgtagctagctgtagagcttgcaacttaatagcagcagctgcccaatgccatgtgaagtaacaaactggtttttggtttttttttccccttcagttttaatgttatgtgtaatgtatttaaacccttatttaaataaaacttgttttcagaaa

SEQ ID NO: 674440 - DNA, 1832 bp, Homo sapiens
  misc_feature (1269)..(1269): n is a, c, g, or t
atgcgctctcacgcaagtggatggctgtcaacgtccctgtaaaactccgctcgtgaattcattcatgctaagtaacgttgtggtcacagcatacagaacccgaataacagctgacagcacggtacaagtaacgtggcaacggaaattcgtcctgctatcagcacctacggagaaaaaagccgtgagtgatgaactgacgaccgagaaggcacagaagatgctggtactcagtgcttgagcgactacagaattctaatagaccggcacattgtgcaccgagaacgaaatatacggactactcaatttacacataacacatactagaatgcacattatacgttgcccatgacacgatgtgtacggtaagacaacacatcttaaacgctgtgctacgtaacatcaattatagagaacccaccacctggactggaggcattactgtatagtacaaccaagccatttgacccacacagccctatattgctccgtgcacaacacattgattctgacagacgtcagcacattacacagcatagggatagacaaacaaagtggagtcccttcaacgtgatggatatatccatcaatcgcagtcttcacgcacatatgtaattggttattcacaacgtgccttatctccccagcgacttcatcacatatgttaataaaggaaaacctactacgtgcctcacagtagaagctttctgatcctgcacatcgcaccttctctataccagcgatgtaccaaatacacacatatgaacacatgcacacaccaacatcgtcgctacgacatcccgcataggacctactcctagacaattgacattaccagacactatgggctagttactggaagacatcgctaataacacctaactaccaacgacagacccacccacccaccgaaacaagacgactaccacctctagacactaacaacaactcacaccatcgccaataactaatactcactacaagtaataagatacgctcaacccatcacacaatacagccaacgcacaccttgcctactcgactcggcacagaacaactaccctaaacgacgcgttacgcgacacacctggacttacacgcatacaaactgtgggaccattgaacaccagaataccacaccacactacacataccacacacaccaacacaatcatcaactctaacacaataacaaacaaacaacacaacattactcaaacacttcatcccactaactcatatatacacaactggaaacacactatcgatganacaacacaaccaaccaacactaccaatcctccatcgctactctcgttgacaatccatcacacaacttatacccaccaccatacacacaacattctaacaatatctcaaaaacaccaacccctacacaacaccacatgcaataaacacaccaacatccactaagaaacacacaagaccaatcatacaaacacaactacacacaaaacacacaacaataaccctactcaaatttaacaaactcacacatcatcacaactataataacatcacatcataaaattataactaatgatccacacacacccacactacctaacaacaaaacaatacaccaacttaaatacatctaacaaaacacctaccaaatactacactcacaataaccaaattaacaaaacacctcatcaaaccaacagtacaataacaccaaccaacgtcaatcccaaccacaaatatatctaaaacacaaataaaatcacacaaaaattacatactcacacactaactctaacaccaaacacaatattccactaacctcacccacatacaatacattcaaatat

SEQ ID NO: 674441 - DNA, 123 bp, Homo sapiens
tgctccgcgactgcagtgaatgcctacattggggcgggcaccctgtgcacctgctagcaccctgtcacagttgtccagcttagctgcctctgcgactgcagtgaatgcctacattggggctgg

SEQ ID NO: 674442 - DNA, 1229 bp, Homo sapiens
agcgggccccagtcactgagccgccgccgaggattcagcagcctcaccgaggaaaaggaatcgtatcgtatgtccgctatccagaacctccactctttcgacccctttgctgatgcaagtaagggtgatgacctgcttcctgctggcactgaggattatatccatataagaattcaacagagaaacggcaggaagacccttactactgtccaagggatcgctgatgattacgataaaaagaaactagtgaaggcgtttaagaaaaagtttgcctgcaatggtactgtaattgagcatccggaatatggagaagtaattcagctacagggtgaccaacgcaagaacatatgccagttcctcgtagagattggactggctaaggacgatcagctgaaggttcatgggttttaagtgcttgtggctcactgaagcttaagtgaggatttccttgcaatgagtagaatttcccttctctcccttgtcacaggtttaaaaacctcacagcttgtataatgtaaccatttggggtccgcttttaacttggactagtgtaactccttcatgcaataaactgaaaagagccatgctgtctagtcttgaagtccctcatttaaacagaggtcaagcaataggcgcctggcagtgtcaagcctgaaaccaagcaataccgtcatgtttcagccaagcccagagccctaagattacaaacaactatggccggaacctcctcagctctccctctgcagagttccctaccctaagagaatgttaccacctgaacagtcctcggtgaatctgagaggagaggatggggtaaggcagaagcaccagctgtactactagaagggagcttttggtggtagatcccctggtgtctccaacctgactaggtggacagagctcaaagaggccctcttaccgctagcgaggtgataggacatctggcttgccacaaaggtctgttcgaccagacatatcctagctaagggatgtccaaacatcagaatgtgaggccaaccttctatcagagttaaacttttgacaagggaacaaatctcaaactgatccatcagtcatgtagctagctgtagagcttgcaacttaatagcagcagctgcccaatgccatgtgaagtaacaaactggtttttggtttttttttccccttcagttttaatgttatgtgtaatgtatttaaacccttatttaaataaaacttgttttcagaaa

SEQ ID NO: 674443 - DNA, 1268 bp, Homo sapiens
gcagccgtccggcttggacgcccaccctcacgcgagtacgatccccctgccgctctccgcacgcgcgcgcttcgaggcgttttcaccgaggaaaaggaatcgtatcgtatgtccgctatccagaacctccactctttcgacccctttgctgatgcaagtaagggtgatgacctgcttcctgctggcactgaggattatatccatataagaattcaacagagaaacggcaggaagacccttactactgtccaagggatcgctgatgattacgataaaaagaaactagtgaaggcgtttaagaaaaagtttgcctgcaatggtactgtaattgagcatccggaatatggagaagtaattcagctacagggtgaccaacgcaagaacatatgccagttcctcgtagagattggactggctaaggacgatcagctgaaggttcatgggttttaagtgcttgtggctcactgaagcttaagtgaggatttccttgcaatgagtagaatttcccttctctcccttgtcacaggtttaaaaacctcacagcttgtataatgtaaccatttggggtccgcttttaacttggactagtgtaactccttcatgcaataaactgaaaagagccatgctgtctagtcttgaagtccctcatttaaacagaggtcaagcaataggcgcctggcagtgtcaagcctgaaaccaagcaataccgtcatgtttcagccaagcccagagccctaagattacaaacaactatggccggaacctcctcagctctccctctgcagagttccctaccctaagagaatgttaccacctgaacagtcctcggtgaatctgagaggagaggatggggtaaggcagaagcaccagctgtactactagaagggagcttttggtggtagatcccctggtgtctccaacctgactaggtggacagagctcaaagaggccctcttaccgctagcgaggtgataggacatctggcttgccacaaaggtctgttcgaccagacatatcctagctaagggatgtccaaacatcagaatgtgaggccaaccttctatcagagttaaacttttgacaagggaacaaatctcaaactgatccatcagtcatgtagctagctgtagagcttgcaacttaatagcagcagctgcccaatgccatgtgaagtaacaaactggtttttggtttttttttccccttcagttttaatgttatgtgtaatgtatttaaacccttatttaaataaaacttgttttcagaaa

SEQ ID NO: 674444 - DNA, 1444 bp, Homo sapiens
agcgggccccagtcactgagccgccgccgaggattcagcagcctcccccttgagccccctcgcttcccgacgttccgttcccccctgcccgccttctcccgccaccgccgccgccgccttccgcaggccgtttccaccgaggaaaaggaatcgtatcgtatgtccgctatccagaacctccactctttcgacccctttgctgatgcaagtaagggtgatgacctgcttcctgctggcactgaggattatatccatataagaattcaacagagaaacggcaggaagacccttactactgtccaagggatcgctgatgattacgataaaaagaaactagtgaaggcgtttaagaaaaagtttgcctgcaatggtactgtaattgagcatccggaatatggagaagtaattcagctacagggtgaccaacgcaagaacatatgccagttcctcgtagagattggactggctaaggacgatcagctgaaggttcatgggttttaagtgcttgtggctcactgaagcttaagtgaggatttccttgcaatgagtagaatttcccttctctcccttgtcacaggtttaaaaacctcacagcttgtataatgtaaccatttggggtccgcttttaacttggactagtgtaactccttcatgcaataaactgaaaagagccatgctgtctagtcttgaagtccctcatttaaacagaggtcaagcaataggcgcctggcagtgtcaagcctgaaaccaagcaataccgtcatgtttcagccaagcccagagccctaagattacaaacaactatggccggaacctcctcagctctccctctgcagagttccctaccctaagagaatgttaccacctgaacagtcctcggtgaatctgagaggagaggatggggtaaggcagaagcaccagctgtactactagaagggagcttttggtggtagatcccctggtgtctccaacctgactaggtggacagagctcaaagaggccctcttaccgctagcgaggtgataggacatctggcttgccacaaaggtctgttcgaccagacatatcctagctaagggatgtccaaacatcagaatgtgaggccaaccttctatcagagttaaacttttgacaagggaacaaatctcaaactgatccatcagtcatgtagctagctgtagagcttgcaacttaatagcagcagctgcccaatgccatgtgaagtaacaaactggtttttggtttttttttccccttcagttttaatgttatgtgtaatgtatttaaacccttatttaaataaaacttgttttcagaaataaaaaaaaaagggggggctaagatcccggggcaactacggccggttttcaaggccaaggaggaaaaaagggcgcggaaaggaggaacggattggttgggaactccggggcggacccaaccggaa

SEQ ID NO: 674445 - DNA, 778 bp, Homo sapiens
tgttggggggggaaaaaaaaaaacccaaaacttggccccaaagaacagcccccctccgggggggattaaaccggcggtgaggggccccaaaacacccacattccaaaccacggggggggggagcccctttcaaaactaaggtggggtgttggggcggcgcgaagcgtagtaggggagaggcttctatcgaatggtagaaaatactaaaagagcactatgttctaacacaactaccaccttataagaaaaaaatgaagaggaacacggcgcatctgggccagtcctcttgtggaccacaggcgacactaaacacacttgtgcacgttcaagcaagatagggactagcgggccgtggtgtggtgcgactccaaacgagtggtaccacataaatgatggaggaaaaacacagggcgagggagagcatcccccgagggccaagcagatgggagaaccaaacggaagacaacaaatagagacaaaaaccgcacaacccactaaacagccggaagaacgaattgagccccgagagaaatggacgacgagcaccaactcactcgtggaggggtcgggaaagagggagaaatccatgcggatgcccccaggggaagagaggatacgagcgacacacagcggcgcatagcaaccccccggggcggaaggaacgaaaccacccgtcgtgaagaaaaaaaacagcagcagaagcacaacaagcgcgcgagcgacacacccaccgagcgggcgccgaagagacccacgatagtataaccgagacaggaca

SEQ ID NO: 674446 - DNA, 1206 bp, Homo sapiens
tcgtgccgaattcggcacgagcaccgaggaaaaggaatcgtatcgtatgtccgctatccagaacctccactctttcgacccctttgctgatgcaagtaagggtgatgacctgcttcctgctggcactgaggattatatccatataagaattcaacagagaaacggcaggaagacccttactactgtccaagggatcgctgatgattacgataaaaagaaactagtgaaggcgtttaagaaaaagtttgcctgcaatggtactgtaattgagcatccggaatatggagaagtaattcagctacagggtgaccaacgcaagaacatatgccagttcctcgtagagattggactggctaaggacgatcagctgaaggttcatgggttttaagtgcttgtggctcactgaagcttaagtgaggatttccttgcaatgagtagaatttcccttctctcccttgtcacaggtttaaaaacctcacagcttgtataatgtaaccatttggggtccgcttttaacttggactagtgtaactccttcatgcaataaactgaaaagagccatgctgtctagtcttgaagtccctcatttaaacagaggtcaagcaataggcgcctggcagtgtcaagcctgaaaccaagcaataccgtcatgtttcagccaagcccagagccctaagattacaaacaactatggccggaacctcctcagctctccctctgcagagttccctaccctaagagaatgttaccacctgaacagtcctcggtgaatctgagaggagaggatggggtaaggcagaagcaccagctgtactactagaagggagcttttggtggtagatcccctggtgtctccaacctgactaggtggacagagctcaaagaggccctcttaccgctagcgaggtgataggacatctggcttgccacaaaggtctgttcgaccagacatatcctagctaagggatgtccaaacatcagaatgtgaggccaaccttctatcagagttaaacttttgacaagggaacaaatctcaaactgatccatcagtcatgtagctagctgtagagcttgcaacttaatagcagcagctgcccaatgccatgtgaagtaacaaactggtttttggtttttttttccccttcagttttaatgttatgtgtaatgtatttaaacccttatttaaataaaacttgttttcagaaa

SEQ ID NO: 674447 - DNA, 1734 bp, Homo sapiens
agcgggccccagtcactgagccgccgccgaggattcagcagcctcccccttgagccccctcgcttcccgacgttccgttcccccctgcccgccttctcccgccaccgccgccgccgccttccgcaggccgtttccaccgaggaaaaggaatcgtatcgtatgtccgctatccagaacctccactctttcgacccctttgctgatgcaagtaagggtgatgacctgcttcctgctggcactgaggattatatccatataagaattcaacagagaaacggcaggaagacccttactactgtccaagggatcgctgatgattacgataaaaagaaactagtgaaggcgtttaagaaaaagtttgcctgcaatggtactgtaattgagcatccggaatatggagaagtaattcagctacagggtgaccaacgcaagaacatatgccagttcctcgtagagattggactggctaaggacgatcagctgaaggttcatgggttttaagtgcttgtggctcactgaagcttaagtgaggatttccttgcaatgagtagaatttcccttctctcccttgtcacaggtttaaaaacctcacagcttgtataatgtaaccatttggggtccgcttttaacttggactagtgtaactccttcatgcaataaactgaaaagagccatgctgtctagtcttgaagtccctcatttaaacagaggtcaagcaataggcgcctggcagtgtcaagcctgaaaccaagcaataccgtcatgtttcagccaagcccagagccctaagattacaaacaactatggccggaacctcctcagctctccctctgcagagttccctaccctaagagaatgttaccacctgaacagtcctcggtgaatctgagaggagaggatggggtaaggcagaagcaccagctgtactactagaagggagcttttggtggtagatcccctggtgtctccaacctgactaggtggacagagctcaaagaggccctcttaccgctagcgaggtgataggacatctggcttgccacaaaggtctgttcgaccagacatatcctagctaagggatgtccaaacatcagaatgtgaggccaaccttctatcagagttaaacttttgacaagggaacaaatctcaaactgatccatcagtcatgtagctagctgtagagcttgcaacttaatagcagcagctgcccaatgccatgtgaagtaacaaactggtttttggtttttttttccccttcagttttaatgttatgtgtaatgtatttaaacccttatttaaataaaacttgttttcagaaatacctgacttgcagattatttatatatagtcgatcttgtgcatataaaggaaccatagaaatgggcagtggaggattcgtccacacccacagcttctcaacgggcctgaattggccaagaaaaacctttatgagcttgtccctctctggtcaacgtggttttttgtcgttgtgtttttggagacaggttgtgcccttgttgcccaggctggagtgcagtggcacaatctcggctcactgaaaactccacctcaggttcaagcaatgtgtcgtgcctcagctccctagtagctgggatttacgcgcaccatgcccagctaacttttgtattttaagtagagacaggggttctccatgttgggcacggctggtcttgaacaaccctggcctccagtgaatctgcctgtctgggctcc

SEQ ID NO: 674448 - DNA, 105 bp, Homo sapiens
cggcacgaggggagcggccgcaaatgtttttttaagggtggatggcaccctggaaccgggaagggtggccttttccctagagggaataaattgggttattttcta

SEQ ID NO: 674449 - DNA, 313 bp, Homo sapiens
catgttactgcaagaacctccagctggcactataacatgtaacatggtccaatctatatgcatgtacacactgaataagaaggatcaatatggcaaactctggtgccagctggcacaagcatctactctctctctggaaccaaagaaccaaaagaatactagcactttccagcaaatccggctttgcttaactacgagtcttcactgttctgttctccttgcagccgggaatcccgtggctactcctagaggggctctgttatttagtctcttccccctggttacagttcgctgtgaagctctgggatggagg

SEQ ID NO: 674450 - DNA, 231 bp, Homo sapiens
tttgacagtgttgaagaaatcttaattaaacagactagatcccagacagagtacaaagacctacatcactgacacatcagagatatactgaaactgtacagtttttaatagaaagaatacctggatttgatttaggtaatatagatttaaattccaattttcttattttttattgtatcctatagatgttaaaaaagataactgatataaactcacaaaatatttctctcg

SEQ ID NO: 674451 - DNA, 313 bp, Homo sapiens
taggatccccctcgcctttacccaaagaaatagaaaacatattcacacaaaaatctgcacatggatgtttatagcagctttactcataattgccaaaacttggaagcaaccaagatgtcctttggtagatgactggataaataaatgttattaagcacttaaaaaaaaaaaaaaaaaaaggccgggggtggggactaagccctttaatccaagcctttttcccagcagcttgttaaaaaaatcatgaggggggggactgtttaaatagaaaacatttttttgtacccaacaacatttgccacttttggaccca

SEQ ID NO: 674452 - DNA, 141 bp, Homo sapiens
  misc_feature (43)..(43): n is a, c, g, or t
gttcgcgcgccatcaccagcaggtcggtcaaggctttacccancgtcagggtggtggcggcctgtttgtcgagaaagttttgtgccgccaactccagatccatcaggtccaacggttcgctgtccgaccaggcgatcagcg

SEQ ID NO: 674453 - DNA, 816 bp, Homo sapiens
gcggagatctcgccgggctggacgtacagctcggtgtctgcagcaccctccgtcttcctctcctaggtcgacgagacccaggtggctagaagttcaccatgtctatgtctcaagatccatgccagggagatcttagagctctcgcgggaatcccactgttgaggtgtgagtctcttcacctcaaagggtctcttcagaagctgctgtgcccagctggtgcttcaatttggtatctatgaggccctagagcgtccgggacactgataagactcgctatatggggaagggtgtctcaaaggctgttgagcgacatcacataaaagcgtagttgcgcctgcgcctggctgagcaacgaaacgtgaacgtcacaagaacaagagaagagttgacaaactgactgattcgagagtggatggaacagacagaagtaaatctaagttcgggtgcgaacgccattctgggggtgtccctgtgccgtctgcaaagctggatgccgtctgagaagggggtcccccttgtaccgccgcatcgctgacttggctggcagctctgaagtcatcctgccagtcccggcgtgcaacgtcatcacagggcggactcatgctggacaacaaagcctggccaggcaggagtgcatgatcctcccagtcggctgcagcaaacgttcagggacggccatgccgcatggagcagaggtataccacagccggaagaatgtcatcaaggcgaactatgggaaaagacgccacaatgggggggcatgaaggcgggttgccccaaaaagtcggaaataagaaagccggcacggtgacgacg

SEQ ID NO: 674454 - DNA, 151 bp, Homo sapiens
ccaacacgtttccccacatttcactggcttcggttggatgctagaggactgagattgggagctccgagcaatgagatttacatgagagtgggactcagagctggtctgtgcaggcctgagacttcaggagacactgtgtgggggataaata

SEQ ID NO: 674455 - DNA, 705 bp, Homo sapiens
agagatgttggagccacccatcaggcatgctctcccccacctctgtccagcccgcctcacggccctggcggcctcgctgtttaccagaagacgtttttctctgtccttacacttctcactgcctctctggacaccgggcttttgctgggctctccagagctgggtcttggctcttccagctggatgaaggactgagtccctcagataatcccctttcctgctttttcctgcctctgtttccctagcacagtgtggatgaatcaaatgacttgcctggctggcgctggtagtcatgggtgccagtcctcccctcttgattgctgggaatgagcagctgagctctttggtgtggacacccgccgcctagagctgaggtgcctctcgcgtatctggtaggctgcccatgctttgcagaatgccccacatgcatgaaggcctgatgtgcaagcgacccttgcgtcctgtactgacccctagtcagcggcagtctggggtagtttcccctgctgaggatgtgacatgggctggagactgtgtctgctttcgtgactccgtcttccagcacatcctgtggtcagcctttcccagagtgatactgcgccctggggtgtcctaaccccttggttgtgcagggactggtatgcttggatgacatggctcagagtcccagtatccacttgaaacctccctctccatctacccgac

SEQ ID NO: 674456 - DNA, 244 bp, Homo sapiens
  misc_feature (45)..(45): n is a, c, g, or t
  misc_feature (51)..(51): n is a, c, g, or t
  misc_feature (96)..(96): n is a, c, g, or t
  misc_feature (200)..(200): n is a, c, g, or t
cgaactgcggcccggaacgcatgaggaagggcccgtcccgccttncccggngcgccatggagccccgggcggttgcagaagccgtggagacgggtnaggaggatgtaattatggaagctctgcggtcatacaaccaggagcactcccagagcttaacgtttgatgatgcccaacaggaggaccggaagagactggcggantgctggtctccgtcctggaacaggcttgccaccctcccaccgtg

SEQ ID NO: 674457 - DNA, 153 bp, Homo sapiens
acatcaagtgaattgcatagagccccctcttccccgaacagctttcccagggaaacagctctaggctgggaggggagaaccaacccctccccctgccccaccacctcccttgggactgagagggcccctaccaacctttgcatctgccttgga

SEQ ID NO: 674458 - DNA, 705 bp, Homo sapiens
gctgtacggtccgggatttaaggatcgagaccgcaaccaatgacagcgagccaagatctgcagagtcacaggcgaccacacacccggcggaccatggccgtggacctcatgggctgctacacccctcgccgcggccgacgaccagctcgccatccagtgaggccgccaccgccggtctccgagtgcctggaacaatcgtgggtctattaggatccacatcctgtccgggctgcggagaggggcgtatacgagccggcaagagataggagtgtattcgtacgcggattcagctctagacggtcgttgttggaactaatgtagtgtctgaatctacacggaaaagcaatagaacatggatgagagaggtgaacagatgaaaggagaacgaaagactagagtacatagaatgcacgaggatgattgaaagacaagaactacacactagttgtgactggagcgagacggtgacaaagaggacagacaagtatggtagatgaggacaggacggaaaagatcaagcgtacacagaacgagaacaaccagcaagcggaccgaagccacaccgaggcacaacaaagggcaaaaaaaacaaaaacgaaacaacggacataaaaacgccaggaccaaaccagcgcaaaagaccgagccaacggacgagacaaacaacgaacaccagggagaccaaatcaacaaccaacggcggaa

SEQ ID NO: 674459 - DNA, 1007 bp, Homo sapiens
ggctcacgcctgtaatcccagcactttaggaggccgaggtggatggatcacaaggtcaggagtttgagaccagcctgaccaacatggtgaaaccccgtctctactaaaaatacaaaaaaaaaaaaattagccgggcatggtggcgcacacctgtaatcccagctactcaggaggctgaggcaggagaattgcttgaatccaggaggcggaggttgcagtgagccgagattgcactactgcactccagcctgagttgaaaaagcaagactgtctcaaaaaaaaaaaaaaaagggaaaaaaaccggttgggggtgggcccaaggggttctcaccccgtgttaatccccagattttaaggaggcccattgcaggaggagtggttttgaacccgggagtttggggactcagcccgggggccaaccaagcgggtggggacctcattcctcttattttacaaaaccatattaaattagagcacctcgaagtcgtggagaaggggccgtggtcccgtcgacccgtggacccgggacaccttaacagcggggggaacctaagagtgccctccttattctccagatattattctccccggaagtgggaatgatcggcgggcttcaggtgtttccggggaaagaggccaggccccgggctgggcctcaagcttcccactccgcggttggaacttgggccatgtggcccgaccccaatttttagacggcgcgcggggtccctcaacgcttaaccccttttccctgggaacgccagggggtggcgggtgggaacctcttgcctggcagcgttcaaaggacgctatttgtgggcgccaggtgcccgaaccgaagtggtgatgggaattggccgcctgttatacgtggacggggagtgtttggcccacaacgctcctccattccgcggaaggcgcggcttcacgggacggcagggagggaacccccccccctcggtaaaaaaaatatgacggcgggaggaacccggggagcacgccacggg

SEQ ID NO: 674460 - DNA, 144 bp, Homo sapiens
tgccacgggtctcaggaagaaccctaaatttatggagaccgtggcggagaaagcgctgcaggaataccgcaaaaagcaccgggaggagtgagatgtggatgtggctttggcacctacggtggcatggataaacaccgggtaccg

SEQ ID NO: 674461 - DNA, 196 bp, Homo sapiens
agtgaccttaggatccccaggcgctgtgaggtatgatcggggttaataaacttgggcctgttcgggacctggttggcccgggtatgtgtcccgggaatgggacagcagtcccagacggaaactacacagaaataccacttagcttttatgatggtcacaaatgtggccaaaatgaccagggtcaacaagcgcctgg

SEQ ID NO: 674462 - DNA, 1379 bp, Homo sapiens
  misc_feature (1375)..(1375): n is a, c, g, or t
agcgggccccagtcactgagccgccgccgaggattcagcagcctcccccttgagccccctcgcttcccgacgttccgttcccccctgcccgccttctcccgccaccgccgccgccgccttccgcaggccgtttccaccgaggaaaaggaatcgtatcgtatgtccgctatccagaacctccactctttcgacccctttgctgatgcaagtaagggtgatgacctgcttcctgctggcactgaggattatatccatataagaattcaacagagaaacggcaggaagacccttactactgtccaagggatcgctgatgattacgataaaaagaaactagtgaaggcgtttaagaaaaagtttgcctgcaatggtactgtaattgagcatccggaatatggagaagtaattcagctacagggtgaccaacgcaagaacatatgccagttcctcgtagagattggactggctaaggacgatcagctgaaggttcatgggttttaagtgcttgtggctcactgaagcttaagtgaggatttccttgcaatgagtagaatttcccttctctcccttgtcacaggtttaaaaacctcacagcttgtataatgtaaccatttggggtccgcttttaacttggactagtgtaactccttcatgcaataaactgaaaagagccatgctgtctagtcttgaagtccctcatttaaacagaggtcaagcaataggcgcctggcagtgtcaagcctgaaaccaagcaataccgtcatgtttcagccaagcccagagccctaagattacaaacaactatggccggaacctcctcagctctccctctgcagagttccctaccctaagagaatgttaccacctgaacagtcctcggtgaatctgagaggagaggatggggtaaggcagaagcaccagctgtactactagaagggagcttttggtggtagatcccctggtgtctccaacctgactaggtggacagagctcaaagaggccctcttaccgctagcgaggtgataggacatctggcttgccacaaaggtctgttcgaccagacatatcctagctaagggatgtccaaacatcagaatgtgaggccaaccttctatcagagttaaacttttgacaagggaacaaatctcaaactgatccatcagtcatgtagctagctgtagagcttgcaacttaatagcagcagctgcccaatgccatgtgaagtaacaaactggtttttggtttttttttccccttcagttttaatgttatgtgtaatgtatttaaacccttatttaaataaaacttgttttcagaaaaaaaaaaaaacaaaaaaaaaaaaaaaaaaaaaaaaaaaaaaaaaaaaaaaaaaagnaaga

SEQ ID NO: 674463 - DNA, 1515 bp, Homo sapiens
agcgggccccagtcactgagccgccgccgaggattcagcagcctcccccttgagccccctcgcttcccgacgttccgttcccccctgcccgccttctcccgccaccgccgccgccgccttccgcaggccgtttccaccgaggaaaaggaatcgtatcgtatgtccgctatccagaacctccactctttcggtaagctatgggaaaggtcgcgggcccgggtggggcagcggggccttccgggcccggagacgtgttccgggaagttgccaagcgctccgggccttcgtaagctcgggcaggggaaacttgaccagggtcgcagggcagcgggatcaaggcctgggccccggggtcggaccctgagcgcgaccggaaggagcaggcgacccctttgctgatgcaagtaagggtgatgacctgcttcctgctggcactgaggattatatccatataagaattcaacagagaaacggcaggaagacccttactactgtccaagggatcgctgatgattacgataaaaagaaactagtgaaggcgtttaagaaaaagtttgcctgcaatggtactgtaattgagcatccggaatatggagaagtaattcagctacagggtgaccaacgcaagaacatatgccagttcctcgtagagattggactggctaaggacgatcagctgaaggttcatgggttttaagtgcttgtggctcactgaagcttaagtgaggatttccttgcaatgagtagaatttcccttctctcccttgtcacaggtttaaaaacctcacagcttgtataatgtaaccatttggggtccgcttttaacttggactagtgtaactccttcatgcaataaactgaaaagagccatgctgtctagtcttgaagtccctcatttaaacagaggtcaagcaataggcgcctggcagtgtcaagcctgaaaccaagcaataccgtcatgtttcagccaagcccagagccctaagattacaaacaactatggccggaacctcctcagctctccctctgcagagttccctaccctaagagaatgttaccacctgaacagtcctcggtgaatctgagaggagaggatggggtaaggcagaagcaccagctgtactactagaagggagcttttggtggtagatcccctggtgtctccaacctgactaggtggacagagctcaaagaggccctcttaccgctagcgaggtgataggacatctggcttgccacaaaggtctgttcgaccagacatatcctagctaagggatgtccaaacatcagaatgtgaggccaaccttctatcagagttaaacttttgacaagggaacaaatctcaaactgatccatcagtcatgtagctagctgtagagcttgcaacttaatagcagcagctgcccaatgccatgtgaagtaacaaactggtttttggtttttttttccccttcagttttaatgttatgtgtaatgtatttaaacccttatttaaataaaacttgttttcagaaa

SEQ ID NO: 674464 - DNA, 110 bp, Homo sapiens
cggtcgcggtgagctgagactcgagccattgcattccagcctgggcgaccaagactgaaactctatcccccaaaaaagtacaaattatttctaaaccttgattttattac

SEQ ID NO: 674465 - DNA, 145 bp, Homo sapiens
ctgtatctgtttgaggatctggtgtgcttctcagccgatgtgagggggccgaggagagtatcctgtttcggggagcgcgtgggcgcggggactgggtcaggagaagccccagggggacgtggaaccgagagattttcgggatgga

SEQ ID NO: 674466 - DNA, 1265 bp, Homo sapiens
  misc_feature (10)..(12): n is a, c, g, or t
  misc_feature (19)..(19): n is a, c, g, or t
  misc_feature (55)..(55): n is a, c, g, or t
  misc_feature (103)..(103): n is a, c, g, or t
  misc_feature (116)..(116): n is a, c, g, or t
cgagggattnnncagcctnccccttgagccctcgttccgacgtcgttcccctgcngcttttccgcacgcgctgcgcttcgcatggcgttcaccgagaaaggantcgttcgtatgtncgtatccagacctccctctttcaaactccatctacgacgctatgctgatgctagtgatgacctgtcgtgtggctgagattatcatataagaattcaacagagaaacggcaggaagacccttactactgtccaagggatcgctgatgattacgataaaaagaaactagtgaaggcgtttaagaaaaagtttgcctgcaatggtactgtaattgagcatccggaatatggagaagtaattcagctacagggtgaccaacgcaagaacatatgccagttcctcgtagagattggactggctaaggacgatcagctgaaggttcatgggttttaagtgcttgtggctcactgaagcttaagtgaggatttccttgcaatgagtagaatttcccttctctcccttgtcacaggtttaaaaacctcacagcttgtataatgtaaccatttggggtccgcttttaacttggactagtgtaactccttcatgcaataaactgaaaagagccatgctgtctagtcttgaagtccctcatttaaacagaggtcaagcaataggcgcctggcagtgtcaagcctgaaaccaagcaataccgtcatgtttcagccaagcccagagccctaagattacaaacaactatggccggaacctcctcagctctccctctgcagagttccctaccctaagagaatgttaccacctgaacagtcctcggtgaatctgagaggagaggatggggtaaggcagaagcaccagctgtactactagaagggagcttttggtggtagatcccctggtgtctccaacctgactaggtggacagagctcaaagaggccctcttaccgctagcgaggtgataggacatctggcttgccacaaaggtctgttcgaccagacatatcctagctaagggatgtccaaacatcagaatgtgaggccaaccttctatcagagttaaacttttgacaagggaacaaatctcaaactgatccatcagtcatgtagctagctgtagagcttgcaacttaatagcagcagctgcccaatgccatgtgaagtaacaaactggtttttggtttttttttccccttcagttttaatgttatgtgtaatgtatttaaacccttatttaaataaaacttgttttcagaaa

SEQ ID NO: 674467 - DNA, 1341 bp, Homo sapiens
ggagagaactagtctggttttttttaatttttatttaaaatattgtgaactttatactggttaaaatccactgtccattaaatgatcactacctaatggtcactaaatttacaaatttaaggaaattatttattagaactacggtgcaaaaacacagataaaaagacgtgaagtttcgcccattctcgtgcctcaggaagctctcttcacctcctaagcttcactagtgtaggtccctatcgtggactctcaacaattctcgtgctcatttataaacgtggttatattccctccattatgtgaatcattccttattggagttccccgagtgtgcgcagaaacttctcccagagagccctttacatcggcctcagaagtagccatctatttggggtatagccatttcgaaacgagcctttcaaagtagattgcccgtgctgtgcacaaacagacggatatgcagtgaccgtgtgtcatacacatattgttcatcctccccgtgagattcttccgcgcgtgtgatccatatatatctaatatggcccgagtgaaggactctcccacgcttctatatatcttgaagcacaaaaatctgctcagtttcatgtgtcgacaaaggcacatgatggatgtggatggcgaacactttctaattattcataagacagaagggggataacaaatagttgcggcctcccctttgtggtacaaaattatcctctctccccaaacatacttatggagaggagtaacaccagtatgagaaaagactaccagggtagcacaatgtggaagcatatcccctatactcaaaggcgcaccgaacatatatattacaaactgtgggctattatccaacagaaccatccgtgtagtcacccccatttctcttataatcttcctgcgcagcggaggtgtactcttatacactagtacaacagagcagattatcattattactcagcttcctgtggtcgccatcttattcttataaaacacaccacgaagttgaattattgtaccgacaacaataatatatctacccaaatgcatttgtatgtgggagcgctttcatacaagtgttcatcccaaccgccgcacggataacaacaggaacgctcgttgggaggcactattttcagcgcaacaacagttcaccgttggtacttagtaggcacctacacacacgaggtgatccccccacgttgtgtttggcccgccggtttattatacacactccgatatgaataaagagcccgtacaaacgaaacacacatgttcggatacaccgataaagaccgccccacaatgattgtggaggcgacatgttcaacagagccc

SEQ ID NO: 674468 - DNA, 433 bp, Homo sapiens
tactgtgatgcctctagctttgttgtttttgcttaggattgtcttggctatgtgtgctcttttttggctccatatgaaatttaaagtagtttttctaattctatgaagaaagtcaatggtagcttaatgaggatagcaatgaatctataaattactttgggtggtatagcactcaggcacagaaatgtccttgtgttagtcaataccattcaggacagagccatgggcagagacttcatcaccagaacacaaaaagcaatggcaacaaaagccaaaattgacaaatgggatctaactaaactaaacagtatctgcagtgcaaaagaaactattatcagagtgaacaggcaactcactgaatgggagaaaattgttgcaatctatccatctgacataagggctaatatgcagaatcttcatagatcaaacttac

SEQ ID NO: 674469 - DNA, 1399 bp, Homo sapiens
agcgggccccagtcactgagccgccgccgaggattcagcagcctcccccttgagccccctcgcttcccgacgttccgttcccccctgcccgccttctcccgccaccgccgccgccgccttccgcaggccgtttccaccgaggaaaaggaatcgtatcgtatgtccgctatccagaacctccactctttcgacccctttgctgatgcaagtaagggtgatgacctgcttcctgctggcactgaggattatatccatataagaattcaacagagaaacggcaggaagacccttactactgtccaagggatcgctgatgattacgataaaaagaaactagtgaaggcgtttaagaaaaagtttgcctgcaatggtactgtaattgagcatccggaatatggagaagtaattcagctacagggtgaccaacgcaagaacatatgccagttcctcgtagagattggactggctaaggacgatcagctgaaggttcatgggttttaagtgcttgtggctcactgaagcttaagtgaggatttccttgcaatgagtagaatttcccttctctcccttgtcacaggtttaaaaacctcacagcttgtataatgtaaccatttggggtccgcttttaacttggactagtgtaactccttcatgcaataaactgaaaagagccatgctgtctagtcttgaagtccctcatttaaacagaggtcaagcaataggcgcctggcagtgtcaagcctgaaaccaagcaataccgtcatgtttcagccaagcccagagccctaagattacaaacaactatggccggaacctcctcagctctccctctgcagagttccctaccctaagagaatgttaccacctgaacagtcctcggtgaatctgagaggagaggatggggtaaggcagaagcaccagctgtactactagaagggagcttttggtggtagatcccctggtgtctccaacctgactaggtggacagagctcaaagaggccctcttaccgctagcgaggtgataggacatctggcttgccacaaaggtctgttcgaccagacatatcctagctaagggatgtccaaacatcagaatgtgaggccaaccttctatcagagttaaacttttgacaagggaacaaatctcaaactgatccatcagtcatgtagctagctgtagagcttgcaacttaatagcagcagctgcccaatgccatgtgaagtaacaaactggtttttgggcagctgttgctgtacaatttctacacctagggcgcgggcccaggtgcagccgccgcagtgcagatcttggaggtagtagcaaatattcaaacgagaactttgaaggccgaagttggagaagggttccatgtgtggaaattgaacgggtaccgagct

SEQ ID NO: 674470 - DNA, 1274 bp, Homo sapiens
agcgggccccagtcactgagccgccgccgaggattcagcagcctcccccttgagccccctcgcttcccgacgttccgttcccccctgcccgccttctcccgccaccgccgccgccgccttccgcaggccgtttccaccgaggaaaaggaatcgtatcgtatgtccgctatccagaacctccactctttcgacccctttgctgatgcaagtaagggtgatgacctgcttcctgctggcactgaggattatatccatataagaattcaacagagaaacggcaggaagacccttactactgtccaagggatcgctgatgattacgataaaaagaaactagtgaaggcgtttaagaaaaagtttgcctgcaatggtactgtaattgagcatccggaatatggagaagtaattcagctacagggtgaccaacgcaagaacatatgccagttcctcgtagagattggactggctaaggacgatcagctgaaggttcatgggttttaagtgcttgtggctcactgaagcttaagtgaggatttccttgcaatgagtagaatttcccttctctcccttgtcacaggtttaaaaacctcacagcttgtataatgtaaccatttggggtccgcttttaacttggactagtgtaactccttcatgcaataaactgaaaagagccatgctgtctagtcttgaagtccctcatttaaacagaggtcaagcaataggcgcctggcagtgtcaagcctgaaaccaagcaataccgtcatgtttcagccaagcccagagccctaagattacaaacaactatggccggaacctcctcagctctccctctgcagagttccctaccctaagagaatgttaccacctgaacagtcctcggtgaatctgagaggagaggatggggtaaggcagaagcaccagctgtactactagaagggagcttttggtggtagatcccctggtgtctccaacctgactaggtggacagagctcaaagaggccctcttaccgctagcgaggtgataggacatctggcttgccacaaaggtctgttcgaccagacatatcctagctaagggatgtccaaacatcagaatgtgaggccaaccttctatcagagttaaacttttgacaagggaacaaatctcaaactgatccatcagtcatgtagctagctgtagagcttgcaacttaatagcagcagctgcccaatgccaactcttaagtcttttgtaattctggctttctctaataaaaaagccacttagttcagt

SEQ ID NO: 674471 - DNA, 1147 bp, Homo sapiens
  misc_feature (256)..(256): n is a, c, g, or t
  misc_feature (293)..(293): n is a, c, g, or t
tggtttaacaagaatttaataacaaagattaaaccaatctcaaagagtgacccgatggggaacttcaaaaacactcctaagttgtgcaaaagtcaatagcatctaagtggaaaactcgtgacgacaattataagaacgtgtaagatataattcttatcatggagtttcttctatactgtgcatttgtgcaaaccagagagaagtgaccgcgcccgtgtttctcagggattctcttatagccctttgagacagaggnctctctctttaaacgcgtgtggtggatattggcgtgncccattcaagaggtgccgtgtggccttggaattcctgtgtggtggaaagaaactgtgacagaacaatgtgcctatactctcttataacagagctgtggagtataaagtctatataatctcccaaggtgtgaacgccagaggcacagtgtgcgccccaaccctgtgttatgtggcacacgcagaggtgccaaaattcccgagccacaacgagtggagtctcccagcgtgggttatgtggggccatatcgcgaaagtgaaagcttcgtattttacacaggtgttttacacctgtgtttcagaggggggcgtggcagaaggggttctcccatataccagggggtgggctacacatattttcctcccgagctaaagagtgggggaggctacctccatcagtatattcaacgtggagaaagcatttcttccttacagattgccacagaatgtggtaaaaattagcttcgtgggtgacacaccccagagggactttccacgtgtgtgttttccccagtatttcaaagcaagggggtggccctcccaatgaaacctgtggggggataaaccactccatttctctggggggaaccacgcgtggcagcccacttccaattaatttggcccaaccttgttcactataacaggtggcacccgcaggtctttgtaacacacacctgctctgttgtccaattattgagcgcgacaaaatatatttccccacatccgagggggtagaaaaaggaccggtggggaaaaactcctaggttgttggcccccacttggggtcgtggtgcaaaaaaacaggtggcgtcggcacaagatttatgagagagaccccctaatatatctgccacatc

SEQ ID NO: 674472 - DNA, 1465 bp, Homo sapiens
agcgggccccagtcactgagccgccgccgaggattcagcagcctcccccttgagccccctcgcttcccgacgttccgttcccccctgcccgccttctcccgccaccgccgccgccgccttccgcaggccgtttccaccgaggaaaaggaatcgtatcgtatgtccgctatccagaacctccactctttcgacccctttgctgatgcaagtaagggtgatgacctgcttcctgctggcactgaggattatatccatataagaattcaacagagaaacggcaggaagacccttactactgtccaagggatcgctgatgattacgataaaaagaaactagtgaaggcgtttaagaaagtaggtcttcagtgagattttgggaaagtcataatggatttgtccacaagggggtgccagctgtgttgtatgtattgttagcggaaggggtgataaatgcgttcatgctcttgctaggcctaattcgttttcctttgtgcttgcagaagtttgcctgcaatggtactgtaattgagcatccggaatatggagaagtaattcagctacagggtgaccaacgcaagaacatatgccagttcctcgtagagattggactggctaaggacgatcagctgaaggttcatgggttttaagtgcttgtggctcactgaagcttaagtgaggatttccttgcaatgagtagaatttcccttctctcccttgtcacaggtttaaaaacctcacagcttgtataatgtaaccatttggggtccgcttttaacttggactagtgtaactccttcatgcaataaactgaaaagagccatgctgtctagtcttgaagtccctcatttaaacagaggtcaagcaataggcgcctggcagtgtcaagcctgaaaccaagcaataccgtcatgtttcagccaagcccagagccctaagattacaaacaactatggccggaacctcctcagctctccctctgcagagttccctaccctaagagaatgttaccacctgaacagtcctcggtgaatctgagaggagaggatggggtaaggcagaagcaccagctgtactactagaagggagcttttggtggtagatcccctggtgtctccaacctgactaggtggacagagctcaaagaggccctcttaccgctagcgaggtgataggacatctggcttgccacaaaggtctgttcgaccagacatatcctagctaagggatgtccaaacatcagaatgtgaggccaaccttctatcagagttaaacttttgacaagggaacaaatctcaaactgatccatcagtcatgtagctagctgtagagcttgcaacttaatagcagcagctgcccaatgccatgtgaagtaacaaactggtttttggtttttttttccccttcagttttaatgttatgtgtaatgtatttaaacccttatttaaataaaacttgttttcagaaa

SEQ ID NO: 674473 - DNA, 1321 bp, Homo sapiens
agcgggccccagtcactgagccgccgccgaggattcagcagcctcccccttgagccccctcgcttcccgacgttccgttcccccctgcccgccttctcccgccaccgccgccgccgccttccgcaggccgtttccaccgaggaaaaggaatcgtatcgtatgtccgctatccagaacctccactctttcgacccctttgctgatgcaagtaagggtgatgacctgcttcctgctggcactgaggattatatccatataagaattcaacagagaaacggcaggaagacccttactactgtccaagggatcgctgatgattacgataaaaagaaactagtgaaggcgtttaagaaaaagtttgcctgcaatggtactgtaattgagcatccggaatatggagaagtaattcagctacagggtgaccaacgcaagaacatatgccagttcctcgtagagattggactggctaaggacgatcagctgaaggttcatgggttttaagtgcttgtggctcactgaagcttaagtgaggatttccttgcaatgagtagaatttcccttctctcccttgtcacaggtttaaaaacctcacagcttgtataatgtaaccatttggggtccgcttttaacttggactagtgtaactccttcatgcaataaactgaaaagagccatgctgtctagtcttgaagtccctcatttaaacagaggtcaagcaataggcgcctggcagtgtcaagcctgaaaccaagcaataccgtcatgtttcagccaagcccagagccctaagattacaaacaactatggccggaacctcctcagctctccctctgcagagttccctaccctaagagaatgttaccacctgaacagtcctcggtgaatctgagaggagaggatggggtaaggcagaagcaccagctgtactactagaagggagcttttggtggtagatcccctggtgtctccaacctgactaggtggacagagctcaaagaggccctcttaccgctagcgaggtgataggacatctggcttgccacaaaggtctgttcgaccagacatatcctagctaagggatgtccaaacatcagaatgtgaggccaaccttctatcagagttaaacttttgacaagggaacaaatctcaaactgatccatcagtcatgtagctagctgtagagcttgcaactgaattaatagcagaggtggccaatgcatgtgaagtaacaaactggtttttggtttttttttccccttcagttttaatgttatgtgtaatgtatttaaacccttatttaaataaaacttgttttcagaaa

SEQ ID NO: 674474 - DNA, 822 bp, Homo sapiens
  misc_feature (349)..(349): n is a, c, g, or t
  misc_feature (400)..(400): n is a, c, g, or t
cttcaatagtgctctaaattacaccaacctattacttccagaatcaggaagccccctgtccccaacacttgcaggagaacttatattccaacttttgctctgaacttctcaccgaaataccctacctaccacccattgctaacacccttacttagacatttccaaagtaccccccataagctgtttcaaaagacccattccattttttcctacacaatcgtgcatactaaaactttcacaataatcatcttcagatgtacatgatatcctactacatttcacaattttcagtacttcagtccctcatgaacattttatagtcatctcttcggccctgttgtgaaatatntgattccagttcaattcagagtgtatgattccgcttttcacgctgatcaantaaatttatggtgtctcttttctgatcttcaacattaaaaacatcatatgtttctctcattcccatgccaaggactgcatcgcttgtctctctcaagattctgcttcattttcatccaagctctgtagtcatcttctcctctcagtttctgctggtttctcccttccccggcagcttcctgctccatcctcctgtccgtcggggatgacaaccctggtctcgctcaggaccctccatctctggattttcctggctcactgacaggtcagcctgcacctgtgggatatggcccagttactccggctcccccgaacgcctcttccacctacaggtctgtcttccaccacctgctcccggcctggctcctgcgccagcctgtccctctgaggctcctcattcaccatcctgatctcattggtttc

SEQ ID NO: 674475 - DNA, 1322 bp, Homo sapiens
agcgggccccagtcactgagccgccgccgaggattcagcagcctcccccttgagccccctcgcttcccgacgttccgttcccccctgcccgccttctcccgccaccgccgccgccgccttccgcaggccgtttccaccgaggaaaaggaatcgtatcgtatgtccgctatccagaacctccactctttcgacccctttgctgatgcaagtaagggtgatgacctgcttcctgctggcactgaggattatatccatataagaattcaacagagaaacggcaggaagacccttactactgtccaagggatcgctgatgattacgataaaaagaaactagtgaaggcgtttaagaaaaagtttgcctgcaatggtactgtaattgagcatccggaatatggagaagtaattcagctacagggtgaccaacgcaagaacatatgccagttcctcgtagagattggactggctaaggacgatcagctgaaggttcatgggttttaagtgcttgtggctcactgaagcttaagtgaggatttccttgcaatgagtagaatttcccttctctcccttgtcacaggtttaaaaacctcacagcttgtataatgtaaccatttggggtccgcttttaacttggactagtgtaactccttcatgcaataaactgaaaagagccatgctgtctagtcttgaagtccctcatttaaacagaggtcaagcaataggcgcctggcagtgtcaagcctgaaaccaagcaataccgtcatgtttcagccaagcccagagccctaagattacaaacaactatggccggaacctcctcagctctccctctgcagagttccctaccctaagagaatgttaccacctgaacagtcctcggtgaatctgagaggagaggatggggtaaggcagaagcaccagctgtactactagaagggagcttttggtggtagatcccctggtgtctccaacctgactaggtggacagagctcaaagaggccctcttaccgctagcgaggtgataggacatctggcttgccacaaaggtctgttcgaccagacatatcctagctaagggatgtccaaacatcagaatgtgaggccaaccttctatcagagttaaacttttgacaagggaacaaatctcaaactgatccatcagtcatgtagctagctgtagagcttgcaactaaataagacaagcaagatagcacacaaatgaccaatgatgaagtaactaaacatggatttatgagattattttcttccccggtcagtttaatgtaatgtgtaccccatggaccataaaatcataaatggc

SEQ ID NO: 674476 - DNA, 1011 bp, Homo sapiens
  misc_feature (349)..(349): n is a, c, g, or t
  misc_feature (400)..(400): n is a, c, g, or t
  misc_feature (494)..(495): n is a, c, g, or t
  misc_feature (498)..(498): n is a, c, g, or t
  misc_feature (660)..(660): n is a, c, g, or t
  misc_feature (667)..(667): n is a, c, g, or t
  misc_feature (679)..(679): n is a, c, g, or t
cttcaatagtgctctaaattacaccaacctattacttccagaatcaggaagccccctgtccccaacacttgcaggagaacttatattccaacttttgctctgaacttctcaccgaaataccctacctaccacccattgctaacacccttacttagacatttccaaagtaccccccataagctgtttcaaaagacccattccattttttcctacacaatcgtgcatactaaaactttcacaataatcatcttcagatgtacatgatatcctactacatttcacaattttcagtacttcagtccctcatgaacattttatagtcatctcttcggccctgttgtgaaatatntgattccagttcaattcagagtgtatgattccgcttttcacgctgatcaantaaatttatggtgtctcttttctgatcttcaacattaaaaactaaaaaacacataatattctatagagtattaaatgagatactagccctaggnnggncccattttcttatcaacttctagaaactgtcataaagaggactgcatctcccacagcaacactgtaattgggagttgtattcctcatcaaggacaagatggcaacggtgatatgggagggggacagggaagtgctgggtagagaagggcagggtcactggcnagggctncaccctcaggcntgtgcccatggacctaatgagaacaaggactcctgtcttcttgcccaaatgttgcatttttcaagaccacttttgcctgccatgccacccattctgtgccttataaaccctgagacccaacgtgcacacacacaagcggctggaccgtaaaggaacacactggcaaagaaccatcgaaagaccttgcaggccattgatggggaaccgattcgacgccaaggaaatatcggccacgtcagtagggaatcccgcttgttaccaccctcagaggagactaccttccatgctattcccctctgggttccaggcaattgttggctacttccacactc

SEQ ID NO: 674477 - DNA, 128 bp, Homo sapiens
cttgtagtatagtagatgaaaacattctcctccgcataatgccttgtgtcgattaaacactgaactgacatttaacatgcccaatatctacatcaaccaacaagtcatattaccctcatgtcatacat

SEQ ID NO: 674478 - DNA, 808 bp, Homo sapiens
cacactggctcacgtctgtaatcctagcacttgggaagctgaggagagtagatcaactgaggtcagaagttaagagaccagcctggcaacatggtgaaaccccatctctacaaaaaaaaaaaaaatttaggggggcatgatgtggaacgcctgtaatcccagctactcaggaggctgaggcagtagaatcgctggaaccggtgggggagggcatggggagtggcgtgcagcagaggtggcagtgagccgagatggtaccacttcactccagccggggtgaaagtgctagattaacactctttcgaaaatttatcttcctctacgtgatctctaagaactaatattcttacacggggaaattatttacctaaggttcaccaaatcccttcgcttttcccatcacgtccactcttttctataatgggtatacactggttgtgaacaaaccacaatcactggtactgctatttccccgaatggtgctatctaggtatcagacttctatctgctgacatgctgatgtctgcatatgccctttatataagcaagatctctttctgatgggagatcagtgaattggcttcaacgctccatgtgctcctttcaccaatttcagtcctgttcaaataaggaaattaacttccttgggacaagccagtttaaagttctgctgccggcgggtccccgtccacactgggagcggggcaacaggcgggttggaactgccctgtaacgtttctaacaaattggggggggctcacccggggcgaagtacgggggggtggacccgggggcgaaaaaagctctg

SEQ ID NO: 674479 - DNA, 1350 bp, Homo sapiens
agcgggccccagtcactgagccgccgccgaggattcagcagcctcccccttgagccccctcgcttcccgacgttccgttcccccctgcccgccttctcccgccaccgccgccgccgccttccgcaggccgtttccaccgaggaaaaggaatcgtatcgtatgtccgctatccagaacctccactctttcgacccctttgctgatgcaagtaagggtgatgacctgcttcctgctggcactgaggattatatccatataagaattcaacagagaaacggcaggaagacccttactactgtccaagggatcgctgatgattacgataaaaagaaactagtgaaggcgtttaagaaaaagtttgcctgcaatggtactgtaattgagcatccggaatatggagaagtaattcagctacagggtgaccaacgcaagaacatatgccagttcctcgtagagattggactggctaaggacgatcagctgaaggttcatgggttttaagtgcttgtggctcactgaagcttaagtgaggatttccttgcaatgagtagaatttcccttctctcccttgtcacaggtttaaaaacctcacagcttgtataatgtaaccatttggggtccgcttttaacttggactagtgtaactccttcatgcaataaactgaaaagagccatgctgtctagtcttgaagtccctcatttaaacagaggtcaagcaataggcgcctggcagtgtcaagcctgaaaccaagcaataccgtcatgtttcagccaagcccagagccctaagattacaaacaactatggccggaacctcctcagctctccctctgcagagttccctaccctaagagaatgttaccacctgaacagtcctcggtgaatctgagaggagaggatggggtaaggcagaagcaccagctgtactactagaagggagcttttggtggtagatcccctggtgtctccaacctgactaggtggacagagctcaaagaggccctcttaccgctagcgaggtgataggacatctggcttgccacaaaggtctgttcgaccagacatatcctagctaagggatgtccaaacatcagaatgtgaggccaaccttctatcagagttaaacttttgacaagggaacaaatctcaaactgatccatcagtcatgtagctagctgtagagcttgcaactccatccaccctccaccctccaccctccttgctctgtccgcgtggacgcagcccccggttcagacactagcgggtgcgcggggccgcccaggacggcgggagaggacggggccctccctcccctctggtcccccaaagctccccggacgccgcggccgc

SEQ ID NO: 674480 - DNA, 857 bp, Homo sapiens
  misc_feature (349)..(349): n is a, c, g, or t
  misc_feature (400)..(400): n is a, c, g, or t
  misc_feature (494)..(495): n is a, c, g, or t
  misc_feature (498)..(498): n is a, c, g, or t
  misc_feature (660)..(660): n is a, c, g, or t
  misc_feature (667)..(667): n is a, c, g, or t
  misc_feature (679)..(679): n is a, c, g, or t
  misc_feature (776)..(776): n is a, c, g, or t
  misc_feature (780)..(780): n is a, c, g, or t
  misc_feature (789)..(789): n is a, c, g, or t
  misc_feature (803)..(803): n is a, c, g, or t
  misc_feature (825)..(826): n is a, c, g, or t
cttcaatagtgctctaaattacaccaacctattacttccagaatcaggaagccccctgtccccaacacttgcaggagaacttatattccaacttttgctctgaacttctcaccgaaataccctacctaccacccattgctaacacccttacttagacatttccaaagtaccccccataagctgtttcaaaagacccattccattttttcctacacaatcgtgcatactaaaactttcacaataatcatcttcagatgtacatgatatcctactacatttcacaattttcagtacttcagtccctcatgaacattttatagtcatctcttcggccctgttgtgaaatatntgattccagttcaattcagagtgtatgattccgcttttcacgctgatcaantaaatttatggtgtctcttttctgatcttcaacattaaaaactaaaaaacacataatattctatagagtattaaatgagatactagccctaggnnggncccattttcttatcaacttctagaaactgtcataaagaggactgcatctcccacagcaacactgtaattgggagttgtattcctcatcaaggacaagatggcaacggtgatatgggagggggacagggaagtgctgggtagagaagggcagggtcactggcnagggctncaccctcaggcntgtgcccatggacctaatgagaacaaggactcctgtcttcttgcccaaatgttgcatttttcaagaccacttttgggccttgccatggcccaccccnttcntgttggccntattaaaaaacccntggagggacccccaggcggggnnaacaacacacaaggcgggcttggggacgttt

SEQ ID NO: 674481 - DNA, 210 bp, Homo sapiens
  misc_feature (56)..(57): n is a, c, g, or t
gttaacagcgtttttctcgtccccttcaacttctacatttactggcttttagaatnnaaaaaatgtattcttttcagtagtgataaggatcttattctttttatttttataaatatgtatggaaatttttaggttttttttaccagttttgtttacagactcttattttaatatttaaaatatatattttcaattttttacagaaatata

SEQ ID NO: 674482 - DNA, 1171 bp, Homo sapiens
  misc_feature (1138)..(1138): n is a, c, g, or t
  misc_feature (1147)..(1147): n is a, c, g, or t
  misc_feature (1149)..(1149): n is a, c, g, or t
agcgggccccagtcactgagccgccgccgaggattcagcagcctcccccttgagccccctcgcttcccgacgttccgttcccccctgcccgccttctcccgccaccgccgccgccgccttccgcaggccgtttccaccgaggaaaaggaatcgtatcgtatgtccgctatccagaacctccactctttcgacccctttgctgatgcaagtaagggtgatgacctgcttcctgctggcactgaggattatatccatataagaattcaacagagaaacggcaggaagacccttactactgtccaagggatcgctgatgattacgataaaaagaaactagtgaaggcgtttaagaaaaagtttgcctgcaatggtactgtaattgagcatccggaatatggagaagtaattcagctacagggtgaccaacgcaagaacatatgccagttcctcgtagagattggactggctaaggacgatcagctgaaggttcatgggttttaagtgcttgtggctcactgaagcttaagtgaggatttccttgcaatgagtagaatttcccttctctcccttgtcacaggtttaaaaacctcacagcttgtataatgtaaccatttggggtccgcttttaacttggactagtgtaactccttcatgcaataaactgaaaagagccatgctgtctagtcttgaagtccctcatttaaacagaggtcaagcaataggcgcctggcagtgtcaagcctgaaaccaagcaataccgtcatgtttcagccaagcccagagccctaagattacaaacaactatggccggaacctcctcagctctccctctgcagagttccctaccctaagagaatgttaccacctgaacagtcctcggtgaatctgagaggagaggatggggtaaggcagaagcaccagctgtactactagaagggagcttttggtggtagatcccctggtgtctccaacctgactaggtggacagagctcaaagaggccctcttaccgctagcgaggtgataggacatctggcttgccacaaaggtctgttcgaccagacatatcctagctaagggatgtccaaacatcagaatgtgaggccaaccttctatcagagttaaacttttgacaaagncatgggggngntactctaggaatcaagctatga

SEQ ID NO: 674483 - DNA, 162 bp, Homo sapiens
cggtcgactctgagatcccccttattttcctttcttgttggcgattgatcggtttcttacatttgcatagtacctatgaagtcctagctcctggtatactttagagatggatggaatttggctactgcctgcactctctgtttgatcactgacctgttggag

SEQ ID NO: 674484 - DNA, 505 bp, Homo sapiens
  misc_feature (17)..(17): n is a, c, g, or t
  misc_feature (38)..(38): n is a, c, g, or t
acctgtaatcttatttngatcaagtgttttaaaccttngatatttgacaaactttccaaaatcaaatgtaaaattctaacttaaatgttttcgacctcaagctaacttttgggcattaaagcccttggaagtccaaatagggcccctggaagtccaaaagaaacatattaggctaatttggtatattaaaatcatacaggaagctgatcaaataaaaaatgttgtttaattttctttgagttgtatttgtataaatctgttattaatatgcatcccaaaattgtatcatattgctaaaatgttgatagatcttgttatatgttattggtaataattgttatcctgttaaattattgtataccacagaaataatgaaatttctttgtcaattgcatcagtaatcatggctcttctaagtcttttgtcattcacagatgattattgttttacttggattcttttcaaaagtggtttgtaattgctacagcctaaaatctgcttgttc

SEQ ID NO: 674485 - DNA, 349 bp, Homo sapiens
ggagaatctattgaatccaggaggacaaagttacagtgaaccatgattgcaccactgcactccagactgcgcaacaaagcgaaactctgtctcataatgcaactgaaggagacaggattagacccgaaacgatcattagggactcggaatgacaaagactgaaggattggtggcaatgagtactggggatacagtatgtggattaaccacagattatgacccagagtgtcagaatatatgtgctttatgcaatctctttgaccaggcactacattgcttgctcagaaggctagtaagcagcaacattgatggtggcctgtagaatgcacataggtttagccatgttggc

SEQ ID NO: 674486 - DNA, 145 bp, Homo sapiens
cacaactgtaatcatggagatggggtctcaccctgtcacccaggcttgcataacggtagtgctatcacagctcactgcagccttgaagtcctgggctaaggatcctcctacctgagcctcctgagtagctaggcatggtctccat

SEQ ID NO: 674487 - DNA, 733 bp, Homo sapiens
aggataaagtgcgtcagtttatgatcttcacgacaagtctagtgaaaaaacagcagtaagtgtctttctcaaaatgaactggaagttagatagttgcaacagataatttctttccaaaatcctgaactttatatacgagagagtgtaaaaggatcgatggagcaggaagaagttatggaacaggcctgtacaaatagatacaaagaccctcaagatgagaataaaatgggaatagatggcgatacacgcagttctgtgagtgaccgtggacactcgagtccacgtccagcattgagtgtgttgattattgcatggaagttcagagcatgcagcacagtgcgagttctccaaagcaggagttcatggatggcatgacagaagttaggatgtgacagcatagaaggaagctaaagggccagataccgaagatggaacaagagttgatagaaccagtgacgatttaacggatgtttgatccagtttactttgaatttggcaaagaatcccaggacaaaaatggattagatctagaagatggccattgctagtggaacttagtgcttaatggaagatcgaagattctggagacgttgagtggaatacaatttttgtgggaacatcataaacgatcaatagcaaaagacagttgggaatcttcttttagacttcagtacgatgatgggatgacatgtgttaattatgatgaagaaggagatggctgttttgttgatgc

SEQ ID NO: 674488 - DNA, 1699 bp, Homo sapiens
  misc_feature (1336)..(1336): n is a, c, g, or t
tcggatctatctgtacctcgggggtaatggtcagtaggttctggcgtgacgtgtgttgcttcagctacggtctgttgctgctgacgatatgatagccgtgtgctgtgtgtcagagtgacttccagctgtctctgacgcttgaggaggtagagcgctgcggtgggcgtggccgaaatccagactgttgtgtgtttgtccgcaccacgataggcgtggttgtgtgtctgaaggtgtcagcgacactgtgtgttcctgcgctgttggtgttgagtccaagcaggtgtgttatgtcatcttcttcgttttgatacttccccccttcggtgttgtggtcgtgtggggagaataggtgggggacacgctggcggtttggtgttcgcaggtgtggtgcttggtggtggcgtcgtggaggcgtggggtgtggtggtgaggttcccgcctctcctgttgtgtgctggggtgtgtggtagtgtgtcgtgtggtgtctgtgggcggcgctgttgggtgtgtgagtgggtgactctctggtgtggcgattgattatctatctatctgcttgccctgagccgttgtgcttgtgtggtgtcgccagcagctcagagtggttgctgcgcaactggaaggggggggcggagccacgacttcgccattggtctggttgtttcatcgccgtgtgcagctgacccctcggggatgtgggtcgcggtcacaccagggtggctctgtctgcgtcttgctggctgggtggcactacactaggtgtggttgttggttgccgcgagggctgggggcctggcagggtgtgtggagggggcgctacagaatgtggtggtgtttggtgtgtgggagtcctgggggtgcggaggggggtttgacgcgggtgtgtgttgtggcggggggcccccccgcgtggtatggttcgctccccctcggtgttctgtctcgtttgcccttcgtgtgcgcagcccccttgaggccctttgagcatgtgtgagaacaccccacggggagatatagtgtgcccccccaatgtctcacgtgatatgtctgtgtcgtttggtacatagtggagaatgatattatgtatgtgtggctcgggagaaaaggcgcgttgcccccccaagcgccaaaaacatcttgtgcgcgtctgtgagagtgaagcccgagattgtgatctctttggcccgcgcgcgggcgttgtttgtcacagcacacacctgcgtcgcccaacagagggggtgcgcactgtctgcacagccacgccttgtgtgtgtgcccttgtcactttgtcgccctgccccacgcgccccacagccccctctgggactctctgggnctctcgcagagacacacctcgggggccacacagagagcccccctcgtctcgtttgagtttcggtggctctcccctcggggcgctctccccgcggtgtggaagtgataaccccacaggcttttcgcccccctctccgcggagacccctcggggtgaacctcccgcgggcccccctcgctgccacgccttcccccgttcccccaccactgcacttctgcacacttctgggtgttcttggttttttattttttgtaaatgtccaatttgtataaacttttaaccccccccattaataaccttccaactggaaatagccgaaattaaataactccgtttcccaccccaaaacaaaaaaaaaaataaa

SEQ ID NO: 674489 - DNA, 441 bp, Homo sapiens
actttcacttaaatgttgtgattcaacataacattgccatagctattattaacactttacatagaaattgaaagtccagagaatttaggtaacttgggtaggtcactctccaagtaggcagcactccaaatccacactccttttaataaaaataggtaataggcagggtgtggtggctgcaatcccagcactttgggaggctgaagtgggaagactgcttgagcccaggaattcaagactagcctgggcaacacagtgagacccccatctctacataaagtaaaaaattagctggacagagggcatgtgcctatagtcccaaatattaatacttgggaggctgaggtatgaagattgcttgaacccaggaggtcaaggttgcaatgagccatgatcgtgccactgcatgccagcctgggggacacggtgagaccctgcctc

SEQ ID NO: 674490 - DNA, 152 bp, Homo sapiens
tccctgagcctaagcttgagctgagcaggcaccctggctggagttcccctcctccacagctagctaggcacctgcagggatgggagtgagagggttcttggttctagtctcccctacttccagggaatcggcgccaactcttcagcatcagc

SEQ ID NO: 674491 - DNA, 2022 bp, Homo sapiens
attgtttaagccaagaaagctctttggtttgcttttattctaggcttaatgtttatgtaacctaaacattccccaatcttgtttcctacaggtagactgggtacaatgtgatggtggctgtgatgagtggtttcatcaagtttgtgtgggtgtatctccagaaatggctgaaaatgaagattacatctgtataaactgtgcaaagaagcaggggccagttagcccaggtccagcaccacctccttccttcataatgagctacaaactaccaatggaggatcttaaagagaccagttagcagatgcttggttagtttgggacatggggggacatggaccacattgagaccttagtcatcaagtagagtggtttatatccacttggaatgttgcttccaaagatgaatggccttcagagaaagtccccttagtgctggcttcctctttgcatggactctgtgggttacattctctatcaacatatctatgcagagggtgtcttctttggtacaacagccaatatttcatgtctcctttgagtgtggtttactgcattaaggccagatgcttaattgagctctagggtggctggttagtattaatacattggtgtgctaacagggcatataggatgtggcttttgtccagctgatagtagttagaggcttacaacttaggagcagcaccaactgaaggtgctaattgcttggatctccttcattgggatagttggagagggattggagtaccactttccttccactgttacctggtacttaatgccctaaagatacaactaggagtaacagggccaaagttatttctgttagacgtcaaggaatggtatcacagtctattgacctcagcgatttgtgcttgtttgtgctagaagaacatcccaaataggagaacctctcacaagctggggcaggtcaccttatctttgtaagatgaggatatcatctagatcagaaatctgactagattggattctgaggagaagaacctactacaaggcaaggagccgttttttggctttgaaaagtcttgctgtcttgggtctacattttagggaagagcaggtacatggatccaggcttctgccaaaaaaaaaaagagaagaagatgacgatgatgaccagtcgtactatcttactgagccacagtgatgcatgcttttcggggaaaacttcattcacaagtattccagacaccaggcttcaggcatggccatgagcaagaccagcaaataacagctttttgccttgcagccctgaccccaatgtctgctgtttccaacactggtgatttctaactacggcccacagcagatgctgttgaataacaccatggcttcatcagaggatgtggggttgtagtacctctgggtgatgaagttgttttagtaaatccatcagaggatgtggggttgtagtacctctgggtgatgaagttgttttagtaaatccatttttaaaaaaaaaaaaggacttgtttttacttttttctaaatgtctctgactactgactgttctatacatagattatttttccttttttaatatacatatatgaatatataaatatatatatttactgttaccagcagcatatgacagagtttcaacatcaaaaatccatttgggggcttgctttttcttttttgctttaaaaaaaaaaatcccattccttctttgtagtacaaggagttagcactccctcctccatcccagcctgaccagatcttccattttgcttttgttcatatagataattatatgtcctttgtgtgttgggacttgtccctgtctgttgggaaacttggtctcactctagtctgtgctggctcttttttcttttgtgtgtgaatgtttgaaactatggtgctgtgtcctcttccctcctgttgtgttctctgttcttcttaaggtattaggtaagctgtatgtaaactcttattagaaggggactaatttttttttaaaggacaaaaaaaaaaaatgactaaaaatagtgttttgtc

SEQ ID NO: 674492 - DNA, 130 bp, Homo sapiens
gcggaccacatgatagccacgtcgacatcagtcactcacttcagaaaacaggagcattaggaggaatttgggtgctaatttaggtgcccccgccctctactttatttatttattattattttatttggtt

SEQ ID NO: 674493 - DNA, 940 bp, Homo sapiens
  misc_feature (82)..(82): n is a, c, g, or t
  misc_feature (182)..(182): n is a, c, g, or t
ctggctgtttgtctcttcctcccttctgttgtttttacctcccttcctccgcgtagtggttttttttctctcgtgttttccncacttgtgctgtgtctcccccgagttagctcttctcctttggaggctcgctgtgttgtattgcgctgcctttctgctgttttgctcccctcctcgtgttntttttttgtgcacagctctttttgttttttggggagcacgacgccgccaccccccgttgttgttgtttttgtgctcgaacaactatcttgttgtgggtcactcgtcgttttctaggctgttgtgttctctcctatcgttggccccttcatttttttctgctccacaccctcggggttttcttcttgtatccaccaaatattttttgtgccgaaatttatttcgctcactacaggtggtgggtcacatccttccgtttgatgatgactttattaggcgcttcttcttcctctccctctttaagtttcctctctttgtttttgtggtgagacgccatccttcttcttctcatcatgcttgttctcctctccttctaatatattttttctgcctcttaaactatctgttgtggctgggtagtctctccccccctgctgccgtgcatcttcctcttccctaccagggctcgatgtttgttttttctaactcgtttagtgcatcgttcttacgtgggttgtcctctctttttgtaatagtttttcactttgtgtcgttacctgctgtcctcctgctttatttgatgtttttcttttttcttccgagagatttctctcttcccccaacttgtggggtgtttttttcgcaccgccattgactccccagggaccccccccatctcacccccctgggtcccaaaaaagtaaaaacccccccccccccgaaaaaaaaccgggccaaaaaaagggggggttttttttta

SEQ ID NO: 674494 - DNA, 513 bp, Homo sapiens
tgtgttcagaggatccccaaagatctttgagcatcacccttacagatgaaataaagatactggccataataacaaaagaatgcaaacgtctaggtaccaaggacttccttttgggggggtcgtcctgtcagatcttcctctaaggggtcatttccagaatccacaaagtcctaacataagaccccagcaatttttcaaattaattccccaaacaacaaagctaagcaagtaaatggaaccacaaaccgacccaagactaagttcttgtttcccttcaagatactcaaaagtaggagagtggcccagaagtacagagtcagtccaaactcccaacacacccaatgcaaaaaccaaaaaggtattgaaactaaaaaggtctgctacctggcgattcattcactaaaaatatgcttagaatctaagcatatgctccaaatctacgtcccaagagttggaggctgccacgaacatacgaagaagtgtgcgaaggtgatgctcaaagatcttgggggt

SEQ ID NO: 674495 - DNA, 143 bp, Homo sapiens
ggagttgttttaatgcaggttataatatccacagtacgttggtatgtggcataacttattaggggtgtactggtatgtttttttcaggagagggggccaatctgaacaaggcccaggtactttccatgcctcctctcctaggc

SEQ ID NO: 674496 - DNA, 545 bp, Homo sapiens
tgtgttcagaggatccccaaagatctttgagcatcacccttacagatgaaataaagatactggccataataacaaaagaatgcaaacgtctaggtaccaaggacttccttttgggggggtcgtcctgtcagatcttcctctaaggggtcatttccagaatccacaaagtcctaacataagaccccagcaatttttcaaattaattccccaaacaacaaagctaagcaagtaaatggaaccacaaaccgacccaagactaagttcttgtttcccttcaagatactcaaaagtaggagagtggcccagaagtacagagtcagtccaaactcccaacacacccaatgcaaaaaccaaaaaggtattgaaactaaaaaggtctgctacctggcgattcattcactaaaaatatgcttagaatctaagcatatgctccaaatctacgtcccaagagttggaggctgccacgaacatttggtgcccttataacctccccttctttctctctcgtttttttgtttttttttttttttttggtaaaagggcct

SEQ ID NO: 674497 - DNA, 531 bp, Homo sapiens
atgcatcgtgatggactccgcgtgacggggctatcacactgtgccatctacgatgggtatgccctcccccatgcatcctgcgtctggcacctgactggccggtgacgtgactagagtaccttatgaagatcctcaccgagcgcgtgaacggcttcaccatcatggccgagcgggcaatcgtgcgtaacatcaaggagaagctgtggaacgttgccctggagttcgagccaagagatgttcacggttgttaccagctcctccctagagaagagctacgagctgcctaagggcgaggtcatcaccattggcaatgagcgtttccgcagctctaaggcactcttccaagccttccttccttggcgtggagtcctgtggcatccaggaaattaccttcaagtccatcatggagtgtgacggtggaacttccgcaaggaacctgtacgcaaacccagtgctgtctgccggacccaccattgtaccctggcattgcctaccggatgcagaacgggatcactgcaattgcgccagcgg

SEQ ID NO: 674498 - DNA, 490 bp, Homo sapiens
tccccccgtttttcccgggtgcccctttttttagttggccccctttccccttggtttttcccgttaagccaaaaaaacccgtttctttttcccccaattttaaaaaattttttccccggggggttttttttgggccgtttccctttgggtttttcccccccttggaaaagggggttttttttttggggggggggttttttttttttttttttaactggggccccccccgttttaaaggtttttttttttcccccccccttttccccccggtgggttttccatttgggggggggggcccccaacctttttttttttttaaaaaataaatttcccccttttggggggttcttttttttttttgggggtttccccccgcccccctgtttgttccccccccccctttgggggccctttttccccccccgcccttttttttccccggggaaatttttttagggcttaaaatgggaaaaattttttttttccctta

SEQ ID NO: 674499 - DNA, 585 bp, Homo sapiens
ggattttcttttttttcacacgagggaggcgtgagaggcattgtttggcaaactgcatcattagacgtgggagtacctgacaagtagacggttgtagctcacttccgaatggtccaatcaatagaagctgtatttgccacagaggaggtctcattccgagatttcccgtattttcagggtacacccaagaccaaacctaggccaaaatccatttcactataatattcatgggggtaaatttaacttttttcccacaacactttttgggccaatccggaatgccccgaggttattgggaataccccgaggcataccccacatgaaacatcctatcatttgtagggtcattcatttttctaacagcagtaaaattaataattttcatgatttgagaagccttcgttttgaagggaaaagtcctaatagtagaagaaccccccataaacctggggtgattaaatggatgcccccccccctaccacacatttgaagaacccgtatacataaaatttagacaaaaaaggaaggaatcgaaccccccaaaggtggtttcaagccaaccccagggcctccatgattttttca

SEQ ID NO: 674500 - DNA, 141 bp, Homo sapiens
agtagtggaagactaaaaggaatccatagttccggataggttatattctgagttattattctgagttatctacaaacatttttgagatatgtctttacactcgtgattgtagtttccagcagcccacgcacatcttccaat

SEQ ID NO: 674501 - DNA, 1058 bp, Homo sapiens
  misc_feature (494)..(494): n is a, c, g, or t
  misc_feature (1058)..(1058): n is a, c, g, or t
tgaggcttaggcaacggggacggggaaccgtggttagatgcacgcgagcggcggcatgccagtcgcctcccaggtcccactactttggcgcttcctgactgcgctgctgactactaagacaatgtgattctccaccgtgagaccgctccagctcccgaagcagccgttgccaattgagaagcttcagagcattgcggaggatatctgcaggactggtcccctggggcagctaagatgagtactgagagcgctgcatatgcatgagtagggggatatcatacacgattctgcccctggtcataagaagatgttctccgggctgtagctcctagctcgtaactgtatgtccgtacgagcagaacgctgtcttcgtatctgactgctctcaattcttagaacaacgaggattgactgtctgttgtagtgcactctgtgattcgatgacggaggcgtggcaaaagtgcgtgctaagcaggactctgacggttcacgantaacctgatgggaccgtacacagatcccctggatactctaacgtctctgccactgtgcccacatattatagaacgcgtattacaccaaaagtttgctcgaggaagtgttcaggaggtaggctacctacttgtgtaccacctaatacagcacatcctctgggtaagtggcgtgggcgcatacatatgccttaaccttaaacaactatagtcttgtgcgctaaatatccgaggcgaagcacacactcgcaaagtctctcgtctaataactttgagggggacccgcgaacccctgtgggaccctttaaacaatgtggcgacacagtacatggttacacccattttccccaaggaatttggcggagacacttgtatcccacctaaggtggtttggcaatagacttaacctattcgttgggttagccaattgtgggcgtggtttgccctctttaagggagagatagtattcggaggaaaaccaccttataagaaagagaggggcaactaagagcccccctggaagaagttgatttcacaacattgtgccgggttgtggaccgccccatn

SEQ ID NO: 674502 - DNA, 292 bp, Homo sapiens
tgtccctctccttttttgtctttgctatgcgcaggcgcttatccaccggtcaatgcgtggttgtcccacagtatttccatccggctgatggcaatctttgggacgctttgttgtgtgggttaataaaaataaaattctagcgttcaatttcacagattgttttgtcacaacctctcacaatctgttttctataccacgtgttgacgctccttttcgacaaaaaccatcctgattcaccacgggtctttattctcacgggattctaataaacaatttgggttatacggagttt

SEQ ID NO: 674503 - DNA, 590 bp, Homo sapiens
tgttcactgcccgcctgttaacatgcaaattgtctgttaccatcaagcccagatccctgggattacaaacaactatggccggaacctcctcagctctccctctgcagagttccctaccctaagagaatgttaccacctgaacagtcctcggtgaatctgagaggagaggatggggtaaggcagaagcaccagctgtactactagaagggagcttttggtggtagatcccctggtgtctccaacctgactaggtggacagagctcaaagaggccctcttaccgctagcgaggtgataggacatctggcttgccacaaaggtctgttcgaccagacatatcctagctaagggatgtccaaacatcagaatgtgaggccaaccttctatcagagttaaacttttgacaagggaacaaatctcaaactgatccatcagtcatgtagctagctgtagagcttgcaacttaatagcagcagctgcccaatgccatgtgaagtaacaaactggtttttggtttttttttccccttcagttttaatgttatgtgtaatgtatttaaacccttatttaaataaaacttgttttcagaaa

SEQ ID NO: 674504 - DNA, 354 bp, Homo sapiens
aggaccttatatgctgtctcagggatgtcaggactccttgataccaaaatccacagatgtcaatgtcctgatatgaaatgcatagtatttggcttattaaccaaaaacattcctcctgtatactttatatctctatattacttataacacctaattaatgatgtaaaagctatgcaagtagttgttatactgtattattagggaataatgacaagggaaaagagtctatacatgttcagtacagatgcagctctttttcaaatattttccactggtggttgattgcatccatggatgtggaactcacagatatggagggctgattgtacttcttccttgcttgaggtttttgta

SEQ ID NO: 674505 - DNA, 845 bp, Homo sapiens
agcgggccccagtcactgagccgccgccgaggattcagcagcctcccccttgagccccctcgcttcccgacgttccgttcccccctgcccgccttctcccgccaccgccgccgccgccttccgcaggccgtttccaccgaggaaaaggaatcgtatcgtatgtccgctatccagaacctccactctttcgacccctttgctgatgcaagtaagggtgatgacctgcttcctgctggcactgaggattatatccatataagaattcaacagagaaacggcaggaagacccttactactgtccaagggatcgctgatgattacgataaaaagaaactagtgaaggcgtttaagaaaaagtttgcctgcaatggtactgtaattgagcatccggaatatggagaagtaattcagctacagggtgaccaacgcaagaacatatgccagttcctcgtagagattggactggctaaggacgatcagctgaaggttcatgggttttaagtgcttgtggctcactgaagcttaagtgaggatttccttgcaatgagtagaatttcccttctctcccttgtcacaggtttaaaaacctcacagcttgtataatgtaaccatttggggtccgcttttaacttggactagtgtaactccttcatgcaataaactgaaaagagccatgctgtctagtcttgaagtccctcatttaaacagaggtcaagcaataggcgcctggcagtgtcaagcctgaaaccaagcaataccgtcatgtttcagccaagcccagagccctaagttcagagccaggcctaagttcagagccaggcctaagttcagagccagggggtacc

SEQ ID NO: 674506 - DNA, 813 bp, Homo sapiens
  misc_feature (202)..(202): n is a, c, g, or t
  misc_feature (229)..(229): n is a, c, g, or t
gaagtgtcctgaaaaccaacgttttagattgtaaatgaacgggtttaacagtacagttacacatagacattgagaagactgaaggcggaaatgataactcctaagaacctagtttcgttactgtcactatggcacttgggcagcatgctcgctacttaacgttgcaagctgctacagctagctagcatgacctgatggatcnagtttgagatttgtgtcccttgtcaanaagtttaactgctgatagaacggttggccatcacattgctgatgttctggacatcgccttagtctaggatatgtctgcgtcgatacagacctttgtcggcaagccagatgtgcctatcacctcgctagcggtaagagggcctcggtgaatctgagaggagaggatggggtaaggcagaagcaccagctgtactactagaagggagcttttggtggtagatcccctggtgtctccaacctgactaggtggacagagctcaaagaggccctcttaccgctagcgaggtgataggacatctggcttgccacaaaggtctgttcgaccagacatatcctagctaagggatgtccaaacatcagaatgtgaggccaaccttctatcagagttaaacttttgacaagggaacaaatctcaaactgatccatcagtcatgtagctagctgtagagcttgcaacttaatagcagcagctgcccaatgccatgtgaagtaacaaactggtttttggtttttttttccccttcagttttaatgttatgtgtaatgtatttaaacccttatttaaataaaacttgttttcagaaa

SEQ ID NO: 674507 - DNA, 712 bp, Homo sapiens
agcgggccccagtcactgagccgccgccgaggattcagcagcctcccccttgagccccctcgcttcccgacgttccgttcccccctgcccgccttctcccgccaccgccgccgccgccttccgcaggccgtttccaccgaggaaaaggaatcgtatcgtatgtccgctatccagaacctccactctttcgacccctttgctgatgcaagtaagggtgatgacctgcttcctgctggcactgaggattatatccatataagaattcaacagagaaacggcaggaagacccttactactgtccaagggatcgctgatgattacgataaaaagaaactagtgaaggcgtttaagaaaaagtttgcctgcaatggtactgtaattgagcatccggaatatggagaagtaattcagctacagggtgaccaacgcaagaacatatgccagttcctcgtagagattggactggctaaggacgatcagctgaaggttcatgggttttaagtgcttgtggctcactgaagcttaagtgaggatttccttgcaatgagtagaatttcccttctctcccttgtcacaggtttaaaaacctcacagcttgtataatgtaaccatttggggtccgcttttaacttggactagtgtaactccttcatgcaataaactgaaaagagccataaaaaaagtcgacgcggccgcgaatttagtagtagta

SEQ ID NO: 674508 - DNA, 176 bp, Homo sapiens
cccagactccaggctgggtgacagagtgagaccctgtctcttaaaaaaaagtgctgggattacaggcattgagcaccgcgcccggcctcatgtagacttttaattgaactttttgtccccgtttacattatatgtgaaataaaggtgaaatcaaatgaacgatttgttgatttgaa

SEQ ID NO: 674509 - DNA, 641 bp, Homo sapiens
agcgggccccagtcactgagccgccgccgaggattcagcagcctcccccttgagccccctcgcttcccgacgttccgttcccccctgcccgccttctcccgccaccgccgccgccgccttccgcaggccgtttccaccgaggaaaaggaatcgtatcgtatgtccgctatccagaacctccactctttcgacccctttgctgatgcaagtaagggtgatgacctgcttcctgctggcactgaggattatatccatataagaattcaacagagaaacggcaggaagacccttactactgtccaagggatcgctgatgattacgataaaaagaaactagtgaaggcgtttaagaaaaagtttgcctgcaatggtactgtaattgagcatccggaatatggagaagtaattcagctacagggtgaccaacgcaagaacatatgccagttcctcgtagagattggactggctaaggacgatcagctgaaggttcatgggttttaagtgcttgtggctcactgaagcttaagtgaggatttccttgcaatgagtagaatttcccttctctcccttgtcacccctttcaacgacctttcagctcgtacgcactctgaccctagtcgggcacgcctcaagctcgatct

SEQ ID NO: 674510 - DNA, 326 bp, Homo sapiens
  misc_feature (292)..(292): n is a, c, g, or t
ggcagcacatagacgacccgtgtcttcattaaggcacagacacatgtccgctaacagtcagtcactgggcacacgagcaggacgaccccatttcttcattagagcacagacatgcgtgaaactgaaaagcctggaagaatctatgagaacactaaccaccaggccaggtgcagtggctcacgcctgtcatcccagcactttggcaggccgaggcgtgtggatcacctgaggtcaggagtttgagaccagcctggctaacgatggtgaaatcccacctctactatgaattacnaaaattagctcggcgtgcgggacacatggcgaaa

SEQ ID NO: 674511 - DNA, 1382 bp, Homo sapiens
agcgggccccagtcactgagccgccgccgaggattcagcagcctcccccttgagccccctcgcttcccgacgttccgttcccccctgcccgccttctcccgccaccgccgccgccgccttccgcaggccgtttccaccgaggaaaaggaatcgtatcgtatgtccgctatccagaacctccactctttcggtaagctatgggaaaggtcgcgggcccgggtggggcagcggggccttccgggcccggagacgtgttccgggaagttgccaagcgctccgggccttcgtaagctcgggcaggggaaacttgaccagggtcgcagggcagcgggatcaaggcctgggccccggggtcggaccctgagcgcgaccggaaggagcaggcggtaggtcagcccttgggcgggcccggcgtctcagtggcgcatttactaatggctcctgggcctcctcgggccacacccgcccctcccgtcaccattgcgtcacgtccgttacgtcaccacccgttgtcacggatccggagggaaaggcggtgccagccctaagtggcaagcgggtgcaccaatgggggtgggaggcttagccccgcctcgggagctcgggttccggcgggttgcatcagctgggtgcggcacgagtggcagcccggactcccccgacatgtgatcggcttcccagggagggcgggaggcccgggcgttccccgagcctggggaagctggccgtcccggactgacctgctcggggagagccagcaaaggacacattcggcctggcccaagccctgacgatttcagtgttgttttctgcacgcgcaaaacacctggggaccgaggggatggcagtggcatcctatctttgacagctctgaacgagcttaaccttttttttcagacccctttgctgatgcaagtaagggtgatgacctgcttcctgctggcactgaggattatatccatataagaattcaacagagaaacggcaggaagacccttactactgtccaagggatcgctgatgattacgataaaaagaaactagtgaaggcgtttaagaaaaagtttgcctgcaatggtactgtaattgagcatccggaatatggagaagtaattcagctacagggtgaccaacgcaagaacatatgccagttcctcgtagagattggactggctaaggacgatcagctgaaggttcatgggttttaagtgcttgtggctcactgaagcttaagtgaggatttccttgcaatgagtagaatttcccttctctcccttgtcacaggtttaaaaacctcacagcttgtataatgtaaccatttggggtccgcttttaacttggactagtgtaactccttcatgcaataaactgaaaagagccat

SEQ ID NO: 674512 - DNA, 697 bp, Homo sapiens
  misc_feature (612)..(613): n is a, c, g, or t
  misc_feature (619)..(619): n is a, c, g, or t
agcgggccccagtcactgagccgccgccgaggattcagcagcctcccccttgagccccctcgcttcccgacgttccgttcccccctgcccgccttctcccgccaccgccgccgccgccttccgcaggccgtttccaccgaggaaaaggaatcgtatcgtatgtccgctatccagaacctccactctttcgacccctttgctgatgcaagtaagggtgatgacctgcttcctgctggcactgaggattatatccatataagaattcaacagagaaacggcaggaagacccttactactgtccaagggatcgctgatgattacgataaaaagaaactagtgaaggcgtttaagaaaaagtttgcctgcaatggtactgtaattgagcatccggaatatggagaagtaattcagctacagggtgaccaacgcaagaacatatgccagttcctcgtagagttgagttcagtcactacttgatttgtgcctctctgctggcaaatctcagatcctgtctgttagcttctgctggggacataaaagttggctttgtaaggctgagcaaaacctcagttgggttttaaagtacatagacttatttctgttttataggannaagcanaagggacttgtctacctttggtttactgtttctgtggatctacttcacagatgcaaatttgaatagcatatagatgca

SEQ ID NO: 674513 - DNA, 708 bp, Homo sapiens
  misc_feature (12)..(12): n is a, c, g, or t
  misc_feature (63)..(63): n is a, c, g, or t
  misc_feature (71)..(71): n is a, c, g, or t
  misc_feature (158)..(158): n is a, c, g, or t
  misc_feature (207)..(207): n is a, c, g, or t
  misc_feature (214)..(214): n is a, c, g, or t
  misc_feature (307)..(307): n is a, c, g, or t
  misc_feature (316)..(316): n is a, c, g, or t
  misc_feature (349)..(349): n is a, c, g, or t
  misc_feature (373)..(373): n is a, c, g, or t
  misc_feature (422)..(422): n is a, c, g, or t
  misc_feature (496)..(496): n is a, c, g, or t
  misc_feature (525)..(525): n is a, c, g, or t
  misc_feature (562)..(562): n is a, c, g, or t
  misc_feature (585)..(585): n is a, c, g, or t
  misc_feature (622)..(622): n is a, c, g, or t
  misc_feature (704)..(704): n is a, c, g, or t
ccatgtactggnagatggcatcgtagtgaagctccaccacctgattttctcttggcagttgcnccaaagcncggctccgtgctctgtcccggctcagcaaatgtcccacccttccagtctgtgggggcagcaccaccatcacacggtcaccctctgcnttgggaaccagggtctccagcatgtctttccttaggccttccaggactngggtttnatttgttcgacatatacaggtatttggggttaggacatctttaattattattttggtgttgtaatattggcgtcctttgtacatgttgttcanaaaccgganacggaggtttctgtggaaccagtggtgacttcnggggggtggtttcttactcttggntgtaggcttattgtgttggtctggaaggtgtttccgcttcctctctganttgtcctgctggatgtagagttcttgattccagagggtcttccgtgatgaggcagttccgttctgttgcctganatccaaggtgttcttgtcaaactcctgcngggagacaggccgcagttagtactcactaacagtcancacccggctccccacagccagangaaccatggcccgaacattgtcaggatcaaggccttncaccttcccatagaggcctcggtgagggggagagagaaccaccacagctcctccaggcaccagcccttgaggctgatcttcnttat

SEQ ID NO: 674514 - DNA, 692 bp, Homo sapiens
  misc_feature (265)..(265): n is a, c, g, or t
  misc_feature (381)..(381): n is a, c, g, or t
ggggttttttccaacggtccggggggggccccccggcagcccacaaaagttatccccctgaaggccttgtggaggatgggcccccccccctcctacggtccatttaaatggttcctggtcgaccagttcccctttgggagaagcctgggccaccacaccagttcattttaccagaaccccgcctttcgcttgttgaaccgggggggggtctccacctattgaaccttcaccttctgggggaagttaataaagtcaaagtactcancatcccccatcatgtttagaagacgcaggtgcccgcgttgttggaggccggcttccgaaggaagaacattccgtatgaaggtaatggcgttggtccccccgcccgactgccgttantaccctttcccacaaatgatcacgcccttggtgaccaaaggttgagcccccacccgggccgggccacacccatgccctcctcggtgctttcttggccggaagtccagggtttcgccccacccctgggttgatcccacttgtgtgtccccaaaagctttcccggtttttttgtgaggggtccccccaccccagggctgatcccagttgtgtgtccccaccagctttcccagtttttttgtaagggtccctgctgccccctgcagggtccctaaggtaaagtaaaccccggcgttgggtttggccagtcggca

SEQ ID NO: 674515 - DNA, 1550 bp, Homo sapiens
  misc_feature (1465)..(1466): n is a, c, g, or t
  misc_feature (1472)..(1472): n is a, c, g, or t
agcgggccccagtcactgagccgccgccgaggattcagcagcctcccccttgagccccctcgcttcccgacgttccgttcccccctgcccgccttctcccgccaccgccgccgccgccttccgcaggccgtttccaccgaggaaaaggaatcgtatcgtatgtccgctatccagaacctccactctttcggtaagctatgggaaaggtcgcgggcccgggtggggcagcggggccttccgggcccggagacgtgttccgggaagttgccaagcgctccgggccttcgtaagctcgggcaggggaaacttgaccagggtcgcagggcagcgggatcaaggcctgggccccggggtcggaccctgagcgcgaccggaaggagcaggcggtaggtcagcccttgggcgggcccggcgtctcagtggcgcatttactaatggctcctgggcctcctcgggccacacccgcccctcccgtcaccattgcgtcacgtccgttacgtcaccacccgttgtcacggatccggagggaaaggcggtgccagccctaagtggcaagcgggtgcaccaatgggggtgggaggcttagccccgcctcgggagctcgggttccggcgggttgcatcagctgggtgcggcacgagtggcagcccggactcccccgacatgtgatcggcttcccagggagggcgggaggcccgggcgttccccgagcctggggaagctggccgtcccggactgacctgctcggggagagccagcaaaggacacattcggcctggcccaagccctgacgatttcagtgttgttttctgcacgcgcaaaacacctggggaccgaggggatggcagtggcatcctatctttgacagctctgaacgagcttaaccttttttttcagacccctttgctgatgcaagtaagggtgatgacctgcttcctgctggcactgaggattatatccatataagaattcaacagagaaacggcaggaagacccttactactgtccaagggatcgctgatgattacgataaaaagaaactagtgaaggcgtttaagaaagtaggtcttcagtgagattttgggaaagtcataatggatttgtccacaagggggtgccagctgtgttgtatgtattgttagcggaaggggtgataaatgcgttcatgctcttgctaggcctaattcgttttcctttgtgcttgcagaagtttgcctgcaatggtactgtaattgagcatccggaatatggagaagtaattcagctacagggtgaccaacgcaagaacatatgccagttcctcgtagagttgagttcagtcactacttgatttgtgcctctctgctggcaaatctcagatcctgtctgttagcttctgctggggacataaaagttggctttgtaaggctgagcaaaacctcagttgggttttaaagtacatagacttatttctgttttataggannaagcanaagggacttgtctacctttggtttactgtttctgtggatctacttcacagatgcaaatttgaatagcatatagatgca

SEQ ID NO: 674516 - DNA, 364 bp, Homo sapiens
  misc_feature (359)..(359): n is a, c, g, or t
gcagacttagaagcagatgtgaagcatcttaaaaacaactacagttgacccttgaacaacacgaatttgaagtgtgtgagtcacttatacgtggcttttctttgcctctgccacccacgagacagcaagaccaactcctcctcctcctcctcacctactcagtcatgaagatgagaggatgaaggacctttacgatcatccgcttccactggaatggaatgctaaatatattttcggcttccttttggattttctggaataggcatgtcttttctctaggcttacttgttgggtaaggaatactggtacataatggcatagggaacataccaggcggttaaccaattccccaaaatggntgggg

SEQ ID NO: 674517 - DNA, 188 bp, Homo sapiens
cctatcacttcaacccctgccttgtacataaaattattccatccacccagtttcccccctcacctgccccctcaaaaggagttggatgggggccaagtaaggtaaccaggtggcatttcccccatgttttataaggaattttgtcaagtttttgtgaaataaaaaaacgtgcttcatttgccccccca

SEQ ID NO: 674518 - DNA, 290 bp, Homo sapiens
  misc_feature (84)..(84): n is a, c, g, or t
ccccccccccccccccccccccccccttttctttgttctggtattaggccaaagtttgggagtaaggagaggattaggtctttnggagcaaagaaaaaagtagcttggaactttttagatgatccccccacatactgtacaccttgctttacaatgtgttagcagaaaccacgtgggttataatgtagaataatgtgctttttgcccaagtggtaattcatcttggtttgctatgttaaaactgtaaaaacaacagaacattaataaatattttttgtgtagccccttta

SEQ ID NO: 674519 - DNA, 428 bp, Homo sapiens
  misc_feature (18)..(18): n is a, c, g, or t
ccctgaaaaaaaaggggnccacccccctaaacgttaatagccctatattttccataaataaacctatcctatgccctaattatgttgaacctagaccttatccaggaggatattaaccttggggtaccttaaagaattagttgtggtggcctcatgccctgtaatcccccaaaacattgagaaagccctagcggggtggatcacttgaggtcaggagtttgagacccagcccggcccaacatggtgaaaccctgtctcctactaaaaacacaaaaattagcgggtgtggtggcatgtgcctgtaatcccagctactttggagcctgagacatgagaattgcttgaacctgggaggtggaggctgcagtgagccgaaatcatgccactgcactccagtctgggctacagaaagagagactgcctcaaaa

SEQ ID NO: 674520 - DNA, 544 bp, Homo sapiens
  misc_feature (468)..(468): n is a, c, g, or t
ggtaattgggtctggaggaataattttatccctaatgcaggttggcagccgtgggtaagatccagtagttagtacatcaatggcatatgggatggcaaaactaggcaggcgtgcatggaccagagcatctctagctaacgaggccaggcgatcagcagtgtccacaaacaggatggcttgctgatctaaaaagcttgaaatcatctttaaagtaaagggtaaatgtattaagcatccctgaaaactatctccttttcacactaaatattgttaaatcattccaaagtaaacttcaaggggaattagtatcagttttccatatttcaaagtagttcttcaaatattctccagtaacttgaagaagaaatatttaatacactagtatttgatattaagagcaataattttctgtcactttaagtaaaagctttctattcatttctccatccttaacattacacacacatnatatcaaagttaggaaaaataagtagaataaaatggttttttcctcttacagacttccagagttggttgataatga

SEQ ID NO: 674521 - DNA, 354 bp, Homo sapiens
tggaaacggattctcgctctgtcgtcaggctggagtgcaagggcgtgatctcggctcactgcaacctctgcctcccgggctcaaatgattctcctgcctcagcctcccaagtagctggcattacaggcatgcaccactaggcacagctaatttggtattttaagtagagatggggttcctcagtgtgggtcaggctggtctcgaactcctgacctcaggtgatctgcatgcctcatactcccagagtgctgggattacaggcacaagccactgtgcccggccaatactgcaaaatattttaaaaagttaaaattatctcttcgggctggctcatagtggcctcacacttttaat

SEQ ID NO: 674522 - DNA, 224 bp, Homo sapiens
cccccagggggggggggccccccccccaaaaaaggggaatttttgggggggggggccccccctttttacccccgtttttttgggggggggggggccccaaatttaattccccattttttattttggggggccgggtcaaggggcccatttttggttttaaaaaagaaggggttttttaaaaaattaaggggggaaaaaaaaattttttggttttttttccccca

SEQ ID NO: 674523 - DNA, 1230 bp, Homo sapiens
agcggagatgcggactggcgcttcccgtgtggcggctggaggagcccggagggacgcagaccgggcaaggtcatgggcgcatgggcgggcggcgcgaggcgcagtggctgctggccgtggcagcaggccacctggccaccattccctggtgccctggggcacaggctgcggctgatggccggtggccagtggtgccctgccgcctgaagtgccgcctgggcgtcgggagccggtgccaagctctggtagtcgggcgctgggagtgcaaggcgtcgaagagcagcagaatgctcggggtgtccagcttgtctcaaaggaatcaggggtgtctggtgcttgacgccacgcattggccgatgattcggcgtacaccttggatgtcccaggtactgcttgcctctcgactggtgggccctcaaaaaccaagctaaagactctcggggcgcgcgctgtcacggcgtggtagagcgcctaggacccggcaaggctacacagggctgtttgcttggcaccgaaacaagacacacgttgagggacggagcgtgggcggagggttgttacctacagctcttgccccaggtgaacagggcagacggagcaaaggttggtatcttggatccaggttggttcggccccccagcacgtgtaggaaaccacaattgctttgtttcaccgggggaattgggccggctaccacaaaactcaggcgttgacggaccggacatagcgtgggacagaacgcggtgtcatgaaacgcagtggttacttcaaattccgattacgaagagattccattgggaaccaagtagccgaggacccccaggaacgaaagaacgttttgcccaagttgaacccggtgtcgccgaaccaagaacttgggaagtgataccccaatcatttcgaggacgcgtgtatcttgcgacttgtgccaaactcgttccgaaaacacaccgcaggtagggagtgtgcacagaaaagtcacttggaatggccaatcgcaccccttggagacccaaggggcccagcgcttcacaggggggggacataaacccgtccaacacaaggaaacgatcggcccaggccacaactgcactggcccagtccaggcacgctggcaaggacaaggcccaggcgtccacgaccatccgcgcgaatgcgtacacacccacaacgaacggcggaggaaacccgcagacagagcgccaccctcacaggaccaaccccaaacgg

SEQ ID NO: 674524 - DNA, 351 bp, Homo sapiens
gaaaggctgacgtggcattcctacacctcgtaggatgatgacacataagatgacaagagctaacgctcctgagtaccagtccatgtcacatgtgactgtgtgtttcaagtggtaagggaaggagttctacttgtcttgacaccattaaggtggcttgagaagatgttcttcgaagagccagtatagattctgtgccctgcagaagtccaagtgctttaaagccggttcaagctgtatagtttgcacacccatcccagtggagggggctgattagttgccaggcacacttttatgcactttgatgcccagcacatgggtactgtggatctttacagagcatattcacgcccg

SEQ ID NO: 674525 - DNA, 709 bp, Homo sapiens
cccccttacaacccgcaaaaggggtgtccgggccccaaaaaataggggtcccaaaacttagaaacccttccttaggcgtaaccaaagggttggccctcttgttgcaatttcttacccggagttaaactcgaaaacggcaaaagtggccaggtcaagctcaggaccaataggtaccccctaggttttaatcgtttaaactccaccgaccatatactgatatgggctgtaagaattagcttaaaaacagcccctctaggcactttatccaaagtcaatccaacactcatgtaattcttttaatgcacaaatgtcttcacaggaggctagtatgtgtacatatccccataatcatttagcgcgagtttcttcggtggacagggcccatagcatgtatactatttaatctatttcctccgcatatatgcaggggagtcacccagtatgaaggtggcccttgttcagatcgtagctaatgaccatgtcccaaccgtcctcactgaatcggggtacccataaagctcttactgaatctacatcccgcttacaccttgggacccagtgcccatccattctttccaacgaacccatagccttgtggcaggctcaattttgactctcccgatctgtataaagagggctcataacaggcagtgacataataaagtgcgctttgtttgtatctcataaaccttttgggagaaaaaaaaaa

SEQ ID NO: 674526 - DNA, 240 bp, Homo sapiens
gagctttttacgcaggccgaaaacgtgcgtgtcgatcgctctctccaccacgctcacgcccccgccttgcacttcgcggatcagctgatcgcgggtgagcacgcggccttggttctgggcgagggtcacaaggagcttgaattcatagggcgtgagctgcacgggctcgccgtggatgcgggcttcgtgggccgcttcgtcgatctcgagaggccccatagaaagagctgtttccttgcg

SEQ ID NO: 674527 - DNA, 187 bp, Homo sapiens
cacagcaaaataagacaaacagacagaatgtcaactgagggtgctacttttatgctatcacttccctttcccttccttagctagtgttcttatcctttcccttaatagtaacggctggtgaatcgaacatgcactattcttatccccatccatttgcttctcggcatcctgcttaaaccaaatgagt

SEQ ID NO: 674528 - DNA, 364 bp, Homo sapiens
  misc_feature (25)..(25): n is a, c, g, or t
aatgttgcatttttcaagaccatcntgacccaccaggcccctatcctaggcctataaaaacccaagatcttaggggcagacacacaggcagccagatatcaagaggaacacatcagcagaagaagacacaagtggctggacgtgagaggatggggagggagcatgccatcagaagagcataccgacagatgcaggcaggcacgctagcacatcacaggccatccactagtgggatgaggcagagtttagctagggcagtcagagaaagtctgcccaactccaggggaaaaccatctcccctctgactcccccatctgctgagagctacttctactcaataaaaccttgcactccttctccaaaa

SEQ ID NO: 674529 - DNA, 886 bp, Homo sapiens
  misc_feature (658)..(658): n is a, c, g, or t
aaaaaaaaaaaaaagggcccgttcattctcaaatgctttgggcgtctccagggtgcctcaggaaaacatgaagggggcattgtagaactgggggctactgtgtaccttgggaagaaaaagttaaggggtactttaaagtgggatactggttttggatgaaattggccaacttcagggagcccagctgggagaaggaggacgtgagtatccttacaaggctccgaaacaattctttcttcacttagtttcctttctggtgctctgcatcttattatcccagcagggtcttccaatggctgggtttaataactaccagaaactgggccaggtgcagtgggctcacgcctgtaatcccagaaacttggggaggctaagacaggcagatcacttgaggccaggagttcgaaaccagcctgggacaacttggtgatacccagtttctggctgaaaatacaaaaattagtcgggcatggtgatgtgcacctgtagtcccagctggctcgggaggctgaggcgggagaatcgcttgaacccgggagacggaggttgcaacgagccgagatcgagccattgcgctccggcctgggtgacaggagactccatctcaaaaattaaatttaacaaaagaatctacgtacaattacgatttatccccctnggggaccgtgtaaaaaacaagaaagcaaaaaaccaaagaaacaaaggagaagacgaagaaaaaacacgagaaaaggacaacgagagcagagaagcagaaacgagaaagacaaaaaaacgacaccccaaagaaacaagaaagaaaaaaaaaaaaggaaggaaaaaggaggaatcaagaaaacaacagagagaagagagaaagaaaaaacacagaacaacagagggaaat

SEQ ID NO: 674530 - DNA, 146 bp, Homo sapiens
cacgaggacgatggcgaagtggtaagagggcaattgtctgggagttgactttagtatgacgaattgattctgtgtcacgacagaatctcccaggtttacactgatgagtataaagatgggacagaggttgtattgaaagagaatga

SEQ ID NO: 674531 - DNA, 512 bp, Homo sapiens
ttgaacttcccggggtgggtagacagcttgagcccaggagttctagaccagcatgggcaacatagtgagactctatctctaaagataagaataacttttaaaataataaaaatacattaattggccgggcacggtggctcacagctgtcatagtgttaatgatgtattttatgtgttgcccaagacaattcttcttccaatgtgtcccagggcagccaaaagattggacacccctggaacagagtatggaaagggaaattagcagcttacggtgggtaactctggtagacaacgccttaaccaagtgatcaaggttaacttcaccagtgagcaatcaggtagatatcatgtgccccctaatattatgtgatgagaaggccatttcacctctggggtattctttccccaaaccccaactgcagtctaatgatcagaaaacatcagacaaatccagattgagggacatcccacaaaatacttccccgggaagttccggaacttcccgggaagtt

SEQ ID NO: 674532 - DNA, 151 bp, Homo sapiens
  misc_feature (32)..(32): n is a, c, g, or t
gttttttttaaacttaacctttatgttggttnctattgctgccttttaattcttgagatgtgtccttggacggaagacctaaatatctttctctctctctctttttttttttttttgagacagagtcttgctctgttgcccaggctggagt

SEQ ID NO: 674533 - DNA, 1078 bp, Homo sapiens
  misc_feature (524)..(524): n is a, c, g, or t
  misc_feature (617)..(617): n is a, c, g, or t
  misc_feature (621)..(621): n is a, c, g, or t
  misc_feature (643)..(643): n is a, c, g, or t
  misc_feature (686)..(686): n is a, c, g, or t
  misc_feature (693)..(693): n is a, c, g, or t
  misc_feature (715)..(715): n is a, c, g, or t
  misc_feature (722)..(722): n is a, c, g, or t
  misc_feature (726)..(726): n is a, c, g, or t
  misc_feature (739)..(739): n is a, c, g, or t
  misc_feature (770)..(770): n is a, c, g, or t
  misc_feature (786)..(786): n is a, c, g, or t
  misc_feature (796)..(796): n is a, c, g, or t
  misc_feature (1042)..(1043): n is a, c, g, or t
  misc_feature (1045)..(1045): n is a, c, g, or t
  misc_feature (1047)..(1047): n is a, c, g, or t
  misc_feature (1051)..(1051): n is a, c, g, or t
  misc_feature (1053)..(1053): n is a, c, g, or t
  misc_feature (1065)..(1066): n is a, c, g, or t
  misc_feature (1069)..(1071): n is a, c, g, or t
ctctggttctgctctcttcgcggtcgcttacgaggcgtattctgcggcctgttcacggggttcgttgtgccctgcctggtgcctgttctgctccggtttcctgcgttccgttgttggccctgtcacggtgttcgggcccgtcctgcctgccgcgaattggtggtatgtacttcccctgccctcatgttccctccctgcttgcgttgcagtactgtatcctcacctcggtttctcgcctcctgtgccccttgctgccagcttttcgctcttctctttcttttcctgtgactccgggctgtggtgtacctgagccctttagggggactgccacgccgtcgtgtttgtgccactcccatttgtgcccctcgttccctcgttacacgatcaggtgtctttggcactagtacttggcatcataagctccatgcctgagacaccaggtctatgtgggctccccaccttgtttcccatcttgcaccttagaagccgaaggtgctttcatcagaaccctaaaatggtcgttngaaggcgtcctgggtccgcagcccagcagtagtctgtgagaggcaggcagagggcagtggttctctccacaataggagacctggggccctgcnccanggccaggggtttgggcctaatnggctcttgactaaattacccccatcctccttgcccggaaaagnggagagnctagagccactcactgtcattnctgctcntganccttgaaaggggncggtggttggcctggcttctggaatggactngagtccatcgtggaanagggctgggnggcaggaggaggtggggaggggcactgcctgcggaaggtaggattagatcattagctcagtgacctcctagggtttcgatgtgctatgttctcatcctacagttggtttggtaatgatctgcaagtcccggagagcaacagcacagctctgcctgacgctctcattaaaatctatgcagccaagctcggcactttgtagcagccggccttgcgaagcctcctcagctcggggggccgggacccagnnancncggncntctgggtcactnntcnnntgcacca

SEQ ID NO: 674534 - DNA, 722 bp, Homo sapiens
  misc_feature (683)..(683): n is a, c, g, or t
tcggaccgggggtcgttctccgtataaatttttcagttcacagccaggaactcgaaagggcgtagttataggaaacccgactggcacaaacgtgcagttgacgaatgtcaggctcagaaacgtaattgcccacggttatgactatatcggcattgaaggcctagaaacggtaatcgggttctcctttggtcaccgagtcgtatttgaaaacgtcaacgttcaccactgttatgttaactggtggcttaaggagcttttcgagtacagcacaggcaccaactgctacggctatgaaggcttcgtcggtatgctgatggtaggtggcaataacaccttcgtagcgtccaactttgaagagaacttcaataacttgcaaatggctggcggttacaaccacgctcacggtaagtttattggctgctcattcaatcacgcagctgatggcggccttggcttcataggtaacggggttgtgaatggtcacacctttgtcggatgcaccttctggtactctccgattacgctaagcgggtgcgccggtataagcatcacgcagtctcagatcgtttatggcaaggtgatcattgccggtggaggcctaaacaatattgacgacaattacacgcctcaggggttggtgaaagagtctactggcaatacattcactaccttccgcaggaacngagtttcctacaacactgttctgctgaatcgccgtatat

SEQ ID NO: 674535 - DNA, 108 bp, Homo sapiens
ctttcacctcccaacattatttgcataagcaacattggcatccattttagcatctttttgtgtctttattgtttctctctgtcttaaggattatagtggcatggtaag

SEQ ID NO: 674536 - DNA, 335 bp, Homo sapiens
aataattcctgcagcaggctacttccagaaagtggcacaatatgtacacggtgcacggggtgtgtctatagctgatgaagatcaagtgggctttggcagagttgggaaacatatctggagctttcagatgtatggtgaagactttgttccagacatcgtcacaatgggccgatgggcaacgggcacccggtggcatgtgtggttacaaccaaagaaattgcctaagccttcagcaggtctgggatggaatattgtaatacgtatggaggtccagtatcttgtgctgatggataggctgtcctggatataattgtactggatgaacagaaggctgc

SEQ ID NO: 674537 - DNA, 708 bp, Homo sapiens
  misc_feature (533)..(533): n is a, c, g, or t
gctttctttctcttcaaacctttcgtagtttcaaacaggtttctcttctgaactgatgacttaatgtcaaaatattgacagcttactgcagttttacagtatctcctcacaaagggcttcaggtagaatatatcagagctgctcagccagctacctctccccgtctgaaaccagcagtatcatggcatatcctgtggattcccgtcccgtccctggaagtgttggcagggggtttgtacctgaccagacttaccagggcgatgatggattacccagaacgctcctaactgaagcacaatggtgccctgtagctgcacacacaaggggaagggcccggcacccattatctgggataccatcaaggtgacccattgtggcgcccccagtgaggagctccactgaccgtctccattctcattcctatcatagttttacaggcgagatagcttacacgtaataatctaataacatctttgcagtatgcggtcaataataattcaacacacagcccgattccagccagctttcaaaanacaatagtctatccccaagaggaaaaactgtcctttcttggcgacgtttggtagacattataacttacgaagacacggggcgagttaacagttcgagaaagcgacaggttcatcattcgcaaagaatcggaaagccccgatcccaggaaagtgacaacaccgatcagtaaaccgc

SEQ ID NO: 674538 - DNA, 146 bp, Homo sapiens
ctaccgcctgtgtgacccctctgtgaagagtttgtaccagacgtcccccctttttgggatgtatttctcagtggaaagagttggaagctgagagttggtgaccccgtgtatcggatggtggattaacaggcccagtggctgacatg

SEQ ID NO: 674539 - DNA, 173 bp, Homo sapiens
gtggtgctgatattagcacagccacaggatcgcgacatctagtcttcatacgtggatcccggccagccatggttgccaccagctttatcctcgatgactactttcccgaacaaagagctggctgcatgagagccagaacctagaaggaagccaacctgctctagtgctgtcat

SEQ ID NO: 674540 - DNA, 165 bp, Homo sapiens
tttttttttttaggagcactaggattttaataaacagaacccatcctaaagccatgactacaacagtggtacttgcaccaaaacagctatagaaaaccagagtgtggtgggtaggacccgtaagccggttggggagaggatgtgagtagaaggcaacggcagtaa

SEQ ID NO: 674541 - DNA, 139 bp, Homo sapiens
agtgatctagccgagcttatggtgcatgcatgtggtgagtacgatattatctcctcaggaacaaaatgtgagagggggctgacgctggctaacacagcagggtggatgccacatcagaaagtgagtactagtccccttg

SEQ ID NO: 674542 - DNA, 1303 bp, Homo sapiens
cgtgacgcgtgggtcgagccacgcgtccgcggacccgtgggtccggctggacggtacgacgcgtcccaggagttggggatgtcctacaaacccatatgccccatgctctcgagcgatgcaccccttggctcctagcaccccatgaggccgggcaccccgggtccctacgaggtgaggatccaggctccacgccctgctacgccgtgcctgggctgagacgatggtctcggactgcagcaagacggggctagcagttcatagcagataccgtggggccatgctcggccgtaacccgtacggcgtgagacctacaggttgtgcatgggccttgttgaaaccgtgggacgttaggtcaacggtaataggggcttgagtacgagttggaagccggcaagggggagcaggggggaccttaaagatcccagcttgtagacagatagggacattggaggacacatgcgcatagttgtacacggccaatacccgtattcgggtaaggggcgacaaatccacatagacgacaaccccaggagcttcctctaggcggccatattgaggactaagacgactctaggagacgaggtccgaggcggcatacacccattgacccggccagcataccatgtaacccccatccgttgataagccatcactggagacaggaaccacgtatggaataatggcacatcgtaatcacgtgaaaagtagcctgttatcacgcccagactaccgtcacaacagagatcaactggagggacataccagaagcatggcaacgagtgagtggaatagccaagcaggtgcagaacgttgccacctattaattacgacagcaaccgccagagcagtctggtaggaacaccccgaagaggatattggggcgacagtcgcagagcacttaattcgcaaagttaggtgagagtataaagccctagtagcgatgataggacggacatgcgacacaggctccatatcacaccgggtgtgtgcagaccacataagtgtggtgaaatccgcgagagacagtcacacacccgataaaccgatcagtgtggtacgctcgctgagacgtggttctcgtgcgctccatcgtaagcgtatggcaccactctatgacgtgcgaaaacaagtggaataacaatatccctgcagactataccacgcttaatagtgccctatgtgatctccggaaataactacgtacccctagtgtagtaagcactctgcgcttgtacggctatcgaagtggagtcagcatgactcacatctatgcatcacttggagaccctcttattgtcaagca

SEQ ID NO: 674543 - DNA, 274 bp, Homo sapiens
cgcttgcgtcttggacccacaaattttttttttggtgagacacagtctagctctgctccccaggatggagtgcagtggcatgatcatagctcactgcagcctccaattcctgggctcaagcaatcttctttcctcagcctcctgaggagctgggactaggcacatgccaccatgctcaactaatttttgaactgtttgtagaaacagggtctcactatgttgccctgatagttctcaaactgttgggctcacgtgatcctcctgactccacctc

SEQ ID NO: 674544 - DNA, 754 bp, Homo sapiens
acgaggctctctggggttccggtaaagcggcggctgccgatctccggtggaggggccagagggccctcgggcctgacgatggcagtggacactgcggcggcagtactgaccgctctgggcggggcgctgaggctggcggcccgtcggtacatgaggcccagggtccatcagatgcgcataggcggagacccaggcctcatgcacgggaagactgtgctgatcaccggggcgaacaggggcctgtgcccgcgccacggacgccgagctactgctcatgggagcgcggatgatcatgggctgccgggaccgcgcgcgccccgaggacgcggcgggtcagcttcgccgcgagctacgtcaggccgcggagtgcggcccacaccctgccgtcagcggggtgggcgatctcataatccggaagctggacctcgcctcgctgcgctaggagcacgccttctgacaagaaatgctccagagaacagcctacgctggatgtctggatcaataacgcagggatcttccagtgcccttacatgaagactgaagatgggttagagatgcacttctgagtgaaccatatggggcactgtctactcaccaatcttatacttagactcctcggagacatcaattatgatgacttgaacagtgaacaaagctataataaatgcctttgttatagaccggagcaaactggctaacatttttgttaccagggaactattccgccttttataaggactgtaaccgctgtgtt

SEQ ID NO: 674545 - DNA, 589 bp, Homo sapiens
ttacaggagactcaagaaggaaattaaaaaattatcgaaacaatgaaaatggaaatacaacatactaaaatcgcatggatacagcaaagcagcactaagagcgaagttgatagcaataaatgcctatatcaaaaaagtaaaaagactttaaataaacaacctaagaatgcatctcaaggaactagaaaagcaagaacaagcccagcctataattagtagtaggaaagaaataataaaaatcagagcagaaataaatgaaattaagacaatacaatacagaatatgaacaaaaaaaagttgttttattgaaaaggtaaaaaaaaatcaacaaacctttagctatgctaaggacaaaagagagaagacccaaataaataaaatcaaaaatgaaaaaggagacgtaacaactgagacatcagaaatacaaagaatcattagacactattatgaacaattatactccaacaaactgggaaacctagaagtaatgcatatattcctggacacatatcacttaccaagattaaaacacaaagaaagctcaaaaaaccaataacaagtaacaagatttaagccataatgtgaagat

SEQ ID NO: 674546 - DNA, 748 bp, Homo sapiens
agttgtttagagatatgcaaagaaggaaatatatatgatgtcacacaagctccagtaagctatccactaagcaggtgcctgtgcaactctgatttatggcattaacatatcaaattgaaggaaggattctagctcattttccattcaagcatcttcccactgcctctcttccagctaaataatcagagaagcagggcagtatatccctggagatccctgacttttatctccataccttaaattgttggtagatcctttggatgtagagataaaaattcattatgatgctagaggcattggggggtccatgcgaaaggttcaaacagcctattacattaatgcacatgtggaaagaacaaaaattttcaagctaagtcttaagttcaaatctataatttttttctcttcagttctgttctttgtatgataatacttaaaaaagtagttgtcttcttttcacatacacctctttaaagctatcatcttataataagtggaattggatgcttattgtgtgcccagcacagtttaggaaaaaaataattggcactgtttgtccagttactggagatcttcattttgatgctttgtactttgttccaggtctttaattctcagtccatcttttcctatgattgtgtacttcacatgatacattccatataaagagctcttttaaaatgactatttcaaaaatactgtacatttatatatagtattttttctcataaaaatgtgatagtttata

SEQ ID NO: 674547 - DNA, 226 bp, Homo sapiens
gaggtgatctagacgatccgatgcgcgagcttccatcaagaagagctttttaactagagattttaaaacaaatagactttaatttatagagaagttttacatttacagaaaacatgagcacatagtacagagttcttatatctcttctctacctttcagtttccctattattaatatcttgcattagaatggtacttctgttgcagttgatggaagcgtcgcgcat

SEQ ID NO: 674548 - DNA, 363 bp, Homo sapiens
gatcaaagtagcttactatatctaaactgtaaaacaatatagttttctcctgaacacctgctttccttctgggagtctggaattttggtatgtgccaggcagagactacctttgtgaccagctcccagtaaaaaccccaggcactcagtctctaacaagcttttctggttgacagtgtttcacaagtgctgttacaactggttgctgggagaattaagctcatcctctgtgattccactggcggaggattcttggaagcttgcacttagtttcccctgacttcaccccatgtgtcttttttcctttgctgattttgttttgtatcctttcactgtaataaatcatggccgtgagcagaactgt

SEQ ID NO: 674549 - DNA, 328 bp, Homo sapiens
  misc_feature (104)..(104): n is a, c, g, or t
tactacaactaaattcgcggcggcgttgaacgggagcggtagcccagccttgcgtgcacaaacatccgggcttgtgggtcatttggtcgaagtgacgatcacgntgtttttccgcatcgatcatcacccgcttaccgtgtttttgcaggagataagtgtggatctgtcgtacctccagcgagctgtagatcgacgccacatccagcaaacccatcagaccgtcagtgctgtagtcgcgggtgttcatcagcacctgggtaccgcgcacgccgcgcggtagagaaggtaccggcgttcgagtccatgggctttcaactgcggtcgacgc

SEQ ID NO: 674550 - DNA, 474 bp, Homo sapiens
  misc_feature (20)..(20): n is a, c, g, or t
  misc_feature (25)..(25): n is a, c, g, or t
  misc_feature (36)..(36): n is a, c, g, or t
  misc_feature (73)..(73): n is a, c, g, or t
  misc_feature (75)..(75): n is a, c, g, or t
  misc_feature (78)..(78): n is a, c, g, or t
  misc_feature (193)..(193): n is a, c, g, or t
  misc_feature (277)..(277): n is a, c, g, or t
  misc_feature (356)..(356): n is a, c, g, or t
  misc_feature (381)..(381): n is a, c, g, or t
  misc_feature (413)..(413): n is a, c, g, or t
cagaaaaccgggccgcggcnccgancaagcttgggnccgggtcagggacacgcggaggtcaggccggtgaagngncanggaagctggagcacgatcccaggaggaacaatcctgcaccatgactcaacagccacttcgaggagtgaccagcctgcgtttcaaccaagaccaaagctgcttttgctgcgccatngagacaggtgtgcgcatctacaacgtggagcccttgatggagaaggggcatctggaccacgagcaggtgggcagcatgggcttngtggagatgctgcaccgctccaaccttctggccttggtgggcggtggtagtagtcccaagttctcagagatcttcagtnctgatctggggacgatgcccgggcnaagggaactccaaggagaagctggtgctggantttacctttcaccaagccagtgctttcttgttgcgcatcccatttgaacaaagatccgtga

SEQ ID NO: 674551 - DNA, 125 bp, Homo sapiens
aggggtgtctcaaggcggacacaagtcgcttcgatgcttcgatctttcttaggagcgtctggtgtcgaaatcgcctgttgtaataatgcgggccacttcggtggtgaacagctcatgagttcggc

SEQ ID NO: 674552 - DNA, 509 bp, Homo sapiens
tctgctcggaccccgagtaagctggatagaggcacccgagcacacgcccggctaagtttttttgtatttttagcagagatggggtatcaccatgttagccaggatggtctcgatttcctgacctcgtgatccacccacctcagtctcccaaagtgctgggattacaggtgtgagccactgtgcccggccatcttttaattctttaataaagtctttgtctagtagatttgctatcaggtttttgtgggtttttttggtttttgggttttgttttgttttttagacagagtcttgctctgttgcccaggctagagtacagtggtgtcatctcggctcattgcaacctccacctcctaggttcaagtgattcttctgcctcagccttccaagtagctgggattataggcacctgccaccacacccagctaatttttggtatttttagtagagacagggtttcagtatgtgggccaggctggtctcaaactcctgaccttgtgatctgcccg

SEQ ID NO: 674553 - DNA, 212 bp, Homo sapiens
taggaaaaaaaaaaaaaaccctgtgatgctatggttgggggtagttaaggaaaaaccacattaaaatgtgggcccccattttctttctgatcctaaatcattttgttttataaatcagctaaagcatctttttagaattaatcctgaaaatgttgaatgttaaaaaaaaaaagtttggatatacccataattaaaaatccacccttttggca

SEQ ID NO: 674554 - DNA, 299 bp, Homo sapiens
tggctaattctttgtatttttagtagaaacggggtttcaccatgttggccaggctggtctcgaactcctgacctcaggtgatccccccgcctcggcctcccaaagtgctgggatcacaggcgtgagccacctcacctggcctatattgtacagttttgaacagtatagatgcatacctgtttacaaatgtgtatgaagatagatatttttacctcttatttgttcaatttactttttcttgtattaattagtatattgatctaattaaaggttaaagctaaaggctttatgaaatgttt

SEQ ID NO: 674555 - DNA, 447 bp, Homo sapiens
  misc_feature (302)..(302): n is a, c, g, or t
tctacagatctacccagctactcaggaggcggactggggattcactttggtccaggtgtctttctggtattgtagacatagagctcgttatacaaaaaagtctacaggaagggagaagaatgtcgtgtcccaaatgaatacgcttcccaggaagtggtgagaaccatcttaatcatgaaaaattcctgtggaactgacatgttaaaggaatgtaaaccataccagcacagggagggcatgggcttggtccccggggcattggggatgacgacacaatgaaaacgaacgaacgcccaccaggnccatcaatcttgaaggtactgaaagccctcgttgttattaggactggtcattctcctaattccagcctagtttttttgtgtttgtattgtttgagatgaagtctcgctgtttgccacagtggagtgcaatggcgcaaactttggt

SEQ ID NO: 674556 - DNA, 432 bp, Homo sapiens
gaagtcagacttagtagtgaaccttgggacccaaggaatgacatagtggtgagctctttgagttttctttttgcttatatttttctgacctgtagctgtagaggctgttcacccagaaatgccaatgggtacaggctctgatatggttcgactctgagtccccacccgaatctcatattgaattgacacttccataattcctgcatgttgcgagagttacccagagggagataatttgaatcatgtgagcgggttaccccatactgttcttgtggtagtgaataagtctgatgagacctagtgcttttatacgaggtttccactttcgctacttgctcaatctctcttggtgtcaccgtctacgatgtgcccatcggcttacaccatgattgtcagccctcatcaagcacatcgctgccagtgcttcctgtc

SEQ ID NO: 674557 - DNA, 152 bp, Homo sapiens
gattcctgtgcatactatcacagctggtaattttgtatttttagtagagatgggatttctctcatgaccagccatgttggctggtcatttctcaacatgactagccatgttggccaggctggtctcgaactgctgacctcaagtgatacacc

SEQ ID NO: 674558 - DNA, 147 bp, Homo sapiens
catgtggtgcactcctgtagtccatatctactcgggaagccgagagatgagaatcatctgaacccaggtaggcggagagttgcaccactgttcgacagagcatgactctgtctcaaaaaaacaataacaagatttgccgaggtggta

SEQ ID NO: 674559 - DNA, 369 bp, Homo sapiens
gttgtgacaaccttggcctaactggattaatctctggttttcttgccaccttggggaagtcccaatccaattttaatcctgagcccaaccaggccttgccatgggcctctggtcctttggaacacttgtacccacaggtgaggggcagaacctgaaggaatgggcctgttcaacaatcagccataatgggggtttttgtcaactgctggtaaatggatttgggaatgttggccccgaatgaaaggttgaggcaagcctaggtggaggcaaggggaataacttaaattgggcgaattgggggctgggcaaggaagagaattcttgggaagtcttgctggccgctgttgaatacggttcctcttgacctaa

SEQ ID NO: 674560 - DNA, 976 bp, Homo sapiens
agcggactgtgccgccccggagcagactgcgtgaggctgccgccggaggcgcggggcattgcctggggatcgtggtcggagagcgcgcccgagacccactagcggagacccgcccggggacatacattatccacaacaaattacacgacaatgatgcccaatgaatgggggaagaccaatgggaaaccggaggccgatcacaggggagagagagagaggcagaggatacacgaccttggaactgagagagggcacgatgaactgaaggcagagatggcaggaaataaggaccatgcatagacccacggaaccaagaagatcaccgttagcccaataaggaggaagaaacatggcaagacgacaatcagtaaacaagcagaaggggcaggatggcagaggcccagtaccacgaacggaagggaaacgagaccaagcagtgggaacaggaagcctatcaagcaccgtacacaaggcagataagcggacaaggagacagagaacaagcgaaggaaagatcccaaaaagagaggggaaacaccggcaggggaaggacgtggaaaagacacgagcaggaagaggaacaaaccagaggaaacaagccagcatacagaaaaacacgaacacaaacgagggaaagtccagagacacacacaaaacaacagagagacgaattgagagaacaaacaaaagcagaagtcagagggagaaatggcaacacaaaagacgacgaaaagagcacacacaaacagaatgagcacggacaaacagagacacaaacacagagaagggacgaggaacaggacacactgagagagggaaggagaacacagaagacaatacacaagaaaagcctatgacacaaaagcgagacaaaagagacgaaacaaaaagcaacacacaaataaataaacacacagaaacaccacagcacaggagaccaaaagaaaaagaagaaaggaatacacaaagcaagaca

SEQ ID NO: 674561 - DNA, 528 bp, Homo sapiens
ggagagaactagtctcgagttttcggtggtgggtttttttggaacgtgaccttaaaactcaaaattttattgtctccataataaaagctattagtgggagtaaagttgaacgtccttgaaagaggataatgatgcgactgtgagttgcgtccgaagcttaggagcgttcgctaggcagaaatactaattagaggacttgtaacgcccaggtggccgacttactcgagcacatgactgcccccggctaaaacctcaccggggggtctgcgaattcgacaaaatggcctgttaactaccaaacgggggcatactgtggctagattgcagaagcagttacttgcacagtgacaccccgcattacaaagcggctcgtagccgagctcggaaaggacaaaattgggcagcctgctccataactacaacgccctcgaaaaaggggaaacagataccaacggaaaacgggcacagcacacaaggtgtgtagtccaaggcggggaacaccaaacggggtatcacggggaaataaac

SEQ ID NO: 674562 - DNA, 450 bp, Homo sapiens
cgaagtatctagtaaatttcttttttattttcctatgactgggcatatttctggtacttggcatgctaagttatggtaattgtcattaaaatactgtacattttgaatattatgcatgggcaaaatggaaaaaaataagaaaaaaaagatatcttctccaggtctgtgcatttgggttcggtatggggacactacttcagggcttagccaggtctttcacaaccctgccttagtccggtctttagcctagagattagccagaggttgaagttatgctcccctcagatctcttctaagcatgcattcggccctgagcattcaaggggctttctagtccccgggtatactggagcactttttccaagactttattccccaaagattctcattccctaccttttctttcctgggctttcagcatatctgtggtaggtctcaacggtgctttgg

SEQ ID NO: 674563 - DNA, 1163 bp, Homo sapiens
ggggggcggggcctgagatcagtctcgcacagctgccggtcttatcgggggctccgtaacttatctataccgtaccgcgtcagacgccttgaccaccctcatactaccaatatgcctggtaccgacccccagtggcactaacgtagggatcctcagggacgctctcccagccaacagcagtgagccgcccggagcggcgggatccacatgtccggccagagagaaaaatgccagctgtagggacaaggacgtgccagagccgcacaacctacggcaaggcaccaggagggcgcatgtaggcgattctacacacacgaagattcacctggagctcaaacgtaggccctgacaccagtcacttgggtccatgcagtctaacctgattcatcagctatactgatacattcatagatagcacaatatggaggacaaagatacacatcgattcagatagatacagataaacaatccatctgaccatcatgcacgcacgcgcaggcaaaaacacacaacatttcctacggacccacaagttacatacgtagactactcctgcaaccatgacacagcaccccttctccctagttacacccttgcatcgatctacacacgggcgcatttaatcaacataactcgacactttcgcacggcacctcagcgatccacccctatctggcctccctacactgtctaaatatgccaccttaaacacacacgcagccgcactgcacagatcaacaataccattagccgacgccgagctgagcaaccactaaaagaggcgcgtcatcggagcacaatcgcctgagagccacgggggacccaaaggacaccagaaaacatggccaaacggctctcccagagagccacccgggaccacgcacatacgcgcagtggacacacccatcccccaccataatacacatgccgccgctgggtacaccgggcccctgcaccacacaaccacgcgatacattcagaaccaaatccaggcagcataaaacacggcaaaacaagaagcgagcaatacaaacgcccgatcgagacagagaacccccacgacagagagtcgaacaagctcagagagacagccagaaccccggagcatgcccgccccacagcgaacgccgcgccaaccccccgacatgcgccaccccgccccc

SEQ ID NO: 674564 - DNA, 140 bp, Homo sapiens
accggggcagcttggagtggcgagtgcttcgaaggctatgaaagtggtttcatgatgatgaagaacggcatggacatggaggaaggtgaacgtaaccctcttccttggtaggggtggacctagtgtgaacagtggagggc

SEQ ID NO: 674565 - DNA, 370 bp, Homo sapiens
gggtggcgggggaaaaacaaccgttttgccaggtcacccaaacctccagacaaccggctagcccccctggccgttccttttacgcccaagttttgctccttgaaaacagattgggtgatgcccctgcaaccccagcccaaggtttgcctcaaagaccgagtgacataagccatttccaccctcctaggttcacatccagggctgtgttttccttgggggaggaaaaggtgtcgtttaaatcagggtaaggcagtcaggggggggttcacccctgcctttttttcctttgagggtgagaaccctgaacccaacccctgcccctgggtccctgtcctggaaaaggtttaataaatccttttcccttttttga

SEQ ID NO: 674566 - DNA, 477 bp, Homo sapiens
  misc_feature (24)..(24): n is a, c, g, or t
  misc_feature (63)..(63): n is a, c, g, or t
  misc_feature (101)..(101): n is a, c, g, or t
  misc_feature (119)..(119): n is a, c, g, or t
  misc_feature (122)..(122): n is a, c, g, or t
  misc_feature (131)..(131): n is a, c, g, or t
  misc_feature (134)..(134): n is a, c, g, or t
  misc_feature (136)..(136): n is a, c, g, or t
  misc_feature (141)..(141): n is a, c, g, or t
  misc_feature (150)..(150): n is a, c, g, or t
  misc_feature (177)..(178): n is a, c, g, or t
  misc_feature (180)..(180): n is a, c, g, or t
  misc_feature (201)..(201): n is a, c, g, or t
  misc_feature (217)..(217): n is a, c, g, or t
  misc_feature (221)..(221): n is a, c, g, or t
  misc_feature (229)..(229): n is a, c, g, or t
  misc_feature (232)..(235): n is a, c, g, or t
  misc_feature (238)..(238): n is a, c, g, or t
  misc_feature (255)..(255): n is a, c, g, or t
  misc_feature (259)..(259): n is a, c, g, or t
  misc_feature (301)..(301): n is a, c, g, or t
  misc_feature (313)..(313): n is a, c, g, or t
  misc_feature (334)..(334): n is a, c, g, or t
  misc_feature (336)..(336): n is a, c, g, or t
  misc_feature (347)..(347): n is a, c, g, or t
  misc_feature (354)..(354): n is a, c, g, or t
  misc_feature (357)..(357): n is a, c, g, or t
  misc_feature (359)..(359): n is a, c, g, or t
  misc_feature (369)..(369): n is a, c, g, or t
  misc_feature (371)..(371): n is a, c, g, or t
  misc_feature (379)..(379): n is a, c, g, or t
  misc_feature (387)..(387): n is a, c, g, or t
  misc_feature (395)..(395): n is a, c, g, or t
  misc_feature (402)..(402): n is a, c, g, or t
  misc_feature (449)..(449): n is a, c, g, or t
gttccccgagtggagttcccagcngcccgcggctgacggccagatctgtcctgaggggtcgtnggagcccagcgcctgccattttcctttgtaaagaagtnatccacctcctcccagcngtncccataaanaanangctgnccgagcctnttaaaacagcttcttgaaagggttttnncnttttttgttctgtgtattgtnctgcttcagctctggnggangctctatnaannnngtnacagggtcatggtcgcnttcngttttgatggtacttgcgatggtgtgtgattttccaggtttnggggggaaagtngcacgaagtcagaggtatatngnggagcaatgangtccagnacntnagtgacaaantngcgaatgnttgtaatnttagtttncagcttntctcagacactttcggatgtaactgacaacaggaagtacataatctngatttagcaggtgaaccatcctgtccag

SEQ ID NO: 674567 - DNA, 873 bp, Homo sapiens
tttttcacgccccgcaggtcccgccccctttcatgttatggcagaatgctgccttgccctcttaattggactgtctttcgcttccccgtctcatttttgttcgtcatctcctcagccgccggcctgctgggcggtggttagtcaccccccccgctggcctcgccattttttttggtgccatgacgttcctctcttatgcccgcccctcggggggggcgtggtattagtccgcttgttgttcccggctacgcctcccccctccgttaacacctctttttgtttgtgttgatgccaggttatttgttttttacggccatgcaatcaattccgccccgcatgttgtctgtcttgtggcactcggacagttattgtgtacgccgcgctggccccgcgcgccgccctcttttttttttttttttcgcgctccctcttcgtcacactccaattactcagtgggggttagccacccccgcttttttgttgtgcttcagcaacccccctcctctcttcagtaggggcggcacgtcccgcccgctagacggtgggttgttctccccgacgaggggcgcgcttgttgcaaggagagagtgtcactcctcccatcaacaattgcgcgtgtttggtcttgccccccccttattagggcgcgccccaatcccccctccttgtcgactttttgtttctttgtctcgcgcgctcgtctgttttttcctacccccgccttcgccctcctgtcgtccccccttttttgtcaacgcgcaaaaaaaaaacccttttgtaacacacaaccccaccccccccttttccccccccctctttcccccccccccccttttcccctttttttcccctttttttttatattttttttta

SEQ ID NO: 674568 - DNA, 581 bp, Homo sapiens
gacaaatatttctttttcttcttcttttctttgttgagacggagttctgctcttattgcccaggctggagtgcaatggcgtgatctcggctcaccacaacctccgcctcctgaattcaagcgattctcctgcctcagcctcccgagtagctgggattacaggcatgcagccaccatgcccggctaattgtgtagtatttagtagagtatctggaggttggtcaggctggtcttgaactctcaacacttctgggaggccgatggggggagcagatcagtgtgagcgtcaggagcttcgagaccgaggcgggcgacatgggaccagtgcgatctacggagctacgagtactacgatcggcgcaggtgtgccggagggccgcaggaggcccggcgagcttggcaagtgctgaaggcgagagagacatccagcatggaaccagcgagtgcgcgatgcggaagcagagaagacgtccgtacgaattgccgcggccggagcgccaggcgtgggtggcacaggacgagacagcaacaagcgagcacccgaaggctaccgagaacgaggaccgagcatggggggatcac

SEQ ID NO: 674569 - DNA, 125 bp, Homo sapiens
aaccccagattcctcgggctacagatcaaatccagagcaaggcctgtaacaatcctggtttttacctttacttaagtgaactttgctaaaggctaaaaatttttgatacaagaatccctcctcca

SEQ ID NO: 674570 - DNA, 488 bp, Homo sapiens
  misc_feature (353)..(353): n is a, c, g, or t
tgggtttaaaagtaatgactttattaataaatatacttccatatgatgatgtaaatacaaatcatgaacactactccattctcccatatacacattaattgtgcacacgagttagcctcaagtttcagtggacatataaaaacattacacagtatctatttcagaacttttatacagcaggaggacaggcggtgcttattactcagtataatgtggtaattatttctcctccaaaattcaccgtggtggcaaacaaagaaatattctgtgaaacacttacaaagacaactccaagaggtgactcgtgattcacttataaatccaccaccacttgaattctcactaatcatagnctattaaatatttcctcccaacacatcattacatatcactattacacctgttgttcgacagacagccaccagatatcttccatatattatgtgggagaggcgaggggggcaacacaaacaaacacaaagagaggc

SEQ ID NO: 674571 - DNA, 458 bp, Homo sapiens
  misc_feature (19)..(21): n is a, c, g, or t
  misc_feature (23)..(23): n is a, c, g, or t
  misc_feature (83)..(83): n is a, c, g, or t
  misc_feature (103)..(103): n is a, c, g, or t
  misc_feature (152)..(152): n is a, c, g, or t
  misc_feature (160)..(160): n is a, c, g, or t
  misc_feature (222)..(222): n is a, c, g, or t
  misc_feature (319)..(319): n is a, c, g, or t
  misc_feature (355)..(355): n is a, c, g, or t
  misc_feature (424)..(424): n is a, c, g, or t
  misc_feature (447)..(447): n is a, c, g, or t
aaatgacctgctttctttnnntncccgggcggcatcggacccgtcggagagtaaatcccaagtaaggtacctgccgttggaantttgagctttcttcttgganacctaatacccacagtcctccaggctccggtagattgcaaatgacctgntttctttnttttcccgggtggcatcgacccgtcggagagtaaatcccaagtaaggtacctgccgttggcnaatttgagctttcttcttggatacctaatacccacagtcctccagtaaatcccaagcaaggtacctgccgtcagcagatttgagctttcttcttggntacctaatacccacagtcctccagtaactcccaagnaaggtacctgccgttcggcgatttgggagctttcttcttgggagacctaatacccacagtccttccagnaaaaacaaacaaaggacatgggntttactgtggc

SEQ ID NO: 674572 - DNA, 187 bp, Homo sapiens
  misc_feature (119)..(119): n is a, c, g, or t
  misc_feature (143)..(143): n is a, c, g, or t
  misc_feature (187)..(187): n is a, c, g, or t
ccaacgcagggggtatcccctgatttcttcagctgttttccaaggaggaagagaaaagcatcaagataacactctcccaaagcaggtcaagacaagactcctctgcaccacggtgggtncggagttccctgcattacgcacangctatgttttacacataaattgtcagcttatgggactttctccn

SEQ ID NO: 674573 - DNA, 1903 bp, Homo sapiens
ttaaaagaggaaaacccggtaatgatgtcggggttagaggaataggaggaaaaggggggataggtgtatagaacatgagggtgttttctcgtgtgaatagacgggtttaatgtgtgtggtaacatggtgggtggggtggatgtagagccccataggtggttggtgggtaaactattgtacagaggagactgtatatgtggtctgtgtgagactacgtattgttgagaagtcctggataagtaagagaagagtgagataactctgtgcgactccacagagacacacactctgggggtgtgtactcatacacgcaccaacagacagagtgatttctctccccagtgatagcgtgtgtacacatacagctgtgcggtggcgtgataacacgtggtgcagacagtggtataccggcgagacagtgcttcgtggccatcaagaagtgtccatttcacacaacagcgtctcattaagagaagtggggaaagaatacacaagtattgtgacagacgtttctctgtgagagaaaagagagggagactataagtgagcacgtgcgccacactcgtgtgtgagaagtgtgcgcgtattcgcgaataagattgtgttgcacgtagtgtgagtgcatagggcgcacgaaaatataagctaaaagttgcgacgcgacactgtgtataatacggccccgcgtggtggtgggcgcagcaccatatatcgtggagcacaacatgtagtactcggtgggcgcgcgcgtcgtggtagcacaacgccttcctcacgggggggggagggtgtagggcagcaacagtagcaacaaaaccatgtggcgggtcgttgtgtataacatcataacacagaaacgagggggccatatcatgtgttgccgcgcgtagctatgtacggacacaaagagattatgttgtcaccaaatgtaggaacgaccaagaaattatattaacacgagactctcagtaggagtagatgatggacaccgcagatacatggcgccacgaaatattggggaaacggctgttgttgtgtaaacaacttaaacaattaataaaattcggccgccccttcccaaatagagggggcggaaaccataatagtgataaccccacacggggagcaccacaggggggggagataacagagggccccacacagtgcgatgcacactaccggatcccacagaggaggggcgggatctgcaggaagaccaacacacgatgacacggtcgtgggcacgaaaggcggcggcggataaataatataaacacccaagaaaaagcgccccgcacccacacaagaattacaaacaacaaccaaggcatcacccgtgggcgggaccaccaaacagatatccaccaatatataggggaaccccccccacagcacagaaagagggggagggggcgaacacacgacacaaagaggaggcagccctaaaaacgacggaaggacaggcctacccacacaaagggcgcggagagaagcgactctcggtacaacacaagccaacgaggcacaccactcgactacaactcagcaactcaaaaacacaacgcacgcccaattacgcgagcgtgcaacaacacggacagcaacgccaccaaataataacaacgacaagtggggaggagcgacacagacggaaggcaagtcgatgcggacaacaacgcctagcgtggcgcgccagaagcaactagctggcagcacatagacagcaatacgcagcgcacggaaagccaagcccccaacgcgggcggacggctacgagacggaacactaaacaacagacaccgaccgcaaacgacgacaaaaagcgagaccaacgaagagacagccaccacacacaacattagcaccacacacacaccaacgagccccatccagataccgcagg

SEQ ID NO: 674574 - DNA, 482 bp, Homo sapiens
  misc_feature (216)..(216): n is a, c, g, or t
  misc_feature (364)..(364): n is a, c, g, or t
  misc_feature (408)..(408): n is a, c, g, or t
tggtttctttatcagggaaaagaaaataccagccctcccttttggacaaaattgttgggctttgttcagtcagggctgagattttgcaggtaaaccctgggcggtgtggcacttcattgaatttattagttttgtattccaaggacattttatgaaaatatcaaatattctgaaaacttccatgcttgatttagaatttaaataaacactatgagncaactccttggtagagattgtttaaatttggaacacatactgactcttcccctgaatttttgagatcccctgagactggcattttacttctgtgttttaccagttggaatggagcaaccttcactaaaatctgtactgatggattttngtaactttttaatgccatttaagaacataacacctttaaattanaaatcttcaaaaggctcgtcattctgttcaagagaaggttcaatacatattcttctaattcaggaaaaaaaaaa

SEQ ID NO: 674575 - DNA, 134 bp, Homo sapiens
  misc_feature (6)..(6): n is a, c, g, or t
  misc_feature (119)..(119): n is a, c, g, or t
gatttnagaaagataccagcagcgcagtggtggcctccttggagcctccagacttctcaatctcctggatgagaacttggagtggaaaggagggtgtggcagggcctgtcaacatgatnaactgcccttgaagg

SEQ ID NO: 674576 - DNA, 283 bp, Homo sapiens
ggtctgacctttacaaaaaatacaaaaattagtgggatgtggtggcatgctcctgtagtcccagctactcgggaggctgaggcaggaggatcatctgagcccaggaggtcaaggctgctgtgagccttgatggcaccactgcgttccagcctgggtaacagagtgagaccttgtctcagaaaaaaaaaaatgtagggagacaaataatggtcatggcaagagaatatggtcactttgcacatgggtatgagtagagggataagaaaataggccaggtgcggtg

SEQ ID NO: 674577 - DNA, 112 bp, Homo sapiens
ccgggagccgccagaggcctgcagtgatattgggaggcttgagctaaggggtaagtgtttggcttttgagctcgtagaagctgtcaggatcaaggacgttttctaattctat

SEQ ID NO: 674578 - DNA, 342 bp, Homo sapiens
cgtttccatttttatgtatgttttgaaaagaaaaggtccggggatggtggctcacacctgaaatcccagcactttgggaggccgaggcaggaagatcattgagctcaggagtttgaaaccagtctggacaacatggggagaccccatctctaccggaggaaaaaaaaaagagtcaggcctggtggtgtgcgcctgtaatcccagctactcgggaggctgaggcaggacgattacttgagcttgggaaatcaaggttgcagtgagctatgattgtgtggccacactccatcctgggtcacagagtgagaccttgtctcaaaaaaagtaacataaggaaaaaaa

SEQ ID NO: 674579 - DNA, 108 bp, Homo sapiens
acttataccctgaattattttacatctactgtaccattcaaatgcttaaaagaaggctagcattgtttagcacaaaacgttggtgatatcccaccccaaatagctaat

SEQ ID NO: 674580 - DNA, 925 bp, Homo sapiens
  misc_feature (925)..(925): n is a, c, g, or t
gcctgggggacaccagaggtcggatggggggccgagtggtgcgatcggcgtcgatccctgatgcgacgcttccgtgctcccaggtcggtctattgtgcgtgctctcccctgatgactggaggtcctggttcacatttcacggcagtcagtgcttcagtgtacgcctgtcacttcaactgcacctgcgcgccacgtgggcctcgcctctgtgctcgtgcgtgctgtagatgggctgctgcccgctcgacgaccgtactgatcgccgtatccacgcacacgcgcgcgtcctgcgcggaggccctggtgtgcgcgcccggctctcctgctgcgttttccagctatccggcgctgcagcgccgtgtcggttcaacggccctcgtgttgcacgttcccatgcgacttgccgagactttgagtccgcttgccgtccggctctccgggtgtgcagtcgcatgcctgagtgtctgccatgacgtgcctctttggactgcctgtcccggccgcctgctctgcccggcccatcggcgggatgtcctgtccatcatggggaccgatggccagttgccgcccggatcaccttgggctacgtgcgcaccgacggccgggatggaggcactaagggtcatagctagaactgggaccccccacaacccttgccgacaaacgccttgaacggcaatgacgcctaattccggtagggatcctagcccctggattggcccctggctggcggcccggggcccccgcatcctagtgtggcgccatggccctccagataggaacggtttaggttcccgcccctggtggaccttgatttggcacacggtttggcgtggccccctgtttgaagggcgcctttctcgcctggctggccacttgggggtcctcccccctggctggtggcccccctttgtggaaatccccn

SEQ ID NO: 674581 - DNA, 105 bp, Homo sapiens
ggtgccggctccatcaggtttcacacgtgcctgtaggcctcgtttgtggacacgctcctccacacatccccaagtgacctggtggttcacctacctgtccttgta

SEQ ID NO: 674582 - DNA, 522 bp, Homo sapiens
  misc_feature (367)..(367): n is a, c, g, or t
gcgatacattcttatacaggtgtgacaactgtgtatgaggttagccagttaacgcgaaagtgccagtttgcatggcttggggcccttccctattggtcaaatggcatcgagcgtcctacagtgaacgaccaccgcaatacagagtgattattcttggccgtgcttgccctgctccagcgtctgctgggtaaaaaaaccgacgcctcggacgcctcgcctatcccggcgtattttcaaaaaaaggccgaacaacagggctataccctcagtgacgggcaaatccgggcgattaccgccctgaatcgcgaggcacaacacctgctcaacggccaggccacgcgcagactgtacctgcatggcccggtgnggcgtggcaaaagctggctgctggatggatttttccaggcactgcccatcgccgagaagcaacgcgtgcatttccaccaacttctttcgcccggatgcaccagggcatgttcctgaaccgcgagcatgacgaagccctgggcgccactctggccg

SEQ ID NO: 674583 - DNA, 336 bp, Homo sapiens
  misc_feature (1)..(1): n is a, c, g, or t
  misc_feature (14)..(14): n is a, c, g, or t
  misc_feature (60)..(60): n is a, c, g, or t
  misc_feature (84)..(84): n is a, c, g, or t
  misc_feature (120)..(120): n is a, c, g, or t
  misc_feature (299)..(299): n is a, c, g, or t
  misc_feature (304)..(304): n is a, c, g, or t
  misc_feature (329)..(329): n is a, c, g, or t
ngcccggctccggnaggagtgagcaggcccgggcactgctggagcgtgaggccgaagagntcgaaggcagctggccgccctggncagaccgagccactcccagctgaggccccctggcgncagacctgtggatcctcggcggcgcactccccgcaggcgatgcctgtacttgagtttcaaccccccacagcccagccgaggcactgaccgcctggatctacctgtcactactcgctctgtccatcgaaactttgaggaccgagagaggtaggaactggggagccccgaagagcggctgnaaganagcagtgaccctgataatggcagcnaggagga

SEQ ID NO: 674584 - DNA, 247 bp, Homo sapiens
ccctgcgttacgccgctgttatcactcaatgacctcaagttctttaatacaacagtaaagacaggaagtctacagcccatgggactctggagacaggtggaaggaatggaggattggaagcatggacatgccaacttcagtgaggccagtgaggacatctttataggagacccatgaaagacatacgtggagatattacaactgacagtaacagggtctcactgtatagcagggcaaggttcgtgtg

SEQ ID NO: 674585 - DNA, 963 bp, Homo sapiens
  misc_feature (65)..(65): n is a, c, g, or t
  misc_feature (196)..(196): n is a, c, g, or t
  misc_feature (311)..(311): n is a, c, g, or t
  misc_feature (674)..(674): n is a, c, g, or t
aattcacgtctcctcggtgtatgacgacaaaccggtgtgttgtgcgccacagcaaagtgtgaagnggcggtttttcacccgtgacttgtggagacgccgcggggttaacaatccttgtgtggcacaacagttctctgtgtgaacacacatctggggcgggcacacctgttctcccacctgtggctcccgcctccgntggttctgtgttcgaggcgcctaacacacgtgggcgtatatccttttgcctgcccgacaaagcggttcagtaattcttttggctcccctcaccgggcgtcactggtgtagatcgnccctcttttgcggggtcacaatacgagttatgtgtccttaaagcggtctttcagcatcatgcagttgtttgccgccacagttattcggattctccctccaattattaatacaaggagagatcttaactatttctcctccacagacattgtcgaagacaccctcatccgccaccctttcaatatcgaaacaagctcctcttcttcgcttcttcgcaatttcctacaaacgggtttttaataaccatcctctcgagtttgttgaacagcccctcactcatatgaaagtaacctttttttaattccactggcccgccttgtagtctctcgctagtcttcgttcctgctagaacaaccggtgtctcncttctatgtgcgaccctattgtgcaagctagcaataaacccgcgtgcgagacctcaacatcgtggcgggtttacttactggtcaacatcccaccacaaacatgtgcgtccccccagtttctttcttggatgcttatgaaaccccttctttttttcatcatgacctccgactattcctccttttatgaaatataatctccgaatcaagtctgcacaatcatcaacacatgaaacgcgtccattaatataacacaaacaagcaaaccaccctctttgccccggacatacaa

SEQ ID NO: 674586 - DNA, 559 bp, Homo sapiens
ggcactctctcttaatgctgtgcgacatctccagcacacgctgtaatgtgtgaagaggacatgagcaccagcttctgtgacccatatccaaaccccagatgccgtttagtgttggagaattcaagtctctgcatgttagcaaactctaccctatggcctcaagggctctctgtcttctaatcctgggaaaatctatcataattccctcaacgagtttcagagatgtaagccatgaaagtgggcactcatcacagaaggcacctggctctggtgaaccataaccttcaactctgcagcacaaatggtcctgagcccagagaaatacaagcttggataatttctattcgccaactaaacagagtgagtattgggcggtgactttggaggttggagaataagaaagatgtaaagtgattgtctccaagagtgggaaagttaacggtactagatcatggtaggctcgttaggcatgttgagtgcccacttgagcaccgtggacatgcttgggctcctccagacatatttagtgctcaggtcgctgtgggttgcgttgctgtct

SEQ ID NO: 674587 - DNA, 713 bp, Homo sapiens
agcggggggaggcgggaggcgggaggcgggaggtgtggggccgtgaagcggcctccctcccgcccccagccgccggctggccgagcctgtgcagaagcgggctggaccaggtaccgacacctagaccggccgaagggtgccgtctggacacgcaaggcggactaccggtagacagcaccaaggaccatgaggggccgcagaagcccgggacgcacggctgctgaccgagacggagctcctgagaccgccagaggaggagcagacggatcaagtgcggagtcaaagacgtcgataccaggcggagtcatgacacgcatcgaggcataccaagagcaatgggcacgacttaacaagacccaaaagtcgcatatgcaacactgctggcataaacgtgtgaaacaccaggacgccataccgtcaatatgttaccagggcgattcatgatgagggcaagatggacacatcgcctcacaaatcgaagctgtctggagtgaacgtgcactggagaaacaagataacaagaaattggaatttgatggcggacacatgaggaacgatcagtggtggccccaaacgtgtcagtacagagagtcaatacaagcacgtaatccaacaacataggcagagcccaccgagacacaaaagaaggacccccacgaacaggaaccagcgagaacgccatcaggagatccaaataggtacagaatacgaag

SEQ ID NO: 674588 - DNA, 213 bp, Homo sapiens
cgcccctcagcttataccaatattatcatcaatcaataagtggtagcttttcgtggtatatccagacaatggcatattattcagtactaaaaagaaatgtgctatcaattcatgaagagatgtgaagaaaactttaagttttcacttagtgaaagaagccaatttggaaaggccacatactgtgtgattctaactatgtggcatcgataaaga

SEQ ID NO: 674589 - DNA, 151 bp, Homo sapiens
aacataagaggagaaaggaagggacatgaggcataccattcccccccccagaattagaggtaaaggaatcctaaaataaagagcacagcagcaatcacactcacagggtccagaggcgtattcctggccatcttcctagtactcggtccgt

SEQ ID NO: 674590 - DNA, 851 bp, Homo sapiens
atcggtgagaacgtcagcgggctgcagctgcgccaaaaccagggactggacaatgaccctggtgaaggaggtcgtacagaatttcgctaatggagttttgtgatcatgttgatctggcaaggatgctggcagtgcaagatttcatcaagagctgagctgaagaaggctggggttgatgccaattaccgactgtcccagaactggagtaaccaccatgaacccacgaacagcacacaaccaccattagcacaacaagtcactcttgcactagcatccacacgagaggcgcagcaggaccctgactgggcctacaagacataaacgtaagacccaacaccatgacgccacccaagggcgaggacaaatgaactgcccaatgacgaagggcaacgcgccccgggccaacccatgactggtccacaaagcacccgcccaacactttcccacggcgtacccgcagtttacagaaactcccttggcccaggaccggatagacataaattgatcaaccttggatctgacgtcaaactggagaagaccaccatcgtacttcacgctaatggagatcaaaaccatatacaaaaccgatttctaatcattcgccacacctacatttagtaaatggagtcataaaattgacaacgaacagatcaagtttacaatagaacttgtcgcaaacgttagattccccattggcaaccatggcccaatatacaaacgcactttcccagaaagtggatggacactacaccatggcagcacagtggaaccccgcccataatacaaccccattgcgagcaataactgcattacttatacccaacgtgatcaagcaaagaaaaagtagttac

SEQ ID NO: 674591 - DNA, 167 bp, Homo sapiens
taatcgatgcactggtgttatcgatgccactggtgttatcgatgccactggtgtaatcgatgccagcggtgtttatcgatgccactggtgtaatcgatgccactggtgtttatcgatgccacccgactcttagcggtggatcactcggctcgtggcatcgataaaca

SEQ ID NO: 674592 - DNA, 274 bp, Homo sapiens
  misc_feature (133)..(133): n is a, c, g, or t
gtctttcccctctgtggcaggttaaaccaaaatccccccaaaaattccgggtttcatggtagctctctttcataggggggtgccctacccccccggtccaagggggttttataggtccggaaccttattctgncagtggattgccctttttcttttcccgcaaaaatgattccagaagaaaaataaccccccggggttggttacccttggataccccaatggtttaggttctttgctttttacctttgggcttgggttaaaaggttttgtttgg

SEQ ID NO: 674593 - DNA, 629 bp, Homo sapiens
ccagcccgtaaaaaaaaatgggtggaaccagcccctaaaaaccggggagaacatattgcctttggcccccttgccataaacccaggccccgtttattatagcgtctcgggtgccttcttagtaagaacctttgccaccccaggcagccagtgcattggcttgcagggccattccataaaagatccttagtttccagggctttggtataggtctaaggtcgatagctctaaggttgagattggcatcatgttcactcatgccacctgacagatagcagatgccaggaacatctgcaggagcagtggtgcaggcatgtcctgcagtctccatgttgggctttagcagggtgccctccaggtatacatgatggtcattcaaggcattgtagacagcaggcagcactttctcagtaacatactggcagtgttccaggtcatggtctccatcaggaatagcctctggttcaacaataggtaccagtccattctgctgacagatgctggagtagcgagacagggcgttggcgttctcttgcatagcgaggctggatggacagtggtcggcaatcgtcagcacagcacgccacttcccaaagtcaacgccatctttcgtgaagtgagcggcacgag

SEQ ID NO: 674594 - DNA, 654 bp, Homo sapiens
tgctctttgggccgttccaattaacattccaagcgtcaatgttcggttgtagggcgggcccccccatcaagggcaagaagttattaatatgtccaacaattgctaacttagcaaaatttctctagtgctttagcatatccaatgcgcacatagacttgttgttatattaacaggttagtcactttctggaactatatgcataaggattaaggggccacaaataaggaagtcgttcatgtgttatctatgtagtcatttttttgaactctcattgcagtatttcagaagtttatatgccgatatctgcctagtaattgtatcatgattagttaaagcatatatcctatctgactgcgcttattgcatcttgtaggtctgggtaccagtatcctacgagtgacagaagcacttgccccaagtatttgcatcaatcaagagcatttcactttgtgtcagtacctgcagatctgatcagtcacatcatgggcttaacgtttaggcacttaattcaatgtagatcagtcatagtacagttctaaatttctatgacaaaataattatgtcactgtagttaatatatgtaagttcagataatagaatcgcctatgaggtagtatatcattaggtctagagttatagttcagcttagtaaac

SEQ ID NO: 674595 - DNA, 154 bp, Homo sapiens
agatgtgccactctgactggaagagtggagagtactggattgaccccaaccaaggctgcaacctggatgccatcaaggtatactgcactgagactggtgagcctgcgtgtaccccactcagccgagtgtggccgagagaactgtactcagcaga

SEQ ID NO: 674596 - DNA, 693 bp, Homo sapiens
taatggctctttcagttaatggcatgaaggagttacactagttccaagttaaaaggggaccccaaagggttactttatacaagctggtggaggtgtttaaacctggtgacaaggggagaagaagggaaattctactcattggcaagggaaatcctcacttaagcttcagtggagccacaagcacttaaaacccatgaaccttcagctgatcgtccttagccagtccaatctctacgaggaactgggcatatggttctggcggtgggtcaccctggtagctggaattcacttctccatattccgggatggctcaattacaggtcaccattggcggggcaaactttttcttaaacggccttcactagttcttttttaatcggtgaatcatcagggatccctgggacagtagtaaggggtcttcctggcgcggtttctctggtgagaatctcttatatgggattataatcctcagtggccaagcgggaacgcaggtcatcaccctttactgtgcactcagcaaaggggtcagaaagaggggaggtccgggaataggggacatacgatacgattcctttccctcgggggaaacggcctgcggaaggcggcgtgcggcggtggcgggcaaaaggcgggcaggggggcaaccggacacgtcggaaagcgagggggcccagggggaaggctgctgaatcc

SEQ ID NO: 674597 - DNA, 149 bp, Homo sapiens
  misc_feature (7)..(7): n is a, c, g, or t
  misc_feature (103)..(103): n is a, c, g, or t
accaggnctgggaagacactcaggctaagtgagtgcagcttccggccagagcacgtgtccatgctggccaccggctagagcaagttttttttcggaggttgcncacgctgacccagtgctgcctgggccagaagcacctggccatcctc

SEQ ID NO: 674598 - DNA, 307 bp, Homo sapiens
  misc_feature (10)..(10): n is a, c, g, or t
  misc_feature (27)..(27): n is a, c, g, or t
  misc_feature (202)..(202): n is a, c, g, or t
  misc_feature (260)..(260): n is a, c, g, or t
  misc_feature (300)..(300): n is a, c, g, or t
  misc_feature (305)..(306): n is a, c, g, or t
cattttaacnccttattttgcccatanttttgttgtctctcctaagttattttttagagacaggatcttgctctgtcacacaggctggtatacatgggtgagatcatggctcactgtggccttgaactcctgggctcaaaagatcctcccatcttggtttctctcaagtagctgggactacaggcacacagcatctcaagancctggcctcaggtgaatcgcttgaccccgggaggtggaggttgcagtgagccgagaangcatcactgctctccagcttgggcgacaggaactgaatcnatttnng

SEQ ID NO: 674599 - DNA, 317 bp, Homo sapiens
tagggttctggatgtagctcttctcttcttggctcccaggagctacaggggaggactctagtctgtcactggtggaggagaggaggtcaccaccgtcaggcaagctcttggctgctccttaccctgagtcccaggcgcagcctactatggggcttgagcctgtgtccctgggcataactctgtcttgcacatacaaatgcacatatactgatcaccagctcaagctcagagacacacagcccacttgcacacatctcacagacccatccagttgactcgctggtgttggatctatcagaagcccgcctccagacaga

SEQ ID NO: 674600 - DNA, 374 bp, Homo sapiens
  misc_feature (7)..(7): n is a, c, g, or t
  misc_feature (119)..(119): n is a, c, g, or t
  misc_feature (215)..(215): n is a, c, g, or t
ccccatnctcctgattcctggcatccttttccctcttgcccttcaaaatgcccctgtggactggattcctttttaatttttgtttaccttatttatttgagacatagactcactgttcnccaaggctggagtacagtggcacccatcacagctcactgcagcctcatgtgatcctcccacattaacctcctcagtaactggggctataggttgtngccactgtgcgcatctttttgcatcttttgtggtgatggagttttgccatcttgcccagacgggtcttgaactcttgagctcaagcaatcctcctgcctcggcctcccaaagtgctgggataccaacgtgagccaccatgcccagcctagccccggatt

SEQ ID NO: 674601 - DNA, 118 bp, Homo sapiens
ccagtcacatgattgacaagaacatttaatcaggataaaggcatgtcctgctattagagcccttctcccctcaaaaacagtcaactgtttcaaatatgtagtaagaaagactaaaaac

SEQ ID NO: 674602 - DNA, 440 bp, Homo sapiens
tataagtagggaggtgatattgcatggtcgaggagccataagacacgtgtatgagattgatatggatagtgtcgtgtggaagaggcgagagtaggtcgactgttatgaggcaggtaatggcggaggacggatgggacatgagaaagtgaatgttgagtgtgagcatgcgtcgccggtgactgagtgcgatcggaactatatgaggagtgagagagaatgagaaagacgtggacatggataatgatgagtgaaagtgtagggagagatcgatagagggagcagagatgggactgttaggttgtgtcagtgtgccccgagcgagatggatgattccgagtggagccggtgagtgaggcggatgcacggacgcggtgtgcacaagagaggatgagcggtgagttggacttgatcaatgtgcagcctatctaggagcgactcga

SEQ ID NO: 674603 - DNA, 933 bp, Homo sapiens
gtacaatccctatgacgcattattgtctcgtgctccttctgcctataacgaagagagctaaaatcgcccatggttactcttcaatcagaccgtatagcccgcggcaataagagtgatactaaaccgtaactccccggatgctccctccgtgcgcgatcattgtgccagtaacccgcccactgaggggtgatcattgcttgctattactattcgtgtcctagatccaatcatttgttacgaaaagaacctacagtagtccgcagtcactctatcactccgtctccacagggtcattactaacctacgtactcgccgtctacatagtcgttatcgattgacataacatagacatatgcatcaggtgaagcatcagtctaacccctatggtatttaagcttattgagagaacttctagtgttgcatgaaatcacgttctcgctgatcaaatatgactctcgctacttagcaggactcaacatattagtcactagccctaatatttgcgctctatcactatttaacttaattacgatgggggtcatcacccagcacattgtctgttaaaatcctgattgcacaacgagaaaaaaaccctcatgttcatggactatcccccattctcctcttgtttcctctaaccccgacattagttaggcgggtgtactctgaaacagtttcctaaatgtatacttggaatgggggcggccgccgattcgaaaaagttggaacctgtcgtttggggcggcaccagcactaaaataaggggaacttttgccggaacgcgttctacgggggggctcaaacacaatacgcggggggcgcggcaagacaaccaagagctgggcgccggctatacaaggtcacgcttggcgcgccggcgtgaggaaagaataaagcgggggggcaacggggggcgacaaggggttcaacgac

SEQ ID NO: 674604 - DNA, 114 bp, Homo sapiens
  misc_feature (36)..(36): n is a, c, g, or t
  misc_feature (94)..(94): n is a, c, g, or t
  misc_feature (104)..(104): n is a, c, g, or t
tgatcaaacgtgtacaaaacagaacaaaaggcgggnttccccacctcaaggaatctttttaatttaattttttttgagaaaggggggggggaangaatgggganggggttcccc

SEQ ID NO: 674605 - DNA, 166 bp, Homo sapiens
gtgaataaagctatagcttgactaaaagggttctgtaactatcgtgaggtcttcaggcatccactatgggtctaggactgtatctcttacagatgaggggagactactgtattatcagttccaggttccataaaatctttactattgcgcattgcggataggccat

SEQ ID NO: 674606 - DNA, 413 bp, Homo sapiens
cttggtggtgggcacttgtggtcccggctgcttaggaggctgaggcaggagaatcgcttggacccggcaggtggcggttgcaggctcccgccaccgggcctagctaatgtttgtattttcaatagagacagtgtttcaccatgttggccaggctcgtcccaaagtcccggcctcaagtgatgcgcccgcctcagcctcccaaagtgttgggattacaggcgtgagccatcgtgctcggcaaggtaatgttaatttcatggcgtggatctgtggctaatacggttatctctatctttgccgatcttgctcctgcctagcttaggatcagagctgcagatgctcgctcaaggccactgtgctacatcttgtagcttatgcaggcctagtagcatgtgggtctctatccctcgccg

SEQ ID NO: 674607 - DNA, 104 bp, Homo sapiens
  misc_feature (20)..(20): n is a, c, g, or t
  misc_feature (71)..(71): n is a, c, g, or t
aggggaagaagcaggctgangttaacagcctggggctctgtccctcaccccaaggagagggagttttccanaccccaggccaccaagcggggccagccccagcc

SEQ ID NO: 674608 - DNA, 161 bp, Homo sapiens
  misc_feature (77)..(77): n is a, c, g, or t
  misc_feature (119)..(119): n is a, c, g, or t
  misc_feature (143)..(143): n is a, c, g, or t
tgcatgatagaatcgagctcggtaccgatgagtaatctggcttctttataaactgtttaggtcactctgtggaaaangagtggctacaagccaagatggtgctttttagaagagccctngatgggcaggccgtcaggttcctngtgtgccagtcaggtgag

SEQ ID NO: 674609 - DNA, 1112 bp, Homo sapiens
ggaggtggagctagcaagtgagccgagatagtgccattgcacaccagactgggtggacaggagcgagactccggtctctaaagaaagagagataaagattgtggctgtgtcgaagaccagccaaggaagcctcaaaaaattggtgccatatggccgtagcgctgggtttgaagagaatgctccaggagattagcctgccaaggtcaagtgccgagcatgaaagggcagtgttcaagcgcaagaactccaaggagagacctagatcaagcggtggttgaggtatcgagtctcccagaataaagatagatgacaccacgcgggtgtgagcacactcaaagagagactgtctcacggtgtcaattctgtgggacgcattatgcaaagacaccttttcggtcaaattgtcgggggtcttaaccggtatctattgtgaagcatgctctcatgtgggggttcacaagaaattcgcagtagatagcaatgacgaggctacacagtcggtgagcagaaatactgccatagggttaggcccggggggcaaatagagcatatatgtggtgttggtgcaaacttcatagaagaaaattaggtgcgacaagaaagtgcaaacgcggataaggtaatcgcgaggggaaatttgtttccagatatacgaggaggaaaatgtgttgtaaagaagaattgctgcgcgcttgtatgaggcccgaggttggaaaacagatgaggaagtctgcctgtgggcaaatgttgtccccttcgggaaatgtattatgcccaaaggaaaaagttcggcggagcccgtggggtatagaaaaagtatcacgcagtcaggggtgggtatcttccgcggaagaaaaaaacctccgtatgaacggtggacgaattggcagagaactagacattgtggagatgaatttcctgagaaatatcgaaggcatgtgaaccatgttgtgtgaaacagaaagagtgagttgaaacatggggtagttggagaacgtgggttgaaacagcgattattgattcattcacaagtgtacatggggggttaaaaatttttctcccaacacaatgaaagggggactttggagagtgggaaatagagggggatcaga

SEQ ID NO: 674610 - DNA, 111 bp, Homo sapiens
gatcacccaatcactgcaaaaaagtgtgaccccccccttttgactgttctgagagtaggcagagtggatccagcatgatgatgtctgcctcgtcgacctgttccaggtact

SEQ ID NO: 674611 - DNA, 162 bp, Homo sapiens
gttcatatttctacaccaaaacaaaaaaaaacaaaaaaaacaagcaagctggtgtagtggctcatgtcgtgttatcccagcaccttggaaagctgaagcaggaggatcctttaaacccaggagttcacgactagcctgggcaacatagggactttgtctcat

SEQ ID NO: 674612 - DNA, 480 bp, Homo sapiens
cggtgcagtgaggccgggcagtgtgtgcggagtggaccgacggacgcacgtggcggtgtcgtgcggggggccatggagcgcggcctggggcccgggggcgctgggccggggtgggcttcccactggcacgacatggagacctgtggttgcgatggctccctggtggctctggcttggaccgcgatgggtgctgggccctggcctcctaactgtgggctgcgtgtctggtggctggtagctggtggtgggcgctctcccccctgcccgcgactcggagccacccacattcccttccccttgcactggtgcaccaggtgccagggtgcgggagctaatgatagcggcgagggagccaccagggctgggatggccacgagaacttgggggcaggcagacccgagccaatgaagtgaggcctgtcgtgttgaggtgagcatctggtggacgtcttcatgactgaccgccacataaccgagagcg

SEQ ID NO: 674613 - DNA, 203 bp, Homo sapiens
tgagcgatgggtggggggtggctctgatggtggcagcagtgcctgttggttcgcccgatgggtctccatggttccagcaccagcagggcaggtggcacggccagggctccagtgcagcccaggcagctgcgcctccagcactatgcagccacacccattggtgcattttggggtttgttctgcgcactcatttcacacattca

SEQ ID NO: 674614 - DNA, 202 bp, Homo sapiens
ggggtttttggggggggccccccctttttttccggggggaaaaaggggggccccccggggatttttcccccccgcccccaaatttttcgcttcccccccggggggcaaggttttttttttctcccccccccccccgggggccaattttaattgttttttcccggggttttgggccccgggtttttttttttttttcccccca

SEQ ID NO: 674615 - DNA, 606 bp, Homo sapiens
gaggggtggggtagctgcctgtgcctggtgagggcgcgggtcactgtcttcacagaagaagttgctgatttgtgattgagagctactgttccattgtgaggtggcctggagaatcgcccagctgtggcagtggcttccattcagaagaagagaggccttttctagcccataatgggtgcaggctgatgggctgggccctgtggccctggtgcttgtagcacaggtttggggacttggcggtgtgcccgaagaccatgcggggacgacagactatcacgtcgaggaagactgagatgacttttgcatccgattggtagtgaggtgcgaagccacattgggaggggatgggctttacttgatgcaaactcatctctgcagatgggactaactgggtggtgctggatggcttttagtaactggtataggggacgagtgggcagcccccagaggtagcagcgcaagtcatggccattgaggcataccctttaacaattgttccccgcttactcaccggtgcatcacaggtggtcgcccagtcccttgccctgtgctcttttgatgctgggctcttgtcgtgtaatggtctcatctcgggtggtcgtcctg

SEQ ID NO: 674616 - DNA, 585 bp, Homo sapiens
tggaaacaaatgtctgaaaatcagagactagtgaaattaacccatagtgcagccactttcagatgtggccattaaaatgatgtgtggcagggcattcaaaaacataccaaaatatttatgcaaaaatttccattcagtgaaaaaaaaagcagagtctaaaacaatgcatcttatttttgcaaaacaaaaatataactgaacacacacatgcacacacatatacatgcagatacaaataagcagagaaaaaaaaaaccctcaaaattatcactaaaatgctaacaatacttatttctgggtggtgagaatgcaggtaatttttatactattctttttcctaagccgatgccctcaattttttatacctaacctagcttaacagtaaaactctatttttatccaagaaggacgcttctttacattcctattttttcattttaaaagggaggtgacttattaataacctcttttttttaaattttaccttccaccctaagaaacttggtttaaggaaaaagggtgggggaaaagggcttcccttaggggggaatttaggggaaagcctgaattcttggaaatttaatt

SEQ ID NO: 674617 - DNA, 427 bp, Homo sapiens
gatctagaggatcccggtctgttcctgcacttctttatggaattggttaccctttactaagcactctcttgcttatacgtcttgtactaatatttggaccccgtatagttaatactatcactcgaaatatttcttctcgcctagaagcaatcaaactccaaatggtgccataaactgaaccacacatggacaggccagccattcctccgaagacccttggatcaaccccagaaggagccctagctgctgtttcccattccacgccccttttcagcaggaagtagccagaaagagtcatcgcccaaaaccccctaacagttagtgtggcatctccacaggggataatgttataggaaaaggggtccttgggaagttttcgtggtttttgttttgttttgagacggaggctcgctctatcgcccagcct

SEQ ID NO: 674618 - DNA, 102 bp, Homo sapiens
ccattgactttcttctactagtggaaattaaggacattatcaagagacaccaggaacagtcactgaggataagaacaatgcctcccatgttgtgtatcctgt

SEQ ID NO: 674619 - DNA, 324 bp, Homo sapiens
tggtaccgttatctagtcgtagacgtaagtcaggcaagctcctggtgctctgttcactcacgtaattttcacatcaggaaaactctgggctgggtgcagtggctcacacctgtaatcctagcactttgggaaaccaaggtgggtggatgcctagctcagtgacaccagcctgggccacatggcaaaaccccgtctgtgccaaaaatgcaaaaaattagctgggtgtggtgttgacgtttgcggtcccagctactctggaggctgaggtgggaggattgcttgagtctgggaggcggaagttgcagtaagccgagatcatgccac

SEQ ID NO: 674620 - DNA, 359 bp, Homo sapiens
tgaggatccgttattgctccataggtgttcatacggttatggggctgtgccatcggcaaagccaggcagcgtgcaaagacggaaatagagaagcttcagatgaaagaaatgacctgccgtgatatcgttaaagaagttgccaaaataatttacatagtacatgacgaagttaaggatatagcttttgaactagaactcagccgggatggtgaattaactaatggaagacatgaaattgtaccaaaagatataagagaagaagcagagaaatatgctaaggaatctctgatgggagaaagatggccatcttctcccatcagctgttttgataaccaacaagaggtcaattatagaaatcc

SEQ ID NO: 674621 - DNA, 778 bp, Homo sapiens
gagtcctcagtcacgcccgtatctccccacaggcactgatcctgtacctatcatgcaagcatgaacagttggtgtgagtcctccgtacccgccttggtcctaactaatagctattgtgtccggcgttttgtcgtagaagttccttgcatttaccagtcttcatcaagacatctccagggagtgtcgctgtgggggcgatcgcgagtaggcctgtgtcgcattccttgaaagtgccgtgatccattgtgcacttgtggtaagcgtttcgaatccccagtttctacgtcctagagttacgcctgtttacagtactctaggctacaggtgttggcacgtcgtaggtgtctgcccgaaaaggccttttttcgcaatgtcgggaaagggtatagaagccggtccttaacacttacgctgaccaacggaaacaccgggtcgcacttagatagggccttgggaagctggacatattgggttgggtgttgtgccaccccaagggcagtaaggcaaggaaccatttcgtaaacgcaaaggccgggttattaccacgatagagcaatgcctattactttacaagaaaccgcgcctgggtactctgatgaatttaccctatatacgttcgaaggagtcaatgggggaaaatgcacatatgtgggtcttttgcatttggatgttcccctacaatgttttccaacttcacaggggacacttttggcggcctattgccacccaaatattttgtggtggctacttgagagattgctctccagaggcgcaggac

SEQ ID NO: 674622 - DNA, 433 bp, Homo sapiens
gccctgcattctcgtccgtcgactcctatgtgatcccctttgtatatcattggtgtcttcatccgcatgtgtgttcaccttttgtgataagtttatgactatagggtatggggcatgcatagaggtttaacggacggtgagtgggtgactcccactggacggaaatggttaagatcgtgtgtgggtgaaacgtggcgatgggaactggccttgtagatcatagtaacttgatctgtgagaagattcccatgaagggacaagggataggcaggtcattgagacaaggaccattagttcggtattcccgtaagaggtgggaaggtatggtgattaataggcgaagagaggcggtggagggaatatagctcttcttctgatgtgatacaaaaatgacaggaattagagaagagttccaaaaatgaatgctaatata

SEQ ID NO: 674623 - DNA, 205 bp, Homo sapiens
cagctggggacggcacaagctgggacaacatatggacggcactctccccggaactctacagaacatatgttggtcaccgaagacccgtacgttctaagcctccctggttcttatgaagttcgaagcagcatacccccggattccgggtacgagccaacgtcatgacacgcgtcctatggaaagaagactgtcctcacacagctcg

SEQ ID NO: 674624 - DNA, 786 bp, Homo sapiens
ttggggtcccggttgcctggattttgtcgtaatccataggccctgtcttgaagtgcctggccctcgaaccttgcacctgcttttggtgggacagcagactggagcttgctgctgttatcaatggccgaagtcgtccgtatgtctcgtgcggctcgaagtccctcgcttggtcgagctcggctcgacccactactcgactgggacctgaggtcttcaggtgtgtaactggagcacattgcctctgtacggccctgatgccattcctcagataacgttcgcagggtttcggtgatacccccaccagccacttcctgaggacgccaatggaagttctcagggacgcagaaacgagcttctctcttgatgcctcacgcgggatgaatgcttcacccagcacccttggaacaatcatgcagaagatggccatgtcaccgaggtccactctcctgctccctgagggtgggtctcccgggaatgaacaggaatggagcttcagactgagacagaacctgtgggcagctgcagtccccccagaatgggtcccatattataccagcaggacattcagagccagcgtgaaggtgaaaccgtcagccccctctgagtgatgctctacctcagtggtatagcctgccaagatgacgcaagctccggtctgatatacacaaacgactgcaggaagaccccaactacagtccccagcgcttccccaatgcccagcgggcctttgctgatgatcctaagctctttgctctatggccaaacactcatgaggggaccgtttcc

SEQ ID NO: 674625 - DNA, 277 bp, Homo sapiens
ggacacaatggtcccaaatcacttgatacaagccaaagcccttacaatgcctttacatcctgaccagccactggccctgggatcacccccttaggcattctagtgacctgggtctctgctgttccaggcatgcttcctagcactccccagccttcaatagggaatagccagatatccttgtaggttctgttttccaccccttcaggtggactctcatcatagccaccatcaccctccttaacctctacttctacctacgcctattttacaccaaccc

SEQ ID NO: 674626 - DNA, 562 bp, Homo sapiens
  misc_feature (379)..(379): n is a, c, g, or t
ctagaaatcacgaatactagtctccgtctcagtctatcatatctgtaaaatagtgacggcagaaccaagcaatgtccaaatctctcacagttaaatattaaactctgaggctgactgcagtctcattactattctcaccttcccaggacactgcctcatcaatcctcttgtctctctcacattttcagtctcagcacaagtccattgccctcttcatatatcacctgccaaacaaaatccttactctgaacctgccatttctttgcgctaccatctcctccatttaaccactatagctgtcaccaaaacagatgacaaagcaaatatactcccaagagtaagcattgtgcctccaccctatgccccaggtactcctctncagtgtccatttactccttagccaatcacaatccattccattcccttcttgaaaaccaccagcacccatctgtcagtggctctgaggtactatccctggtctccccaaccctctggtagaaaaccactatctcccactgcaagaaagggatagtgtaacaaagacaaagagggcggcttctat

SEQ ID NO: 674627 - DNA, 298 bp, Homo sapiens
  misc_feature (25)..(25): n is a, c, g, or t
  misc_feature (60)..(60): n is a, c, g, or t
  misc_feature (114)..(114): n is a, c, g, or t
cccataaggggctcaggagctggancctggggttggaggctgcagtgagctctggttgcnccactgtactcctgtactcctcctgggtgacagaatgagacgcttctttaaaanaaaaaggggggaggtgatgggggaggggctgggagagtgtcagaaaaaatagctaatgcatgccaggcttaatacttaggcagtgggttgataggtgcagcaaaccaccatagcacacatttacctatgtaacaaacctgcgcatactgcacatgtacccgaaaacttacaataaaataaaatt

SEQ ID NO: 674628 - DNA, 734 bp, Homo sapiens
agggtacctgaagcgaatgggcaccaaagcagcagtgtatgccgcagttctagcttcaccttcacgatgttcccttgtcaaaagcgcactaaatcgtctccaagtcgaagcatcagcaaacaatggcaaggagagccaccagaaatgtacacctgattttcatgacaaataggtaatgctgtattagctagtggagccactttctgtatgtgtacatgacatatgttagcacaccagtcggaatagaatgaacctgtcccctgtggcagagttacccccaaaggatgtggggcaatcagtattcattcccagctgttgtaatactgattgggttcaaaaaacagctcatatttgatgcaaattaaagcactgtggacccactaaggatatggcatcactggacgaaacttacctgctacctttgaaaccaaaaaaaaaaaaaaaaaaaaaaaaaaaaaatgtttgtggggccgcccgtcgcccagaaaaagtttaaaaaccacttctggttggcgcccgggccccgagatgtctagggaccctcgcccaaagggtgtccgaaagaacaccgcgccaatgaacacgcgggggttcccaaaaaaaaacgcgggggcaacgagggcgttgacacccgaaaggagcggggcaaaggcctaacaagggccaacgcctactagcgccgcggtgaggtggaaacaacgcgaagacacaagaagacaaagcaaaacaacacg

SEQ ID NO: 674629 - DNA, 558 bp, Homo sapiens
ggcctgacaacagcaaacattgcaaaaacactgtttccaaagtgtgttcaagatctccttagccacagaattgtcatctagacactttgtaaccacatggcctcttaaatgggggtcatcagaatgtttgtcctgatcactttagtgtgggaacaaatccaaagagatgcctggaagactcagaagactttggagtaaacaaagctataactcaaggtgagcccgcttttcgggtgggaaaagcacccctaatatacccttctgcaatatggtttctgtataaggctgagcgcgcccttgagattaaaccctcccttcaggtggtatattcgccaggtggattgttcaggcaccgaggaaatttctcctggcctgactctgccaaaaatgggcttacccaaagggaatgttaggggaatactaatggccccagtgtataaaggctatgtgcatctttttgagcacccatgtttacccgccgtgaattaagttttttaatttggcgtacctgttttaaaaatatccattaaaaaaaatctcaaaatgttgcaagaaaaa

SEQ ID NO: 674630 - DNA, 994 bp, Homo sapiens
  misc_feature (7)..(7): n is a, c, g, or t
  misc_feature (98)..(99): n is a, c, g, or t
  misc_feature (106)..(106): n is a, c, g, or t
  misc_feature (109)..(109): n is a, c, g, or t
  misc_feature (116)..(116): n is a, c, g, or t
  misc_feature (121)..(121): n is a, c, g, or t
  misc_feature (140)..(140): n is a, c, g, or t
  misc_feature (146)..(146): n is a, c, g, or t
  misc_feature (149)..(149): n is a, c, g, or t
  misc_feature (153)..(153): n is a, c, g, or t
  misc_feature (157)..(157): n is a, c, g, or t
  misc_feature (172)..(172): n is a, c, g, or t
  misc_feature (177)..(177): n is a, c, g, or t
  misc_feature (184)..(184): n is a, c, g, or t
  misc_feature (189)..(189): n is a, c, g, or t
  misc_feature (193)..(193): n is a, c, g, or t
  misc_feature (197)..(197): n is a, c, g, or t
  misc_feature (214)..(214): n is a, c, g, or t
  misc_feature (219)..(219): n is a, c, g, or t
  misc_feature (231)..(231): n is a, c, g, or t
  misc_feature (247)..(247): n is a, c, g, or t
  misc_feature (253)..(253): n is a, c, g, or t
  misc_feature (258)..(258): n is a, c, g, or t
  misc_feature (282)..(282): n is a, c, g, or t
  misc_feature (295)..(295): n is a, c, g, or t
  misc_feature (305)..(305): n is a, c, g, or t
  misc_feature (307)..(307): n is a, c, g, or t
  misc_feature (313)..(313): n is a, c, g, or t
  misc_feature (315)..(315): n is a, c, g, or t
  misc_feature (323)..(323): n is a, c, g, or t
  misc_feature (326)..(326): n is a, c, g, or t
  misc_feature (331)..(331): n is a, c, g, or t
  misc_feature (342)..(342): n is a, c, g, or t
  misc_feature (352)..(352): n is a, c, g, or t
  misc_feature (372)..(373): n is a, c, g, or t
  misc_feature (379)..(379): n is a, c, g, or t
  misc_feature (398)..(398): n is a, c, g, or t
  misc_feature (413)..(413): n is a, c, g, or t
  misc_feature (417)..(418): n is a, c, g, or t
  misc_feature (423)..(423): n is a, c, g, or t
  misc_feature (433)..(433): n is a, c, g, or t
  misc_feature (453)..(453): n is a, c, g, or t
  misc_feature (479)..(479): n is a, c, g, or t
  misc_feature (485)..(485): n is a, c, g, or t
  misc_feature (496)..(496): n is a, c, g, or t
  misc_feature (508)..(508): n is a, c, g, or t
  misc_feature (520)..(520): n is a, c, g, or t
  misc_feature (523)..(523): n is a, c, g, or t
  misc_feature (557)..(557): n is a, c, g, or t
  misc_feature (636)..(636): n is a, c, g, or t
  misc_feature (714)..(714): n is a, c, g, or t
  misc_feature (737)..(737): n is a, c, g, or t
  misc_feature (800)..(800): n is a, c, g, or t
  misc_feature (812)..(812): n is a, c, g, or t
  misc_feature (838)..(838): n is a, c, g, or t
  misc_feature (845)..(846): n is a, c, g, or t
  misc_feature (850)..(850): n is a, c, g, or t
  misc_feature (864)..(864): n is a, c, g, or t
  misc_feature (867)..(867): n is a, c, g, or t
  misc_feature (875)..(875): n is a, c, g, or t
  misc_feature (881)..(881): n is a, c, g, or t
  misc_feature (899)..(900): n is a, c, g, or t
  misc_feature (905)..(905): n is a, c, g, or t
  misc_feature (908)..(908): n is a, c, g, or t
  misc_feature (921)..(921): n is a, c, g, or t
  misc_feature (924)..(924): n is a, c, g, or t
  misc_feature (927)..(927): n is a, c, g, or t
  misc_feature (931)..(931): n is a, c, g, or t
  misc_feature (956)..(956): n is a, c, g, or t
gaaggcntggaaaacgctgcccagctcccagaggggtaggggcccactcgccggccagcagcccctgtgtggcctcgaggccttcctgctccagaacnnaaaaaanaanaaaaaanaacancagcccccgatcctaaacnctctanatnagcnccanggctgcctggagtanacggnaaagggnatgcngacnaacnacctaagatatggaatnggggnagggatccgaanagggtctagtgcaacnaaaagnggggnaaaacaccaaagggggcctgggcnacccccaccccanaaaataaaangnttaaananaaaactgnatnggtcnggcgtagcggnaaaaaaatanacgcagggctacgtggaaanntagggnaggaaaaaaaccatacagnccgtagtgcaaaacntccnnagtanataaaaaaanaactatacttatatctaagnatgcccataaacacctctacagtaanaccccntaccgtacaanaaaacacccgcnctacctgaaaanggncatagagcaacatccatacaacacaggctgcagngtcagggagaagatctgagcaaagtcaaaggcaccctgcccatcccaccagcccttggcctgggcatgagtccgcagcnccgggtgttgggccgagatgtccgtgccaatgctcagctggttggagatgttgcgggccccctcctggatcctctgtncagcccagagcctcccagctgtntccagcacccacgcctcagtgcggtcagccagcaggaaggtgctatggtaggagaatggcgcnatccctccaggnagttgccccctgcccatagtgctcantaacctnnaacnaatgcaaggctccnggnagactgcncgttcnaagcacctgagtggtcannccacnggnttcccctcccacnggnctngtcnaaagctcgtgcaatcagaacatgcnttggccatttaccccaaacaaaaggcggtaaataagct

SEQ ID NO: 674631 - DNA, 327 bp, Homo sapiens
  misc_feature (322)..(322): n is a, c, g, or t
  misc_feature (324)..(324): n is a, c, g, or t
  misc_feature (327)..(327): n is a, c, g, or t
aaaaatcccttactgtctctccctttctgaccccttaaatatgacctgtttgccccaatggttgtatttaggtaagatttgtagactctgtttttccttttgacacagctgcaaggcccaacagctgtgcaaagcccacaagttatgcctaagtcagcagttatgcctatagattacatgacctgtgactgtatcattaactgcttttgttttgcttctgtaagtttgcctataaaaaccacactcagtctttgttcaatggtcagcttttcagatacaaatccactgagccggtgtacatctaaataaatcctcctgttancnagn

SEQ ID NO: 674632 - DNA, 137 bp, Homo sapiens
agccgggagcagccaggaaatagaaacgggctgaacgatcggcccgccatcatcctgagtcctcatcgccctcccataccctgacgcatccttggacataagcagacgagggcgaacgatccctcgccttaccgatc

SEQ ID NO: 674633 - DNA, 411 bp, Homo sapiens
ctagagtatcccctgcgggaccctgatcttacatcttatacaaagaattaagcgtcaacgaatggtattaagagatttaaacataagaccgtaaacagcataaaaaccctaggaataaaaccttaggcattaccattcaggacataggcatgggcaaggacttcatgattaaaacaccaaaagcaatggcaacaaaagccaaaattgactaatgggatctgattcagactaacgagcttctgtactgcacaagacactatcatcagagtgaacaggctacctacagaatggaagacaatttttgcaatctatccatcttacaatgagctaatatccagaatttaaaggaacttaaacaaatttacaatgtgtatacatttaattagccccttcaaaaagtgggctaaggag

SEQ ID NO: 674634 - DNA, 735 bp, Homo sapiens
tcacaggggggttgcttggaccttttttggaaaaaaacaaaaaataatgtgtttcaaaaaaacacacaggtgtggcgggggaggcacagccagtgtggcggcagccaggggtgtgggcatccgggactagaggcttcactggggcggccagctctcatgcggatttggcagcttcgtgggccccacaagtcggggcccgccaacctcgaaggtgacggggagtgggtagactcctcgtgggacgtgcggtggcatacctgggccctgtgggggcctccacggctcaggtggtgccctcagggaacagggaggagagaaactgtgggttggggctcacaccacgcggggggcccacgcggtgtttattcgccggcggtgaagagcccaccgggagaaatgatagcccaagtgcacgataccgagcgcgacaccccagcgagagcactggccccaatgggcgggggcacaggagggaaaacctcagaacgtggcgggagagaagggagaacctgcaccatttccgcgcgccccacagacacaagggcccacagaaggcgccccccacactcagcacaacggcgccagacaggcggaaacaccaaacgagagcaacgacaaccggcgggctcacatcaggcacctcggggcacacaaccagaggcacgacatcaacaggagaacaaccaaactgaatatgagagcgcagcccggccaccaacaatcttgaacgccatc

SEQ ID NO: 674635 - DNA, 210 bp, Homo sapiens
tccgcgttaaaatctgctgggatactggtatgatggtggatgtgggaggatccagctcctcaatgtgtctgggttgtgggagttggagaacctggtgactcagcggtcgatacagtgggcgattgggacaaggaagacgatgtggtttccagggaggcccagagattgggagaagcggataacgttccccttaaataccggaagtcagct

SEQ ID NO: 674636 - DNA, 363 bp, Homo sapiens
  misc_feature (44)..(44): n is a, c, g, or t
cgtcgacatgtcaaaaccatttgaacatataaaaaatatggaanacttaattaaagaggaaacagattggttggcacaacatacaaatgaatatgaaaccaaaacttatcaagagcatatggaacgttatgaatcattaacaaaccggtttgaacaacttgaaggttatcagtatgaaagtaaaataaaaacagttcttcacgggcttaattttactgaaagtgattttaataaacccattaatgattttagtggtggtcaaaaaacacgactttctcttgctcaaatgttattgaatgaacccgacttactattgctagatgagccaacaaaccacttagatctagagactactgtcgacgc

SEQ ID NO: 674637 - DNA, 458 bp, Homo sapiens
  misc_feature (250)..(250): n is a, c, g, or t
cccccttggatccgacatctcctggagtataatggcgaggccaaccaggggagcccccttccaaaaatctaaaggggtctaaaaaacccgccgatggcccaggcccccttgatggtctttccgggggtttgggaggctggtcctcccctccagaaacctccccaaaccccaccaagggttagggccagaagggtggtttccgcttccaagccccttaaaaaggggggtaaagagagggtttccccaaacnccccaagggaactttccagcccaaaaatggcttaaaaaaaaccaggttaggggtttggggtttgccaggaaaattttcccccggggggggggggccttttaaaaaccaaagggtttgggccccaaaaaccaatggtttggggggtttttaaaaagggttttggtggggtttttgacccccctaaaaatggggtggttttttttttcca

SEQ ID NO: 674638 - DNA, 931 bp, Homo sapiens
  misc_feature (910)..(910): n is a, c, g, or t
gagtttcactcttgttgcccaggcggagtgcaatggaacaaccttggctcacggcaacttcagccttcccaggttcaagcaattctcctgcctcaggctcctgggtggctgggactacaggcgcgtgccaccacgccaggctaatttgtattttggtggggacattccatgtggtcaggctagtctcgaactcctgacctcaggtgatcctcctgcctcggccttcaggggtgctgggattacaggcatcagccactgcacttggcagatcttcattcttttagtaaaaagtataaagccacacatggtttatttgaaatattttataatttaaaaaagtacagaagcaggaaaaccaattctaggttcaagtgagggatgatggtagtttgaaccaaaggattgcatgtggtaagaaattgtgatttaagatatattttaaagttggaagtagcaggatattctgatggagtttgactttggtttgggcccactgagtttgagatgcctttgagaaatgaaagaagtagagagagaattaaaaactggcaggagtggtggctcacgcctgtggtcccagcactttggggggctgaggtgggtggatcacctgagaccagcttgggcaacatggtggagccctgtctctacagaagatacagaaattggtgggcattgtggcacacacctgtagtctcgtctactcacggggctgagatggggattcattgagcccatgagttcaagcctgcagtgagtcgtgatttgccactgcatcctgctgggtgacgaagagaccctgtgtcaaaaaagaatctgaaaacaacggaaccatgccttcagaattctataaagttattttcaactgataaatctatattcaggcaaagaatcaagggtgaaggtaaanaatacatttttagacaagcaa

SEQ ID NO: 674639 - DNA, 948 bp, Homo sapiens
  misc_feature (927)..(927): n is a, c, g, or t
  misc_feature (934)..(934): n is a, c, g, or t
ttgccttacgaattaatgttttacttgtttaatgttgatagaagtgttggggaatgtatgatgtaatgaatgttttattatattttgttatggtttatggttattttgtattgtatatttttatttttgtgggtatttttgagttctatggtattgggccaatacgggcatgctgctagattaattagtaattatccagtgctggtccccggtttgctcttggcctgtcgtggttttcttggcttgcctttttggtcttgtgtattcgttcttctttattggccgcctgtgactctattcaccctccacttcccgtctcagatatctaaacgtggtctaccttcgatgtacgatgatgcctcgcccgctctcacccgtgggcagtgccacccgctagatgacacgcgctttccaccatccaaccctatacctatgagaatttgcaacaggggaggttataaagaacccgatacttccaaggccctgctttttttcttgaaagtactttaaaaaggaaatttgtttgtattttttatttacattttatatttttgtacatattgttagggtcagccattgtttaatgatctcggatgaccaaaccagccttcggagcgttctctgtcctacttctgactttaccttgtggtgtgaccatgttcattataatctcaaatggagataaaaaaatccttgtaaaaaaagcataaatgacaacagaagaaacaatcttattcgcgagcattccagtaacttttttgtgtatgtacttagctgtactataagtagttggtttgtatgagatgggtaaaaaggccaaagataaaaggtttcttttttttccttttatggtcaaatgaagttgctgtttatttctcttttggcctgttgtgatatattgtgtgcaacacatgctagtaccacacngatacancaggaatatactga

SEQ ID NO: 674640 - DNA, 911 bp, Homo sapiens
gatgttgccagaattcactcaagtttgaataaagatgaacagtatttagtttacttgttgtccatgaattatatcagtattctagagaacatcgcttcagaaagagaagccgtgtttattctctgcaggcttcctgtccttttgtggtatggttgtattgggcttattttcactgggttcctccttactgccaaagcttctgaggcgtgatttcattcattgaagaatcaatagatattttgtttcaaaatgtgttgaaactaaaagagatagatggtagactttgtattaaaagcagtatatggatgtggaaatgcacatatattaagtgcagtctatcccttttcaggtgggatgagagcgaacagttgattttaataagttgccatccttagtacacatgagaatatacttttcctcaagtaatatacctgtttgaagctttaagagagatgttttgggtaagctatttcattttcgccaaagaagtttgctattcttgtgttcatggtgtataccatgattgttgtttgcctggaggtatagtgagtgtagtaagatgggggtaagttctatgtgaggggcaagtgttttctgagttgacgcttgttttacgactggattttattggcctgtgcttatccttgagtacccgtaatttttgtaaactatctaggtttcttcgacctggtattgtaaagtgttaccttccgggatgagaagggtggccgattaccaggggttccggctaaaacactgtcaaccactggtcccagaacggggcaaaattctcacgtgcggccccttagtcgacattccggtgggaccactgtcagcacttattacctcgaaaccggaatctgtgccaaaacaccgcctaaaagccatctataattaccagcgaatcacgg

SEQ ID NO: 674641 - DNA, 487 bp, Homo sapiens
  misc_feature (14)..(14): n is a, c, g, or t
aaatggaaaaaganaatgaggtaagtatatacaatggaatactaattgaccaaagaagaatgaaatcatgtcctttgcagcaacatgaatggagctggaggtcattattttaagccaggcacagaaagataattatcttatgttattatcatatgtgggagctataaaagttgatctcatggaggtagagagtagaaggatagataccaaaggctgtgaaaggtatgtctggagggtgaagagaggttggttagtgggtaaaaatacacagctagttagaataaataatttataatgtttgataagagttggttgactatatttaacaatataatgtatatttcaaaataaaaaagaggacttgaaatgttcctaactatagagatgataaattgagggtgatggataccctgacttgatcattacacattcgatgcatgtaaaaatcggcaatgtaccccataagtattatgtaacgatcaaaaaa

SEQ ID NO: 674642 - DNA, 293 bp, Homo sapiens
  misc_feature (53)..(53): n is a, c, g, or t
gggaccttgctgggcattatatgcctggtgggggtttcagagacccctgaaanaggagggaggacccgcctccttgtctgcacaactgcatgcacttctctccccatcgctccacaaccctgaaacccgagaaggaagttgctgaccagtgcccacccccggcaagccccgggaaggaaacacaaggcaagctcccttttccctttcaacggtggttcttgcagaagaagcaggggtgaagctgccaagctgccccttctccaccaagggtaccctgtcttggtggttagggg

SEQ ID NO: 674643 - DNA, 293 bp, Homo sapiens
  misc_feature (76)..(76): n is a, c, g, or t
  misc_feature (127)..(127): n is a, c, g, or t
  misc_feature (184)..(184): n is a, c, g, or t
  misc_feature (250)..(250): n is a, c, g, or t
  misc_feature (255)..(255): n is a, c, g, or t
gttttgtccgggtgctgtggttcatgcctgtagtcccagcacttcgggaagccaagacaggcggatcacttgaggncagttcaagaccagcctgggcaacatggtgaaatcctgtctctacaaaaantacaaaaaaagtaagccagatatggtggcatgcgcctgtagtcccagctgctcaggnggctgaggtgggaggatgggtttgagcctgggaggtggaggttgcagtgagccaagattttgcatntaccntccaacctgggtgacgagagcccttttttcaaaaataa

SEQ ID NO: 674644 - DNA, 105 bp, Homo sapiens
gctcgcgccccaggtgggcgcatgcgtcgactccactgacctggtagccggtatcgagcgggtacgtgacgccgacgaagccaccatgaagcgctggcacgagcg

SEQ ID NO: 674645 - DNA, 151 bp, Homo sapiens
ctctaagctcgcaggaggaggaaggaggcctgtctgccagtgctcccccaagccgcctcccgggtacctggccaggcacacggcacctcctctggtatcccagcctcacctgctgaccagcgtgcagatgcgcagctcaggaccatcgtgg

SEQ ID NO: 674646 - DNA, 268 bp, Homo sapiens
ccgccaagtgacaccaaagccctggttgactttgacagccccgtgggcgcgcgggaggccgggcactctagggtctacctaccagtgcaatcgtttagcgctttttcagtggggcagggcaggaagcaggcgggaccaggcagccagttctcaaaggctgcggggccaactagaggccacagcccctcacccctagacactgccaaccagaactgacacgcgacctcctgggcgctgacgccattaaaaccaacgttggcgcccggcg

SEQ ID NO: 674647 - DNA, 440 bp, Homo sapiens
ataataagagaataatcattgtcacagatttcagatccacagcctcatgagaataactgcacacagcaggctctggaagaaagctttacagagaacacgtgatgtttttaatcaagtggagaggagttggaagagtcaacacttgagttaaaaccttcatatgggcagggttttgtgggaccccaaccaccctctcagcaaaatccatgcaatcgggccaggcgcggtgactcacgcctgtaatcacagcactttgggaggccaagacggggatcatttgaggtcaggagttcaagaccagcctggacaacatggtgaaaccccggctctactaaaaatacaaaaattagccaggcatggtggcaggcacctgtaatcccagctactcgggaggctgaggcaggagaatcgcttgagcctgggaggcagaggttgcagtg

SEQ ID NO: 674648 - DNA, 135 bp, Homo sapiens
ttcacccaatgcaatggtacagagccaaacatgttaatgtggtgtttgagggcagggacaaactaaatctataaagatgggaacacattaatgagccttgagtgtcatgcttcactctaatgacaatgatggaag

SEQ ID NO: 674649 - DNA, 531 bp, Homo sapiens
gcgtatctcgtccaccgtagtctgaggtatctccattgtcccaccgttaccagagattcaccaactcagcaggacctcctcccccaggcttgaggtctgaggttcagaggaccacagaatactggccgtggtgtaacaatctggtaaaggcagtgcatttgacaggacaacaaggatatgaaaattcaggaccagggttctggacaggcttgggaactggtggaatactaggatatttgttcggcagcaatagagcggcaacacccttctcagactcgtggtactacccgtcctatcctccctcctaccctggcacgtggaatagggcttactcaccccttcatggaggctcgggcagctattcggtatgttcaaactcagacacgaaaaccagaactgcatcaggatatggtggtaccaggagacgataaagtagaacgttggagtcaaacactggatgcagaaatttcggatttttcatcactttctctttagaaaaaacgtactacctgttaacaattgggaaacgcg

SEQ ID NO: 674650 - DNA, 402 bp, Homo sapiens
  misc_feature (41)..(41): n is a, c, g, or t
  misc_feature (77)..(77): n is a, c, g, or t
  misc_feature (91)..(91): n is a, c, g, or t
tacgtatcaagtatgtgcatgcacggtagtccagtcactgngaggctaagggcacacaccaagctggctaagtttgngtctattgtagagnacaaatttccatgttgtctaggctggtctccaactcctgggctcaagttatctgcccaccttggcctcccaaagtgctgggattacaggtgtgagccactgcacccagccatggggtgcattcttaacctctctgtgcctcagtgcccttatctgtaagttggagataataatagtatccaccttacagggctattaggaggattacatgagttgttaggaggctttatacatgtacagcactcagaacagtgcctggccctaataagtgtatgtattaggctgttattgtgacacaggtgtttgcctgat

SEQ ID NO: 674651 - DNA, 233 bp, Homo sapiens
ccccagtcccctaatcccctggcctcctcccccttacttgttttaaataaaactgtttggaggatgttttttgcgctcccaggccggcatcgagtgtcatcaatttttaccccccgctcttttttttgcccaagggtgtgttgcttattccctacaaagtttatactgcatttggggcgggatctttttttgttttttgttttgtaaaaaataaatatctccgggggccgtta

SEQ ID NO: 674652 - DNA, 126 bp, Homo sapiens
cggggatcgcatactgctgtttacatggctggtttaatcaggcgcatccagttggaaccatgtccgtgtagtttaaataaaaaggaggaaaacacaaaaccaagtctgccatctctaccagatgaa

SEQ ID NO: 674653 - DNA, 175 bp, Homo sapiens
tcggacccgtttgcctgtagagtatagagctgcgcccttaaaaagcgcttcaagctgagccaggcgcgcaattgttttaatccgcgctttgacgcagcgtagcttccgatgtcgctgcctgatgcccccgttgcacgccggcagatggggccattgtcgctatggctctgcgcat

SEQ ID NO: 674654 - DNA, 127 bp, Homo sapiens
attctctacacggatccccccctcgaaacccagtcaggggttggtcacattttcgttgtcctagcccactcgtcgtttcacaccgattaacccaagctcattagaagtccggcggtaaagtagtgta

SEQ ID NO: 674655 - DNA, 142 bp, Homo sapiens
acggtggtgctgctcgccgtcgccgcgctgcgatgcgttgcagccattcctccccgtcaccgtctgtcctcgtcaccactggacgctctggtggccaaggggagacaccagcgacctggtggaattgctgcaactacagcgg

SEQ ID NO: 674656 - DNA, 818 bp, Homo sapiens
gcgggcagaagcacaggaactcagtgtcccaggtgccggaaggggggcgtttctgcacctacagcagctgtggtagagggctgctgaggggtcaagaggaggtgtagggtccctggtgcagatgaggtcaggatagcagactgcgaggggcagctgagtgtgctgggagaagtcggggagtgaaggcccagcagtgttttataaggccatgctcgccctagcccatgtaccttcagaacaggacgatgagagtggctgtggagaagcaagccctgcgagaaagtgtggggatgaacatgggctcacagaccagagtgccgggctgcacgggatctcagagctagggccagtggaggtgggagacaaggccatctgctatagggacagtgcattgcggaagggaggatgagacgaccaagggtaacgccacaacggtggcgaacttctggagtacccatgagcgtttgtggacctcaatttagagtaaatgtgggcatctcacctccagcacactgagctggcacaggtacaggcaggagaaggtggacaggtaggggtcagtagatgggagtgagcaggggggtaggagagtgttgaggatttctcatggactcccgagaggctgcccaggcagctcgatagagccgtggaggacctgttaaacttggcgagctggactaatcccgagcccggggttgacctggaacgcgacgggcagcatacatcacgtgcaagcctgaaagcaccgggaacccctactgcgcgcctcagcaaagtgggtagaaacaggcagcggttcgcccgagtgccgcgaacgg

SEQ ID NO: 674657 - DNA, 938 bp, Homo sapiens
tgaatgggcacacgttgtagtgccctctcctcttccgccgctgtggtcccccctgctgtggtctatcctccctttagcagacccttatgggctcgtatttttcaagcgcttcgtccgttaaaactttcgcccgcgtctcataatccaattccgggtgtcaccccgccggtaacttccgttaagtgcttgactaactgtgaaattttcgctggaccataacaggatctggccacaacgtggtgcatttgggaaatccgccccgcacccttgtatcagatccatgacccaaacattttgggcttcaagtacagcctcctcatatcttcttccccccaagcgtgcccctgggatcgtataaaaagggggaaccccccagacgaacttcccaatcttgacgcccccgcagaacgattattatttctatcgaatctccccctttatgactatttttgctctttctacataacgagcatatattccccttgctctgtgagcagtccgcaatactactacggtgggaacttgctcatggagcctcggcggctagaccaccttgtagtaagaagtcattttctagaaattccggcggaattgcaacgaccgaaataatatctcttctccgggtggggcacccaacccgcctttggaggtactccccctttggtcgaaaaatacaccccgtgccgaaccgattggaggcttctgagatgtaaaacgcgacgtatgacattttagacgcccgccccagttctttgtaccaacccccgcgagtcatctcccgcgcccgcttctattccaaagccgtgtatcaggattatatttggtccaaccagaaccagccatttcagggaaagcagaagacgctaatggggaacacgcagatgttccctcatcggacaaacaaacaaaaccccatagaaaagcaaaaaacaaaaaca

SEQ ID NO: 674658 - DNA, 112 bp, Homo sapiens
ccctgccacaatctcaccgttgcactgtgaccacactgatgaccttgactaccttctccaagcccacaggctgaagggatactattccttgtcttacttcatggaacaagcg

SEQ ID NO: 674659 - DNA, 258 bp, Homo sapiens
gctgggccagtgtgtaggattcattctccatgtgagagtttcctttcatcctgactagcacatccccaaggtactttccagaagcacaggaatatctctacttggatcaattctggtcataacaagaggatggcggcctcacgtgtgggaacttcccctactccctggatgtgtgtacctagcacacttccttctcccacccctttttccagttggattagtttttctgttctcttctgtcctgtctaaatgcaatca

SEQ ID NO: 674660 - DNA, 129 bp, Homo sapiens
atatacaatcgagccggtaccgcaatctattctagagtccatatcaacatagggttacgaactcgatgttggatcaggacatcccgatggtgcagccgctattaagggttcgtttgttcaacgattaaa

SEQ ID NO: 674661 - DNA, 847 bp, Homo sapiens
actggagaagggtgcatggatgcaccttgtgttgagagagaggcaaccctggagggccagttcaggtggtccccaggcataagctaggtctagagagttacacagaacaagtttgagctctttaacaagtggatgaagagcctcatttccccagcttccctgatttcttccagaatgtgggacagtgattatttagtgtgcgtctcccttgtacgtgtctagattgaatgtaaggagcgagttctctcgcgctctgcctcgtcgaaggaggacggtgcgaaggatccctggagatattagtgaggtgtcatcggagagtgggcagcagtaagcctggcggtctgaccagtatataggggcttagcaggatgcctgccagctgactctcgtatgggaggaggtgtagcgagtcgtgaagattgtcctatgacgcaagatgcttccatctaagtgtaggacctgtaggccacctagtcacgcaaggtcggggtggcaatatatggaggaccgtgggaagtgtgtgaagcggaggcgagatcacaattttcacgtggctttggacacgaagaaggagggctctggatctaacgcggggtggtcaactgttgatgaccacggtactaccttgggacatgttatttaaacatgaattcagtgattgtccttgagaatttcaccagtagtgggtgggtgactgttatgaaggctcttgacagataccactgaaaacatgaagcacgtgggaactagagaagagccccgagggttcctctctgagtgcaaagggtgcaagatggtcaagggctcctcacggggcgtgggacgtggtagccgtgaagcctgcttg

SEQ ID NO: 674662 - DNA, 887 bp, Homo sapiens
  misc_feature (878)..(878): n is a, c, g, or t
caaccccagagcacctcctctccctaccccctccctgaggaaataggaacctgtggcgatgttgaaatgtgtgtagcggatatactgaagggagaacttttatccacagaaagcaaaggaaaagagagaatcccttatcaagaagaccacacgatgtgaagtctagtctatcttccgaaggaagtccaggacaaacggtgatgctgaagatggcgcatgacatatgatgccccttttgctgggccttccaggacactatttcattagcctcagaatcgatatgaatagcagacgagtgaagccccctctgatggagcccagtttcctccaatggcagcactagaccttccttctggtactaaaggctgggtacctttgaaaagcgcagaaatcagatcacagctttcgtgggattcgaatggcagaaactggtggtgtagctctcagtgaacacacggaatctattatccatcggaatgtgcttagtgaccaatcctagcagagacagtgtgaacttgcgatagatggctacggggtcatactgaataactgctcttaggaaaaagcgtgggcagggaaaacttgctgctcggaagtctcgtgcgtcctgattaaacgtgtattttcagttgacaggagctcctcccaaagttgcttgataagtgggtacagcagctgaattgggttgcacgattggaggccacgtaacccgcggatgttgtgcggaggggaaatcttgcgggggggcccctcacagaggacctacagcgcccagaagtgatgtcacccccggaaacctccttataacagacgctcgtcccccgcgaacgttacccagcgcccgaggatagcgttcaccacaagaaagcgcaatactngagtcgtat

SEQ ID NO: 674663 - DNA, 756 bp, Homo sapiens
ttgtgcgacgcaagtctcagctcattgcgcttatctgggtccaccgtcgctatgctgccccccggatgtgaggatgtgcgaagtttcgttggtgtctgcgctcgctccctagctatggtgcccgtccccctccggaagcctgggtccccgtgggcggtcgcggccgtcttgcttcctcatgtgcctgtgcctgcggggagtggtaacggtgggcggcaacggtcgcttccgaacagatgccgtgtgtgccattggccaggccccacgatgaggtcttgtggaagtgtagggagcttggatatgtgccccggttggtgcctggctctgtcccgtcctctgagggatccccggcagccgggtcctcggagcggatcaggctgctcgggctcggaggtcgagacggcgcccccgtgggaatctgcagcccagggccttgtggcctgggcccaaggttgatttcggcccgaggcccccggtctcgtctacttatccgcagcgaacttgtccgcttggctcaggagccctccgggagtcattgactggaaccagagaagctggacacctttcccggtgcgaggaggtcccggctgcgacttggatcacccacgagttttgcctgaagtactgctctccggctttaacgcacaacaaacagcagtggcgttagggattgaaacgcggcgaaacgttgggcctactgactttcaaagggcagcttttcgtggttataatcgcacaatcaaaccaacaggggaa

SEQ ID NO: 674664 - DNA, 284 bp, Homo sapiens
ctggtggctcctcattctcttgttgcattggcatgtccccttgcagttctcttctcttttttttttttggagatgggagtttccactactggctggcccaggttggaagtgcagtggctcaatctcgggtcattggcaacctccgcctcccgggttcaagtgatcgtccggccttaggctcctggagtagctaggggattacaggtgcctaccaagctatgctcggctaaaattttttgggtattttacagtcaagcaagctgtggcggccgggagaagctgtg

SEQ ID NO: 674665 - DNA, 505 bp, Homo sapiens
catgtgcttattactattcatatatctttggtgatatgtctattcgagttcttttgctgattttttaaactgtgttgtttactttcttgatttatatattctttgcatgtggatttcaattagcccactaccatttattaaaaagactattcttggctgggcgtggtggctcacacctgtaatcccagctgctagggagactgaggcatgagaaaagcttgaacccaagaggcggaggctacactgagccgagatggtgccactgcactccagcctaggcaacacagcaagactctgtctcaaaaaaaaaattattcagcaataaaaatgaagtattgatatatgctacaacatggatatagctcaagaatcttatgctaagtaaaagaagttagatacaaaacaactactttttgtacaatgctattgatatgaaatgttcagaaaaggcatatttctagaggtagaaaacatgctcaacatagtcagccattgaaggtctctt

SEQ ID NO: 674666 - DNA, 293 bp, Homo sapiens
gagcatttgaatcattgtgagggtcccacattttaagctctgtctccacttcttgctgtcgccgctcaatggtttcccgtcttttcctctccatgcgctcctctcgggattcagcacgagctggaggaggttcatctcgagggtcctcaaactctcgaatgtacggcgctatgccacaataaggttgattgcggtgtttttcatgtggcagattctccaggggcggcaggtatggaatagggtcacggggggcaaagagggccagaagtgttggcagcaggaactggctcatc

SEQ ID NO: 674667 - DNA, 167 bp, Homo sapiens
  misc_feature (28)..(28): n is a, c, g, or t
  misc_feature (127)..(127): n is a, c, g, or t
atcataaattcccgtttggaggggcagngtggggcaaggccctgtcctccctttagctcagctgagaactgactaagatcggctttcacccgcggccgcaccgttagcactcagtgtgctggcgcanttaccaaaggtttgggtaactccacaggcagactgtcaga

SEQ ID NO: 674668 - DNA, 367 bp, Homo sapiens
actgacagtatcgacatgctaaggcacgcagggttgaatccagtgtcaagaggattacagagttctcatacattgctggtgggaatgtaaaatggtgccgctgttttggaaagcagtccagcagtttctcaacatgctcaccatagaattacacagtaaccctgagtaacatcccacttcaaggattgaaagagaattgaaagcatatgtctacacaaaaacgtgtacattaatgcccataggagcattattcatcatagccaaaaagtggaaacaacctaaatgcccatcgatggacaaatggataaacaaaatgtgatatatgcatatgatggaatattattcagccaaaacattcacgccgtca

SEQ ID NO: 674669 - DNA, 106 bp, Homo sapiens
agaaagcctacacatgagcagtgttctgtggtctcttggctggggggcacttttaaagtggcgagcctgagaagcctgtctttcccaaatgcaggcagatctgaga

SEQ ID NO: 674670 - DNA, 622 bp, Homo sapiens
  misc_feature (42)..(42): n is a, c, g, or t
  misc_feature (75)..(75): n is a, c, g, or t
  misc_feature (99)..(99): n is a, c, g, or t
  misc_feature (110)..(110): n is a, c, g, or t
  misc_feature (116)..(116): n is a, c, g, or t
  misc_feature (125)..(125): n is a, c, g, or t
  misc_feature (177)..(177): n is a, c, g, or t
  misc_feature (288)..(288): n is a, c, g, or t
  misc_feature (292)..(292): n is a, c, g, or t
  misc_feature (294)..(294): n is a, c, g, or t
  misc_feature (399)..(400): n is a, c, g, or t
  misc_feature (402)..(402): n is a, c, g, or t
  misc_feature (404)..(406): n is a, c, g, or t
  misc_feature (409)..(409): n is a, c, g, or t
  misc_feature (412)..(412): n is a, c, g, or t
  misc_feature (426)..(426): n is a, c, g, or t
  misc_feature (449)..(449): n is a, c, g, or t
  misc_feature (453)..(453): n is a, c, g, or t
  misc_feature (458)..(458): n is a, c, g, or t
  misc_feature (524)..(524): n is a, c, g, or t
  misc_feature (544)..(544): n is a, c, g, or t
  misc_feature (554)..(554): n is a, c, g, or t
  misc_feature (616)..(616): n is a, c, g, or t
cacatctccacagagccatggggagagaaagcaaattgggcnaagctttgcctactggtgaatctgagcaggatntgtggaggccaggcagcgggagtntgttgaggcanagctanagtgtgttntagaaatgtggggggctgagaggcagggccagctctagagcctgaaccacanccagggaaggaggagcaaggggagactccacacaggaggaggtcacagtgagtgggacaaacattggtgcaggacttccagaggcggaacaggatactgcagtgggcgcancttncnacctcatcctcacaggaaaaggctgaccagagcgttccccgggctttcccatggtcgcctcctcctcacgcacgttatcgtaactggcagaggaagtgtgataannanannnatnatnaagataagaaaatnaagatattgtgagtggaggaatnatcntgtantccagcagccaaagcgtcaagtgcaaaaatcagcattctctgcagtacatcaaccgcgacctgcgncattttttcaggctccacanttcttctcanatctgagtttttctgaaatcccctcaaaacaaacatttgaacaaaatcagaaagcatggccntggcga

SEQ ID NO: 674671 - DNA, 330 bp, Homo sapiens
ttttttgagatggagtttcactctagttacccaggctggagtgcagtggtgtgggcttggcttactgcaacctctgcctcctgggttcaagtgattctcctgcctcagccttccgagtagctgggatcacaggtgcacgccaccacgcctggctaatttttgtatttttagtagaaacaggatttcaccatgttggccaggctggtctccaactcctgacctcaggtgatcaacctgcctcggcctcccaaagtgctgggattacaggtgtgagccaccacgcccagccgtttctgcttattcttaagcaacccacacttttggtcgacg

SEQ ID NO: 674672 - DNA, 228 bp, Homo sapiens
gcgctaatcctctagaggtcgagcaggactccatcataaccgagtatttggaggtcagcactggtgctcacgtgtcgacggaacttgtacaggggaggcatgcaccgaattggtgaatacacgtcgaccaggctccatcttaacgatatttggaggtcagcaacggtgctccctgtgtcgacggaaacttgtccaggggaggcatgcaccgaagtgggtgaactacac

SEQ ID NO: 674673 - DNA, 344 bp, Homo sapiens
  misc_feature (60)..(60): n is a, c, g, or t
  misc_feature (225)..(225): n is a, c, g, or t
  misc_feature (230)..(230): n is a, c, g, or t
tctctaattaccaccgctacaggcgtcatctcacgtgtcgaggtgatctcgaacttttangctccggggatggggccgcatcggcctcccggagtgctgtgatgacacgcgtgggcacgacggagtttcactcttgtcgcccagggtggagtacgatggcggctctcggctcaccgcaccctccgcctcccaggttcaagtgattctcctgcctcagccttcccnaggancgggaatgacagagatgagccatcgggcccggctaatttttctatttttactacagatggggtttctccatcttggtcaggctggtcttcaacttccgaccgttggagaatctt

SEQ ID NO: 674674 - DNA, 303 bp, Homo sapiens
taccggtttccatatgatggtaatatgtttcttctaagaatatttatttttccttctaaatattgagataaaattcatgctttgaaatgttctattcagtggcttttagtatatttgctatgttgtgcaaccatcgacactatccatttctagaactttttcgtcatcccaaacagacgctctgtattcattaaaaaattacttcctaactgtctctccccctagtctttggttacctttggtataccgggttaactttgtgggggccctcgcgccggggtgaatttgggctcatttctaggg

SEQ ID NO: 674675 - DNA, 894 bp, Homo sapiens
cgggtctgtcccaaataatttctctggaggtcgcgtttggagagtttgttaaaggtgttgagagttttctgttgggaccttcaatgcggccccgcgcagggtctttatcgctgtcctcccgcctggcgtgcccttctgccatgctagatggggtaggtgcttcaccgttcttctccctccctagttcctgcgcggaccgtgtccctcccttagtagacccggggggttccttccgtgaccccccctaagcgagcccttggttcctgcgctggaggcctccttcagcgcctgtgtccccgccggtcttgtaaaagacgggtgttcccctcccccaacaggggcagacccctaatcgccccctttgatcgtggaaaattctctccccgacagtagctgtccccccaagggcattttccagaactaattttccacagtggacgaatagttttcttttaaaaaaacagtctttacaccacaattcgggttgccaaacatagcttctccggctaatgttccaactctgtcccaccacctgcaaagtcctgtcccgccctcctctctgctaatatagccagatatggatgtcttcccctcttccccgtttataacaacaattttcgccacgatgcttttcgcaccaaatatgttgcaccccccaaaacacctcctgttattgttttcacagcatgtggagactccacccccctatggttctcgttctgttatacatatcattactgggggaagatccgtttcatcatcacggaacataatgtgaggagccgtgccgtgccaaacacatcgagaattagctggtgggaaccccaaaaaaaaaaggcgaaaaaaacccctttttttaaaaaaccacaaaacaaaaaaaaccaaacataaaaa

SEQ ID NO: 674676 - DNA, 609 bp, Homo sapiens
  misc_feature (372)..(372): n is a, c, g, or t
  misc_feature (375)..(375): n is a, c, g, or t
  misc_feature (433)..(433): n is a, c, g, or t
gtacatggtgtgtgtgaatggtgtactgtgtgtgtactgtatgatgtgtgatgtgtgtggtgtgcacatatggtgtgtggtgtgtttggtgtgtgtggtatgtaatatgtggtatgcatgtgcttgtagtatgtgtgctgcatgtgtggtataaatgtgtgtgtgatatatatgtgtggtgtgtatgtgtagtgtgtatagtgtgtgcagtatgtgatgtgtgtgatatgtaatacatgatgttcatgtgtgtggtgtgtggtgtatacgtgtgcatggtgtgtatgtggtgtacgtaagtgtaagtaacatgtgtatagtatatgtgtgggagatgtatgtggtatatagtgtgtagtgtatgactgatgngtnctgtgtgtatgtgtgtgtacatgctgtatgtgtattacggtatgttgtatgacatggngtgtacatgtggtgtatacctgctcttttagctgatcttagctagctcgtctggtttacggcggtctaagctttggctctcctcgcgcagttatttctagtcaattcatacgcagaaaggtataggggatagtccctgtgctatagttatgcttgattataatttttctctttccc

SEQ ID NO: 674677 - DNA, 1622 bp, Homo sapiens
tggaggggcccagttggtttatatttaaaaaaccgtgagtgtgtccaaaaacatgtgggtgggtgtgcttcacacctttttccacgtgggaattgggtgcgtggagggtgaataggcagaattctcataccattttccctcagcaacaaaggttgaagtgcccctcaaactcaagaagagaccacaatatggtgagggacacgagggtgggcgcgagggaaacagaggcgcaaagagagtaatactccaagaggcaaaattccatatacaacacagagaggtgtaaaaaaaggtgaaccatccaaaacatatctatctataagcggggacaaggtgatgtggggcgacccagtgacaatgtgacactcacgggtcgccccagtgcacatacacgtgtgtctctctagtgcgccctactcaatgttgatggcgctccatactatctataacacgacaactctctcacaactctcaaaaaaaagagatcctctctatactgtggaatatctctccacgaagcagtaaataaggagacgcacgccgacggggcgacaaatattaattcgccataagatacgcacttaagaagcggggggcacccaaaaccataacccccgaggaggaaaaaaaaaaggccccaatacagagaaaagggcgaaagacgaggggcacaacaggacgggcgaatatgcggccaggcacgcggacaaatgacgcgcagatcgtaccacggcgcaccgacacagagaggcatgcaaaacgaacgaactatgttacaaaccaacgatgtggcacaccgacgaggtcacagaaaggaggtcaccaccaaaaaacagtggacagagagacagagtggacgacaaacacgagacaggagagaaacaaaaagaagaaagcgaaaataaaaagagccaaccagaggggggtgccacactgcaacaacaacaaacgacaaaacaaaagagaggatacttaggccacagaagaatagaggggtgcacgaacaaagaagacaataacgaggatcacaccacacacagacacaagcacaccgatgacacgaatggggcaagcagcctgcaacacaagagggagacgatttactaccacaaaagagggaatcgttggagaaacaacacagaggaaagtcagacgacaccacgtagtactggagcagaagaccagagccacaagactacaaacgagacgaagaagaaaacaaaacaaaagacaatctatcagcagaaattacccccacgagcagaaacacagacgggaaaacacaaagagagcaaaacagaaaggagtaaagcgaaacactatagacgaaaagagacaccaagaacacaagaagataggaaccaaatgaggagataccccaaggtgatggacgaccagccacacaccgaaaccagagcgacaacaaggacagaacacaacaacacacgatggaacgatataaacaataggcagcaccgccacagagcgagagtagaataatgacgcgcacacgaaggggaaagcgatccaccatatcacgggacgaacagccacacaataaagaacacacgcgaggaaacaacgaacaaagcactcaaaagcacgacaagaaaaatcctcct

SEQ ID NO: 674678 - DNA, 512 bp, Homo sapiens
tcacgccagtgtcacaaggacggacctctgcccagcaactcaggcctggatttagtccaagggccctcagtggtttttgggtggttggtattttcaggaagctgaagaatagagatgggataaaaggcggagataacttttcagactctgaccttggtaacaatctagtttccttttaaaggagcatggtttgggcctggggccacctagaccttctgatgctctttccccacccttggaggaggaggaaaggaagaaaatgggccctgagcgatcaccacataccaggccctgggggtctagtggcgaaggaggcaggtagggtctcttgctttcatggagcttctagtcaagcgagacgcactaaacagtaaagggacaaataggattactggaggtagccctaactactgggacagaaacaagatggtaagatagagaaggaagagtggcctgctcagatggggtggtccagaggcctctcgggggaggtgactcctttttattttatt

SEQ ID NO: 674679 - DNA, 147 bp, Homo sapiens
  misc_feature (89)..(89): n is a, c, g, or t
gtggagacgttgagtgtgcctcccgctctcaccaactgcactaagcactccaacttgccgaaatgcgcggccagtgcacgggcgtccancactagaaggagtcctcagaggccaggtgggcgtggggtgtctgctgcagcacgagca

SEQ ID NO: 674680 - DNA, 407 bp, Homo sapiens
  misc_feature (33)..(33): n is a, c, g, or t
catttttttgaagaataggtttagttgtatccntccctattctttctggcctcacatttcttcctcaaacactgagccatatgtattcttttctcagaataaactctggtgccagcttataaaataatacccttttcaatttatgaaattatttctgtctcagcacaaatcatccgaggaaaggttttaagcttagggtggcaaggagaaagatataacgtccatattagaatgacgtgtgtggcaagtagagggtaaacagagtaggaaggggtttcagtgtccctagaatatgcatgttacacagcactttgggaggccaaggcgggcagatcacaaggtcacgaggtcaggagattgagaccatcctggctagcacggtgaaaccccgtctctactaaaaatac

SEQ ID NO: 674681 - DNA, 295 bp, Homo sapiens
tgtaaaggatccccgacgagttgtccgagttaattgttgaattttattttagatgggggtttcaccacggaggccaggctgggtttgaactcctgacctcacgatcggcccccattggccttccaaagtgctgagattataggcatgatctaccgggccctgccagcatggagtcttttagtatgctttaagacatggaccattacatgtgaaaagtttgacaaatgttcagacactatacattcaaaggaatggaagccaaaggtcagaagtattgctaactcggacaactcgt

SEQ ID NO: 674682 - DNA, 1034 bp, Homo sapiens
gagcaccgatgagggcctggatcttctttctcctttgcctgtgccgggtagggccttggcatgccctcagcaatgaagccctgcctgatgagacagaggtggtggacagaatacttgtggcatggaggtgtaactgaggctatctgtggggcagctagagtccctgtccactgtggaagtaggcagaatttgatgcactggtgcatgaggaagaccgcaaacgtacgaggtggtggcggagaaatccctgccagaaccaccactgcaaacacggtcaatgggtgtgcgagctggatgatgaatcaacgatcgccccagtgatgcgttgtgccagagagccaccagccgatgcgtgcccagtcccccattgggcgagcttggagaacggtgtgcagctaatgacaaacaaggacctttcgaatctcttcctggccacttctttagccaacgagaagttgcaccctggagcggcgaccaagagagaggccacaatgctaccacctggatctacatcgggccttgcatatacatccccccttgccttggactctgagctgaccgaattcccccttgggcatgctgggactgtgttcaagaacgtcctggtcatcgcctgtaatgatgagggactgaggactagacaaggcttctgactgaagatcgccagaagcctgcagggtgacatgacagatccgatgcatgaactcgagaatggcggcctgcgaagggctaggagaagcaccaaagtctcgatggcaagcttgcttggatcctggcgagtttcggtagacacgaaagttataagcaatgttacagtcttccgctgttacaactgggcaaggtattcgagccgatggttgggaaccccaggggatgccaggtttggactggcgattacccgtctactccacacagaagccggaaaccgtggccattcacgacctggtccggtagggtcacacgcatttacaatccccaacaagggaaatgcgatcgggaactatacgcccgacgctattgaacccgaggatacc

SEQ ID NO: 674683 - DNA, 932 bp, Homo sapiens
gatgtaatgcggaggcaggggggaagatggtggcggatgttccaccgcgggacgtggaccgtggagacagctgggcacgtgagcagatgctcacacgtattggacattcactctaagttgtctgcacgttgaaccactggtcatcattcgtattcttgcagacacaataaactctatataggacacatttaacatatgttggtactcgactcgtctaatgaaaggaccaacttgtgattacaggccttattacaccgcactacttttagaatagataatagcgttttacaaggggtacttggaatggtattaaaggtataaaggtgtctgacgcgaacgttacaacattatgtgatacgccttaaatgacacgattatacgcacacgaacgcacaaatgccaaggtcgtgccaagaagatcctggaatgagggtccactctaaaaatattacgtaaagaatctggtcctgattaacggcggtagatacatacaatcccatctttccgcacgtaaacgggagatcgttggttcaactgcctggtattagaggaatgacttcatagatgggtgactgtttagaagactaatattgcactacaaagtgccaaaggaataagaatcgactgcattaggcctttacatgttattacagggtcaggatatgagggaagtgtgattcagaagggaatgggtaaattaaagatctctctgaatattgacgtccaggggatgaaaaatgtgttcgaattggcgacttgaggccatgaaatgtggcttactggaaatgacaggtcaagacttgatgcaatattgcagcaaatgcaaaacgcatttttgacggggaataagggggtaaggattgataccacagggtcagtctgagggttttagaaggtgggaaaattgggtttgacaatttttaacattggaa

SEQ ID NO: 674684 - DNA, 466 bp, Homo sapiens
ctaaaatcaataagagttttttcccccaagatggcagactagaggcttttagtgtgcctcagccacttggaaatagcaagatagtacataaagatcaactctgtgtgctttatttcaagaaggaaaatgagagtccactggaattgtgaaggacaccccagatcccagagaggagaattgccggcaaacagccgttgtgatggcatacagctgataaaagtgagtgaagccccagtaagtgaaaaaggcaaagaacctccctctgtcactctcctttccactggggacccaaacaacccagacctttgttactcccaagcactggagataacatggggagaagcttggagatgctgtgagagaaagaaatcaaggttgcagacattttcccagacccaggaccaagagcaagataccatttttaatccagatgcatgcgtcagccattctttgaccttggcgcgtg

SEQ ID NO: 674685 - DNA, 1081 bp, Homo sapiens
gcctcacccgggcccaggtcccttcctattcagaacataaagaggccataccctggagagcccaactacggaaaccagcaatagggaccaaacaggccagttccccatccagcaggccagtacccagcccgcaccgcgaggatcactccccaagaccaggtggaggatggccggtgcagaagcaagaggctccggggaggagccgaggcaccgatggggtcgaaggatggggcgggtgatctcaacaccgcccgaggaacgagttttataggggacaagcataacacgagcgtccacgggaagacaggtgacagacactacagtcaaggggacggtcaaacgaggaactccgccaggtgcggtgcactgctggggaaaagtaggcccctcaactcactcctgtctcagggaaaacggggaaagccgacggaaggagcgcaggggaccctacaatcgatacagggatactgaccaatcccgtaacgagactgtcccggggcactctctgtcgaggagatgatacacaggccgacatagtgcatggggattggagaggacacaagaacgaggaccagaacaaaagaggaaagacgacggcggaataacaaatatgccactgatgacagcgacagagcgtgcagcacaagaggagcccattaccggactgagaggcacaaacattggacggaacaagacaaaccaagcaggtaccaccccgccggtagccacgcgatccaccaaggaatacctaggatgctgcagagctctgacccggaagccaggaaggtatcaagcatgctaacccacacaacaaagagagcaggcaggaacggacaaaccaaggcgcccgccacattcgaacgaacaagcacacgatgataaggaaacgcaccccataaaaacaaaggaggtacggacgaaacaaaccaaaaaaccaaaaaaggcagcggaactgaaacacgattggacaaccggcagacaaatatcagataatagagagactgaagaggcacaaccacataagacatgccacgaacgagaaccacgacagaccgagtacgacagctaatcaatcaccacg

SEQ ID NO: 674686 - DNA, 177 bp, Homo sapiens
aacctatgtacatctggtagaatttgtgtgtgaattaatctaggtccaggccttttattcggcaggtagatattttattactgattcaatttggtagcttgatattaatctgtgcaaagttattatttcctcctgggtcaattttgacaggttgtgtatgggatggaatgtattcat

SEQ ID NO: 674687 - DNA, 321 bp, Homo sapiens
tagcgctcatcctgacggcatgagagctcatgcgaataacgatctgagtgtggtggggaatggagagagagcccgtgacagaaacaacatgggaaagcctccatttcccctagtagtggtgcacggcgcagtacaccaactcgaaagagaccttatgactgcaggtgtacgggaagcctttaattctcccaatttatttcaaatccatcaagaactcacacggaaagaggtcctataatgtagggaaatagtgagagccttcacagttatccaggtttccttttccggacaaaccatggaaaaatgcatactggagaaaaa

SEQ ID NO: 674688 - DNA, 140 bp, Homo sapiens
ctcttccatgggctgtgcagcagcccgctggagctgatctttttggcgcgtgggctccaccgcgcgggatacaccgtgcgcgtgccctccatgacggggtacacctaccgcaacggcaagaccctgaaggcgaaggatgg

SEQ ID NO: 674689 - DNA, 861 bp, Homo sapiens
ggtcccccattatgccgaggctgacattgttaccctgcaggcgtcaccgggggcaacacctatgctgtgcctagcaactgcccccaggtgcagtcggggatgggccccccagtagtggatttgcccctcgatctcgactcccgcttcacacggagcaagcttgtgcgagggccagtttggggaggtgcacctgtgtgcagtgtcgactaggcgcctcaagatctaggtttacgtcttagatttccccacttaaatgtgcgataagggactaccctttgctggtagctgtcacgatcttacggtcagatgccacacaaagaagttgccaaggacaaatgatttaccctagcaagagcaggctgcaacgcatccatgtcgcagggctcgaagggacccaaacgatcatacggcgcctgctgggggcgttggtatcgttgcagcggaacgaatccccccttcttgcggttcgcattaacctggaaattaacgtttcgaaagacacgggagagaacgctttcgaaacgcaaaggtttcctcatcaagttggccgacaacccaaatgccttgagaacggaaccaaaatcggccagatgccccagaacgggctggtgggccccccctttgtgaggggaacagtcgtgcgcagcgggcctttggcggcaaaggaggggccccctctagcgcaatttcgagagaccgatatcccgcaaaatatgctttggcgttggcaaattggttcgggccaaggggcccgcacaggaattccggtacctccccggggggcattatgcgcgccttatttccttcgggacacaagcaagagttccacatggtctttgggtagcaatccgggggaactcg

SEQ ID NO: 674690 - DNA, 474 bp, Homo sapiens
atccagttctaataaccctgtgatagctgaattcctttcccggggtaaatcttcaggttccagcaaacattttactagtagcacgagttccaccagaggagactccacattggaaagcaggagctttaaaagggcagatgaggccggaggtgaagccgatcatgaaggaccacatagcaccaagagaggccatgctaaatctggccctgtcagaggtatccacacttctcctttggggaagccttccttgtccccttagactaagttaaatatttctgcacagggttcccatggcccctggcatttccttcttaactctctgttacacgtcattgaaactacactttttgggcctgtttttgtgctaaactgtaagttccttgggggcagggccttggccggcctaatctctgaattcccaaatgcctaacagtccagagccatgactcattaaatccatgttaaatggaaaaa

SEQ ID NO: 674691 - DNA, 779 bp, Homo sapiens
aggattctgtttgcttcgctcatcctgatctcaaaatagttctatagttataaactttcaggatctcccctgatatttgttgaagataatatggaaagcttgtgatgatataatgttcatacgtactcttaacattggataataagcttgtacaaactgatgatgaagaggaagccggcttattggagcctcgtgtaataatctcctagatttgtcgactaagttgccagcagtctatagcactaaataggtagcgatgatagaagttccaggctgagtacctgcactcgtcctggttgacagtccatcgtggaatttcactagttacttactgggtcaaagaggttaagatagtagatttgttggtagagtaatgcaacttacaaattatctggctgtcaggtttgtagagagagctcacttataatgaatctatttcgaggaccactaacagcgcatgaccaagtatctgggagagaaggttgattgtggcgtaatcgatggacatttacgagctgcgtgatgaagaaaatagtttgaacgatacatatctagtaggagatagcaataaggagagaatttgggcactgatcctgatgatttgatatctgaggaacgcccgggttgattgtgattcctggtacgcaggatttatgccgagatgttctggagggggccctggtgtccacggaaatctttctccgggggtgggtgccccaccccgccggggcgcaaccttccgcggcaaacctccccggtgccggtctccccaaaattcg

SEQ ID NO: 674692 - DNA, 494 bp, Homo sapiens
ggcatgcaagctctggattcctagaatgggagcagggagtggttatgatgatagaggggtgcaaaaagatgaattcaacccatatcacagtatttttccaggccagaaatattaagactttattgctgaaatattaagactttaaatgtctgaataccccgaagggtagtgtgaacagcatgaaactctgatgcatcctaaggaagacataaaaccaggtttgataaaagtcattctcctctttcacacaaacacacacacacacacctgcaaacacataaacaaaatcagtaagtaaaggaagacaaattattatctaataaaaaacagccagataacagctaacaaaaacaaaaaacaaacaaacaaacaaaaaacaaaaaacagaggactgtttgtagatggagcttgagcttcattcattcattcattcaacatttagtaaatgccttgtatgtgctgaaccttattccagacactaaagatatcataga

SEQ ID NO: 674693 - DNA, 366 bp, Homo sapiens
cgctgtactggttagtgaactgctcgcttgggctgcttggtgctgcgcaggtaggcctcgacattcttggggatgcgcgaggggtgattggcgaagcgctgggtggaaaatatttcggaaaaaccggcagtgttggccaaatacagacgcaggtcgaagggaatgcacatcggccacgcctggtgaggaaactgctgtccagggtaagtggcgaccagcaacaggtaatcaacgccgtcacggttggtttcgaaaggtggacaccaccaggcccgtgctcacgccgggcgaacttgcacgggtttgcagcaccggggtttgttggtgaggggttgctccgcccgcgcaagaagtttcggggtaccg

SEQ ID NO: 674694 - DNA, 227 bp, Homo sapiens
taaagatatggccttgatttataaacagtacagaatccagatggttttcaatggcgggtcagaagcagtaccttactttcaattgcaactggatgccagtcctgatggtgactgtcctctggtttccatggtaacaaactttaatggtgatcagcattacggtaggaactttttggcattggaaacagggcaacgaaaacaaaaattctggatcctggtactggttt

SEQ ID NO: 674695 - DNA, 1350 bp, Homo sapiens
ttgtctcttgtttgtggcttgttgttctgtgcttctttttttttttctacagcgtcctcttcgtatcattgatagtgttgtgttttctttccatactccttcgtgtggtatcttttctgtcttctcctcagtttcgttgttcttgctccttcccctcctttttttgttttgttttagcgggggtctctcatatgtgtttgcgtgtgtggtgatcctgcggctcgtgtgttcccctctctggccctttcacattgttggggtcccttgttgctataggcctctgtgcccctctcaatgtagaggtgtttttctctcggtcgattacaaatgttctctcttggattcccctcatggcgctaatatcctggtgcttcttcaacagtgtctgaggcttgtgtaattccccccccgtgaaaatgtgttcatgtaggagatttgtatatataatattacggggtgaaaccgaaaaacttttttctacagccctatgctctaattgacatattgttataggtgtacttcgggattgttttcccctctttaggtgtttgccaacacgtgtaccggaccttctcgatggtaacggcgagacttcctttattttacctgattaccggtcatgtgaaatcgcaaaatgattacaacttgtttggtcaatgattttggacaagtgttctctagaggggaagacacatttttccagccttaatgcttccatgagaactggttcattggttgtcattgtaaaaatggctatgaatttcagtcgattagttggataccttttgggactaacttgcccgtaactcattgcttaaagggactattgtcggttcccagcctcaacgtttgaagctaattgtctcctttacacaactatacagtgaataagtcacttctatggggaaaagactcctcacgataaacatagatttcaaatgctaaaagagataaaagtcaggctacatacttatcctaaacactgagtcagacaaatcattactgtactagaagttgctttcctgatcaagtctgaacttcagctagctgctagagaactattttctatgacttaactctcaaccaagtgtttattttaagctgtttcatttgactagaaggcgccatgaaaagtagagtaagtgatactagtgaggagactcaagggattggtcttggtctttttcaataaagatagcaagttgctgaagtctattcttgaacttaactcaatagcacttagagtgtgaccttttagattacggctgttgagctcctgtgcttgctataaccttccatagaacagataatgcttcaaacatctaagcaataaacggctcttcatgttaa

SEQ ID NO: 674696 - DNA, 425 bp, Homo sapiens
aaggtaaaagggaagaaaaaggagatagaagagaagaagagacaacagggagggaaggaagaaaggcgcaagggataaagaagaggagaaaagagagacagagaagggtgaggtcgaggagaggatggtaggaagctggactgggagggggggtgagagaattggatatggatggaaagaaagagatagagaattcagaaggcagaaggaagaggggggagtccaagagaaaggaagagaggtaataagagaacatgaggggcatgaggaagtatagcgaaagcgagaggtagcaatatctatcgcagacaatctatatgggtaaatggcacggtcaagctcgctcggtagcactctcgcgctctctctctctctctctctctctctctctctctctctctctctctctctctctctctcctcgt

SEQ ID NO: 674697 - DNA, 205 bp, Homo sapiens
cagtacgtatgcgattcagatctgggaggtcccagctagggggggttaagattctgcatttctaacacgctcccaaggaatgtccatggcaccagtctgggaccgtcctttgattagcaaggctgtagagtggaggaaatccgtgtgtgtgtgtgtgtgtgtgtgtgtgtgtgtgtgctgtgcacggaaacaacacagtacggga

SEQ ID NO: 674698 - DNA, 370 bp, Homo sapiens
ttgagaccagcttgaccaacatggtgaaaccccgtatctactaaaaatacaataattagccgggtgtggtggcacgggcttgtagtcccagctacttgggaggctgaggcaggagaattgcttgaacccgggaggcggaggttgcagtgagccgatattgcaccactgcactccagcctgggtgacagagtgagactccgtctccaaaaaataagcaagcaaaaaaaaccagatgagcagcagtgagaagaagggggaaagagtagaacaaagagtttgggctgtcactgactgtgagtatacaattgcgataactcactaccttcacgccagcctctgagcaccttctgagccgtatctgctctctcaa

SEQ ID NO: 674699 - DNA, 188 bp, Homo sapiens
ccattcaagtttagtagtagaagacgggttaaggataacaaggcatcgtaaaagcttcgagaaggaaaggagatggttggtggaccacttgggttatctttatggcgggtggcagttttaagtgataagtttttaagatcagtacttttgaagggaaacagttggagcaaaaattggtcacataattc

SEQ ID NO: 674700 - DNA, 414 bp, Homo sapiens
tcccattgcagaggctctactacttcatttccacagtgagcatatatataatgatcacctctgagtatatcaccagtaacattgatacctattttggggtataaacatggtgtttttcagaaataccaccatcttcattaaccttagctatggctgtgataatacccaggcactcgatactcatcctcaaattttttataatatatgtaatttgtctagtcttaaagacacttggagcatggccaacagtaaggtcagcttctcagtgatgtgtgtggattcgtacagaatgttagtccgaatctttatcaatagttggtgatccatggggggcaacatcattcgtcccatggttagaaagtgaattagaaatttcagctcagtttctattttactattcaagttgtgtacttt

SEQ ID NO: 674701 - DNA, 604 bp, Homo sapiens
  misc_feature (21)..(21): n is a, c, g, or t
  misc_feature (397)..(397): n is a, c, g, or t
cgcgagccctaaaagaggccncccccgtggtgtccatacattcactggcctgatcctctcgccgtgggttttgctcttcggtctgtggatacgggatggtgccaatgtctccaacttcccttttgctcctagcacgattatatttcacctgggacatgctgctatgctgggactcatgtatgtctactgggctcagctccacatgttccagacccttaaggacctggccctcttgggcagtgtgacgtttttggctggccatcggatgctggccccgcaggcagtccaaagaaccgcccctttgttcccgaaaaaagatgggaatttttgaaactgaatgtccagaaaaggggtccagccccattccccgtgtgagaaggaaaatgggaaaaaaaancttttttttaaaaaaaaaaaagtcccggttgggggtaaacttttgcttgtttttcagtttcccccacccccagcagaaacctggtgaggtcagatagtttctttttttgaccctgggtaaaaaactgtgaatattcccaactttccccgatgttgctttttaaaagtttaaatggggtattgttttggaataaaaaggggtaccata

SEQ ID NO: 674702 - DNA, 314 bp, Homo sapiens
attcccccatgtaaaagataaaaaaggagcctgtaatccccagcactttgggaggccaatgcgggagggatcacttgaggcaggagttcgagaccagcttgggcgatatagtcaaacccctccaccccaactatctcttcaaaaaaatttaaaaattagccagatgtgctggcacatacctccttgtggggctgaggtgggaggattgcttgagcccgggagtttgaggctgcagtgagccgcattcacaccacactccagcctgggcgacagagggagactcaatctcaaaaaaataaaaaagtaactcataa

SEQ ID NO: 674703 - DNA, 397 bp, Homo sapiens
ttattaacttgtctgttctactgtgccagtactcctatgcctatacctatttaccgtctaagagggatatctatcttgctggtggaaatacacacctacacaagtaattacgatatctgtaaggagataacaacgtgtgagagacacaggattccgtggcccagacaccaaatgttccctatttaggatcaagatgtgggggttgtgaagagggtacatcactaagctgagacgaatagaggaagttagagaaatttgtaatgggtacttgattgactgtatgcaaagggtactgattaatttctgctgtaacctgtgcaaggagatctctcaaaagccctgcagcatcaaggttattatgaatggcttatatcaggtggatacagcattcctgact

SEQ ID NO: 674704 - DNA, 193 bp, Homo sapiens
aactgttacattataagctgttaatgcattattgactaagtattatacaaagtcgcactatcttgatttgtacttaaattgcattgccctatcaaacatacagctcgaaacctatgagcatcctacccgtctattgagggctgtcttgctaccaagttttgtcatctccccaaggctgttctgtgaaactctt

SEQ ID NO: 674705 - DNA, 1283 bp, Homo sapiens
  misc_feature (966)..(966): n is a, c, g, or t
tatgacaccctgagattgtttctgttgtattaatgagagtgcgtgtattaccccgggtgtatgagccatcacgacgggcagagtcttttataaaggagaaggggtgtaagaacgggttcataaggggttatctcggcataaatttgtttgtcgccgcgccctggtgttgtccctcgcgagaaatggccgcgtttgttagagtatctccccccgtgtgttatgggggcgctcgccgtgggttcccagtgggaaacgcaccgtgtttatcgcgcgcccgccggtgttccctcgtgttgcccgcgctcctaagggggggtgccattaaatctcccactgggggttccctctctatttttgggggagccctctgtagtatatagtggggtctcccctcctaggggggtgtctcagcgcgttgtggctcctaactgttttgtaaaccctctcctgaagaatttggaccccgttgcccgctggggagaagagggggcggggccaatttattctccttgccataaagtgcgggcgaagggtccccccttttggggggctttgtaaaaagtatagatgagaaattgcccacctcccgggtagacctgtgagacataagacccgccccacgggtcttcttaaatatatcccacaacacctcggcagcttttaaaaaattttctgcgtatgtggggcggagcacctcgcgcggatcacacagtgagactcccacactctctctcgagagcccacgtgagacactcggtttagagagacactgtctacccacgcttccaaaaggcgaatgactattataatagagtgccaactgtgagacccccacataacactgtgtgctcaccccgggggccccacggtttaccctagtggggggataaacacgggccaaattcctatattttatagaggcgccacaatgccacccataaagggtgtttcgacacctctcgagangttggagatacacggagtcacttcccgagtgggggccacaccccgctgtttataaaggtgttttgtttgtttcacacacgcggttataaagtgtctctcacacgtggatttgaggtgttcagagccggaggtatattccacggtgcgggtgttttatgttactttccaattgtctctctccctcgtgtcgaataaggacacaaagagagaaaaaaaggcgctatctttccgcacaagccggcctttcccccggaaaagaaattattttaacttgaggattaaaccccccccccccccagaaacacggggtttgttta

SEQ ID NO: 674706 - DNA, 278 bp, Homo sapiens
  misc_feature (139)..(139): n is a, c, g, or t
tatgcactgcttcggatgcccagaaagcaagtcttcagtcctgtggggcgggaggggtgtggaagagacggggtctcaccagcaaggcgcctcccccacagcctgtcccatgtcctcagtcccaagggccgaaccaggnaccaggagcaacgggtgcctggagccgtggggctctgccctgatgtccgcccgtgtgctggggctgtcctctctgggaagcccggggacccgcatcccccaccaacctgactaaatcagctcagggacccgcgtccccc

SEQ ID NO: 674707 - DNA, 195 bp, Homo sapiens
ttgctatcatacgcatagttttgtataagtgaggatctaacgcgggagaggctgcggggagttgggagcctaggaggctgggcgctggttacttggtgacgtgcagagtctctctctgggtgggctgcagctcatcttggggggagctggactcagatgcccccgtagttgcatgaacacatcactgggttacct

SEQ ID NO: 674708 - DNA, 927 bp, Homo sapiens
agcggacttagagcgcggtcggcgcaggggccgcgagaggcttcgtcgccgctgcagctccgggggctcccagggagcgtgcgcggaacctccaggccctagaaggatcccggtgtgcggccgaggaggataggatgccagcctagcgagcttctgcgcctgtgtgccgcgggtgtcctggaggcctctcgggtgtgacgagtgggggagccgaaggctcgttgtgccacctcctaggctctggacggctgccctccgttcttgctgcctcccaataagggtgtggcgggaatggtttcatggcctcgtggaggcttgtgcttgcatgcatggaatccgtagcagtcacggcgttccagggatggcgcatccagatagatattttcacaggttcgggcagattcggcccaggggatggtactagacaagtatgcgcttagcatgggccaatttttggctcgacggtgcgttggacgttctttagaggtcaccgctttggttacttacgtgctgggtctacatgtccggaggcgttggcgcaatgatggtttccccccctttgggggaggcatctgctgtgggaagtcgctttcggcctggcgcaggtttttcgctaccctcagggtcggtggagacagacatcggatttggggatatggccaccggagcaggagttctgatacgtgcgcttcgcgtcggcggctgaaggctgcacatacccgttggacaggcgcgtgtagcggagcgatgcacacaagacaaggtggatggacccaaccgcggaaccgacgcgatgatgcgcagagacatcgtctggaggcgccgcgcaaagaatgtgtgattccgggcgaggctgctgcgggcacgcatcgtcaggagtctgctaacctggagctggtagcagagggacacgtgacacacctgagc

SEQ ID NO: 674709 - DNA, 748 bp, Homo sapiens
taaaaagtatggctttttatgcattccttcatcgagggcatttgaagttgcttggactgataaaagcttgatgcaaaacaagaaagaaacaaacaaacaaaaaaaaccagcaaaagtgttttaccaaaaaactcaaacaaagtgagcaggtgccgtgtctcaattctcacagtctcgtgtggagatccagtgggtaaatagtgtttcaaactgacatttcctggggaaaaaaaattctctacaacttttgtccacttgtgaggggtacactacttcccaggcttaggttccccaaagctgcagtagattattgtcttcatcaacgctggtaattgggcgcttattttcatatagaacttttagcatccggggaaggagctggccccacctcaatgatattctctgagaacaacttttgtaggacggggtgtccttaaacatacttttagtaacaactgtggtgacgagtagtcagtaatggctttgctagctacacaccaggttgaccacattttgaaaactctttgggatttggtccctcatggcgccaataaatacaagaacactgtgtttttaacttgaatttctgttcaccacaaggggagggcaatgcacaaatctccattgttaacaaaacattttagccagtaggatggttttataccgacacggtacactaaattgcataggagtcacggcctctgggatccaccccagatggaccaaaggttagcgaaggttaatgtcc

SEQ ID NO: 674710 - DNA, 566 bp, Homo sapiens
gaaacccccaatgaaataaacagaaatagagcagccagtttttataaagcctgaaactcacagaattggaagtctgagtgacacagatatgttaacagaataacccaattgtttctcaacaatggaaagatgtgggatccagagagcagtttttgtttttgtttctgctattaagtgactgccctccatgtgataaaattggagaggtgaactgagagttcttcattacaaatacagctgactttattgcttactgaattttgatactgagccaggcattgggctgagtgcttcacaaacatagtttccctgatcccttccgacaactctctgaggtgggtgttggtggtcctattttacagatgcagacactgagattcaggaaagttaagcagcttgccaaatacaacacagctagaagtggcagtaccagaatgctaaccaaggcaatctgacttggttcactgtgctcttgtgagccccacaatggaagggctctgtccattacttgctgacaagaacaagacctcaaacatacacggcactcaagaaatatctgttgatgg

SEQ ID NO: 674711 - DNA, 312 bp, Homo sapiens
tcaaattaatcaataatctgcaccaaaagggcaaaatggcttacattatcctgttcaagctgagatgtaaaggacatagagcatttacactgacacacactgtgtaccatgaaacgagcttgcaagcttgtacctactatataacatggctggttgatggccatgcatttcagtcaactttatatataaatatatccccattttttgattcatataattagacctaaaatcctatgattagtgaaacaccaaaaatataggaaaataaacagcagaggaatactccccttaacagagtgatggtcccactac

SEQ ID NO: 674712 - DNA, 878 bp, Homo sapiens
  misc_feature (171)..(171): n is a, c, g, or t
  misc_feature (175)..(175): n is a, c, g, or t
  misc_feature (179)..(179): n is a, c, g, or t
  misc_feature (188)..(188): n is a, c, g, or t
  misc_feature (220)..(220): n is a, c, g, or t
  misc_feature (238)..(238): n is a, c, g, or t
  misc_feature (249)..(250): n is a, c, g, or t
  misc_feature (262)..(262): n is a, c, g, or t
  misc_feature (290)..(290): n is a, c, g, or t
  misc_feature (305)..(306): n is a, c, g, or t
  misc_feature (311)..(311): n is a, c, g, or t
  misc_feature (356)..(356): n is a, c, g, or t
  misc_feature (363)..(363): n is a, c, g, or t
  misc_feature (427)..(427): n is a, c, g, or t
  misc_feature (453)..(454): n is a, c, g, or t
  misc_feature (457)..(457): n is a, c, g, or t
  misc_feature (459)..(459): n is a, c, g, or t
  misc_feature (464)..(464): n is a, c, g, or t
  misc_feature (466)..(466): n is a, c, g, or t
  misc_feature (479)..(479): n is a, c, g, or t
  misc_feature (481)..(481): n is a, c, g, or t
  misc_feature (490)..(490): n is a, c, g, or t
  misc_feature (505)..(506): n is a, c, g, or t
  misc_feature (524)..(525): n is a, c, g, or t
  misc_feature (534)..(534): n is a, c, g, or t
  misc_feature (537)..(537): n is a, c, g, or t
  misc_feature (543)..(543): n is a, c, g, or t
  misc_feature (556)..(556): n is a, c, g, or t
  misc_feature (583)..(583): n is a, c, g, or t
agctggaagccatgctgtctgttctgctggagcagctgaacatatacatagatgtgccctgccctccccatctgcaccctgttgagttgtagttggatttgtctgtttatgcttggattcaccagagtgactatgatagtgaaaagaaaaaaaaaaaaaaaaaaggacgcntgtntctngaaatgctngtaaagaggtttctaacccaccctcacgaggngtctctcacccccacacngggactcgtgnnggcctgtgtgtngccaccctgctggggcctcccaagtttngaaagggctttcctnnagcancggggacccaacagagaccagcttctagcagctaaggaggccgtncagctgntgacgaaggcctgaagcacaggattaggactgaagcgatgatgtccccttccctacttcccctnggggctcccggtgtcagggcacaganntangntctgngngctggtctggctngnggcgcgagngatggtctctctggnncatagcccgaagtctcanngcagtcccnaanggaggnttacaactcctgnttcacaagaaaaggaagcatgccagcnggggggatctgcagtctcccagaaagctccgtgaagcctaagccacccctcaaaacggggttcctcttccaagcttcgcccctctggaaggggcagctgcaagccttcccaccaaagggccctgggaccacgagcagggaatcgggatgcaattgcctgtcctggatctgctctagaggcccaagcttgcctgcctgaggcaaggatgactttgccccaggtcaggagacacttgttccccaaaggccttgaccagaagcaccctaagcccgtttaacctttgcccaaattccac

SEQ ID NO: 674713 - DNA, 833 bp, Homo sapiens
ctgtacagggcgggacgaagcggtggtagccgaggactgtagctggggctggctggtgcttccaactgcgtggcacaggaagctggccagtacgcggccttgctatggcataagctggcacagcatagcatgcataagccgtgtacaaacattgaccaagctgcggcatggcatcagctgctgaacacactctttggatgattctgccaaaaaggtacttctggaaaacatacaaatatgtggagaattttggctctaattgatggtcgcctcaccatctgtacaatctcctgtttctttgcacatagtggctttgattatcgggattatatagcacccctattccagagtccaaacccgtaataggctattgtcgtgtcatatcctattttgctgatgatcggggattctgaccatttatacctcatataaggagaagagcatctttctcgtcggcccacaggaaaagatcctacaggacatggatcctgcatgactatccgcgcacggctgtccttccagctcttaacccgcgtcctgatcgacacaataacccccctatggacagcttagaccctcaccagtacaagataggcgtcagcaaccacaaagcaagcacgcgggcgccccgcccgatcgctcccaagacaagtcccatacggctcaccgttctcacagcgaccccaccaacgttggggacacccttgggtaccctagatttgccattatgtcacccccctgacaaccttattaccatggggatccccaatttcgaagcaagttgctcttggccactttatgaacatgcaaaacactacacccgaaagccaggg

SEQ ID NO: 674714 - DNA, 482 bp, Homo sapiens
  misc_feature (88)..(88): n is a, c, g, or t
  misc_feature (392)..(392): n is a, c, g, or t
cgggtgaaaaagcgcctgatacaaaggagaagaaacctgcggccaagaaggctggcagtgatgctgctgcctcccggccccggcgccnaaagtagccaaaaaggttcaccctaagggtaaaaagcccaagaaggcgaacccgattgcagccgaaaccctgtcctggtgagaggaattggcaggtactcccgatctgctatgtactccaggaaggccttgtacaaaaggaaatactcggctgccaagaccaaggttgagaagaagaagaaaaaagagaaggtccttgctacttgtcaccaaaacagttggtggggacaagaacggtggcacccgggtggtgaagcttcgaaaaatgcctaggtattatcccacccgaagatgttcctcggaanctgctgagccacggcaagaagcccttcagccagcacgtgagaaggctacgctccagcatcactcccggaactgtcctgattatcctcact

SEQ ID NO: 674715 - DNA, 257 bp, Homo sapiens
  misc_feature (13)..(13): n is a, c, g, or t
  misc_feature (47)..(47): n is a, c, g, or t
  misc_feature (84)..(84): n is a, c, g, or t
  misc_feature (215)..(215): n is a, c, g, or t
  misc_feature (220)..(220): n is a, c, g, or t
  misc_feature (235)..(235): n is a, c, g, or t
  misc_feature (246)..(246): n is a, c, g, or t
actaccaaactgnaaaggaagagtcaaattaaccttgttcacagatncatgattgatatttaaaaccaaagaaactccatcaanaactggttagaggctgagcatggtggctcacacctgtaatcctaacactttggaggctgaggcgggtggatcacttgaggtcaggagttcgagaccagcctgtccaacatgtgaaccccgtctgcatttanatgancaccactcactctanctggtgcaaantagctccatct

SEQ ID NO: 674716 - DNA, 299 bp, Homo sapiens
gctggttcagaccctgcgtactgcttgtatactgacccctagccagcctcatcagcactcacaactcttccgctccaccctctattacattcccacctgcatatatctcagataactcttccatgctgtatttcattcaccttacatgtatttcttatcaaacgtttattgatcaccttgacagtgttccatggggagctatggatgcgacttcgaagcaagcgacctttcctggctctagagcttgagtctggtcaggaacagcacaagtagagacgtcgatcctagggggccatatg

SEQ ID NO: 674717 - DNA, 162 bp, Homo sapiens
tgggtttgatgattaaatttctcccttcccataaccagtaaaaaaaaaaaaaaaaattacaatcaggcctggtggtggctcacgcctgtgatctcagcactttgggaggctgaggtgggcggattgcttaatctcaggagtttgagaccagcctgagcaaca

SEQ ID NO: 674718 - DNA, 991 bp, Homo sapiens
tacccccttctcttagtctttgtgcgctcaaaaaccaaataaaacccccccccctatttaaagggggggcagtaaaaaaagaaaaaaccccaaaaggacagtctctgtgaaaccaccatgtttctgtggccccccgatcattttatcccgccctagaatgggtatttggggtgcttcatcatctctggtccctcggtaatgctagggtgtaagcagatgttgaaggggtggagccgcctcctctgggggggataaatgatgcacattgagagcccttcttggaaaatgtcaaaggggaagtagagaaaagccagccactggtcccggagccgggagtattaacagggggaaacaggtggagctggtgccccccagaaaagatccagagagagggacagaaaggagggagggcgtaggcgacaggagggcccccaacgagtgtgtcacagagagagagtgtagcctcagagacggccccaaggggagggggggcctccttagcgagttgagcactagaaagagtagtgaccagaagtgagggggaaaggggagcaagacaacaaagggtggtgttgtaaaccaccaagaggtggtctccatatcaaagagaccgggagagagcagagaggagggagccacgccattctccagacaacccttgaggaagaaaacccacctcccatatactccccatcaggggagacaacaacatggggcccagcacccactaaaagaacacccgagtcatgaagcatcacagaaaaaaggaatcgagaaacgctcgagggaaggacacctccagcgagtggggaacaggggtgagtaagcgaccgcgagaacaacaaggagaagaccataaggagcgagtcagtagccccaaagaagaagaaaaaactgcaggattgaacacaacgaacagtggtggtgtggccccgcggaaaccatggttgtggtgcataacaaagaccaacacagggacctgataagtagg

SEQ ID NO: 674719 - DNA, 159 bp, Homo sapiens
tgtgacaggctgaagctaattttcaaaaacagtcaagaagctggtttctcctaaactatttgccttgtggtagtagagatcagctgggtcagaaacaagtcctgagcacttggtttccttttgagccgcgtcattaggaggcgatctgtcaatcataat

SEQ ID NO: 674720 - DNA, 282 bp, Homo sapiens
acccccccccccccccttttttccgggggggggggggggggcccaaacggttttttttctttggccccttttttttttgggggaaaagcgggggttttttcaccccgcccggggcaccccccccaggggggggggggggtttttggggccccctggggttttttttttggggggggggggttttgtttttttttttttttacccgggcccttttttgggggccccctttcccccaattttggcccccgttttttggcccccctttaaaggttttttggggga

SEQ ID NO: 674721 - DNA, 369 bp, Homo sapiens
ataagtgtagaaatatccacagacttacagaaggacttatgctcaatccaatatcggggaggcagtaacttataagcacaactgacatcaaaataatatcttgactgaggaactggtcctgctgaatgggtccaacgtggtctttaatcttctgggtccggtgcttgtttaacaggatctgggggagtgctcgcggtcacagttagggaataggctggactatatcacagctgaaatgtgagtttttattccaccatcgtgtgctgtactcctgtgatgcaagtgaaccattggagtagaggtgttgaaccattgcagaacagctctccatagtggccccttttcctccatttcctccaaccctttcct

SEQ ID NO: 674722 - DNA, 1690 bp, Homo sapiens
tggtgggtgtccttggccctcgtaaaagcttgcaaaaataaagccaatggggctatacctcagctgttgcaccacgagctcaaccccttcagaggggaaataaggtacaaaccaaaaagagttccactccaagaggacaagaggacagcaatcttcaaagagataagggaaccacctgtgccctcacgaaattgagaagaggaacccgagcgcgcaagaaacacctctgtggacagattctcttagaacacccgagggaggtggtggttcgtatacctctcacagaatgtgaattctatcaggatagactctcaccgcgagacaatggggtgtgtgtgttaactcgaatattataaaagcgcacgcctgtgagaagagtgtcacagaggaaatatctccagacaaactctgtggagagtgggttcagagaaaacgagcctccaaagggagaactactacgagggaaaacacatagtttgtgaacacactctccaaactacccgaggggggcacaacacaaccgagtctaaacaatagtggctctccccaaaaaggagagtgtgtgaaacagaggactatgtggtacccacagaaggcgcccaatttttttacgacgaaacacatagaaaaccgccaaacagtgtggaaacactttcttcttataagaaacaattgtgcacacaaagtattttccccctcaggggggggcaaaattccccccattaaatataaccacactcttcagagagaagccatattataaagtattcacacccacaccgcagtatattcctactctgcgtggggagggggacaaagagagaagtctcctctccagagaagaaggctctccaaaagatgacacccacactctcccctttgtgtggcgacttctcctaaaaagttgccgaagggcctgcagaaaagcaaaatcctaatttttatcaaaaacaacacgaaaatcttttttctaacacacagcagatgtgtacgaacaaacctctccattcgagagcaacacacttaggtgcgggggacattacatgtagtttaaacaaagggacgagcagcaccgaacaaactctataatattagacctctacaatgtttgggcggaccaatttccccgctgttgacgaagcagcgaacaacaaccggcgtcagcccccgacatgcaagatgtatatccccgaccacaccacatcgcttgtgtcggcaacgcaacagccgcggcctttatgtagcccacgggcgatccttaatcatcacggctttctccgcccaggctgcgcagcagacataccatattctgattcgccccacagcaaaggaatcctccgtcacccacctaaaacagacagagagaagctgcggtggggtgacaccagatgggtgcgcgcatggaaaccaaccttccccccaagtgggtgcagcgagcccagcagtcatgtgggtcggcaagcagcaattactctcctcacaaaaaacgagaaaacacagcaagcatggctcttcacacagccatattttgtagcacacatcatcccatacgagtaagagtactctcttatcataccgcggagcggcgcatttttattaattccccccccacgacagatcaaaacaaatcatcatgatgcttcatatctgcatgcggtccacagagagaagcaactctttagttgtggcc

SEQ ID NO: 674723 - DNA, 215 bp, Homo sapiens
acgcggtatggtgtcatgatgttcgagattaccaagcagtggaccttcaattacattctccgggagcttccagaggtgccacccacgtgccagtgtgcgtgcttggggaactaccgggacatgggcgagcaccgagtcatcctgccgaacgacgtgcgtgacttcatcgacaacctgggacaggacctccagggtccgtcctactatccgactat

SEQ ID NO: 674724 - DNA, 156 bp, Homo sapiens
attcttcacatttgtagggtttctctccactatgaattatcttgtgtgtagtaagggatgagaagtacttaaaggctctgccacattcttcacatttgtagggtttctctccagtatgaattcttttatgtgtagtaaggacagggtaccgagctc

SEQ ID NO: 674725 - DNA, 387 bp, Homo sapiens
gtactgaatcatatttagcaagttcttcattaggatcaagaaaatgatccagtactaagtccatgctgtcacagcgttatgagagcacatatgcaaagtaaggcagtaagtacatagtctcactgttattagtgtcaaattacatcatttcaacacttccatgagaaacagattattccacatgtctggagtaatgcagacgcatatttctttgtgtgtgctgaagtttattcaaaagaagcctctgatcaacagcacaatagatcaacttcctttgacataggctttagtgcacaaaactatcttcataggtcaacaggggtaacattacatagtcccttaaaggtaatgtatgcatatgagcacaatcagatattagtgttgggc

SEQ ID NO: 674726 - DNA, 202 bp, Homo sapiens
gggcaggggggggcccccccccccccccccccttttgggtttctttttcccccctttaaaaggggggggcttttttttccccttttaaagggggggggggggtttttaaaccccccggcggggggccccccggcccccttttttaaaagggggttttttttccccctttttgggaaaaaaccttggggttgggtttttttta

SEQ ID NO: 674727 - DNA, 928 bp, Homo sapiens
tcgtctggggtcattgtgcggtcgccctgctctcacggcccttttgtccgcctgcgtgggtgtcccccagggccgcgttccccaaagcagggacttccacactggcgggcgccccccgcccgttgggtgtttgccccccgctttcgggggatccacccccccgtggctgtcggcgagcacccccttcttgtcacgagggccgccaccgtgtgccccagcacactgggggagaactgcttgtgccacccccggggagccgctgcttggtgctcgcgtgtggacacaattgctcctccgttgttctgtaatgctttcccgaactgagccccccactggtgtaataccttgggcacagcgagctctccaatcccgcgcgctggggccatccctttcccgcagtacgcccccccgtggtcctttcgcctgcgtggcgtcccctgtttttcaccatcgggccccctctccccacacagcgtgtcatcactgtcccgggctgacccggcgtgtgcaagtcattatatccgcccctccctcgggggagtcacccctgtggcgggtgtcccccccgcgtgaacaagacaccccggtgtcttcatcgccgaggtgcatcctcgtcccctcggatcccgcgagattctgtggggcccccctcatctccccccccacggggatcgatgctgccaggcgccacagcggtggtgccaacactatcgtgtgtcacgggtctgcgttgccacttgtatttggtgcgcacccccaggcttgtagtgcgagtggcagtccctcttacatgcgacggggttggggcgggaacgacgtgacgacgccccttggaccatcaggccccccgtcggccgtgcctcaattgagtgtccccaccccgcatcaaaaacaacaagttttccgaaattccccacccaacaaaaca

SEQ ID NO: 674728 - DNA, 695 bp, Homo sapiens
  misc_feature (614)..(614): n is a, c, g, or t
gcaagacctgtcgtcatctgattctcccccaggagcagtgtccctttcaattttcaaaaggaatatccatgcaacactcagttgcatacaactgtggatgttccgcagatgtaagacgactggaatgcaagccttttctcaaggtcttaatgagcaacagcaagagcagtctccagttacgaacagagagacttacaatacagcagagatttcctgtttgaagctctcaaggtgtttccatctgcagaaaaaaaccagaatttctgcctgatcatcccatggtactgcaaaaaccagaaaaaaccaaagtttaagtagcattttaaggaacagatgaatttacgtttggacatctgcaaatgaggtggatctagcaacaataatctgtaatgggacttgtgacaattcaatttattcttaattttgatggttggctatttgattctctaaaaatgcagaaagagctattttaaaatataacagaatttctaatcagtttcagctttgcaaggaggtttccgggcataaattgtgggaagtaccaccttggaaaataaggaatttggttagttgaagtgcgcagactgtatattcataattggcatactatttgncaattttttgttccatcacttgtaataatggatggaatgtagctgtaaagatctcaaatataaaatatttgtaggtgtaac

SEQ ID NO: 674729 - DNA, 108 bp, Homo sapiens
cagtccgtacagcatgaagcgagctctaccactctgcagatctcccccgtgtcttcctatgcagaaagcgaaacgagctgatggtgtgcccagccgactcacgacgag

SEQ ID NO: 674730 - DNA, 380 bp, Homo sapiens
  misc_feature (1)..(1): n is a, c, g, or t
  misc_feature (117)..(117): n is a, c, g, or t
natctcggctccacttggttgcgatcacagccacttgacggggttggcagggaggggaccaggaagtcagtggggtaggggtagtcatcatagccagcacggtgaaggcatccgtgngaacatgaagagctgggtcaggtccttctcgtctgacagcggctggcaggtgccgaactcccagcggagcgtgtcgtaggctccctgtaggaacaagtccttgatctgtcggaacgcttcccgcacaccctgggtgcatatgggactctggccctcaaagtccgccgtgacgtcccggaagaactggttggagtcgccgaggcctgccacagataagaacgggcgcgctggcccgccagggcccccggaaccaagtggggagg

SEQ ID NO: 674731 - DNA, 762 bp, Homo sapiens
agctgagtggttgtggtggtcgcgtctcggaaaccggtagcgctggcagcatggctgaccgactgactgaagagcagatggtcagaattcaaatgaagcgtttttcacatatttgacaaagatggtgagtggaagctataatcaacaagaggaagtgggaagctgtgaattgagatctcttgggcagtaatcccacagaagcaggagttacaggacatgattaatgaagtagatgctgatggtaatggcacaatgacttgccctgaatttctgataatgaatggctagaatggatgaaagacacagagagtgaagaagaaattgagagaagcgttccgtgtgttgataaggatggcaaggtatattagtgcgtgctagaacttcggcatgtgatgacaagagctgggagagaagttcaacagatgaagaggttgatgaaatgatcagggaagcaggatattgatggtgatggtcgagtatactatgacgagttgtgccaaatgatgtacgggtaaagtgaagagcttgtaacggaatgtgtttaaatttctgtacaacatttgtgtagttgcttttgttggttgtactgatcgtgtaagaggtttctggctactggtaaggggaaggtgctgtatagtagtgagggagttcattttccatgtatgttcccttatgtgactgtattgcttaaactttgtggaaatgttgtgtcattgtgggtggttatcgggatttaagcttggatttagggaaggggggcag

SEQ ID NO: 674732 - DNA, 542 bp, Homo sapiens
  misc_feature (191)..(191): n is a, c, g, or t
  misc_feature (327)..(327): n is a, c, g, or t
agggcccccttttttttgtatagggtgtggtggcgccccgggccttccccgcgcatctcctttggggttttctcctctggcgcggccttaggttttttctttcccttttccgggggacggggttttgggggccccaaagggggggggacgcgggtttttcccccggggtttttccatttcccccccccctncggctttggggggttttttttggccccccaacacccggggtttttcaaaatttttttaaaccccccccccccttccccaaatgggggggggggggggggggggggggggtttttttaaaaaaccctttttttttcnccccccaatccccgggggggcccccccccctttgttgttccccttttaaaaaaccggggggggtttccccctcgtgttttttttttggggggggggggggggaaaattttttccccgggaaacctttttccctttggggctttttttgggccccttttaaacaatttttttcaaaaaaacggggggggggcggggggggttttccggggttttta

SEQ ID NO: 674733 - DNA, 324 bp, Homo sapiens
tgtcagcttcacatgtcacagcactctggcctactcttgttcactgctcacactgctcctctccattcatcgaacttctcattgtccttttcctcttgttgcctggcactagggcaacagtcatgccccctccggtgtcatgccaccctgatactgtctctgtctacttccctaaccccatgctccctctcttggcttacaccactctcccaacctttaatcacagcatatccacacacaccctcccacttttcctatctccacccgactgtggccttgctacaccctattgcccatggcacacgaacctacaagattcttcac

SEQ ID NO: 674734 - DNA, 1046 bp, Homo sapiens
  misc_feature (407)..(407): n is a, c, g, or t
aacagattccttaacatagaccgtgagtgctcctagagctaacaaagacttgtcctatggactttatcgagtctaggggagctgatcaaccaaacacattgcataactccgataccaatcttgcttctgcatctgcaccgacgatcgaaaacaacggtagtgtgagctaatatctgcataattgggatgctcggtaagctgtgcacacgatgcgcgcacatctaaggttgcccttcaaaggaatgtcctggacaatgcctaaatacatatgggtccgatttcagctatactcaagtggatattactaaacgatccgactagatatagcgagtccaagcgagcagtacaccagtacttcgtcgacgagacagacttactataaaggattcagtacagataccatagcngaagagaaagctccttcaaataactctaagacgattcacgcatctagggaagtcaacttccatagtacgtatgatttatcatagcattcaaaatttcctcccctgcttggaaataggacaagcgaaatctgagcacttcattattaacgataattcagtcatctacccccgttaagaaatagaatatgcatactgctaagcctttacgttactttgaataaagcacattaattccaggcctatagtagacaagtggtggagcccacaagtacctatacctaaattacaaaaaaaagaccaaaattcaggatggtgagtgagtctctcctagactttgtcccataggtgtgagtgctgcatttttcccttgtggtagccctaagcttttgccgggactaagtgagggtgttccctatgaaaagagggacacccagttgccaatttcagactgtcttgtgccccttaagtgacctcttggacagctaaccttagcccataccacggtttaacctggcgagagctataatttgcgactggacccaagtaaagtttagtgcaaggtccccttgggactggtcatgaaaacacggtttcccgaggattgacatgttcttgggtagacaaaaagaaattaatccg

SEQ ID NO: 674735 - DNA, 202 bp, Homo sapiens
tgcggcgaacacaagatgagtttgagttgcaatggcgagtgcatcaacttcagcctgacctgctgacgggtcccccactgcaaggacaatgtcctgatgagaagccgtcctactgcgactcccgccgctgcaagaagactttccggcagtgcagcaatgggcgctgtgtgtccaacatgctgtggtgctcggtggccgcaag

SEQ ID NO: 674736 - DNA, 112 bp, Homo sapiens
ctcaacgctttattacttccgtcagctttatactttctcaacgctttatacttcatattatacttgaattcaatacggaagtataaagcgtgaggaagtataaagcgttgag

SEQ ID NO: 674737 - DNA, 570 bp, Homo sapiens
atcccagtacttgggaggccaaggcgggtggatcacctgaggtcaggagttcaagacgagcctggcaacatagtgaaaccccatctctactaaaaaatacaaaaaattagccgggcgtggtggcagacgcctgtaatctcagctgctcgggaggctgaggcaggagaattgcttgaacccggggagtggaggttgcagtgagccaagattgtgccactgcactccagcctgggtgacagagtgagactctgtctttaaacacaaacaaaaaagattcatggtccttagattagattggtaagcccacggggcaggtacggggtctaaggtccggtgtggcccctggtcacatggtcagaggctcgaataaaggtgtcaagcaaagctagaaaacaacaccaaaaaagaaagaagaaaaaaacactgctgcgcgcagcggcgccacacgcgcccctcaagaagagatcttcgacaagccacccccccggggggtgggcgccgcggggccccccaagcgcagcgcaccgccacccacgtgtcgcaaccaagcggtgtcaccccggagccacc

SEQ ID NO: 674738 - DNA, 441 bp, Homo sapiens
  misc_feature (276)..(276): n is a, c, g, or t
tccggagcacggtggctcatgccctataatcccagcactttgggaggccaaggcaggtagattatgaggtcgggagttcgaaacccagcctggcccaacaaggtgagacccccccccgatctctactaaaataattagccgggcctggtggcgcatccctgtaatcccagctactttacttgggaggctgaggcaggagaattgcttgaactcgggaggcggatgttgcagtgagccaatatcgcaccactgcactccagcctgggcaacagagcnaagctccgtctcgaaaaaaaaaataaattttaaaaactacacattgggtacaatgtacactcctcgggtgatgggtgcaccaaaatctcaaaaatcactactaaggaacttatccatgtaaccaaacaccacctgttccccaagaactattgaaataagaaaaaa

SEQ ID NO: 674739 - DNA, 388 bp, Homo sapiens
  misc_feature (155)..(155): n is a, c, g, or t
  misc_feature (357)..(357): n is a, c, g, or t
gtgcagctgatcaagactggagacaaagtgggagcagcgaagcaacgctggtgaacatgctcaacatctcccccttctccttggggctggtcatccagcgaggtgttcgacaagtggcagcatctacaacccgtgaagtgcttgatatcacaganggaaactctgcattctcgcttcctggagggtgtccgcaagtgttgccatgtgtcgtgtcgtgcagatgggctacccaatctgttgcatcatgtacccctattcatatcatcaagcggtgtacaaagcgatgtccgtggccgttgtcgtgtgagagacgagattacacctttcccatcttgctgaaaagtgtcaaggccttcnttggcgtgatccatcgtgccttgtgtggctg

SEQ ID NO: 674740 - DNA, 428 bp, Homo sapiens
ctatgtggcaggctagtctcgaattcctgactcgtgatctgcctgccttggcctcccaaagtgctgggataacaggcgtaagccaccatgcccggtttactgttattcatttactcaaatcttccacagagcgtaacaaaccagtcatgtgatcaagacagagtcgatggtttggggggtgagagttgttggagatctgctgcgggtgcccaggagtactggggtctcttccggggccctgatttgggtcggacttgtgagcggtcccgatagaggtgtgggacacccactggtttgagaataaagagtcgaatgacacgattggacgataatggtagaaaaatgtctaattcggtcatatattcgccgagattgtatgattgagctgaatatgagtgaccatggggcgtgaggtacccctcagggga

SEQ ID NO: 674741 - DNA, 1217 bp, Homo sapiens
  misc_feature (299)..(299): n is a, c, g, or t
  misc_feature (580)..(581): n is a, c, g, or t
  misc_feature (1188)..(1188): n is a, c, g, or t
gcctcactgatatcagccagcccaccatagtgtaggctttgctgatctatggaaacttggtgacaggctggccgtgctggcggtgccctcatcacagttgacttgagtcctctgctgcactgcagtcgatggcaactatgttgctctgggcgtcgtgtgcgaaggaccggcggttcagactggcggactagtggcaccacggggagtgcctcatctagctgtcccctcagtgcagtgtgcccatggcccccagggacagtgaatgctcgagcgaatggttgttactgatagcgtaatcncgatatcgcttgccgatggaatgccgtgccactagtagccataggaccaagggcatccttacgcactcgttgggatgcaacaccagtgttcaaacaagagcttgcggccttgcgacctagctcatccacttggggggagagagccttgtacccccaacctatgctaacgatgtggaaggccatggcccgtgtgagctttccagcagcgtagctaaggccttcttgcaagcctcgcatgggaaaccgaggcagccctttcattgcctgcagatagtaccganncctgggacaacatgacttcaaactccagacttgttttgttgagcatgaaccctcgcggagatgacaattctcggcagtcacactgttttcggggcgacgttcaatactccagcgccatcggggacctagatctcgcgtggctacacgaaatttacctcgcccggtagagcccaagttccgcgagtcagccccttgtgtgaaacgggctccccgaatgggaccttttgaacgagagcccaatcaacacgggaattgcgcccaaatcgggtcaggccacgtgcgtgggggttggcaacttgctcccatctccaacaatggctcaagtcctcattgtcgggatgcgctcacagacaagccaaggccggcaattaaggtcgcttccacgtatgcctctccttgggggaggggctcggaaccattggagcgccgtcacgcctttgagaacgggttcaatgcaccttttcgagacgccaaggaaggagcaggccgggcggattttttgaacgcaaggagactttgttcccagaggcccacattcccacccctgtgctgctcgcgacagaccgtggtggcgaaaaaatttcgggggtagtccggattgtgaacncacttatccacactcgttgaaacgcgaaa

SEQ ID NO: 674742 - DNA, 208 bp, Homo sapiens
  misc_feature (72)..(72): n is a, c, g, or t
tgcaagaattgcgacactcaagctcgaagtcacgccgcagatacgccggacggcacatcatcctcgacgtgnacatcaacaaggacagccgggggagaccacgcttgcgggatcgcgatcaccaccaagcacgtaaagacccaggtactgttcgagaacggcggcacggtggtaatcggcggcatcttcgagcaggtcgaccgggatg

SEQ ID NO: 674743 - DNA, 654 bp, Homo sapiens
  misc_feature (39)..(39): n is a, c, g, or t
  misc_feature (64)..(64): n is a, c, g, or t
  misc_feature (103)..(103): n is a, c, g, or t
  misc_feature (107)..(111): n is a, c, g, or t
  misc_feature (114)..(115): n is a, c, g, or t
  misc_feature (148)..(150): n is a, c, g, or t
  misc_feature (175)..(175): n is a, c, g, or t
  misc_feature (195)..(195): n is a, c, g, or t
  misc_feature (209)..(209): n is a, c, g, or t
  misc_feature (212)..(212): n is a, c, g, or t
  misc_feature (224)..(224): n is a, c, g, or t
  misc_feature (231)..(231): n is a, c, g, or t
  misc_feature (324)..(324): n is a, c, g, or t
  misc_feature (359)..(359): n is a, c, g, or t
  misc_feature (362)..(362): n is a, c, g, or t
  misc_feature (395)..(395): n is a, c, g, or t
  misc_feature (416)..(416): n is a, c, g, or t
  misc_feature (448)..(448): n is a, c, g, or t
  misc_feature (450)..(450): n is a, c, g, or t
  misc_feature (456)..(456): n is a, c, g, or t
  misc_feature (473)..(473): n is a, c, g, or t
  misc_feature (477)..(477): n is a, c, g, or t
  misc_feature (525)..(525): n is a, c, g, or t
  misc_feature (537)..(537): n is a, c, g, or t
  misc_feature (593)..(593): n is a, c, g, or t
  misc_feature (623)..(623): n is a, c, g, or t
  misc_feature (646)..(646): n is a, c, g, or t
aaaaaaacaaatttataaaataataaaaagaattaaatnaaaaatataaaatgtataaaagaanaaaaaacaaagaaaataaagtagtatatgcattccagtnttcnnnnnagnnacggggggggcccaagtaaaagctcttctaaannngcctgaatggggcaggccgggtganaaaggttccgggcctcaggnacagtgtggggggngcntgtttcctccgnagagccnggggggtgggggcagcaccagctcctagggcctccgggccagcggcggaccccaggccggcccaagcccgacgccaggcagaaccctttgggnggggccgtatctggccctccggggacggcagtganganacccccagaaatgtgggcttcagggctggccanagggtaccctcagaagcccgnagcttagtcggctttttttaggaagattttgntnagaatnacccaaacaggggagtncgtntggatcgagaggcgcagtgcttccagagggccgaagtgggtccacctntccctctgccantcccttgtagaaggagccgatttggaggtatgccgtcggggctccgagggtaccgnagggtggcggtggggccctcctgcaggggntccttgtctgactgagggttgtngaagggca

SEQ ID NO: 674744 - DNA, 161 bp, Homo sapiens
ttatactgtccacttccaagaataattatctcaacaggcaggttaactaatgtatttaaaacttagtttatttcccaaaaagtaaggctcttgtgcctcactagctctgatagacttgatagggagaagagctggtaacctgactttacctgtatgactac

SEQ ID NO: 674745 - DNA, 210 bp, Homo sapiens
tcacatagtgtagggattacagtgcgcctggcatataccagatttaaaacaataatctataaaagtgttactacctaaggacttccactcaagaagaaaaactacatagtacacaccaaacttgcagggtggtgagttactagatacgtctcctctaaatggaagcttacctagcttcagcaacatttctggaagaggtcagcgtagtgc

SEQ ID NO: 674746 - DNA, 252 bp, Homo sapiens
gtatctagatatccgggcgggcggctgggagtagaagatgaggtatgtggcagtaacattcctgggatgtcttgaccagaaccccagtgacaggcccaagaacggcaagaggacttggaccctggagctcagggccttgtgggaaaatgcttgctggcaggctccctgtgtgggtttgggaggttacggggcaccatattggaacaggtctggaagaattgagaattgtacggttccatttcttgaccgcaa

SEQ ID NO: 674747 - DNA, 320 bp, Homo sapiens
acaaaaacaaaaaaagtttacaaccacagctagggtaatgtttgccatggttcccagtcagctccaaacccatggggtgcaaagcccatttttttccaggcatctaaatgatagatacgggctatgaaatgctttattctattggtagcagcttatgcaggtgcggccaaacacaaggcttcaggacaaatggtacaaactttacaaggggggatctaaatttaaaatatgaaacataaaattctacacaaaacggataaaaatcaagcacagataccaggatggaaacttataatattccaggtgtgaagggaagtccg

SEQ ID NO: 674748 - DNA, 354 bp, Homo sapiens
cttaaaagtaaggttttcctttaaaaaaaaaagtcttgggaataatagctcccatgtattggagtcctttccaggcactattgtatggactttataaactttatcccatttaatccccccgtcaatgctttgaggtaggtatgattccccttttatatatgagtaataaaaaaagctcaaggggtttaatcctttatcaagggttttttttgcgaataataaagccagggtggcccgtcggctcctttagcctaacgttggtttccagtattcaaaaaaagttgattgaattcaaggttttttttccaggtaaagctatttatattttccaagcctaatgaaatgggtttttta

SEQ ID NO: 674749 - DNA, 570 bp, Homo sapiens
acacattcatttggcaacacaagttttccaagtcagggggcaccagttgctatcaccatcacatatcattgtcatcattccacatcctcaacaacattttccatttcatgcagtcatgggcatgtgttgtcatcatcggcttcagcccccacagttcacactgtgctcgcattcaaccacagtcactctcatcaccacacatcagctcacacagtcagcaccacattcaatgcatccagtctgtaactcagcagtgcacaccatcatatcagcacagcagcacacaaatcccaaactaccttctatcattcacaacacatcgcaatcaccaatcacagcaacacatctgccaacacagcagcaccccaacacatggcacacgtggtttctcgcgtcaacgacttgggcttacccgggtcaggccaaatatacacagcattttggccacacccgttacgcttattctccacacgatttacctcttatagcacacttctctacacactggatcagctcttatcgggcaccagcctctatctggatctttctcacagcctttggtgaacccaa

SEQ ID NO: 674750 - DNA, 118 bp, Homo sapiens
cagtagttgttaggtgttgggaatataggtaatttttttaaataatttactttattctctaatttttcctctgggtatgtagttatgcacaacaatggagacacacataatacactgt

SEQ ID NO: 674751 - DNA, 771 bp, Homo sapiens
tctaggctcggcgccttggcgaggggggcggggagagccgagaagccacacaaaggttccaccgaggctcgagacctagtagccttcggggtgaagccagggattacagtgcggagtggatttcgggagcgaaactccggaggttctgctgggtttgagatctgcctttcggggccggggccaagtactaaagttctaaccctgtcgcttggctatttccgtgccccttgacttccctgagcttaagctcgagaactctgcagacgctgcaagtgtctgttctttcctaggcatggcagcggctgtccttagttggctgtatctgagactctgacaacctagtgccctggcctgtgggcccttaggcgagatcttagcgcaggtggtaccctgtgttcacgggaagtcgtgggcggcctaatgctggcttgggttctgagtagttcttgataccatggtgggaatgccctgtggtactcagtctagtggtggaaggcggcgcaaagttaaaagtagccgtgggtcagttctgctggagtgccgcttcctcctaacctccgagcagtttgtggccctggggtcgccttcgttggtcttgacttattttaagagctctgtcctggggcagggcttggctactggcgaggtgctcccacctgtcggtacccttggagttccaccattcgctgctggggttcgcggtcgaagcatcgtgggtccggccacctgtgcagagctcgttctggcgttcgctggattgcgacggaggcc

SEQ ID NO: 674752 - DNA, 151 bp, Homo sapiens
  misc_feature (29)..(29): n is a, c, g, or t
  misc_feature (101)..(102): n is a, c, g, or t
  misc_feature (145)..(145): n is a, c, g, or t
gcggacccgcgggtatgtcttacgcagtnatgcactcgcaacctattttggtgacataaaggtaagcttgagtttaatgaaagtactcaaactatgggttnnacgggtcgagaagattatgtactctttggcacgtaagacatanccgcgg

SEQ ID NO: 674753 - DNA, 846 bp, Homo sapiens
tggaaaggagtctcgctctgtcgcccaggcttgagtgcagtggcgcgatctcggctcactgcaggctctgtctccggggttcatgccattctcctgcttcagcctcccgagtagtcccaggagtagctgggactacgggtgcccaccaccacacccagctaattttttggtatttttagtagagatggggtttcaccgtgttatccaggagtggtttggatctcctgacctcgtgatccgcccgccttggcctcccaaaagtgctgggattataggcgtgagccaccgcccgggcaaattttggtattttatagtagagatggggtttcaccgtgtgtggccaggatggtctcaatctgaccttgtgatctgcccacctcggctcccaaagtgctaggattacttggcgtgagccaccactcctagccttaatgcatattcttacatatacaacaggtcagatttgttattgaacaattgcttgggggctataataacctaccttttacgactgagaacccggctgggctaggggaatacagtatgatcaagcttggaccctccaactgtgggctggactcctgatatatatacatgggatctctccggaactctggcactgcgaatagacaccaacaattcgtgtgaacctatctgacctatctccggcgtatatatggcaccgtacaagcgctgtgttgatacgtatcactgttcccctgtatactgctatcactgactctgcccacctaccactatggccaggagttaacacacgcctttagcccactgtaccataagagcaaacacagtgaaacggccccttggtatatcctctttgctggc

SEQ ID NO: 674754 - DNA, 174 bp, Homo sapiens
ccaggcggattttagagaatcccggtctcaaggtggctacagcattttttgagcctatttccgccccagggcaaaggtgtaatctgggcatcagggacacctcggcagaagcgagactttgggtacggcttgttcttacaataccggtaacaacgggcggttcttgcggccgca

SEQ ID NO: 674755 - DNA, 252 bp, Homo sapiens
aaggccatcccagcccgacccacgtcaagcgtccacagtccaccatggagtcacgcgtttgacacagactgcgtgaaacgctggacggttctcctgacagcaaagtttcgtattattcaccccgtgagtgtgcactacatgttgacccttttcacaacaagtcccagcgcaatctgggatatcactgcaagaccagaccatgcgacgttcgtcacgtgaggagattgaacgtccgaggaaattaatgtggcg

SEQ ID NO: 674756 - DNA, 513 bp, Homo sapiens
  misc_feature (181)..(181): n is a, c, g, or t
  misc_feature (258)..(258): n is a, c, g, or t
  misc_feature (263)..(263): n is a, c, g, or t
  misc_feature (280)..(280): n is a, c, g, or t
  misc_feature (301)..(301): n is a, c, g, or t
  misc_feature (317)..(317): n is a, c, g, or t
  misc_feature (349)..(349): n is a, c, g, or t
  misc_feature (361)..(361): n is a, c, g, or t
  misc_feature (386)..(386): n is a, c, g, or t
  misc_feature (396)..(396): n is a, c, g, or t
  misc_feature (477)..(477): n is a, c, g, or t
  misc_feature (510)..(510): n is a, c, g, or t
aattcgcggcccgcgtcgaccgagaagacgacagaaggggagcgccgattccgcgggaagggccctgggacctcacacttctagtcgcgggagctgcaggtcttacccggagagacgctgcacgtggagccctcgccgctgccgttctcagccggctctggagtgcgggcgggggcgacanggccgattccggagtgggactgatcctttgaaatactccagccatgactaaaagagaagcagaggagctgatagaantgagntgatggaacagagaaancagagtgcacagaagaaagcntgtagaacaaacctangcgccactgaatgtgtaagccagccatagacntcaatgaaccanaagcaattaaagaaactgctagaancaagactacntgtcttggtgctcatgaatttgtctgctatccagtggatccgaacgaatttatttgaccaggatacgatggaatgtacacntagtgtacagtaattctaccaggaatgaaccanttc

SEQ ID NO: 674757 - DNA, 438 bp, Homo sapiens
  misc_feature (86)..(86): n is a, c, g, or t
ttacacctttaatattaggaatttagagacaaagatacatcaaggagttatgttgacacccaaaggagtctttgtattttagaatncaagtaggaagtaaaactattcttcacactcccctttgttttaaaataccctgatctttgaaatttcaggatttttccccttagattcatgctcagaagccttgggtactattgtcagaattgctcctttcaaagtgtcttagtactgaagtacttatttattatgatggcattgtggaaatgattgttttgtgttaaggaaattaagtggccttgtctctactaataattgaaaatgtgaatgaggttttcttatggaggctgtcttactgcttagacttaccctctgttggtcctgtgattgatggcagaggtgtagttactgaaataaacaacctgttcttcctcttta

SEQ ID NO: 674758 - DNA, 278 bp, Homo sapiens
  misc_feature (44)..(44): n is a, c, g, or t
  misc_feature (51)..(51): n is a, c, g, or t
  misc_feature (78)..(78): n is a, c, g, or t
  misc_feature (132)..(132): n is a, c, g, or t
  misc_feature (143)..(143): n is a, c, g, or t
attgcctcacgggtccccaggacgctcaccatttcttgccgtgntggcggntctgttccgagtcatggtgcaggtcgnagtgggggaagtaggtcttggtggaggggtagacggtgaacatcctctccaggncctcggccccnaagtcctcctggtgccccagcaccttctcccacacatgttggatcagctgcttttcgtcctcggtcagcatggcggcggccaagggtctgcgctgggctggctgccccgcgtactctgcgttgttaccactgctt

SEQ ID NO: 674759 - DNA, 114 bp, Homo sapiens
ctactcagactcaggtagctgaagtggacagatcactggagcccaggaggtcgaggctgcaatgagctgtgatggcacccctgcaccccagcctggattgactcaggtggtgtg

SEQ ID NO: 674760 - DNA, 617 bp, Homo sapiens
gccatggtctccccacggatgtgcggggtcctctcccagagtgtgatcctagcgctcattgtcctcccccagacacggcccgctggcgtgttcgagcgtgcagatccagtctttcgggccgggtccatggcccgtggggcccctgtggtccccgctgctgcgcccggcgtccctcgtgctcggcctgcttcttcacgagtctggtctgaaggcctgaggctctcgagagtgaggcctggcggagtcgcctcggtgcagcctcgtgggctgctggtgcttgagttgcgcgcgggacctggtctagcgactcggatgccgccgcgggatgcgctcactgctggcctgggatcattctccagttggttcacggaacaaggtcctcattggcaaagagttggctcgccttcttacccagggtggatcggtcccatgtgtcgcgttgaggcagcacgtgttccttccttgtgtgcaagtgcaagttactgggaaacaccctcgtggggattgaagacggggcaagtctccatggggacggacttcgacggcatttggtgccatggggcgcctggctggacattggggattgtcccatagtgttgctaggtgtttccgggatg

SEQ ID NO: 674761 - DNA, 555 bp, Homo sapiens
  misc_feature (9)..(9): n is a, c, g, or t
attcgcggncgcgtcgacccctcaggctccaccacatccccagatcaaccatcatcatccaaccccaccacaatgacacctcaaacaccaacctcaacactagaattgactgcattatcttcagcatcaacatcaataccacaaaccaccacaacaccatctctaacagcagcctctactttaggctccaccacaccaccagatcaaccatcaacatcagaacccatcacagcatcacctcaaacattcacttcaacatcacagtctacggcacaatctttatcctcagactcagtgacaatcacaacacaggcttcatcgtctgtctctaccttcccttcatctacaccagcagatccaactcaaacatctgtttctgtatccgccacaacaccagctctatcatcaccagccccctcaagctccaccacatccccagatcaaccatcatcatccaaccccaccacaattacacctccaacatcaacctcaacactagaattgcctgcattatcttcagcataaacctcaatactacgtcgacgcggccgggaa

SEQ ID NO: 674762 - DNA, 955 bp, Homo sapiens
gatataattagttgttagaagtaattactaacttctacatttataattgtgagaaaatgctaaaagatatatatatgaaaataagaatgttgataattggacttcaggagtcccataaagccagcgttcaacaattaccaaagtgtgaccaatcattctacagcacatgcgacaggtgtgcctcagtatctgtggtggcattggttctaggaccacttatggataccaacatctatggatgctcaagtccctgatataaaatggtggactatcggcatataacctgtgtacatcccgtattatttaaatcatccctagatcacttataatacgtaatacaatgtaaatgccatgtaaataactgttatactgtattaaggaataacaacaagaaaaatgtacatgttcagtacagacgcaatttttttgtgtgtggaatattttcattccaagggtcagttgaacccatggacataggaggctgactgtgtgtgtgtgtgtgtgtgtgtgtgtgtgtgtgtgtatagagacacatatattgtgaaatgtaaatattctcttgtaaaaagttttttctcagcgtaaagattttacgagttattcttatatgcttatatacggggggtaagattagagaggggctcataatttgaacagatttatggaatggacaaaatatgttagggtaatgtagaacaacctcaagcccctataagggttctattgaccccctttttaataaaatcgtgtattggtgtcacaagagcatgtttcaaaatgcggggctgatatgcaatgtgttcatgtacacggccctatccggagggagacagaagtataacagtctttacaacgtaaatacgacattatgttgaaatgtgaaaccaaatgactaataatgaacaactacaatttcgagaaaaaagggattcggctagttatacatgtcatattc

SEQ ID NO: 674763 - DNA, 575 bp, Homo sapiens
  misc_feature (57)..(57): n is a, c, g, or t
  misc_feature (433)..(433): n is a, c, g, or t
  misc_feature (502)..(502): n is a, c, g, or t
aaagctggatctcagcgaggggctgtcattgccacggagctgaagaacacagctccnagttggcccggtggacctgctgtgctttgctggctggatctgagtacctcaagcttggttatgtgtgtcggtaccacgtgaaagactcctcacgccacgtcatcctaggcacccagcagttcactcctaatgagtttgccagccagatcaacctgagcgtggagaatgcctggggcattttacgctgcgtcattgacatctgcataagctggaggagggcaaatccccccccttctttcccaaattaccctccaaagggaccccaacaagcaggtcatccgtgtctacagcctccctgatggcaccttcagctctgatgaagatgaggaggaagaggaggaggaagaagaggaagaagaagaggaagaaacttaanccagtgatgtggagctggagtttgtccttcccccgagactacgagggcctttgatgcttagtggaatgngtgtctaacttgctctctgacatttagcagatgaaataaaatatatatctgtttagtctttcaaaaaaaaaaa

SEQ ID NO: 674764 - DNA, 546 bp, Homo sapiens
  misc_feature (10)..(10): n is a, c, g, or t
  misc_feature (77)..(77): n is a, c, g, or t
  misc_feature (158)..(158): n is a, c, g, or t
  misc_feature (167)..(167): n is a, c, g, or t
  misc_feature (210)..(210): n is a, c, g, or t
  misc_feature (487)..(487): n is a, c, g, or t
  misc_feature (531)..(531): n is a, c, g, or t
acttgaccgntctgagctaagcctagccccatgccccactccaccctactaccagacacccatagccagtccatttncccaaattaagtataggcgatagaagttgaaacctggcgcagtagtatatagtaccgcacgggaaagatgaaaaatcatgnccatgtatnttatagcaaggactaacccctataccttctgcataatgaattnactagaaataactttgcaaggggagccaaagctaagacccccgacaccagacgagctaccgaagcacagctaaaagagcacacccatctatgttgcaactatagtgggaagatttataggtagaggggacaaacctaccgagcctggcgatagcttctttgcccaagataggatcttagcttcacttaaatgtggccacagaaccctctaagtcccctggtaaattataactgttagtccaacgagcacagttctttggcactagggaaacacctgngagagagtacaaatttccaccctggcgcctaaatgaggcacggntagaagcttcaagtc

SEQ ID NO: 674765 - DNA, 388 bp, Homo sapiens
ctgcatatcctagcaatgcatcagctgatcctcctgttggttgtctgcagccatctaacagatcatcacggtcaccacatgactagttggtagtctctgaagtcctaactaaagtctgcggtgtgtggttcacagcattctgatctggacttgcttagtcccgtgtagtactgtacttcattcacgacatcaatggttctgcaagcatctgctgtgcccttgtctctgattgagctcgtctccgtgtcccgtctgatatcaatatgataggtagtcacagtctcagcctagctgtgcttgcctcattctagacagttttatttatctctccacagaacctttaacatggtgtcatcacttgagcttccctctctagcgtacagctcac

SEQ ID NO: 674766 - DNA, 1104 bp, Homo sapiens
ggcaaagagccgaggcctgggcgcgcgaccctcgtccttctgcccctggccgcacacttatgcgcaccatctctttttctgcatggtggatattatatattcattatcctttactagggtgctatgtggtgatcattccaagaagaagcccgggacggacatgtgcgtgggcatgcgggagtcacgatccacgacccagattcatcctgcgggtgctcgcccgacatcgagtggccacgcggactgcctcaagtgtgccgcagtgcagccagtacctggacgagacgtgcacgtgcttcgctcgagagaccgggaagacctactgcaagcgggactacatccggctgttcggccactcaagtgcgccacgtgccaggtgggcttcagcagcagccgaacctgcgtcgatgaggagctgctgggacagcagtgtacccacaatcacgtgctttccgcatgcctccgtgattgcagccagccagctgcatgcctgaggaccgacgcttctcgccttgcagggaagacacgacgctagactcatagccgagccgacacacggaaacatcactggatcagagaacgcgccgcaagcctggaagaccacgcgccaggcacacggaccagctaaccccggcgcacgcaagaactgcactctgccccgaacgcctgggaacaggacccggcaggccagaggatagcggcccaggaaggctgccacaaaaccgaacacggaacaagacccgaccccgcgctgccgggaaccgatactagaaccgagcaaacaaactgtaaagacatcttacggacacgcctaacgccggccaaaaccgaggacacagcacgactcgcaattgacaggcgcaaatggtgctagccaagaaccgtgcatatacccaacgggataacacgaatcttggctaacaaacctcagccgctgccctagacaagaagaaactcatacttccgcaacacaagggaccacaggcacaacgaacaaaccaactaacggacgacaggcagccctgagtaagggaacccacccgcaagcaaccccaagtgacagaagtgcgtgcaacctacacacgcgaatcgacacaggaagga

SEQ ID NO: 674767 - DNA, 867 bp, Homo sapiens
atacaagatctccgcatgatgaaacttcggatcactcctggcgcctgcctgatcctccgaatgcatcataggactatccctaggccatgccactaatcaccagacgcctcaaccgacttttcatcagtcgcccacatcattcgagacgtaaattatggctgaatcatccgctaccttcacgccaatgggcctcaatattctttatctgactcttcctatcgcatctgtcgctgaggcctatattaaggatcatttctctactcatgaaatcctagatcacatcggctataatcctcctgcttgtcaattataggcagcagccttcataggctattgtcctcccgtgagtgccaaatatcattgctgaggatgcctacagtaattaccaacttactatccgccatcccatacgttgggacatgacctagttaaatgaatctgacgagatggctactcagtgagacagtcccatcctcagacgattctttaccttacacttcatcttgcaccttcatttatggcatgtcctagtcagcagtccaactcctattctatgcacgaatagggatcaaacaagcccctaggaatcacctcacatttcgataaaatcacctttcaaccttactacaacaatcaaagacgccctcggtaagttctcgtccttctctcccttcatgatcctaatactgttctcaccagaactcttaggcgaccccgaaattataccctagaccaatcccttaaaaacccttcccaatcaggccgaatgaaattcgtatgagctaccaattgcccgaagcgccctagaacgagaggggctggccatttttcctctcttaataccctcctttttccaaagaaattggc

SEQ ID NO: 674768 - DNA, 141 bp, Homo sapiens
  misc_feature (98)..(98): n is a, c, g, or t
cacatgtgctgagtgaaataagccaggcacagaaagacaaacactgcatgatctcacttacatgtggaacctataaaagctgcccttatacaagtaanagagtcaaatgctggttaccatgggctgggaggagagggactg

SEQ ID NO: 674769 - DNA, 247 bp, Homo sapiens
agtgtcgagcacatggcaggtgctcagtaaaaagttctaaatgggctgggtgtggtggctcatgcctgtaattccagcactttgggagtctgaggtgggtggatcaggaggtcaagaggttgagaccatcctggctaacacagtgagacaccttctccactaaaaatacaaaatattagccgggtgtggtggtgggcgcctgcagtcccagccacttgggaggctgaggcaggagaatggcagggag

SEQ ID NO: 674770 - DNA, 112 bp, Homo sapiens
tacaagtcccgcggtacaccgtctcgatgatgtccaccatctcctgcttgtcttcatggctgatgttggttgtcgtttttaagcccaatgcacagtagcggggccttgtacg

SEQ ID NO: 674771 - DNA, 331 bp, Homo sapiens
caggccccgaacaatcctcatacagatcaataaatcaaaattgccagaataagcattaaaaaaaacttacgttgtcagtaagaaaacaccttcactgcatctttcaaatgcttttcttgctgctggtttagaagcaaattctacaatgcctttcccggtagatcttccacgatcatccacaattacaacagccctttcaataggaccaaactggctaaaggcttcttccacacagttcattggaaacataaggtgaaagatttcgaacagaaagggcagcagcatgtgtggcaaatcgaacccgaagctgtctaccattgtacggggcctg

SEQ ID NO: 674772 - DNA, 159 bp, Homo sapiens
gtagggggggggcactcaccccccgtttttttttgtcgggggggggggtggtttatttttcccagggttttattttccttttgggcttctggaccgtttttttttgtggttttttttgggcgccgggccgggtccccctttgggttttttgggggtgtc

SEQ ID NO: 674773 - DNA, 1446 bp, Homo sapiens
atttgtttattacactttccaataaatttattctgtaaaaacaatacatttttttgtttttggatttttttacagtaaacttttcaactgacagaaccgggaataccgcgaaaagatgttccaagggacaacgcattaacaggattggataaaacccaaactggactaaatgtggttctcacaatataacgctgggctattaataaatcaaataaatatgtctgcttatttatcgccaccaatgagcaacagatatatggtgaccactattacataatgggtttaaagggtatgatattattaacttattctcaattggtgagttcccaaaaggaaacacgagtgtgttatttctcaagagatgtctacaatattttgaaagatgtcaaagcgcgttgggtgcgtgaggtgtctcccctatagagggcgtgagtgagggtggatatcccgagctcttcaacatatgggtgtaagagttatcccaaccttgggagtggcgttaggctcaagaacatctggtgttttggcgccactggggggacaacacaatatcaacatcccattgcgcgccttataatattgcgggggatgtaaaccaccaaaaacaggactcccacttaaactttccaccttttatctagcaaacacttaagtctttggtgtgtgcaccatttaaacacatctttttggacacttttggggagagcacaaggttatcaaacgctgtgttccaaactaaagcataaattttctaaaatacgcggggaaattccgcattctttcttcaccccatttctgggggtgcaaaaaccttttcaacaactttggggggcttcaaaaaagctgggccaggcgacaactctgcaaaatttctgcgctctttcacaatttattaccccaacggtatatggtaatctggagggcaacttcaaattccgcgggggtttcgtggtcaccagcagcgagggacaattctcccatgtttctttaaaggcattaatcggcgtggaacgagggtccttacttaaacaaaactggtctcacattcattattttaacacctcggagtggtcaagaagcaagggggcggggccccagggccggacacaaccgcgaggaaatcccaaactggcgctgggaccacaagggatccctaaacacgtggataacagactggcgcaaaaaaccgtggagaaccacctagagggagaaggaggagcaacaccgggagcgcaaaaacaagctgaactacacagaaacgttactaaaaggcgagcaatagcgatgtcccccccgaaagactaacagagacagaacatcatacgaccaccaccgggggcgattgcacacaaccacacgagcatcgcgggcttacaagccaccagattaacaacaaccagcgcggcacacgaacgaacgcacaccacctagacccaaagagagcat

SEQ ID NO: 674774 - DNA, 136 bp, Homo sapiens
aacattattaaaatggtcaaatgtatgttacatgtatttaccacaataatataaaacatttttaaaaggaagtattatagtgttgaccctattataaaggaggatggcagtcttttagggcattataattaaggat

SEQ ID NO: 674775 - DNA, 1502 bp, Homo sapiens
ggagaactagtctcgagtatttttttttttgttttggaaaaagtcatggaggccagggggtgggcttgaaaccacgcttgggggggttcgattccttcctttttgggtctagaattataagtgttatacgggtttcttcgaaagtggtggtggaaggggtggggggcaatccatcataagtcacctccgagggtaatatggaaggcgtacctctctcatataatataggacactatttcgctatcgaacacgcgaaaaggcgcttcctccaaacattcgagtgcacaactatcttatataacttatctcacgtggcgggttagacagccaaagtgcacagtgcacccttcacgagcagtgtactgagcgaagtgctttaccagtgtgtgcggcgcgtagtgcacaatgcgcggcggatagcctcccaaaagtacacagagtaacgagggagcaacatacacgcgggcaataaagacgccccgcaagaaacaacgcgagcaaccggggggcgacaaaacacaacagctacaacgccatcatacacagccggcgcgaactaacacccagaacagacctacaggaacgaaaaccagagggcaatcatccaggagcaagaccaacacgacaaccagcgcaccacacaccgagcgttgcagtcaaacgaccctgagagaacaacatacagcgcgacgaaaaaaccacaccgagagaacaagcgacacggcacacccgaaccagccacggacagcaaaaaacacaacgcccacaacaaagcacaacaagggaacaacacaccgaccgaaaccaaccaacccacccacgccaagaaacagacaccggttgaaaccacacacgcaccccccacacgcacagcacctcaaacagcgcccaaccaacgcagaggcaacaaacataaccaaagacgccccacacaaaacacaaccccaaccaaccgggcaccaaacgagtcacacagacgagcaacaacaccacccaaggccaccaaacaagcaaaaacccgaccccacaatcacaaccacaacacaaatgcagccgcaaaaaggggccacgaaaaaccaaggccacagacaaaaacaccaaaaagaaacacccgcggaagcgcgaaaaggaaacgcaacaacagcgaacaaacggagcagcaaaaaaaaacgacacccaaaaaaacacagcaacaccaccgcaccacgacaaccaacaaaaggaaagagaaacagaaaccaagactagcagcaagaagcacaggcgacacagaacacaacacacaaacacagaggacgagagaaggcaaccaacacccaagcaagcaacaccctgcgacgaaacaaagagcgaaagcgcgcgcaaccgagacaaccacacgcgagaaagaaaagagcacgcagaggacacagcacaaccaagagggcgaagcaacaaagcgcaccccaaaacgcaacgaaaacacaaaaaacagcagacggccagccggccacaaaaaatca

SEQ ID NO: 674776 - DNA, 198 bp, Homo sapiens
gcagaaagagcttcccctgagcctcaggaatgggtccctattatccagcaggacatacagagccagcggaaggtgaaaccgcagcccccacagagagagcgtcaccctgggatccttgggctgctctcactcccggggtcccagcagggcaaggcctctgattgggaccagtgctgctcttcctcgctgcttactcca

SEQ ID NO: 674777 - DNA, 370 bp, Homo sapiens
tttttttttccagaaatgcttttccttttatttcagaagaaaggacataaaggcagacacttccccctcccctaaaccatgcacagaaacacggacctgaacaaccagcactaggagtgatgaaagagcccagcgctcatgagaacaagcgactgcagataacaaggattgagcctggagctccagaactacatcaatcgttgacctccacaaagtggactaggacatacgaagacgagaacgccaacgcagaagacagataacacctcacccgaaggaacaaggacggactagagagcgtcacaaatgtcggagagaccaaagcgaacgaacaacagacgggcgagacaaggagaacaccactagcccg

SEQ ID NO: 674778 - DNA, 147 bp, Homo sapiens
ggtaccgtttgtcgcgcacgccgataaagccgtgctgcgttgccaacaaggcattgctgaccgcaacgctttacgttcggcggcgggcgattgcgctccctggcgcatgaggctttgaactcggcgcagatcctgagcagataaagt

SEQ ID NO: 674779 - DNA, 130 bp, Homo sapiens
catcggtgacatctgtcacacgtgggcgacgtgcctggcctctgtagcaagacagtgcagcttcaacgctgctcaaaggtcaccaaggtctgccgcgctaccaagaagccagttccagaaagtttctgag

SEQ ID NO: 674780 - DNA, 98 bp, Homo sapiens
gggggggggccccccccggggatttttaacccaagggcggtttttttaggggggggggggggggccccccaaaaaaaccccctttttttttttgggga

SEQ ID NO: 674781 - DNA, 214 bp, Homo sapiens
tgccataatatctggacaagatcgacgtgatcacgcaggctgacatatgtgccgagcgatcaggacctgattcgatgacgtgatctgacttctggaatcttatgagaaccaagttccaggtggacaaaagtcaaactatccacaatgtttgacgtagggtggccagacagcgatgaacgaccgcacagtggactccagatgcttcaaacgaatg

SEQ ID NO: 674782 - DNA, 146 bp, Homo sapiens
ctattggtgtgtccagatgggtctcaatgtctggggctcaagtagtcctcttctcttggcctcccaaagtgctgggattataggcgtgagccaactggtacctggcctaagtacttttttgggggggggggagggagtttcgctct

SEQ ID NO: 674783 - DNA, 903 bp, Homo sapiens
agcggagcgccgcctggcctggcccggacccggtcacggtctctcacgctgctcgtccctatgtgggctgtgtttgtccttgtcccggcggtagtcctgcgccttcccatcgccggaccctggcaacgagacaagacgagcaaagtcttgcagtacggactgccggagagaacgacaaataagagtgctgcctactctcgtgggcaacttttaccagtgttcacatctgtgcacagaatatacgtagaaagagaccagaggatgagaagagtagaagaaaagcaaagttgcactacatccggggcccccatgccatgaagggtggcacttagcggtggacagctttcattaaacgcactatacatgagctagcaagaattctacctgcctagtaactggtttaattatctgcagatcaagttgggtcttcactcaatttcaattctcttctctttgcagtaaactgacagattcagcactttggtaatacttattgcccttaaggtgctatgcctaatcaaaacgtttgtatttttccaatgccttaggagatactggcctacgagccttttccagttacaattacctgaattctttcctatcctgaatgaccgagaactaaaagacttctttctccccgcgcggctgagacctcccgggccattccgggagtcctggactcctttccggggcgggcggccccggttcaagcccatcctttcgcgtggtcccctcttgttgaggaagcggggtgcttcaatatcctccgaggagtgtatgagccggggtcactcagtgggcgtcaattggacgtcgcttgcccctctgcgcggtgtgagccattgggcttattccccgggggcgctccactttccccctcgcgttgattccgccgcgcgcaca

SEQ ID NO: 674784 - DNA, 142 bp, Homo sapiens
ggtttgaatggcctgatagatgacgggctcccctcctggcccctcccagcagtcctgctccacgcagcggcatccctgggcaaaggccctaacataggcctcggtgctgctgggcccgccgatctgtgagtcagtcagatag

SEQ ID NO: 674785 - DNA, 624 bp, Homo sapiens
gcccggccgcggtgctcacgcctgtaatcccagctctcagggaggctaagaggcgggaggataagtggagcccccaggagttccgagacctgctttgggcaaattatagcgagaccccgttcttccagccaaacaaaacgaactaacaaaacaaaacacaaaaacaatcattttttgtggggccgcgacctttcgccccctcggaaaaaacgcttttttagaaaacacaaatctcgttttgggtgggggccggacgggcccacacaatgtagggtaacatagtggaacacaccatgtggcgcaacaaagggctggtgccccaaaaagaggaacaccccctgtggggcaacaagaagaaacaagacgtctggcagagggagatccacccaaccacaaaatataaagagacggcgccgcgagggagaaaacaaccagcgatggtttgtttctgagacacaacctcccacagagcggagagcgctctcgaaggcgaggacaaaaaagggacggaaggaaacataactatacaaaagcgaaggggtgaagcccaccaaagacggaaggcgcccatcataattgatcaagaagatatgcacgccccccgctggcgtcgtgtggagcaga

SEQ ID NO: 674786 - DNA, 144 bp, Homo sapiens
actgatacattcatctaatgtgggatatctagaacacttaactcacttaaaacgtcttccaacagatgtggatgtcctttgaatgcaaagaaaacattcgtacattatttggaagacttttaagtgaagtgattgttccccgct

SEQ ID NO: 674787 - DNA, 169 bp, Homo sapiens
cgtcgaccttctgctctttgtaaacctctactgaagagttaagtatataaaattaattaatgcagaaagtactctatatctcatctaatacttgatgtaatacatattataaactatttatttatttggtaggtacagcttttttatacacaaaaatagattagataaa

SEQ ID NO: 674788 - DNA, 550 bp, Homo sapiens
gattcagaggatccccttcagcacataagtaaatatccacgggggtaaaatataacctaaacttaatatgactttctggaccggcggtaagttagagaatattaatcatataagcaccatttcccggaattgttggtaactacatatttaatcttacggtcactatggtgtaaaatcttggaaaggaaaaggaatacggtgtaatagttaaccccatccataaggtggcattagagtgtcagccaaaggtgtcatacatcaaatctccagcagctttcgcataatccaggagactggattattagttaaggctaatttggccagtgaaaggtagggaaagaaaaaggttggaactttaaatcatccagatagctaaatccttactcctaaaatttaaaccccttaatccggtcggtagtggtaatatcaagacttttggatagtcatggaaacggagtaaaacttaatccagattacttaaaaacagctttcccgggggtgaataccaccttaatttggaccagagtatctaaagcaacaaaagtgcgga

SEQ ID NO: 674789 - DNA, 241 bp, Homo sapiens
  misc_feature (203)..(203): n is a, c, g, or t
  misc_feature (232)..(232): n is a, c, g, or t
ggcggatcacaaggtcgggagattgagaccatcctggctaacacggtggggccctgtctctactaaaaatacaaaaaaaagaaaattagccgggcgcggtggcgggcacctgtggtcccagctgctcgggaggctgaggtgggagaatggcgtgaacccagggaggcggatttgcggttgagccgggatcgtgccatttgcgntccagtcttggggcaacagagcaagattncgtctttca

SEQ ID NO: 674790 - DNA, 838 bp, Homo sapiens
ataggttggtctgaaggcgttccaccgtgatgcagcctggaaacctatgcctgcctctttttatgcatagatcgacattttcgtaaaatgattttctgtgtaccctgaaaaagtgatcagtcttagtttgaacactatgttatttcgagaaagacttgatatgtggtatatggtatcactcatagaagatactcaataataagaaagcaccaaagagaacaaccaaaggaggggcagaaaaaaggaggacaaagagagaagccatatacagagtagcagcaaaaactagacccctgcacagaaaagcacagcaaccgtctgttatgctggtggacacatggcccctcccccgtggcaggagcttgggacctaatccaagcatcccttgcccagaaagaagatgggggaggaggcagtaataaaagagatggaagtatttgctggaataagttcaaattcttctgaactcaaaactgaggaatttcacctgtaaacctgagtcgtacagaaagctgcctggtatatccaaaagctttttattcctcctgctcatattgtgattctgccttggggacttttcttaaaccttcagttatgatttttttttcatacacttatgggaactcttgctttgattttgggcctcttccagtcttcctgacaactttaattaccaacctgttacctacttgtgacttttgcatttaaaacagacactggcatgggatatagttttacttttaaactgtgtacataactggaaaatgtgctatactgcatacttttaaatgtcaagatatttaatctttatatgagaaatccttaggaaaggctttgg

SEQ ID NO: 674791 - DNA, 192 bp, Homo sapiens
ccagtcgtttctaccatggaacagtgtatgtttaagaattagcagaatatcttagctcattattagactgtagctatagaaaagctctttgaaatcttatcacttgagtatcagatgtatgtgagaaagcatatggaagtattttcataaactgtaaaggtattatataaatgttattatggagaaccgact

SEQ ID NO: 674792 - DNA, 252 bp, Homo sapiens
ggcccccccgggcccccttgggggggtgggggggggaaagggggttccccccaagggggggggttggggggggccgatttggggccccgccccccccggggggggggggggggggaaccccgtttccaaaaaaaaaaaaaaaacttggggggggggggcccttttgttttttgaaaaaaacccccccccaccccccggggggttaagggggggggattttcccaaaagggaaggggttggggccggggtcca

SEQ ID NO: 674793 - DNA, 197 bp, Homo sapiens
atagagacagggtcttgttaggttggccaggttggtcttcaactcttggtctcaagcagtcctcctgcctcagcctcctaaagtgctaggatcacaggcataagccaccatgcccagcctctttcttccctcccctcccctcttttccctttcttcttctcttcccttcccttctgtcgtcttataacagccgtata

SEQ ID NO: 674794 - DNA, 338 bp, Homo sapiens
taatcgttgaacaaacagctttaatagcggctgcaccatcgggatgtcctgatccaatcattgagatcgtaaacctctatgttgatatggactctagaataggattgcgctgtaatccctagggtaacttgtaccgtaggtcaagttattggatcaattgagtatagtagttcgctttgtctggtgaagtcttagcatgtactgctcggaggtaggagtactgctctcgagatcgcgccaaccgaaatctagactgcaggtgtagtagtttaggacctgagggtttgaagggtactgttagcattaactaaattagagctccatagcgtcttctcgtc

SEQ ID NO: 674795 - DNA, 824 bp, Homo sapiens
agtccgcggaggtgtggtagaacaccgaggggtatatgtcctggaggctgcttttctacgacggggtgcttccccccccccggatagtgttatagaatggcgggttttcttggaaaaactggtcttggcaggggacccacattggtcctctggtgtttcgtcgcggcaccgatgtgggtgggcggagccctagggtttatgataggacctaccgcatcctgggggggtgccccctccctcagcccccggcaacccccgggtgcggggcgaaccccaccaacccaaccccaccagacggcgtaggttgtctccccaaccgcagtcctttgggtaaagatccgcgttacgcccgacctcgtagtggcccgcctgtctttgtgaaaagatattcgtccgaccgcgctggggatgtcagcccggtcttctgaggcgttgcaattctcacgtcctccttccttggttctcacaagagaacgggcatttgtgttccccctggggttcatctacagccccgtcgcgctatctaacgccgcggaacccactatataccgtcgtccgaaatcaacacttttcttactaacagagaggaacactcaccaactccctgattacccccacgtattatccacacaatccgctgtgttatcccccatgacccacgaagagatcacccacctggttgttatttggcacattttaattcccccttgtcactccatcctggtaataaacacgtccacagtttcaccgagaatgaagacaacaaaagcccctttttagtccacccaggacccaaaaacaaaatttttaaagcccacataaca

SEQ ID NO: 674796 - DNA, 246 bp, Homo sapiens
ccacgtcagtgattataagggcgttgtgttagctagttggcagcgtagagttactttggcacagacatttgggagtgtgttttgggggccagagccatagctccaaaaaaaaaaaaaagggttcaaaaattttttagatttctcaaatttgaggccaggaggaaaaacctcaaaaattccaaagggaaatttatttttttgaaaaattattgtcagactccaaaatttgatgaccccttctccatt

SEQ ID NO: 674797 - DNA, 679 bp, Homo sapiens
gtcgcaatgcaccatgaaagcttttgtgaagctcttcctggggacaatgtgggctttaatgttatgattgtgtctgtcacggctcctcgttgtggcaaagttgctgtggacagcgaaaatgatccaccaatgttagcagctggctttacttgctcaggtgatgatcctggaccatccaggtcaaataagcgccgcctatgcccctgtattgtattagcacacggcttacaatgtatggaagtctttctgagctgccccaaaagtacggttcgctgttttcttagcttcaaagttctccctaattttttggggtcctataatgctgccatatcctctttgccacctggcatgtcctacttttccaagaggctaacacactttccccccttttggtcactccaatacgctccgatgctcgcctatccttttgccctccctcccctcaggcccgtcatctttcccctgaaccacttctttgaattccctatcgccactccgaaccctaattcctccttgctttttttcttactttctcgcctcctcaattcccttccacttaccgcgacaggctcgctccctatcattccctttattctctactctccgtcaccgcgcatacaacaccctctcctctcgtcgccccccctgctcccatctacacccctcctccacttccccc

SEQ ID NO: 674798 - DNA, 176 bp, Homo sapiens
caaaaaaatcgtatcgtgggagaagacgatggcgaaaaagcttgaacagatcgaagccgatgcgcaggaaatttgatcgcagcggaattgatccgcctgggggcgcggatgcagctgctggaagcggaggtggtgctgagccgcgatcggctgatgaagctctacaagcaagtgcg

SEQ ID NO: 674799 - DNA, 1025 bp, Homo sapiens
  misc_feature (251)..(251): n is a, c, g, or t
caagctgggctgcagagcatctgtttttctgctctccagtttcttttctttttattgttttatttttttggacattggacccgtggtgcactcaacgcgcgaactgtgggctcctccaaacaacatagcaaacgacacgcaaaaaagttcacacttacacacacactcctggcgtcaaccgggcacactactccttctctgctagttctctctacacgtcctaacgtcgtccgccacgctatcaataaganacacagtgtcgttccccccaagcctctgtgcgcgcgacacacatcctagcatgctgccgcacaacaccgtcgtgagtccaccccgcgacaaggtggccgagcggagcaacaaacattataccaatatcacacatcaacaacgccgagcgactccacaacacacccttcaacaactctactcacacacacagaacactatcacaacatatactacacctctctcacccacaactataaataatatcatctaatcgccgctctaacagaccagccccctacatctcatcatctcagaaacgacaacacatttgtaggatatctctcacgtgtatcacacatatctataataacactacgacctgccgcgccgaccaaccacgataaagcgtctctacctccaacaaaacagaccacctcttcacaccacacacacacccgacaccttaatttcttcttcacaccataacaccaacataacacacacatacttcaagtcgacatagtcctcataccaccaacattcttcatctaatcatcctcccccacaccgcaacacacataatatatcatcatatactactactactactatactaatactcatcattatcccctgctcgtgcccacacacacacaagcagaccacctctctctcctctcacactacaatagattcaacaccaacttaagacatgcacgtcagcgatgactactacctaaacaaacagactgacgtctacacccaacactcgttgagacctacacccaaatatg

SEQ ID NO: 674800 - DNA, 148 bp, Homo sapiens
agactctagagtatccctgcacttccataccagacattaggcagcccggcgtgaagatgttggagccaggagcactgctttgggcgagttggctccttatccgacgaggcccccagtttaaccatctctacactgcagagttggactc

SEQ ID NO: 674801 - DNA, 158 bp, Homo sapiens
agctggaactatcggctaaagggtctctaccacatagtagggtctctaccacataggatatctacgtaaacaggataaaacagtaggactacatataccaatatatcacgggcctacgaaaaagagtacctagtaatatagtatataattaaccgtac

SEQ ID NO: 674802 - DNA, 274 bp, Homo sapiens
  misc_feature (35)..(35): n is a, c, g, or t
atgacagcacgggatgtgtggacacataagcacantatgaacatttgtcctatagtagaaagcagagaacagagaactcctccaatttatctttgtatcaatgtggttctataaaaaataccagatggtttaaacttaattatttcatggagggattaataaagggactaattttaaagatatgaggagtatatatatagaaaacacaatatacactggagcttctcttggggacataaccgatgcgtggcgcgatcctcatagagttcgacct

SEQ ID NO: 674803 - DNA, 383 bp, Homo sapiens
atttgaggctggttttgatggctgggtccttgggcctggccagtcttcctcttagcctctggatttaaaagggaccataaaaggagtaggccctggttccttctgttctggtggctgggcccaacaggggccctcactctttaagtccaggactgggtcttacctggtgggagcccccgccaaaggatgctctttcccaggacggatgggccctgtgtttcaagagtggggttgggggacagccttcaacagcagctcaccccctaccttccccaaacttgcactggggtgggatttggagtgatgggaaggtttttaagggccggggatggatcttttttaaatgttattacttgtaaataaagtctatttttttcccgtga

SEQ ID NO: 674804 - DNA, 1211 bp, Homo sapiens
gtcctcagtttcccaagtagctgggattacagttccttcctcagcagatcacctatgggcatggcttgtggcagacctgttccactcctatgtaggcagctcaccgcagaaccccgctgtactcgaagattcacgacgcctcatacgtgtaagatgaaaacagcctatccacttacaaccaagcatttctcccatcctggcattcccactcctgcaccctggctcccaggccctgtgcagctccaatgcccccgtcttctgccaggccccgcacgcccccaccactctgccagcgccctctccaccgccccccacgctactgcccctgcatccgctccctctccgccccatcacatgcacctgacccggcccctcctcgcctctctgcgcatctctcccacctcaccactactactctctacccacacccaccacccttcccccctacaatactactcacctccacccctctccccctcccgacaccctccctgctcaccgctcccccccccgacctcgtcccgctctccccgcccctccctccctctctctcctgcccccacacctgcctcctaccccacgctctcacgggccacctacctgatcaggcaacctccccctgcggcacacttcaccgcggtcttctgccccacctcctgctctcacccgctacctttcacaaccccccctggcctaccaacttcgcaagcgccacttccgcaacctaaacgcaactggcgccggaacaccaccccagcaccgaaacccaccacctcccacttcaccacaaactcgcttcgcactacgctcacccgcttaatccccttacccttaaaaaacaccccgctcacaccgtccacaactctcattcctcctctcgcactccttcacctaactcactccactcaccctcccactccacccctacttaccttcaccccctacttcgtctccaccacaccacactactcccaccaccccacctccgctcctccccctcctctcaccaccgctctcacccccgcgcaccgcgcacttcgcccactccccacccctccacctcccataccccgcaccgccaccaccccgtccccggaccacacgccccgcgccacccgactccactctgccctcctaccccgccccccacagcccacccaccaccaccctccgacccaccacaccccccctgccccccacctccctcgccc

SEQ ID NO: 674805 - DNA, 110 bp, Homo sapiens
agttcgacggagactctcgacatcgtgctctgcgtgctggatgtcgagagtggcaacatctctgtgcttgagggggtccctgagaatgtgtcccctggacaggcattttg

SEQ ID NO: 674806 - DNA, 174 bp, Homo sapiens
gcgcaaatagacaggaatatgagtttacatacgctaacggcccaaatgtgagctgtttaaacagccaaaccactaagtgtcattaatactttagggcagtggagggatggcttatttgtattgtgtaatttttatcactatatgtagtggtagatgtctaattggacttagaca

SEQ ID NO: 674807 - DNA, 107 bp, Homo sapiens
cagctggagaccagtggcatcatcctgcttctcgagctgcaccatccagtgtgcagtcaccagccccagggctgtttacacagttaactcacagttcagtgcctcag

SEQ ID NO: 674808 - DNA, 658 bp, Homo sapiens
ggtgatcacaccactgcactcctggactcaagccaccctcccacttcagcccccatcgctacaaaatattttaaaaattagccaggtgtggtggcttgtgcttgttgtcccggctacttgggaggctgaagtgggagggtggcttgagtccaggagtgcacctgcatcgtgatcatgctgaatgcacaccacatgcgctccagcctggacgacaggagatgagacgggccaatctctaaaagacacggcacgctccacaaaaggcatgccatcaattgtcccaactgtggccacccttgtggggctttgcaagtacttgtccccctcactggaactagtcacctttctagtttcttcgggttcaaacaaactcccccttatactacccgcgctttcgaacccgctcgaacctctatgcagcacaaatcaaaatgcggctcaattcattatctgagctggggggcccatcccctgttgaagtctatagggcgtcaccaacacgtataaaaagcccccgggtgctccacattctggaccttcaaatcacacaatcgttggagcggccacgactaccaattaaacacatcacctctctccccccatgcagtgacggaatagcacaatacattcactctttgaccacagcacaacacacaaa

SEQ ID NO: 674809 - DNA, 116 bp, Homo sapiens
tccagtgacttccatgtcagctcccaaagtgctgggcactacagtttgagccaccacgccagtcctcaggatgttatagattctctataaatcatttatagagaatgctctagatt

SEQ ID NO: 674810 - DNA, 558 bp, Homo sapiens
gtgagagctccctggagagttccctgagagagctcggaatcttcctcttctccacaacacactagagggggtagtagttttgtgtagagtttctatccccatctatgaattataaactgcagaggtgcacttagtggtagacaaggtagactttgatttgatatgtgtggcatgtaagcacgtttagattacaacaagtactatgcttgcagagacctcatgggctatgacagaagagggagacctggagaccgttacgacggcatggtaagaactttggtttattaccagtgtgttgggtatgtgagggttgtcacaatgtagttcacgttttgttgaaggttatcgtgattaaaaagtttttcttacaagtaaattttgtttggattactagttaaataattctgttatttgctgctggaggattacgactttattgagcttggtcccctcgattacaaatagtggctatatattgtacctcttttgtttactgtacatgcaattaggctattaaaacactctgccaagggggggtacgagctcgaatcgtatcat

SEQ ID NO: 674811 - DNA, 323 bp, Homo sapiens
attattttgttggttgtaatctcaacagtctctgtactgctagagtctatatgctcatgggccatagctgtctgctgttttccttggacggcttcctctagtccactcatggaagctgtctcattgccatgggctaagattgtccaattgtggctttcccccatacctcatggctgggccatggcaatggaagctgtgccattgttcccttagaggattctgtccagccacccagcttatattcatttccattcagcatctcacccgagcgtagcttaatgtgtctggtttccatcccaagcatcatatagttcagcgtctga

SEQ ID NO: 674812 - DNA, 329 bp, Homo sapiens
  misc_feature (56)..(56): n is a, c, g, or t
caaaacgatcccctcggccaacccaacagtttttcccacccccccggggtcggaantaataggaaaaaactttttgtgaaaaaacgagccagtggctgaaaccccctggtggaaacctgttgccagaccttcccctttttcttcagaataaggagctgtggggggtatttttttttgaagaaaaaaaaaaccgattttagggggggaaaaaccgtccactcccccaaagaatgggaaaaaattctgggtttaatttagccaaaacctttttcaagggaaaggaagaattttttttttgccggccataaaacccttggggtttttttgga

SEQ ID NO: 674813 - DNA, 345 bp, Homo sapiens
cgactacatacttccgaattgctaaataatataaaattcattctgctggcatttgtgaggaggctaaggtaactgtatctgggaaactaacatgccatgttgacttctgattaaccccagttctgggaatgcctctaagatttccaatttatctactgtttctggagtaatggcacatacttacagtaaatcctgcccttacatcaaattcctacctattccttccgaagcatgtgtgccctttccttagatataatccctgggtctggggtataatggcatggagatctatccgtcttgcagttgccaaaaaccacgcttctgtctgtcagttccccaataaaa

SEQ ID NO: 674814 - DNA, 351 bp, Homo sapiens
tacaggactccgccagtagtcaagatcgatgcactgcactgtagcctggggcgcacagtgagactccgtcatatatatatatatagcacttcattacccagagggcctcttgggcctgttgaaaaatgaaacccaatatttggaaattaaatccagagtttaaacgcagctatttgtggaagagctgccattagggtagaaagtatccaacaatgtaccaaaagcaaagttgtatgggcagtagcagtgtgaaggtaggcatttaagcagccagcactgccccaaatataaacttcctcataatgcaaaatgttctcataatgtcatgttgccccagtacaagtagcccac

SEQ ID NO: 674815 - DNA, 1538 bp, Homo sapiens
accatagcgatcgcaccgaatgaatccttctaagggctctccagctctactgagatcacactaatctggcactctagtaaaaaagctaacgatcagaggtggtcacatggtccttggcgctgtggttgcagagaaggtctcgaccggaacccttgatattccggataactaggccttgttcgagacgcgcgcgtggcattctgaacatatgtcctcagctcgctaacgctctgatatctcataccactagtaacaaagcgatctagttaagtcaacgaagcgaccgactcctcgctcgtacacaggccaagcgtgaggcttgggcacttggcagcagtaaggtagtaacgtccagacgaatctccaagccacgatcagcaccggactgacaactcaaaaagtccaatgtgtctcactaccacacagggcacctgagagacggtgcaaccagccgcaggtcaatgagtcccctagatgggggctgaggcgttctagcggtccgtagatttgaccttatatcatagtcccttatgatatcatctcgacagaccataccaggacaaccgtctgcatcgacccatgttgccgccgactaccagtcacatttccttcctagctttggcgaacgcgaaatttctacgggaaacccttccctcaaagttcgcgcgagcgttagagtcagatcgtctccaagggcagtccggataatctccctcaaaggccaaagggctcgtggcggccataaaaagcccatcaaaacacttttggccgcgcgcgcaaagcctaagtaatgaaaccgcccctaatctttgagtacgtacatcacatcgtgccattctgtcctacgcacattgaacgctaatttgaacgaccaggtcactttccgcggtagcgatgcggacagtaggttacttcggactttccgttcgcagtatcgtgtaactcgggggaaaggcatccaaaacggagtaaaccaatattagttgaacccccgacgcacgttgagataacgcgaccgcaccgtcaaacaccggttgatttccttcacacggacaatagccaatgagccctgggcagggcccttcccaagttacacagacccgccacaagaaacaagattatacatccaaattctatctttggaaaaacccaccgtaccgagtttcttagctgagcacggagttaacacacaatgtgaagcggcgcggtccgcaaattggattcaccggaaacagcacagtccctttttacttagacccccttggaatgtgaactatccacgggtgccccagttagactgctggcgcgtccataaggcaattaccggaaattccgggatacggattgtgttacccgcaagcgtgaggtattaaatagccccttccgtgtgtgatattgcagcaagacaacaaacacattacaaaacgacgggtcattgttaaaacccgctgtgtcacaataacgacacagaatagacagacaacctcaaaaaggtggtggcggcgcgccacagggcagttatatacagagagataatt

SEQ ID NO: 674816 - DNA, 387 bp, Homo sapiens
agcgggtcgcggcggcgagagcgcgattccagaagcggcatcgcggcggcggcagcggcggcggctacaccgggcttggccaaaaccaaaggaacaaaccaacgacatgccctcaccaggaggcagcaaacagaacaagaacgcaacgcacaaaagacagcgcgcgggcgaccagacacacaaaaagtgaaaaaacaggacgcccgcaggcaacccacaactgcacgcgagagccaaagcgcataagagacagccgacaccagaacatagcacgactacaaaagggcccccgagagccaagacctaagtgaccccacagaccacacaaaaaatacagaaaactagcagaagcaaagcaagcacacccatacgacaaggcctgaaacg

SEQ ID NO: 674817 - DNA, 993 bp, Homo sapiens
  misc_feature (292)..(292): n is a, c, g, or t
ggagaactagtctcgagttgtttttgagattttttaaaggatctcttaagaagtttattataacccagttctcataggccacaaggaaaataaagggactatgtacagccttacgggaaacaggcagggagctgaggagggccaaaatgagcctagggccttggtggggcgcattcccgggggagggggccctgtaaagggaaaccagagaatcccatgagactccacgaacaagcagctataagaaaacaaacaggtactgcaggaaacgatggccctgaaggaactcaangcaccagggccatcgtggaggagcataaattaccaataccctcgtggtgagcccaagggctcaaaaagaaggccatcaggaattccccaagggcgagagagagcgccagaatattccccgagatgggggacatgccccaatatggagatgtacaccataaataacacaaggggagataatcacccaatatgggtgagaccccaaaaagagaaggtgcatacatacccaaggaaggttggaacccaaataaaatacgaccttgaaagagcgggtagcaacccacacgagacacccaaataagggatggaggtaaaagagaacaccccacaaggagaccaagagagagagaaaaaaccgaggggaatcggcgaaagccccccagagcaaaacaaacaacgtgggcatggtatcgaacaaagcaaaagaatggcaaacaaaggcgagatgaaacacagaagaaaacaataaaagaccaataataaaagagagaggaaaaaacaacaaccccgatgatagacaagaagaaaagtgacgccccggaagcaaagccacccaaagaggaacacactggtgcccccaaaagaaaaaagacatcccgatgaaacgagaaagacccactggagggaaccaatgggagacacacaccgcaagcaacgtggggaggaaaaatacgagcggagccccaagagcgagagacccac

SEQ ID NO: 674818 - DNA, 120 bp, Homo sapiens
cttctgcgcttcctgcttctgccgcttcctgcttctgccttcactttctccctcctcttcctcctcttcttcacgtttcttcatcttcttcttcctcttcttcctcctcctcctcctctt

SEQ ID NO: 674819 - DNA, 2655 bp, Homo sapiens
cggcagggttggaaaatgatggaagaggcggaggtggaggcgaccgagtgctgagaggaacctgcggaatcggccgagatggggtctggcgcgcgctttccctcggggacccttcgtgtccggtggttgctgttgcttggcctggtgggcccagtcctcggtgcggcgcggccaggctttcaacagacctcacatctttcttcttatgaaattataactccttggagattaactagagaaagaagagaagcccctaggccctattcaaaacaagtatcttatgttattcaggctgaaggaaaagagcatattattcacttggaaaggaacaaagaccttttgcctgaagattttgtggtttatacttacaacaaggaagggactttaatcactgaccatcccaatatacagaatcattgtcattatcggggctatgtggagggagttcataattcatccattgctcttagcgactgttttggactcagaggattgctgcatttagagaatgcgagttatgggattgaacccctgcagaacagctctcattttgagcacatcatttatcgaatggatgatgtctacaaagagcctctgaaatgtggagtttccaacaaggatatagagaaagaaactgcaaaggatgaagaggaagagcctcccagcatgactcagctacttcgaagaagaagagctgtcttgccacagacccggtatgtggagctgttcattgtcgtagacaaggaaaggtatgacatgatgggaagaaatcagactgctgtgagagaagagatgattctcctggcaaactacttggatagtatgtatattatgttaaatattcgaattgtgctagttggactggagatttggaccaatggaaacctgatcaacatagttgggggtgctggtgatgtgctggggaacttcgtgcagtggcgggaaaagtttcttatcacacgtcggagacatgacagtgcacagctagttctaaagaaaggttttggtggaactgcaggaatggcatttgtgggaacagtgtgttcaaggagccacgcaggcgggattaatgtgtttggacaaatcactgtggagacatttgcttccattgttgctcatgaattgggtcataatcttggaatgaatcacgatgatgggagagattgttcctgtggagcaaagagctgcatcatgaattcaggagcatcgggttccagaaactttagcagttgcagtgcagaggactttgagaagttaactttaaataaaggaggaaactgccttcttaatattccaaagcctgatgaagcctatagtgctccctcctgtggtaataagttggtggacgctggggaagagtgtgactgtggtactccaaaggaatgtgaattggacccttgctgcgaaggaagtacctgtaagcttaaatcatttgctgagtgtgcatatggtgactgttgtaaagactgtcggttccttccaggaggtactttatgccgaggaaaaaccagtgagtgtgatgttccagagtactgcaatggttcttctcagttctgtcagccagatgtttttattcagaatggatatccttgccagaataacaaagcctattgctacaacggcatgtgccagtattatgatgctcaatgtcaagtcatctttggctcaaaagccaaggctgcccccaaagattgtttcattgaagtgaattctaaaggtgacagatttggcaattgtggtttctctggcaatgaatacaagaagtgtgccactgggaatgctttgtgtggaaagcttcagtgtgagaatgtacaagagatacctgtatttggaattgtgcctgctattattcaaacgcctagtcgaggcaccaaatgttggggtgtggatttccagctaggatcagatgttccagatcctgggatggttaacgaaggcacaaaatgtggtgctggaaagatctgtagaaacttccagtgtgtagatgcttctgttctgaattatgactgtgatgttcagaaaaagtgtcatggacatggggtatgtaatagcaataagaattgtcactgtgaaaatggctgggctcccccaaattgtgagactaaaggatacggaggaagtgtggacagtggacctacatacaatgaaatgaatactgcattgagggacggacttctggtcttcttcttcctaattgttccccttattgtctgtgctatttttatcttcatcaagagggatcaactgtggagaagctacttcagaaagaagagatcacaaacatatgagtcagatggcaaaaatcaagcaaacccttctagacagccggggagtgttcctcgacatgtttctccagtgacacctcccagagaagttcctatatatgcaaacagatttgcagtaccaacctatgcagccaagcaacctcagcagttcccatcaaggccacctccaccacaaccgaaagtatcatctcagggaaacttaattcctgcccgtcctccaacaatggggaccagatttaagcatgagacgaaaacaccctcacccagacccacctccaacactggggaccagatttcagcatgagacccaaacacctgcatccagccccacctcaaccactaggaaccagatttcggcatgagacccaaa

SEQ ID NO: 674820 - DNA, 230 bp, Homo sapiens
ccccccgggccccctttttattggggacttgttggttaaaggagctctttttgcagggtggaagccccagggaattaattccccccgtcaaccaatgggatccaaaaaggggatggggggtccatacaaccttttccccccccccatttttttttgtcctaaaaatgttttccctttgggggtttttgagttggagcctttataaaaaaggggtaaatgttggaactgca

SEQ ID NO: 674821 - DNA, 151 bp, Homo sapiens
ttttttcccccccccccccttagggtaaaacttttaataaaaggtgggagggaaagaaattagggggaaaaaaagggctttattttttttttccattttaaggggtagggggaaatccccaaaagggcttgctttcctaaaaagctgtgga

SEQ ID NO: 674822 - DNA, 2506 bp, Homo sapiens
cggcagggttggaaaatgatggaagaggcggaggtggaggcgaccgagtgctgagaggaacctgcggaatcggccgagatggggtctggcgcgcgctttccctcggggacccttcgtgtccggtggttgctgttgcttggcctggtgggcccagtcctcggtgcggcgcggccaggctttcaacagacctcacatctttcttcttatgaaattataactccttggagattaactagagaaagaagagaagcccctaggccctattcaaaacaagtatcttatgttattcaggctgaaggaaaagagcatattattcacttggaaaggaacaaagaccttttgcctgaagattttgtggtttatacttacaacaaggaagggactttaatcactgaccatcccaatatacagaatcattgtcattatcggggctatgtggagggagttcataattcatccattgctcttagcgactgttttggactcagaggattgctgcatttagagaatgcgagttatgggattgaacccctgcagaacagctctcattttgagcacatcatttatcgaatggatgatgtctacaaagagcctctgaaatgtggagtttccaacaaggatatagagaaagaaactgcaaaggatgaagaggaagagcctcccagcatgactcagctacttcgaagaagaagagctgtcttgccacagacccggtatgtggagctgttcattgtcgtagacaaggaaaggtatgacatgatgggaagaaatcagactgctgtgagagaagagatgattctcctggcaaactacttggatagtatgtatattatgttaaatattcgaattgtgctagttggactggagatttggaccaatggaaacctgatcaacatagttgggggtgctggtgatgtgctggggaacttcgtgcagtggcgggaaaagtttcttatcacacgtcggagacatgacagtgcacagctagttctaaagaaaggttttggtggaactgcaggaatggcatttgtgggaacagtgtgttcaaggagccacgcaggcgggattaatgtgtttggacaaatcactgtggagacatttgcttccattgttgctcatgaattgggtcataatcttggaatgaatcacgatgatgggagagattgttcctgtggagcaaagagctgcatcatgaattcaggagcatcgggttccagaaactttagcagttgcagtgcagaggactttgagaagttaactttaaataaaggaggaaactgccttcttaatattccaaagcctgatgaagcctatagtgctccctcctgtggtaataagttggtggacgctggggaagagtgtgactgtggtactccaaaggaatgtgaattggacccttgctgcgaaggaagtacctgtaagcttaaatcatttgctgagtgtgcatatggtgactgttgtaaagactgtcggttccttccaggaggtactttatgccgaggaaaaaccagtgagtgtgatgttccagagtactgcaatggttcttctcagttctgtcagccagatgtttttattcagaatggatatccttgccagaataacaaagcctattgctacaacggcatgtgccagtattatgatgctcaatgtcaagtcatctttggctcaaaagccaaggctgcccccaaagattgtttcattgaagtgaattctaaaggtgacagatttggcaattgtggtttctctggcaatgaatacaagaagtgtgccactgggaatgctttgtgtggaaagcttcagtgtgagaatgtacaagagatacctgtatttggaattgtgcctgctattattcaaacgcctagtcgaggcaccaaatgttggggtgtggatttccagctaggatcagatgttccagatcctgggatggttaacgaaggcacaaaatgtggtgctggaaagatctgtagaaacttccagtgtgtagatgcttctgttctgaattatgactgtgatgttcagaaaaagtgtcatggacatggggtatgtaatagcaataagaattgtcactgtgaaaatggctgggctcccccaaattgtgagactaaaggatacggaggaagtgtggacagtggacctacatacaatgaaatgaatactgcattgagggacggacttctggtcttcttcttcctaattgttccccttattgtctgtgctatttttatcttcatcaagagggatcaactgtggagaagctacttcagaaagaagagatcacaaacatatgagtcagatggcaaaaatcaagcaaacccttctagacagccggggagtgttcctcgacatgtttctccagtgacacctcccagagaagttcctatatatgcaaacagatttgcagtaccaacctatgcagccaagcaacctcagcagttcccatcaaggcacctccaccacacagaagtatattcagagaaccgtcaattcagggatcctcaaggtagcc

SEQ ID NO: 674823 - DNA, 2334 bp, Homo sapiens
cggcagggttggaaaatgatggaagaggcggaggtggaggcgaccgagtgctgagaggaacctgcggaatcggccgagatggggtctggcgcgcgctttccctcggggacccttcgtgtccggtggttgctgttgcttggcctggtgggcccagtcctcggtgcggcgcggccaggctttcaacagacctcacatctttcttcttatgaaattataactccttggagattaactagagaaagaagagaagcccctaggccctattcaaaacaagtatcttatgttattcaggctgaaggaaaagagcatattattcacttggaaaggaacaaagaccttttgcctgaagattttgtggtttatacttacaacaaggaagggactttaatcactgaccatcccaatatacagaatcattgtcattatcggggctatgtggagggagttcataattcatccattgctcttagcgactgttttggactcagaggattgctgcatttagagaatgcgagttatgggattgaacccctgcagaacagctctcattttgagcacatcatttatcgaatggatgatgtctacaaagagcctctgaaatgtggagtttccaacaaggatatagagaaagaaactgcaaaggatgaagaggaagagcctcccagcatgactcagctacttcgaagaagaagagctgtcttgccacagacccggtatgtggagctgttcattgtcgtagacaaggaaaggtatgacatgatgggaagaaatcagactgctgtgagagaagagatgattctcctggcaaactacttggatagtatgtatattatgttaaatattcgaattgtgctagttggactggagatttggaccaatggaaacctgatcaacatagttgggggtgctggtgatgtgctggggaacttcgtgcagtggcgggaaaagtttcttatcacacgtcggagacatgacagtgcacagctagttctaaagaaaggttttggtggaactgcaggaatggcatttgtgggaacagtgtgttcaaggagccacgcaggcgggattaatgtgtttggacaaatcactgtggagacatttgcttccattgttgctcatgaattgggtcataatcttggaatgaatcacgatgatgggagagattgttcctgtggagcaaagagctgcatcatgaattcaggagcatcgggttccagaaactttagcagttgcagtgcagaggactttgagaagttaactttaaataaaggaggaaactgccttcttaatattccaaagcctgatgaagcctatagtgctccctcctgtggtaataagttggtggacgctggggaagagtgtgactgtggtactccaaaggaatgtgaattggacccttgctgcgaaggaagtacctgtaagcttaaatcatttgctgagtgtgcatatggtgactgttgtaaagactgtcggttccttccaggaggtactttatgccgaggaaaaaccagtgagtgtgatgttccagagtactgcaatggttcttctcagttctgtcagccagatgtttttattcagaatggatatccttgccagaataacaaagcctattgctacaacggcatgtgccagtattatgatgctcaatgtcaagtcatctttggctcaaaagccaaggctgcccccaaagattgtttcattgaagtgaattctaaaggtgacagatttggcaattgtggtttctctggcaatgaatacaagaagtgtgccactgggaatgctttgtgtggaaagcttcagtgtgagaatgtacaagagatacctgtatttggaattgtgcctgctattattcaaacgcctagtcgaggcaccaaatgttggggtgtggatttccagctaggatcagatgttccagatcctgggatggttaacgaaggcacaaaatgtggtgctggaaagatctgtagaaacttccagtgtgtagatgcttctgttctgaattatgactgtgatgttcagaaaaagtgtcatggacatggggtatgtaatagcaataagaattgtcactgtgaaaatggctgggctcccccaaattgtgagactaaaggatacggaggaagtgtggacagtggacctacatacaatggcaagtaatatagaagaaaattagtgtgatctcccagtggcccaaggcataaattgggcatcctcgtacctctccctcacttcccacatcagtatacatttaattatgttgattcagcctcctaaattccttgtgactgtttccatttttctcatccccatttatatttcaatttctcattcttggga

SEQ ID NO: 674824 - DNA, 543 bp, Homo sapiens
  misc_feature (149)..(149): n is a, c, g, or t
  misc_feature (153)..(153): n is a, c, g, or t
  misc_feature (165)..(165): n is a, c, g, or t
  misc_feature (205)..(205): n is a, c, g, or t
  misc_feature (232)..(232): n is a, c, g, or t
  misc_feature (395)..(395): n is a, c, g, or t
  misc_feature (397)..(397): n is a, c, g, or t
  misc_feature (400)..(400): n is a, c, g, or t
  misc_feature (417)..(417): n is a, c, g, or t
  misc_feature (429)..(429): n is a, c, g, or t
  misc_feature (455)..(455): n is a, c, g, or t
  misc_feature (468)..(468): n is a, c, g, or t
  misc_feature (476)..(476): n is a, c, g, or t
  misc_feature (484)..(484): n is a, c, g, or t
  misc_feature (501)..(501): n is a, c, g, or t
cagtgaaacagcatgacaaattaagacatctatgcaatgctggagatagaatcttaccaaacctaatcaagaacacattaatggagaagtataggcctggctacagaaagaacagcaaagaggaaaaaaaaaaaaaaaaaaaaacacangganaacaaaaacagntgcttcaatggaggcggtccaggcggtggaggagctgcgnaagctgaagcggggctgaaagggtcanacaaagctaagctgtcatgcaggaaaacaccaggagctcagtgatacttgagctttatttgagacctaaatttctatgtccataaataaccttttttgggagcacaaccacacccactcatttatgcacggtctatggctactgtgttcaacctgtgcagttnantanctgctatggaggtcacntgactggcaaanccttaagtagctactatcttgtcctnaatggggtctgtngactgacncctgcttnaaagagctgtggggacntcacatactttatcttatttaatcttcacaacaatcttttgc

SEQ ID NO: 674825 - DNA, 167 bp, Homo sapiens
  misc_feature (161)..(161): n is a, c, g, or t
cagaggggagagatagtcggagcagtcaggcatgttgtagccgaaggcgaggatggtccaggtggtctcgtgcggcggctggatgaagagcgtgttcaggaagaggaaacctgcacgagacaaagcagggggagcaccaggcacagccccctacccaaaancacctg

SEQ ID NO: 674826 - DNA, 151 bp, Homo sapiens
gtttgggtgctctgaggatcccccccgactagcccgacaggccaagagaaggcagggggagggaggaagaggagaaatagaaagagaggaaggaaggaaggaaggaaggaaggaaggaaggaaggaaggaaggaaggaaggttggttagtt

SEQ ID NO: 674827 - DNA, 452 bp, Homo sapiens
cacgaggatgttggccaggtagtcggcgaacggcccgacgtagtggaagtggttctcggcccagcgggcgaagtggtggcgctccaactgcccttcggcccacgccttggagaacgatgcgttcttggcctcacggcccttgatggcgttctccagctcggcgcggaactcgtcgcggcccagtagttcagtcatggatcagatcccttcgatcagttgatgtcgcgaaacgatgagcaacagagaatgtttcgcaatgatgggggctgcgagacgccgcggcgttgcgaagtcgcctctgcaccagcgacgttagccagcagaccggcgttgcgacatggacaacatcaccccggatgcccgcggcgacgaggcatggtgcacaccgcctcagtgactgccgaccgcagcggtcagcgcctcgaattcgggcaggatcgccgcaccgacgg

SEQ ID NO: 674828 - DNA, 230 bp, Homo sapiens
agggggccggggcccctttaaaaaaagggtccccccccggggttgaagaaccaacccaaaaaaaggttgggttgggccaagggcccccccgggccccggccccccgggggcccccccctggttggtttgctggccaaaaggccggttccccccccggggtttcacccccccaaggctttttttaaccaaatttggccccccggccaaaaaaaccccctttttttttttga

SEQ ID NO: 674829 - DNA, 87 bp, Homo sapiens
agcgagcaggaaacatactcgggggcgggtttgccccgcactcacctggtcagacgaactccgtttccaaaacaaaaacaaaacgga

SEQ ID NO: 674830 - DNA, 636 bp, Homo sapiens
ctattttgaacgaatgtcatgctttcacatgattcataatagtgctattgtgaacgaatgtcatgctttcacatgattcacaatagcactattttaaataaattataagctttaaggtacgaagtatttaatagatctaatcaaatatgttgattcatggctataataaagcaggagcaattataaaatcttcaatcaattgaacttttacaaaaccacttgagaatttcatgagcactttaaaatctgaactttcaaagcttgctattaaatcatttagaatgtttacatttactaaggtgtgctgggtcatgtaaaatattagacactaatattttcatagaaattaggctggagaaagaaggaagaaatggttttcttaaatacctacaaaaaagttactgtggtatctatgagttatcatcttagctgtgttaaaaatgaatttttactatggcagatatggtatggatcgtaaaattttaagcactaaaaattttttcataacctttcataataaagtttaataataggtttattaactgaatttcattagttttttaaaagtgtttttggtttgtgtatatatacatatacaaatacaacatttacaataaataaaatacttgaaattct

SEQ ID NO: 674831 - DNA, 261 bp, Homo sapiens
gaagctaaaataaaggccccaaaatttgggttttaaacagggtttcccacactttttggtattcggcagtctaaaaggaaccaattcctttattttagccttcccccccaaagtttattgggaattctttatcctttaaaaactataaatatatttgggggtcagcccagtaatgccccccaatattgtttttaaacaaaaaaggtaaccattcaaaagaatctctttaaatccctgattaaatcatttggctggaaccca

SEQ ID NO: 674832 - DNA, 182 bp, Homo sapiens
tgtacgctcagccaccaccgcttgctgtggtccagaacctccagcttctctccctggaccacagtcagttcccgtgggattcctagcttcaaactcgtacaagacttgcattttcagggactggctgggcaggtttggggctggagggccgaagggaaacaggatcctggtatcctaagggt

SEQ ID NO: 674833 - DNA, 114 bp, Homo sapiens
tttttttttttaaaaaatccttttaaaggtttttgttttaccataaagtagggcctggcccttttataaaaaaaagttcccctagtattaaagggtttttaagttccccaggga

SEQ ID NO: 674834 - DNA, 140 bp, Homo sapiens
ctctctctcaattgaacttcaaatctacgttcctttattgaaaattcatgttccattgtactgatctttactttggcttctttttttgcctccagcgcattcttccttaaactctcagtctctttccgtaactgtttatt

SEQ ID NO: 674835 - DNA, 2282 bp, Homo sapiens
  misc_feature (1440)..(1440): n is a, c, g, or t
aacaacttccgctcgggaagtttgtaaaagtctggtctaccggcgcggcgtagtggatgcagcatcctagtggaggacgcccctgtgatggagtctcactctgttgcccaggctggagtacagtggcgtgatctcggctcactgcaagctctgcctcccggttgctgaacctgtttgcatgagttgctcctgacggccctttaggatacttccatgtctgtagggtctagagtgacatctcctcccctcccctgacgagatctgccctccttggcactgtgcttccccagaggggtggcctcgctgttcccatggacatggcccaggagccagtgaccttcagggacgtggccatctacttctcaagggaggagtgggcgtgtctggaacccagccagagggccctctaccgggacgtgatgctggacaacttcagcagtgtggctgctctgggattttgcagccccagaccagacctcgtctctcgcctggaacagtgggaggagccgtgggttgaagaccgggagagacctgagttccaggcagtgcagaggggaccccggccaggggcaaggaagtctgcagaccccaagagaccttgtgatcatccagcttgggctcacaagaaaacccacgtgcggcgagaaagagccagggaaggaagcagctttaggaagggcttcaggctggacacggatgacgggcagcttcccagagctgctccagaaaggacagacgccaagcccacggctttcccgtgtcaggtgctcacgcagcgttgtgggcggcggccgggccgcagagagcgccggaagcagcgcgcagtagagctgtcgttcatctgcggcacgtgcgggaaggcgctcagctgccacagccggctgctcgctcaccagacggtgcacacgggaaccaaggccttcgagtgccccgagtgcggccagaccttccggtgggcttcaaacctgcagcgccaccagaagaaccacacgcgcgagaagcccttctgctgcgaggcctgcgggcaggcgttcagcctgaaggaccgcctggctcagcaccgcaaggtccacaccgagcacaggccctactcgtgtggcgactgtgggaaagccttcaagcagaagtccaaccttctcagacaccagctggtgcacaccggggagcggccgttctactgcgcggactgcggcaaagccttccggaccaaggagaacctcagccaccaccagagggtccacagcggggagaagccctacacctgtgccgagtgcggcaagtccttccggtggcccaagggcttcagcatccaccggaggctgcacctgacgaagaggttctacgagtgcggccactgtgggaaaggcttccgtcacctggggttcttcacgcggcatcagaggactcacaggcacggggaggtgtaggggcgcccgaagngtggggtgctgcgcctctgcgggagtactgggtcctgagggagagctgcagtgagaagttgctcttcagcctggaaaatcaacctgaattcagagaagccttcttagtcctcagagctccccagtcccccgagaagtttactgggaaaactgccaggtgggagaagcagagccatgggtacgccggagatggcgggggctctggagatggcgggggctgcgccccggcgccgggcatcctggggatgtgctgagagtgtgcgcgaccccggagccacgtgccaggccgggctcagaggcggagaagcctgcctggtgcccacagccgtctggctcagggactccaccctggccccgagtcgccgtctgctgggcctttccttcctggctctgcaccccatgctggctgcccggtctggcttcccttcttgtctctgtcttgggcgaggcagctgtgagcattgcacagaggcaaagaccctcctgcagcctctgcgctgggccgtagaaacaagagcctttgtaatactgaacctcattcaaggattaggagtggtggttaggtcagggccacccccagtgctgcaggaacggcctccacccagctctgttggtcagagcctgggtcatgcacctggagttgggagatcaagctgggtctcagggcagtgaggtggccatatccaccacatcgcatttcgtgggggaagaggtgacctctttgttttaaacttaaggtgtctgcttatccagccagaaataaaaatctgccagtggtgttcccaagggaagacccccgtgggaatggatcgggacactgccgtgtttcaggttagccaatta

SEQ ID NO: 674836 - DNA, 208 bp, Homo sapiens
gttacgttacgatgtctgccatgtcgcctgaaataccatgagtgtttatggaaagtcagtgcgtattaatacgcacggactttcctttctttgggatacatacccagcagtgggactgctggatcatacgatagctctacttttagttgtttggttttctttttggggatggagtctcgctctgtcacccaggcgggagtgcagtggt

SEQ ID NO: 674837 - DNA, 2143 bp, Homo sapiens
  misc_feature (1301)..(1301): n is a, c, g, or t
aacaacttccgctcgggaagtttgtaaaagtctggtctaccggcgcggcgtagtggatgcagcatcctagtggaggacgcccctgtgatctgccctccttggcactgtgcttccccagaggggtggcctcgctgttcccatggacatggcccaggagccagtgaccttcagggacgtggccatctacttctcaagggaggagtgggcgtgtctggaacccagccagagggccctctaccgggacgtgatgctggacaacttcagcagtgtggctgctctgggtgagcacgggctgagcgcagcgtgagcacagggattttgcagccccagaccagacctcgtctctcgcctggaacagtgggaggagccgtgggttgaagaccgggagagacctgagttccaggcagtgcagaggggaccccggccaggggcaaggaagtctgcagaccccaagagaccttgtgatcatccagcttgggctcacaagaaaacccacgtgcggcgagaaagagccagggaaggaagcagctttaggaagggcttcaggctggacacggatgacgggcagcttcccagagctgctccagaaaggacagacgccaagcccacggctttcccgtgtcaggtgctcacgcagcgttgtgggcggcggccgggccgcagagagcgccggaagcagcgcgcagtagagctgtcgttcatctgcggcacgtgcgggaaggcgctcagctgccacagccggctgctcgctcaccagacggtgcacacgggaaccaaggccttcgagtgccccgagtgcggccagaccttccggtgggcttcaaacctgcagcgccaccagaagaaccacacgcgcgagaagcccttctgctgcgaggcctgcgggcaggcgttcagcctgaaggaccgcctggctcagcaccgcaaggtccacaccgagcacaggccctactcgtgtggcgactgtgggaaagccttcaagcagaagtccaaccttctcagacaccagctggtgcacaccggggagcggccgttctactgcgcggactgcggcaaagccttccggaccaaggagaacctcagccaccaccagagggtccacagcggggagaagccctacacctgtgccgagtgcggcaagtccttccggtggcccaagggcttcagcatccaccggaggctgcacctgacgaagaggttctacgagtgcggccactgtgggaaaggcttccgtcacctggggttcttcacgcggcatcagaggactcacaggcacggggaggtgtaggggcgcccgaagngtggggtgctgcgcctctgcgggagtactgggtcctgagggagagctgcagtgagaagttgctcttcagcctggaaaatcaacctgaattcagagaagccttcttagtcctcagagctccccagtcccccgagaagtttactgggaaaactgccaggtgggagaagcagagccatgggtacgccggagatggcgggggctctggagatggcgggggctgcgccccggcgccgggcatcctggggatgtgctgagagtgtgcgcgaccccggagccacgtgccaggccgggctcagaggcggagaagcctgcctggtgcccacagccgtctggctcagggactccaccctggccccgagtcgccgtctgctgggcctttccttcctggctctgcaccccatgctggctgcccggtctggcttcccttcttgtctctgtcttgggcgaggcagctgtgagcattgcacagaggcaaagaccctcctgcagcctctgcgctgggccgtagaaacaagagcctttgtaatactgaacctcattcaaggattaggagtggtggttaggtcagggccacccccagtgctgcaggaacggcctccacccagctctgttggtcagagcctgggtcatgcacctggagttgggagatcaagctgggtctcagggcagtgaggtggccatatccaccacatcgcatttcgtgggggaagaggtgacctctttgttttaaacttaaggtgtctgcttatccagccagaaataaaaatctgccagtggtgttcccaagggaagacccccgtgggaatggatcgggacactgccgtgtttcaggttagccaatta

SEQ ID NO: 674838 - DNA, 2443 bp, Homo sapiens
  misc_feature (1601)..(1601): n is a, c, g, or t
ttacacttgcaggttgtcaggacccggttgcgtatcctcttgaagctggtttcttcctggccgaccccgtccgcgatcgtgaccttagttatccctcatagacactttccacacctgtgtctccagccctatcgctccgatgagacccgagcgcttagactgtgattcataacacccaaagctccccggccccaggctgagctcctgcaacctccacaccccaccctctggtcctcccaggcattccaccgcgaaggagaggaggcagaaacccgagattcgcttcttctcctttcctgcccacgcccagcacacagtcactggctggagtgcgatggcgcgatatcggtcgccgcaacttctgcctcctgggttcaagtgaatctcctgccccagcctcctgagcagctgggatgacagatctgccctccttggcactgtgcttccccagaggggtggcctcgctgttcccatggacatggcccaggagccagtgaccttcagggacgtggccatctacttctcaagggaggagtgggcgtgtctggaacccagccagagggccctctaccgggacgtgatgctggacaacttcagcagtgtggctgctctgggattttgcagccccagaccagacctcgtctctcgcctggaacagtgggaggagccgtgggttgaagaccgggagagacctgagttccaggcagtgcagaggggaccccggccaggggcaaggaagtctgcagaccccaagagaccttgtgatcatccagcttgggctcacaagaaaacccacgtgcggcgagaaagagccagggaaggaagcagctttaggaagggcttcaggctggacacggatgacgggcagcttcccagagctgctccagaaaggacagacgccaagcccacggctttcccgtgtcaggtgctcacgcagcgttgtgggcggcggccgggccgcagagagcgccggaagcagcgcgcagtagagctgtcgttcatctgcggcacgtgcgggaaggcgctcagctgccacagccggctgctcgctcaccagacggtgcacacgggaaccaaggccttcgagtgccccgagtgcggccagaccttccggtgggcttcaaacctgcagcgccaccagaagaaccacacgcgcgagaagcccttctgctgcgaggcctgcgggcaggcgttcagcctgaaggaccgcctggctcagcaccgcaaggtccacaccgagcacaggccctactcgtgtggcgactgtgggaaagccttcaagcagaagtccaaccttctcagacaccagctggtgcacaccggggagcggccgttctactgcgcggactgcggcaaagccttccggaccaaggagaacctcagccaccaccagagggtccacagcggggagaagccctacacctgtgccgagtgcggcaagtccttccggtggcccaagggcttcagcatccaccggaggctgcacctgacgaagaggttctacgagtgcggccactgtgggaaaggcttccgtcacctggggttcttcacgcggcatcagaggactcacaggcacggggaggtgtaggggcgcccgaagngtggggtgctgcgcctctgcgggagtactgggtcctgagggagagctgcagtgagaagttgctcttcagcctggaaaatcaacctgaattcagagaagccttcttagtcctcagagctccccagtcccccgagaagtttactgggaaaactgccaggtgggagaagcagagccatgggtacgccggagatggcgggggctctggagatggcgggggctgcgccccggcgccgggcatcctggggatgtgctgagagtgtgcgcgaccccggagccacgtgccaggccgggctcagaggcggagaagcctgcctggtgcccacagccgtctggctcagggactccaccctggccccgagtcgccgtctgctgggcctttccttcctggctctgcaccccatgctggctgcccggtctggcttcccttcttgtctctgtcttgggcgaggcagctgtgagcattgcacagaggcaaagaccctcctgcagcctctgcgctgggccgtagaaacaagagcctttgtaatactgaacctcattcaaggattaggagtggtggttaggtcagggccacccccagtgctgcaggaacggcctccacccagctctgttggtcagagcctgggtcatgcacctggagttgggagatcaagctgggtctcagggcagtgaggtggccatatccaccacatcgcatttcgtgggggaagaggtgacctctttgttttaaacttaaggtgtctgcttatccagccagaaataaaaatctgccagtggtgttcccaagggaagacccccgtgggaatggatcgggacactgccgtgtttcaggttagccaatta

SEQ ID NO: 674839 - DNA, 281 bp, Homo sapiens
  misc_feature (37)..(37): n is a, c, g, or t
aaggagtaccaatgtgcgaacatcatcatgccgcgtngcaatcctgtgctcgcagtgtgacatgctggtggcgttaccgcgccttgagcatggtcagatagcggcatgtccccggtgtggcacaacgttaaccgtggcgtggtatgcccctcggtagcgttcccaccgccctatggtttggctgtactgtttatgctgttgctgtccaacttgttttccttttgtgaatatgaacgttgcaggagttaccagtgttattacattactggtaattcccggcg

SEQ ID NO: 674840 - DNA, 588 bp, Homo sapiens
aaaagcttcagtcttggctgcagcgttctcttcctctacaaatccgatatctttaagtataagtgccttgagcataaatttctttggttcaatctctgggtgctgtgaatctttcaagggtactcttttcccgaagaagagagcttcagatttggctgacaagcttgtcaaaatcattctggaacatggttaactccttttcatactttttttaggcttccattttaattttggctatctcggtatctttaaaaaacttcaactttggacacatttctgcccgaagttgctcttctatgtctctcttatactcatttagctttatttctaaagattcgaacttgatacgctgagggtaagcatctgcaaagtgatcatcaataagctgaagcttctcagccagagaatctctgttaaaggtcgaactggtctgagtttccatattacaactctctttagctggatgatattcggccaattcttttaaaaaatgcataagaaaacctttttgattttctttatcagatcctgaaaccagtgattggtagagactggaagtagggttgattttaatgaggtgtaatagat

SEQ ID NO: 674841 - DNA, 680 bp, Homo sapiens
gctggagttggatccacaggctctggctaggtcattatgtcacttttgcacagcgaatgtagatgtgactgtcacctctgaatttgttcagtgtcccaccagtggtctatgagaagtacactggaagcgtggggggaacacattgacatgatttggtgaatatcatcatctttgccagacaaggtctccagtgggagtcccttgtttcccaagcgtgtaacaggtgtgaaccgtgacacgacgatcacacgcactgggagtgcacgaccttgcgcctgtgtctacagtgggcctgtaatggtcgggcgtcgtggagcctatccgagacgtaacgtgcgtctcaaagcgactagtcgagatagcctcgactggcgactgcgtatgtcgtctgtactttggatgcgcgtatgtagtgggtagccctcaagaaagctagagactgttctgcgcatgaggtgagctgggcagcaaatctcccatctcaaggagaacgttgcctagtgactgtgtcttgccagagtcacaagagcgcccgccggtagaactcactaggggccctcgttcccagaaagagacatctagttcgtatcagcttcagaaatcaggaacactcaagtgctctgtgcagaggaaggccacagttagcttgtcatgggtctttacgcctctggcttgttccc

SEQ ID NO: 674842 - DNA, 183 bp, Homo sapiens
  misc_feature (75)..(75): n is a, c, g, or t
  misc_feature (131)..(131): n is a, c, g, or t
tcaagcttctacgatgtacggggacatggtgaaggctagtagttctggaaaaagccactggggacgaagacaggntgctaaagtatgaacgacgctgatggagtatgaactcaccaggtccacagaatctngtttaaaggttcagacttctaaatcagtggcaaataaaaagtgctatttgca

SEQ ID NO: 674843 - DNA, 603 bp, Homo sapiens
  misc_feature (297)..(297): n is a, c, g, or t
aactgctgtatcttttccattgtgaaatgaggactggtgtaagctagccagtgggtacactagagtcagcaaagataggcctggggcattttgtgctagctttctccttccctcctgctcttcctcttttcctccttcctgtagtgggactataatacagagaattgttaacataggtgatggacgacttgagattgccaaaaagggcatgatgaggcagtcgagagattagcagcagtaagaagcaagtagtgatctatagagggatacaagtaggagatggttcttggaggctgnggaccagagttacctggtgggaactgggcttgtccagaaggagcagaaacatttgggagattcagtcttagagagaaaggttctcctaccttccggtcaaagccaatggacaagggagctgcagcttatttcttagtgaacggaatataaaaccattccttagaataatttccttacctataaaaaaatcagtctggttaattccagcttgtctttttactgagaagtaaatttattgagtatatttaaatatttgtgagatttggccagtcatggtggctcgggcctgtggtcccaagtagctgg

SEQ ID NO: 674844 - DNA, 352 bp, Homo sapiens
ttttaattttagaaattttaaacttgaaagaaccctcaattatcggggggtttttgaaggaaagttaaaaaccaacataggaaatgggaaaaaatttgggtttgttttgtttgactaacttgggggtaaaagcaatttttaggggggggaaagttttttgaaagggtattgtccttttacattttgttaaaaagccctgggttttgagaatcaaaaagggggttgtttagggggtaattgggtttaaatttttcaaaaactttttttttttggtttataaaaaggtccagggggcccattttgattagtttgaaggttttcgggccttgaaataaattttggttaggggata

SEQ ID NO: 674845 - DNA, 616 bp, Homo sapiens
tcttctactaatggacatgtatgtcagctgtagagaaaaggatccttgccaaaacacgtcttcgagtggtgaaatacaccccgcaattcctttaatgatttcagattatcttaaatatttataaaaatcgactctcagcaacacttctttaagcaaacctcctcatcaacttcgattatttatatatttatgaacacgatgttcaaggagcagacggcagctagtaagtcctccaaaagaaggaaaaaaaaatcaatgggacagaatgtaagctccatgactcgtccatgtactcttctcgacaagctctggcacaattatctttccattcagcggaagcgccacacaaaagtccacaatgggtttaaaatagcacacttggacttcataaagcttggaggctccaagtttaatccaggaatgacctgccagccaagggctctattcccaaaggaaactgaagctctgtcaggggagaagatcttctcccctgacagacccgcaagacaaaacaacgggttcttgccagcctctagagaaatcccagaacactcagccctgacacgttaataccctgcacagatcagaggctgctggccacacagactcaccagcc

SEQ ID NO: 674846 - DNA, 133 bp, Homo sapiens
gaaggggctgggaactagtaggagctagggcaaaagaaaaaggaagtagaaaggaatcttggatcctctagtaccagcccaatagcatagtaatgtactatatatgcctacagtagtagggctatcgctatac

SEQ ID NO: 674847 - DNA, 103 bp, Homo sapiens
  misc_feature (50)..(50): n is a, c, g, or t
caccatgatgaatggatgtgtactgtttcttcttcgagcatcaccaaggntgatgacgatcactgtcgctatgacaacagccggccaccatgagtccaatgat

SEQ ID NO: 674848 - DNA, 955 bp, Homo sapiens
  misc_feature (177)..(177): n is a, c, g, or t
  misc_feature (179)..(179): n is a, c, g, or t
  misc_feature (218)..(218): n is a, c, g, or t
  misc_feature (224)..(224): n is a, c, g, or t
  misc_feature (229)..(231): n is a, c, g, or t
  misc_feature (239)..(239): n is a, c, g, or t
  misc_feature (248)..(248): n is a, c, g, or t
  misc_feature (263)..(263): n is a, c, g, or t
  misc_feature (266)..(267): n is a, c, g, or t
  misc_feature (292)..(292): n is a, c, g, or t
  misc_feature (326)..(326): n is a, c, g, or t
  misc_feature (358)..(358): n is a, c, g, or t
  misc_feature (360)..(360): n is a, c, g, or t
  misc_feature (364)..(364): n is a, c, g, or t
  misc_feature (375)..(376): n is a, c, g, or t
  misc_feature (383)..(383): n is a, c, g, or t
  misc_feature (389)..(390): n is a, c, g, or t
  misc_feature (400)..(400): n is a, c, g, or t
  misc_feature (406)..(406): n is a, c, g, or t
  misc_feature (415)..(415): n is a, c, g, or t
  misc_feature (434)..(434): n is a, c, g, or t
  misc_feature (437)..(437): n is a, c, g, or t
  misc_feature (467)..(468): n is a, c, g, or t
  misc_feature (480)..(480): n is a, c, g, or t
  misc_feature (497)..(497): n is a, c, g, or t
  misc_feature (503)..(503): n is a, c, g, or t
  misc_feature (513)..(513): n is a, c, g, or t
  misc_feature (596)..(596): n is a, c, g, or t
  misc_feature (623)..(623): n is a, c, g, or t
  misc_feature (632)..(632): n is a, c, g, or t
  misc_feature (661)..(661): n is a, c, g, or t
  misc_feature (695)..(695): n is a, c, g, or t
  misc_feature (890)..(890): n is a, c, g, or t
gacagagcggtcggtgacagcctcaaggcgcttcaggcaccgcgcccatggtgagagccatgaccgagctcacgattcatgactctgagtggaggacgccgctggtggcatgaagcacgcacagtggacgttcctggcggaacttattctcccagacgctcagcctgggcagccagnanggagcgtctgctggacgagctgaccttggaaggggtggnccggtncatgnnngagcgaancgctgtcgncagagtcatctgttngtnngggagctggaatcttccacatccgnaggcatccccgagtttcgctctccatccaccggnctctatgacaacctagagaagtaccatcttcncntacnccagaggccannctttgangatcannctatttcagnaacacnatccggaanccttcttcgccctcgccanggnaactctagtcctgggcagttcaagccaacnnatctgtcactancttcatgcgcctgctgnaggacnaggggctacntcctgcgctgctacacgcagaacatagataccctggagcgaatagccgggctggaacaggaggacttggtggaggcgcacggnaccttctacacatcacactgcgtcagngccagctgncggcacgaatacccgctaagctggatganagagaagatcttctctgaggtgacgcccaagtgngaagactgtcagagcctggtgaagcctgatatcgtctttttggtgagagcctcccagcgcgtttcttctcctgtatgcagtcagacttcctgaaggtggactccttccctggtcaatgggtacctccttgcaggtgcagcctttgctccctcatcagaaggcacccctctcaccctcggctgtcatcaaaggggnagctggcagtggaccttccgggcggtatcggtcgagaggtgactgcgtccaaggccccgcgtgtt

SEQ ID NO: 674849 - DNA, 174 bp, Homo sapiens
  misc_feature (108)..(108): n is a, c, g, or t
tgtgtcgagtaaggagcagaaagggcagcattgaggtttcataagcccaagggcgaaaagggacttacccccgcatgggtcttcaagcaagtggaccaagcttccttnttttaaacaagttatttatttcattccttttttttatttttattttttgggggctcttactcggta

SEQ ID NO: 674850 - DNA, 161 bp, Homo sapiens
  misc_feature (155)..(155): n is a, c, g, or t
ctaacacagtgaaccctgctctactaaaaaaaacaaaaaatagcttgcgtgttgttgggcgcctgagtcccggagcttgggagctgagctggagaaggggaaccaggaggcgcagcttgagtgagccaagatcgcgccactgcactccagcccgngtgaca

SEQ ID NO: 674851 - DNA, 274 bp, Homo sapiens
gaggcactgaatgttagtgtacttggagtattaggggtctgaccccaaacaccttccagctcctgtaacatactggcctggactgttttctcttcggctcccctatgtgtcccttgttccctgttatctccacctaagaacttgtaaacctctcgatgggcatgggaccacgacctctgtacttgttcgtgtgttctttcacatgctcctccgcacaagtgctgatatatacacgcaagtgaggctcacatgtgctaagagaggctcacagatg

SEQ ID NO: 674852 - DNA, 617 bp, Homo sapiens
agctggtccgcgattgctcccaatcagaataaagccttccttctgcaatcggtgtctgagaggttttgtctgcagctcgtcctgctacatcctgaccttgtgatccactcgcctcggcctcccaaaatgctgggatgacaggcatgagccactgcgcccggcaccaggtcatgtttttttgttgttgttcagccaagtttgagattccctgagccaggcaaatgtcaactgcagtttccagccctcagcatctacacctctggcgtctgtcatacaggatcatttcaaacaccttgtacttcccagaggttctgctaagccgtggagcccagacagatgtgtttctgaatgggagtgacttcctccattaaaccaggatcacagcatgcgttcatctgaaaagtgtttccaaacagccaggactatgcaccaaatcttcagttctaaaaatatctccagcctgggtgacagagcaagactccatctcaaaaaaaaaggacaagaaaaataaaataccactgggcatggtggctcatgcctataatcccagcactttgggaggcccaggagctcgagaccagcctgggcaacatggtgagtccccatttctacaaaaa

SEQ ID NO: 674853 - DNA, 301 bp, Homo sapiens
acatttccactgagtcgcataataaatcaacagagagacaggcatagccatgtacctagcgactggattacatgacaagctccgtgctccctactatggaatagtattttcactctctccgtttttcatggaagagtatacatagggaaaactaatgctcactactgtccttgcattaataaactaatgaaaaccagtaagagcagccggctttaaagtttaataattatctgcaaaggcagaagtttccagtttcactcaaatttgtccttttatactaaatgcgtgactcgtggaaatg

SEQ ID NO: 674854 - DNA, 627 bp, Homo sapiens
ttttgaaaaaggtgggaatagctggtaaggtctctttattatttatttatttattcatttattcaattctttttttttcttttcaccaaatagattttaggtaaaccaaggctttgaatagaacagaaaagtgtatgtatgtttgtacatgtgaactaattcgccaaattcgatgtatttttttctaccgaatctaaaattctattgaagagctttttttaaaaaaaaaaaataataaataactgaacttgttcagacaagaaagaaatttaaggaacctggaattgttgaaccaggataaacatagaacatcttttagggtttcgtcattgttgttggttttccattctagtcctcagcaatttaaaattttaaattcacacctcttcagttgtatttaaatccgcagttgggcaaccttttgggaagaaagaaatattaatggaattattttagttttttatttttattaagatttggggtggtaggtagaggtagaagaaagagatgactgactctattctagcctgacattctttttgtttgtgtgcataaacatgctgatagtaatattccaagttactcaaatcagggaatatattaaatttttgtgattgatacagagct

SEQ ID NO: 674855 - DNA, 256 bp, Homo sapiens
cggcgccgcttgtgcgctctggtggcgcggcgcctactcccctccacttcccacaggcccctggcctcccttttgtcaccccactcctcaccagccctgcaccctcccctccctgtgggtttttttttttttttttttttttttttttttttttttttttttttgttttttttgttcttcggaccttgacttcgcgtcctcttctccatcgctctgacgacgccctcgcgtcccaggcccacgccacgggaggccg

SEQ ID NO: 674856 - DNA, 416 bp, Homo sapiens
gaggatcccgaggcgttgtatggcctgggtgatgaggatgcaatgagctgtgattgtgccaccacactccagcctgggcaatacagcaagactgtctcaaaaaaaaaaaaacccaaaaaaactcaaaaatgtaatgaatgatacccaatgtgccttttctaaaaaaagttgccaaatatttctctgggatctgctgagcatgtcctctgatacttaaggcaagcttgttttacacccggtgtggatcccagtgagttttccagattccaaactgatggacgctactggcccttgggactgacatcctctgggattatacccttctctggggctgagatgctgctgccagctctaaaacagccctctttcctcaaaacctcatggcaggcccctggctccattattcagctgcctac

SEQ ID NO: 674857 - DNA, 148 bp, Homo sapiens
gtcactctagagtgatccccgttctcccttgtcaatgaaatgctcaggtcatgggactcataggaagttctcagtactttatacttacttgcatactcagagtgttcgacactatgaaaacactccctccttgtaaaacccacgctgt

SEQ ID NO: 674858 - DNA, 1209 bp, Homo sapiens
ggtcgggaagagcttcgggcggggctccaccctgatccagcaccagatgcgatccagcgtcgcggtgagaagccgcatacaaatgtgagagtctgcaagcgaaaggtgcttcgtccctagaatggcgtctgtaaccttcatcgaatagcgacctatgcgcaatcccaagagctaggcagtagcaggaaccctacaacaatcgatccccagttgtcggcgaaaggtccatgtcgccagactatgctccttgacaacatgctctcgcacgacccagctgccacttcaacatcgtagcccacgaaagccctacatagtgtcccactattgattggcaactggcccttacggacgagcagacttcacttagccctgccctgccggaactaacccaagacgtcatccctcaactagtacttcagctggaatcttggaccacttacacagactggcaaccgaaagtcgacgtgctaacggttggcttatcacctcgcagtaaacttcgcttcccctgttcgcagtgcacctccacgcagtggtaggctccacacgggttcagtacagggctctgtcaggcatgttggccactacttggcgagcaacagcaagtctgtacctccccagtcgagttcggacactcctctattcgcaccccgatgtcgcctggcagtggcacgccccggtgtcatacacgcccattcaaggtgccctgtagtgctgggcacaaggctgctttgggcccaaaaagcttccgggatgctgtggcctatcccatcgacctctgcaagcgctatccctggcacgaggagcgcagcatccgtaacgagacatggcccccgaaacatgcggggtctaacgtaaccttttccaatttcgacttcctctctatctgctcgatcccatggggaccaaagcggcctcgcccacactgggacggcatacgggacctttaccagggtagttgcctggtggttgacgagcacatggtgactttcttgcgcgcgtacctcacaacagcttcgttgccaaggcattacaaccggggtcccacaggttgggcgaagcgggttccttaccaaggttgccgaatagacttggcgggaaaagggccctttctcccccaggagactacagaaccctcgattcccgcccaccaagggggagcccaacgctgaaggggccaggaagctgaacttggggcccccatatgtg

SEQ ID NO: 674859 - DNA, 777 bp, Homo sapiens
tctcactgctgtgatagtattccttgacagggatgcctgagaccagtctacatgtcagctcctgctccgaaggaagggttccaagaaggttgtgaccaaggcgcagcaagaaggatgggtgagaagcgcaagcgcagtcgtaaggagagctactccgtgtatgtgtacaaagtgctacaatacaggttcaccccgaataatggccatctcatccaaggccatgggcatcatgaattccttcgtaaactgacatcttcgaacgcatcggaggcgaggcttcccgactggcccactacaactgagcgctcgaccattacctccaggagatccagaccgcgcggtgcgtctgctgcttcccggagatcagggcaagcacgcagtgtccgaaggtcccaagggctgtcaccaagtaatacaaagctccaagttaaactgtgtgcttaggtgcttcaataactcaagaggctctgtattcaagagccctagctcaaaggtactcaacactagaaaggaggctttttgacataatgtggaacttttcacccggtgtgttactaagggcgaaataatttattgaccggatgtcttcgtaaaatccctagtcacctattagggatgggccggacgcgcggtgcaggatcccgagcacgcagtttgtgggggtaaccgtggttaaaagtctccgttctcataacttagaaacataacagagatatataagcccggggccgttggtggcaggtccgacagtgtaaatcccccataggaactcgggga

SEQ ID NO: 674860 - DNA, 608 bp, Homo sapiens
  misc_feature (345)..(345): n is a, c, g, or t
  misc_feature (608)..(608): n is a, c, g, or t
ggaatagaccagaacatgtatagctgtctgtatctctttctgtttttaagatctccagtgaaggaattactaacagagtacaggagattgtatggaaggcctatagtgatgactctttcatcagctttgttcgtaataaattaactgtatgtgtttcagagagtcatatgactccaaaatgatttaacacatgctgctacaagccagccttcttaagtttttattaaatcttgattgttttggtcacataatttttatattaaatcctgtgatagtcattgttctttctataacaaatcatcacatttcaacgtgttaaggtcacgtgtgtactagaaaactggnacaggtaactagatttttgaacagggctactggcgattaaatagaatccatccaaaaccatttactttccttatacattatacgcagaagtggctaaattagagggttgttcctgtctccatcatgcacttctgtcttctaactccatttccccttggtatactatttgcgggcatactttctggaagccaaagttgctaagcgttacttacacagctgatatttcagattaatatgaatgctgaccgtttgccctcacaacn

SEQ ID NO: 674861 - DNA, 1375 bp, Homo sapiens
atgagcacggcatcgaccccacgtggcacctaccacgtgggcacagctgacctgcagctggaagcgcagtcaacgtgtactacaatgagtgccaccggctggcaatgtactgtgcccctgctgcctgtgctctgtggatcttggatgccctgtgcaccagtgtgactcctgttgctgctctgtgtggccctttctggtgcatgatcattcctgtgcctgtgatcatacttctgttattcgtgtccatgatggttgtgttgcttgtgtgcaaccaatctttgtgtgccacaatgtgtgtgcgacataacaacaatgtatatgtgcttgcctgtgcacgccttgtgttgtgaaacttctgttgttggcattggggacttgttttgtttgcacgacaacatcgcgcacgtggcctcagcgacgcaaggccatttcgttacgcactattgcccgcattgccacaatgatgtgcctttgctaccccaaatgacttttgccactacacagacatacacacaattagttgtggcttaggtgaaggtggcgtaagaaccctctagcgagcaggatacccatttatggtgtctcgcaaatttgcgggtgagttaaaccaccacagaatcccaccatttcccatagcttcacgagtggtccacgacaagagcaaacttccaccgatcggacggcggcccactcgggccgccacatctgcttcacagctacccctgcgcacaagtcaggcaaacctccaaacctcgtggagaagatttccacgcacttgttggctcaagtcacagcccccacaaaacgcgtgacgactctggcacacgctacaacggagcagatttgggtcactttggtgcacggacacttgggtgcccacaccacagattaagatacacacggtcaccgccagctcgaccacaaacacacactacgtcggtccacagtagtgatattaccactaaaacgaggcgccaaaacccataatatgctccacgaaatagggtgacagtagtgtgatcggcaaacatcatggtgctcgctgcaacagactggaacacccactcccgaccgccgaataattacaaggcgcagcgacgaacaacagcgccggtgggtcgacgtagctacggaatgacaagccaggcacacgtattaccccaatgattcaccctcgaaagcgaggagcacttaccaccgacgcaagagacagccgccgccccgcacaacggtagaacgtcacgacttatccccacgcaggcgacgagataagaacgcaggcaggcaaacacgaaccaacgtgacagcaacaaacgccacccacaaagcagccgtacacgcgcggtcaacgaccccgcgctgtgccaaaaacgtc

SEQ ID NO: 674862 - DNA, 319 bp, Homo sapiens
ataacgccgagcaggtgccgactctgtctcctttgggtagtgctgacggggaacaacattcagcgcatgttgcagaagctcgggagaaatcagtctgtgaataatccactatagggggaagaggccacttttctggttcctccctcctacgaactttctcatcaacgatctccaccaccttgctgtcctttagggccgcaaagatgactgaactgtcagtggtaagggcctgcactcggtggaaggcagaaataagggtgatgggtaggaaaccatcagcatccattttccttcgcaggaagaagtctcgctctaaatt

SEQ ID NO: 674863 - DNA, 570 bp, Homo sapiens
tccccggggaaaacagggtcttttctactcggaaaaaaacttttttggggggcgggggggggtgtaaaaaaaaaaaaaaaaaaacacttaaaaaaaaaaaaaggggggggggccaaaaaaacccccgggggggcccctatcagccaggcgccacaccgacctttctgtttgagaaagagggggccccccatcaggcaggagtggcgctcatcaaaacaaacgacagagcagcggggggccgcgtaaaaaaacaagcggcggtcgcggagcggcaacacaagtcttgcctactggtgggtgctctctgtgggagagagagagaacacaccaccattctgtgtggggggggggggacactctttgtgtcggggaacacaccccatcaccaacagagaatattaatgacgctccgtcaggaggagttaaataataaaaaaaacagaggagttttcatgtgggtggtaacccaccagaccatcttaattgttgcgtggtcgacgagaaaaagtattgtgtccgcgcacagatttgatatctaaaaaatattttcagggggcgtgaagataaagt

SEQ ID NO: 674864 - DNA, 133 bp, Homo sapiens
atggcctggtgcaagctgcaggccagttttgagcccatcagctgccctgtctccagagaaggcctcgcacagttgcgtgctgcttgctgaggatcgggccgagtcgggcaccaagggactcttcaccggccat

SEQ ID NO: 674865 - DNA, 232 bp, Homo sapiens
tttcatgtcgtagatacaggaccgtgtatgcgtacaatgcatctgaaaggaacacaggaactagaataagcagaaacaattttgaaaaagaaaataaaggggcactcctcagtgtcacctgatttcaaagcttattatatagctatagtaatcaagacaatatattcatccagctgggggcacataccacagatcactgaaatcgcagtagaaacatgcaaaaacagcatgc

SEQ ID NO: 674866 - DNA, 290 bp, Homo sapiens
gatttccccttttttccttccccctcaggaaaaaaaaaaattagtggttccagccctttttggagccttcatggtccaggggtaggggcccccctggcctgagcatcccatttttaggggaggggagttgtgcctatttatcccctggcagaggggatgccaggaccatggacattagggttgcccatccctgccaacttacacagcctggacccctgtccccccttccttgggtactttgaaatgggcctgctcctggcatttcaataaaacccgggttgggtttgtga

SEQ ID NO: 674867 - DNA, 141 bp, Homo sapiens
tggtgcggatttttttctttccctctgggcgggttttacaccgcataatcggtaaccttcggtggatcctttttccaggggttttaatgggttgggggcctttaatcaaactggtttgtgccgctattaagccaccccccc

SEQ ID NO: 674868 - DNA, 384 bp, Homo sapiens
cttgaacttttgggctcaggtaatcctcctgccttggcctcccaaagtgatgggattacaggtgtgagtcactgcgcctggcttattattccttttttttaaaaaaaactttttttgggggcaggacatgggatctcgctttgtcgcccagctggggcgacagagcgagactccatctccaaaaaaaaaaaaaaaatagggacagcctggccaacatgacaaaaccaaaccctgtctctactaaaaatataaaaattagccaatcccagctactggggaggctgaggcgggggaatcccttgaacctgagaggcgaaggttgaagtgagcccagatggtgccattgtgctccagcctgggtgacacagtgagactctgtctcaa

SEQ ID NO: 674869 - DNA, 225 bp, Homo sapiens
cgctagcggaattaatgacgtctctggacttggatctatatgttaattctttcatggaccctgggcattgctctttccatggatcctcatacctcactaagtgtaagggtcctgtctggccccattccctatcaactggtcattttgaccaaatccttgcttctcaaattaagcacatttgatttataacataatttaggtatcgttcacttaatgccgctagcg

SEQ ID NO: 674870 - DNA, 105 bp, Homo sapiens
caggcatgcagctgggagtcgaattttaatataacttaagtaatttaaactggccccgtgtggctagatggctactgtactggccaagctaatgctagactcact

SEQ ID NO: 674871 - DNA, 603 bp, Homo sapiens
  misc_feature (6)..(6): n is a, c, g, or t
  misc_feature (542)..(542): n is a, c, g, or t
  misc_feature (559)..(559): n is a, c, g, or t
  misc_feature (567)..(567): n is a, c, g, or t
  misc_feature (570)..(570): n is a, c, g, or t
  misc_feature (579)..(579): n is a, c, g, or t
acgaanaagtagtaccaaggcggaccgaaagcgggaccggctcgaccccgcggaaacgaagttgatggaccagagaaactgacaaatcccctaccgttggagtctgtgctgagaaaacttctctgtcaataaaaacgaaaaatttcaaaagaaaataaaattttaaaagaagaaacctgcccccccccccccccccttaatgccctaccaaaaaccaaaaaataagattacaacgctaaaatagagtaaaaatctaaaagaatagagtaaaataccctcatcccccgctccctcccctctcaactcctcttctgagcaatctcttgctgagcctacaaacctcgcctatagttcgtacacctctcagtgctctttgtagtccgtcgtcattagctttactgcactctaaacgccctaccgggcaacttaggacaccgcctatcacaacctcggcccgccctctcatcgtcctttctgctcccccgcttacgttacctttacgccctgagaccaaccccctaatatacctagtctcgacctcnctcgcccgtcctccaanccttcgancgncggaaatgntcgtagtgaactttcttatttcca

SEQ ID NO: 674872 - DNA, 681 bp, Homo sapiens
ctgctgctttgacactgagtatgtctcttcaagcctattaccagcctgtcctgccaactcagagagtgtatgtggtgtgcaatggtgcctgaatgtgtgggcatagatgatgttctgggattacctcttcgctgtgaatattaaactcaatcatgctgctgtgaacactggattcctgactgtcaacttgtgttgtgtccccctgtgatgtgtgatcaatggtgatgaccactgaatttacttgactacattgatactgtgtccaattgagagccactgtatgtcttgcatgatcaatagctctggcgaaaatccatgccttatgttcaatgacactgcacactgagttgactcctctgacatgtgcatgagatactgtgaatgtgacgttgtctccgactcttggtgtggatcccagaccatgggctcgttgtggctccttcttcctccctgaccctaaatcgaagtatctttgagctaaatccacgggcactgcagatttgacatcttcagctatcaatgccccacacctgctcacctctaaaaatccttggacgaagcatcccgccctgtagtatgactacctgctgcatggtatctggcagtgagcacaagttcctcatctggcctggggaaattccaggatcaacacatgggattggcctgtcagtcataccgatg

SEQ ID NO: 674873 - DNA, 299 bp, Homo sapiens
gctacgtcagtaatctggcctattagtgcgccctcgtgctgttatatatacttcctggtcttagtgctcctgtaacaagtactcaacattgtataagggcgctgctgatcaggacgtgtcctgcatactggcctttgggtaaacgtagtcctcaaaagcactatcatgtttgcttttactctttgtcagtgatcgatctattttacagggtactgaataacatgtgttgatcgactgtaaaagaacctttactctgaatgggagacagcagtcgctgatctgatagcaagcttcccaag

SEQ ID NO: 674874 - DNA, 235 bp, Homo sapiens
acgcttagaggctgcagtgcagcaaggatgaaagagaagaatgaaagatatgaatggacgtatctttcagagaaatattgaaggagtaaactgggtcttccagcctacatctttctcccatgctggaggatttcgctttcctggtttcggagatcaacggtcgaggagtctatgagctgcagctctccgaggagcgggacctgctcaagggcaccggtacgggcgcttctatccg

SEQ ID NO: 674875 - DNA, 110 bp, Homo sapiens
ctatacatactgacgctaatgtgactgcagacattcagactgcccactctttgagaaaacaaacaaaaacaggtacactcccatgtcctcccaacacaacattgacactg

SEQ ID NO: 674876 - DNA, 1085 bp, Homo sapiens
  misc_feature (134)..(134): n is a, c, g, or t
  misc_feature (392)..(392): n is a, c, g, or t
ccacgcggctgcatgccgtatcatatagtaaaacccagcccatgacccctaacaggggccctctcaggccctccgtaatgaccttccgtgccatagcctttgatgaattatctacttccgcttccataaacgcntccttctatacttatgtgcccgtacttaatctcaatctacacgtaagccagtataccaaatggagtggcgcggatgtagcacgaggaaagcactattgctcgatggaccatacacagcacctaccatgtgtccatacaaatggtgcattcgaaattagcggggataaatccatagttctagttaccatcagtgagaattgtgtgttctttcgccagtggattcggctgagtccttgtttaccgactcgcgagcccctnagtcgccgcataccctctccaaaattagtggaggtgtcaccttgtgctccctcgagaatagcgtctatccaacccggacttacatatcaccactagaaagatcccaacgtgcacgttataacacaatcccggtaaatctaacttccggtaactcccgaggtaggataatcaatactatccattgaaggctacctaccaaataaggctccttaacttatgaaaatacctaagcacgaatatctcacataatatatttcagaaggcactgccttaattgaccaagttttactgggtggtcgcgtaactctttaccgcatctcttacaaaggccctcgatgaacgttactctcagaatgtctatccccattacgaacatctattccctgcacgtggagatcctaggaggactcaaacagataacgaaaggttaggcccgaacgggttgcccccacggggacttttccaaggatcccacttgactctgggcctccaaacgttggtccctactagttaatgctaggtatccaatcccgggcccattcttgaattatttcacccttttaaacattcgcaaaaggcaatcaagcttatgggagtatcagaaagccctggcccgtctggataacctgggcaatctcgtgacaatgttggggacaggctaatagcctggtattggcttccccactctacccg

SEQ ID NO: 674877 - DNA, 1334 bp, Homo sapiens
gcagggacgctacttcccacatatcataggaagagctgatcgagccttgcatagatcagcagccacgtcatgaatcacttttcctgtatactagcgttgcactagatcctgatatgcggctttatccctaattactacacaaacataagatcgtagagctagatcctaaacatgcgtcagatcggctcgagggaggactagaaaccggtacgtgagacctatcgcgtgcccggctcaatctactctcatcatgttcctcgattcgaccgcttcgccgagttcctcgtcacgacattcgcgttataacactaagcaggatcgtaggggtcaaacgcagtccctgctcgcattgacgcaatgcatagattctaaaattgtgctcgatccgaaatgggtcacctagagaacccttagcgaaagtaacaaccgaatctgactgcgccgtgaacctaaactcgtttgcaagctccctacaattaccgttcctcgcgctcgattgtacttgcctctagtaagcctagtgtcggaccctggcagaactgccctatgaaccagtgtggagcgagaatgcgaggcttagtagcctcccgaattgagatgccccgctcatttcagtaataaataagttacatcacaaagacgtcttgcactcatgagctgtccccgcaacattagggcttaacacagacagatgcaatttccctggacgtctaaagaccaaagccaactttcacccgtcgtacacgacccgggggtatactacgggtcaatgctctgaaatctgtggagcaaaaccacagtttcatgccccatcagtacctagaattgaatttccccctaaacaaatctttgaaatacgggcccgtatttaccctatagcacccccctctaaccccctctagaggcccagaaatatccgacatcacataaaggccggtcttgaaagtagcccatcaaaggctcttcgaggacccttggagacacagagccctggcgagccttccttgtatcacatcgtctccatcaattgaaatccggcccccagtatttgtcgttgccttaaagaaataggggggccccccgcaggagaaaaccccaggcggcggtctcacacacgtggaacgtgggggaaaggccccggaaaaagctatctagccaccgaagatgcccgatgcaccacacagccgcccagttcacaaactggccacaacgccatggtggactgcacccatacgcaaatgttcaccaacacgactccatgtacacacggggcaataatccgtcccacacccgaccaactgtcgctaccattgccgaactttcgcacaacccgc

SEQ ID NO: 674878 - DNA, 170 bp, Homo sapiens
tgctttacggctgcataggaggtggggctggcttattatttgccacaacaaacttgggcttgggggccaacctggtggcttctttatctctggctgcagaagtcatgattcccctggtgcagctcgccccatgagttcagcagcagctcgcccctgagttaggcggcgct

SEQ ID NO: 674879 - DNA, 207 bp, Homo sapiens
ccagcctgggccacaatatgagaccttgtctctactaccaaaaaaaaaaaaaaattaaccaggcttggtgatgagtgcctgtagtcccagctacttgggaggctgaggcaggagaatcacttgagtacaggagtttgaggctgcagtgaactatgatcgagccactccaccccagcctgggtgacacagcaagaacttgcctgttta

SEQ ID NO: 674880 - DNA, 439 bp, Homo sapiens
  misc_feature (21)..(21): n is a, c, g, or t
ccgatggggaaaaaaaaactnctgtttaccctgctaatgaaagaaaatgccctttaactttctaatgattatagataaatataatatgcgtctttttcccaatatcctatgatttttagactaggctctagtgttcagaattcatgaaattatccatggtaaaaactagttataaaaattacataattcaaagataacattgttatttttaagccttatataatattgtaacttgcatggatccaaacctggatttgggatgaaaaacttaatgatctttcccttggaaaaaactggaagtgaaaaggttttgttgcttgtacagtgtcagatgaggaacccccctattttaattttgcgaaaccctgcatttgctggggctatttttatacagtgaagcaacagctttgcagcaaaataataaaaaactttttcgtta

SEQ ID NO: 674881 - DNA, 352 bp, Homo sapiens
cggcaccattcaggagatacctatatagctgtactatccatggggatggttacagataggaagtttattagctgtacagagaagcaccttttgacaaaaaggggattttcatttacttcgagttacacgcattctgaaacattgagccaaagacaaagattactgaaagaactttagctaaaatcttccagtttactttgtcttactctcttttacttctcagacacttcccccaccctcttagaacctgttgcttgcaacttagtttcacagctttgcctcttctttttgatgtattttttccagaccttttctgccacttagcacttgtttgttcggactgcaattgggg

SEQ ID NO: 674882 - DNA, 129 bp, Homo sapiens
tatttgaatctgaacatgaataaaatttgagataaagagacattttcatctctttgtctggtttgtccttgtgctttatggggactctaatggcatttcagtcctgttggttgagggcattatatttta

SEQ ID NO: 674883 - DNA, 172 bp, Homo sapiens
gtacgtacttaagcattctgcgcttccacaccagcctatcaacgtcctggtctcgaacgaacctgtcagtggggctcaacggccccgcgcaagactcatctctgagacgagttacccgcttagatgcttatcacgcggttatctctatcccgcacttagactactcgcgcaa

SEQ ID NO: 674884 - DNA, 124 bp, Homo sapiens
gagtcggccccatattaatgcgatcagaatatagacggattattctcatttgttcaaaattcatttgattctgaatgtctcgaaatcactgccgacgtttctttttacgcggcttcgcctaacg

SEQ ID NO: 674885 - DNA, 1172 bp, Homo sapiens
  misc_feature (553)..(553): n is a, c, g, or t
  misc_feature (555)..(555): n is a, c, g, or t
  misc_feature (566)..(566): n is a, c, g, or t
  misc_feature (607)..(607): n is a, c, g, or t
ggacgggcgctttggagccggacccaggcagcgtgtgtcgcgtcgcctagtctggagaactagtcctcgagtcacgtgcataggtatgatgctgaaaggaataacaaggtcttatctctaggtatccataagtgggaccctgggcgtgtattacacatggggacccaagctcgtcaaagcattgcgtgcttcaccttagataatcgcaggttccaggtgagagtccggagaggtatttccacgcaagcctagattgagaatgagccgggtcaattcgatggggatcggaggtagtgagggtcgagcgagtacaaaatctccccccgaggatttggagactgtatttccccgatggccttcctcctcgcttggtgatgcgaggtgaagacattcagtgaagcgttggctgatgggtaaggaaacgcaggcctagaacttctgcattacctgaaagacaggcagttatggttatccaggtatacgatatcttctgtatggagagaagggaacaggaaaaaccctaagtctttgccatgttatcatttctgtgcanancaggactggcngatactacatattccagatgctcatctttgggtgaaaaatngtcgggatcttctgcagtccagctacaacaaacagcgctttgatcaaccctttagcaggcttcaacctggctgaagaatttcaaaactacaaatgagcgcttcctgaaccagataaaagttcaacgagaagtactgctctggcaataagagagaaagcactgagaaagcggagtcctctgggagcaacgtggcttgaacacgggcactaacacgggctgaggaacgccacagatgcagcttggaattgtgctgacaagagctaaagaggcaaagcttctcttggcgtatgtttcacctcctagttggcacgtggcactggaactcaatgctctcttggggaagaaccactctgacaaagcagaagataaaagccccgattgcccccgaggcacttacgcacttgctcacaacttgcaggcacactgatgacccctctgattggcatggaccgccgccattgctgtcggctctctgagcccaagactggagtctctcttctaaggccccggaaacgcctatctgaccccaggacgttgctggcgacacggaggatccgcatgccct

SEQ ID NO: 674886 - DNA, 120 bp, Homo sapiens
cagcccgccaacaccccttgcaaagtcatctgctgctcccgggggagaggacggcggctcagctactagcccaccagcccaccaggagaaaggaagccatgagaggcagcgcccgccacc

SEQ ID NO: 674887 - DNA, 192 bp, Homo sapiens
tttaagtcactagtagatatgatagagtggtattggttcagaattaagtgttggttgaacaggtggaagattacataaagaaatggggcattgcggtggttcatggcttgtattccgcaggattttgggagggtgagctggagatgatcccttagaggccatggggagttcaatggaccatgctcttagggc

SEQ ID NO: 674888 - DNA, 1155 bp, Homo sapiens
  misc_feature (1155)..(1155): n is a, c, g, or t
cggacgcgtgggtacaagatcaataacattattaatatatctagtcttcttagaaatcgttagcgacaaaaatcttggactcaaaagtatatattgggcacttactgtgtgccaagttctgcattaggtacaggaagccaagcagccaggcaagggaagcaagacacagaaaattaatctcccctctcactgatccctcaaactttgctggacatcttacaggggtagtggcatatgatagccttctatataggtagatgtagctagataaaaaataaatatgtaatagaaaaaggaataggaaattagaccttacccatcctaatactactgtatgttataccttaatggccccaaaagataaatattttactcagatgtaaaccatgtgaacgcctcagatcataggtatacggttgacctaagtcttacaaagaaaaatatccctatccttatgaatacatggtacactatacaagagtgaattatcatagtaaaataaaatctaaatagattcatgagtacacttaacataaagcataaagacctatttatctgaccttgactattgccaagtacatggcaaaaaatctatagcaattataacatggcaatatatgaaactctgatttcccttagaacatcacaggggtaagactgactcattttgactggacaagatgaaggacctaccactaacgggacaggcccagcaacaggacactaacaaaacagaaaaatagaacggtcacaaagcacaaaggcaacaatacaatgcaataaaaaagccctacaatagacagaacgagggacacaacaccaaaagcgacccgtaaaaacaaaaggcaggaacaatacaacagacaccagatcacgcaaaggagaaaaaacgggaaatagtaaagaactacaaatgaagagaggcataacaagagtagaaaaaaagagagaaataaatgaaggaataaactgtggttgacaataaaatagagcaaagtataggcagagacaacaatgaatacgatgtcaatagaaatacagaaatagggttaagttgttacatatagaagcgcagagaacgagataaataaaaaaaaaaacaaggaaaattaagaacatataaaaaatgcataaagggtcaatccatcactcaan

SEQ ID NO: 674889 - DNA, 269 bp, Homo sapiens
  misc_feature (14)..(14): n is a, c, g, or t
  misc_feature (243)..(243): n is a, c, g, or t
agctgggaacctanaagcgtgcgccaaccaatgcccaagctaatttttgtactttttgtagaagacaagaatttcggccattttgcccccaggctggtctttaactgggctcaagcgggtctgcttgcctcaccctcccaaagtgctgggattacagcatgagccaccacgctcagctggaaacagagctttttgattagggccagaagcgtccccctgaactgcatatttgactaatcctgntttcagcagttttaacatcccatgag

SEQ ID NO: 674890 - DNA, 1232 bp, Homo sapiens
ggctgcggagatggagcatccctcggacctgccggcgcgtgcaaagcatttcccctgtatggggctcttaaagccgttgccctcccagagaccttcccggtgttgcgccgccccggccaaagcctcagcctttctggggccttagcttcttcacgtgtaggtggcggcagggaggactggaccacctgtgcgcggcttgggagccctgatgccctaagggtataccatgaggtgcaccgggagggtgacaaagtcgggcggcccactacgtggaccgtgggcccccacaaagaattcggccccccaggggctactggactccaaagaacaagagtaggggatggaactgaccatgggcccaagggccaacacggggagtgaactgggaaagggggccctgcaggggactcaccaggtgggaacacactggaacccatcccagagaaacccaggaacagggccccagaatggcacgggtggtgtcgcccctttcctggggcccttcttggccccctgtggaatcacaattccaaagaggccgcctctcgaaatgggaaaaccccaaccgcaataggaacacccaggcaacgaggaaacaccgcaggaactagacacacctagctttacaacccaacccaggggcggcaccttactcccccgatttatcggtgaactggcacgcacgtggggttccaacacccatatgtttgggccctccgaacacgaggcaatgtgcctgggaccgcccgcggaaattccccttataggcgccgagggagaggcaaacctctccctcggtggggtcaaaaaccccactcatttgaacgacgcaagcacttccccgttggggagagaaactgtggccccccgggtcacaactagtgggagacatgcacaaggggttaggaagtgcgtccgggccgaatcccttccattgtgacctctcatatccgaatagacccatttcaaagccaggaggcttgccatgtgtgcgccaatggccccaagggcccagattgctaaggccgctacacaggggggcaaaacacaatttttcgcagattgaagggggcctccccttgggggacccacgttgtcatagaccgatcacaacatgtatcatgtccagcagaccacccatgtttcgtgcgcgcgccctgctgacctcacggaggaagcttgctggaccacccattgttttgctggagcgtgcctcaggatgcccgcctgac

SEQ ID NO: 674891 - DNA, 497 bp, Homo sapiens
  misc_feature (134)..(134): n is a, c, g, or t
  misc_feature (221)..(221): n is a, c, g, or t
gggtctgtctctatgcttcaacatgtgttgtggcacggaagcagagtccgtggtgactcgtcttccagtcctccgatccgccctccgatttcctctccgcttgcaagcctccgggatccatcttctcgtgccantcttccctgcgttcgtgggaccgtgcccagacaccggttgtatagtaggtttagcgtgccgttcgtttgccgagaccaagccatgangctccccagattcgtgcagagatgtattccacacgaccgtggaagggcgagccccgggttccgaaaaaccaaaggcccgcttgggggtttcccaaaattgtttgtagattaacccctggcacagagggccccttcgcataaacacgcacatagagccattcgtacttcttggggactttcctaaatttgcgaaacacggcggaatcagatggtgtgggcgtacttgggggaaaacgggggccggtttggaaggggccccaaagcatttatcctttc

SEQ ID NO: 674892 - DNA, 390 bp, Homo sapiens
ccgtacctgtggccaggcttgagtccctgatgaattcgacattgacggacgagcttggaaaactaaaagggaaatcagaaaggtcatctgaggaccccactgatgactccaggcttcccagtggccgaagcggcgcagggaaaaggaccagctcaggacccaggtggtgaggctacaagcagagaaggcagacctgtggggcatcgtgtctgaactgcagctcaagctgacctccagcggctcctcagaagattccttggtggaaataaggatggctgaaggagaagcagaagggtcagtaaaagaaatcaagcatagtcctgggccccaacgagaaacagtctccatgggcagggcattgtctaaattataggagcagatctgcagatg

SEQ ID NO: 674893 - DNA, 192 bp, Homo sapiens
  misc_feature (159)..(159): n is a, c, g, or t
gagaagagaagaagggatgagtgagtggaacggaaggaagtgtcttagtctgaaatgcttcgcgtaacttggtgctcaggttcctatgggactttggatgcttaaagggagaagaaactacggccgggtcctcttgcgagaactggcctattgatcttnggatgtggatgattgtgccctgtgaaacatgtc

SEQ ID NO: 674894 - DNA, 562 bp, Homo sapiens
gcccctccctagtctgggatcacctcggtctcccttctgtcttcaggagtcctaatgttgggtactcagaagacagccactatgggtataaggtctagcaaacactgtgcacataagatgccttgcttccttcagtccaggagaagtagcctatagctttcgtgggggttactactatttgttaccagccccgcggttgaaatcataggtcctctaacttattacctgtgatgttgaggcaataactacaattctctgtgcttcaattttctcccatgtgacataggaatactggtagtacttatctcacacaatttttacaaagattaaatgggttaacgtttacaaagtgcttagaactgtacttcacacataatacctgttacttgaatgattgctgtggtcgtcattagctaccatttagagctgtgtgaggaacagattaataacgcctgtccagcacgtatcatggggggcacacacataaactgtaagcaccccattaatgctaagctataattactttggtcaaatatgacacacgtgtctgaaatgacccgct

SEQ ID NO: 674895 - DNA, 701 bp, Homo sapiens
  misc_feature (538)..(538): n is a, c, g, or t
  misc_feature (563)..(563): n is a, c, g, or t
tggaatagtcaataaaatcatttggctttggaaagaacagaggtattttgttcaatagttttgttttctttaggctgagacagcaattatgccatcatcatcactttccatcttttagaaggatattggttaaattttgagttaatgatttttttctccccaagattcctttctagcccctaacattactatagtcttaaactatcttctgtttgtcatacaaaatggcttctcatagaacaacaccaatgtcagggtaggagctgaggaagaaaaagtaaataaaaatacacaaaatccaaactttgttatatgttccattcagtggccttatacatgacttacaaattttgtttgaagtttaattataactaaccactatttaattcgaattcactgctggctgtatttcctgattcagagttccatattgcttctattgctggttttaatttatttgaacctcagtcttctaaattgtctctatttcctatccattattttttatttgcctagaggtacttgaaaatgcattcanaaaaaaaaattcttactcaccattntgtacaactcttcaaaactctaggatatgctacataatgtacataataaaagtagtaatttcaacagaaaatcaagatgccactcgattttgccatggatttataaaatgacacattagaccacagaagcatatgaga

SEQ ID NO: 674896 - DNA, 129 bp, Homo sapiens
caccgctttcctggatctgggtggactggcctgcctctcctccttgtcctgtctcaccctaagcgaaggacagagctctgttctcagataatgacagataatatcagagcttagcagtatatctgactg

SEQ ID NO: 674897 - DNA, 875 bp, Homo sapiens
gccgggcgcggtggctcacgcctgtaatccctaagtgctgggattacaggtgtgagccacagtgcctggcccattcttgagtttgataaagtaattcatacaaagtaccgtgtcctcaaataagtcttccttagctaaatgcaatttaaaattattcaaagatcctagggcacttctagtttcaggtaaatcattcatataaggtggttctcttcatccattgtgttttcacactgatcacataacacaattaccagcagtctaatctagtgacacctcagtcatatttcgtatagattttacctcaaatcagtccaagacttttttcagagatcaccattgtgtctgtgaaaaggttcatttcgtatattaaactgcctaccttataagtaattaacgagaaattaagaaggtagtatgcatttctaatctgaacatggtttacattcttgtgtataataaactaaaagcaaaatgtcataaacaaatttgcggtaaagatataaaatgccacatgaagtattccaaattttctattctaatatttagttcaccatcatggtggaaacaaactactagatcctgttagtatatatattctcctagtgatccagtgagtaataagtaccaaacactagactagaggtcatttctacctcgttcagaacggtgaaccattttatcccctctgtatgtctagctagtttgttcacagggttagtagaaaactccgttacattggcagcaaccccatttacgtgagtaaaatgttctagggcgaaccttcggagttgccgagggtttgcgagagcttgccacaaggtaaaggcccgcactcacaaattgggctaaacttcgcgcggcggatgcagaac

SEQ ID NO: 674898 - DNA, 148 bp, Homo sapiens
ttaccggccgccttttttaggtgccacacttaatagcttcatccacgtcctcatgtactacttactatggtttgtcgtcagtcccttccatagcgtccatacctactagtggaagaagtacatcactcaggggcagctgcttcagttt

SEQ ID NO: 674899 - DNA, 326 bp, Homo sapiens
  misc_feature (15)..(15): n is a, c, g, or t
ctgagaagcagtctngctcttgttgcccaggctggagtgcaatggcgtgatctcgtctcacggcaacctccgcctcctgggttcaagtgagtctcctgcctcatcctcccgagtaggtgggattacaggcatgcgccaccatgcctggctaattgtgtatttttagtagagatggggtttctccatgttggtcaggctgcttgcgaactcccgacctctggtaatccgcccacctcggcctgccaaagtgctgggattacaagtgtgacccactgcactgcgctggctgcagtagcttcttgtcctcccccttctgtcgtcttcta

SEQ ID NO: 674900 - DNA, 384 bp, Homo sapiens
gaatctgtctttaacaaatctccaggagagtctaagtgaacaaccaagttaagaaaccagcagaccagttctcttgtgaccaggtcaaaacaatggcacagcatgcttgtcgctaacacagaagatgtgctttctggcctgtgaaacgcgcctgctctccagtaaaacacagccaagtcaggtgctgggttccagtaagagaagttcatttgagaaaaccaatggtgtcttcgtaaaacaattcaagtgcaattggagataacctcccctaaaatggagtaatgaatgcaaatattcctgttcggaatcatggcaacggacccttctgagaacacacaagagctttagtttgagccgacagtggccttgcaaaacgggctctca

SEQ ID NO: 674901 - DNA, 153 bp, Homo sapiens
gccacaagccgtaacttggccttagcagacccatggagcagctcaagatgtgctgtagaccttctccaagacttcctagcctgtcaattgacatgatgtgagtacacctatggaggcagcaggtggctcgccgagctcttgcctcttttgggc

SEQ ID NO: 674902 - DNA, 517 bp, Homo sapiens
caatgtgcaggcgctcactaactaactggctaagggagctcactaactaactggctaagggagctcactaactaactggcaaggtgcgctcactaactaactggcaagggcgctcactaactaactggctcaggtagctcactacctaactggctcagggagctcactacctaactggctcagggagctcactaactaactggcaagggcgctcactaagtaactggcaagggcgctcactaactcaactggctaagggcgctcactaactaactggcaagggcgctcactacctaactggctacagggagctcactacactacactggctaagggagctcactaattacactggcacgggagcccactaactaacaggctaagggagctcactacctaactggctcagggagctcactacgtacctggctaagggcgctcactaactacctggctaagggagctcactaactacctggctcagggagctcactaactgccaacgcagctcactaac

SEQ ID NO: 674903 - DNA, 122 bp, Homo sapiens
gaaacccactccaccttactaccagacaaccttaggcaaaccatttacccaaataaaggataggcggtaggaattgaaaccttgccggaattaattttggccccccaaggggaaggttgaaa

SEQ ID NO: 674904 - DNA, 371 bp, Homo sapiens
  misc_feature (199)..(199): n is a, c, g, or t
gccgggggtctggaaacgcgcgcatcgcggcggctggtatggtcgaactacacggatctgatcgtttcgaacctccgatttcgttcttgatatgaaaacttttggcaatggtttcgctcccggtcgtcttgcgcggtcccaagaatttccctctagcggcgcaatacgaatgcccccggtcgtccctcttaatcatggnctcagttccgaaaaccaacaaaatagaaccgcggtcctattcccattattcctatgctgcggtatccaggcggctcgggcctgctttgaacactctaattttttcaaagtaaacgcttcgggccccgcggtgacactcagctaagagcatcgagggggcgccgagggctgag

SEQ ID NO: 674905 - DNA, 171 bp, Homo sapiens
gggggtgcattgacagacagacagcaagtgtgcggagtcatctaacattcatgtcatgacactggctctaggacgagcgtttccaacctgtttggactgtttccccctcccttttctaatcgaagaagcttaagcagcaaatgtgggcttttcccagcacaagaacacacg

SEQ ID NO: 674906 - DNA, 377 bp, Homo sapiens
gtgggaggagagctgagaaagagtagagagaatgtgtggtcaggagcacacagtccttggaggactgttcgttagggtagaaatgttttttgtcttgtatataggacaaggagaagactggtgagaaaaagatgaagacagagacagagaagagaggggaaaataagtgtgaagtcttggaagttaggaagggatgactttgacaaggaaggagagacttcttttgtcctcggagcaggggaaaggagacggaacacaggagtgtataccaaaggaatggagtattgacagtgccgtttctggaggccttgactttctcagggcagcagcaggcaaggatgtctgagagtaagtgggaggggtgtcacagagagaat

SEQ ID NO: 674907 - DNA, 515 bp, Homo sapiens
aaacgatatagagccgcccgtgtcatcatgcatgctggtttcacttcaatacttgcgtggcttacaatcaatctgatgttgtccctcaatagatccagagactgctatcggtctggatagtctgccgacacctagtattcagacgcactactgctgatgtcgtgaatggtggttcctcacatatgatccaggacactgtacgagagtctaatgttgtccttcacataggatttagaacactgctcccgtggtctgaatgttgtccttcacatagcattccagaacactgctgctggagtttgaatgtctttccttcacatagaattccagaacatggctgggagggtctgaatagtttgtccctcacatgggataccagaacactgctgcgagggtctaaatgtctcggtccctcacataagattcaggacactgctacgaggttctgaatgtttgtccctcacattgagattccagagcactcctgactgtggtctgaatgtttgtccctcaag

SEQ ID NO: 674908 - DNA, 682 bp, Homo sapiens
ccgttcgagcggccgccctatcccaccgcttcgactacccccaggggacttcccatgccgaaatggggccccctcaccaccaccctggccaccgcatgcctcatcctggcatcaacgagcacccgccttgggctggaccccagcaccctgacttcggcacctcccaccccatggcttcaccgggcagaccccacacatgcggcgacagggcccgcccacacatacaaaacacgatgaccccagactggtccccaagtgtgccctacgttcgatctccctgactgggcatgagtggacacaccccatcgtgaagctggaagatcacgagatacaacgcccattggaccacataaagacatccgcactcccacacccgcatgaccgaccagcagagaggctgactggcctgcaagatggaggacatcctaacacgaacgccccgatccacaccgaccaggcgccaggcaacagctgaacggcatgagagacacgagccgaggccatcatagtgaaggattccatatccagaagacacaacacatgacggggccccgcgagggcagcgaacaaggccaaagcacacacgcaggacacaggcaggacccctccgaggcacatcgcaacacagaccccaacagaaatcaaggggccgtcataccgaccacggccgaactcaaagatc

SEQ ID NO: 674909 - DNA, 163 bp, Homo sapiens
ttttttttgctaacatgtcagtccagtgagagtacggcagcaatcaagtcaccaagtgacctgaattgcttattatgaactgggtgctttctgacccatctagccatcaagggggccatgcacagcagcattcagcatcaaatcatcaaattaaaggtcgacg

SEQ ID NO: 674910 - DNA, 382 bp, Homo sapiens
agttaaaatgttagctattgccatcatcttattacatgaatattagaagacagagcgtacgactaatcatcaaagacaacaacgaaagcaagcaacagatcacaccacaatgttcaactgatggaaatggctaaactaagaaccagaaccggcatttatggcaaatttccccatatcatccttttctttccttcctggagtttttaggtttttaggatgaagtgagctgccttgtatattttcaaatgtggaaaaggtagagaaagaatatcaggtagtaaaaattaaaacatttgtaagtaacagcagaggaatgagggccctggaagcaaattccttggttgtcttagggtcctacttacatggtctcttatttcaaaag

SEQ ID NO: 674911 - DNA, 610 bp, Homo sapiens
  misc_feature (380)..(380): n is a, c, g, or t
agcggagtttggcggctggagaggcagtatgtccggttcaatggcgactgcgtgaagctagcggctgcgatgggaaagggcaggaagtcgagacctcagtcacctattaccggttggaggaggtggcaaagcgcagatctccttgtaaggaactgtggtcttgtgatccatgtggcgagtctacgtatgtctacccgacttcctctaactgatgcacccgtggcaggcagaagatggttctgactggagacaaagtctggtgtatgatgcaatgtgaacagcgtttgaaagatgtgaggacatactcttctgaatgccaggagaagatgctaagagcaggtactacatttggtgatatccatccgagatgaccttaaacnctgaatagtggtagcaatggaacccttcagacagatgatactatgcgataagttggctgggcactagttggagttttaacccattcatacggcgcgtgttcctctttacggtttcccgtggtaccgctaactagcacattcgggaagagcaagagtcctcctggagggagggccttgtgtagaaggttagaaaagttgcattccacgtttgggggccgaaaacttagaga

SEQ ID NO: 674912 - DNA, 149 bp, Homo sapiens
cctctggtgcacatcgaacctggcactcgcgccgtcctgtactgctttcttgattgcaaaaaccccttccgtcagagcagcaggcagagccggcgcttcttctgccgttgtgccttcttcagagcgctgagagccacctaggcgcctaa

SEQ ID NO: 674913 - DNA, 439 bp, Homo sapiens
  misc_feature (282)..(282): n is a, c, g, or t
tctacttcggcgtgagataatggcccgagaaaaatattaaacctgtcgcgtctgtgcacctcaactaatgataccctgcgttttttcttaaacccgactgttataataggcactctctggtgcgtctctacttttaaataacctgcgactgcactatcctgggcgcccaataataccctcttgtataaaaacactctttctcaaacgaaccactacctggcgtttaccttggggggttgtacacaaaagggcttgtgtcacttccgctcaacatctccctgngcccatcaatgaactgtcactcactcgctacaaggttcaacaaccaggtttatcaagcaccttaccacggcatctttgttacaatgtggggtacacataaccaactgtcctatagctttctcaagtattcgccaaccagcatcgtctggtcccctaa

SEQ ID NO: 674914 - DNA, 356 bp, Homo sapiens
ggcttcattaatacagaaaaaagaaaccgtctcccagaaaaccacccactgcgaaacagagtgtgtccgcccatcaacacacaagagcctctttgtgactcaacacgtggggtcgcaagacagagctggtggcactgcggatcacttccatccacctttagaacgtgtactcgcttcccgccctaaagtagtagacgtggcacttaaagtccagcttgaacacgtagtctttctgaatgttctcggactcagagggaatggtaagcgagtacccgaccagagccagcctgccaagggaataattgtcctggtgtgatttgtagaagatgaatttccacagcaggtttccagacacc

SEQ ID NO: 674915 - DNA, 1135 bp, Homo sapiens
  misc_feature (591)..(591): n is a, c, g, or t
gaatccatatctcttcagagcaagtgtggttccgatgagtctcttgtagcacgttacctccgttgtaccatagaatgatttacgttgacgtcatgggtcataactgagatgtcaattagcgttagattgcgagagatcctatcagttaatatttaaatcgtcgaggtcgtataccatcataaggttctctgatgatctctgattgcgaaggctatctcactttgatgtctatagatacgtagtttccgtgctgtccttcttcggcctattgattgacatcgtatcttgggcaattaaaggtcgatcgactcatatccaaagaagttggtcaacgtagtattatataacaaatcgtgacgagtctggtagtctcatttattacatcctatcgctttgttcctggtcgtcgactagcccttggagcacgaaagaccctaatagctttacgaagtggtcgattcgtgctaagaaattatatatggtagggttatattaagacttatatcatatttatacttaattataactagcatcgatggtcttcagggggttgaaagtgaatatatagtccatggtttataagaagaaatnttgactggagagtggttccagagacctatttagtcagggcaagggtgtaaataagtaaagctacttttgggtctgaaaaccataagagtatggagaggttgaattatgatttcactctctaatcataaaagtagttggatttcataatccgagaagtgagaagagtatctaaagttcataggaggtgggactattgggttgagaacaagttaactccttacttttgtagttcctgaggatgaggttggaatatcttatttttcaagcaatttgcggtgcctaaaggaattcaatgataaaattggaatccccctaaagaggaaaccatattgtaaaagctaaagggtgtggaaggtactttaatctaaggggaaatttccgaagataaggtggacgaagagataaaggggagaggttgtatgtggtccatttcgcgagaggtaatagggacattgggtgacgcggcgatgggtttccatggatagaatatagaagacaaacctttgaagtatggggaatagaacttctggagaatgtgggtaac

SEQ ID NO: 674916 - DNA, 122 bp, Homo sapiens
cacgaggggaaccatggctttcctgagggatgtgcatatgttcaagatcggaaattttttgcgacccaggaattttatgctgcttttaatactcaacatcacccccttctcctttgggatgg

SEQ ID NO: 674917 - DNA, 785 bp, Homo sapiens
taaaataaaggataatatcatggtaaggtcttaaattaatttataggggaagtaaccagggggtcttctttaggggatacccttgaacgttatgggggtgttggatttctctattccacaaaggaggggattcagaaaattcggtgacagacaaaaacaatatcccacatagagggtggcatcgaggtacctacgtggtctctcgagagaggccacatggtgtggggaagggtggatgggaggtagaaatccatccaattcgaggggccgtggagagagtgggtcacaccacaaagcctgtgtgtgagttataagcgagggtacaagttacaccgcgtggagcacaaagagatataccactgcgtatcggagcctaaataacgatgtggtggagtgtggtgttatatatgtaggacatctctcagacaaggcccagctctcactaaagagggagacagagaatcaacacccttcaggtggcgagcaccccccacacacctgcgcagagaaaagtagtaacgagaaacaagaactacaacaaaagtagtagggtgtaggggcgagtggcgtggtggcggcatgatgtgaagaggacgagacttaagaacacacgacgtctccacaccagtgtcggctccacaggtgatggtcaactaaacaaccacgtgatgccgaaccgggaggacgtgagaagtaggcggaaaaaaggggggaaactctcgacaaagaagacttctggaggagcaaagagagcatcgcaccagattaacacgaggggccacagt

SEQ ID NO: 674918 - DNA, 152 bp, Homo sapiens
cggcacgagtgaagttacaggtctgagcaataggtgtataaaaatggatctgtcttgagacatcagaagtgattttccagtccttgacaacctagcttgttgaaagctttctgggtttggggggattcagtagtacccttaaggtttagcag

SEQ ID NO: 674919 - DNA, 189 bp, Homo sapiens
ttacattgctgtgctactattattgttattgaaattattattagcaacacttatgtatcaggaggctaggtatgtttcttttggagtcaggtttcactctgtcaccaggctggagtgcagtggcgctgatcatggctcactgcagcctcaacctcctgggctcaagtgattctcccacctcaggctact

SEQ ID NO: 674920 - DNA, 510 bp, Homo sapiens
atcactccccgctgcggggggttgttatataatatagacaacggggtcctttctttgtttgtggcgcgcgctcctcatgctgctcctcgtggggagaccccacttcatcaccgggctcgcgtttgtgttacgccccctctgataatatgaaccagccgcggggttcaggcttattcctcgctctcctccgcggtctgtttagtcttctttgctgccgcgcggtggcgtgagtgaatcacacttctttttcacccaccgtgagtacgcctctctttgttccaccgctgggccgtcttttgggcggctcctcattgtgcgacgttttgtcgtcgagaaaccacggtggtgggtccccgtcgcgggtattctcccgggttagttcttctggtcccccccccctcctccgctcgtggattagttttagggttttggttccccgcggggggggggggggccccccacggggttcctccccttggggccccctgtgaaaaaaaggcccccccctta

SEQ ID NO: 674921 - DNA, 496 bp, Homo sapiens
  misc_feature (11)..(11): n is a, c, g, or t
  misc_feature (46)..(46): n is a, c, g, or t
  misc_feature (88)..(88): n is a, c, g, or t
  misc_feature (99)..(99): n is a, c, g, or t
aaaagcctgtnacagaactgcctcgtgtttcctcattagggttgcntccaccttgagcacacgtgtgggagcaagcgagggaagtcancctaggagggnagctgccgggcctaatgggcggatgggccgcaggggagggaaggcatgctgttggtgactcagagtcagcgagaggtggatttcgccagcaggaagttggattcaggaggcactgccgggtacttttccatcctccctcctctccccctccccaccatgatcctgtggttcaggatgccaaaatgcacaggccaaactcagcttgtttcctagaactgcacgaactgtttggactgacttgaactggtcaaaataaaacaaccgaggaacctgtcaaaatccagtgaagaatgtacactctgcttttgtgcaggtgattgttttgaatgacagtgtttgtgaccaacaacccaccactattttctaccatcaatcatactctactccaaaccaataa

SEQ ID NO: 674922 - DNA, 854 bp, Homo sapiens
ctccaaggaggtggtcaccggcatccgtggggccatcatcctggccaagctctccgggaggcagaggtgctggtggcgcggggagtgcgcgtcacggtgaacgaggcctaccggttccgcgtggtactgcctgtgtacccagcgtcgctcaccgacgtctccctggcgctgagcgagctgcgccgcaacaggactcaggtatctatcgctgtgaggtccagcacggccatcgaatagacagcagcgaccgctgtgagaggtcaaggtcaaaggggtcgtctttctctaccgagagggctctgcccgcctatgctttctccttttctggggcccaggacggcctgtgcccgtataggagcccatcattagccaccccggagacagactctatgtcaggcatatcccttgggtgggctagtgagtcaactgtgagtgctggtctggctgtcggcatcagacccgtgaggtatcccatgccagatccaccaacgagagggccgtcacggagacatggatggacttaccccggggttccggaactagtggtgtgtgtggacccggatgacgctctactgatgtgtactgttatgcggaagacctaaactggagaactgttcctggtgtgaccccgccagagaagctgacattggaggatagcactgggcgtactgcaggagcggggtgctgcagattgtcaccagggtcaaatgtatgcgacccggggatgggtgtctgtaccagtggaggcaaggtgggagcgtgatggcagtgtgggcgtaacccatagtacacccagccaggctggggtgggggctgctggtgtaagaactttcctctcccaacaaagggttccc

SEQ ID NO: 674923 - DNA, 541 bp, Homo sapiens
gatgaggccgttgtccaggatagtgcgtagtacttgagctgccggagttcccggcccagtgacgccaaagtgatcataggcctagatactgggatcgcgagactactcggggtcgtcaaattctgggtggatccaagtgcccttgtaatctgagttgtcgatctgccggggtgttccacacacccttgtactcagggttctgaatcactgggggtacccagtctccgtccatctcttcatcccagacctcgggctatcttagcatcagggtcagggatatgctcgggcttgtcccagtcctcaggcttggagtctgtgggatcatcgatcttggcccgctcatcccagtcttccggttttgaagcatcaggatcctttatcttcttgggtggcaggaagtcccaatcgtcttcccaaggagccggactccacctggctgtggtcaatcttcacctcataggtgtcgtctggccgcacaatcagtgtgtacaggtgtgtaaactcatcatccttgcaagggatgtcttgttgatcagcacag

SEQ ID NO: 674924 - DNA, 1104 bp, Homo sapiens
  misc_feature (607)..(607): n is a, c, g, or t
aatgtcaacatggcttcgcgagaacgtacgtgtcacttccctcttgccagccctcagactcctagcctacagtatccatgatcatgatcaacaaatcgtgaccttgagctgtcgtactggcggcctgttcttacatccctttagtcaggcatacatcataatgtatggaaactcatccacgaaccatctcgctgaacgggtgagttttacgtacctggaatctccgaaccctcataccattcacatacggatactcagcgctgtgcatacgtcgcgactaatagtccgagaggcctgtagtagaatccgtgtcccgcactgtgggccaccacggtgccagtctggagtgtagtaaattcgagcaagggatatctcttataagcctagaggcctcgaattgcaagatggcagctctgcgttaacgagataagatgtgcgaacaggtagagacctggttggatccttagtcggggcgaaagacctctagaccgtggactgtgtggaggacgcgttctggttgtgtacgacccccttggcggtttgatagcggtcggaagcatctcttcatccccccatgtgactattacttgttcacgggaggaagtcnggccctgtcactggtgacgttagcatttcggctcgcaaccgatgggttctgacatccccccagtggtcgcgcggtgttggtggggcctgcgacttgtttcgtccagccggggctggtggtgcccctccctggggttattggggcggtagcctgtgcccgagggaaactaaccccaaactactggagagtggtcatgtgtgccctgttcctgcagtgcgacggtcgtgccatagagacatcgaaacgtgcaacgtcgcactgtccaagtatcgccccaaagtggaagccatgctgctggccttgcacatggaatccgtgggcgcaccagtgcgatccccctatgcagggcgctccgtgacgagtcatttgctccaagttgccccccatgtgttgtccttggaactccaggactggtgtccccgaaagtgactcttggcctagggccaaaaatgggcaatttagctgtccccatcgtacccgtacacctccctggaaca

SEQ ID NO: 674925 - DNA, 339 bp, Homo sapiens
ttcgatgaggtcgcaaatggctgtaatgacaggacacccgtcgaccacgcccaggataattgcttgtatatctattagtagagatggggttacaccaatcttggccagggttgtcttgaactgctgacctcgtgatccacccacctcggtctcccaaagtgctgggattacgaggtgagagccaccgtgcccggccttctttctttttttgagatgctctgtcacctacactggagtgcagtggctctatctcggctcactgcaacctcttgcctcctgagttcaagtgattctcctgcctcagcctccagagtagctaggaatacaggcgcccaccac

SEQ ID NO: 674926 - DNA, 88 bp, Homo sapiens
acagcgaatgtgtcagtagaggtgtgatgactgacaacgacacttgatagatgtctgacgtgagtgttgatgttgagtctatgctctt

SEQ ID NO: 674927 - DNA, 292 bp, Homo sapiens
  misc_feature (32)..(32): n is a, c, g, or t
  misc_feature (46)..(46): n is a, c, g, or t
  misc_feature (84)..(84): n is a, c, g, or t
  misc_feature (86)..(89): n is a, c, g, or t
  misc_feature (129)..(130): n is a, c, g, or t
  misc_feature (166)..(166): n is a, c, g, or t
  misc_feature (252)..(252): n is a, c, g, or t
  misc_feature (279)..(279): n is a, c, g, or t
ctcgtgccaaaatatattatctcaagtatttnttaaaatatatganttctctctccaaatattaactaattattagattatatntnnnntgaacttgttggcccatctattacatctacagctgacccnngaacatgggggttaggggagctgacaattcgtgggnccgcaaaatcttaactacctaatagcctactattgaccataaaccttactgataacataaacagtaaattaacacatattttgcgngttatatgtattatacactatattccnacaataaagtagg

SEQ ID NO: 674928 - DNA, 235 bp, Homo sapiens
aaggggtactagaggatccggaaaatagcgacgcatgggtgggaaagttattccttttcaaattcctttccctctggttgtaacgtgaagaaagaccctctccaggctggaatagccttcgcgctctgacgcgtgttagtctcctgctttgtaaccgagaggccagccccggggccacatcagctggaaagaaggaacacggccgtcggctacatttgcccgttcggtaaatttt

SEQ ID NO: 674929 - DNA, 136 bp, Homo sapiens
aaaagggcaaacaaagctcatgagtgtaaagtccaagattagtttgcgcataacatgaggatatattgcattttagcatggctatcttctgacctcttccagcagttcgtctgccatcattctccctttctggtgg

SEQ ID NO: 674930 - DNA, 614 bp, Homo sapiens
cttgactaaatagcatatctgcaggaaaatatcttgtttgtagtgatatgccccaagagtgaaatcaatcactattggggcatatcactacaaacaagatatgccccagtagtgatggatttcactctagagatgagttatatcacttaatttgttaaatgtatgagtggagagacatgtacactgttcagaagcactgctagcagtccatagtataccagttgatcgctcaaacagctctactcccgtgtctcaacagaactagcgtataagttgccacgcccatatcacgccgtctaccatcacccactgctcgctacaccaacacatctctccgccagccaacgcctcacgccacctttggccagctccatcaatgctggattccgacaaacgtgttcacaacagcagacagttgtccacagtacaacctggaatacgtcagttcgatcggctcactctactcgatagctaaaatgcacacatggggacgcgaccagcggacaagaagttactggtggagaataccaaggcttcgtaacccctgacaggcggaacctggataacactgatctcggtgcagggcacacgggctagccacgtggacacgaaag

SEQ ID NO: 674931 - DNA, 558 bp, Homo sapiens
ggcgccatgtgctgctgcacgcctcgctgtcctgtgtatgtgctgctcttctgctccgccttgggcttcccgcggccactgggggcgctactggtgctgagatctcggataccaactcatctcgtggcaccttccacctacgtggagagagggcaccaccaaaagtgaggtcttctacccaggggagacggttgtacactggtgcctggtgaggcaacagcttgtgtgagtgggggccaaacacatggatgcgtgcgagtacggccgaggcgtcatcccatccatcctggccttcgcgctggccgacatgtgtcttcagcacccagtgacttcctcaccctctttctatactcttcgctcctatgctcggggcctccggcttgagctcagcacctatctctttgggcaggagccttgaccagccaggcctgaaggaagacctgcgcttggagaggagcgggcaggcccgcacatatccacttgctggagcccatgtttacagacagggacatacaccatgcagatcctgagttcctgctgtatgagcagggatatcca

SEQ ID NO: 674932 - DNA, 829 bp, Homo sapiens
gtaggactgggctgtgatatggcaaacgtactgctacgtggcacagcatagttagtgtataattctctcatatgcacactattcatgactaactgagagcatgaacatgatgaggtgcagagttgcagcgtttcaaccgcacgaagtgggtcctgtcattgttttccgtcattctatctagattcagctgtctgattgccaagcacaagggcaccatttgccctctaagcggaggcgtgacttatcataagactggcgttcatgagtgcgcttgcgagtggagaatacttcgcatatgatcagtcacagatatgagccatctgatgggagaatcaagtgatatagagagctgaccctggacttgagtctcgcacaagcgctcaagaatcgtaccatggagatagaggagcacgcagagcctctgtgatgaaccaggtgctagaggctctctcagaatagagttgtggaacccactatgcactagagtctgggtacctctcagcgtgcagtgagtatgcatcttgcatagttcggtgcagagcatcctgcagtgatctggggtactgttggtcgtttgcatttatattctgcctacttgagttcgtcagcagtatacccgtgctcgctgctccacaggagtggcaccagatatagtaaacagcggagctacgtttgagtctggctgttgccaccatctccattgctggtgctaatgcctgctactcgggatgctgctaataggccctgagtctactgggggaagagagatcattccaaatggacacaatcatagggggaagacccttacctggcaggggtgggccaccca

SEQ ID NO: 674933 - DNA, 311 bp, Homo sapiens
  misc_feature (33)..(33): n is a, c, g, or t
  misc_feature (48)..(48): n is a, c, g, or t
  misc_feature (125)..(125): n is a, c, g, or t
  misc_feature (240)..(240): n is a, c, g, or t
  misc_feature (286)..(286): n is a, c, g, or t
  misc_feature (289)..(289): n is a, c, g, or t
cttgaacgaaagatgccgtaagtaccgcaatgnagggaacgaatatantccagggccaaggctcgggcgcaagaggcaagcgcctcctccatcaagcccagcactggcctcaccactgccacttntgcagctgcagctcatgccaccctcccgctctgcctcctggttctcttgcctgcccagggccgtttgctgggtgaaggggcatccccaccatcctcggcccatttccgtttgggnctcagccgtgcccctgggctgccaatcgctggcaccccttggtganccnactgcagcgccttcactctgca

SEQ ID NO: 674934 - DNA, 213 bp, Homo sapiens
catatacgaatcgagctctgtacctgaacattcgtgtccatcaaatgggatgatccccattagctcctcgcgcagtgccaatcatgattgttgcagttcccctatttcaactttcctgatatgcagggggactctctttgccccatcatgtttaaatgcctttgaccactatagtcgatccactgtaatatgctggtatgtctcgagatatat

SEQ ID NO: 674935 - DNA, 618 bp, Homo sapiens
  misc_feature (368)..(368): n is a, c, g, or t
tcattctgggttctatttgccccacacttttcagaagtttccaggcagttgacagggccttttcacctgggttccaatgtttgctgtgaagcaaatgcagcgcctccccttttttttattcccaagcaaaatttctgggttcggcctgtttgttgacccggggtgttcatcatctttggcgggtggggtgtccagtgtacaatcttctcccaatgagtgtgcacgctccacggaggttgttgtccaagagcgttctccgtgctacatacgtccctaaatatactcaccaattggatcacgggggttctgcaaccactctctcaaggtgaccctgtacgcggtggatacatgtgcattttcgcatgttnctatagactcaaggggcactctgcccaaaccaggccatcgggctggcggcgtctccaccttgtttatgagatggtgttcaaatagtctaagtgccggcagggtcacacgccctctgctgtgatgcctgccaaccacatgtcagtccttttctggaatacaaaaaccaattttgcagacctttgcctttgagccacaaacaaattggctggcatcctttgtgccacgatgaaggtctatgtcccgggtagc

SEQ ID NO: 674936 - DNA, 220 bp, Homo sapiens
cgagcaggcacactttcgttagtaactctgcccgagaaacaagttcagcctcgctcaccgggctggccacgatacgggagaagagacttccatggttgtgttgggtttcatttatctccaggcatcatcgccgtgcctcctcacctcacctctcttctctcccgctctctcctcctccacagatgccacacgctggcagctctgaccagccccatccctc

SEQ ID NO: 674937 - DNA, 194 bp, Homo sapiens
ggggggggggtttggccccccccccccccgggggggggttttttttttttccgggtttttttttggggggggggggggcccccccccccccgggttttttttttttcccagagattttttgggggggccccctttttttttttttcccgggcccccggggggtttttttgcccccccccccccccgggggggga

SEQ ID NO: 674938 - DNA, 213 bp, Homo sapiens
tactctagaggatcgttcaggagagagaactggagcctgagcttgctgccaccctccgtgaagctccacttggacaacaacaagttggacaggtgccctcaggctcccagacctcaagctcctccaggtggtctatctgcactccaacaacatcaccaaacgtgggtgtcaacgcacttctgtcccactgggcttcggcggtgaagctgggcc

SEQ ID NO: 674939 - DNA, 435 bp, Homo sapiens
cgatggattgtctggctcaccttcagccctgtgttgagaacacacgtgctcctcctagctgagccttctgagtacactgggactacaggatgtgcactcctcgcgggatacattctcatcatggtcacaggcaggatcttgccaccttgcccagggtggtcttgaaactcctgagctcatgccatctgcctgccttagtctcccaacatgctgggattaccaggagtgacgccacccatgcccggctgccagttgcatggacagagaacacctctttatggcttaccctctagaatttctacattatgtgttctgtggacactttttgtttgtttacctttatggacacacacaaaaagtcagtatggaaacataatctcctgtccactgttgtcaaatgatgatactgtgccatgatgtatcatatcatatcat

SEQ ID NO: 674940 - DNA, 265 bp, Homo sapiens
  misc_feature (167)..(167): n is a, c, g, or t
tcgtcaagagaatactgggaaagggcatgaaagaatctctggatggtaatatcctttatcttgagaagggcatttgtcaaagctcagcaaatgtacaactaagatttgtgctttttcataggtattaaatttttaccctcaaataaataccatagcgccaggcacgngtggctcacgccctagtaaccccgagcatttgagggaggccaaggcagtgtggacacgcttgaggccagagagttcgagaccaccctccgtctttcga

SEQ ID NO: 674941 - DNA, 435 bp, Homo sapiens
caagaattctctaggccccagtggtttcactgatgaagtttaccaaacattgtggaagaaataataattttacataatctcttccagataaagaagaggaaggaacacttctcaattgattttatgagattggcattacccaataaaaccaaagacattacaattaagaaaatgtcaacccaatatcctttaagaacacagacacaaaaatcttataaaatattatcaaattgaatccaaaaatatatttaaaagatattaataatatggcatgatcaagtggggcttatccccagaatgcaaggctcactcaacatttgaaaagccatcaatgtaattcaccacatcaacagtctaaaaaagaataatcacatgaatatcttattggatgaagaaaaagtttagaataaattcagtaatcacttcatgatacac

SEQ ID NO: 674942 - DNA, 145 bp, Homo sapiens
tcattcctacgtatttctggtatgaatgtgttggtgaatgtatgtgtaaaagtctttcttttgcctaagttgcttaggtggggtccgttaaaacatttcccaactaaagaatagaatcgtaaaggaaaagtggtactgttccaac

SEQ ID NO: 674943 - DNA, 470 bp, Homo sapiens
  misc_feature (3)..(3): n is a, c, g, or t
  misc_feature (37)..(37): n is a, c, g, or t
  misc_feature (42)..(42): n is a, c, g, or t
  misc_feature (52)..(52): n is a, c, g, or t
  misc_feature (134)..(134): n is a, c, g, or t
  misc_feature (159)..(159): n is a, c, g, or t
  misc_feature (346)..(346): n is a, c, g, or t
  misc_feature (358)..(358): n is a, c, g, or t
  misc_feature (370)..(370): n is a, c, g, or t
  misc_feature (432)..(432): n is a, c, g, or t
  misc_feature (437)..(437): n is a, c, g, or t
aantcaaaaaaattagccaggtgtgatgttgtgcgcntgtantcccagatanttgtgaggctgaggtgggaggatggtttgggccccggaggtagaggttgcagtgagctgagattgtgccactgtattccatnttgggcaacagagccagaccctgcntcaaaaaaaaaaaaaaaaaaaaaaaggcctggcacagtggctcacgcctgtaatcccagcactttgggaggctgaggcgggcaaaacacttgaggtcagacgtttgagaccagcctggccaacatggtgaaaccccgtttttaccaaaaataaaaataaaaattatccaggcgtggtggcatgtgcntatagccccagntactcaggaagntagagcacgagaattatgtgcatcctggaggtgaaggttgcagtgagccaagatcacaccantccantccagtttggacaacagagtgagaccctgtgtc

SEQ ID NO: 674944 - DNA, 124 bp, Homo sapiens
gcgaatgaggcaatttattaacccagcatggttggctataaggcatcttgttggcagataccacctgtccgtcgatactgtacagatctcagtgtcccttctgtcgtcgtcttgcagcagtata

SEQ ID NO: 674945 - DNA, 121 bp, Homo sapiens
cgccgcagaatcctaatctaacattgtgtgtgaggcggaagggatctctccagcgagagggaatgcggcaattgccagacggacattgcatctgcagaaggagggggtaggatacacgcgg

SEQ ID NO: 674946 - DNA, 157 bp, Homo sapiens
atcaatggtagtacactagaggatatgcaccatactaagattggatccggcgtggagactgcaagactcaagaggcagcattggacacgtaggaatatatatatgacagtggagtagttgttgctgagggctgtgtggttgagtatgtattagctgg

SEQ ID NO: 674947 - DNA, 450 bp, Homo sapiens
  misc_feature (282)..(282): n is a, c, g, or t
  misc_feature (287)..(287): n is a, c, g, or t
  misc_feature (401)..(401): n is a, c, g, or t
  misc_feature (420)..(420): n is a, c, g, or t
  misc_feature (427)..(427): n is a, c, g, or t
  misc_feature (448)..(448): n is a, c, g, or t
aatttcagcatttttttttctatttcagtgaagaatgttattggtattttgatagggattgcattgagtctgtagattgctttaggtagtgtgaacattttaacaatattaatttttctaatgtatgaacatggaatttctttccattttttggtgccctcttcaatttctttcatcagtggtttatagttttcattgtagaaatccttctcttctttgggttaagttaattttgagggtactttattttatttgtgggcaattgggaaatgggaattcccnttccnggatttctttttccaggattgttttctgttgggcatataggaaatgcctacctggatttttggtatgttggatttgtatccccgccaacctttaccggaaattgttgatccagntcccaataggtttccgggngggagtnccaggggttttcccccaatantt

SEQ ID NO: 674948 - DNA, 127 bp, Homo sapiens
caactcttacgaaatcctttttctgagtaactaattagtatctgtccaactctctatatcggtgacaccacaacaatgcaacgtatttggatcttgtctactgcatggcttctatccctgaagattg

SEQ ID NO: 674949 - DNA, 195 bp, Homo sapiens
ccgtgatctcgttctcttcatcttcactctcagtctcactgatctgctctgcttcctcttcttctcgctcttctgtctttcctgggccatctgtccatcccttctgcacgaagattgccctctcctaccctgtccactccaagaaactccctctccctccagcatggctgttccttcccgcacgcttcctctctc

SEQ ID NO: 674950 - DNA, 178 bp, Homo sapiens
  misc_feature (66)..(66): n is a, c, g, or t
tgcaacaacacacttggaccctctgggctggggtttgactgacctcaagctgaaataaggggaccnataccagctgtgataacccatgggagagcctaggcaggaccagtggggcccaaatcttgctgctcttgcacttttaggcactgcccttgcagactcacctttctccacctgc

SEQ ID NO: 674951 - DNA, 133 bp, Homo sapiens
gcacagtagtgggtcattggaaaaagggcgaggtctgggtgattatcccaggatctggaactctcccacccctcctgcagttggactgaattcttccctttcatccgaaggacccacttgctgtttccagccg

SEQ ID NO: 674952 - DNA, 112 bp, Homo sapiens
ggtcccctctgagcagagggcctctggtcagtcagtcctctccaggacctaacgaatctggctctgcctgaatcatcgatgacggggcaaaggcgagtggggcagatgggag

SEQ ID NO: 674953 - DNA, 172 bp, Homo sapiens
ttagaggatccccggtacttgcgcctgggatatggaggttgcagtgagctgagatggcgccactgcattccagcctgggtgacaagagcgagactctgacaccaaaaaaaaaaagtaagcttcatgaatttaaagtatttttcccttgtgcctgtgaaggattttctggttt

SEQ ID NO: 674954 - DNA, 307 bp, Homo sapiens
tacagcttacaattctgatacggagtggtaaatccagtcgatggaatccagcgtctcgtactcaaatgccaccttttattgtcctagttcttatttctcgggaaaggagggttctactttagcacattttatgagccagcagtggactttagttacaatgtgtaggttccttgtggtcctagctgcagaagaagccatcaaattcttgaggacttgacatctctcggaaagaagcaaactagtagactgatgagctggattgcttagattgataacatttacaaataggagtccagttgacatgcta

SEQ ID NO: 674955 - DNA, 1065 bp, Homo sapiens
ggaaaatgtggtcatcctaaacatgccgtatttacttgacaggaaggacgagagggcaggccctaacatccagtgatcctgtgggcaagtgaatgctatgctttcctttgtgctcctgattgggcagtactgagccccacggaaccctgagattctcattagggaaccttacagggccagatattctaggcagcaggacaagtgacccaaattcttttattaccttctggacctttaccccatgatagagtcttgcagacacaacacagaagtgggatgcagacatgtaccaggcagacctagatgacagactctggctcagagtctggctcgtagctgcctcctgaaactcaaatgctcatcatctctcttcttcaactggccttgccatacttaccaccaaaccaccatctccaccatttcaacatctaaaaaaaacgatatcaaaaactcacatgagcataaggcccaaactgacactcacactaaagctatataatacaatcagatcccaccctccagaccacttcgaagataggataccccgctgaaataaccccccaagggcaatcgagaaagcccacagatcggaacaagacaccaatcagtgaaaacataccaacccaacatactcggagacacccacctgagaccacaactcagcatccattcaacaccatgacacatggcatccacgatcacaggcctcaagaacaacacccaccccactacctacccaacacgccaagcccccgaacacccaaaagggggcacaccataccgccaccctggacagccatcaccccgcgaacaccccccaccacaaaacaccacagacaaccaacacccgaagaattaagaaagcatagaacacgaagcaacacccagccctaacgccccagacccagctaacaaaaactacgcacggtcaatccccgacgccaactccacgagaagacgcaagcaacatcacacaccccaccaccacccacagaccgaacatctcgaattgcgcaacgccatctcaacacaccaaaccaacaccgccgccaatcacatactccc

SEQ ID NO: 674956 - DNA, 126 bp, Homo sapiens
aacaaggtcgtgaaaaaaaaggtattgggtagaggtcccgccatttaaatctgtccctcaattctcttgcgccttgcgcaagagcttccagcagcggtaatgtgggccaagaagcatccggaggtt

SEQ ID NO: 674957 - DNA, 881 bp, Homo sapiens
aacggacgaaccgcagaggtgacctgtttagagaggcactacacccgcacgttggggcaagaaggggacacattcggcccggagaattagccctgggaaaagggacccctctggaccgggcatcccaccggggggcaagtgagcatgtgaaagtctggtacaccaaggaggacacttgtgagaccgcgccgacaccacttcaagacctgggcgccctgccccccgggttgcatgggaccggaacagcagtgaggcacaattgccccgggccacgcatgactataaaggggtcctccgtcgagcaacagattaaacagcgcggtacccccccaggagcaaacgcgaggggaagagttcccggcgacaacaccgacaagctaggggttgttgaacaacaaaaagcccccaggggggctaattcctccaagaggagccctcagcaaccccctccccagagcgatcttgcgaggccaaatctcagtctgcgcccacactccttcaagaacgcgcccccgcggtcataccgggtgcaaacatggtctccaaaaaacaccggaggcgatgttggaaccccccccccagaagactgcccaagggctgccaccagtggcgctccgtcgcaacaaacttgcccgatgcacgaacagtgcaacagggatcagcgtgctcgcttccccacgccacgtcaataatgggtactcctcacaggtgaggggaaaagcatgttccctgcaaatatatattcgaggcgaggcaccttatatctggtttggagaaacgccccttctgatgctctcccagcgttggagggttccccccccccattttggtccctcctttttcgcccgagtaaaaagcccctacttttcccccaaaaaaca

SEQ ID NO: 674958 - DNA, 201 bp, Homo sapiens
gcgagcccccactactactaaatttgcggccgctcgacttcaatggcttttagtatattcacagaggtgcaaccatcaccacaatcaatcttaggacatttttattaagccctcccttctagatcacttagccatcaccaaaaattccccccatcccacccagcccatggaactactaatctcctttctgtctctacagat

SEQ ID NO: 674959 - DNA, 896 bp, Homo sapiens
acttcaggagcggcagtgctgaccaagcgcgcgcctcctcttgggccccacggtccgctgccggaactcatcatcttcctgcacacgctcaacaatcgatctttgagccatacgtggccgtgagagacgcagccaaaatgaacgatcccacacagtgggcgagtcagtggacaccaaacatgctaaccgctcgtgcctcatcaccgtacccatgtaacccggcaatgacgacgtctccgctggcttgtgcaccgtcgtactgcgaggctcttccagaccggccatcaccctgggcacaaggagaagcgcgaagcaggttgaggcttctctatcgcctgcagggccagaaggagcccggggacccacgggccaagtccgcacctctccatggggctgacgatgagccgttcccgtgtgcatgttcgacatcatccatcccaaaagcaaactcacacgtccaagcgctgtcgtgagctgggaatccctcgttcccgcagacctgggtcagcggcatccatcagtcgtcgttacttactcagctgatgtcgcagtgcagacatccatcgttccacactctagaaccatgtggctgagctggaccaaccgttgccatgtgcgttgcaactgtaggggaacagagcacagagggtgagcgacatgtgcacaagaggcgccttgggtgcacgttaggactcagtggcgtggtatgcgcgagcctgctatgaagatgctgcgtgtccatgtgaacccagcaggccatcccttcaccgtgacccctgtgacctttggtcaggaagggtgcaagctattcttcgcaatctaaaatgcctgtcaacgtggtgccggtttcgttagggaacctgggtccaaggaggctggaaagaaacggaagaatg

SEQ ID NO: 674960 - DNA, 187 bp, Homo sapiens
caaaaggtcagagggaggagtcagaactgtgcctattccctgccacttttgttccagttcttttattcatttatttgtttgtttgagacggagtttcactcttgttgcccaggctggagtgcaatggcacaatcttggctcactgcaacctccacctcctgggttcaatcgattctcctgcctctgc

SEQ ID NO: 674961 - DNA, 410 bp, Homo sapiens
gaagatgtagtcttacacattcttacaaatagaaaacacacacttcaatttctgaaaagagtcagatacaacaaaactggataggaaaatataaaaaagatcacctaccaagactgtaaacaagaaaacaaggcctatgaccatctgcagagaagttgaatccaccatgatcatacaaatatcatctcctaggtacccactgccaactagctaatcaataatatctgcaactgtttctgaaatccaagtttcttaatcttatttaatctacctgcagaaattagttttacaatcagaagaactaggttaaaagactatgaatagtatacctaaaatataaatggcttacccttcttggctattttttaaaaatttaaaaaagaagaaacccaggtttgggggctgaggag

SEQ ID NO: 674962 - DNA, 402 bp, Homo sapiens
  misc_feature (39)..(39): n is a, c, g, or t
  misc_feature (67)..(67): n is a, c, g, or t
  misc_feature (71)..(71): n is a, c, g, or t
  misc_feature (82)..(82): n is a, c, g, or t
  misc_feature (88)..(88): n is a, c, g, or t
  misc_feature (122)..(122): n is a, c, g, or t
  misc_feature (126)..(126): n is a, c, g, or t
  misc_feature (141)..(141): n is a, c, g, or t
  misc_feature (190)..(190): n is a, c, g, or t
  misc_feature (193)..(193): n is a, c, g, or t
  misc_feature (197)..(197): n is a, c, g, or t
  misc_feature (204)..(204): n is a, c, g, or t
  misc_feature (209)..(209): n is a, c, g, or t
  misc_feature (235)..(235): n is a, c, g, or t
  misc_feature (243)..(244): n is a, c, g, or t
  misc_feature (256)..(256): n is a, c, g, or t
  misc_feature (284)..(284): n is a, c, g, or t
  misc_feature (291)..(291): n is a, c, g, or t
  misc_feature (297)..(297): n is a, c, g, or t
  misc_feature (299)..(299): n is a, c, g, or t
  misc_feature (328)..(328): n is a, c, g, or t
  misc_feature (381)..(381): n is a, c, g, or t
cgtagttcttgagcagtgcgtcgatggttgtgcgacgtntgtgtcaaacttgctgtaggtgctggcntgangatctggcgcnaggtcncgggcggctgccgtcgttcgaggcctccgccatnaggngtttggatgccttgntctaggtcctttaggaggtgatagtcatcgctgtcccgaggtgtcatanacnaggntgttggngaagntgctcctgaggaaccgcacggggtcnagccacgnntcgatgagcagnagggtgatgcggagagctctagattggntttctgnggcggntnctgcatgttggagggtgtgggaatagagngtgagaagcagaaggaggtctgggggtgatgcaggaatgggtagttgtggtgntttgggatataggtttcttca

SEQ ID NO: 674963 - DNA, 879 bp, Homo sapiens
  misc_feature (41)..(41): n is a, c, g, or t
  misc_feature (91)..(91): n is a, c, g, or t
  misc_feature (119)..(119): n is a, c, g, or t
  misc_feature (125)..(125): n is a, c, g, or t
  misc_feature (128)..(128): n is a, c, g, or t
  misc_feature (159)..(159): n is a, c, g, or t
  misc_feature (354)..(354): n is a, c, g, or t
  misc_feature (410)..(410): n is a, c, g, or t
  misc_feature (415)..(415): n is a, c, g, or t
  misc_feature (424)..(424): n is a, c, g, or t
  misc_feature (427)..(427): n is a, c, g, or t
  misc_feature (445)..(445): n is a, c, g, or t
  misc_feature (464)..(464): n is a, c, g, or t
  misc_feature (467)..(468): n is a, c, g, or t
  misc_feature (479)..(479): n is a, c, g, or t
  misc_feature (493)..(493): n is a, c, g, or t
  misc_feature (516)..(516): n is a, c, g, or t
  misc_feature (525)..(525): n is a, c, g, or t
  misc_feature (531)..(531): n is a, c, g, or t
  misc_feature (568)..(568): n is a, c, g, or t
  misc_feature (581)..(581): n is a, c, g, or t
  misc_feature (608)..(609): n is a, c, g, or t
  misc_feature (621)..(621): n is a, c, g, or t
  misc_feature (641)..(641): n is a, c, g, or t
  misc_feature (647)..(647): n is a, c, g, or t
  misc_feature (659)..(659): n is a, c, g, or t
  misc_feature (669)..(670): n is a, c, g, or t
  misc_feature (727)..(727): n is a, c, g, or t
  misc_feature (755)..(755): n is a, c, g, or t
  misc_feature (789)..(789): n is a, c, g, or t
  misc_feature (798)..(799): n is a, c, g, or t
  misc_feature (804)..(804): n is a, c, g, or t
  misc_feature (816)..(816): n is a, c, g, or t
  misc_feature (822)..(822): n is a, c, g, or t
attgtacttcataaacagaaaagagaaatatcctgggagcnggaagtgaactcttttctcagataatgttctctaaatccgcgagagcganggtccatgctcccggctcttagcaggtngttggnggncacttggttatagcggcggggggccagaggnctgcgtctcactgaggaatgtgttcagggaagatgtcaacactggccgggaaaaacatcaggctttcacctcactcatggcctccataaggcgagcgctgtttgtgactgctgtcgtcaggaaaatgaacctgtagtcctttctctctgcccaggaaccggagggctgagatctcagagaatgtacaaccacccnagaacaccaccaagatgagtgtcgtcgtgtgactcactgtgaagtccttgtgcttnccttnagttgcatnatnctgttgtaatgtcgaaanttcaactgtcagtttgtantcnntccgtttaccnaccttcaatctaantgtcccctgtccagtctttcgcncgtctactnagtcancctgtctaccaatgtatttcgtgtcagtcttcagtgntgtcaccataaantcaaccaaccgtaagtacgttaagtcnnatgttcttcgtngtgtcacttttacagtatcnataacntcgtccgttccnacaacgttgnngtattcaaaatttcagtctttttttgtctgtatgtgtcacgtaaaaaattgtctccntctttgtgtccagtagtaaactgtaagngtcattcagtttaattcttttccctgtcagtccnttgtttcgnnttcanccagtctttgtnttcaantttttacttcttcccacgtgtctgttgtaggtgttgttccccgttttttttcctgtc

SEQ ID NO: 674964 - DNA, 639 bp, Homo sapiens
actacggcgctggtttctcagaacgaggttgtcactgtgaatcgagctggcaaggttccagcgccacttagcctatgaggactaaatcttaaatgtgtcagactgatggaagacacatagcatgtaacacatcagactaacacctgatgctatttgacaataccaatgtcccaaaatgagcatgatcgtccgcacaaaggcatactaaatacaatctacacgttatattgctcactgcacattacaacttatgctcggctagaatactgatgatatacaactaccgctctattagtgcccgattgctctcgctaactcacttcactaacctttcatagagcataggagcattacccatgatctgatggacttagaattacggctcaaaaaccgctgttactcaaacgagggtcattgataactctatcagaaacgtttaggaaagtgtaatagtacttcctaaataggagcataatccacttaagcactctcatcggaatggtacctactcgtctggacccttatgcacgatgtacatgaatttccctcacgacgattccataacaactaatgattaatgaacgttcagtgcaagtagggcaaactcataccatcgcacggtccgtgatgcacgtccca

SEQ ID NO: 674965 - DNA, 1384 bp, Homo sapiens
agcggggtccttgaggagacatcccgtccctggcccggcggatggacgatagtcgtgtgcgcaccgtgttggtctgtcgcatgctgcagtctcccgtaggcaccggatcagctctttgcctgcactgtccgtatgccgagtccgggttcgcctcttctcgccgagttgacgtgctggctcgccgcctttctcggtgtgtcttcgccgtatcgtcttcgcgacgtgtggcgctcgtgatcttgttcggcgtacgtaggtcttggtaccttgccaacggggctgcgcacgagtatgcgaacgtatccaggattgtatgctagttacctctacgcggcgagtgcacactacgcgatcgcgagggaatcgcactgtgctccaacggctgcgagcctcccagcagcatccctgctgtctcgttgccttcttcggtgagtcacacgctcgcctgagaagccgctatgtctgggcggaagtcaacgcagactcatcttactcgagtgggtccctttcgagtagagtacggtagcacgaacacagaacaccgctgaccgacctcgctagaaaccgcgttgaggcaacacgtccacccacgcgcgcgggcagagcaccccctctcctggccctcgctccaactggtcccgcgctcctgtgtagtgagccccgccctcggcgcacacgggcgccgttctccctcacctgtgtccgccccgttttcgcccgtcactacctggcggcgacgatcggtccccacctcctgtcctccccgcgcttctttgacgtcgccgcctaccgttggcccttgtccttctggccttgtgcattcctgccgccgtcccccgtgggcctaccggcttggcccctcgcgttctttgccctctcttcgtccgcttggcgcctaggcccttggctgctggcgaacacaccccttggggcacgccgcccgggaggttgagtcccccttcgtggcgggtccctcgccactgagggctcctctttccactgccgaagctgggactcgcgccgctacccggcggtttagcttgatcgccgccttggggcccccggcgtagcgtccgtacctccgaatttaaagagccgtttgcacgagattcctcgggttcccacgtttggtgggagcccctctggtaattccctgggtgtggcacttcccccgcgcccccttcgcgggccctctcggaggccgcccacgtctagcaggcccctttggcgagaaactgctgtcgctctgtcgctttcacgctgtttgtgggggcccctcggcctgggagaggtgatcgtgtctcggtccgaccactgccgctccgtccgcgctcgaccatccccagcactcccgccatctgtccccgctccgtcgcccgtccct

SEQ ID NO: 674966 - DNA, 362 bp, Homo sapiens
ccccctccccggataattactgaaaagtttgactggctttgttttatttaaagggaattatggaggtttggtttggagacggagtctaactctgtcacccaggctgccgtgcagtgttgcgatcttggctcaccacaccgtccgcctcctgcattcaagccattctcgtgatctgcccgcctaagcctcccaaagtgctgggattacaggtgtgagccaccatgcccgaccgccttatttttatttttttgagacagtgtcttgttctgtcacccaggctggagtgcagtgttgtgatctcggttcactgcagcctctgccttctgggttcaagtgattcttgtgcctcagcctcccaagta

SEQ ID NO: 674967 - DNA, 296 bp, Homo sapiens
  misc_feature (51)..(51): n is a, c, g, or t
  misc_feature (63)..(63): n is a, c, g, or t
  misc_feature (95)..(95): n is a, c, g, or t
  misc_feature (132)..(132): n is a, c, g, or t
  misc_feature (246)..(246): n is a, c, g, or t
cacccaggctggggtgcaatggcacaatcttggctcaccgcaacctccgtntccattcaagtnattcccctgcctcagcctccaaagtagctgtnattacaggtatgcaccaccacgcctagctaatttttngtattttaagtagagatggggtttcaccatgttggccaggttggtctcaaactcctgacctcaggtgatctgcctgcctcggccttccaaagtcttggggattataggcgtaancacttgcacctgggcctctaatcctcaattttgtaggtgtcaatttcaat

SEQ ID NO: 674968 - DNA, 195 bp, Homo sapiens
accacgcttggtatgcagagtaacaaatttatttccagcactttgtcagtcgccttacaatgtatcctttttctccccctagaagtaagagagagtctaacttgtttcccgatgtaagaaggttatgtctgccctctgccactaacgtctctagatacattgtttctccagcgtgtgatccctgaccaaagtctt

SEQ ID NO: 674969 - DNA, 259 bp, Homo sapiens
aggagtcccgctacgattctccaggtgttttcattggtcgtgtagcgccgctcctgtttcctcatcttcagctgtccctcggtccctgtgtgagctttgttctcgacagagggggctcagatggtgcggcctgagtgtgcggccggcggcatttgggatacacccgtagggtgggcggggtgtgtcccaggcctaattccatctttccaccatgacagagatgcccttgtgaggctggcctccttggccccttatcgag

SEQ ID NO: 674970 - DNA, 1193 bp, Homo sapiens
cacaagaaaagaatcccgcgggagtctacaggaaacatgtgctcagcagtgacagactgtctgtaaaaataaacccaagtatgtcggatcctgacggaatccagggcgaaactgatgaactagtgaacgcagcgagattgctggttacagatactctgcagggactgcctacagcgttctcccggtaacgacttacagcagtgccattggcaactcatacagcaagatgatgtagtgagaaacacatactacacgtggctgcacggagtgtgcattgaactttcctttgatgataggtacttccatactcttggcggctacgcccatggtccgctgtttcggctgctgcgcgcgtactgcttgcgctctcactctgcgtctacaggcagccgtggcatgtcgcgcggacagtccgctgccttacactgtccatacacagaccgatagcttctaaccttcatagctcgcaaaagagaggaacttctgacgcagatgtcccaaggcgccaagtgacttatgactttccagatatcatcgtcgtcgtgcgtgcctacgtggattgccctcggatctggagaccaatatcaagatgatctttgcagcgaacatttctcatgatgaagctattgatgcaagacacggactgaccttgagaaccgagcaagttgacccacgcgtgcatgctgcggagctggggcctaccgcagaaagggtcagggctgcctgttccttctaggacgcgctagtatcctgctgctcagtggctttccttgggcatttgatcggcaccgacaggaaacagtcgagacaacattgatgaggaacgcacaatcttaggacacacaacatgagttgaagaccatttagcggcttggacttgaagcaacgatttagccactagggacttacacgggcttggacccaacacagggtggtctccaatgaccccaatatgtcccaaacgagatatacgagacacgaggagcaaaaaggccgttttctcctagggggcaatacggttcaaccacgacagctaagagagacgtgactctaagaggaccaccagggattagttctaagaacgaaatcggacgcagacaagactgcaaaacaaaggcgtattgagctgcgcgcaaaaacacatcgttgtaagccgtatcacaacatgattgtcaatgactccatcgatctac

SEQ ID NO: 674971 - DNA, 1158 bp, Homo sapiens
aaaaagactatgttagcaagtgtcacgccatgcatagggcgaacatattccaattaaaggttgacatatcctgcataagcatttctctgtgaaaatgtccttgcctcattcacagaggcagcagcaggcaacacaagcattgcaagcagcaatcgacaacaaggctctgggccgcagcagctgagcaagttattggccagccaacgagcatctagcaggactagctcgggcacctccatatgctggcaacccattccaggaccaagcaaggcccatcccaaaatttcccaagggagatcttgtacagccagtgcagccatggtgatcatatttcaagcaaacagaatctcagtagctccatctacatgctgcaccacaagacctacatgcattccccaaagctttcacaaggccacaagggcacatatggccaacaagccagcaagacaatgcccaacagccatgcccaggccaacagtcccacgatacgtcacaatgagcatcatcaactggcacatctacatcctacacctagggccaacaaaaggtcctaccagaaggctccactaaaacaacaaccatcattgaacttatgcagttcacagtccacaggttccatgccatcaggctatcaacctgacgaatacacggtacacaccccctcttgctaacaccacaacctccatacaggccttcatggcccacacacaacgaagttcccaagcagaacaacagctcattccctccagaggacaaggactcccccaaggaaatacgaacagtgcagcaaggcccacgaaccaaccaacagacctgcaccgtctggcggcaagaacactgactataacttccattactacacatcaaaaaaaaggtaaaagcaccaaaaaacaccggaaaatatccaaaccgaaaagaccaacggaccccacacacaccacaacacggcaaagcactcaacaaacagcagccacggaagccagcgaaaagggagaaacccaaacccagaacacgcaaacgacacaaaaaacgcaaaacccacgaccaagagaaacacaagtaagcaccaacaaactaacccccagaccacacaagcaccccacccacacaaatacacaacaaaaaacccaaaccacaaaaacacacacacaaacaaca

SEQ ID NO: 674972 - DNA, 460 bp, Homo sapiens
tgcaatattgaggtctatactcacgtggtcgcttgccaacatactttattgccagctgttcaggtgtcatcttatcttctatcttctacagaccttatagtaattcttggctaatccaacatctctttaccactgatacatatgtgttacaatgttcactgtagtcctgaagttgtcaaaccttccatccaactcttcttatgcaaatttagcaacatctatctgttccagtacatttgtccgatagttaatagtaatggagtcataatgtctgtttagtccatgaattacatgcctggatagatggcttgtctcagtgacccagattcgaagtagtacgtcttggttcatgtcctaagaacatcatatgagcattgatcaatctgaaggcctcaataacaacctaacctttaacacactgaatgggatccacaaacactgccacagatctctccgaaaa

SEQ ID NO: 674973 - DNA, 193 bp, Homo sapiens
tccggggggcccccccccccccgggccccccccccccccctttttttaagggggggcccccccccgggggtccggggggggttgcccccccttttttttccccccggcccgggggggggggggggtttttggaagtttaggcccccccccccttccggccccccccccattaaaccctttttttgggggggga

SEQ ID NO: 674974 - DNA, 920 bp, Homo sapiens
agcgtggtgctgagtcagttcctgggtggggccaacaagatcaaatgaggcagtttattgatctgggtggtaccagctgatccgtcaagtacagggtctgcaaagatatctcaagcactggatcttaggagcagatttcgggggagggtcacgaatcttgataggtctaccagtatgcagtgactcgatctcctaacaccgtaacttgtcgtaactcattgtggcatacaatgtgtatagatccaagcaacacggtagatctagacaccccagtgcaacgaacggtggctctagttatatggagaacaggacgtgtatagtcgatacttggatctattaacactcagtaagcgtagagttccgtcgccagaaggttgagttcacgccgtagtgccgcaacgacatggacgacagaagcagactatgagaggcttcagaagccaacgaatgcgacgtatggtatacggatcacgaatcatcttgtcagctgagtcttcagattagtaagtgtttgacaacatggtggaatattcagacataacttgaggacggactgaagcgcagtgcagaactcagctagggaccacagagcaggtcgcgcaggtagccagagcaaccgaaagatacacgaccaatagcactgacacgattggcgtgacgcagagtcgagcactctggtctacaaaaacaggacaaaaaaacagcatctacgacaacaaacctcgtggctaggcctacactggggcacaaacctcagcactgcgtatccccaacgtacagaaaccaggggaatcaaaggaagcagcagcacagaatccccatgcaccacgacttgcacaagacactactgaggtacccgtccgtagagaagatacaccagacgacacagcggaatctaaagccaataacaccagcgataa

SEQ ID NO: 674975 - DNA, 1166 bp, Homo sapiens
  misc_feature (691)..(691): n is a, c, g, or t
taactctcagatatttaatttttcttagtctgacattaggttatgagaagtacaaaagatccacaagtacaaaaaaatctgtatagcttggcggtagttgaaaaaaatgcaagagaacaaaaaaatttttaggagtaatattcatctctgcagatctgagtgacagtccgcttgaaacaccgctgtacaaagtgggtaaaaaagtgatttcatgtggtgattatgtttaaaattttggagtgtctctttaactgtggtttaggaaatcgtgtcttcgtgacatttatacgtggatagtctcttttccgtggtatttggctgaagctcaattcccgtgcctcttcaggggcttcaagtgagtgacactttgggtttttatagtcaggctaggtgagtgtttggtccaaaggaagattctgacaacaggcttcagcagaaagaaaatcgtggatatagggtttatagtatatgggtcctttccaaagtaaaaaaaaaaaaaaaaaaggttggaaaaatttggggtgacttttctagaggggtaaatttctcttctccggcagggatttaacattggagggaataaatttcccttggatgcagttttttccccaagagttttttcaaaacactttcttgaacagatgaattcttttacatatccctaggattcggggtaacagatgacatacgnggacatagggaaaaagcccaggataacacaggcacctatctaaccaaagatcccgggtggcacacacaccacggagaaccacaggggaacatacgaacctctggaaggggggacaataagaaacaaaccaaaaaaaccacgctgataataaaaccaagagaatgatacaccacggggccgcagagggtataaaacacacaggggccaaatgaacaaagaaaaagcacaatacagcgggtcgcacagggaacaaaacactattacccggaagagaaaaaaaaaagaagtaaaggggacaacaaactaccgcacaacaaccacaaataactaagagacccaccactcactagaagaagcaactacgtcgaggagcgaatgacgaacgccagaaagagaaaagcacgaatgtgaaacacgagacaaaagaaggcggcagaacaaccaaagaaaggagagcacacaaagaaaaatgatg

SEQ ID NO: 674976 - DNA, 265 bp, Homo sapiens
cccgcagtgggccacatccaaggaatttttgatccaaagccatcccagcccttcccgggccccttttcctggcaaatgactttccccggttttgggtcctgcctgcccattcataccagtttgaactgcaacagcctagctcctcccctgtgcccccccttccccaggggggcacgtttccagccccgagggggggttttcctgctcatttgggtttcctgggcaaaaaggggcccccaataaatgtttgttgagtgagaacata

SEQ ID NO: 674977 - DNA, 160 bp, Homo sapiens
cgggctggatgggttatgtggcccaaacaggaatgagtgtagccggcccaatctttcctctcaattggttttcctggttgccaagacttattaacggagaaaaggagagagaattcaattagagggattaaaaatggttaaggggaatatccccacgggg

SEQ ID NO: 674978 - DNA, 518 bp, Homo sapiens
  misc_feature (1)..(1): n is a, c, g, or t
ngggcggtaactccaaagtctcctttttttctcaaccctttggtgaccacgccaccttacttttcagtgggcatgttaatgacccttacgttcccaagattttaatctgagacattcccctccaggcagacataggccccctttttaaaaaggagggtcaatcacagaaccaatctgcacttgttgagctcgtaaatcacaagcgcaaggcatcaaaagagcaccttaaagctgttatgaatgatttcccagcttttgtagagaagtgctccaaggctacaattaaggagtcttgctttgccgaggagggtaaaaaccttgttcctgcaagtcgagctgccttaggctcataacatcacatgtaaaagcatctcagcctaccatgagaataagagaaagaaaatgaagatccaaagcttattcagcggtttttctttttcggtggtgtaaagccaacaccctgtctaagaaacataaacttctttaatcattttgcctcttttctctgaaattcaatt

SEQ ID NO: 674979 - DNA, 221 bp, Homo sapiens
tgcggtccgtcgataaactgctatctggtgactcttctaagagaacgaagagttgtcagcagtttttacaagaatcgggacctccgctgcttcttttttccaagattggacacttagagtggtatcggttttttcttggcagatgttagtgtgaacgtccttgtgaggggatttagaggtctcggtgtatcggtgtccgtgaataggcagttacatcgagt

SEQ ID NO: 674980 - DNA, 224 bp, Homo sapiens
tcaaaaatcccaggtaccacatccttgcagcctttccctcatataccccccctaatatctggagccctgtccttccctccagcccccctttggccctgggggtggggaagtgtttgtgtccaactgtttcccctgacctcagggttccttggggggtgggcttaggcctcagtacaaagggggctttggaagtgtttgttggctgaataaaggaattcagtgga

SEQ ID NO: 674981 - DNA, 107 bp, Homo sapiens
tcagtcggtacccctagcattgtcatttatatacattaatgaaatcctgatgaggacctgctttttgtttgttttcctttgaaacccagctgccaatggttccattg

SEQ ID NO: 674982 - DNA, 705 bp, Homo sapiens
  misc_feature (301)..(301): n is a, c, g, or t
  misc_feature (395)..(395): n is a, c, g, or t
  misc_feature (402)..(402): n is a, c, g, or t
  misc_feature (404)..(404): n is a, c, g, or t
  misc_feature (410)..(410): n is a, c, g, or t
  misc_feature (455)..(455): n is a, c, g, or t
  misc_feature (457)..(457): n is a, c, g, or t
  misc_feature (511)..(512): n is a, c, g, or t
  misc_feature (517)..(517): n is a, c, g, or t
  misc_feature (532)..(532): n is a, c, g, or t
atgatcatcctacccgagatggtgggcagcatggtgggcgtctacaatcccagctacttgggaggctgaggcaggagaatcacttgaacccgggaggcggaggttgcagtgagccgagatcgcaccattgcactccagtctgggcaacagagtgagattccgtctcaaaaaaaaaaaaagaaagggaaaaaaaaatagctttatacctctttcctggtctcaaccgccatgaaaatttctgaacactccaaatttcagtggaattaatccaaaacaaaatttataagtataaaataatttnacttcttatagtaatagtatactttaaaaagcctcagggtatattatcttctaaacagctacaattcagtgcagctactttaaccaactatgtnctctagntngagaancaattaggcctatttcactgctgtgtagcctcagtgcctaacatngngtgccaaataaatattccgtagaattaccctgatttggtaaaaaccattcgttnnggttnacaattggccaaaantctcaaagggcccggttattttagtgtaactcctttggaacatcattatttaacattaattcctcagtatatggactggctgggtgtgacttagttccataagtacctcaatatttttaaaacctcaaataatttgaccttgattttacacaaaaatccttccctttttctac

SEQ ID NO: 674983 - DNA, 705 bp, Homo sapiens
tcctcggcggagctgggcagtggggagcctggggagtgcgaaggccttgtgtgccctgagtgcctgagcccgctcttgtgtgcgcgcagaaatgaagaagatgagccccccctgcatctcggtgtgaaccccctcgtgaggacgagggctcttgctgctggccctcctgctggcatgatgtggctgtgcatgcaccaacactagatgtgctgcatgtgaccccggtcctgtgatggccactgcctcacatgtgactcccttgtgagcccacatgatgtggctcatgtgctgcctggggtgtgtgacccttgcatgccaatggtgtggagcggcttggggccagtgcctcctgcctgggcttgagcacctgaccgtccccagctttgcctttgagccgctggacctcgtgggtccccagtggagaccctttcttggactggtagccacagtgtgaccccagaatccagagctttcctcttcagggtgccatagtgcccctggaacccccagaatcagagcctcccatgcccgtcggtgaccccccagagaagaggcggaggctgtacctcagtcccccagtgtcctctggagaaaccatggttccccctcagcacccctgccccagggtggtggtgcagattgaccccgtgtagctcggggcttggtgcgccacggtttggcctgggtctggggcccgctgggtga

SEQ ID NO: 674984 - DNA, 356 bp, Homo sapiens
  misc_feature (302)..(302): n is a, c, g, or t
ccggtcgactctaagtccccatttttctgaggctgcgtcgtctgggcaaggtcccgggcggccgtctggatcagcagctccaggtcgcgggcctcgaatgtatctggttctgagggtccaggtgttcaaactgtttcaggagattcagatgatccacctcgtacattggggatcctcgctcggcgtccatctatgcgccttgagcagcatccggcagccgtgacaccgtcctgtcgctatgagctcatccatgcttggtgcggacgtcgtggctgacaatagtccagcatctcaggctcagncttcccggctcttgaatgtcctccggcattgggcagccttcagaattaaatggg

SEQ ID NO: 674985 - DNA, 605 bp, Homo sapiens
gccgaagggcagagcacgataccaaggcgccgcacgagaggccctctataacccgcgcagcgcgaaaggctgcaacaaagcgcgccttgtttgcgcccaaaccgcctgcggagagaggccaaacaaaatcgtcgcgcccccaccaggtccgcatcagtccaacaatttcgccaagatttttcaaaaaagtcctctcaaagagtgggcgaaacaccacatcttgctcaccatacgtaatggaagcacattactttgaaaacatctgacgacaaattcgggtcaaagcctcctggttggcataacagtgcggtatgctaccctctatgaccccgcccccaacgggggactccataatgaatgtcttcatgggtcctcctcctgtcttccctacgaaggctccccttcggcactcttttatcttatttttccttcaagatgtgttcccccgcctctcccaggggagccacccgctgccccgccccctgcgggagctgtctcacaaggacgcgtggagaagaacttgcgaagaactctcgagtgccgggagccaccccgccccttctttcaatatatgccgctgctattctcaaaccacaatgtaccaa

SEQ ID NO: 674986 - DNA, 185 bp, Homo sapiens
ttagaatttgggggggaattttaaaaaaaatattgcccgggtttttgggaatttgttttaaagaaaggaaccttttgttaaataagatttatattttcttttttaaccttttataaaggaaggggggggggggggttatttgggttttttttgttcccccaggttaataaattttaaaacttgga

SEQ ID NO: 674987 - DNA, 289 bp, Homo sapiens
cagtacaacttctgcaacaattgcacccccacctccatattaaaagttttctgcatcttgtcagtggtattaccccgttctgttgtaaccaggtaggccgctttggtaattatttccttaagattctctgcacagtcggctacagtagagaagtgtgggacttggtctctgttcccaggctgtgtcgctacaattccagttctgctgtgagctggtcacacagttttgggataacttcctcctctgtctcagtcctggcttcctaagaggagagcaagacacacctggc

SEQ ID NO: 674988 - DNA, 402 bp, Homo sapiens
ggctcgggggaagattttctattaatgctgcccaggctatgactccagccagggcagcactaatagaaaatctacccccaccctcctccaaaagcgaaatcctttccttcccagggctagcaggcttctttagaatatggatttccaactttgccctcctagctcatcccctctatgaagtggccaaaggccctcccaatgaacccctaaacccctcacataacatactccccagcttccacaaactccaaactgctcttgtcactgcgtcagctccgtccttacctgatatctcccaacctttcactctctatactgctgaaagctgaggaatagccctcggtgtcttaggacaacagaaaggaaatcctccttcctttgcccctgtagcttacctctcta

SEQ ID NO: 674989 - DNA, 226 bp, Homo sapiens
  misc_feature (8)..(8): n is a, c, g, or t
actgcttnggatgtaaagcgaaatattatttgtcggatgaatcacatagtgaggaaagtggagccatttttgacctgaaaaccttggaaccctgtggcttcaaaaaatgttgagccgtaaatgccgcctcaaatggggaatgggagactccaaatactctgcggcttgtaggagggtaaaatagagacccagcaaaatggcaataaccggtgcttgaattattagg

SEQ ID NO: 674990 - DNA, 654 bp, Homo sapiens
tgatgtagtatactagctacgtacgcactagaatggccaagaatccagatcactgacagcaccaaagtcaggtgaagatgttagaacaacaggagttattgtccattggtgatggtaatacagaatggcacagccactttgaaagacagtttgacagtttcttataaaattaaacatactcttaccatatgattcagccatccagttccttggtataaacaaaatgagttcaaaacatatatctgttcaaaaacctgcacactgatatttatagcagctttattcatactttcccaaacttggaagcaaccaacatatccttcagtaggtgaaagagtaaattatggcgcacctagacaatggaatattatccagcactgtaaaggaatgagctatcaatacatgaaaggacatggaggaaactgaaatgcatatttctaagtgaaagaagccaatcatatgattccaactatatgacattctggaaaaggcaaaactatggagacataaaaagatcagtggttgtcaggggttgagggtaaggagggataactaggcagagtgcagaggatttcaaagacagtgaaactattctgcaggagacagaaagttggatcattgtcctatttattatccaacccattaatgtcagta

SEQ ID NO: 674991 - DNA, 235 bp, Homo sapiens
ctgctttgcactgtgggcccaaggtgagaggaccacttgagctcaggagctccagaacaacctgggcaacacagcgaaaccctgtctctatcaaagtgggaggctgaggtctcaaaaaaaaaaaaaaactaaaattataacctattgtattttaagattttcccattaggcttttaaagtaaaacgaaatcagttgaaattaattataccttcatttacctcagtatttccaaaa

SEQ ID NO: 674992 - DNA, 187 bp, Homo sapiens
atctggtcacctcctatgccctggcgacgacccacctgccgcgctggtggcgcgactggagcgcgggccagcagctcagctgcagcctgcagacgggcaacgtgcatgacacggtgtcggccttcacctcgggcgcggccgatctgctgatctgtttccaccaggtggcgcagccgctgccgctgga

SEQ ID NO: 674993 - DNA, 382 bp, Homo sapiens
cgtggccagtcggatgtggagtgtgtctagaagcatttgcggtgggcgatggaagggccggcctcgtcgtactccgtgcttggtgactccacatctgctggaacggtggacagcgaggtcacggatggatgccgccgagtccatagccgaagtattttgcgctccggacggtggcgagtgactcttgatctatcatggatgcatggagttgccagcgctggtgatctcgttatctgcatgtcggtcagcgtatcccaggggtacattgtggtgtgacgccgtctcccggagtccagcacgtatgccgtgctggtcctcgccggaggcgtaaagggacagcacggactggatggccacgttctgtcccgaacatccgtactgg

SEQ ID NO: 674994 - DNA, 445 bp, Homo sapiens
  misc_feature (408)..(408): n is a, c, g, or t
ggcacgagcatcttacaccagtacagcttggccctcatattaaaaatccatgacctaagctgaattttaataacttggaagaggaacagagagatacacaggaggttatatctaatggttacataaaaggacctcaaaggatatactttaaattcttttttttttttttttttgggggcagagttccgctctggtctcccaggagggagtgcaggggcgcaatctcagctcagtgcaacctcggcctccggggttcaagcgattctccagcttggcctccggagtagcggggataacgggcttccgccaccatgcccagttaatttttatacttttaacagagagggggttcaccatgtgggccaggagggtctggatctctggacctggtgatcggtccacctgggnctcccaaggggcggggattacgggcgtgagccacacg

SEQ ID NO: 674995 - DNA, 328 bp, Homo sapiens
  misc_feature (312)..(312): n is a, c, g, or t
ttttactgaaacatcagttaagaataaccttgtaatcttttatttaaaataaggctctcggccggcacagtggctcacacctataatcccagcactttgggaggccaaggtgggcagagcgcttgaggtcaggagtttgagaccagcctggccaacatggtgaaacccctcctctactaaaaatagaaaaattagctggcgtagtggtgcgtgcctataatcccagctactcaggaggctgagtcaagagaatcgcttgaacccaagaggcagaggttgcagtgagctgagattgcgccactgcactccagncctgggtgacagagtg

SEQ ID NO: 674996 - DNA, 201 bp, Homo sapiens
aagaatacgaattaactaggagaagctaatagcatggccacgcgatatgaaggtggcctatggagccgcggtgaggcggcatactcatcggcgacaatcagagaatgtgcaggactgcggctactcgacgtgaccccgttgtcgctgggcatcgagacagctggcggtgtcatgaccccactcatctagagcagcaccacg

SEQ ID NO: 674997 - DNA, 166 bp, Homo sapiens
cactgcagacacctcatgtccacaaatattaactgaacactccagacataattcatacagttctacatacgcacatcatttagagcagcatgatgaactctgccattctgctccatcttgcccaggatgtgagtcctcccttcgtccggtaatatctatgctgctg

SEQ ID NO: 674998 - DNA, 660 bp, Homo sapiens
  misc_feature (15)..(15): n is a, c, g, or t
gtacatcagcaaganaccccaaggacaagaggcatgtctggttcggcgagagcatgaccgatggattccagttcgagtatgcggccgggctccgacctgccgatgtgccatccagctgaccttcctgcgcctgatgtccaccgaggcctctccagaacttcgaccttaccactgcaagaacagcggtggcctacatggaccagcatgactggcaatcctcaagtaaggtccctgctcctccagggctccaacgagatctgagatccgcgccgagggcaacagccgcttcacctacagcagtcactgtcgatggctgcacgagtcacatccggagcctggggctaagacagtgattgaatacaaaaccatccaagacctgcccgcctgcccatcatcgatgtggccctcattggacgttggtgccccagacctaggaattcggcttcgacgttggccctgtctgcttccatgtaaactccctccatcccaacctggctcctctcccacccaaccaactttccccaccaacccggatacagacaagcaacccaaatctgaacccctctcatatagccaaattatgagagacaattttactatggacatttgtataatactttttttcctttgcattcatcataatcaccggtagttattatc

SEQ ID NO: 674999 - DNA, 560 bp, Homo sapiens
aactagggcttggttcgacaagactatacattctaaagcagtatactgggtcttacaacccaaatcattgacactctctgtactatgcccctaccctatcacaaatgtgggaaatgtctctttgattcaatagcgaggctgtgctgacaaagtggggtccacgcctccccatcacagccgactcccagcctgatgagaggcgagacggagtgggcggtccctccccacactgggaatctcaatggcaggcctcctggagggccaccattgtccaggccccgactgaccttcagctcccctggtggccaccttgaagaccagctctaccacgcagcccaacgccaggcgggctgcccccgccgcagtgcacctcgtcccatatggtgtcctgtccaccccaaaaccaccgcaagggagccggacgaacacggaggcgagcgcgctgtccagtttctgccggttagagggggtacggtgccataccggagggtgtgggcttccgagtgcccgtctgtagctcccccagggtggccttgcagtacgagatgcactcgcctttg

SEQ ID NO: 675000 - DNA, 736 bp, Homo sapiens
gactaattctacatgcctgcatttgttacctaaagtctggagagggacatgtaatgtcagatgacgacatctctaccctccttgccacctaggtacaaaacctcagtcatccctatacattcttctctttcttacttttcaaccacttgacatctaagtatatatgtatggttgttatccctaaaataatagccaaagttgtcctgcattgaatttgtaaaccaatctgagaataactgaaatctttataaagtcttccaatccatgaagatgatttattcctccatatatttgagttcttttaaatatcattcataaagtttgttgttttacaggtttattccatggtacttggtattttattttgcacatttttgtgatgctgctatattttgcctgcaactaaccaatggaaattacttaaaatccttcaccaaacctttcacttaggcattgatagcacccatcagatggacaaattattatttgttggaccaggccttttcaaaactatcaagcagatagtcaggtcctgtgaagtgtgccaaagaaataatcccctgtatgcaggccatacatttcaatctctgtatctttaacctccttgttaagtttgtctcttccagaatcaaagctataaaactacaaatggttctccaaatggagccccagatgcagtccatgactagatctactgcggacctctggacggctgttaccagtccactttatgact

SEQ ID NO: 675001 - DNA, 312 bp, Homo sapiens
  misc_feature (25)..(25): n is a, c, g, or t
tcaattccccccctatggggtgagnacatggcgggtgtcaaacaagactttttaaaaaattgggggaaaatacacataacataaaatttactgtcttaaccattttttactgtacagttcagtagtgttaagtatattcacattattgtgtactatattttcagaacttttacatcttgcaaaactgaaactctgtacccattgaataattcctcactccctctccccaccagcccctggtaaccactattctacttcctgtttttgtgaggttgactacactgtatatctcatataagtaaagtcatatag

SEQ ID NO: 675002 - DNA, 196 bp, Homo sapiens
acaatactgcggttgttttgtatggggatcattatggtatctcaaacacggatgcgaaatatttagcgccaattttaggcaaagatgaaagccaatggagtgacttggacaacgcgaacttacagcgtgtgccatttatgatccatgtgccaggcatgacggatggttatattgatcatacctttggtggtaaacg

SEQ ID NO: 675003 - DNA, 276 bp, Homo sapiens
attgtttgcaaggcagtggctagaggaaagttcataccccgtaaacacctacatcaaaaagactgaaagagtacaaagtggcattctaaggtcacacctcaaggaactagagaaacaagaacaaaccaaacccaaacccagcagaagaaaggaaataaccaagatcagagcagaactaaatgaaacaaacaaacaaaaaaatatccagaatatgagaacacgccaggtgagtgatccagaattctgatccgggggatggggatgcctccccatctg

SEQ ID NO: 675004 - DNA, 108 bp, Homo sapiens
tggtcaatctccagcgctcccgaaaccatcgcacgggggaccaggaggagcggcaggactatatcaaccgggatgagagtgaggccgcagcgttggatgacgagtggc

SEQ ID NO: 675005 - DNA, 404 bp, Homo sapiens
tatttgaaagttatagggctccaggagccttgggcacaaaaccccagagaaactagccgggggacagctgatatcattccacgccctctccgggctttccaatagtccccaggagctactgcagcactaacagtgggctttggggcctgtatatgttaataactgccatagttgtttgagggtgaggagagtgccatggattcttcattactattggaagtacttctacatttagaaacatacagagggtagtcctatttttctactctccaacagctaaatagaggggaggccaagtatttcgagtgatctcagcttcagaggtctacacccgagtccaaccatagtcagagtggccaactacatcaccgtcactgggaaagtctcgccttggaaaaaagggg

SEQ ID NO: 675006 - DNA, 116 bp, Homo sapiens
cacgagggggaacgggtatggtattccccgaaactcaacatgtctgcgggtcacacctggtaacttgaacatcaatatgcaagcaaaatctccgcccccaatgaatttaggaatga

SEQ ID NO: 675007 - DNA, 708 bp, Homo sapiens
  misc_feature (359)..(359): n is a, c, g, or t
gggctggtctccagctcctaacaggcgagtgatccgccagcctcagcctcccgaggtgccgggattgcagacggagtctggttcactcagtgctcaatggtgcccaggctggagcgcagtggcgtgatctcggctggctacaacctccacctcccacccgcctgccttggcctcccaaagtgccgagattgcagcctctgcccggcgccaccccgtctgggaagtgaggagcgtctctgcccggcgcccatcgtctgggacgtgaggagcccctctgcctggctgcccagtctggaaagtgaggagcgtctctgccccgccgccatcccatctaggaagtgaggagcgtctctgcccgngcgccatcgtctgagatgtggggagcgcctttgccccgccgccccgtctgggatgtgaggagcgcctctacccgcgcgcgacctgtctgggaggtgaggagcgtctctgcccgcgcgcccatctgagaagcgaggagaccctccgcctggcaaccgcccgtctaagaagtgaggagcccctccgccggcagccgccggtctgagaaagtgaggagcctatccgccggaggcaccccgtctgggaggaatgcagtacatgtaaatcacggttgatgtgcacttcggtttggaggttaccaagaattgttcaccatttgggaaaacacgcgcttcatggcacgctgctctg

SEQ ID NO: 675008 - DNA, 151 bp, Homo sapiens
ccatggactaaggctgcccctgtgaaaaagaagggaattgacggactaagtggaagaacctaagtctagggtccttcagtaatctcagacttcatagatttctcacgctgcttctgggatagaaccgcagtctgcaagccaagcagggcag

SEQ ID NO: 675009 - DNA, 1507 bp, Homo sapiens
ttcgagcagctcgggagtgcctatgccctctgacgggggggggtttgatgtacgcccgcccctgttagtatatgaatccctccccggtgctgtgggggcaccaacccaagcaaagcgggcgcgggtgatattggatgtgagcgatgcatgtaatgtaggtttggtgtcccaatcgagccgtgctgtgtgtggttgttgctccgccccgtgtgttagatagaagagacgatattatgatgggaggggggggtagctgaacccgcgcgtccggtgattgaatgttgggtgtagaaattcatttgtgtgggcgcggtgtgtccacccaccctcccgacagggagcggccggtttgttagcacagcaagcaccctgacaggtttgttccttttcttcggttagtaaaacaagccgttctgttttgtttaggtagcaggcccccgacgcggcgtgtgtgaaggaaagaatatgttttgtgaagatacgtccctttgggtgtcccaccccccggctgtggggaggaaataggaagtaggggcaccggtcggtggcccaacatgtggaagcagctaccagcctcctggcggccacacacaggagttaccgttatgatgaacaatatggatgctgccccccccctctatcttagtagaagagggcctgctttgttagaagagtggtgtgttaagaatgttagaagtagtggcgctaccgacgagcgcccacacggggaagtacccccgttggaccgccacaacatgacgcccccacgaccacagcggggtgtcttcctgctgttagtattacgcttatgcccccgacaacgactaccccctgaggcgacgatgtttataagtatatttgttttccgcgctttttgtgtgggcgcgagagcttctctgcgcggagtgcacacagcagattacccgcacacgcgtcttctctcgcagagccacacgctgagacaactcgtgtctgatatagagactgtggtcaacacacacagctgtcacatataccgcagaactagtagcgatatatatacgctcacacgtgtgaatccacatctatacaccttgaggccacaccgcggacacacacggtttataccctcatgggagatatacaacacgcgcgccacattctctatatagttcttaggagtcccatatatccacaccaatattagggtgttttaccgcacccccgatatgtttggagtaccaaggacacattccccgatatggcgccacacccgcgttatattaaaagtgtcatgtgtttgttctcaccgattataaatctcttaacgtgaatcttgagagttctcagacccggaggtaaatcccaggtccggtttcttattttatcattccaaaattctctcccctgtatccgaaaaggacacaagaagaaaatataggcctacttccccaagcgcgccttcccccgtaaatgaaatcatctccacttagtgatcatacccccaccccccccaggacccgggttt

SEQ ID NO: 675010 - DNA, 168 bp, Homo sapiens
cgagcacagtgctccccaagacccgtactagattaagtatgcctcaaagtgctgctgtcagtaccaccccacccatatataccggtaggcaccgaggctgttactgtgacataaggccaacatagaagacaagcacagttagatactgctcatgcctactaaagtaca

SEQ ID NO: 675011 - DNA, 804 bp, Homo sapiens
  misc_feature (1)..(1): n is a, c, g, or t
  misc_feature (302)..(302): n is a, c, g, or t
ntatggtcggttggagtagtcccctattggtttttctaaagccggtgtctcgcaattctcaggtgggcgccaacagctgatcctccgccgtccgaatattaaactgggcgacaaaccggaaacaatttctcttgatagcgtttcctttaattgtgggggaccaccgctcagaataattattggagtactttcggaggtccgttgtggtcgaaacgacgaatgagcttgtctccccctggcatgagttcgccaagacgattttcattagcgagctgtcattgccaggagtcaccattatcacncgcatcactgacactcacgcgcttgttgcccacaacaaaacgcggccctctcttttatggccaaggagatatccttctcggtccccccccccgcgcgctttgtttaattgctgtgatgcccacggcatggctctcactcacgaaagtgtcatgtgtgttagagccccctcctccgcctatgccaggtagtggaacacttgaagggggtaacatagtggcctatccccattgcgccctccgagccgattattggtgctggtcactccaggctgttcttacaacagatgctcaccgggaggaacacagtttgtacccacgcattgattcgacaaaaaagggcttgatcgaacaccccagtgtccctccataactacctgctcttctttcgtgacacgcctatactccactcgccacttccatgatgaggacacatatggctgagacggacgaattagaaggggattttcccaaaaaaaacaaagcaaacacggacaaaaagtca

SEQ ID NO: 675012 - DNA, 196 bp, Homo sapiens
gacaacccagagctggcaatctgggctggtcggccgttcacttcctcttcggggttcttcttcatgcagagcaggccctccgtgagagcctctatctctgtcgtccagctgcggtcgtgtgatattggtgtcgtcaatgaccttgaggagcgcatggatgtggttctccacagagtgcagctgaggaccatcgtgg

SEQ ID NO: 675013 - DNA, 102 bp, Homo sapiens
aaaaagggtgattatactgaatgtaatatataaacttataattgtaaaaaagagataatgaaggccaggcatggtggctcacagcctgtaatctcggaggta

SEQ ID NO: 675014 - DNA, 818 bp, Homo sapiens
tgaataatagcagttctaccggtacagaccctaacataaccattcttaattttaactatttactattatcctaagcgtactaccgcattcctactacatcaacttaaactccagtcaccacaaccctagctactatctcgtcacctgaaaacaagctaagcatgactaacaccctttaagtaccatccacgcctcctctccctaggaggcctgcactcgcgctaaccgggttatatgccctaaatgggccattatcgaagaatttcacaaaataagaatagacctcatcatccccaaccatcatagccaccatcagcctccttaacctctacttctacctacgacctacatctattccacctcaatcatcactaatccccatatctaatcaacgtcatagacactctaaagtgacagttctgaaacattacaaaaagcacagccacagttacctctgccaagcaattcgaattcgcccatttaacctagagcttcactgctcattgccgtattcttcccgcctgtgtaaattacttatataaagcctttatacactccaaaacacgaatcagctcaacacacatgacaacaacacaacagagagtaacgggccacaacgcacttacggaacaacacacacaaagaatagcaccactggcaaacaccaatactaccagcagggaactacacgggcggccacacaactcccccatgcaaaacttccaaccctgagcgaaaaggcacttcgaacaaacagaagcattggacacacctacagatagtagacgcgccgcaatcacaggagaccatagtactaa

SEQ ID NO: 675015 - DNA, 237 bp, Homo sapiens
acggctccacctcggccaattccagacgggtctacaaatccgcagagacatgggagtgtgagctgtctgggaataagcagcaagtagtctgggagagcttccagaagagtcatgtgggatatgcaggtatgggccctggatgtgcataggctagaggtatcaacatgtcttggtcggtctctgtagccagtcagagcagatgtgcagtgagtaggacagttcgcgcaaggctcaatg

SEQ ID NO: 675016 - DNA, 657 bp, Homo sapiens
gatcccggcacatctgacccagaccaactcagaggcctggctgggaggggctatgaagggaggagcatcagtgaggcttcaggagctgagctttaaggccagtaggatggggagaggccaggtgacaggaggaggatgggagagaagtcagggaatggaggcaaagcacagagatgagggaagacctgccatacttctgcagtgttgcccaggtcctaatgactgagacgatgcagctgtcaaggacaggtgggaagcttacgcagggccagtatcttgctaacgggactagagggtggggaccttctggggggtgctggacaaactcaaaacggtttacgcaggtgaacaacaatttcagataaactcccaggtgagtgtgtagacattggaacgggaagccctgaaaggtgggggcagggagatacttttattgttccctgtttgcagaagtagaagttgaggcttgagaggtgaagaagcttgtgggaggtgtcacaggcctaggtgtggagtgcggctttacgccttggctgttgggcccctagcacaggcccgcacccaactgccctgagccctgctgtaggttcaatcgtgtcttcacaagatatgtcatatctaaccctggtcctttgactgtgactatctggaatagcg

SEQ ID NO: 675017 - DNA, 503 bp, Homo sapiens
tgaggtacttaaggatccgtgtcatccccttcgtcatgatacctaagctcagctgtctcgccgcctgcccgggacgtggccgcacccttgctgtggctgtgtttttgaggctgctgtcccagcacccagcacctctggaagaacaaggtctctgggtccccgagggccagcgcgccaggatcaccgtggctgctctggatgcctccaatctcttgggcagcgttccatcacccccagcgctcagagcatgatgtgctcttccaggtcacacagttccccagccggggccagctgttggtgtccgaggagcccctcccatgctgggcagccccacttactgcagtcccagctggctgcagggcagctagtgtattcccacggcggtgggggcacccagcaggatggcttccactttcgtgcccacctccaggcgccagcaggggctccgtggcttggaccccaaacctcagaggcctttgccatcacgaagggggatcggacac

SEQ ID NO: 675018 - DNA, 224 bp, Homo sapiens
ctctagaggatcactcttcgacggtgtctgctcttgtggcctaagctagagtgcaatggcacgatctcagctacactgcaattctcctgtgtcagcctcctgagttgctgggactacaggcatgtgccaccacgccacggctaattttttgtatttttagcagagatggagtttcaccgtgttggtcagggtgatcttgaactcctgactttgtggtccacccg

SEQ ID NO: 675019 - DNA, 378 bp, Homo sapiens
  misc_feature (12)..(12): n is a, c, g, or t
gtcggcccgcgntagcgctcgacgaccgccgacgtgcatttccgatcttttggttccgagtccaatatagcaactctaatggatcagctgatttataatcttctactggaagaacagacccccccgaataagattacagttgttggggttagtgccggttgcctagcctgtgccatcagtatcttaatgaaggacttggcagatgaacttgctcttgttgatgtcatctaagacacattgaagggagagattatagatctccaacattgcagccttttccttagaaaaccaaagattgtctcttggcaagactattattgtaactgcaaactccaagctggtcattatcacggctgaggcacgtcgagcgcgccgaca

SEQ ID NO: 675020 - DNA, 128 bp, Homo sapiens
ggagagcctgacctgtttccccaatatgcctgtgaggagacattgggtggggatagacaggaggttctgggtctccagttgggccctcaatgttgctcctatcctagagtctgacaagtgtaagcctc

SEQ ID NO: 675021 - DNA, 178 bp, Homo sapiens
ggcaccgctctcgtgaactgtcagtcatcaagagcttgggatgaaacatctgtcccgtcaggtgttcaaagtcctctccttctggggttcccgctggggtgcagtgggttaggaatccaacggcagaggctccggtggctgcagaggggtgggttcgactccgggccccgtgctgtgg

SEQ ID NO: 675022 - DNA, 870 bp, Homo sapiens
acttccggttctctgtcagctcgcgagcgaacgaccaagagggtgttcgactgctagagccgaggcgaagcgatgcctaagtcaataggaacttgtcatcttcccatgctcttctgggcatctgattcgtgacaaggtgatggcttgatcgacatataatgttacagaagaccgaaagaaagcacaggttgcttccggaacaaaccgtgtaaacgagaactaagatagacaggtgagactgtcgagagccctgtcattcttcgtaagcgagagacgatgcatgccatgctaggagatgatgaacgtgtttcagatggggacagatgaggtacgttagatgttcgcgtattttaaaggcacaagatgcgtaattgatattagagaactattggatggatccgtgaaggtggaaatgaaaccaggaagaggaggtatttctttaaatcctgaacaatgtgagcctgctgtaaggaacagattgctgacaatcgatgatgcatgtaagaatgaactgtaagattcgagccatataaataaaagctgtactgttctagttgggtttaatctgtcttctgacacttggcttagttttctaaattgttctccatgtctattcgtgatgtttggatttgcaggaagactcgttaagatgaataccttgccttagtgtgcattcttaaacagttttgagtgacacgttacttgtcacccgttattaggaattactttgtctgccaacaacctgaggtcaaataacgccacgtatcaactaacggtgggggcctttgatcataacgcggactggctaaggggcaaagtacgttttaaacctaggtccccccgttaccaaagagtgccggtgaggaaact

SEQ ID NO: 675023 - DNA, 567 bp, Homo sapiens
cctcagtttatgtatgttcaatagcacgtggaatggaatattagacacattcgctacggctcctagagccaggacactaaggcttcggtgagacaccctgggacacctgctcgtgcaattggcactcgctctccagtcctgggctgctattgaaacttctaaaagtaggaatttgcagggcctcgtgcaagaaactgcagaggttcttgtaaagaggtgattcatgatgactgcagagcagagaacaactgagagcaactttttgaagggcggtggaatgtcatcaggatagatcactctctcctcgaccttccctctggctggattcagacttggcatgtaccctgctcctttgacactgagcgggatgcagatcttgactgggcgcggtcatggagacctgtccgtaggcaggagggcattagtgtagtgtttaaaatgctgccctttggagggcaaggtcggggggacaaaccggagatactgcatccgccttcagattttctacgtgcgctctgccattcaagtcggaagaaagcctacttctgatgaccattcggtgtaatc

SEQ ID NO: 675024 - DNA, 105 bp, Homo sapiens
aatgcgttagtattttacttctgtaagctgtttaactttgtaagatgcacagaggtaggatcaagttcaactgacagtgctgccacttcacatcacagaactact

SEQ ID NO: 675025 - DNA, 188 bp, Homo sapiens
  misc_feature (13)..(13): n is a, c, g, or t
  misc_feature (37)..(37): n is a, c, g, or t
  misc_feature (87)..(87): n is a, c, g, or t
gacaatggaatgnttaattgggagtggtaggatggancaatttggagaagatagaagtttgaagtggatatctgcaaaacaaaagtncgggaaggcgaaggaaagaatagagaagatagggagcttaggagatagagacagacttttagaagaagaaagataaatttaaacctgaaaagtaggaagca

SEQ ID NO: 675026 - DNA, 112 bp, Homo sapiens
acctttaacagtgagatgtctgagatgtcaggattttgtagcattcttagaaaacaacatccactgtgtgggcatacttttttcccttctggaagttttaaacccacgtctg

SEQ ID NO: 675027 - DNA, 370 bp, Homo sapiens
cgctcagttcctataggcggctgaggactattgggtcatcaagactgacctgttccagactgttgacctctttgaagggcaagacatggcagcagttgcagacgaccctgatggctttgggcagcttggcagtgaccaagaatgatgggcactaccgtggagatcccaactggtttatgaagaaagcgcaggagcataagaggctattcacagagagccagctgcaggaaggaacgcatttcattggccttcagatgggcagcaacagatgggcctcccaggccggcatgacaggctacggacgaactcggcagatcatcagttacaccggagagggctagccctgagcccggccctcccccagctcctt

SEQ ID NO: 675028 - DNA, 921 bp, Homo sapiens
aatcaggggtatcgacgcaaagtggccattacggacgggggcgctataggagtcaagcatggggagagtacgcgcgagtatccttgcccatgatcgaatagtggatgagtgtggctgcggtgcctctatacgaatggggtgaccatttggtggtggatactcttgccaaggcatgtcacagaagcgtctgcgcttggtctcagccagatggggagataagaacccacagacatgcgacgggagttttgagagcgtatgaagaaaccagggtctcctactatgcttaagagagagtacgtgttttgccaggttcaggggacgggctgtatgccagtgattgattggtagtatggttcaagtcagtaggaaaaggtcagatcccgtgggaaactccatcagcacagtgagtgaccgtataaggggagcctatagctgggcagccgcatgacgtagtggccccagcgcgccatcgcgtgtggtgtcaggccgcagttgggtaggcattctcctatgtttaattgaaggaggctggtatcttgttgacaagatttgctctctggcacagtttccgcaaatggtcctcagtttctgcggaagaacgcctcccagtgtggccctttcgacatcagtataagctttccctcatccttgttaggaggactagtcgggagcacctacttaggtcgcgacttacgtttggcctattgactttccctttaacaggacacgagttgtgggtccgaccaaggctttccagaaagaatccacggtaacagtcctgtctttaacacccatatgggggacaggcgtagggcaatggctctcaagagaacgtttggacgttttgccattgcaacgggacagcggcgaggggcaccgcaaaacgtcttttcccctggcgcttgtcccccacaggtctcc

SEQ ID NO: 675029 - DNA, 540 bp, Homo sapiens
ctgatacttaaagggggtggggaggtttctgtgaaggaatgtatttgaagcccatcaatgatagacatttgggttggttccaagtctttgctattgtgaataatgccgcaataaacatacgtgtgtatgtgtctttatagcagcatgatttatagtcatttgggtatatacccagtaatgggatggctgggtcaaatggtatttctagttctagatccctgaggaatcgccacactgacttccacaatggttgaactagtttacagtcccaccaacagtgtaaaagtgtccctatttctccacatcctctccagcacctgtggtttcctgactttttaatgattgccattctaactggtgtgagatgatatctcatagtggtttggattggcgtttctctgatggccagtgatgatgagcattttttcatgtgttttgtggctgcataaatgtcttcttttcagaagtgtctgttcatgtccttcacccactttttgatggggttgtttgtttttctcttgtaaatttgttcgagtcatt

SEQ ID NO: 675030 - DNA, 345 bp, Homo sapiens
tatagagggttggcccggtgcagtggctcacgcctgtaatcccagcactttgggaggccaaggcgggtggatcacctgaggtcggaagcttgagaccagcctggccaacatggtgaaaccccgtctctactaataatacaaaacaatttgctgggcatggtggtgcacgcttgtaatccaagctactccagaggctgaggcaggagaatcgcttgaatccgggaggcaaaggttgcagtgagcccagatcacaccactgctctccaacctgggcaacaagagcaaaactccgtcaaaaaaaaaagatacagggtcaactgtacacattaaacacttctatcaact

SEQ ID NO: 675031 - DNA, 106 bp, Homo sapiens
cgcaaatactcagtggacatgacctacccaggtagggactctgacacactcatcttcatggctgcctggggtattgtataatgctactgaaacttctaaaactagg

SEQ ID NO: 675032 - DNA, 416 bp, Homo sapiens
agagaatgccagacactgtgtaactgattaaggcttacatggtacttgactaccttgatgacggcgataggcgatccatacgcaggtgcgtgctagctatattctagctggactagatccactgcgcagtgtaacacgggtactgacgtcacagtgtattatatacatacgttactcactagctgcgtactagcgagtgcatgatcactgcattagagatgccaatgtgatacacattgattctccgctttataatatctgacctgtaagttgtgatcactgctccatggccgatcatgttcgagtgattgaactacttcctatggcagtgttaactagtgttactcttccaacactaagcattcctgacgatcgtcacgtgctcaagcactgacatagcttttctcatgtgctct

SEQ ID NO: 675033 - DNA, 202 bp, Homo sapiens
gccacatctgccagagcctggagtctgcgaggccgggacccggttccccggcccacagtgggggtgtgcaacccgagagaactgggttgcaattcgtgaagatcagcatcatgtttggcagctgagtattggagccaggagcctccatgaggttttgagacagagtctgttttagagctgcagcagatctagccaaggaagg

SEQ ID NO: 675034 - DNA, 251 bp, Homo sapiens
gatagatgctggaggatcaagatgcttgcactgtgagtgatagaagacgacatgtcagtggatatgttaaggcagactggctacatgctcgagatacgttctgtgtaactccatcactctggaacagcataatgatggctgtgaccttaagacagtcaggatatataccctctgcaagggattcaatatacattgagctgtgcaactgttaccggcatagcgaccccacgattgtaccatctgccatggcc

SEQ ID NO: 675035 - DNA, 304 bp, Homo sapiens
ttacgcagggctggatgaaaactgaaaatacaacatatcagctgggcgtgatggcttgtgcctataattccagcactttgggaggcccaggcgggtggatcacttgcgatcaggaattcgagaccagcctggccaacatggcgaaaacccatctctaccaaaaatgcaaaaactagctgagtgtggtggtgcacgcctgtaatcccagctaatcgggaggctgaggcaggagaatcacttgaacccgggaggcagaggtagcagtgtggctatcatgccactgcaactccaggctcactatcgc

SEQ ID NO: 675036 - DNA, 244 bp, Homo sapiens
tgagtgtctgaagtcaggtctggcaagtgtgttggtgtggccacattggaaagatcaccacagtgcaggtgcttcagaaagtggtggctggtgtggctaatgcctggccacaagtatcactaagctcgcttcttgctgccattctattaaaggtcctttgtcctaagtccactactaaactgggggatattatgaagggcttgagcatctggatctgctaataaaaaacatttatttcattgca

SEQ ID NO: 675037 - DNA, 183 bp, Homo sapiens
  misc_feature (38)..(38): n is a, c, g, or t
  misc_feature (60)..(60): n is a, c, g, or t
  misc_feature (163)..(163): n is a, c, g, or t
tcctgcggggatcattgagaaagtccaatacctcactnggtcagctataagaagagcgtngaccattgaaatgcctcaacaagcacgtcgaaaagctacagaatgcgatgtatcaattaagtactgtactgatgtgtgggggtgctgatcgtgggttgatctngatgctctctgctgaagttg

SEQ ID NO: 675038 - DNA, 199 bp, Homo sapiens
cggttttaccgctgcacgatgactcgcattcatgcagtgttggcttccttcagagtctggctctcatcagccagctctttgttcgggactggtcgtcatgaggatgactgctggtggcagccactgctcgccgggcatccaccctgaacagtcggatgtcgctgctcctgtggctatggttaacttgctagcaccagcc

SEQ ID NO: 675039 - DNA, 211 bp, Homo sapiens
atcggccggtaccttatgttctgacccaccaacaaaaagattagaaaacaaatggatgaactgttaacaatgacagtaatatacagcgagctataaagtcacagtatggatgtcattaatgctcacagaaatatgttttgaagttaatcaggaaatgatcccagcctgtggaggagctgtatagaaagtagctgtttgctggtacatatca

SEQ ID NO: 675040 - DNA, 132 bp, Homo sapiens
  misc_feature (10)..(10): n is a, c, g, or t
tagtgtaccnaatttggggagtctttcacgagactctgttggtgggaaaaaaaaaaaaaaaaaaaaaaaaaaaaaaaaaaaaaaaaaaaaaaaaaaaaaaaaaaaaaaaaaaaaaaaataaaaaaaaaaaaa

SEQ ID NO: 675041 - DNA, 615 bp, Homo sapiens
gcaggggcttctgctgagggggcaggcggcgcttgaggaaacggcagataagtttttttctcgttgtgcaaagcatcagcagcattcaatcacaactcacttttaaaacaatcattagtccacatcagggttcactcaggcatcattgtgacttagccggttaagtcttttaaacggtcaattttcaatcagctttaagcatttccaagcagcaaaatcatgcaagcacttcagcaagcagtccagccatgcaggcacacggcacaaagcatcacacacaggtcttcgtcaacaaccatgcacggcagggttcgcagcatcgaaagccttctctccatcgcgcagtaaaaaaacatgtattttcacccacagcaacaattgcagagcaaagggcactcacagagcccccgaattaaataccaaatagcaagggcaatggcgtctttcagcattaaaatggcaaggtgagttcaaaccagcttcaaagtcttcagttgtaacaagtagtcaaggtgattcaaaatgaatttagaaggccgatcatttttaaaaaagagcattaacaaccccgaaaggtggatttcacacgcagcagcgtctgcaaacatcccactg

SEQ ID NO: 675042 - DNA, 335 bp, Homo sapiens
  misc_feature (99)..(99): n is a, c, g, or t
  misc_feature (257)..(257): n is a, c, g, or t
  misc_feature (290)..(290): n is a, c, g, or t
  misc_feature (293)..(293): n is a, c, g, or t
  misc_feature (304)..(304): n is a, c, g, or t
  misc_feature (315)..(315): n is a, c, g, or t
aaggatacaaaacaaaatcagcaaaggaaaaaagacaccatggggtgaagtcaggggaaactaagtgcaagcttccaagaatcctccgccagtggaatnacagaggatgagcttaattctcccagcaaccagttgtaacagcacttgtgaaacactgtcaaccagaaaagcttgttagagactgagtgcctggggtttttactgggagctggttacaaaggtagtctctgcctggcacataccaaaattccagactnccagaaggaaagcaggtgttccaggagaaactnatnattgttttacnagtttgagatnattagtaagctactttgatc

SEQ ID NO: 675043 - DNA, 222 bp, Homo sapiens
aaacacaatgtacaggtcatccgtcggttgggaaaactcggggagtgcattctcacccagcaactgagctctgtatacaggctcaggcagagcctgccttctctgggctatcgtttcaatgtgtgttgtataaacagcctccctttggtgcgagggcttccttctgcataaatctgcagctgctgaagagccagagttgaaggcaggcgcggtctgccgccg

SEQ ID NO: 675044 - DNA, 100 bp, Homo sapiens
tccgggtcctcatggatggtcaacgtcactgaaacgagatttcacgatcttcgagtacttccgcagagacacagagaagcgggacttcgtctccgcaggg

SEQ ID NO: 675045 - DNA, 1042 bp, Homo sapiens
aagcattccggccttttgtggttgatcatttctgctgccgactgccggttgtgaaggatatcagcagtcccatgtgatcgtgcgctaggtgcgagtctccatcttcacgggatgctcttcgatcacttgagaccatgcgtcgttgatgcaagggaacgagttcgaatatagcgagaacggcaatatcctgggtagctagcttcgacgatgtacatctaagctgaccgaagttcctatccctgttgtcccgtaccaacttgggatcatgataggcgatcaggtgtggcccatgtttcgacgacgaatggattgtgctgatggggcgggacctgggatatgtgagcaggtccattcccccagagagaggagagaagattgctacacggcaaggtagagttcgtctattgtagcgaggcttcgttgggcagacacgaattgcctctttatttacctctagtatttgcgctgaacggtactgagaggactaccgtggttaccgcgagaggaggctgacttgtgagactgcagaagggttgactcctcttgcagtcggtaagaagacctctagtaatactcgttcagtgaactgtaggtagaaagaagcttacaccgagagaagttccaggccttgatcgagacaccaaggaatgcagcatatgatggctggaatgcccttagtagaatgtgagtgagatggtgcgttggggccgtatctcccctgtagttatagtgacgtaattccgagcggcataagacgttcaactttggcgtgagcatagcggttgccagtgcaagtgttgtgttgcaagagtcgcttctgtgctcgaaatgccgaggttttgccaatcagccttcgacaacagcgtggggcagatcccctccccgtgccttcgtgcgctgcgagtttttggcggaggtaaacactactgtaggttacaaatacaccgtgcgaaacacctttatagtgcacccccgtgtggtgggcttcttccctgcgcgctcacaagtgagaggggccgcgcgggccgcagctgcaaaagtg

SEQ ID NO: 675046 - DNA, 449 bp, Homo sapiens
  misc_feature (201)..(201): n is a, c, g, or t
  misc_feature (211)..(211): n is a, c, g, or t
  misc_feature (213)..(213): n is a, c, g, or t
  misc_feature (233)..(233): n is a, c, g, or t
  misc_feature (259)..(259): n is a, c, g, or t
  misc_feature (268)..(268): n is a, c, g, or t
  misc_feature (271)..(271): n is a, c, g, or t
  misc_feature (276)..(277): n is a, c, g, or t
  misc_feature (315)..(315): n is a, c, g, or t
tatgtccattaacctcttaaaatcagtgaattcttgattgttttaacacagtccctaagactaatgctttccgtggacactgagccccgcctcaggcgccacgctctgggaccggagagccacgttcctggcgactgctgtcctcgcagacactgagctggctgtgcctctggaggaggaagacagtcctgagacgggatngttgtccctncnggaggaacagtggccttgcntctagacggtcttcactgtgtgtttncaaacaacnacnacaanntaaaactcttttgacctgtaacttaaagatcataaacntcaggcaataatattttctgtgtaagcttttaaaattatttttggggatcatagcttgttttattttgtgctataaaattaacagtattaaatgacttatattcttagaatacatcgagtgtcttttcttaaaa

SEQ ID NO: 675047 - DNA, 210 bp, Homo sapiens
cgaggagggagaatcattctgaggccaggagttagagaccagcctgggcacatagatgagaacttgttcttcttactcttacaatttataaaactaaagctggcgtgtggtaagcatgtgcctattgtcccagctattacattgagcccctcgatgccgcacctagcaataatggaataggaccgcggttctattttgttggctcctcgg

SEQ ID NO: 675048 - DNA, 1498 bp, Homo sapiens
  misc_feature (1498)..(1498): n is a, c, g, or t
tggcagctgctgcctgtgaccctgtggcctgaagtggagctgctggtgactgtccttgagctgctggaggtggctgatgctctgcctgtgctgttgatgctgcctggagcaatgctgagatgtgctgcatgtgatgctgtgctgtgctgactgtgctgtgctgtgctgtgctgtgctgtgctgcctctgatgcaatccctgatgtgggtgtcctgaagtcccctgtgcatgcctaggccatgcccctggtgccaaaaagatgtgtgatgctgcaccacaggtagctgtccctgtgaaagctccccctgagcgttccacgtcgcacagcagatggtcagctcggggagcattcagagaaggggaagggatgcccttgaggaccccctttcaagaatgggaaaccaggtgtggattgatggttgcgcttgcatggattcacacgccacaagtcacctttgccattggagcacttgcctgggcatggatcgctttcgccccagagacaaaggacagcactttaggaggaggagccacagtataacctctgccatttggaaatggtagacaattacagaagccaaggttagctttggaggccaacgacgtgggatcttagaccatttagaagcctgttgctgacccttactttgatttggtggtcctttgaccagtggccgtggcgactgctggcaagcgtgttgtgagatgactgtggcatgtcccaattccataatcataagcaaaaaggaacgtgggtgcaacccgggataaaaagcctgttcattggccccagctggaaagaaaactgaaccttaagtccgttccaaggtacgcctttatgtgggggaggccaaagaagtaagcgggcgactcatacatggagatgtcccattttcccatgtgatggtaagacataaggaccgtgtgcgacatctccagagttgacccccatctaatttgacaggcgagttgacaaccacacgttgggccgtgaggctttgacagaggagagcaacacaaagaagagtgtgttacattacaaccacattttgttgaagacgtggattacttccctcggagtgtgtgacgggacccggtcagcaatgtggattcgaggaggacaaacgcccacaagatttcgacgttggcatgagatgcggaggattggcaatccaagtaaatttaacctccttgcgcattttctgaattccgcacagaccttttccttgtgacgaccagatctagcttggattgtgcgtcaatgacacaggcgacacgcactttccttacacgcgaagtttggtgaacccttaaaggagacttcacaagatgtgtgcgcaatttgaacatcacttgaggcggacccacgacgacagtgatccaccaccggggaggagcacgaatctcattgtggatgggaggcagagagtttgatcgaagagtcgtacgagaaaccgtgcccagttattccgacgactgtggagaacattcgattgcn

SEQ ID NO: 675049 - DNA, 245 bp, Homo sapiens
tggtgcgggcacagaggaagtcacttgcagcgtcatcatccctatgtccaccatgtaggggagggacttatgttcaggaagaaatccgtgtctccataccacactatctacccatcagagacccctttcctatcactcaaggccccgagcctggcacaaatggatgcatacagtcctgtgtactgccatgaatgtggatatgggtgcatgtggggtgtaacagatgtgcctacaggtatgcatga

SEQ ID NO: 675050 - DNA, 254 bp, Homo sapiens
cggcattaaaagctatccccaaaatgtccacgactgtggttatcagcagccaagtatatgagagcagctattaaaactatagtcatggggtgacgaaaaacaattctcatcatgaatgaatacatgtggaatctccgcagagaaacgcacattattataaagaaccaaatacgacccgactacatgacaatttaaatagtacctttacggttgacttcctacgactgacgacaacaagaccagaaccacactgg

SEQ ID NO: 675051 - DNA, 307 bp, Homo sapiens
ctcataactgtcaaaggacatgctcctgtcaggcatttaaccagacgtgattccatcttgaacaggggctgagtaaaatgaggctgacacttactgggctgctttcccaggaggttagacattcttagtcacaggatgagacaggaggtcagcgcaagatataggtcacaaagaccgtgctgataaaacaggttgaggtaaagaagctgccaaaactcaccaaaaccaagatggtgacaaaagtgacctctggtcatcctcattgctcattatatgctaattataatgcatcagcatgctaaaagac

SEQ ID NO: 675052 - DNA, 274 bp, Homo sapiens
gcatttggctcccgtttggggtcctggtcctttgtgcaaatgctttgggattccagttttgagctgaaaaaaataatggcctttttgggcctttcctttccctttactgaaagctcagtgcttttggggttgaagttggccaaaggcctgcttcagggaagttgggagtcccccggccctccccccttttaggtgttccctcccctcccccccccccccccccctgggttggggttggggtggagggggttttcaaggtacccatgtgcctgga

SEQ ID NO: 675053 - DNA, 135 bp, Homo sapiens
aagaaacagacaagggctaagggctttgaggcagggaagcaaccttgggcatgtcttcacaagtaaagggaaggaaggcctacgttttggcttaaatttccaattaaagggaaaggcaaggttggggggggtggg

SEQ ID NO: 675054 - DNA, 487 bp, Homo sapiens
agcggagtgggtagcagcatcctcccgggcgccgctttcgcgcggcggcggcggctgcggcggggtctttctttgcttaaatacctcgttggccagaagcgctggtaccgggggcgggttgggtcgggtcgggcagtgctgcacacctgggtttccttgcctagagctgtgtgttcggggtcctttggtccagtcggaggctgcggagcggcgggggttgcctgcgctgtccgcccgggcatcctcccggtgatggaagcagcacgccgccgaccgactgcggggatcgcagctgatgccccattccactacgaatgaccagagaggatgggaaaatatcgcacgcacggaggccgaaagcgagaggggctagcagccagctatgccgggagctgagtcccatatcagccgaccccagacgtacagaccacagcacggatatcagaaccacctgagcagagacaggaagctgcaggtcccgagaaag

SEQ ID NO: 675055 - DNA, 842 bp, Homo sapiens
  misc_feature (112)..(112): n is a, c, g, or t
  misc_feature (454)..(454): n is a, c, g, or t
  misc_feature (462)..(462): n is a, c, g, or t
ctagcccgcagagctccaccgctgatgccaacgaggccagtgctttattttaatgtgcatagcacaggggagttgcaggagagtgatgggggagtaacccaatggggtacanatacttatagccccttcttccaggggaagggaaaatgggggaagtgtggcaatctgagggataataaatgatttttaggtggaaataaatgggcctaatggtccgacaatggttagtaaattggaaggtgctggccatttggaaattggaatggggcaaaaagaagaaatggtttgggattcttcctctgggatatgaattttactcttctctggttaataaaatttcgaggcaggcaattgtgttcctctttggtaggtccagtttctagatagatgagggaattttagagaacagctttatcctatgctttgggggaggacagaggactggggagatggngggaggantttagaacttgagctgcttatttaaatcaacaatttttgggggggaaatatttagtttttagctctcctgttggaagctttatgtacaaaggggtttccattttaaagtaagaatgggggcctgttggagagagaattggaattgtggtcgcgtgggaggccatcaaaaaataggaggcttggaaggaggtttgagacaagggggaggccatctttcaaagggagtgttggggcttggaggggcagcttccgtcctaaggcaatctggcttgcgaaaagtatggggggacaaggaaaccctgtgtgaaaatccgggggtggagggggggtttgttaaaaacgagggggtgccctggggtgtgaaattaagggaccaagag

SEQ ID NO: 675056 - DNA, 121 bp, Homo sapiens
ggtcccgattgtgaaataggtaggtggatcacttgagtttaggagttcaagatgagtctgggtaatacaactgaaaccctgtctctactaaaaataccaaaattatcctgcgatgtggtgg

SEQ ID NO: 675057 - DNA, 220 bp, Homo sapiens
ctaacctatgataagatagagactggctgggaagactgagagttcactgtgtggggtgacataatagtgtagatcttggctgggcacggtggttcacgcctgtaatcccaacactttgggaggccgaggcgggcggatcacctgaggtcgggagttcaaaaccagcctgaccaacatggagaaaccctatctctactaaaaatacaaaattagctgggag

SEQ ID NO: 675058 - DNA, 680 bp, Homo sapiens
  misc_feature (23)..(23): n is a, c, g, or t
cgagcaggtacattgtgacctgngaagaaccgcgcttaacaccaggatgtgtttcgttagatttccttccctaggcgacaagcagggagagcactgattggacacataagtgacattactcactaagctaagaagctataactggtgtggcttatagtttataattagagaagttataaaatcaggaaagaggctctcattacacagcaacagttactaccctaagtgacatgtatgcttaactgtctcctgactgagaagttttggatacagaggcaactcaaagagtagcttggcgaagcactagaacagcaaatttggagtaaagttctgacactgtcatttcttagctgtgggaaccgcgaaaagaggcttaactcctgcatgctcaggtttctcatcatctattttatacatactacttgcgaaaattaaacacggtaaataatagacattatcccaattaatagaaagagcttacgcgttcccagtacacagtatgaaatacttattctactctgccaatccagaattttttaaactcccacaaaagggccctgattttgaaggcacggaaggataggggcttctggatacaggcaagataaggcagaatttgtcatgtgggattaattcttatcccgcgcccggcttgaccagggcacgttggctggagaccg

SEQ ID NO: 675059 - DNA, 756 bp, Homo sapiens
atataattgagagattaaatctatattatagctatatttaggtgacattatttttctgcattatttattgaaataaaaaagatctaaatgtatcttgtcattaatggtggtttgtaatcagttaactaatgtctaactatttctaataaaaagacaaataggagtctaaatttctcatcattgtagtacagaagcatttaaaagaaatactccatgttctaaataaaatatagacctaaacatccttatgggtcataaaatgtgattcttaagtgaagtgagtgctttacctgctgaaccagaatattttaaagccaatccactttgctttcaggtttctttctgcactcctaatgttaaaggttatttttttcttcctagctggggatggcaaggactatgctaagttgtatgtccagcacaattgtattcaatagcaccattttttttcttcatgatagcatatctacttttcctattatctctgttatcctacagagaaaccatcataggaaatttgagatatcaatagaaaagcattaatataggtagtccatcttaaaatcacaggcaaagatagaaacctgaagggatctggactgcataattaggagttcctatagatgttgccttgagggtttagtttaagaaaagtgggggcttagatatctcaagttctttatatattgacccggaattttccgtcccaaggggctttgtctaaaagctattttggattgtgtccctcgggctaaa

SEQ ID NO: 675060 - DNA, 230 bp, Homo sapiens
gcccagcttcccgattccagtggagacggttgaaggagatgattaaagtctggaatgccatgtggtcgtctgacctccatggaactcatgagtcatgcggaaccatcagatgtgcgcacgccggaaagcttgcttctgacccacctctacggccgtgctgtggctctagacactaaggactgagatccactgggccatcaaggcgcggcactgcagaggtggagctgaaa

SEQ ID NO: 675061 - DNA, 382 bp, Homo sapiens
agcgacaccgtacagaacatcaccgcttactaccgccagcgcctcgacgagatcctcgaagaccgcccggacctggcccgcgcttccagcggccgtaccgcgcacttcttcctgcccgacccggaaaaaaccttccaccgtggcagcaccgattactttgtcagcgaccgcaagatcgacatcggtgcctttgacaccccgacctttaccggcctgcccgtgggcaccgtggaaaaagccggcaagcgcgacttgcaggtggtcacccatgagccactgtccaacggcgacggcctcaatgtgctgatcaagcgtgaagtggtgggttttcgcgccaatatcgccgagcccaagggtgagttcgaggaagacggtgagaagc

SEQ ID NO: 675062 - DNA, 401 bp, Homo sapiens
gttttccctaggcttgcttccttcactatgggcaaccttccaccctccattcctccttctactcccttggcctatgttctcaaaaacttaaaacctcttcaactcacacctgacctaaaacctaaatgccttattttcttctgcaatgccgcttgaccccaatacaaactcaacagtacttccaaatagccagaaaatggcactttgaatttttccatcctgcaagatctaaataattcttgttgtaaaataggcaaacggtctgaggtgccttatgtcaggcattcttttacacatcattcccttcctagtctctgtgccagtgcactcgtccaaatcttcctctttcctccacctgtccctagaccagccagatcgtgagtctctatctctttaagcat

SEQ ID NO: 675063 - DNA, 378 bp, Homo sapiens
ttttttttggggttttccctttccccttggaaaagccccggaaacgggcccctttcccaggggtgggggggttttttttaggaagcccccctttttgggggggggggggtcacccccccaaatggggttttttttttttccccccctttttccaatgggggggttgaatttttcccttaacggtgaaaccgggggggaaagtgtgggtccttttgagggggttctttttttttgggtttgttttttttgcccccaggggggtttttaggggttttggggtaatttttaggggttttcccttgtttttttttttttttaaaggttttaaaaaaattttccccctttttattggggtttttttttgggccccccccccca

SEQ ID NO: 675064 - DNA, 128 bp, Homo sapiens
atggggtatctccacaagtattccatttatacacatgaactaaacagacaagcacagagtcactatggcggttagaagtgggcagcattgggaatgggggaggaccatggtggggaatggggatgttt

SEQ ID NO: 675065 - DNA, 319 bp, Homo sapiens
caccatcatgtaagcagaagtctcagggtccagacacttccctgagccaccactcccaccccaattcctgcctaccaagcaagcagccccagcatagggcaagacagggtgagcctcatacagactgtgccttgatggccccagccttgggagaagaatttactgttaacctggaagactactgaatcattttacccttgtctagaagaataagtcataaacaatacatgcccgggaaagtgggtcatctgaattgggggtagcaattgatactgttttgtaaactacatttcctacaaaatatgaatttatactttga

SEQ ID NO: 675066 - DNA, 772 bp, Homo sapiens
ggagaaagcgtgttgcgtggaagataatggcggcgcgggaagtgtagcacagggatctaactgccactctcgtctcctgctggctggacctggaggattgggaggaagatgtcagggtttcatggtggatgagaccttggactttggggggctgtcatccatctgactgtcttgagtgagggaagagcactatacagtgttggtgacgtccagagtaaaccacttcgaccggggccgtctcccagcgaagtgagccaatatgcagtggcagctgagcctcccgagggctgtgaggctcagcactaggaccccgtcagtccagagaagctggaggagatccgtcggatgaggccaaccggctggcacgctcagctggagcagtgtgccctgcaggatcgggagagcgcaggcgagggccatggggcctcgccgagtgaagcccagtcctcggcgggagagctttgtgctgaaggatacgtcctgtccgagacctgctgtccactgtgaactctttgacgtcggagcagcccctccccaagcagcctgacgcctcgactccggagtaatgataggaaggggtcagtcagggcatctccgggctacatcctggaaagaggccctccaacatggaagagggagtcagccagcttgcaatctgtgtgcctgcatccgaaagcgccagcatcttctcctcttaccccgatcgactcccccaggaccgggggagagccggggcccagtgggagagcagaggcaggcgaacgcaagccga

SEQ ID NO: 675067 - DNA, 372 bp, Homo sapiens
cttatataagtatattaacttgcaaaatacgatgtctgttaaacacagctgttaaggtattctgagaccgcttataggattatcataatatatccatgctaccttgcatctgatgttcctggttgcaaaagtcaaaacaagatctaaaaatagtctgtgtgtgtccccgacatgctcgctcctttgatattctcaaacagccagaaccatcccgtctcacggattgccaggcgccaggccggcttcccggtgcctctttctcgaccattttcacttaaaagcactgtgagtagaattagctgtcacgttcctgccacaaggcagtcagcctggtcaagaggcgtggtctggaatccaataagaccactgctt

SEQ ID NO: 675068 - DNA, 901 bp, Homo sapiens
  misc_feature (901)..(901): n is a, c, g, or t
tcttggcctgttctagaaccttgactcctctgtgctctgctctgataaactcctgctcagtttgttcatataatactgttgacccagtgcctgcattaggtgggttgtgagtgttttttttttttttccctccgggggtggagacgatttcggggtggctcatccatttctggcctctgctacccagggcacacgtttcctggcacgcacagcttgttggggggtgtgccagcacacgcctgtgggccacagaagagacacagaatctcctggttgctcacctatgggattacgcccacggggctgggtcgcttaacgctcaggcgctccgggttccaacaccgttttggtaggaatattgtccagggaagacccgcgtaaaataccctccattgagaagacgccggcggaaaggggtccctcccaggggtccaaagggcgcggttcctctcagattctccacaatctggagcatgtttattatactaggggggcgtacgggggaaacgcgctggcgcgacgattctggtccacctacttaagataaattggcccacttgatttctttttaattacaaagtggccctttcattttaaaacctgagatggttaccttccctgggggtgccttcagccaccaaagtggtgccagtccccccaaccgttgaccagagagccacgctgcccgtgtgtcctgtgggtggctcccttgcccccgttcagtccccgtgctaaagaatgtcctgtgccgtgttccgctttggagacaggccccggttcggtcctttatctcggttgttcatccgacggggacccggagggcgtcgcggcccttgtggtgcacccccttgacggggcggtgcccttctccgggtaaaggcggcccggtgtcgggccgtgn

SEQ ID NO: 675069 - DNA, 1292 bp, Homo sapiens
aaaagggggtttacgcgttgtgttccggatagccgctttccaaaagtgccgcgtggtactgccttagtgtggctggtatgatagacgcccctttataaagtggtggttaaatagggaagaaatattcttgtgggggggcagctgatcagcaaagcttttttccgccagaagggcccccccttctgatggggtctatatcccccagatgccccaaggggtcccacccccctgtgtgtccccccacttttgccaccaaagggggggccccccatgaagccgcgccttttgggcccccccaaagagaaggttttgtcccgttttaaagaggtggcgccctgattctccctttcaaagagggtgttttcttccacagcagtttttgggtagagggtggcaaataggcgggttgtagaaagagattttgtcccccggaagaaccccttttgtctcgcactattggccccagagatatctttctgatgcccccccctcgtggtgtgaaatatctcgagaaaggagaaagcgcttggtggccacacttcatctttagagggcaaactctggcacacacaaggagatatttgcggggtgtgataaaggggctgctttctctttttttgcgccacacctcgagagattgtctctcaacactatgtcggtgtatggactctttggaacacaactctcacaagccacatatgtgttgcgaaataatggccacaggggtggacacttgagagttgtcccctcgcgcccacagctgtattccggggaaatctcctgtggcgcccacatgtccacctctgtgtggtggtgtgtgccctctcttggcgcccacgcgtctcctctgctcggagaattatagcttccacacgtggtatccccctcttcaacttccctctcccacccacggctttctggacagcccgccctcattgcgccacattaatattcttctataagagaggtggtgttccccgcgagctctctttgggagcctcatccttaaaccacactgagatggtgtatttttatagaatgggagatcgagatcttattaatgttatatgtaagaagaataatttttggagccacactcaagcttttctgagatatcccacaaatcacaggaggcacttttgtggagatttatttaaaattaatgtaaagaaagaatatgcaccacgatattcgcggagatatattattttggtgaaaatgccgcttttactttgaagtgatttccttgaaggaccccccccagttcccatataaatggctagaaatttgta

SEQ ID NO: 675070 - DNA, 940 bp, Homo sapiens
taaggttggagggggaatgcgggaaatggtaaggggtatggaaacttttcatataagtaaggctagggtgagtggtaggaagtttttccataggaggtgtatgattgggtcgtaccggaatcgggggtatgctgtcgaattcataagaacagggaggttagaagtagggtctgggtgacaaaatatgtggtgtagagttcaggggagagtgcgtcatatgtggttcctaggaagatggtaggggtgagggtgtcatataataatgtggtgtatcggtatgaagaatagggcgaaggggcctgcgggtatcgatgtgaagcctgagatagttcggatccccttcggcaaggtcgaagggggtacggcgggactcggcaacgggggagatcaccatcatatcagggccaagggtcatgagggcaggagtaaccagaggggtctaggcgtgcgacaaggcggcacaggtcaaacgacgcacctaatcaagacaaggtccgacccagtacaaagcacggatacggagcactcccaatatgagactgccgggcacacggccccgaaagggccccggaaaccaagcgagcgagaagacgacacagaacgccccccccgacccacgagcgaacggcacgacacccgggtacggcaccaacgggcggcaccacaacacacaacgacggcccacagctacccagctcacccaggagccagcaacaaccggacaggcagccacacaacaacacaacagcccacccacccaacgccagcgaccgacaacaaaggcagccacacaaacaccacactaacaccgctcgcgcaaccagacgctagcccaccaacgcaataacacgagccccacacgacatcgcgacgaagtcgcgtgcccctcccatacaaacccacacactcagcgccagcgacaccacgcacccaaccaacc

SEQ ID NO: 675071 - DNA, 296 bp, Homo sapiens
catcacgtgcctgctgcacttgcctccataaggctgctgatacagaagttgttctgcagtgtcgagacgccctgatctgtgaggattgacgtgtgccggaatactggacaggataccgtctggttctgggcaggtgtatagtaatggagacatctttcacagaaggtgtgcaggcaaggcacagaaccttggggcactggtaccgatccaggcagatgctgcataccaggaactgcttgtccattggctggacctctgggccaggcctgtcctccctctttgccatggcgcccaca

SEQ ID NO: 675072 - DNA, 293 bp, Homo sapiens
agaggatctcggaattgtgtggtgttatgcctaaaaacatcgttctaataaaaacgacatcatcccattgtatcgccgcgtttttcgagctgtccggcttaaacgaaggaacgccgttactaatcgcctctactcccgtcattgccgaacaaccggaagcaaacgcccttaataaaataaagactccgtatcctgatgaaaagaaatgttccgcagacgcatgctcccgataattgaagccgttccatccttcacgccataattgccagccgccaacataacaccacacaatt

SEQ ID NO: 675073 - DNA, 244 bp, Homo sapiens
  misc_feature (14)..(14): n is a, c, g, or t
  misc_feature (231)..(231): n is a, c, g, or t
ctagaggatcccgnttatcgcccaacacacgcccggctactttttgtatttttagtagagacagcgtttcaccgtgttagccaagatggtctcgatctcctataggcacgtgctactaacccctggctaattttggtcttttaagtagagacggggttttgccatgttggccaggctggtctcaaactcctgacctcaagtgatcctcttgccttagcctcctgaagtgtnggggataacatca

SEQ ID NO: 675074 - DNA, 1013 bp, Homo sapiens
aattaagctaggtacgaggctgggtttgaattcggccgaggctcgcgcccccctctctgctgaccctggcggccatggcgtgcagcctcatggacgagctgctgtgctccatctggctgagcatctaccaggacccggtgagcctgggctgcgagcactacttctgccgccgctgcatcatcggagcactgggtgcggcatggattggcgcatgggtcgcccgcgatctgccccgagtgccgtggcgcacgttcgccgtagcccgcgctggcgcccagaccctccaagcctggccgagaccatcgatgtgagcgcgtaccagtcatccattgcccgctggcacgccaatccgtcaacagcgacgccgcagctctgcgccgacccttgctccaggcgcacgattaagggtcaacggctcttctgctctcacgggatccgtcgccagcttcctctcgcttcattcttgctgtaccggagtcggctgccgaactcgcgatcgcagccgaatgtctatacattgcgtcaagccctgggactaatctggaaccgaccgacctctctgtagccgacgtccttggcccagtaggtgaagctctgaacgttggatccgaaactgtcagcgcaccttgcaaaggtagcaggacgaggcagggtaacgagcgacccagagagtcggctcgcacgactggctctagagtcgagctaacttggcgataggcaccaagtacttccatcgaagagcctgcggaccgactatcgggcgaggctcgttcggagccggctggcgatccggtgcttgctggcgtcgatacggccgagcataggccatgctagaggagctggcaggctggacactggcccggcacgcctgacgcgactatctgagtcgatacaagtcccaagcgcttagcagccagtcagctgcggcctaggtccaggaggggagcccatggatccctgcggaagcgggttgggttgaaaacccgaccgtgccacaccttcctggctgggtg

SEQ ID NO: 675075 - DNA, 659 bp, Homo sapiens
tcacttaggcagtgagtccgtggtctcgtcatacctggtgtccagagtacacgtagagctgatgtgtcaccagcgcatcgtccagtcctgggtggtccagagctaataccccgatctcaaagaataaataaatcaggtgatatacataagggggaagaagagggagaagaaagtaatttcaggtctgggaagggctctcctaagatacaacatttaatccaagagctaaaaggaaccaaccacacgactgttccagacagatagcgctatataatggtggattccataattcatgtaaataatagttaatcaattagctatttaattatcattatgtccaatagccccaagcttcttccaaattccagcttgggactcacactgtagaccaatgagaactgggaacaaaaagggaggggtgggagaagtcagccacagtggctcacacctgtaatcccagcaggcggattgcttgagcccgggactttgagactagcctgggcaacatggtgagaccccatctctacaaaaaatacaaaaattagccgggtgtggtggcacatgcctgtggtcccagctcctcaggaggctgaggcaggaggattgcttgggcgtgggtggttgaggcctcagtgagctgtggacgccactgcattcag

SEQ ID NO: 675076 - DNA, 635 bp, Homo sapiens
  misc_feature (264)..(264): n is a, c, g, or t
  misc_feature (336)..(336): n is a, c, g, or t
  misc_feature (373)..(373): n is a, c, g, or t
tgggaaaggaggcaggggctacccagagaggggggctcgtgtggcacagcccccaccgactccgacgtccccctcccctgtgagccccgggggctgtacatactctactccatccccttgtccatccctgagaccacccccgccgcccttgcgtcgacttagcaaccacctcataggcccacccacctcgggatccgagccaaccatcccacatcacaaactttggtttgggggactttacgttcgtttaatttctcattttgnacggagaaatattcttttcgcgtcttttgactgaagtaactttcctggtgctgttgttaactcgttcctttntttaatttattcccccaccccaggcagccctcctggntcctactcaccgttagtcccattctgaccctacgtaccatgtgaaccattcgctcctatactgttccgtcagatttaggaaacagtcttcactcctacccggcctattcacagcatactgcccgatttacatgtagtcactgctaccaggtacagatgcactgtgaagatttcacgcttaataaaggtgtactggtgttaaccctggtgtcgtactgacaccatgggcggcccggtccccaatctgcctatgaagctgttgc

SEQ ID NO: 675077 - DNA, 592 bp, Homo sapiens
  misc_feature (264)..(264): n is a, c, g, or t
  misc_feature (336)..(336): n is a, c, g, or t
  misc_feature (373)..(373): n is a, c, g, or t
  misc_feature (400)..(400): n is a, c, g, or t
  misc_feature (443)..(443): n is a, c, g, or t
  misc_feature (451)..(451): n is a, c, g, or t
tgggaaaggaggcaggggctacccagagaggggggctcgtgtggcacagcccccaccgactccgacgtccccctcccctgtgagccccgggggctgtacatactctactccatccccttgtccatccctgagaccacccccgccgcccttgcgtcgacttagcaaccacctcataggcccacccacctcgggatccgagccaaccatcccacatcacaaactttggtttgggggactttacgttcgtttaatttctcattttgnacggagaaatattcttttcgcgtcttttgactgaagtaactttcctggtgctgttgttaactcgttcctttntttaatttattcccccaccccaggcagccctcctggntcctactcaccctcctcctctcccccnccctccgtcccatctcacccatctctttctttcctttccctcngattttgnaaaaatgctcctatattccaagtcctgtcgagaccatcattcccaattaaaatctaatcactgctatatgcctcaaacgctctgtgaatatccaagttttactaagggtgcacactttttaaaagaggtgcctgcaaaact

SEQ ID NO: 675078 - DNA, 346 bp, Homo sapiens
cattgtcataaagtcaaaaggtgcctgggaaataaaataaaggaaaaagaatccagtgtggcaaggctcagagccctgagtcaaacaccctcaggaagacaaaacagtgaataaataaacattctgagagttttcatcaatatcaccacatctagaaaaaaacacctgagtagttatccctatattctcttcttctgactagggaagagagaaaacatctgctggggagaaaaggatgagatgatgcataaaccgtggtgttgatcatctctgctgcaaggaatgaagactctgggagtccaacgtgaaacccaaggctgacccgaggccacagaatactgccaga

SEQ ID NO: 675079 - DNA, 420 bp, Homo sapiens
cttaggaattaggcctgaatggagccacttggggtaggaaggcacctccctccatgcagtgggttgtgactcatccacaggatctctctgtgtgagatttctctgatgttcttagggatatataaagggggagtataagctgattccgttttccctgctgtgtgattgtcctgattgtaaaaatttcctagctttattgttggcaaatacttgtatttcaaggattaccttgattagctatatcagaaatgggttggagagaaactacaacagttccttaaatgttcttaatcttcttatattattctatataattcctgaagagatcattcggatatgtttacttgagcaaaacaggcagatggtgttgctacccagtttcccaattctgtaaggcctgtatcagacatttacggtagg

SEQ ID NO: 675080 - DNA, 252 bp, Homo sapiens
  misc_feature (221)..(221): n is a, c, g, or t
tcagagatccctattcgatccgctgatccagcatggaactctgacccaaccggtccttactcagcatacttttgttttattctctcaaatccctcttgggcactcaatgcctgctcgctggcaccttccgcaaggctgctgggcctgtgactgcctctgccccccttgctgccgtgccttggatggcggagcttcctccatccggtgtccagcaagtcacnccagctgcttggtccatgcttgtcaaccagc

SEQ ID NO: 675081 - DNA, 360 bp, Homo sapiens
ccggttacagtgtatcatattcatgatgtaagttgaggatgtaagtcccaggagcagcaattcaatcttgccatctgcaataaaggttatcctgtcaggcagtctcaaatagtcaaatatatttacattgatattttcctcaaggtagtgctccctagctctccatcttaggtgagtaaagccatagatcggttttgtccacataatttcctccctttggatttaccgtttcaaagcgaggcaatcctgtactcaagagtgcccacaatagccctcagcaccatgccgcagactagaaatcccatcaaaggtctgttccttatctacttcgagagtgtgtgtgtagtgtgtgtgtgtgcg

SEQ ID NO: 675082 - DNA, 235 bp, Homo sapiens
  misc_feature (5)..(5): n is a, c, g, or t
  misc_feature (83)..(83): n is a, c, g, or t
  misc_feature (141)..(141): n is a, c, g, or t
aggcntaaagacaactatttaaagtgactatagccataataatttgttaagtatattaagataaacagttgtcattgtgacancgataacaaactgttggggtggggggaataaaagtgcagagtttttgtatgtgagggnatttaagatgttatcagtttaaaaaagactgttaaaacctataaaatgtttgatatgtcttatgaaaaccaaacacacacacacacctctaata

SEQ ID NO: 675083 - DNA, 162 bp, Homo sapiens
aacccaggctggttctcaatactcctgaactgatgtgatttacccgccttccaaagtactgggattacaggcatgagtccaccattaataattttaattatatatttaaactcatttcttaattttaaacaatttaataagttattttaataatttaaaata

SEQ ID NO: 675084 - DNA, 931 bp, Homo sapiens
  misc_feature (7)..(7): n is a, c, g, or t
  misc_feature (85)..(85): n is a, c, g, or t
  misc_feature (119)..(119): n is a, c, g, or t
  misc_feature (127)..(128): n is a, c, g, or t
  misc_feature (148)..(148): n is a, c, g, or t
  misc_feature (215)..(215): n is a, c, g, or t
  misc_feature (228)..(228): n is a, c, g, or t
  misc_feature (235)..(235): n is a, c, g, or t
  misc_feature (255)..(255): n is a, c, g, or t
  misc_feature (269)..(269): n is a, c, g, or t
  misc_feature (289)..(289): n is a, c, g, or t
  misc_feature (310)..(310): n is a, c, g, or t
  misc_feature (316)..(316): n is a, c, g, or t
  misc_feature (320)..(320): n is a, c, g, or t
  misc_feature (353)..(353): n is a, c, g, or t
  misc_feature (364)..(364): n is a, c, g, or t
  misc_feature (369)..(369): n is a, c, g, or t
  misc_feature (391)..(391): n is a, c, g, or t
  misc_feature (398)..(398): n is a, c, g, or t
  misc_feature (411)..(411): n is a, c, g, or t
  misc_feature (438)..(438): n is a, c, g, or t
  misc_feature (453)..(453): n is a, c, g, or t
  misc_feature (472)..(472): n is a, c, g, or t
  misc_feature (485)..(485): n is a, c, g, or t
  misc_feature (500)..(500): n is a, c, g, or t
  misc_feature (504)..(504): n is a, c, g, or t
  misc_feature (533)..(533): n is a, c, g, or t
  misc_feature (538)..(539): n is a, c, g, or t
  misc_feature (547)..(547): n is a, c, g, or t
  misc_feature (554)..(554): n is a, c, g, or t
  misc_feature (559)..(559): n is a, c, g, or t
  misc_feature (568)..(568): n is a, c, g, or t
  misc_feature (571)..(571): n is a, c, g, or t
  misc_feature (625)..(625): n is a, c, g, or t
  misc_feature (931)..(931): n is a, c, g, or t
cttttanctgactaataagtaataagtgttcaaactcaagattttattaaaatcatttttaatttaaattatcatatctctggcngtgaaggaagacttttaataaagcaaaacactcnctcacgcnnctcaaccccccgccccaaancccttaacactcacatttaaatggttacatgattttaattattcttttgataataagcaaccttgtnatatctattcaanaaaagcnagaacccactatggaattancagttgaataaganctttgttccctgcttttggnaatgttaaagaaacaaatggnaatggnttanagagcttataagagtgtgccacctagcaaaagngtctaaaaggnaaggngggaagcattagaaagagagtnaaaaganaaataaaaaaggnctcacacgcagcattgggtttatttgngagagagggcaaganagaatgaagtgttggtganataaggtgctggnaggttagctgatgcnaatnccttccttatctgttcttggctgctaggngtttnnggctgatnttttttnatttnttattattnttnttcggtggttctgggttggtctgcatgtttttgccgtagaggtatttgtatgtntcagaacggatatactcaaaaacatgggacacgccaagctggaactggtctgcaatgggggtcacccagggattgttctctgctttgaatacctgcttctggccagttaaatccaagtttcctagttctgggggcagaacggtgaggcggttccctgaatgtggagctctttaagctgggtaagctccccgatttccttaggcagcgagatcaggtcgttatccctaaggctgagtatctgcaactttgtgagcttcccaatatctggcggcaggatttcaaaatcgttgtcacttagatagagtn

SEQ ID NO: 675085 - DNA, 659 bp, Homo sapiens
ttgtatttttttagtagagacggggtttcaccgtgttagccaggatggtctcgatgtcctgaccttgtgatccacccgtcttggcctcccaaagtgctgggattacaggcgtgacacccgtgcccgaccaatgaattcttattaaattactttatcatctgtcttgttagccttactctttcctattaacttctttgccccctgctccctttttgaattgagtggctaaattttagaggtttgtagcttttgtgtgtgtgtgtgtgtgttttatagatggtaaatgatgcttgtacattttgtacatgaatgaatacgtattttagcagacttaaaacattaacagtaattgaccttatacattttgggaaagaaaaattaaatcttcatgctactacgatttttttaaatgtggcatcaatgtttatttttaataatagtattactgacttaataaaccccaaatgtctctttaagctgatttaatggttatattatagaattttttatttcattgtgtgcttattagaaaaaacatattttagagttgggttttaaatggtagacacagaaagtaactttaaaatatcctaaacaaatatctatttcatttttcttcttaagtaaaataacacacctcattcgtgtgtagtacatgt

SEQ ID NO: 675086 - DNA, 82 bp, Homo sapiens
aattcaagcttctaacgatgtacggggacatgtactcttggcacatttcaataaaattgtttggaaaataaacacagcaaaa

SEQ ID NO: 675087 - DNA, 381 bp, Homo sapiens
gccccagttaacagctaggtatggatgcctctgctcattatacttctcagtgaacacaccatatccaaatcgatcagattgtgctgcataatcgggcgtcaaggactgccgaaatcaatgagcatccgtcagatgtctggggcgcagatcagaattgcgaacccagtgtaaggagtctactgataggcaggttaccatcactggatctagagccagtattagcctggcgcaatatctaataatgtcaggcagtacctcggagacgggtggagtgcggagcagctatgaacgatgcagattcatccataatccctgactgctgttcactcgaacacccatgatccatctgtatatgttgcagtccagacgggtattccgagc

SEQ ID NO: 675088 - DNA, 173 bp, Homo sapiens
tacgatcttccgtacgccactggtacagagagaatcgtccaagtgctggttacaggcgtgacgcactgtgactgcctatgtatcttttattataccaatactatgcttggttgcgtactaatagctctgcttgatatttttgaagtcagctttgttcttttttgatattgctt

SEQ ID NO: 675089 - DNA, 1165 bp, Homo sapiens
gcccgactccacacttactaccaggacaactcttagacgcaagagccatttacgccaaataaatgtataggcgatacgaaattgaaactctggcgcacatagatatacgtaccgcaagggtgaccaggactgaaacacagttagtaagccaagcgataatataggcaaggactaaccccctataccttctgcataatgaagttaatctagaagtaactttgcaaggagagccaacagctaacgacccccgaaaccagacgagctacctaaggtaacaggctataaaggagcacacccgtctatgtaggcagaatacgtcgggaacgactcttatacggtagaggcgcagaaaccgtaccgaggccgtggtgatagctgggtcggtccaagatcagaatcttagttcaaggtttaagatttgtgccacaggaaacctctaacatccccttgtagaatttaactgctatagtccagaaggaggcaacagactccttcggagcactaggaaaagaaccttggtaccagagagtacgaacagacttgaacagccattagtaggcctaaagagcagttaccaattaacgaaagcgttcgaagcgtcaacaccgcagtacctaacaagaatcccaagacattataactggaactcctcagaccgcaattggacccagatctatcacgcctatagcaagaactaactgtaagtataagtaacatgaagaccattctcctccgtcataagcctgcgtcagaatgaaaccattggaactgacaattaaagccaatatctacaatcaaccagaagtccatattaccctcaagggtgaccaaaaaaggctgctcataagcgcccggttcacaacaacgtcaaagggactccggacaatcttagaccgccggttaccacaaaaatcactctcagacaccccggatacaaaggacacgcaggcccaggtacccatggtttaagggcgcggggaacactaacagcgcaagggtagcaaacaccagtgcctatcatggagaccgtgttcttgctcccgagaggatagaagactataattaacccagcgaagtactgccggtacaagggcatgacacagaagaaaacactaggggaataaagcaagccaacacagggcaaacacgaaacaagcgagcccac

SEQ ID NO: 675090 - DNA, 293 bp, Homo sapiens
ttttttccctaaacccccccccccccctttttttcgggggggggggggggggtccaaaactgtttgtttccatgggccctttaagttttgggggaaaagggggggttatgaaacccaggcctggggaccccccccaagggaaaggggaattttttggggcccccctgggttttttttttgggggggggcggttttaagtttttggttttttaaaccgggcctttttaaggggacccccttgccccaaaatttgtccccgatttttgggccccctttaaaaggtttaatgggga

SEQ ID NO: 675091 - DNA, 161 bp, Homo sapiens
ctgcagatactcctatcctgatatatagtcacatactccgatgatccattcaggagctttcgtatacactgtctcctatctggaggtagcactgagctctgtgggacgaaatgattcctcctgaccctcagatatgcaatggctcccaattcctctagaac

SEQ ID NO: 675092 - DNA, 243 bp, Homo sapiens
acaggttgaacatgtttgctggtgtatatattgtaatagagatagctcgaggagaataggttatgtgattaggagtacgggttaggatgagtgggcagacgaaagagaggaagtcaagtttacttctgcctttttgggttgcggtgctgactggacggtggacgactttggtgctgtgacattgttttacggtaactacgcttttctacgtcaggttaggtctaggactacccgtacgggaga

SEQ ID NO: 675093 - DNA, 298 bp, Homo sapiens
tgtacatgaggtcgagatactgtaaagacaacgtgtggtcattggcacttgcgcactgcgtgttgatcatcatcattctgaccgggaagagcagtgatgttggctggaggttcgaggccggcgaagcattgatccctctttggatttcttcttgaagcggttccctttgctgtcatatttgtgactcttgccacgtatctcccggtacatgcaagcttgcatgtaccgggcttgcatgctgcctggatgtacagggatccaaacaccccctaggaatcaactaccattccgataaaat

SEQ ID NO: 675094 - DNA, 264 bp, Homo sapiens
  misc_feature (40)..(40): n is a, c, g, or t
  misc_feature (184)..(184): n is a, c, g, or t
agcggggactcacttggttctcatgatctgactgcctcangctcccaaagtgctgggattacaggcgtgagccactggcccagcctattagttcattttcatactgttgataaagatacccaagactggatcatttataaacgaaaaagaagtttaatggactcacagttcctgcgtggctggnggaggcctccataatcatggccagaatgcaacaaggcacattcttacattggcggcaggcaagagagaatgagaacccag

SEQ ID NO: 675095 - DNA, 307 bp, Homo sapiens
gcccagctatttatagtagttcagcagagatgggggttcaccatattggtcaggctggtcctgaactcccgacctcaggtgatccacctgccttggcctcccaaagtgctgggattacaggtgtgagccaccatgcctggcctcatatcatttataaataagagtaatttgactagttcctttccaatttggatgtctttatttcttccttatgtaatcgctctagctaggactttcagtactatgttgaataacagtattgaaagtgggcatccttgttgtgtttcatatcttaggggtaaggctg

SEQ ID NO: 675096 - DNA, 201 bp, Homo sapiens
gacgaaaacgcgtatggcgctgatgggtgtcgttgttggggtctgtgtgccggtgggtgttggggttggggtcaccgtagtggtggtggtgatgggtgtcaggttgtactctgtgtgccggtgggtgttggggttggggtcacggtagtggtggtggtgatgggtgtcacggttgtactctttgtgctggccgtttccgcc

SEQ ID NO: 675097 - DNA, 253 bp, Homo sapiens
  misc_feature (10)..(10): n is a, c, g, or t
  misc_feature (70)..(70): n is a, c, g, or t
  misc_feature (72)..(72): n is a, c, g, or t
  misc_feature (132)..(132): n is a, c, g, or t
ctcagatttnaggaccctcctcctcgcccacgggcctcaaacctcaggaccctgccgtctcacgcctttntnaaccccaaatatctgagaccagtctcagtttattttgccaaggttaaggatgcacctgtnacagcctcaggaggtcctgacaacaggtgcctgaggtggctggggatacagtttgcctttatacatcttagggagacacaagatcagtatgtgtatggcgtacattggttcagtcagcctt

SEQ ID NO: 675098 - DNA, 748 bp, Homo sapiens
gtgggaagtgggattccgatcccgtggggctatgtagggaagttggtggctgcagctgccgtggttttctcctggtgttcagccagaaacgtgcggcggcgcaaggtgtggcttggggcaacccaggatctcccaggagcctccgctctgcgcgacaaggtggcccgcgcttgccaaggccgacgcggcagtgagtgaacgttgctccgtgggtctgcagcccgataggccaattgtacagaatttaaaccgtctctcagatgttgtacagtagaactcaagaagacagactaccaagggtcatcttgaagtcgtgattgggtcactaataacaccaggacaaagttaatgggatcactactcaagcataagccccagttttcataagactgcttgtgaagatgtttgatataaaggctttgggctgagtatgtttgtggaatgggctgcaaagtgaccctatggcttccttacaaccgttattttgggcctttactccactgttttctagcaaggtgcttgtactgtcttgggaacattgtggccaagattgatttgaggggcagtgtgagaactgcagccccacaggaagaacgcacaaacacgccccctgaaaacacctttgcgaaaggctaaaatcgacttaccacagggattggcatggctggaaccacggcttttgaaccagcatggacaactccttttggagcactcacacctcgtctttgggcaggatcccctaaagttc

SEQ ID NO: 675099 - DNA, 397 bp, Homo sapiens
ggctaccccttttcaacgataagtatcttttgccttatatcatgccaagaaagacttgaggtgaacttcatcaccacagggcatgtgaaggtgggaaaagtttcttagctttctgtttctgtctctatatatattggaattcccaaattccttaaggccaattgatttagtaacaagcacaaaagtcttcctgttttcttctcatacaactacaaggttattttatttaaagacagcgacttggttatttctttaagcatagctatcttgagcatttctaagctcttctttccaccatgaccataccaccttggacctagattagaagctacttctgacactgctgaaattctagatgagattaactgtaggagaagagaacatgggttgttctctt

SEQ ID NO: 675100 - DNA, 979 bp, Homo sapiens
gcgtcagcccgcctgccgggtggaggcgtctagtggcgtcctgagccccccggtggtgccgctacagtgacatgtgtgcttgcccctgagctggagtggggatccgagcgaccaagagccatgaggatgcactgatccgccctgtccccccctagggcccaatctctccaccttggcctcagtcccggggttcctggcggtgctgtgcggggctgggggcagactttgcgagggtcgttggcccctgtgaggcctgaggggccatggtcgaccagacacgttctgaagccggtgtcccgttgctctgtccgtgtctgtaggctcgggcgacatggacgggattgccgaaggagttcccccggcgccgtggccggcctgagcaacgccccgggcaaccccgaacgggaccgacgggcgagaatggcggccgaccgggacccttaccttgcatcgccgttccctgagcgaatggcgtacagcgactgcgtcgacttccccccccgcggtggcgtcgggccggaggggcctggcgggcaggccccggcggggcggccggggggccagagcaagaccgtgaccgcggcgggccagtactcgccagggatgaccattgagcgtgtgatggggcggcagcccgggcctctctgcgggcctaggcttctgcccagcgccctgctcagggcgaggggctgaggtcacacctcgggcaccttggatcctggcaatcaaggttgccagctggaagccccaggaaagactcttaccatttattaaaacgcaggactcagaaagtctttctgactggaccttctgccttggctttgcccgaagaaggtcttgggggccctttaccagacgtcggggtgggccctcatatgggacctgctggcgttggacaacacaccaaagagacacgggacaataaggcgccaacacctactggcaggcctcgttccgccctttacgcgacccccccaca

SEQ ID NO: 675101 - DNA, 539 bp, Homo sapiens
gtggatgagtcgagaatctctcactctattcactgagtggattcagcagggagatgagtgtagaagataatacagtctaaagtttcttcagagctaagactgtctctctggggtcccattgcctatttcagatgctgcaatggtatttccaggctgacccacaagtgtcagcatctggtccagagtgttgttcttcatgtactcatagagtgtgccactttttgagcaagcagtcaagtatggtagttcagagcatgcactgtgaatctttgctataagcatggtggtgtcttgtacatttccagacatgttattttccactttacagacccttgctcttaatagacttaatagagaagaggggtctctatcctttcctcttgactaagcactggctcacagaattagccacaactagattatgaccaatagacatatggtgacagtaatgaacgatgactgaggataagtcagacaaggcagtgcagccttccacttgtgttctgggacacttgcataggatcatatgcgccagggga

SEQ ID NO: 675102 - DNA, 820 bp, Homo sapiens
ctgctggctgagcctgtgcagtcgggcctgctcgccgtctctcgagccccctgtcgtgcctgatgtcacctcgccccggtctggcatcaaggagaccatcctcatgctgaaggagcagaaccgactcctcaccaggaggtgaccgagaagagtgagcgcgtcacgcagttggagcaggataagtcgggctcagttaagcagtctgtttgaggcccgcgccctgatccagcaggacgggggacctctggattccaccttcatctagtccttgtggggccgcgtgggcccccaggccagcctgtctggggagccccattggtatagcggtcggttacttccaggtcctgctcacccgggccgtttgctctcacgcccagcctgtccccaggtttcagctgggagaggcctcctccctcagccaatggaaggacgataaacccccgtgtgttacaggtggaggctggggcaggtccccttggggtgtcactctctcaggcccgtggccaggtctgcactcccgggtggtgctggagtacgtcctggtgggggtggccctgggtcagcccaacctgggaggggtccgcaggtgtcaccagaaccaggggggcggacaccaggcatcgagatggtttctgcttgcccgaagagcccccgatgcggggtcagtgtgtgtggggcgcacggggctccgcgtgcgggggcagggcgttggggggcgccggcccccgtcgtgtccgggcctttgggacactgtcccgcaggcaccggtttcgggggatgtgcctgggggctttttggatccttcggagccggtcgctgt

SEQ ID NO: 675103 - DNA, 304 bp, Homo sapiens
  misc_feature (283)..(283): n is a, c, g, or t
tgagactgcatagggtcggcgtggtagctcatgcctgtaatctcagcactgactcagaccaaggcaggaagatagcttgagcccaggagttcaagaccagcctaggcaacaaagtgagaccctgtctctacaaacaaatttaaaaattagctggccatggtggcacgtgcctatagttccaggtacttgggaagctgaggtgaggagattacctgagcccaggaggtcaaggcagcagcaagctgtaaattgtgccactgcactaccatcttgagtggacagngtaagactctagctttaaaaa

SEQ ID NO: 675104 - DNA, 511 bp, Homo sapiens
cagacagcattatagaggttgagagttctcagttctataacaaggtagacctggatagataaagatgttagaaaatccttattaaattttttgagacaggtctcaccttgcaagcacaaactggagtacagtggtgaaatctcggctcacctactgcctcaacctgctgggctcaagccatcctcctgcctgagcctgccaagaaactgggacatacaggcagacaccaccactacacccatctgttacattttaggaggggggcgtgattagtagagacacgggtttagccatgttatccaggctggtctctaactcccgagctcaagcagtccacccacctcagcctcctaaagtgctaggattacaggcgtgaactactgtgcccagccaggatgttagaacactcttgactctgtgtagcagcataactgtccaaaacaacacaaaacaaaaccaaagaaaagccatgctacaaagtctagtgacggtcattcccacagataggccg

SEQ ID NO: 675105 - DNA, 483 bp, Homo sapiens
gttgcctgagatacattattagataatttattctccatgtatagctttttccaaaaaaaaggatttggggtggcgtggcctggtccagtaaatatatgttaaaccagaatggttcagaatctatgggagttagtcaaggtacaggtgggtaaaaggattcttcgcagggaaatttctgaggatgaggcatcccagggagctctggacagccaggggcagctgcagaaagacagaacttatggtacctcttccacgatgtgcacagagaagacttgtgacccttatacagaacacactctttgcctcttgcccttgtgacagtggacactccagaacttgcatgatatgtgcccaggcttaccgatgcagatgtgctatgaggaagtggctaagagcatgggccccggacccaggagaatcctggctatgtctattcctagtgcagtaatggccttgggaaagttgctcaacgtttttaatcct

SEQ ID NO: 675106 - DNA, 371 bp, Homo sapiens
gcccccaattggggggtttttccaagggggtccccccttccccccccaaaaaggatttttccccgggggcccccctgggtgggggcccaattgtttttccccggtgggtttggggggcgggttttcccccccgggcttttttttttttaaagggggatttttctcccccgggaagggggggggccccgggttttttttgtaacccccaaaggggggggggcccccttgtaaaaaaaggggggcccccaaggttaagatttttggggggggcctaaaaaggggggtaaaaaaaaaaaagggttttttttaattttccccaattaaagggtttacaaaaaacccttggaaaaaagggtttttgggaaacccca

SEQ ID NO: 675107 - DNA, 665 bp, Homo sapiens
ttccgagtggctgcagatttgtggtgcgtctgagcctgtctgtccgtgcgcaggatgcttcaaagtatataaaaacttatggatccccatgaagcctattacaccaaatgtttcaccaggagattggcataggaatggggctgatgggcttcatcgtttataaaatcgcgggctgctgataaaagaagtaaggctttgaaagcttcagcgctgctccttgtcatcattaaccagatttactgtgagtcacattgttgaacagacaaagtgtcagtcctgccttgtaaatttcagcaaagcggtgtacaagatgggacagctgtggaacggtcaccttgtacacgtgtgtcataaatgtaccgggttaacattcaggtgcccttgacatttacactgggcattcttgtgaggatgtgaaacactagaagcacaacgaggcccaagaacacacaccaccatcgtggttgggggggcgcggccaccgagccccactaaaaagagaaacatttttagaacacacacctaccggttgggggaagcaccggcggcccccagacgagtgacaccaagaacccagtgttgctcacaaaagctgggtgccagacaaaaagaacacccggtggccacaaaaacaccaagagcactgagggggatctcgcacccag

SEQ ID NO: 675108 - DNA, 1516 bp, Homo sapiens
  misc_feature (885)..(885): n is a, c, g, or t
  misc_feature (959)..(959): n is a, c, g, or t
  misc_feature (987)..(987): n is a, c, g, or t
  misc_feature (1055)..(1055): n is a, c, g, or t
  misc_feature (1434)..(1434): n is a, c, g, or t
gcggcggcggtggcgaggcgaagcgatatgaggatctgtgtgctggcgtgggccgggtggtcgagttaggaggccatgaagtgctgcaggagaccgagggggatgccgggtgcctggtggtggccgtccgtcctgttggtccactgctagggtaacactcatcggccatgcggtgtaggcatcagtcgatgttttgacgttgcgatgcagtcgcgtgtgagatgcatgctcgtcctgtgtggtgcacatgacgtcttgactcgtttccgccgtgcgactgcgtagccaagattcaagtgccagactgcgtagattgtggtagacagtatctttgtctctggagaaaacggcttcggcgcttgggtgagccaaaagggaggtggacaattgctgtcacggttttgcggcgcagaaagttcgatgttgggttgcacgaaacggatcaggggtaggttcggtcggcaaagacctagcgtagggcccttgggcaggtatgtggcgccgttactgtcaaaggcgacagacgggggggaatcgcaatgagtcgtttggacaggttccgcttgttcactgtggaggggtacgtgtacctattctgtaagcgccaaacctcaagctcgacatcgcggtaacgacttggcgttagcgttatcccttagtggtatccccaacaagtgttttcctgaggtgtggcacgcgatggccaggtcgataaatgcgaacgttggtaaaagtggtttcgcctcctttttcggccttgtgcgcaagctagattcgggaaatgccgcgccggtccagtggtcgctggagaagaggaaatccgacatgtggtagaccgtttgtcttctctgttaatggaggtgttgagttcgaagcgacctggtncttgatgccctatgtcctttggcccgaagggaaccgccacctgaaggttttctcctcgcgcgttcaattggttnatgaggtgggcaacctgggtgtacgacncgctagacatatcggtgaggaatcgcaagaggagtaccgaggttcttgttgtgtgcggttgcaacatnttgtgagccgcctttacgggactggtggtgcaacgttttccgttgggagcgcctggcgcaatgtgggaggggcagcccccatatccggcgatgagctttcacagaggcttttcaaatttggcgaagcgcgccgttcgggaaatgtgagtactgtgacaatccgtatggtcgacccacagatggagtgtaaaagacccgagacgctggacaggcgcagttgccgcattcgccagagggttgtattccgtggaatgtgccacgcgaatggtgtatccaagttggcctgttcgctaaggtacgaagattacgagcctatatgaaggcagaaccctcggcggggcagtgggcgtcacattcagggcggaggtttcaatttgcnacgtataggctccccacatggggcaggtcccaagtgtccgccgggagggccaaacgcccgagtggagataacgccccatggg

SEQ ID NO: 675109 - DNA, 958 bp, Homo sapiens
gctggggtctgcgtctatctctgtcgctcttttcagcccctcctggtattcccctcctaacctgggttttttacacgcccgcgtggcttcctgctcgacctccctgagtctgatcctggtttccacctccagccctgggaaatttcctttctccagactcggcctccccacccgggcctcggactttcaccccagcttctctctcctggccagtgattacccaccccgaatcccaacccgacaccggcgagcaactaacatgctcccttcacccggactgggaacatcatcccacagtccactccgacacagactgggactccaacttggctccgtacaccaatagcacactcaatctctgcttggtctcgttcactctatggcctaatctctcgtctcggacttataggggacggacattctcacagattaggttccaaacaacagatacctggatggattcccgacgatacatgaccccgtcttgcaattagaccggacctcacaactaacagtagacagacccctctacagataagacaccggctcctacactcttagaccgatgtctgctatgacataaggacagggtagtggaagataaaaacacataagccacgatgacagacgcgctcgcacaccgcacacgacggcaagaacaaacctgaacgacagcccagagacgaggaagacggaccatgcactacgcacatatgctccaggacaaaaacaggcgtgagaacgaaaagaaaggataacggcaaaactacaagccaaacgtgcgtgagcgccaacctccgattgtacgagaagatgacaaaacgcaaagcacatagagcaatacgccggcaagactaaggagtaaagcgataaccaaaacaaacgaaagaagctagcacgacgcacaagacatggacaggctgtcttttcttcggttgctctctcctaccagaacaaa

SEQ ID NO: 675110 - DNA, 236 bp, Homo sapiens
  misc_feature (19)..(19): n is a, c, g, or t
  misc_feature (31)..(31): n is a, c, g, or t
  misc_feature (36)..(36): n is a, c, g, or t
  misc_feature (39)..(40): n is a, c, g, or t
  misc_feature (207)..(207): n is a, c, g, or t
tccctcttaagacaaatgngactgattcatntaganccnnttgcatttagactgattgcatttagactgattccatttagactagctacttcataaacagccccaccaagaaaagaaaaatcgcgatcccgatataaaccattctaggtctaaatgcaattgcatttagactcccttgggactgtgtctcatgtttgtgtgaatgtngaccaggaaagggggctgcaaaaatgttg

SEQ ID NO: 675111 - DNA, 150 bp, Homo sapiens
gataaagggaaaggcggatgctgggagaatctaagacggcgctacccccaacagcaagaaactattctccaagttctccccttcctctcgcctccaatgagccaatttaggaagttgttgtcactatccactctcccgctacttgcgcat

SEQ ID NO: 675112 - DNA, 475 bp, Homo sapiens
  misc_feature (62)..(62): n is a, c, g, or t
  misc_feature (188)..(188): n is a, c, g, or t
ggaatagcttttaccagccactggactggatagtacaaatctctcgatgtggttcatggcantgattgcatttagactgattccatttagactagctacttcataaacagccccaccaagaaaagaaaaatcgcgatcccgatataaaccattctaggtctaaatgcaatcatgattgcatttagacntcttggaaagaacatttagcaatctgggatgatgggaaatatagcatgattcaacactggtttttttttttttttttttggtacagttaacactatcatatctatgtgtaatattttaagaccagggcacaaacgtgtttatgtgcatcaaccccagttctctttaaaatattgaatctattttattttaattctcttatattcttaatttgggacccatttgtaccccagtcatcctccctaatctacagatcttatttaactcttaccccacacaaatatcaaaa

SEQ ID NO: 675113 - DNA, 409 bp, Homo sapiens
  misc_feature (21)..(21): n is a, c, g, or t
  misc_feature (23)..(25): n is a, c, g, or t
  misc_feature (27)..(27): n is a, c, g, or t
  misc_feature (29)..(30): n is a, c, g, or t
  misc_feature (32)..(32): n is a, c, g, or t
  misc_feature (36)..(36): n is a, c, g, or t
  misc_feature (39)..(39): n is a, c, g, or t
ggatcccccggactgcaggantnnngnannangtcnagnttctctagggcgccccagcaatgggccacttttgctagaatatggtatctcttagatgggaaaatgcagccacctggcaaacttgctgctatggcatctataagacttcagggattacataaacctgtgtaccatgcactgagtgactgtggggatcatgttgttataatgaacacaagacacattgcatttgttacttttcatctctttccccaagtgcatcttaaatatttggaacaactgttttgcttccttgagccagactttgcccattcctccccttaaaatacattcatgaaatctttatataatttaacaaaactgaatttacatccgtctttagtaatttcagctattggcagatctctat

SEQ ID NO: 675114 - DNA, 1548 bp, Homo sapiens
  misc_feature (4)..(4): n is a, c, g, or t
  misc_feature (1524)..(1524): n is a, c, g, or t
ggangcatttccggttcccttcgtttaggtcggctggaaattatgtcctccgtcggttttccgcagtttttccaccaagcgagatattttgggagttattccctaaataactgcattatatgctcctttcatgacgaaattgctgccgtggagaagactggaggaaactcgaggaagagggagaagccgacaagtgctcgacgggctaggaactgtcctgcttgggtgttagcgtttcccgccgggccagtaaggctgagtgacccggcgtggctactaggagaaggacgtacggtcctgctagtagaggaatatgtcgagtttctctagggcgccccagcaatgggccacttttgctagaatatggtatctcttagatgggaaaatgcagccacctggcaaacttgctgctatggcatctataagacttcagggattacataaacctgtgtaccatgcactgagtgactgtggggatcatgttgttataatgaacacaagacacattgcattttctggaaacaaatgggaacaaaaagtatactcttcgcatactggctacccaggtggatttagacaagtaacagctgctcagcttcacctgagggatccagtggcaattgtaaaactagctatttatggcatgctgccaaaaaaccttcacagaagaacaatgatggaaaggttgcatctttttccagatgagtatattccagaagatattcttaagaatttagtagaggagcttcctcaaccacgaaaaatacctaaacgtctagatgagtacacacaagaagaaatagacgccttcccaagattgtggactccacctgaagattatcggctataagagaataagaattgcagaaaataacagtgaagtgattgaaactttcttctgatgagtttctctaacctacaggatggagtaaaacaactgctacagttcagcacctgttttatgtgccgaatcactgtggggaaaggtcaggaaggtgtagtccttcaataggaaattgtaattaaaatataattttatagaaccatttttatgtaatctgatttgaatgttatagttgataataataaaatcacttacttggttgactaaaaaaaaaaaaaaaaaaaaaaaaaaaaaaaaaaaaaaagggggggggggaaaaaaaggatccccgacagggggcccaaagaaaacgacacacaacaagatctgtgtacacagggcgcccaaaagagggagacgacaaaaaacacaagagacaaagagacggacagaaacaaaaacgaggacaggggaaaaaacggcacacttggacgaacatcgggagaaaaaggacacacccaaacacacagggggaggggcaacaaaacatgtgggacacaaaccaccctcaagacagagctatataaaccccacacaaggacacgcatcacacaccgccagaaggtcatcctccgggggtgtaaaccacacgcgcgaaaaagcgacgacagagagaaaaaaatatagagccaaacagcagnacaagaataatgagcacacttttg

SEQ ID NO: 675115 - DNA, 112 bp, Homo sapiens
tgaaacagctgccaccatcactcgcaagagaatccctccatctttgggagggttcatccagaccaggtgagaagttgacaggcagtgatgggggcaacagcaaaataggggg

SEQ ID NO: 675116 - DNA, 1115 bp, Homo sapiens
  misc_feature (4)..(4): n is a, c, g, or t
  misc_feature (1077)..(1077): n is a, c, g, or t
ggangcatttccggttcccttcgtttaggtcggctggaaattatgtcctccgtcggttttccgcagtttttccaccaagcgagatattttgggagttattccctaaataactgcattatatgctcctttcatgacgaaattgctgccgtggagaagactggaggaaactcgaggaagagggagaagccgacaagtgctcgacgggctaggaactgtcctgcttgggtgttagcgtttcccgccgggccagtaaggctgagtgacccggcgtggctactaggagaaggacgtacggtcctgctagtagaggaatatgtcgagtttctctagggcgccccagcaatgggccacttttgctagaatatggtatctcttagatgggaaaatgcagccacctggcaaacttgctgctatggcatctataagacttcagggattacataaacctgtgtaccatgcactgagtgactgtggggatcatgttgttataatgaacacaagacacattgcattttctggaaacaaatgggaacaaaaagtatactcttcgcatactggctacccaggtggatttagacaagtaacagctgctcagcttcacctgagggatccagtggcaattgtaaaactagctatttatggcatgctgccaaaaaaccttcacagaagaacaatgatggaaaggttgcatctttttccagatgagtatattccagaagatattcttaagaatttagtagaggagcttcctcaaccacgaaaaatacctaaacgtctagatgagtacacacaagaagaaatagacgccttcccaagattgtggactccacctgaagattatcggctataagagaataagaattgcagaaaataacagtgaagtgattgaaactttcttctgatgagtttctctaacctacaggatggagtaaaacaactgctacagttcagcacctgttttatgtgccgaatcactgtggggaaaggtcaggaaggtgtagtccttcaataggaaattgtaattaaaatataattttatagaaccatttttatgtaatctgattttattattatcanctataacattcaaatcagatgtcgacgcggccgcgaat

SEQ ID NO: 675117 - DNA, 322 bp, Homo sapiens
cctgtggtagcacaacctagggtcagttttgcatgtggtaagccatttaccaagatagttgtaggtaaagaagggcagatttattgagagaaattgtgaaaatatgttgcagtgggcagctcagcagagaaggggctacctgcaaagaggcaagggctggaggaaagttttatagggtcctgctgaagggtgctacgtgtggaatgaggtcattgtgcccgcaggttgtttgtgattagctgtctctaacaattgttcatacaataattgttcattattgttctcaacttggggctctccccaacctggggacccttcctta

SEQ ID NO: 675118 - DNA, 1022 bp, Homo sapiens
  misc_feature (4)..(4): n is a, c, g, or t
ggangcatttccggttcccttcgtttaggtcggctggaaattatgtcctccgtcggttttccgcagtttttccaccaagcgagatattttgggagttattccctaaataactgcattatatgctcctttcatgacgaaattgctgccgtggagaagactggaggaaactcgaggaagagggagaagccgacaagtgctcgacgggctaggaactgtcctgcttgggtgttagcgtttcccgccgggccagtaaggctgagtgacccggcgtggctactaggagaaggacgtacggtcctgctagtagaggaatatgtcgagtttctctagggcgccccagcaatgggccacttttgctagaatatggtatctcttagatgggaaaatgcagccacctggcaaacttgctgctatggcatctataagacttcagggattacataaacctgtgtaccatgcactgactacccaggtggatttagacaagtaacagctgctcagcttcacctgagggatccagtggcaattgtaaaactagctatttatggcatgctgccaaaaaaccttcacagaagaacaatgatggaaaggttgcatctttttccagatgagtatattccagaagatattcttaagaatttagtagaggagcttcctcaaccacgaaaaatacctaaacgtctagatgagtacacacaagaagaaatagacgccttcccaagattgtggactccacctgaagattatcggctataagagaataagaattgcagaaaataacagtgaagtgattgaaactttcttctgatgagtttctctaacctacaggatggagtaaaacaactgctacagttcagcacctgttttatgtgccgaatcactgtggggaaaggtcaggaaggtgtagtccttcaataggaaattgtaattaaaatataattttatagaaccatttttatgtaatctgatttgaatgttatagttgataataataaaatcacttacttggttgactaaaaaaa

SEQ ID NO: 675119 - DNA, 1423 bp, Homo sapiens
  misc_feature (4)..(4): n is a, c, g, or t
  misc_feature (1260)..(1260): n is a, c, g, or t
  misc_feature (1265)..(1265): n is a, c, g, or t
  misc_feature (1267)..(1267): n is a, c, g, or t
  misc_feature (1276)..(1276): n is a, c, g, or t
  misc_feature (1279)..(1279): n is a, c, g, or t
  misc_feature (1300)..(1300): n is a, c, g, or t
  misc_feature (1346)..(1346): n is a, c, g, or t
  misc_feature (1367)..(1367): n is a, c, g, or t
  misc_feature (1381)..(1381): n is a, c, g, or t
  misc_feature (1385)..(1385): n is a, c, g, or t
  misc_feature (1395)..(1395): n is a, c, g, or t
  misc_feature (1397)..(1398): n is a, c, g, or t
  misc_feature (1400)..(1400): n is a, c, g, or t
ggangcatttccggttcccttcgtttaggtcggctggaaattatgtcctccgtcggttttccgcagtttttccaccaagcgagatattttgggagttattccctaaataactgcattatatgctcctttcatgacgaaattgctgccgtggagaagactggaggaaactcgaggaagagggagaagccgacaagtgctcgacgggctaggaactgtcctgcttgggtgttagcgtttcccgccgggccagtaaggctgagtgacccggcgtggctactaggagaaggacgtacggtcctgctagtagaggaatatgtcgagtttctctagggcgccccagcaatgggccacttttgctagaatatggtatctcttagatgggaaaatgcagccacctggcaaacttgctgctatggcatctataagacttcagggattacataaacctgtgtaccatgcactgagtgactgtggggatcatgttgttataatgaacacaagacacattgcattttctggaaacaaatgggaacaaaaagtatactcttcgcatactggctacccaggtggatttagacaagtaacagctgctcagcttcacctgagggatccagtggcaattgtaaaactagctatttatggcatgctgccaaaaaaccttcacagaagaacaatgatggaaaggttgcatctttttccagatgagtatattccagaagatattcttaagaatttagtagaggagcttcctcaaccacgaaaaatacctaaacgtctagatgagtacacacaagaagaaatagacgccttcccaagattgtggactccacctgaagattatcggctataagagaataagaattgcagaaaataacagtgaagtgattgaaactttcttctgatgagtttctctaacctacaggatggagtaaaacaactgctacagttcagcacctgttttatgtgccgaatcactgtggggaaaggtcaggaagatcccttctgcttactatgacattacccagagccacggcggacagtggtgagagtgcagcagactcactggcactggcaggtgctcatgtctcatgcatatgcaaggagcttctgggttctgtctcagggtactcatgccaagacagcctccgagattgaaagttaacaccctgagaaacaaggctcaaccacaaggattcaggaatcagtgaaggaaagcttcaacctcccatcctctaggggacagttctaagaaggatcttntcacntntcagaagtnaangtagaattgaatccccactgnctatagctgctgctgataatgcacctttagggtggcttttccttgncccctgtctcatttgtgctgntccctactgctatntccnttagtaactntnnanataaactgcaatgcgggcagtct

SEQ ID NO: 675120 - DNA, 623 bp, Homo sapiens
ctctcattagaatctagtgcatgccaagctcgtgtactttgtagcatggcggccttgcgaagcctcctcaggtcggggggccggggagccagtgagccgagaggtcctctgtggctccacttatgcatatgcgccaaaaaaaaaaaggtaaaaaaagaggttgtgttttaagagcctggagcccgttatcacaatggatatacgtggcgccccatcgggacggggtagaacggtgatgctgtggggatctcgcggggtcaagtcgtgaaggttggcaaacagtctaaagtggcctttttcaagagtcctgggggctttccaacaatcgaggagatggcgtacaagatggctcgagaagagggtctctacatgcttggctaaaagaggtgggctcggcatgtgcgcgggttcgatcccgcagccaatgggtgggcgggccccatcccgtgggccacgggggcccccagtttccgagatacgtgctccggagagccaactaggcgggcactagaggcctaggtgctggggccactggggtcacattccctgaggctgcaaggcctgcgtgcgggcaggggagccaggcaagcacaggatgcgttgggaaggctgcaacaacattt

SEQ ID NO: 675121 - DNA, 283 bp, Homo sapiens
gcacttttgtcaggtgtcctccatttgcccaatgtaaccgtattttatttctgagacacagtcgtgccctttaacacagtctgtttttcgaggaggaggattcacttaccgccctgaaaaccaaggtcagtctgggctggttgatgggcatttggactgttccttgggttccaagtgatttttctctaacaagttttcaccctttaaatgcctcgaagacccacttaattaggaagacagtttctgtaattgccgtcctcttcacctctggactgtggtgggc

SEQ ID NO: 675122 - DNA, 1097 bp, Homo sapiens
  misc_feature (4)..(4): n is a, c, g, or t
ggangcatttccggttcccttcgtttaggtcggctggaaattatgtcctccgtcggttttccgcagtttttccaccaagcgagatattttgggagttattccctaaataactgcattatatgctcctttcatgacgaaattgctgccgtggagaagactggaggaaactcgaggaagagggagaagccgacaagtgctcgacgggctaggaactgtcctgcttgggtgttagcgtttcccgccgggccagtaaggctgagtgacccggcgtggctactaggagaaggacgtacggtcctgctagtagaggaatatgtcgagtttctctagggcgccccagcaatgggccacttttgctagaatatggtatctcttagatgggaaaatgcagccacctggcaaacttgctgctatggcatctataagacttcagggattacataaacctgtgtaccatgcactgagtgactgtggggatcatgttgttataatgaacacaagacacattgcattttctggaaacaaatgggaacaaaaagtatactcttcgcatactggctacccaggtggatttagacaagtaacagctgctcagcttcacctgagggatccagtggcaattgtaaaactagctatttatggcatgctgccaaaaaaccttcacagaagaacaatgatggaaaggttgcatctttttccagatgagtatattccagaagatattcttaagaatttagtagaggagcttcctcaaccacgaaaaatacctaaacgtctagatgagtacacacaagaagaaatagacgccttcccaagattgtggactccacctgaagattatcggctataagagaataagaattgcagaaaataacagtgaagtgattgaaactttcttctgatgagtttctctaacctacaggatggagtaaaacaacttttatgtgccgaatcactgtggggaaaggtcaggaaggtgtagtccttcaataggaaattgtaattaaaatataattttatagaaccatttttatgtaatctgatttgaatgttatagttgataataataaaatcacttacttggttgactaaaaaaa

SEQ ID NO: 675123 - DNA, 1073 bp, Homo sapiens
  misc_feature (4)..(4): n is a, c, g, or t
ggangcatttccggttcccttcgtttaggtcggctggaaattatgtcctccgtcggttttccgcagtttttccaccaagcgagatattttgggagttattccctaaataactgcattatatgctcctttcatgacgaaattgctgccgtggagaagactggaggaaactcgaggaagagggagaagccgacaagtgctcgacgggctaggaactgtcctgcttgggtgttagcgtttcccgccgggccagtaaggctgagtgacccggcgtggctactaggagaaggacgtacggtcctgctagtagaggaatatgtcgagtttctctagggcgccccagcaatgggccacttttgctagaatatggtatctcttagatgggaaaatgcagccacctggcaaacttgctgctatggcatctataagacttcagggattacataaacctgtgtaccatgcactgagtgactgtggggatcatgttgttataatgaacacaagacacattgcattttctggaaacaaatgggaacaaaaagtatactcttcgcatactggctacccaggtggatttagacaagtaacagctgctcagcttcacctgagggatccagtggcaattgtaaaactagctatttatggcatgctgccaaaaaaccttcacagaagaacaatgatggaaaggttgcatctttttccagatgagtatattccagaagatattcttaagaatttagtagaggagcttcctcaaccacgaaaaatacctaaacgtctagatgagtacacacaagaagaaatagacgccttcccaagattgtggactccacctgaagattatcggctataagagaataagaattgcagaaaataacagtgaagtgattgaaacaactgctacagttcagcacctgttttatgtgccgaatcactgtggggaaaggtcaggaaggtgtagtccttcaataggaaattgtaattaaaatataattttatagaaccatttttatgtaatctgatttgaatgttatagttgataataataaaatcacttacttggttgactaaaaaaa

SEQ ID NO: 675124 - DNA, 283 bp, Homo sapiens
  misc_feature (129)..(129): n is a, c, g, or t
  misc_feature (210)..(210): n is a, c, g, or t
aagcccgggttcaagcaattctccggcctcagcctccggagtagctgggattacaggcgcctgccacggcgcccagctaattttggtatttttagtagagacagggtttcgccatctgggccaggcggntcttgaactcctgaccttgcgatccaccggcctcggcctcccaaagggctgggattacaggcgtgagccaccaggcctggntggattcctactttaagctcacaatccggggtgggagccagcagagacactggcatggcagtaaactgtgcat

SEQ ID NO: 675125 - DNA, 992 bp, Homo sapiens
  misc_feature (4)..(4): n is a, c, g, or t
ggangcatttccggttcccttcgtttaggtcggctggaaattatgtcctccgtcggttttccgcagtttttccaccaagcgagatattttgggagttattccctaaataactgcattatatgctcctttcatgacgaaattgctgccgtggagaagactggaggaaactcgaggaagagggagaagccgacaagtgctcgacgggctaggaactgtcctgcttgggtgttagcgtttcccgccgggccagtaaggctgagtgacccggcgtggctactaggagaaggacgtacggtcctgctagtagaggaatatgtcgagtttctctagggcgccccagcaatgggccacttttgctagaatatggtatctcttagatgggaaaatgcagccacctggcaaacttgctgctatggcatctataagacttcagggattacataaacctgtgtaccatgcactgagtgactgtggggatcatgttgttataatgaacacaagacacattgcattttctggaaacaaatgggaacaaaaagtatactcttcgcatactggctacccaggtggatttagacaagtaacagctgctcagcttcacctgagggatccagtggcaattgtaaaactagctatttatggcatgctgccaaaaaaccttcacagaagaacaatgatggaaaggttgcatctttttccagatgacctgaagattatcggctataagagaataagaattgcagaaaataacagtgaagtgattgaaactttcttctgatgagtttctctaacctacaggatggagtaaaacaactgctacagttcagcacctgttttatgtgccgaatcactgtggggaaaggtcaggaaggtgtagtccttcaataggaaattgtaattaaaatataattttatagaaccatttttatgtaatctgatttgaatgttatagttgataataataaaatcacttacttggttgactaaaaaaa

SEQ ID NO: 675126 - DNA, 443 bp, Homo sapiens
cgtcactgtgattcacgacatgctgtgtttctagcactgagatctcacgtctagacccacgatagctgtgcagtcacccaggccaggaaatacctgtgaaggcagaccttacttggtgcacgttgggtcccttagaaagcagagtctgagatgtcaactaagatatatgagggttatgggagtcgggggagttgctcttggaattcacaactgcagaaaggaaagggagtatacaggaatggacacgagggagaaggtgagcaccaatgcaatttctggagcctaagctattcctacagaaaggttcgaagctgagatgacctttagaggtttacccagatggtctaaggggctgggcctttataccccatgtcaatcaggcattacatgtgggccaccccaggatggggtgaggcagctctttatagctagcgtctccgtgg

SEQ ID NO: 675127 - DNA, 211 bp, Homo sapiens
gtcgacttccaactgaatgactgagtcacagcgaggctaagaaacttgcccaaggtcacacagctggcaggtgccagacctggcattcagacctagtagtctggctccagagccacacactgaacgacaatgctgtgttgacgttggccaatgcaagcatgccctttgtgatggagaattgccaggtgcactattaggctcttcgtcgacg

SEQ ID NO: 675128 - DNA, 116 bp, Homo sapiens
ctttgctctagaaacctagtagtctaaattgtgactttctcatttgaacagcaccttttcctactgctacaatgactagtgccatagggtttgcagggtcatgacccaacaggcag

SEQ ID NO: 675129 - DNA, 264 bp, Homo sapiens
accaatacctttggcgccaccagcgtcgcgcaagacgactaccatatggcgcacctggtgtacgagatgaacgtcgagtcggccaagctggccaaagccgcttgcgtcaaatacagcacgccagacaaaccacgcttcgtcgcgggcgcattaggccctacgcctaaaaccgcgtctatttcacccgatgtgagtgatccggctgcacgtaatgtcagctttgatcaactggtgacgtcatacatggagcaaattcgtggcctg

SEQ ID NO: 675130 - DNA, 120 bp, Homo sapiens
ccggtaccgatgattgtgtttcgtcagtcccgagtcccttcatggctttccgcagcgcttggcatctgcgtcaggttgaagtcatggctgggcgcacagttcccttgtcaggggagaaga

SEQ ID NO: 675131 - DNA, 179 bp, Homo sapiens
  misc_feature (60)..(60): n is a, c, g, or t
  misc_feature (91)..(91): n is a, c, g, or t
  misc_feature (140)..(140): n is a, c, g, or t
aggctttcctgaggcctcggcgcttccatcctggacagcaccacttccacatggagctgnaatcaagcaggctgctaattgccttaaaaantctttgtttttttttgagatggagttcactcttgttgcccaggcttgangcagtggcacaatctcggctcaagtgcaacctccgcctc

SEQ ID NO: 675132 - DNA, 203 bp, Homo sapiens
gtggcagcactatagtgtaggtgctatgggggtccatgcgcacatttatcccctgagcgcagcagtgcctgatgccacatacctgcatgagtggcaggcgagtgaagatgtaagcccaaatcctggaccacaacagtgtcctatctacatacctacaaatggctgggcacccctccagcacacggtgcgttgtgcccaacggt

SEQ ID NO: 675133 - DNA, 181 bp, Homo sapiens
ctaccgacagccgacagatgttgcttcccttcatgcttgtggtttgttgtgtcgatcagaattttgggggaaatggaaagttttcctcaaggagcagctgtcgggctagagctcttccaggacaggttcttcacccgtggagccccaggatacctaccactacctgtcgggctagtcgggg

SEQ ID NO: 675134 - DNA, 351 bp, Homo sapiens
acaggatccagacgacttcattcatcccattctgtaccaactgtgtgttttccattctcttcctccatcactttttgttttgttttgttttttgagacacagtctcgctctgttgcccaggctggagtgcagtggcacgatcttggctcactgcagcctccaccttccaggttcaagcgattctcctgcctcagacttcccagcggctgggattacaggtgctagctaccacgcccgctaattctgtatattagtagagcctggggtttcaccatggatggccaggctggtctcaaactcctgacttcaagtcaaccaccggacttagcctcccaaagtactgggattaca

SEQ ID NO: 675135 - DNA, 238 bp, Homo sapiens
  misc_feature (149)..(149): n is a, c, g, or t
tgggcggccgtgggtatacatcatacatttattagtgaatatccctctgaaatcagcaacaatattaaaaaaaataatgatggcactactttggtcaagcagaactagcaacttctcttttaaaaaaaagtacaacatctctgttaaanaattctcaactcagtatacacattattttttaatacaacatactagtttatgttaaagtgctacaaaccaagtgtgaactcccagtgtt

SEQ ID NO: 675136 - DNA, 179 bp, Homo sapiens
cacgagggcgacccttacggctgctgcggcatgaattctttgcacggccttgccggagtacgactcaatccccatcttggtccctgcacagagatccctgggcccagatatggacgcatcaaatccgggactccccccaagtcctgagggcatgaagaagtacagtgacatcttccgga

SEQ ID NO: 675137 - DNA, 966 bp, Homo sapiens
  misc_feature (182)..(182): n is a, c, g, or t
gccaatctcgagtagaatgtagagaaaggtgtcttgtcggtaccagatcagttcatggctgagttgcagccttgctctaggcgaaacggcgagcaaggaaacttcattaccatgagtagatggtgtgattttggagtttggttgacgcgtcggcatgaagtgggattcactcggtgtgctcnttaagcatgttgatgctagagctgtagtgtctggagagttgtgaggaaatgttgagttgttataacaaaatatcgatgatgctgtggacgagagtggcttaaaacctgtagtgattctcagagagcaggaatctcggtagctgcaagaggaccccattccaaggtaagtccgaagtaaaggtcatgaacatagtggatgtatatggagtgactgaagtatgatgatgacccagtgtgggacctgccagggacatccatggagtcgaacgagtctgatgatgtcgatgacgtgatgattgtcaccagtcctgatgagtctcaccattcgtgagtgaatctgatgaactggtcagtgattgtcccaaggtaagtgccagcaatgcgacagttttaactcgagttgtccccagagtagaatacatatgatggccggacggtgataagtgtgttattaatgggactggacggtccaacattctaaagaaagttttcgcaagaccttgaatttcaggtacccttgatgcttacacagactgaggaacattcaccctccaccacattgggaaaaggcgaggacgttggaatgggtgcttaaaaggggcatctccgttggcaaggacctgggagggggcttttgatgtggactacacgtggcaagggacgttttgaaccgagtcagcgggatcaccaagagtggtgtgacccagagcatagaagcagtttctaggcgggcagctttgagaatacactcaggttggaaaaatacaaggggaacagatttacg

SEQ ID NO: 675138 - DNA, 264 bp, Homo sapiens
ttttttttgggggccccccccccccccggggggagggggccccaaattttgggggggtttttttcccccggggttttttttttttctcctgggttcccccccccccccccaaaagggggggggggggcccccccccttgtttgggggggggggggccccccccggggggggggtgggggcccccccccccccccggggccccccccttttttttttgttgtttcccctttttttaatccttttttagggccccccccgggggga

SEQ ID NO: 675139 - DNA, 1094 bp, Homo sapiens
cttgcagtctgaaagacaaagggaacacatgacatcaaagtgcaggattcccctgtggccctctcccttaccctgggtaaggcctcttggagaccttaccccttgctgtttggactttgtatactttaaataatttaactacccttaacttacttaataaaacaaaaacaacaatgcttgtatcgacttctcgataacctaatttggcggagtacgcagtgggacttcgttactccccaggacccgtgtactcgtatcatcctgagtcgtaccacagactacgcgcgctgcgccaagggaacaacacaaacttcaagacacccacttttctacgccaacaaaaaaaacaaaacaaaaaacaacaaacaacaaacacaaaaatacattaaacacaacaaacaaataaaatacaatacacaccaaagacacaacacgacacacaacacaacacaagacacactccaccacacaaaaacaaacacaataccaacactcatacacactccgcgccacgcggcccctactatccctaacactacacccatacttattaaactcgtatgaatcacctctagcataaatgacaataacttatactaataattcactctcaactatacgccactaatactactaaacaaaaaaaaaaacttacactataaacatcatacactaacatcacatatcattaaacctacttacctctacactaccctacaaatcaaaataccaataacgcctgttatccaaattacatataaacaaaagatgacctcacactgtacaacgtgcccacttatacgaaatcctattcaaaaaaactacaaaatcatacacagcattacaacgacacatccgtcatcgaatctactcatcactctaccattagaaattttcacatccatctaactatattactcgaactgtagcactagtacagtccagcttctaatatcaacacaataatactcttaccgccgcacacacccaacgtattctatgtatttactaactagtgtattatggctgtatcatttactcagatttctatagtttgctagtatgcatctcgtaatctatatcattacacacat

SEQ ID NO: 675140 - DNA, 423 bp, Homo sapiens
aaaaaaaaaaatggccgccgtgacctattcaccctccacttcccgtctcagaaatctaaactgtggtcaccttctgagtagagatggccctgccctgcccacctgtgggcagtgccaccctgcagatgacactgcgctctccaccacccaacccaaaccatgagaatttgcaacagtgggagtgaaaaaagaaccaaaacttccaatggccctgctttaattctcttaaaagtactttaaaaatggacatttgtagagtattttttatttacatttcatatttttggtacatcattggtagggtcagccatttaataatgatctcggatgaccaaaccagccttcggagcgtactcatgtcctacttctgactttacttgtggtgtgaccatgtcattataatctcaaaggagaacaaaaacc

SEQ ID NO: 675141 - DNA, 239 bp, Homo sapiens
atgctttgttatgaggcctctcaggctctgaccgacgccacgtgccgcctcttcgcacctgcgggccgatcatggagctcctcatgtactcccatgacaacatcacctgtggcatcacctctgttgccttctcgcgcagcgcacggctgctgctcgctggctaccacgacttctactgctacatctgggatgccatgaagggcgaccgcgcaggagtcctcgctggccaccacaaccgc

SEQ ID NO: 675142 - DNA, 327 bp, Homo sapiens
  misc_feature (122)..(122): n is a, c, g, or t
ccaaattcctccttccttcccaaatgcccagccccccaccctcctcctggtcctcccaccctgcccctttggttactcctcctagtgtccttcaggtaggtcttgtatttttgtcccacagnttacacatgttatcaatgggaggactgggccccacagtagctactcagttattaattgttgtagctggacatggtggtgtgcacctacagtcccagctacttaggaggttgaggtgggaggactgcttgagcccaggaatcctaggctgcagtgagctaggagtgcaccactgcactccagccagggcaacagactctgtccctt

SEQ ID NO: 675143 - DNA, 522 bp, Homo sapiens
ctgatgtctcaccctgcttaggtgtgcgcctacagctcccgcggtgcggggtctgctgctgctgctggcgcagtgtggcgacgggcgtgtgcacacctgctcgtgggctacgatggcctgactgcgccgcagctgctgcgccctgctacaggcctggcaaggcctggcaccatggtctggaccgtctgcgtcctgctgtccttccccttcatcttcagcccctgcctgggctgtgtgggctgcgtcacgcccgaagtgtggctgccctcctctactacgtgcccgttcatcgtgatcttccagttttggcttgtgcctccacaacagatctcccacctcagcctcatccctggagctcgtcaccaatgaccatgagaaggtggagctcacgtgactcaggtatgctgtcaccgtggtggccaacatcaccgtctacggcgcctgctggctcctgctgcacctgcacgggctcgtcgcgggtggagcccaccaagacatcagcatcagcgaccagctgcgggg

SEQ ID NO: 675144 - DNA, 139 bp, Homo sapiens
gcacccgtggctctgctcaagctatgcaagagcgggccctccagaggtcacgttccccctccaccaggcacgtagggacagcctggcctggagcgtggctagtactgcctgggggaccctgcggctattttccatgccg

SEQ ID NO: 675145 - DNA, 374 bp, Homo sapiens
cttgtagtatattgagttgagtcttgaatctgggagtctaggaaatcacggtatcttctacaaataatgataggtttatctcactcttttccagacatttgctccccttattttatggcttaccactcaggaccttacagaccagtagtgaatacagagcattagatactgtgcaccctatgtccagtcctgcgcttcgaggcggctgcatatgacaactgaaaaccaacgcagcgcatgttaactagaagactgggagactttttaaacaacagaagattcattgaagaacagttaaccaataagaaagcagttactggcgagaacaacttcacagacaccatgaggcacatgttatcgtcccggctgagcat

SEQ ID NO: 675146 - DNA, 296 bp, Homo sapiens
caaatctatgggaaacttttttttaaaatgaaaaaatttaaaaaatttttttaaagcccagaatattataaatatagtattcaggattttcataataaaaaaaaagtaattcaaatcaaacagggtttttggttggaacaacaaaatcgactttttctatttacaggggtaaaaatgccctttaaatcaaaggggtggaaaaaaaggaaaaaaatggggaaatgaaaaaaaagcatcttttgtgggggattttttttaaaaaaatttttagccaaaaaaaatttgtttgtttttca

SEQ ID NO: 675147 - DNA, 410 bp, Homo sapiens
gaggtgcgacagaccaagagtgccatttacttccaacgtggtgtcacggagcgcactggtgcattgccatggcctcacaggtgtcggcgcccttccagctcctcccagtttcttggctgggtcttctgaggcctacgtggaatgaactacacatttggcctcatgcccgagggtttgtaagatggcctctgattctctggtattcaacttgactttttatgccccacgagtgtctttctggaaacaggcttagcttttgtgctggggtgcgacctgccctatgggcccaagggaggggccagatgggggtcaggccctaagggtgtccagggtctgagctctttggctccgacctggttctgccccagaaggaacagggtgttggtagcagggtcctctcccgggagctg

SEQ ID NO: 675148 - DNA, 245 bp, Homo sapiens
caagcagcagatgaagaggaggaattgtctactgccacaaaggatactacacactcatggtgataaacaagacatagtcaagcagaaagcgttttgtggagccgtattttaaaggtgatgaaagagagactagcttgcaaaatttttctcatattgaggtggttcggataatagaggagagaagaaaactgcttgggcacacgtgtaaggatgtgaatttattatgcagatatgccagcagaaga

SEQ ID NO: 675149 - DNA, 317 bp, Homo sapiens
acagtcgcaccaccccatcatactctttcagccacagcaccaattcactagctccatcgctaggctccactagaacagtcaccaagacctgtaacgctgagcccggattgcgtcaggatattcctcaatagttcatcgtctcttttctctgtgaaaacaaccatcattccccctaaataaattaaaaaaactattaaacccatataacctcccccaaaattcagaataataacacacccgaccacaccgcttacaatcaatactaaacccccataaataggagaaggcttagaagaaaaccccacaaaccccgtcac

SEQ ID NO: 675150 - DNA, 278 bp, Homo sapiens
cgtggcgtgcagacaaccaggggctgcagctgaccagcactcaggataaggtggcatcagtaataaacatccaccccaatacaactcactccacaggcagctgccgaccacacactgctcaactacaacacaatagcagcaccattaagtatctagactttgtctttgctgtgaaaacatgaaaaccgattttatctgaaggaagtgaacatcagcatgtatttggttcatggctccgtaatcagcatagcacataacaatctcagctactggaatag

SEQ ID NO: 675151 - DNA, 916 bp, Homo sapiens
  misc_feature (4)..(4): n is a, c, g, or t
ggangcatttccggttcccttcgtttaggtcggctggaaattatgtcctccgtcggttttccgcagtttttccaccaagcgagatattttgggagttattccctaaataactgcattatatgctcctttcatgacgaaattgctgccgtggagaagactggaggaaactcgaggaagagggagaagccgacaagtgctcgacgggctaggaactgtcctgcttgggtgttagcgtttcccgccgggccagtaaggctgagtgacccggcgtggctactaggagaaggacgtacggtcctgctagtagaggaatatgtcgagtttctctagggcgccccagcaatgggccacttttgctagaatatggtatctcttagatgggaaaatgcagccacctggcaaacttgctgctatggcatctataagacttcagggattacataaacctgtgtaccatgcactgagtgactgtggggatcatgttgttataatgaacacaagacacattgcattttctggaaacaaatgggaacaaaaagtatactcttcgcatactggctacccaggtggatttagacaagtaacagctgctcagcttcacctgagggatccagtggcaattgtaaaactagctatttatggcatgctgccaaaaaaccttcacagaagaacaatgatggaaaggttgcatctttttccagatgagtatattccagaagatattcttaagaatttagtagaggagcttcctcaaccacgaaaaatacctaaacgtctagatgcatttagactagctacttcataaacagccccaccaagaaaagaaaaatcgcgatcccgatataaaccattctaggtctaaatgcaatcagtctaaatgcaatcaatttatgtctgcggtctaaatgcaatcagt

SEQ ID NO: 675152 - DNA, 1071 bp, Homo sapiens
  misc_feature (4)..(4): n is a, c, g, or t
ggangcatttccggttcccttcgtttaggtcggctggaaattatgtcctccgtcggttttccgcagtttttccaccaagcgagatattttgggagttattccctaaataactgcattatatgctcctttcatgacgaaattgctgccgtggagaagactggaggaaactcgaggaagagggagaagccgacaagtgctcgacgggctaggaactgtcctgcttgggtgttagcgtttcccgccgggccagtaaggctgagtgacccggcgtggctactaggagaaggacgtacggtcctgctagtagaggaatatgtcgagtttctctagggcgccccagcaatgggccacttttgctagaatatggtatctcttagatgggaaaatgcagccacctggcaaacttgctgctatggcatctataagacttcagggattacataaacctgtgtaccatgcactgagtgactgtggggatcatgttgttataatgaacacaagacacattgcattttctggaaacaaatgggaacaaaaagtatactcttcgcatactggctacccaggtggatttagacaagtaacagctgctcagcttcacctgagggatccagtggcaattgtaaaactagctatttatggcatgctgccaaaaaaccttcacagaagaacaatgatggaaaggttgcatctttttccagatgagtatattccagaagatattcttaagaatttagtagaggagcttcctcaaccacgaaaaatacctaaacgtctagatgcaatcaggattgcatttagaccctccagaaggggctcggcccggggtccgacaggccgacacccatagggtagatggcctgtcatgctctgaatcttgagggatcacctgatagcaccagaggagcggggtatattactactgaaaaaggttttggtagctgaaaatgaaaatatagagaaggaaactacatggccagattttggctgagattaaagcggaatgaaatttgattggtggttgtgtagtaggtaagtaatgagaggtatagatgattaaggtgtgagata

SEQ ID NO: 675153 - DNA, 1152 bp, Homo sapiens
agcgggtaccaacgtcctcaggggctcctggtcagtgaaccaacttactagtttcggttatactgcaaagaccagaaatcaaagaaacgtagaagactaatatgaagaagacatcatggtcatctgcttatctgagtactaccagatcctggatcccctcttgcttctgttaccctaccatgcacacggaaattggccgatctccttgtccctgtcatagtcgcttgggagacagagactgggatgcgtatatactggcactactactgagggagagagtgcgcgcatttagatagctatgtgccctctcatgaatgcgatgcgggaggatacaaggaggaattgcgcggggatttgtgtgcaaggcaagggtaagtgtgttgacttcatagagaaatggagtttgatagaatactatggcgcaagtcggtaactgggtaagtaaaggactatatttgcaaaggccatggactcgaaataatagatccattggtttaaatgatttttgctcggtacagtctgcttggggaaactggacagaattcacctacttttttcgtctgggaaatgaccattaggtaacaatcaatgagggggtttttagaggtagactcttaccttgggttgtatacacccaaattttgcttcggaccactagacgtacttaattaattctatatccaagaacgtaatcgagctatatctccattaatttataggtacgccataagtgacgtcacggcaatggaacgaatatcccgatacatgctttggcatatgttaaccagggggaataaggacatatgtataaacaagttggggtctgtcaacagtaaatggataacacttttgccaatgaaaaacggctaggtcttctggaatcttcaacaccgcgccatggtggatattgccgttaggattcgcggattatgtccctccgtgaaagcgtgaacaccacacatttatggatgagagagccgttgtgtcacattgaacactgttggggaccggaacagcacatacaaactggggcgcaaagcgaatagagttaaggccaagtcttcggttgacaaatttctaagtggtccaaaagtggtattctttacaccctttggggaaaccaatcacaacaaacggtggccgaaacacgcc

SEQ ID NO: 675154 - DNA, 185 bp, Homo sapiens
ggcaagtccagttgtgttgtgtgcacagcagcagcaccacactttcagatcttctctcatcacatctcatgtcagttgtcacagttcagactcaacagcactccgttctgcagcttttcatcagcacaattcacaagcacaccagcgccacccacagcacaaacacttaacatcattgtcatcac

SEQ ID NO: 675155 - DNA, 857 bp, Homo sapiens
atctgggtgtctatagaactgggaattccaggtaggaaaacgtttgttttgtatacagcttgtgcaggaatacggcctgatatgatgcctgctcagtgtgtatagatgtgggaactgataatatcgcactcgttcagtcgacccagttttacaatgggcttgatatctaggaagacgagagtctgcacgagccaacaggtagtgagtagacgctgattgcatcgagttgtactgaaaagcctattactagacagcatagtggcctggaacacgacgtcgatgcagttctgaagagcattggaagatctagtaagtgcagttccaggttgcctatgatgaaagtactcgcgaaaaatatagttactattcaatgaggtgatattcaagggacagcgtgcagtagctctagcgaggtacttattatgcagcacaaaaagttattgagtaaaccaatcatcacgaacacaaaagtcttattccttggagcaggagaggctgcatcttggaattgctaatctaatagttatgtctatggtagaaaatggcctgtcaaaacacagaggtcaaaagacaatctggatgtattgacagagtattggtttaattagttagaggggaagagagaatgcaagagatagataagtttatacaggactccaatttactctccactcaaggcccagaggagcatacctgatactttggaaggatggcggtgactatagtggaagccttcaagtatatgtggaagtgtgaggtgaaggcagtgtttaacagtcgtgatgtaaaaagagcatggttataaatagaaagcgaaaattggttagtaaataggaaaggaatgaggtggaagtaaa

SEQ ID NO: 675156 - DNA, 1218 bp, Homo sapiens
  misc_feature (4)..(4): n is a, c, g, or t
ggangcatttccggttcccttcgtttaggtcggctggaaattatgtcctccgtcggttttccgcagtttttccaccaagcgagatattttgggagttattccctaaataactgcattatatgctcctttcatgacgaaattgctgccgtggagaagactggaggaaactcgaggaagagggagaagccgacaagtgctcgacgggctaggaactgtcctgcttgggtgttagcgtttcccgccgggccagtaaggctgagtgacccggcgtggctactaggagaaggacgtacggtcctgctagtagaggaatatgtcgagtttctctagggcgccccaggtgagctcggactcttatggcttgatggggttcattatactggcagaaggagagcgttggttccggcagattaagtagtgaagctggggcggcagggaagccgagaccctcggccaagaggcaatgggccacttttgctagaatatggtatctcttagatgggaaaatgcagccacctggcaaacttgctgctatggcatctataagacttcagggattacataaacctgtgtaccatgcactgagtgactgtggggatcatgttgttataatgaacacaagacacattgcattttctggaaacaaatgggaacaaaaagtatactcttcgcatactggctacccaggtggatttagacaagtaacagctgctcagcttcacctgagggatccagtggcaattgtaaaactagctatttatggcatgctgccaaaaaaccttcacagaagaacaatgatggaaaggttgcatctttttccagatgagtatattccagaagatattcttaagaatttagtagaggagcttcctcaaccacgaaaaatacctaaacgtctagatgagtacacacaagaagaaatagacgccttcccaagattgtggactccacctgaagattatcggctataagagaataagaattgcagaaaataacagtgaagtgattgaaactttcttctgatgagtttctctaacctacaggatggagtaaaacaacttttatgtgccgaatcactgtggggaaaggtcaggaaggtgtagtccttcaataggaaattgtaattaaaatataattttatagaaccatttttatgtaatctgatttgaatgttatagttgataataataaaatcacttacttggttgactaaaaaaa

SEQ ID NO: 675157 - DNA, 199 bp, Homo sapiens
  misc_feature (106)..(106): n is a, c, g, or t
catccggccagcacacaagtgtctttttgctccatcgacggctgtctgtcctcactggctcccacccactgccctgctcagtgtctgggggggatgaccacaacancccccgacctactgtctttctgcttctcccatccattcgccatggcaatcagagggattttttgcagataaaaacctggcctcgttggcctca

SEQ ID NO: 675158 - DNA, 220 bp, Homo sapiens
attgtgcccctgtgatgccgacgctgatgctggagaccttttgatttggcccgtccagcccctcgttcgttctggcagtccttgaccaccaaaagccaagtgctcctcaacgaccacgaactggatagaaagaggaacagtaaaaccagtttggcatgaacctcttccttacgggataagagccttcatgcattacttctctagagctcattttctgcgc

SEQ ID NO: 675159 - DNA, 207 bp, Homo sapiens
  misc_feature (19)..(19): n is a, c, g, or t
  misc_feature (31)..(31): n is a, c, g, or t
  misc_feature (36)..(36): n is a, c, g, or t
  misc_feature (39)..(40): n is a, c, g, or t
tccctcttaagacaaatgngactgattcatntaganccnnttgcatttagactgattgcatttagactgattccatttagactagctacttcataaacagccccaccaagaaaagaaaaatcgcgatcccgatataaaccattctaggtctaaatgcaatcagtctaaatgcaatcaatttatgtctgcggtctaaatgcaatcagt

SEQ ID NO: 675160 - DNA, 465 bp, Homo sapiens
  misc_feature (19)..(19): n is a, c, g, or t
  misc_feature (31)..(31): n is a, c, g, or t
  misc_feature (36)..(36): n is a, c, g, or t
  misc_feature (39)..(40): n is a, c, g, or t
  misc_feature (178)..(178): n is a, c, g, or t
tccctcttaagacaaatgngactgattcatntaganccnnttgcatttagactgattgcatttagactgattccatttagactagctacttcataaacagccccaccaagaaaagaaaaatcgcgatcccgatataaaccattctaggtctaaatgcaatcatgattgcatttagacntcttggaaagaacatttagcaatctgggatgatgggaaatatagcatgattcaacactggtttttttttttttttttttggtacagttaacactatcatatctatgtgtaatattttaagaccagggcacaaacgtgtttatgtgcatcaaccccagttctctttaaaatattgaatctattttattttaattctcttatattcttaatttgggacccatttgtaccccagtcatcctccctaatctacagatcttatttaactcttaccccacacaaatatcaaaa

SEQ ID NO: 675161 - DNA, 268 bp, Homo sapiens
gaatgcaacgagatatctgtatttgaatgtatagaccgtggtatatattccaatacatattttttaaaaaagtgtatgatttgacatatgaatcctcagtttctgaaattcattacatatctgtcgcatgctgccatttagactagctacttcataaacagccccaccaagaaaagaaaaatcgcgatcccgatataaaccattctaggtctaaatgcaatcagtctaaatgcaatcaatttatgtctgcggtctaaatgcaatcagt

SEQ ID NO: 675162 - DNA, 421 bp, Homo sapiens
  misc_feature (251)..(251): n is a, c, g, or t
  misc_feature (415)..(415): n is a, c, g, or t
gggctcggcgtggggtgtggtggctcacgcctgtaatcctaacactttggggaggccaaggcaggtggatcacttgaggtcaggagttcgagaccagccttgccacatggtgaaaccctgtctctatgaaaaatacaaaaaatagctgggcatcgtgggcaggtgcctgtaatcccagctacgtgggagaccgaggcaggagaatctcttgaacccaggaggtggaggttgcagtgtgtcgagatcgcccngggacttctagcagcaacagagacagactccatcttcaaacaaaaaaaaaggaggctcacccttagaaaggcttcttacaatttaacaccacaaagtggaccacaggcacacagattttgggtaatgtggggttttcctttatttaacgttgttttcaccagcntttttt

SEQ ID NO: 675163 - DNA, 249 bp, Homo sapiens
  misc_feature (37)..(37): n is a, c, g, or t
aatcgctgatctcgacctagaccattctacgatctanatttcaatcaggggatccgtctgatgtcgatctgaagcgtctgctcgtcgtggtactgacatttgtgtcaaatgctgccatttagactagctacttcataaacagccccaccaagaaaagaaaaatcgcgatcccgatataaaccattctaggtctaaatgcaatcagtctaaatgcaatcaatttatgtctgcggtctaaatgcaatcagt

SEQ ID NO: 675164 - DNA, 186 bp, Homo sapiens
  misc_feature (19)..(19): n is a, c, g, or t
  misc_feature (31)..(31): n is a, c, g, or t
  misc_feature (36)..(36): n is a, c, g, or t
  misc_feature (39)..(40): n is a, c, g, or t
tccctcttaagacaaatgngactgattcatntaganccnnttgcatttagaccatttagactagctacttcataaacagccccaccaagaaaagaaaaatcgcgatcccgatataaaccattctaggtctaaatgcaatcagtctaaatgcaatcaatttatgtctgcggtctaaatgcaatcagt

SEQ ID NO: 675165 - DNA, 260 bp, Homo sapiens
ctagaggatccccccaggttaacagctccatatcgacaatagggtttacgaactcgatgttggatcaggacacccattatggtgcgccgtgatattaaaatggttcgtttgtacaacgattcatagtcctacgtgatactgagttcagaccggagcaatgtccaggtcggtatctatcgtattataaatttcctcccagtacgaaagtgacaaaagaaattgggaccaaccctcacaacacgcgatctcagacgataagt

SEQ ID NO: 675166 - DNA, 154 bp, Homo sapiens
agagttcgaagccagcttgggcaacataaggagaccccatttctagaaaaaaaatacaaaaagttagccaggcatggtgatgcgagcctgtaatcccagcctctcaggagactgaggcgagaggatcgcttttgcccaggagatggaggctgca

SEQ ID NO: 675167 - DNA, 193 bp, Homo sapiens
atgtatctctccttattatgactgagttattctatacttactataatgtgagcaagggtcagtccatgtgccacaatttcctttcttatcaaagtgagctgagatcacgccagtgcattcaagcctaggtgacagagtgagactccatctcaaaaaaaaaattatagttatccttgtaggtatgatgtggcac

SEQ ID NO: 675168 - DNA, 538 bp, Homo sapiens
ggagactggaactcttgttgctggaaaagcaagtgggcggagatactaggctggaattacaacgctttgattcccagagttaaagagactcggccctttaaagacaatttgtggccattaacctaccattttggggaaacaatcagttcagtacttatggacaatatcatcctttgtgacagatatacttgcgtaagaaaaaataaatgtatcctttaaaacatgatggacgaatccaattaacacctataacaaagtcatcatatttgtttcagcacagaaggacagctggataataggaaaagaatcgtatgcctgtatgcttttgctcctagaacagcacagtgttttattctgtcaccctactccaataactatgttcagtctgggaagaaataaagctgtttagcctttgtgctggagccggcaagctggagaaaacgagccaaccttatgagagactgatgtccagaaagtggtcctcacaaaccaggggttaaagactcaggctgagaacaatgaacacgagaccccctag

SEQ ID NO: 675169 - DNA, 955 bp, Homo sapiens
tgggacacataggaaacaggatcctatgaaaagagaaaaaaaagagaaacagagcccaatggtgggcgagtaggcgcaaacgcacgagaatgaggggcgcacccaggatggtactctggcacccaccgctgagggggcacacgcgtggacatggcgccagacgcgggggcctcccctattaggtgcgaggcgctgccagacgtgaaatgaaacacaacagaaggcccgacggtgtgcaatggtgtgtacacacccaaagacacacggcggggggtgccagaaaactacctactatgcctcccaggtgcgataacgggcctcggcgcctatctttacatggtgctctatgatctacacgcgaggcacgagagaaagaggcccaccctaagacagaggacccggggggaacatcgcgggtgacacgacctgaccatagcggaaacccacaaaagagtccggcgcgacactacaacttctcgcgacgcggccctatagcgggaacaagcccacaaactatagcgcgtcaccgacagaccacgctgcgacgcgccaccacgggaccccacagcacagttcaacggcgattatccacagaggtatgcggcgctgagaacacacaacgactatggagcataaaccacacgtgagaaacaggggacgaacgcacaatgtgggtgccacaacgagagagacaccgcggggagatcaccatgggccactacttgcgacccgagacgagcccacataacgcagtggacaaccatagtaccctgggccaccacaccacgttagggatgcacccaaaatgaatgactgacgaaagcagcatgcggaaaacgagagacacaccaacataccccatgcgaacagtgcaggaacaaacagctcaccagggatgaagtaaagacaacaaatccccgcgaaagacgatcacgggagcgtgccaacacaaaca

SEQ ID NO: 675170 - DNA, 189 bp, Homo sapiens
ccgagcatacgtgtgagctccgcctcccgtcagagcattaccgtgtgcgctccgcctcccggcgagagcattactgtgctgagctccgcctcccgtcatggctttacctgtgtgagctccgcttcccgtcacggcttttccttttttgctctgcctctcgccactgccttaccgtgtcagctcgctggc

SEQ ID NO: 675171 - DNA, 784 bp, Homo sapiens
tcactcaacattgccacttttgacgcaactctataatgcccagccaaatttccccgtagacccaccgccaaactgttgactcccaaccaatagaatccaaacaccgccgttgatatcttccaccttgccacccctcacgcattacaggtgattacaaccccacccatggttactattatcgagagatgtatgtccaaagaatatctattttggatcttacaccacaccctgttgagatatccaaaacaaatataatatatcgtagtaacatacgctgtccattccacaccactatgccacccacaccccgttagggttatttttcgcaacaaatacttgtgcttacacatacataatgagtaaaatgtacccaccactcacatatgtactacccctcgtcatacccacccgcttgccgagtgtatataacacttgcttggtccttctcttctaattcgatagaatctttctttcgcagactatctatgcatgaccagtagaagatatacatagtatcttctaacacccatcattcggcgaacaatggcgctaatgaccgctattaccgaggatgatctctttctcccccgctccacgtaatttactggcgctcggtccactcatgttccactcgtttgtcattacacgcctatactcttctcgcttcaacaggtgacagaaaaaactcacgctgaggtcgcccccactgctttggtgtttatcagaccaataccccccattaaataaaattctctctgcgccacatcacaacccgcccataaaa

SEQ ID NO: 675172 - DNA, 129 bp, Homo sapiens
tcatttactagctgaaactctagacaatattatcattttctatcttgtttctatcttccaatttatctactaagtttgtacattttgcccttagctttttagtttcctcagcttgagtattgtatcaag

SEQ ID NO: 675173 - DNA, 505 bp, Homo sapiens
  misc_feature (27)..(29): n is a, c, g, or t
  misc_feature (31)..(31): n is a, c, g, or t
  misc_feature (34)..(34): n is a, c, g, or t
  misc_feature (53)..(55): n is a, c, g, or t
  misc_feature (62)..(62): n is a, c, g, or t
  misc_feature (77)..(77): n is a, c, g, or t
tccgccattaatgcccggagcaacaannnanaanttagtgtatcatttttagnnnaagaaanagaataagggggaanggggggagatttatagaaaactctttcacaccatataactttaaccgtccgcctagaattgccaacaaaaaccaacaaaccgcttcaatccaccagtatcataaaaccaaaaccgaaaaaaaatcaaatcttcaacacacataaaactctaccaacctcacccaaacaaaggtccccataaccaaacaacgcccaaaactttcattgaaacagattataaacacaaacatttaagaatttttaacgataacaaaaattaccccctgattaatcaaccggactccaaacaaaaaacaactaccaactcaatctccaacctcccgaacttaaaacatacaaaacacttcctcaatggcaacaaaaattctctaaccaaaccctccaacccaaaaacttagaaacccaacaaatcgatcccgcaacttatc

SEQ ID NO: 675174 - DNA, 970 bp, Homo sapiens
  misc_feature (184)..(184): n is a, c, g, or t
  misc_feature (565)..(565): n is a, c, g, or t
agcggccatggggagcgagccggtgcttgctgcagtgctgagggctgcggcaacgcggtgacgcgcgcgcggtgaggacggacagtcaccgacttactccagcttccctgttatctcgacacacaatcgttgccgtcacggctcctggacacggtctccaagtcaagttgtcatccttcttcgngtgtactagtgttgtcctcattcgtgacttttagtcactcgtgacccatcagacttggactagactccatgcatgagagatagctgagacctaatttgcaagtgatccagggacttccttcaattcctactcactgtcgcctgcttctcatttcaccattgtacacgcagatcaggttagagaattccactatccgtctagcaaagtctaggatagatagatcgctatgtttagcgacaaactcgacttgaatgagattgaataacgtaaaaatactcgcacaagaaaaagttacgtttccaaggatagattcttccaaacgatagggcattttgggaattggagcgactaaatttgtcgctccaaagaaggatttgcttntgtaacaagcaggcgacaatgggaaatactttaggaaaattttcgggggattactgtggtgattaaaggattccattgtaaaggtgttggaaaaagtcataggttgcacataggaagtcgttattttgaaaagattgcaacatttgaaagttaaaagaattaccaacgataagtttggccaccttatagggttgtaggggagtccttgtggtacacgaccttttaagtttggcccttgttaacacatgacaattctattttaacttaagcgtgtaaattccaattggggggctccaattttctttgtccaaattacatttcccccaaggaaaacgtacaacgggcgaacactggcaccattccaaccgcttgtcaatcttgtctggggccaagggtttattccaa

SEQ ID NO: 675175 - DNA, 126 bp, Homo sapiens
tcctaagaaaggtaataagaagccttaaatgtgataacaccagcactctttttttgttttttaatgtgacaagacagaagaaacaaatattcttttgtttttttgaaacggagtttcactctgtcg

SEQ ID NO: 675176 - DNA, 1057 bp, Homo sapiens
cgggcaagtctagctcgcgtgctgtcggatacttggggtgagcggaaagcatggcggggacctccgcgccaggcagcaatgaggctgtatgctgagccccctggcgcctcgccccgagccgcctgccgggcacctgggcaccaccccgatgcaagcgggccctggggcttactccgctagcctgctgcccctggacccgtgacgacccgtatcggacgcgcactggggacttcacttgccgacgagcatggaggcagcttgagacccatcgcgtcaacaggcccatgagccaaatgtccaggccgcggctcgtggacgtgtccagtgatcatcaggtccaccagattattcagatggccatgtcacacaaaatccttcagggcaacaaacagagaaactgttccaattcaaagataatttcgaattagaggtccttcaggcacaatacaaagaacttcaagaaaagatgacagtaatggaagaagaagttctcattaagaatggagaaattaaaattttgcgagactcactaatcagcacggaatccgtcgtagaggaacagagaagatcacatgtactgctgagcaagagaaaacccaagccactcagtgacaaaggacaaggcactctccaaaagctccaatcatgcagtctgcactccagttttaaagatgcagagatgaatgacttacgggacaaagctcagaacagatgaacgaggcaaataaactggctgacacctctgttccccatgtcaagcctaggaacaacccttactggggtgatacaggcagaggatgtcatacaagcgtggaaaacattagtactacaaagagattcaaagcaacatgtctcttccacctgtcagccggggcgctacagcccggcggaccagagaacaagcacaaccaaggcgagcccacaacacagcgctcacacacagtgacgcggcagagcacccacgcgactagagacaaaaacgagacaaacacaaagacacaacagagcagcccaacccggacaaaaagacacaacgccaccaacagcacgagcacca

SEQ ID NO: 675177 - DNA, 307 bp, Homo sapiens
  misc_feature (216)..(216): n is a, c, g, or t
agcggggaggaagaggaggaggaggaggcggcggccgggagccgggggagaggggcggggggtgggccgggggaggggaggagcgggatttgcggagcgccgcgccgctgccgggagccggcaggcccgagagtgaccggagtcacggcgggcgccggcggagctgcggcgtcggacccgcctcctggaggagctcagccccgaccaggcccggcnccattcccgccccgtgcggtcgtagagtaggggtgacgtatatttatctcatctgacgtaggaaatgtacagcaatgataaaaaaagtgaa

SEQ ID NO: 675178 - DNA, 130 bp, Homo sapiens
ttttaaataccatcttgaatgcctaataattaaactggatgaaagtggcatatcattgttcctaacatttatggaacccccataaagatgtttcctgatcctttaaaactcattaatctgagtattaagt

SEQ ID NO: 675179 - DNA, 170 bp, Homo sapiens
gagagagcgactgagccctttggaggtataatttagggttttgcctcctgtccacagatcgtgcatttgcatagttcagactaggagccaaatgaggactcaaaccagctagttattattccagactggattgtacctcagcatttagggcagattccagacctcaaagt

SEQ ID NO: 675180 - DNA, 338 bp, Homo sapiens
atgacatagatgaaaagcttattgtaggccgcacgaggtggctcatgcctgtaagcccatcgcttcaggaggccatggtgcacggatcactacaaggctggaggccaagaccagtctgaccaacctggacaatcccagtgcatactaaaaatacataaggagccatgcagagctaggccatgctatgtagtccacacatacatggaaggctgcagctgagaataggaagatacatagggcggatgacgtgtagagccacgatcaaaccaccttcagtccgggcctctagagcacagctgagtcttattagctctaggttattttagcctttagaccgc

SEQ ID NO: 675181 - DNA, 455 bp, Homo sapiens
tcagagacaaagagcagttactcatctttgcaggtgttcaccaggcaagttgtcattgatcaattcaatggattttaaaccaactgaaaggatttaaaaccagttctggtggttctcttgttaccatggttacataacaattagtcttttcctaggagtatggaaatttttttttattcccttagtgttattagcttgatcctctattctgtttttggttaaactgttttagcaagattatttcacagctaataccgtgtggtccctattacatcaggaggcttacaatacctggttgcccccactttaagtgatgggctccagtggttgcagctgattcctccgttgtaaagttccctggcatgcttttaactaatggttctatccattaataatcattacttgaaacagttattttataaggaattcaaaagtgatgaattgcttttctttta

SEQ ID NO: 675182 - DNA, 110 bp, Homo sapiens
tgtgtcgagatgatatcattagtgggggaaggcgcttgtgaagtaggccttatatctcttgtcctttcgtgacgggaggactttgaagtacgatagaaaccgagctggca

SEQ ID NO: 675183 - DNA, 211 bp, Homo sapiens
cagagctgagagatggcgatgacatgcctacagcacagctgatgagagagaagacatcttgatgctatctgacacgcatgacgagaaaagcttttctatgaagatgatggagcaaaagagatagaaggggcctagactccctaccttcacacttcctgctataaaagcatcgctattatgaggttaatctgcagaaacagaccctatgccg

SEQ ID NO: 675184 - DNA, 119 bp, Homo sapiens
gtcttccactgtgctcatgaggtcaggatacttccactgtgcttcatgaggtcaggctaccgtccactgtgcttcatgaggtcagggtaccttccactgtgcttcatgaggtcagggta

SEQ ID NO: 675185 - DNA, 503 bp, Homo sapiens
ataatgacagttgctgagacagatataagggtaggagagacacaattctctctgccactactggggtgtgtaccctgaatgaggaatcgagaattgggcattatgcatgccctctgccgagtggtctgagggcaggcatcacagctagcgcacacacgtacctgtgcggtgtatcccagaaggtaaattctacttcctttaaatgttattactttaatttctggtactttaacaagttaaatttagtatcttaaatctgataggttggctgcagtagggtcacgcctatgatcccaacagtttggaaggccgaggtgagtgtatcacctgaggtcaggagttcaagaccagcctgaccaacatagtgaaatctcgtctctactaaaaaaaaattacaaaattagccgggcgtgatggtgcatgcctgtaatcccagctacttgacaggctgaggcacgagaatcgcttgaacccaggagacaaaggttgcagtgagttgagat

SEQ ID NO: 675186 - DNA, 247 bp, Homo sapiens
ggtcgacggcagatcacggtcgaatgacatgacccgcccactggcctggttactgttgtgcatcgttcctctgctggcgacggcagaggaagcgcccttgcgctggcctggaaaaccgccgacggttatgagctggtgcagttgaacaccacccaggtgctcaaccgcgagccgttgccggcggatctgcaaacgccgctgggaagcctgtggaaactcttcgtctatgcctggttggtggacacca

SEQ ID NO: 675187 - DNA, 134 bp, Homo sapiens
acagatccccggactgggccggagcggaacgctttttattacagctcatgttctttgtgagacgttggagaaagaactttccaaagtgagggaatatgtccaattaattagggtgtttgaaaagaacctgtgaa

SEQ ID NO: 675188 - DNA, 1183 bp, Homo sapiens
acaacaccagggatggtctcaacaaatatgacttctaccagccttaaagtctacacccaaaagcaacaagtgtttcacagaacacatctcagatatcaaccatccacaatgaccgtcaacccacaatcagttccagtagcacatctgcatgcttccatcagtcaacaatccaccaacaactcatgcaattctgcaagccaacagcaacaggatcgacaacatattgcatcactgggcagcttatgttaggtaggtcattgtcattaacagctggagagtaatatcatattcttatacattggatgcaaaaatgtattactcaagaagaggcattcggtatagaaccatagatgaacatgatgccatcatataaggaaatccatggaccaacggaatggcacataaccgcatgcatgcgtgccctatcaatataattaacaggatttattaatagctccaaccacaaatatactcattattgaaaatagatataaaaaggccatgcattataatgatccagagtatcaacagtacatatgtaaaagatacatacaaggtacaccaggagataggcactcagacactcacacatccggcactctctcatcaaaccgcacatccacatggtaacagcccaataacaatacatacggccccacaaaaggacctaatcataacacaaacagccacagacaaagacacagacacaggagccaaatacagaccaagacacaaggacaacaagcacaatcacacacgaacgaccaaacacagacaacacgaagacacacataagacagaaggcacaaaacacaacacaacagggcacaacagcacagaaaccaccaacacaaaaccacccagacggtacaccaacgcaggaatcaacacgacacatacaaagagacaaagcaataacacgagacaaacaaccatacaccagatacgaaaaagaacaaaacagaaaacagaggcaaaaaaggaagagagaaagcacaacagtcagaaaaacgaaaaagaacaagcaaaaaaaaaaccagacaaaagacagacaaacaagaaggagaagagagacaacgaagcggggcgagagcaggcgacagacaagcaacaggaaacagagaaacaggaagaaaaaaaccgaaaccaggcatcgaagcaaccaaaacactgcgaagaaaaa

SEQ ID NO: 675189 - DNA, 198 bp, Homo sapiens
agtgatcgctgtagcaatctcgcagatctcctcccgacacagagctgctcttattaggaggcccaagagcgatggcattgcccatttccatcaggctctggaacacgtctgtcttgagctctgcgtacccgatgatgtccttcagctggctggtggaagaactccaggtatccctggtgggcgttaccgacgctcgaa

SEQ ID NO: 675190 - DNA, 739 bp, Homo sapiens
  misc_feature (66)..(66): n is a, c, g, or t
cctaggagacagagctagactccatccggaaaaaaaaaaaaaagaaaaccaaattatttcctttgncgagcaaaggtgacattcacgtgaaaaatgaagtgaacgcttccaccagtacgttcttggtaattctcattatatttctaacatattattcacctgaacatgggggaacatagattaaaggtccatcttaaaaaacaagccttacagggtgaggccaggcagggttgcctcaccccgtgtagaccaagcactttgggaggcctaggcaagtggtggattcgcctgtgaagtcccaggaagtttcggcgaactcagacactggtgggccaaaagggtaaaacccctcttcttacagaaaaattacaaaagtttatccagttggcgagggtgggtgcataccgtgtaattccccagcctacttcgtggagggccctgaggttggcgcagaagttggcctggagcccaagtgaaggcaggaggtcggcaaatggagccgaaatcgcgcgccacgggcactcccaacgtcctggtggaggacagagagcgagaagacgttgggcctgcagaagaacaaaaacaaacatgtgggcaaagaacctttataaaccccagtctggaatctccaaaagatgttataaaccccagctgtatttgaaagaatgattgaacaccaaatttgcagatatcacttaagccaatgatgtaccccttctgggggcatcaattccgaacg

SEQ ID NO: 675191 - DNA, 470 bp, Homo sapiens
  misc_feature (9)..(9): n is a, c, g, or t
  misc_feature (59)..(59): n is a, c, g, or t
  misc_feature (170)..(170): n is a, c, g, or t
  misc_feature (173)..(173): n is a, c, g, or t
  misc_feature (192)..(193): n is a, c, g, or t
  misc_feature (212)..(212): n is a, c, g, or t
  misc_feature (249)..(250): n is a, c, g, or t
  misc_feature (408)..(408): n is a, c, g, or t
  misc_feature (429)..(429): n is a, c, g, or t
  misc_feature (442)..(442): n is a, c, g, or t
ctgggttanaaagccgctgcctgctgctcgtgttgaatccagaaccgtagccagacatncggactggaggacgagcaccagatgcttaccgaatccccagatcctgaggaggaggccgaggaagaggaggaattcctggatcccctaacaacaccgagagagcaatgcangcncttggagaaatgtgtaaanncccgggagcggctagagcnctgtgatgagcgtgtatcctctcgatcacatacagannaggattgcacggaggagctctttgacttcttgcatgcgagggaccattgcgtggcccacaaactctttaacaacttgaaataaatgtgtggacttaattcaccccagtctttcattcatctgggcatcagaatcatttcctttatgggttttgggatngtaccattttgtttcctattntgtgtaaactgtnaagttcacatggaaccttcatgggtttg

SEQ ID NO: 675192 - DNA, 155 bp, Homo sapiens
caattgatcggtattacaggcaggaaccaggatgaatgtgtgattgctttgcatgactgcattggtgatgtctactgatctttctttgttcttctggttggtttccctgtctcgctttcctgggtgttggacggattgttgttgggtgtctctgg

SEQ ID NO: 675193 - DNA, 438 bp, Homo sapiens
gtaaatgctatgccttaccttgtggaccaggtggactacagattcggggtactacacggaggtactgggagtactgttagggatgaccgggttgcgttatgaagtccaagctgatctgcaactgctgagctcaaacgattcaccagcctatgactcccaaagtgctgagactacatgtatgagtcactgtgccactgctaggaacaggggtgataagaattctcattttatgtgaatgcgtaatgcactacctatgatctacaaattccctgctggatttgtagattaaaggccacgcaatctattaacgcatatgatgtgacagatgcattacgtatgcctcagtcatccctacgtggtggatctacggacccatgcattacgatataccttgacgtggctgtcctacctgcctagccatgatcctgtacctgcttt

SEQ ID NO: 675194 - DNA, 265 bp, Homo sapiens
ggtcgactctaagcatcccattgacatatttgcatatgctttcagctacgactggtcaagagggacatgaattttatttatccctagaaagaataccattacattttcctgtcgtaatgcagccgaagagctaaagcccaggattaaaaagtgttgtctgtggactctgtctcgggcagagttgtttctctccactctgcctcatctctgtacgaatttgggtcccagccttgttgggttgtcagccatggacatggatttcaac

SEQ ID NO: 675195 - DNA, 243 bp, Homo sapiens
  misc_feature (4)..(4): n is a, c, g, or t
  misc_feature (110)..(110): n is a, c, g, or t
cccnaggtgggaggatttgctggagcccccggagtttcaaggcccagcctgtgcctgcatggtgaagccccgtctcctacaaaaaatacaaaaattagtcacatgcggtnttgcgagcctgttggtcccagctaacctgggaggctgacatgagaggattgctggagcctgggaggtcaagcctgcagtgagccatgagtctgccgcagcactccagtctgggtgactgagccagtccctgtc

SEQ ID NO: 675196 - DNA, 195 bp, Homo sapiens
ccggcccagacatgcccgccaacatgtacagggtcggagattacgtatactttgagaactcctccagcaacccatacctgatccggagaatcgaggagctcaacaagacggccaatgggaacgtggaggccaaagtggtgtgcttctaccggaggcgggacatctccagcaccccctctaccccctctagagcca

SEQ ID NO: 675197 - DNA, 122 bp, Homo sapiens
cggaaatcttatcgtcaccgagatcttctgtgtgctccatcccctcatggtgctgcatccttcctggagagagggaggtgaaagctggtgtgagccagtggttccctgccactcacccagga

SEQ ID NO: 675198 - DNA, 431 bp, Homo sapiens
tagtctactcattgcggatactacggaccttaagacaaagacggctccactccagcagtggggaaaggcagcaagtgccgctggaatccgtggggatcacactcaactgagccctgctgctggggaccgggtaacgtccgcaggctgaacttcatctcaagaagagagttttaggttttcatgctgcagagaaatcctttaaaaaggcaccaaagggcatggaactatcttctaccaaggacctttctcctccattctcctatttcgcagttaactcaagaggcgggagattttctccggggaacaagacattctaagcacctccctaggtcgaagttaggttttaaggtgtggaatagggtgggccccgaggttccgtggggttcgcgcttccatataacccctaggacttgcgcaatgagtacagatta

SEQ ID NO: 675199 - DNA, 304 bp, Homo sapiens
cagatgccagggacctgtgtgctaaagaaaccaagatgctgatggtttctggggacaaagatggggacggcaaaattggggttgacgaaatctccactctggtgggtgaaagttaggaggcactgactgcccatggtgttgcacctgcatgccgtgaacacccaattgcggcccgttttgccaccctcgtgcatttatgttcagttggggaagggtcttttgtactcccccatcccctgtggccttctaatgtcaccatttgtgtggaaattgttggggaggcgataagggttggaccggtcca

SEQ ID NO: 675200 - DNA, 129 bp, Homo sapiens
cctcaatagcagttctttctccttaaaatattgtggcagtgcacatgctaacaggtatcaatttctttgatcaggcacaaagaactccttcaggaaactcactttcctggtccttgtaaaactatcatg

SEQ ID NO: 675201 - DNA, 937 bp, Homo sapiens
tagtacaaagaatagatttagtaagttggctcagtggccttccgccacagagtttctgcctgtacgcggttgtgtccgcccgcccgtgagtgggtttccccgggaaagttgggatattgctaaaaattggcgggcgcctgagtgactataaaacaagacgggggtctactatctgagaaaagggaatactaatttcggggatattctaatccctccaagccccagggacttttatcggaaaatattgctaaaagggcataccctcaccgtcctttaagtgggggggaacgcaatacctttatgaagaagagcggccaaaaaaaatgctcggggaagacaacggtggcacaccgaacttgttcctagggcaacccggttgtattgcaaaagataattgccgaccacagcggtgctttttgtctggcggccggttcaaatggagcttagtcgtgccccggggaactccttcggcccgggtagtacatgcggccctgtccttcggagtatcctgggccacaagtgccgtcctgtttcaagcaccaaggtcccttgggccccccccggatttagatattcgagggcagggcccaccaaacgaaacattctcggaaacgacttgtgctccctcattttcaatctgggcgcttgtggtctcccgcccctttatgcggggggaatacccccgtgccgacacaaattttgggggattagcctcgtggagaaatcatgtgggcagaagcctccacgatattggagcccttggtcagacttaagccctggtattattaggacctcaaccgaaatcacgtggttgtacatggggcaaatagagttagactccccccgattcaaggacaagcgggtgacgaatcatatgtatagttaaaaaagggagttatattatggggaaaaatgtaaaagaaccgcccacataaca

SEQ ID NO: 675202 - DNA, 166 bp, Homo sapiens
gagatagacgagagcttgtgtgttctgtcacttagatgcagagagacttttaatgaaatcaatctttcaagggtctaggttccaaatatttttttccctaatctgttgccaattattatcagtatgtattttgtagagtatactatcctaatatgagctagactag

SEQ ID NO: 675203 - DNA, 265 bp, Homo sapiens
tacgtcgcatgagtaggggaagggagctactcgggtgtcgactaggcagtctgtgcctgcgatacagagcgttctggctggttgcctcatcgggtgatgatagccaaggatggggataagtgtggtttcgacgaagatataacatatgattagttctgtggctgaatgttctcattacggagatatgtagggagatacgtatagagaggtagagttttattctgtgaacgtgcagttagagaggtctcacgtgcgcataagtagg

SEQ ID NO: 675204 - DNA, 204 bp, Homo sapiens
  misc_feature (40)..(40): n is a, c, g, or t
  misc_feature (126)..(126): n is a, c, g, or t
  misc_feature (134)..(134): n is a, c, g, or t
agaaatgactgtctttaccctttttctggagccatggaantaggcactaatcccacttacaccccacgtgacagtgagtttgggctcacagcatctcttggaggcagccacttgactctatgtagntatttccncctgagcctcttctctctgtcctgtgagcagagagctgatatggccagatggccacacctggaccagaag

SEQ ID NO: 675205 - DNA, 975 bp, Homo sapiens
aagctgtcaggacttcgttggggaagcccgtgttcaccgtggagcgcatgatatgaacgatgtacactctgctccggtggtggtcatgggggtctggcctggaccgcattgggaggttccacgtctgtttgtggagacatccactgagacggccactggacaaggatgcccaagggtgactgaaggcatggctcaggcttgggtcaggtgactaggctcgagaatggggggaggtgatggagagtgagtagcgcccgcagagtagctcttacgagctgtcgcctgagaagccatgtcacttcgatgcgagctgacgctccccagccattgtgatcgtaccgtggttgaacctctatgacattcctaccatggcaattgtgccctgagggtcagcccatcccctctaaggcacggtctcctaatgtcgcaaggctgcaaccaactcgtctacaggcacccatgcatgttccacatgtgtcactattgggtcaatggtccgtgtcactggtgccagttatatcatgagccaatgtacttgggcagagatgttcgtcgcctcaacaggttggcaatgaaatccctgccatgtttgcgttgggcttatcgatgcgtatgtagcgacctattgcggccaatgcgctgccttgcggtggtgacggtgcggtgtgtccttgccagccggtgaacaataggggacttctacgtacctggcgggccttgcatcgagcggagtgggccgtggtagtgtgtcacttcggtgttaagcagtacgcggggggatctttccgatctccgcccttccgcggacgcagcaggcatgagggggcttggccgggggaacggtgcgcggtcacccggggattggaggcggggggctgtcggggccggtctgggcaggaatgaggcgtgtggggagggggccggcgctttctggtgtgggcccggggagggtttgggcgggccactcccgggccg

SEQ ID NO: 675206 - DNA, 241 bp, Homo sapiens
gaggatatctgagacaggtagatggacgatctggacaaaagtccaacagggtgatcccagaaagtagaggcttggctgagggtatggaaccgggaatgagtcaagccgggctctgccctacagtgtaggacgcattcccgagtgcgggacggcccaagtaggcagaggacagagtccgagtctgtagaggaagcaaatgcaccctgaaaggcagctccatgtcctctagacctgagcgggg

SEQ ID NO: 675207 - DNA, 240 bp, Homo sapiens
  misc_feature (122)..(122): n is a, c, g, or t
gggttcatcagatcttgtgctcagccttccaagtagctgggatacaagcgtctgccaccacacctggctaatttttgtatttgtaatagaggcgagatttcaccatgttggccaggctgggnccgaactcctgacttcaagtgatttacccgccttggcctcccaaagttctgggattgcaggcatgagctaccactcccggctctagatcgcattttgaatattgaaccggatagcttg

SEQ ID NO: 675208 - DNA, 761 bp, Homo sapiens
tgcccttgtgtgcgagaactacatgatgtgagtccaaactggtaccaaacatgtaccactaataggcatatggagttgatagctccattgcttcacatgcagtggcctgagctaaattcacagtcatgaccagtactgggtattcacgcagtcagttgcatgcacactaacttactaactaattagaactggtagagtgctcaataccatggaagtcggaattcatctggcaatccagatcgacagtcaaccttcaccgtgaagcccagtggccatggacctaccacttgttgccctgtgattacaccactcgcgacatcgcataagacacacacttaagaacagcgcaagccctgctcaaaccaacaatagcgcggagacatcaaactaagagaaccacaccacagaaatgaacttaaaaataccagtaactactccaccaatgtgacagaacacagaccaatagataacacacataatacgatgaaaagacacccaactccacaccaataccgtaacacacaacgcttacgcgccaaagaccccacaaacaacaaacgtagaccaacatcggcgcgaaacgcggccacgacaaacacaacagagaacgaggcactaccaccggcacgagagagaaaacaccccccccagaatacggctcccacggagcatgaggcaccgaaacagcaaagaagccacagaagccaaacagcagaacgcagcacacaccagaacctccagcaaccaaaccaccaagacgc

SEQ ID NO: 675209 - DNA, 517 bp, Homo sapiens
tcgggcaaatattaaactttaagttaaaagggacatgtgcccaatgcgcgggttaattccatattggtacaagaaaaaaactggggcgttgggcccactaacttcaaatctagccgtggggaattttcccactggtatttctgcccggtcccccacccccaaaaaagccccagagggggaagatgccccttccgggggcatgggttccaaaggtgcacaccccccctataattgaaaaaatgcggcggatgcgttcttgtgtcttgggaatgttaaatgtgaaaggagaaggccaggtggaaaatgggccctccaagggcttgaaattttgatttttttaagggggacaaaaatatcaagggggttaagtgcgcccatttttttaattaggcttttatttttggaaattgggggggttccaagggtttgtaatggaaaattttctgaaaaaaaataaaagggctgggtctttttgggccaacaatttttttccctgggaaaatacccagaaaagggg

SEQ ID NO: 675210 - DNA, 369 bp, Homo sapiens
cggggtttcactatgtatacctgggtggtcttgatctcttgacctcatgatccgcccgccttggcctcccaaagtgctgggattgcaggcgtgagccaccgcacccagactatacattttttttttatgcggcttctggtagtttggatcacgccattctacatctactctctgtaaagttagtttatatctttatcatggatcagacacaaggccatttctttatttaatggattacatatttgttgagcttataatgtagtcctactgtaatgaattttgattaaatattctcttgttttccaagggatgaactacatccagtttgcccagaatcttaattcaagagcctgtgggaggactgattga

SEQ ID NO: 675211 - DNA, 171 bp, Homo sapiens
ggcaatctctgtctcccaggcccaagcgattctctggcctcagcctcccaagtagctgagacggcagtggtccgccaccaggtccggctaattttggacctttgggagagatgaggttccgcggtgtgggccaggcggctctcaagctcctaacctcaagcgatccatcgg

SEQ ID NO: 675212 - DNA, 435 bp, Homo sapiens
atccgtggcaaattcaagtcatggaatactcacaaagacggggggaaatggtcagtctaagccaaaagaaacttcctaaacaatgtataggtccacagcaaaattaaacaaatccaacaataactgaagcttagtgtaattgagtggtggaagttatacaataaaattatacccaacaagtgtctctcctaaaagtgcagttcccatgagtcacttcctgaacccattgaccaaaggtggacagagacaatcctgtagaccttgacattcagaaagatgtgagctgcttactgatcatatatgcatacgtatctttacagcagaggaaaccattgtccacaaaactgatgttcttttggggttttatgtaccgacttgtccaatcatgtgtgtggttcctgcgagtatgtgatgactccgcattgaagctctcta

SEQ ID NO: 675213 - DNA, 128 bp, Homo sapiens
ctcctggcttatctagaggatcccatctgtatcgtacttcttcgctgttgaaaacacttggtgtaggacttgtgatcacgctccctctctctctctctggtgcgttctctttctctgtcccgatcact

SEQ ID NO: 675214 - DNA, 977 bp, Homo sapiens
gttactcactggctagactgtgggcttgtgttaggccctgtcttatgcagcttcatggaccctgggctctatatgctaataggcagtcttgcatagaagttctgctgcctgagtaaatctttctctgtacatgtacacaggataaaccagcgaaatgtacatgacactgacgatgcatattgaatgtacagaacttcatgttgatctatagcggccttgcagcctctggcatctctttggacatgatgtcgtgccactgaattacggtcctggatgctcataaaggcaagagctaacttgaggttcggaaagctaaagtcctgcactaaccaggagtcccattcatttcactatcaacactcctgaacactaggaaccaaggcaaggtctctagaggacgcggagcacatggctctccagaatcacaaaaccaggtgttatcacattcacgtaagcagcttgaccaacatgttctgaactacactatgtaaccattctggaataagctatgtgtaccccactacattgagcaagaaactttcactctaaccataattaattgtgctacagacgatctttgattctctacacagcttctgagtcttgtaactgactgctacacgcattcgcacgtagacttgcgcgctcgaactcactcatacctgtacggcagacttattctagccaccgactaatttcatctcacctaacccaccatgtcatggccaactaatccgcatgttgcgacttgacacctttcaccaaaccaaacataatacacccccaccccacacacacacaacacaccacatcactacctcacgatcacaaacaacaaaacacacctcccaaatcaccaaacaccaacaccaacaccaacactactacccattccaacacatacaaccaaacatacccaccccaccaacccaccatcacaccaacaacatccacaatcatcacacacccacgcgaac

SEQ ID NO: 675215 - DNA, 601 bp, Homo sapiens
tcctaataacgtcatgtaatgggaccagggaaagagtggctaaatgaatccagtgaaggattggaacttctcgaagagctaccaacacccaagttcagcttgggaggcagatctggaaacagtgtagcagcttgggtttcccaaaaaatgtgaaacttttcctgggacgaattcaggtagctacacagaatctacacagcaaagttaccctgacacagaaaatccttgtgcaaataaatgcttagtaagtacacaggatgcacttgttgaatagagtatacgggatgggtgaaagaaaataataataatgagcatctaagtggtggggtttagagatcaatcaagaataatttaatttcctttggtattgaaatgtaacatagtttcctttccgattaaaaaaattccctataacggctaaacagttaaaacactttaaagtagtaaatgagtttatagaacggcatgtattctggattttggtgcctgtggtaaagtggataactatttatgatttttggaccaattttattccagcatcagaataatacgcaaaatacctttgtagtgttggtcgccctgttttgaatatacagaattc

SEQ ID NO: 675216 - DNA, 499 bp, Homo sapiens
tgagctgttatcatatgggaagggttgaaaaataatagaccatctccacagcaggggaaggaggaaaaacacaaatcatcttaatactaggaatcaagcaagtgggaaggaaaatgggttgtgtggtagagtaaagtggaaatgtgcatgtgagagtttgtgcaaatatgtggtaaggcaagggagtttccaactcaacatgcattaataacctggccctgtgcaaagtgctataaggaaaacaaagatggaaagacatgtatagtagcatgaatttagatgaatataacagaaaacttactaacagtagcttaaaccacagggttaaacaatttcagacataggctgtcttaaggtaggttttagttgttcaacagtgtcatcaaagatatggtcccattctcccatctgtcatactcagcttcttagccttttaaagtccataggcttattacctcatggtcacatgatggctgccacagcgttccacaacgggtac

SEQ ID NO: 675217 - DNA, 218 bp, Homo sapiens
gtgcatgcagtacctagaatagtcaaatttatagagacaaagtagaatggcgcgtaccaagggctgggggaagagaatggagagttattgtttaatggatacagagtttcattttggcattttgcaaaagttctggggatggatagtgatgagggctacacagcactgtgagtacacttaatgccattggcaaactgtaagttatgtatagttgacca

SEQ ID NO: 675218 - DNA, 592 bp, Homo sapiens
tgcgatgacctcgtgggcttttcgggggactttggaagcggtgtcggctgggaggatgaggaggacgaaggacgaccgagtgaatcccggccgaccggatggccgcacggacggaaggaggcgtcgacaggcacaggcgaaggcgtgaacgaacgcggggcctaacaatactggtgaagacgcccctccacaggagagccggctgtcccgcgggggtgagacatcaacaacggcacgagcttctgagagccccgcacagcacggcacaacttcgagaacggactcccgacgatgcacgtcaatgaaggatccctgctccacacctggggggacatgggagtgtgagctgtgcacatggcacttgtgtgtggcaccagatggctgggacgggtgaccacctgtgagtgcacatgtgtgcacatgcacatgtgtgtaatgtgtgtgtgtgtgtggcaccatgcgctgaccaattagtgtccttgatccaccctgctcctggcaagagtgagtcaccccaaggccccttcggcctccttgtagactgttttctttccctttgttgttggttttaaaataccatcacacaccaata

SEQ ID NO: 675219 - DNA, 197 bp, Homo sapiens
catcggaccagaatcatactgtcatggatctgcaacaattcatgtccatcctctatacagaacatattcattgcttctgccagatttgctcccgaaatctgtcctaccccgctacccaggatggagtgtcatgggattgactctgtctcaatcgtcaactgccacctcccgtgctcttttgctcctcccctctctgt

SEQ ID NO: 675220 - DNA, 1853 bp, Homo sapiens
  misc_feature (276)..(276): n is a, c, g, or t
  misc_feature (1172)..(1172): n is a, c, g, or t
gtttagacttcgcttccgaaatatctttcaggccctgttggaggagcagaatgttgagtgtggccgatgcgtccttaactatccgtgagcggtctgtgcggtgacccttccagtcggcaggtcccagacgccccttgtctagtcgctagtctagtaggcttcccgattccctctgacaacctgtgtcatgcgtgcggttgcccaggtactagcgcttgtgcagcatgtctagagagggacctcatctagagatcatcgacgtgtggtcttctgaangtatggacattgttggtagaacgccgtaggtgtagttcacgcctaaggagatacgagcacaagttgcgcatgcattcgttcgcctacttgtgcgccaagagtctttgcaagaaacagcaccaggatatttttcagttcgaacctcaataaatgtctaggagtgggcacgccattcgtttcaccttgggaacaccatatggagtacgggaaggccccggctttccaattttaccacgcgcgaaaaaataaataccatggttggttgcttctagtcgtcggcgcaagcgtaagaaatgaggctaaggccctgtccaaggttccccgttgtggcgatacgccttggtgttccttaggagcccacggcggttaaagggtcgtttggggtagaccccaccacctcgacggggttggacgttagcttcagggagcacttacacattagacgcgcccttttcgtttgtggcctgtggaacaaacaaaaccttagagcaggcttgacttgacaaatagcaaaaacattaacactttcttggttcccgaggcgtcgagtatttacgacagcaagaaaaaagaattttgcgggaaatttttcccccagactatggaatgagccccgagctgcccctgtaagctcatctgctcccacatcgtcacacagggcaacggcaatcttactatagagaagaggacaacacaatctcgtgttctacacaacgtagcggcaacacagtgtgtccaacacgagccgaactctttttcaacccaacttttagtgacggaagctaccatacttttcttggtggccgaccttataacagcaaataacgaccctcctctaggtaaacaaaccacagaatcaagagcacgacttcatcgagaatcggtcacgctccacnactgtaggtcccttcggaggcatgcttgcgaggaaaactggggagcctgtgcaagccacaatctacattcgtttctagtgggaaacgacaccccaagagatggaccgtaaaaaccattgccacctttgggattatcgacgacgcacgacgagcggagtcaacagcacagacagcagcgtactcacacccgctcttatcacgaggagtagactgtgagccacgtcgggcgcacacgtgtgtgggtaggacacaccacagccggcatgttgtatggtaagggggcgatctttgtgacaccatcactgtctgagtaatctctcataagacagcaacaaaagcacttgttgctagccacaagggtgcgtgagacacaacgcgcccctcggttgcgcccacggggccacctacaaccagagagcggtgttgtgtctatcattacaccaagctctggtctggcgtgtggcgtcaatgcgttgacaacattgtggctacatctcgttagtctgaggcctagcgcgtggtagacacactagcggggtaggtgctaacaacacagccagcagggagtgatggtgtggggccaccactcttagtgccccactcgaagatcgctggttctgcaagccagcggatgacacctatgctctggcagagactagtgcccagaggaacgaatgtgag

SEQ ID NO: 675221 - DNA, 396 bp, Homo sapiens
ggcgcacagcttctcaatctgaatcatatatatctgctgtatatagaatttaatgagactatcagatgatagtgatatgtcatgtgttgtatgcactcgtgggtattccgtactaacgttaggacatgccggatacgccgtgagagtgttgtgggaagaatgttcgattatatcgccgatgaatatcataatgcaaatggattctggcgtacgtttggtctatggtgtcgccggagaataggggaaatcacttgaatgaagcctcctatgatggctcactacagctcctattgataggaccatagtgcaccgtgagctacaacgtattacgtgtcgtgtagtatgatgtctagtgatgagtttgctaatacaatgcctgtcaggctatcaacagtg

SEQ ID NO: 675222 - DNA, 1101 bp, Homo sapiens
tggacactggtccaaaggttttccatcctggtcctgggaatcagagttgggaagctgaggagcttcagcctcttttatgggttaaatgggccacctggttctcctccgtggtgaagaggctctgcgcaaagctcacatttaagcttgtgctgtgaccgtggtaactcccgtggggcccatatttacaatagcaggcgtggcccatatcaggtgatttccaaacaacaacacagtggcaaggtgcccctctctggcagtgtttcaccccacatacagcaaacaaacagcccaaggggcacacatgcacaagccaccatcgcgcacaggggggcacaggcatgcatcgccagtgctcccactcccgcgctggcaccacttcttctccacgtgggctggctattaggataaagacctcttaacacaccaccacaggtgctccgtggtacctctgactgccaaggaggcgcctattctccagcgcttgaaggcttacagagtgccgtgcggtgaagctcccctcacaacgagggtttaacaaggggattttccacattccactggggaaactcctttaattcagcccagaattagggcacctctcccagtgcacccacatgacacagccagacatttacccgggcctctcactcccctcctaaccgcctcaatactgtcttgcctccccccagattgtgccacaacgcacccctctgggacgcgccccctttctattccaatccagcttccacgcgggatgtctccggcactaggggcccttacgaaactcttcccaaacggtccggcttcccaatacgaacgcccctatcgcttcttcttcaggccccagccccccgggctccaccggcggtcctccccccttccgtgcaggcccccaacgcacccggcccctgggcccccctaacccccccctggccccacacgcgaacggcccacccgaccccccccccccacaagaccgacccacagcccgtaaaacaccagagcgcgcacaacccgcacagcccgcccaccaccttcccgccgcaacccacgccccgccccccgccaccccagcgccccccgacgcacccctcacccccc

SEQ ID NO: 675223 - DNA, 578 bp, Homo sapiens
ggccccacttcctaattctagcaccttggtggtcaggtttcagtgtaggaattttgggggtacaaacgttaacagcccccaggctgaccacagagcactggcatccaggctgccctgtgcccaggtgcacacagtgggtctggtgaggaggagagcagggctctgcttgggacccatcctgtgaggaggaaccagagtgaagtctgttccttacagccctcagcttcagctcacagcgaaagcgtccgctgagggctgccttctgaatttttcattgtaaaaggtggcacacctggatagtcagttgattttcaacaagggtgccaagttcattggagaaaatatcttttcgcaaaaaaactgaggcttgacaatgcacaccatgtgcagaattcagcttgactggatcatattcctaaatgtaaaagcctaaaatttaaattacctagattctaagccttaaaaaatatgaacttaaatcctgcactaatgccactgaactgtacacctaaaaatagataaaatggtaaatattatgttttatatatttttaacacaataaaaaaagtagaaattta

SEQ ID NO: 675224 - DNA, 191 bp, Homo sapiens
gtgtattcagctacatgcgctgcatggctccctggacaagttcctggcgagacgtgagcaccgttgctgacctccaaatatcgttaagctggagccatggtcgacgtgtattcaccacctgcggtgcatgcctccctgtacaagttcctgtcaagacgtgagcacgtgctgacctccaaatatcgttaagc

SEQ ID NO: 675225 - DNA, 127 bp, Homo sapiens
cttggcaggtggaaataggaggtgcttcacgactgtcaggtgccgacagcgcccaggcggtcagaggggcttcatgtcaggcagtgccccaaccagcggctgtgcgcttctggagcgtggggccact

SEQ ID NO: 675226 - DNA, 183 bp, Homo sapiens
tccagtgtctcaacagaactcatctatactcccatgtatatagcaggcctgtctaaaccagccaaaatttggaatcacactcagtgtccatcaccagcatgaatggactcacagcaaaatatggtacatatacacacatggaatactatttagccataccaaactgaatggtgtcgacacttg

SEQ ID NO: 675227 - DNA, 1386 bp, Homo sapiens
gccctggtgctgagtgctggcctgctgacggggctggtgcgtgactctcggtgcgctcagagctggcctcgtggtcctcgtgagcctggctgctctgaaccgtcccttcctgacctccaccctgtgaccctctgatccctgacacgggctggccctgggacaacagacacctgaccacaccgagcagcccgatgtactagaaatacaccgaacgacactacctctcaccgagctccgcctgccgctgcggagcgcaccaatgagaagagcagatacacagacgcttaggctgagcacactcacacggcaggagcaatcgacgtacacaacggacagcgacaggggacaacgaactagacagacaaccaccatagagggcagcaggagtaatcaacacagacagtggcgaggtcgcaacggcgatcatcgcgcagaagagagcggcgccgggagcagcaatcgcaacgcgcaggagcaagcaataggagagggcacgataaaaaaggagagaaccagaagaccacacgcagcgagcaaacagatcgaggacgaggacagccagaagaaacagagtgctgacccacggtaaggtctggtcccaggaagtagggagagcaggcaagagcgacgacgaacgggggacgagcagctagcggagagaggacgaagccacccaaaaggacgggtagaagaaacagtgagtgagggcgagtccgtatagcaggcaagtgagacgggcgggagagcagacaggggaataacaaggcacacgaagaacgcaagggagccaacacagggaatgcgagacgcgacgcgggcgatcgacagaaggaggaacgggtgcaaacagaacggcgaggcggcgaagcgcgcggcaacagcgacaggggaggacagggacaaagggacgagcgagagactaagcggtgggcgcgcacgcacaggggcggagggatcagaaaggacaacaggagagaagggcgaaaaacaaagagaggcaagagggaggcagaagagagaacgaacaacgaaagaggagaaacgcagacgaagagggcgtagcacggactagacaccacgagaaagaatgacgaactcacaaggtacagacaagcaaacaaaaataaagcaaagaaaacacaggataaataatacacactgagagggcaggagggagggcgggggggcaggagacgtggaggcagcgcgtagtgagagaggagccgcggaggagggacggacagaggacggtagagctcgatggggccagcgcagacgaggcactgcgccgacgcgctgggaccgacggcggcggagctaagggagcaagatagaggtacgcaggagagagaggcgagggggacggcatccgacgtacgctccgcg

SEQ ID NO: 675228 - DNA, 123 bp, Homo sapiens
aaacctgagccctggcccagtattactctcaaagcccatgatgaaggagttccggttggagccatcctcacagattatcgaggttgcacggaatggccagaacctgatagatcaccactcacg

SEQ ID NO: 675229 - DNA, 880 bp, Homo sapiens
  misc_feature (39)..(39): n is a, c, g, or t
  misc_feature (70)..(70): n is a, c, g, or t
  misc_feature (81)..(81): n is a, c, g, or t
  misc_feature (86)..(86): n is a, c, g, or t
  misc_feature (94)..(94): n is a, c, g, or t
  misc_feature (96)..(97): n is a, c, g, or t
  misc_feature (183)..(183): n is a, c, g, or t
  misc_feature (189)..(189): n is a, c, g, or t
  misc_feature (204)..(204): n is a, c, g, or t
  misc_feature (207)..(207): n is a, c, g, or t
  misc_feature (278)..(278): n is a, c, g, or t
  misc_feature (287)..(287): n is a, c, g, or t
  misc_feature (300)..(300): n is a, c, g, or t
  misc_feature (328)..(328): n is a, c, g, or t
  misc_feature (338)..(338): n is a, c, g, or t
  misc_feature (349)..(349): n is a, c, g, or t
  misc_feature (374)..(374): n is a, c, g, or t
  misc_feature (381)..(381): n is a, c, g, or t
  misc_feature (386)..(386): n is a, c, g, or t
  misc_feature (527)..(527): n is a, c, g, or t
  misc_feature (596)..(596): n is a, c, g, or t
  misc_feature (607)..(607): n is a, c, g, or t
  misc_feature (635)..(635): n is a, c, g, or t
  misc_feature (668)..(668): n is a, c, g, or t
  misc_feature (670)..(670): n is a, c, g, or t
  misc_feature (676)..(676): n is a, c, g, or t
  misc_feature (678)..(678): n is a, c, g, or t
  misc_feature (683)..(683): n is a, c, g, or t
  misc_feature (692)..(692): n is a, c, g, or t
  misc_feature (731)..(731): n is a, c, g, or t
  misc_feature (738)..(738): n is a, c, g, or t
  misc_feature (743)..(743): n is a, c, g, or t
  misc_feature (787)..(787): n is a, c, g, or t
  misc_feature (806)..(806): n is a, c, g, or t
  misc_feature (812)..(812): n is a, c, g, or t
acacacaaaagaacaagaaagaacaaaaaagcaggcagngaaccggaccggaaaacccgggaacgctgancaggccgcggncagcnggagatancnngctctggacctcgcatgatagctacttacagggacatccatcacccagaaaatgagaatgtactgaaacgtggatattcaggttanaatacnaggtgggccaaaaanatnctaacacaagattaaacaggaaaagaaacagattatgagacatcccagtagcagtaacaaataacaatagnaccaataanaatccactaaaanatgaaaaacccaaacagcacattccccnggaggagaangcagcgaaccnaaagaacatagaacaatacctgaantccgtgnacatncctaaaaacgagtacaatcacaacacgccgaccccactaagtaaaacaacctgggaagaacagagcatcaaacaaggttgcaaactaaatcgcctgaactctgaagtcggatgaatatgccaatacgtgtctacaagtagnccaagacagtcggactagacgtacttgacctgtggaccctgatgcaggacagccaggacttctcatctnatttatcaganggactacatttgtctccaaaggggaatnaatatttgttctcgcatctctggcctttgatananaaaaangnctctnctctacctntgctgcttccttactggcgggatgtagcagaagcaaaanctgaatnaaatntgctgggagaaggagaacattagccaatcacaggagaccaaaantgcttgttatctacagaantcaaantagtcaatacgtagaggtacgcttttttcctcaggcttaaacctttgccactgatataaataataaaa

SEQ ID NO: 675230 - DNA, 1357 bp, Homo sapiens
caaaacgtttttccgacacataactggttgagaatcacaacgcctgtttattataaatgtgcgataatttttatatataatcctctttcccccaatgtcttcgccaaaaaatgtccctatatatggttgtccccaaacccctctttgtagaaagaacattttttccctcccttatataaatgttcttccacaaaatatatccgtgtgttattccacccacaccccaagtggtcccccgcgttgcattttttggcgccaacaaaaatagggctccccccccggattgggggaaatcccaaggttgatacccgggaagtcccacatttgggggcccgaagaaaattggtactttggggcccctccgcaaataagcttttgtgctccccctagagtgtacacctggtgggtcacaccaccagtggtttttgtgcgctccgagtattattaaattgtatctagcagcgtccaattccggggggtgtacccccaaggggcccaaatagggggtcacacaaaaagagggggtccaacacacacgatgcgggttgggcgcacccacccccagaaaatacttgctccccccctctagaccccccccgggagagccccttgccgctcaaagaggggggcccctggttaatttggggcgccttggcacttccctcgggttccgtgtttagagcctcttctctcttgtgtgccacaccgccctttggggcacaagaaaaggctataccacttctccccgcactctctgaaattgcccacccacagaaagatatttttaaacagatatttgggccacagcggtttatccctctttttttcaaagggagcgccgcacaagctgcgagtctctcaagagaaccatatgcctctcccactcgagctttataggagccttatattggacgccaagagagcactctcacaaccctctctctgggtggggctcttgtgctccacattatagggtgtaagatggaccccataggacatttggtctcaagcctgtaaagagcctttgttgtgggtgtgggcacccacagaaacccggggtgtcttctacaccctcttccccaagagtctcctgtgtcgtgggtgccagaaccggaatacggcgggcgtcttggagaaagaattgtacccttaagattctcattgtaccacccaccctccccgatttggccctggccccgttcccaggaccctgggagaggagaaagaaaagacattctcatgggacaccactgtaagaaaagaacccgattgccaagagaaaaagagagacttaaagtcccgggaccagattttgcccttggtggggtttccaattaaaattattttccccctgtga

SEQ ID NO: 675231 - DNA, 154 bp, Homo sapiens
aacaccaatgtgcacgggctccttccggtctggggacctcatgtccctgaatcagcttttgccacttgcctggcaggacacaacacttacctccatggaatgtacatggccatgcgggacgcccactgtatcatgctcaacattccactgacat

SEQ ID NO: 675232 - DNA, 80 bp, Homo sapiens
gactgcccatcccgggtcctttccctgatgggttggggcacttacccggtagcggttttaattaaaaaaaggaaaaaaaa

SEQ ID NO: 675233 - DNA, 212 bp, Homo sapiens
aacgcctatccctgctgcatattgaattaactagaaataactaggcaaggcgagcctagcgctaagacccccgataccagacgagctgcctaagcacagctataagagcacaccctgtctactttcgcaaaatattaggaagctcaataggtggaggcgccacccctactgcgcctgtgctcatagcctggttgttgaccgagtagacgtct

SEQ ID NO: 675234 - DNA, 269 bp, Homo sapiens
cgacggccatgagattcctcgttgtgactttgtttactttctcagggtgatcagagtatgtattatgttatcatctaagtaccaagattcattctcatcaaatactagaaacaaaagggaaaatcccattttgctttttaggattgaatactttcacatagatttcgcacatcatgctatagcacttaggatctactgatcagtgtatagcatgtacgtatctctcacactactcttgatgcatatatatcatactgactgcactaatc

SEQ ID NO: 675235 - DNA, 316 bp, Homo sapiens
taagcgtgcttagtgaagccctgtgaactgaagctagacaacttaaacttcagaagaaaataacagcaaccggtttacatatataagctactttcatacctgcctacggatgtatggacttcagaagtagtgtggcctatatcgattttctaggatcattatttggtttgttgtttttctcccttcctccacctattttctcttcataggacatgaggattctcaacctgataaaaatgagctttcctaataactcaagacccatctgcctaggaataaaccatcccagctgtgagagaccagacaaagggaaaca

SEQ ID NO: 675236 - DNA, 913 bp, Homo sapiens
  misc_feature (330)..(330): n is a, c, g, or t
  misc_feature (477)..(477): n is a, c, g, or t
  misc_feature (496)..(496): n is a, c, g, or t
  misc_feature (511)..(511): n is a, c, g, or t
gagggacccgcagctcagctacagcacagatcagcaccatgaagcttctcacgggcctggttttctgctccttggtcctgggtgtcagcagccgaagcttcttttcgttccttggcgaggcttttgatggggctcgggacatgtggagagcctactctgacatgaggagaagccaattacatcggctcatgacaaatacttccatgctcgggggaactatgatgctgccaaacaggggacctgggggtgtctgggctgcagaaagcgatcagcgatgccagagagaatatccagagattctttggccatggtgcggaggactcgctggcngatcaggctgccaatgaatggggcaggagtggccaagaccccaatcacttccgatcctgctggcctgcctgagaaatactgagcttcctcttgcactctgctctcaggagatctggctgtgaggccctcagggcagggatacaaagncggggacgagggtacacanatgggtatctaatanatacttaatgaggcaaagcctagttaacgcatttactaaacgcatttgagcactcgcacacggatcccacttcggagaaagtcggtcacgggactgccaaccatttgggacccaccgatcccccgtttcgaacgctgggacacacttgggaatacgggagatgtccggagaaaggcgcccgagcgacacgaagctagaacgcaacgaatgagaaggactcactcccggcacgaattaaacaaccgcccccgggttgtgggaaacacagaagcaggctcttcgggcacacagaatcccccgaaagtaaggtcattgcaacagcacgaaccaataacgggggactactgcctacggcagggactacacacagggtgaacggcccccaaatgcataatatccccg

SEQ ID NO: 675237 - DNA, 405 bp, Homo sapiens
  misc_feature (169)..(169): n is a, c, g, or t
  misc_feature (305)..(305): n is a, c, g, or t
ggcacgagcacggtgccgaggtggtcgaacacgggacgcttggcgtgcgcgccgccccggtcggccggcaggtagcgccaggccagcagcagcgccacgccggccagcggcacgttgacgaggaaaatggctggccagccgaagtgcgcgatcagcaggccgcccatcncggggccgagcgtggtgccgaccgccgacatggtgccgagcaggcccatggcgctgcccgtcctggccttgggcacggtgctgccgacaaaggccatggtcagcgccatcatgacggaagcgcccaggccctgcanggcgcgcgcggcaaccagcagccacaaggtgggcgccagcgcgcacaggatggaggcaagggcaaacagcgcaatgccggccagcagcaggcggcgccgg

SEQ ID NO: 675238 - DNA, 631 bp, Homo sapiens
  misc_feature (330)..(330): n is a, c, g, or t
gagggacccgcagctcagctacagcacagatcagcaccatgaagcttctcacgggcctggttttctgctccttggtcctgggtgtcagcagccgaagcttcttttcgttccttggcgaggcttttgatggggctcgggacatgtggagagcctactctgacatgaggagaagccaattacatcggctcatgacaaatacttccatgctcgggggaactatgatgctgccaaacaggggacctgggggtgtctgggctgcagaaagcgatcagcgatgccagagagaatatccagagattctttggccatggtgcggaggactcgctggcngatcaggctgccaatgaatggggcaggagtggccaagaccccaatcacttccgatcctgctggcctgcctgagaaatactgagcttcctcttgcactctgctctcaggagatctggctgtgaggccctcagggcagggatacaaaggttagtgaggtctatgtccagagaagctgtagatatgggcatagtaataggcatctaaataaagtgcttaagaggtactaaaaagacatgagagttcatgaaacagaaaggattttgggagtcctctgtggagttcctgagaagagtttttttaa

SEQ ID NO: 675239 - DNA, 675 bp, Homo sapiens
  misc_feature (292)..(292): n is a, c, g, or t
  misc_feature (439)..(439): n is a, c, g, or t
  misc_feature (458)..(458): n is a, c, g, or t
  misc_feature (473)..(473): n is a, c, g, or t
gagggacccgcagctcagctacagcacagatcagcaccatgaagcttctcacgggcctggttttctgctccttggtcctgggtgtcagcagccgaagcttcttttcgttccttggcgaggcttttgatggggctcgggacatgtggagagcctactctgacatgaggagaagccaattacatcggctcatgacaaatacttccatgctcgggggaactatgatgcagcgatcagcgatgccagagagaatatccagagattctttggccatggtgcggaggactcgctggcngatcaggctgccaatgaatggggcaggagtggccaagaccccaatcacttccgatcctgctggcctgcctgagaaatactgagcttcctcttgcactctgctctcaggagatctggctgtgaggccctcagggcagggatacaaagncggggacgagggtacacanatgggtatctaatanatacttcagaggtggacacccaaatttcctgtattctgaacaaagagaaagacagctttaactcctgatctcccttcctaatatcacacttgttcctgggcagacagctgcaatcatgatttccctaagcaactcccccctagaaggtgtcctggaacgcactcaagcttgccatcatccgagggccctcaggcgagttccg

SEQ ID NO: 675240 - DNA, 523 bp, Homo sapiens
gacggccaccgttcccctgttagaacagtgccgtggctgctgttggagaatgttgcttttacacaacaacagggccacatgggacacacgggcccccaaggcaagccctttcacgctttccctttcctttttcttccatttaaaaacgacgccaaaccagggggcttaattcctttggtttctctccttttttattcacaaaacgtggtggccttttggggctctggccaattctgaggggtgttggatgtggctatgttggcgacacgaacagtctcaggaaggacaccgtttgggaaaaaccgaccgtttcaacgggcatttttaaccccttctctcacggtaaaccattttttattaacaatttcttaaccgtttggttccaactcgttacttttctgagcaccaatttccaccaagggcaaaacaggcccttgggggaacattcctttgtgtcgaaagggtccctccctttcacgcctgcataattcatttacttttctcctctcctcttcttcaaaaa

SEQ ID NO: 675241 - DNA, 478 bp, Homo sapiens
gtttgccgagataggatgatggacgcatgaccacacggctaacgtcctgtggtactggtcctcccgcgagtttgtctaggaattattgctcctcctaagccgtccacgtaacagttgaacttgactctcagggtactctcggtggctcacggtccatcaccatgcatgtcagcctcaggggtccgggagatcatgagggtgtccttgggttaaggggggaagaggaagactgacggtccccccaggagttcaggtgctgggcacggggtgggcatgtgtgagttttgtcacaaggatttgggctcaactctcttgtcccaccttggtgttgctgggcttgtgattcacgttgcagatgtaggtctgggtgcccaagctgctggagggcacggtcaccacgctgctgagggagtagagtcctgaggactgtaggacagccgggaaggtgtgcacgccgctggtcaggggcgccttagtt

SEQ ID NO: 675242 - DNA, 692 bp, Homo sapiens
  misc_feature (277)..(277): n is a, c, g, or t
  misc_feature (367)..(367): n is a, c, g, or t
  misc_feature (500)..(501): n is a, c, g, or t
  misc_feature (506)..(506): n is a, c, g, or t
  misc_feature (512)..(512): n is a, c, g, or t
  misc_feature (518)..(518): n is a, c, g, or t
  misc_feature (522)..(524): n is a, c, g, or t
  misc_feature (527)..(527): n is a, c, g, or t
  misc_feature (535)..(535): n is a, c, g, or t
  misc_feature (537)..(537): n is a, c, g, or t
  misc_feature (540)..(541): n is a, c, g, or t
  misc_feature (548)..(548): n is a, c, g, or t
  misc_feature (555)..(555): n is a, c, g, or t
  misc_feature (560)..(561): n is a, c, g, or t
  misc_feature (567)..(567): n is a, c, g, or t
  misc_feature (570)..(570): n is a, c, g, or t
  misc_feature (572)..(572): n is a, c, g, or t
  misc_feature (576)..(576): n is a, c, g, or t
  misc_feature (578)..(578): n is a, c, g, or t
  misc_feature (582)..(582): n is a, c, g, or t
attatggccggggcacggatcacgatgtaaattattaagcattttggttggatttcttttgtaataaactatttttgtaccataaaaaaaaaaaaaaaaaaaaaaaaaaaaaaaaaaaaaaaaaaaaaaaaaaaaaaaaaaataaagaccacttagaccaaaaaaactttaaactaaacaaagttaataaatagcgaccgaaattaaagctaatttgcccaatacacctaaaagggagccgaataaaaattaattggccgtcttttaaaaacgtcgnaattggaaaaaccttggggtaaccaaattaaatcgctttgaaaaaaatccccttttcgcaagttggcgaaaaaccaaaaaggcccgaacnaatcgcctttccaaaaagttgccaaccctaaatggcaaatggaaaattgtaagcgtaaaaatttggtaaaaattcgcgtaaaattttggtaaaataagttaatttttaaaccaataggccaaaatgggaaaannccttnataaanaaaaanattnnnccnaaataggntnaanngtgttcnagtttgnaacannattccnttntnaaanancggngcctcaaacgttaaaagccaaaaaacgggtatataaggcgatggcccaattaagtaaacctttaccctaaataggttttttgaaataaggggctctaaagccctaaatgg

SEQ ID NO: 675243 - DNA, 572 bp, Homo sapiens
  misc_feature (187)..(187): n is a, c, g, or t
  misc_feature (277)..(277): n is a, c, g, or t
  misc_feature (410)..(411): n is a, c, g, or t
  misc_feature (416)..(416): n is a, c, g, or t
  misc_feature (422)..(422): n is a, c, g, or t
  misc_feature (428)..(428): n is a, c, g, or t
  misc_feature (432)..(434): n is a, c, g, or t
  misc_feature (437)..(437): n is a, c, g, or t
  misc_feature (445)..(445): n is a, c, g, or t
  misc_feature (447)..(447): n is a, c, g, or t
  misc_feature (450)..(451): n is a, c, g, or t
  misc_feature (458)..(458): n is a, c, g, or t
  misc_feature (465)..(465): n is a, c, g, or t
  misc_feature (470)..(471): n is a, c, g, or t
  misc_feature (477)..(477): n is a, c, g, or t
  misc_feature (480)..(480): n is a, c, g, or t
  misc_feature (482)..(482): n is a, c, g, or t
  misc_feature (486)..(486): n is a, c, g, or t
  misc_feature (488)..(488): n is a, c, g, or t
  misc_feature (492)..(492): n is a, c, g, or t
tgacattttagggacatggtgtttttataaagaattctgtgagaaaaaatttaataaagcaacaaaaattaaaaaaaaaaaaaaaaaaaaaaaaaaaaaaaaaaaaaaaaaaaaaaaaaaaaaaaaaaaaaaaaaaaaaaaaaaaaaaaaaaaaaaaaattaattggccgtcttttaaaaacgtcgnaattggaaaaaccttggggtaaccaaattaaatcgctttgaaaaaaatccccttttcgcaagttggcgaaaaaccaaaaaggcccgaacnaatcgcctttccaaaaagttgccaaccctaaatggcaaatggaaaattgtaagcgtaaaaatttggtaaaaattcgcgtaaaattttggtaaaataagttaatttttaaaccaataggccaaaatgggaaaannccttnataaanaaaaanattnnnccnaaataggntnaanngtgttcnagtttgnaacannattccnttntnaaanancggngcctcaaacgtaaaggggcaaccgtttataagggcaatggcccattacgggaacctttcccttatgtttttggggggcgg

SEQ ID NO: 675244 - DNA, 624 bp, Homo sapiens
  misc_feature (239)..(239): n is a, c, g, or t
  misc_feature (329)..(329): n is a, c, g, or t
  misc_feature (462)..(463): n is a, c, g, or t
  misc_feature (468)..(468): n is a, c, g, or t
  misc_feature (474)..(474): n is a, c, g, or t
  misc_feature (480)..(480): n is a, c, g, or t
  misc_feature (484)..(486): n is a, c, g, or t
  misc_feature (489)..(489): n is a, c, g, or t
  misc_feature (497)..(497): n is a, c, g, or t
  misc_feature (499)..(499): n is a, c, g, or t
  misc_feature (502)..(503): n is a, c, g, or t
  misc_feature (510)..(510): n is a, c, g, or t
  misc_feature (517)..(517): n is a, c, g, or t
  misc_feature (522)..(523): n is a, c, g, or t
  misc_feature (529)..(529): n is a, c, g, or t
  misc_feature (532)..(532): n is a, c, g, or t
  misc_feature (534)..(534): n is a, c, g, or t
  misc_feature (538)..(538): n is a, c, g, or t
  misc_feature (540)..(540): n is a, c, g, or t
  misc_feature (544)..(544): n is a, c, g, or t
tgacattttagggacatggtgtttttataaagaattctgtgagaaaaaatttaataaagcaacaaaaattaaaaaaaaaaaaaaaaaaaaaaaaaaaaaaaaaaaaaaaaaaaaaaaaaaaaaaaaaaaaaaaaaaaaaaaaaaaaaaaaaaaaaaaaaactcaagggggggcccggaaccaaattcccctaataggaagtcgaataaaaattaattggccgtcttttaaaaacgtcgnaattggaaaaaccttggggtaaccaaattaaatcgctttgaaaaaaatccccttttcgcaagttggcgaaaaaccaaaaaggcccgaacnaatcgcctttccaaaaagttgccaaccctaaatggcaaatggaaaattgtaagcgtaaaaatttggtaaaaattcgcgtaaaattttggtaaaataagttaatttttaaaccaataggccaaaatgggaaaannccttnataaanaaaaanattnnnccnaaataggntnaanngtgttcnagtttgnaacannattccnttntnaaanancggngcctcaaacgtaaaggggcaaccgtttataagggcaatggcccattacgggaacctttcccttatgtttttggggggcgg

SEQ ID NO: 675245 - DNA, 295 bp, Homo sapiens
  misc_feature (109)..(109): n is a, c, g, or t
  misc_feature (133)..(133): n is a, c, g, or t
  misc_feature (154)..(154): n is a, c, g, or t
  misc_feature (156)..(156): n is a, c, g, or t
  misc_feature (166)..(166): n is a, c, g, or t
  misc_feature (180)..(180): n is a, c, g, or t
  misc_feature (189)..(189): n is a, c, g, or t
  misc_feature (191)..(191): n is a, c, g, or t
  misc_feature (199)..(200): n is a, c, g, or t
  misc_feature (206)..(206): n is a, c, g, or t
  misc_feature (227)..(227): n is a, c, g, or t
  misc_feature (235)..(235): n is a, c, g, or t
  misc_feature (278)..(278): n is a, c, g, or t
  misc_feature (283)..(284): n is a, c, g, or t
gagctgactcccatgggttgccgtcttcccagtatcggtggggacgggccctgagtgggaaagaagaaacaaggaaaattccagtcccagctaacagatacacaccatngaaagaaaacgggatgaagatatntactcctatggtggaacattngnggacttcagnatacgctttaactntgaaatcangngaatgtannaaatcnggactggtaaggaaaccaagngatgtcangtgctctgacaaaagcagcgtgatttggtgaaagcttttagtnctcgnnctttcagcgtg

SEQ ID NO: 675246 - DNA, 259 bp, Homo sapiens
cccccatttttttccccccccccaggggtttttttttaaaaagaaaaaaattccaaaaccccccccttttttttgggaacccccccccgccttcctggggaggcccccctttttggaaacccccccccggccccccccggggttaaattttaccgagcccgtggttttgcccccccccccccccctccttttttaattccccccccccaaaagggcccaaaaaaaagcccctttttcttgggtttaaaaaacaaaccca

SEQ ID NO: 675247 - DNA, 448 bp, Homo sapiens
ggcaacgcccctagaggctaatgcgacaaagcacgacacgatcgctactacgctaggtgtatgcaccgcaaacggtttgcctgcagacgaaatgcgcgttgtctacggcagatacagtactatgaccgtacaactttacgggactgcaaagaaacatacggcacaggacataccgcaaaaaactgataatgatgaagagggttataagtgggagaaggaacgcaattaagccttgaattaaggccaaaagagctgcgaggcgcggcgaggacaccaattggtacggcgttgttgggagcactatgtaccagctacgggaatgccgggacgaaagtgagattgctgccgcacgaaaataaagagagagcgggggagagaaagggaacgcaagggatgaagatacagcaggaagagctacggaccagcggttcgtaccccgattatagcg

SEQ ID NO: 675248 - DNA, 107 bp, Homo sapiens
cttcctggagatcgtcaccaaccctgatggctttgcttcacgcacagcacgaatcgcatgtgggccaagactcggtcccacacagcaggctccctctgtattggcgt

SEQ ID NO: 675249 - DNA, 1481 bp, Homo sapiens
  misc_feature (64)..(64): n is a, c, g, or t
  misc_feature (430)..(430): n is a, c, g, or t
  misc_feature (509)..(509): n is a, c, g, or t
  misc_feature (1384)..(1384): n is a, c, g, or t
gaaaactacctcctactacgccaaacctggtgcacaagcgataaacgcacttcatagttcgacnctattgtcgatcattggacacgtacattcgggcaagtccacctagctactggccactctgtatcttattaaattgtcggatggcatcgtacgaactagaactcacttgacaataatctgaagaacgtgacgtgcctgctggcataactggcgtaaatgcggtctccatatcaagttattgtccatgtgagctcctctgggaactaatagaactgtatacacgactgaaggcgatgaatacgttgtgtaatccaccaattagaactcatcctccctagtgcgtgaaatatttgaagcactcaggtcccgccttactatagttgactaatcacttgattgccccacgagaacatacatgtatagaccntgttattcacacaaaaccattgattctatcacgggcaccactctatcacgaggctgaccctgctgccatgatacctgantttgctctggcatgacctggatgctctggctgaaattctgagaggcctgggtactctgcccaagtaactggcgcagaacacccgaacgtagtcactggcaccttctggtcttaccatcatctggtgtgttgaatacatcacacttacaatagttcgcggtgattaatcataaactggacttcgcacctgagaccactcctcactagtcccagaaaagtagcatcattgcaggcaacactagtcttaaaggcacagctccacgtcagttaactatttacagcaccacagattgggagtgcacaaaccccgcgacgaccagctcatcgatcgcgtgccgcaattttacttggttcggacatcggtgcactaaagctatagcctgggcagtcccacaggttgacttaaaaatattggcctttgggttttcaacacgtgcatcggggacaaacgtctaaacgccgttcaaggcatggctaacttgacccagttgggagaacccaccacttggcctagaaaagcttcatgcgaacttggcctttttctacccaccccaaacttcgctctcagaacttgggaggcttaggtccccctttgtgtggcccttggctctctcccccaggaggtggtcgtccccccaccacgcgagggcgcgcgccattactgggcaccaccgctccccaagggtacgacacggactgaagcgtgcccccacgcgtgcggtccgctccaaacccaccggccatgtgcggcggcggcccccccttctcgattcacacactcagcacgggcagtctacccggacacacactaccacctctgtcgctcaactgatcggcagccgacacacagcaactaagcaaaaaaccacacccccngacggcaacaaggagcgccgcaaccttgcgacgaaagactcgttgcacaccccatcagtacgacgcagcacaccgacgaaccgtgcaaacactcact

SEQ ID NO: 675250 - DNA, 475 bp, Homo sapiens
cggtctcttcctgacctattataccttctctaaaattgcatcttgaccaggcacagtggctcatgcctataatcctagcactttgggaggccgaggcgggcagatcacctgaggtcaggagttcaagaccagcttggccaacatggtgaaaccccatctctaccaaaaatacaaaaattagccagacgtggtggtgcacgcctttaatcccagctactcgggaggctgaggcaggagaatcacatgaatccaggaggtggaggttgcagtgagctgagatcttcccactgcactccagcctggacaataagacctgtctccagcaagaccctgtctcacaaaaaaaacaaacaattgcatatggactcctgaagaacttcaagccatagttgagatccatcacataagatggacatatactaaagtacctgtgagccaggtgttgcaatctcaaagtcactccttaccaagctcc

SEQ ID NO: 675251 - DNA, 930 bp, Homo sapiens
tgtttatacggcacgaggccaagatatgccaggctgacattgtggaggctgtggacacttgcaagtgcagccaagcactttgacttgaatctgcgtgcagatgtggaccctacagactaaactactctcgaactggaagacacctggcttttggatgggctgccgaggtcatgtggctgcccttgatttgggtaacaaagaagcttatgttgcgagatcaactgtcatggagtgcggtgctgggacatcctggttatctaccattacttgacgagcaccttgcatctgactaggtttgcttctatgcacaccctgcatagtgcatcccacgatactaattgacagatcacgggccattagagcatccacttgtatcctgcctgctgtgacctgagtaacacggcttgagttcctgcccttccacttcctcctggctacagcttcagaaacagggtttctaacctacctggatgtgtcagtggggaagatagtggcagctctgaactgctcgagctgggcggctcgatgtcatgagtcagaacccttacaaatgccgtcatccatctcggacacagcaatggtactgtgtctttatggagtccagctatgcaaggagccactggcaaagatactctgtccatcgtggtgaggtccgggctgtggcagtagatactacaggcacgtacatggccacctctggcctagaccaccagctgacgatctttgacttgcgagggcacgtacagcctctgagcactcggaacctgccccatggagcatgtcactgcccttcttcccaaggcgcactgcatgttccggcgcaatgggataccgtttgacacatctgggccggtccggcacggccagccacctcctttacagcctcctaccacggatccaggccgtgcatgcctcaattgcccttgacgt

SEQ ID NO: 675252 - DNA, 131 bp, Homo sapiens
  misc_feature (64)..(64): n is a, c, g, or t
acacaaggcagtgtggagcaacatgctgttttaatgagcgcctggatgcaggtgggctgaggcntaaaatggggtcagcctgaacaatatattttttaaaaagattctgtcttctacttttttcattactt

SEQ ID NO: 675253 - DNA, 293 bp, Homo sapiens
  misc_feature (197)..(197): n is a, c, g, or t
  misc_feature (226)..(226): n is a, c, g, or t
agctcgcttagagctcccgtgtactcttctccctagaggaggcagttcccaaaggtggaggggagatgtctattactactttaagaactaatcggccgggcgaggtggttcacgcctgtaactcccatgcacgtttgggacggccgagtgtggtgtggactcacctgagtgtcaggagttgcatgaccatgcctggncaacacagctgagacccctgtctttacanaacattcgctgggcgggtggttgtatgccctgtaatcccgagctacacgggagccactaggcgaggt

SEQ ID NO: 675254 - DNA, 853 bp, Homo sapiens
gcatggcaggcgcgcggtaatcggccgaggactggcaccatccttattgctacagatgtagcctcccgtgggctagatgtggaagatgtcaagttggtgatcaacatatgactatccaaacagctcagaggattatgtgcaccgtatcggtcgaacagcccgtagcaacaacaagggtgccggcgtataccttctgcaccccagggaacctaaaacaggccaggagagcttatcaaagtgctggaagaggccaatcagggctatcaatccaaaactgatgcgctgtggaccacgaggaggcggcggaggcgggggtggtcgttctcgttaccggaccacttcttcagccaacaatcccaatctgatgtatcaggatgagtgtgaccgaaggcttcgaggagtcaaggatggtggccggagagactctggaaggtctatcgggatcgtgggtgaaaccgtatagagcggtggtgatgctaatggcagtggcatatggaagtcgcaagattctgccttcggagcacaagcaggcgcagatacaccgtatggtcaaggcacctatggggcagctgcttatgggaccagatagctatacaggctcaaagaatatggtgctggcgaacttatggagcgtagtagcagcacagctccaagctgggcagtaagttcacagcagctctagcctagcagtttcagtgggataggccggtcgtgggcagcagcctacagtcacatgatgtcacaacagttgtgcacagcctccgggagctagcaatatgataggtcacatggggcagactgctacaatacctctccttcacctctgtccaatctgggtatccccatggggtcg

SEQ ID NO: 675255 - DNA, 115 bp, Homo sapiens
tagaattggaaattgttgtttctaaatctatatgagaattgacaataagtattcttattataacgcggcccatacatgtatactatgtatgcagtgcatctgcatagaacagttt

SEQ ID NO: 675256 - DNA, 258 bp, Homo sapiens
  misc_feature (240)..(240): n is a, c, g, or t
gacaagatccgttgagctgcttcctctggtgcaattggacatatagaacatctgcactgaggcgctcgtctgtgcacgcaactgcagtactgacccctacaagggagctgtgcactgatccagctgagagggagttcagcgctgctgcccgcagggaacaatcacacctgtacatggaaggcctgggaggatacccttgacaaatactgtgaccgggagtatgctgtgaagacccaccancacttgtgttggcggggt

SEQ ID NO: 675257 - DNA, 397 bp, Homo sapiens
  misc_feature (61)..(61): n is a, c, g, or t
tttttttttcccctttccctccctccctttccgcatttttcccttggttaaggacaggganaagggttcccctccctccccgccttcatggatcaccagctcaggtcatgttgcctttttttttctttgggggggggtaaataagggaatttttttcccccccccccttttttttttgggcccccccccccccccttttttgccagggaaatgggggatgggttatgggtttgcaaacaggtggacggtcaggggggtttttttccaaaggttcctccttggcctccccttcccctcctttcccctccttttccttccttccttcctttccttggggccctgggccccatttgggaggttgagagaaacccaaattaaagagagaaagaggggggga

SEQ ID NO: 675258 - DNA, 176 bp, Homo sapiens
  misc_feature (64)..(64): n is a, c, g, or t
  misc_feature (71)..(72): n is a, c, g, or t
gggtggaaacagccttaaccccagatgacttctattctgactaatttgagtcattgcttgactncataggnntttttcttgagagggctcttccacttttgattcagaaaaggtagcatattttatttacccatgaaattttgagaaccacagggctttttttttttttgggggga

SEQ ID NO: 675259 - DNA, 218 bp, Homo sapiens
cgcggtctctatagatattaacactacatatgcatgtatatgtaattaggtgtgtagcctgatcccttaacatctgcagcctccgcaaggacaaggagatcatgtctgttggattcccagaacccagcagatgagtctggcattcagtagatggccaataaattttacagaatgaataaaagtatatacttctatagaaatcacacgtatacacttac

SEQ ID NO: 675260 - DNA, 394 bp, Homo sapiens
taatgtctagttcactgcactcacctcctgggctcaagcgattctcctgcctcagactcagtctcctgagctagctgaaagttactgacaaatcacttacatgcccaactaaatttttgtattcttagtagaaacacgctttcgccactgtaggtcaagctggtctcgaactcctgacctcaaactgatctagccacctcagactccccaaagtgctgggatttacaggcggtgagccatcgcacccagcccatgaaattttttttaaaaaagcctttggacagagaggcttctcgtcagattaacctccccaggaaatccattgtctgggcctttgccctgttatgctcagtattctcatcctgtctccagcctgggcaacacagcaatgctc

SEQ ID NO: 675261 - DNA, 1105 bp, Homo sapiens
  misc_feature (804)..(805): n is a, c, g, or t
  misc_feature (808)..(808): n is a, c, g, or t
  misc_feature (812)..(812): n is a, c, g, or t
  misc_feature (814)..(814): n is a, c, g, or t
  misc_feature (817)..(817): n is a, c, g, or t
  misc_feature (827)..(828): n is a, c, g, or t
  misc_feature (830)..(830): n is a, c, g, or t
  misc_feature (836)..(836): n is a, c, g, or t
ggtggcggcgcgcgcagcggcaggcggcggcgggatggagcccgatcccgagcccgcggccgtggaggttcccgcggggcgcgtgctcagcgcccgggagctcttcgccgcccgctcgcggtcgcagaagctgccccagcgctcgcatggccccaaggactttctgcccgacggctcggcagctcaggccgagcggctgcgccggtgccgggaagagctctggcagctgctggcagagcagcgcgtggagcgcctgggcagcttggtggctgccgagtggaggccagaagagggcttcgtggagttgaagtctcccgcgggcaaattctggcagaccatgggcttctcagagcagggccggcagcgccttcacccggaagaggccttgtatcttctggagtgtggctccatccacctcttccaccaagacctgccactgtctatccaggaagcttaccagctgctgctgaccgaccacactgtgaccttcctgcagtaccaggtcttcagccacctgaagaggttgggttatgtggttcgacgattccaaccaagctctgtcctgtccccgtatgagaggcagcttaacctggatgccagcgtgcagcacttggaggatggagatggcaagagaaagaggagcagctccagccctcggtccattaataagaaggccaaggccctggacaactccctgcaacccaagagtctggcagcctccagcccacctccctgcagccagcccagccaatgcccagaggagaaaccccaggagtcaagccatgaggggccagggggcccttnnagnctgngnccngggccaaccnngncggcangagggggtggggacacgggtcacagggcggcaccacaaaagagagtcagcgcgagaggacaaaggcggagaaacaagaagacaacaagccagagatgatcaagaaccaccagggagcccacaaagggaggcaacaaaggtagacaacaatcatggtgacgatacgagaacgactgtgagcacaccagaagagaacaaacagagcaccgagatacgatgatcaaggccacagacactcacccgcgagagttgctagactaacacgacaaa

SEQ ID NO: 675262 - DNA, 218 bp, Homo sapiens
ggtttctcgcctcatgtctggtggctgccgcgggagtattaacagagaaccatgggcggcccagaggaccgtgtgaccccgatgggtgtgcatacgagaggcaactggaatgagattatgtgataactttggatcgatatgaatttaaaggacgtctctccgctcgttggcatcaatgctaactggattgaacgaggccttccgctattacagcagtg

SEQ ID NO: 675263 - DNA, 138 bp, Homo sapiens
cacccgcacggacttgtcggatcgtctggatgtggctgatcgcctcgatcttcttctcattgacgagtacggcgatgcgctcaagcatgttcttcttattcacctgataggggctctcgtcgatgatgatcgcctggc

SEQ ID NO: 675264 - DNA, 872 bp, Homo sapiens
  misc_feature (2)..(2): n is a, c, g, or t
  misc_feature (447)..(447): n is a, c, g, or t
  misc_feature (489)..(489): n is a, c, g, or t
  misc_feature (871)..(871): n is a, c, g, or t
tnacggccgccagtgtgctggaaagccaccaccgccctgctcattccctacttcttaaatatttccatcgattggaagaaacaaggggaacctttgagatccaggttctctgagatcctgtctcacagtctcaccatggttagtctagactccatgtctccttagtaaaccaagatcaggctcccacacggctcttctctctctcagaagaaagatatagtcccaagcacacagggtcatggagtgtcatggaagcaaatgacaaactcgatggggaacttgacagggaggatagagcattttgtatgtggtaactgaagagctgcagtctttccacacaaaggggaaggtagagagtgcccctagaaagggagcaaatgaggttacagaccaaagtatgaagtccagaactgggtcatccaagattagacagagacattatctgtnaacaatgaataatcaaataaaggtttataccttatttaaaanaaaaaaagaagaacaagggtcatggacatatagaagcctgagagccacagaagggcaggcacatcctggccataccagctgagttctgtctggttctctgttaggcagaccgctgtattcaagggtccagcaggaggagacactttagagatgagcatgatagactatcgctgggttgttgactagcaaacccggtctagaccaatccctgtgagactgttagacaggatctcagagaacctggatcttagacgctccccctacttcttccaatcgatggaagtattaaagcagtagggaacgccttggggactctctacccgacaaaaaagaaaaaggaagcttatttcctttcttctggcagctcctaagcaggcttctnt

SEQ ID NO: 675265 - DNA, 868 bp, Homo sapiens
gggatccaccatggtggcgccgagtgtgagccgatagagagagaccggggaaattaagtttcttgcggagtacgggtggggatagcgagctgcttgagcgagggattctggaaagcattgcgtatctgagtcccccaggagtgtgggggcttaaagcggaggcgaaagccaggggtggccagaagagcatggtgagcatggaacatgggctgtacatcctggaccgcatgttggacatcgtgggcactcatctgacacagagatgatgtgcgcgtggtttctggccgtctttgtagatgtcatgatgaccaggagcagtggagtcatcctgataatgggaacagtcgactgcttattggcagtgggtacgcgccaggggcgctgttggatgaaaggtacacgtttgagccaggtggctggcagttgctgcgaattatcactcggcggaagagcttgctgccgtagttaccctctaagaggagacgggctgttgtgccctgatcttgtgcgacgagtatctgggagggagacatcgaagatcgtgatggtgacccccacagagcgggttcagtgagtgcagaaccaagggggctccccaggcttgctaaagagaggtggctccgcagtatccttgtgagtgtgttgccccacttgggaggtcctcaagatggttttgcaaggcggcagcccgagggagaagcaaaaattgggaagccagtgaaaaacccgggaaataaggacagagatccaggaaaagtcaacatgtgggcttggaacggggttccggtgattcggcagtggacggtgggggacagttccttagaagcaaccttgacccggtgcggtacacgaaattcatcgcggctgg

SEQ ID NO: 675266 - DNA, 1641 bp, Homo sapiens
ggtggcggcgcgcgcagcggcaggcggcggcgggatggagcccgatcccgagcccgcggccgtggaggttcccgcggggcgcgtgctcagtgtgcgtgcgctggccctggcctggagtgggtgtctggggtgctgctggtggccagcgctgggtagggaaacctggctgccctgggaccctggccaggctggcccctgatgcgctggctgctgacccctgcgtccccttctcccccagcgccacggagagcatctacagccgaccgcatcgcgggatagacagaacgcatgcacccagcagactcgcagtggaccccaaggcactttcatgccacagaacgagctcagagcagctacagggccagagcggcatgactggaccgtgttgccagggaaaagatgcatctgcgcagcctgccttggcaggaaggcacgcaggctgtaggaagctggccatgagtgcatgactattggtgagcttgccaggaggtgggaggcccaaggacaggaagggagcttccgtgggcacgttagagacgtgatacaacaagatggggagcaaaacttacatggggcagaaagcaagttggtgcgtagtcctacaacagacggcgaggggaccagggacacaaagaccgtgtcagcacaccgggcaaagaagggagcttatgcatattcattccttggaagatggtgcggcataccaagtcacaggaccttccatatcccaagcccaaaaagaaaccagttgccccacctattgatcataatatcccagggcggacaaggcatttacgccaaggacagttgctattgcaattgcaaccatagaaacccaaacaaaagatagtatgaaacacaattatacccgtattggacacgcgttacacaaaatagggatacttacacagcgacgagcaccttggaaagaggaacgggatctcggggagagcaagcaaggttgaggaacacagcaccgaaaagatacccacagcagaccacaaagccgtccatagaaccaatcgaaccccagcgagagacttgagcgaagcgccagcagtcacacccacacggactagccgaaagagggtgaacagcacacgggagcagcagacatggcgcggacacgaggagcgagcaagaggacaaagcgcagcggcacacacaccccgacacaacacactagacgaaagcacagagcagccgagagggccgacaggcaagagaagacgcacagaacccaggagacgaagagagcaggagggagacaggcagaagacaagcgagagggacaacaaggcagcacgaaggcggagaagcacaaggcgcaggagagagacagcgacccaggagaggcagcacggacacacaggaacgacagaggccaaggcgaagagcagagaagcacaccagacacgaaggtaagacaaacaaaagaacagagagacaagcagtccaacagcgacaggcgacagcaacaaggcaacgagacagagcgcgacaagacaaagaaggcacgtcgggacagaccgaggaagtagctcaggccaacacaaagaggagagggagtcataggagcacagacggacgcgagaggcagcgacgaaggaagagtagacaggagagacgcacttaggagag

SEQ ID NO: 675267 - DNA, 592 bp, Homo sapiens
ggtggcggcgcgcgcagcggcaggcggcggcgggatggagcccgatcccgagcccgcggccgtggaggttcccgcggggcgcgtgctcagcgcccgggagctcttcgccgcccgctcgcggtcgcagaagctgccccagcgctcgcatggccccaaggactttctgcccgacggctcggcagctcaggccgagcggctgcgccggtgccgggaagagctctggcagctgctggcagagcagcgcgtggagcgcctgggcagcttggtggctgccgagtggaggccagaagagggcttcgtggagttgaagtctcccgcgggcaaattctggcagaccatgggcttctcagagcagggccggcagcgccttcacccggaaaggccagtctgggccttggccctgggtgtctgatactcacagagtgaaactgtgaccctctcccttccctgctgccttgcagtgacccctctggaactcaggactcgattttaaggacccaggaggtggggcagaagagaggactgtgtgcctttaacgagagggtgcctgcttcgtgctataaagccaaagccattaaaaatagatttcttt

SEQ ID NO: 675268 - DNA, 631 bp, Homo sapiens
gggggcgcgggggcagaggtgacctggggctctggacttagacccaagggctagacaccccgggtctgactggtgggagagaagacgtaatgtgaagggggttggcaaccaagacgcgggaccccacttgcagtaccccccgtctgcggccggcgtcgcccacccgcagccgccggccgggcaatggcaccacctagcggacggcaccagtgcggggaccccagcctcgaggaggcgctcgtgccgggcggaggtggcgcttcagcaccgtcgtgggccggacagcgcctcccgcccccggccctcgaaacctggcttctggagcccagccgtagggaccggacggaagacaccgaaggaatggcgaacctccccggaccgctcctgacagttcccgggtggccttcggcctgcaaagtcggaatttgcacaccctccgctcgtccttccctgagcccttctgccctccttgcccagcccgggcggtgtgggactaagcagcgcgaggctgcagaggggcggtcacaagtgtgaccattcgcactgcactccagacgccggctcctcaggctttactggagagaagccccgaggagggctaggggcaaaagaggggccttctgcatctcca

SEQ ID NO: 675269 - DNA, 111 bp, Homo sapiens
aggtactctaagatccctcacgtgcattgtgggccattagtcatctcaaacagttttgaacccaggaccagaaaagacaggagggtggctgaggacacaacaccacgttaa

SEQ ID NO: 675270 - DNA, 330 bp, Homo sapiens
ggcaaggcagggtttcaccattttggtcaggctggtctcaaactcctgaccttgtgatctgcccacctcagcctaggagttaagagaccagcctgggaacatagactccacacaaaaaatttttttaattagctgggtgtggtggcatgcacctatagtcccagccacatgggaggctgagcgtggaaggatcatttgagcccaggagattgaagcggcagtgtgtggtgattgtgcccctgcgctctagcctgggcaacagcgcagaccttgtctcaacaacaacaacaacaaaaggctatctattgtgggtacactgcctatggggta

SEQ ID NO: 675271 - DNA, 300 bp, Homo sapiens
tgaacattcgtgtccttcgtgtcctcgtgtccttgtagccgtggtccttcagcatatctctgtgctgcagacaacacaccttcctgatggaggtgtccggtaagtttccaagcagtgccgtctctgcagtaccttgaccgccaggagttggtggttaggaactggctcctgaagtagggtgtaaactagaggactgttccagggactcctacccctacgcctagctctgagcataactagtgttcgtgtgtgtctagggaagagggagaataaccagtgggggacacgaatgatcggtag

SEQ ID NO: 675272 - DNA, 209 bp, Homo sapiens
cgccatgttcccaagaataggccggaggactcgctgcttgacgggagggatagctgacctatgctatagctatcttatacctagtgaaacagggacacaaaagtgcttcatatgaagatactaaggaacgatagagatacttgtagaacaagttagtatagagaaatagctgatagtatagtagagactagcttgaaatttctataata

SEQ ID NO: 675273 - DNA, 742 bp, Homo sapiens
  misc_feature (593)..(593): n is a, c, g, or t
gtattcaaagctttatatattcctagaccttgcttatctgttaaaaacaagacctagcatataacatatattagatgctcagtaaatatgtttaatgaataaaaccaaagttatcgtctggaatcataatacatgagttctaatacaccctggtagatagaattatctagttcttatacttttatttgttgttgagatggagtttcactcttgttgcccaggctggagtgcagtgacacgacctcagctcactcctgggttcaagtgattctcctgcctcagcctcccgagtagctgggattacaggcgcccaccacaacgcccggctaattttttgtatttttagtagagatggggtttcaacatattggccaggctggtcttgaactcctgatctcaggtgtttcacccgcctcggctcccaaagtgctgggatcacaggcgtgagccacacgcctgtcctagttcttatactttttttttttttttggagaccaagtcagctttgtcacccaggcggagtggcagtagtggacctcggtcactaaaaccttgtgtctcccgggtccacagtgattcttgtgaccacaggnccccgagatagctggctcaacgggtgctcgccgcaatgcctgctaagtttcgcattccacatcagagcggggtttcacgtggttaccaggatgtcccaattccagaccctcgttgttctgtcccgcttgggttctcaatttccgggtac

SEQ ID NO: 675274 - DNA, 1936 bp, Homo sapiens
ggtggcggcgcgcgcagcggcaggcggcggcgggatggagcccgatcccgagcccgcggccgtggaggttcccgcggggcgcgtgctcagcgcccgggagctcttcgccgcccgctcgcggtcgcagaagctgccccagcgctcgcatggccccaaggactttctgcccgacggctcggcagctcaggccgagcggctgcgccggtgccgggaagagctctggcagctgctggcagagcagcgcgtggagcgcctgggcagcttggtggctgccgagtggaggccagaagagggcttcgtggagttgaagtctcccgcgggcaaattctggcagaccatgggcttctcagagcagggccggcagcgccttcacccggaagaggccttgtatcttctggagtgtggctccatccacctcttccaccaagacctgccactgtctatccaggaagcttaccagctgctgctgaccgaccacactgtgaccttcctgcagtaccaggtcttcagccacctgaagaggttgggttatgtggttcgacgattccaaccaagctctgtcctgtccccgtatgagaggcagcttaacctggatgccagcgtgcagcacttggaggatggagatggcaagagaaagaggagcagctccagccctcggtccattaataagaaggccaaggccctggacaactccctgcaacccaagagtctggcagcctccagcccacctccctgcagccagcccagccaatgcccagaggagaaaccccaggagtcaagccccatgaagggcccagggggcccctttcagcttctggggtccctgggccccagccctggcccggccagggagggggtggggtgcagctgggagagtggcagagccgagaacggagtcacgggagccggtaagcggcgctggaacttcgagcagatctccttccccaacatggcttcagacagccgccacacccttctgcgcgccccagccccagagctgctcccggccaacgtggctgggcgggagacagacgctgagtcctggtgccagaagctgaaccagcgcaaggagaacctctccaggcgggaacgggagcaccacgcggaggccgcgcagttccaggaagatgtcaacgccgatcccgaggtgcagcgctgctccagctggcgggagtacaaggagctgctgcagcggcggcaggtgcagaggagccagcgccgggcccctcacctgtggggccagcccgtcaccccgctgctgagtcctggccaggccagctccccagccgtggtccttcagcatatctctgtgctgcagacaacacaccttcctgatggaggtgtccggctgttggagaagtctgggggcttggaaatcatctttgatgtttaccaggccgacgctgtggccacattccgaaagaataaccctggcaaaccctatgcccggatgtgcattagtggatttgatgagcctgtcccagacctctgcagcctcaagcggttgtcttaccagagtggggatgtccctctgatctttgccctggtggatcatggtgacatctccttctacagcttcagggacttcacgttgccccaggatgtggggcactgacctcacagctctgcagaggatggagcttgctccgggggaccgggactgtctgttctcagggaccatctcggctgcctcctgtacccagactctaacctgtagcttcagaggccagtctgggccttggccctgggtgtctgatactcacagagtgaaactgtgaccctctcccttccctgctgccttgcagtgacccctctggaactcaggactcgattttaaggacccaggaggtggggcagaagagaggactgtgtgcctttaacgagagggtgcctgcttcgtgctataaagccaaagccattaaaaatagatttcttt

SEQ ID NO: 675275 - DNA, 102 bp, Homo sapiens
  misc_feature (1)..(1): n is a, c, g, or t
nccctgtagatgagcagaaatcacatcgcgaaggcccgcggcgggtgttgaggcgatgtgatttctgctacatctcaggtactcctattacgtgtccggcca

SEQ ID NO: 675276 - DNA, 2875 bp, Homo sapiens
  misc_feature (1862)..(1862): n is a, c, g, or t
  misc_feature (2044)..(2044): n is a, c, g, or t
ggtggcggcgcgcgcagcggcaggcggcggcgggatggagcccgatcccgagcccgcggccgtggaggttcccgcggggcgcgtgctcagcgcccgggagctcttcgccgcccgctcgcggtcgcagaagctgccccagcgctcgcatggccccaaggactttctgcccgacggctcggcagctcaggccgagcggctgcgccggtgccgggaagagctctggcagctgctggcagagcagcgcgtggagcgcctgggcagcttggtggctgccgagtggaggccagaagagggcttcgtggagttgaagtctcccgcgggcaaattctggcagaccatgggcttctcagagcagggccggcagcgccttcacccggaagaggccttgtatcttctggagtgtggctccatccacctcttccaccaagacctgccactgtctatccaggaagcttaccagctgctgctgaccgaccacactgtgaccttcctgcagtaccaggtcttcagccacctgaagaggttgggttatgtggttcgacgattccaaccaagctctgtcctgtccccgtatgagaggcagcttaacctggatgccagcgtgcagcacttggaggatggagatggcaagagaaagaggagcagctccagccctcggtccattaataagaaggccaaggccctggacaactccctgcaacccaagagtctggcagcctccagcccacctccctgcagccagcccagccaatgcccagaggagaaaccccaggagtcaagccccatgaagggcccagggggcccctttcagcttctggggtccctgggccccagccctggcccggccagggagggggtggggtgcagctgggagagtggcagagccgagaacggagtcacgggagccggtaagcggcgctggaacttcgagcagatctccttccccaacatggcttcagacagccgccacacccttctgcgcgccccagccccagagctgctcccggccaacgtggctgggcgggagacagacgctgagtcctggtgccagaagctgaaccagcgcaaggagaacctctccaggcgggaacgggagcaccacgcggaggccgcgcagttccaggaagatgtcaacgccgatcccgaggtgcagcgctgctccagctggcgggagtacaaggagctgctgcagcggcggcaggtgcagaggagccagcgccgggcccctcacctgtggggccagcccgtcaccccgctgctgagtcctggccaggccagctccccaggtaccccctcagcctgccacatcttcgagggccactggcagctgaggaatcacaggactttggaaagggcatggatgaactgggatggattgaggcttaaggaagatgtgggaggagggagtggacccacaagcacggtcagttctccggcggctgcagcagggcctgtgtgggaaggcttagagatggtgagtcaggagaggtaaggaggggtggaaactatgaccatatccttaaaaagataaacaacatgcatgtggatggctttgccaccaactagctgtgatcccaacctgttagatgggaaaaggaggtgccttcttggccaagtgaaagaaaggcttgctgtctgctctaagcccagggaaccaatggggaaagaataagctaaatgtgttaacggattccaaattacttaaagcctttatgggaacacggtagattgtaggtaactagatagggttgccagatcagtttgatttgactttcagtataatttttcagtatatgttccaaaaattgcatgggatatgcttatactaaaaaaaaaaaaaatgttgctaggctggacacggnggctcatacccgtaatcccagcactttgggaggccgaggcgggcagatcacctgaggtcaggagttcgagaccaacctgggcaacatggtgaaaccatctctactaaaaatacaaaaattagccgggtgtggtggtgcacacttataatcccagctactcaggaggctgagacaggagaatngcttgaacctgggaggcagaggtcacagtgagccaagatcacgccactatactccagcctgggtgacagagtgagactccgtttaaaaaaaaaagttgctaaatctggccgtcctaaactagatggcagactgagaaatgtgactcccctccccagtaccttgttttctgtgtccttgtagccgtggtccttcagcatatctctgtgctgcagacaacacaccttcctgatggaggtgtccggctgttggagaagtctgggggcttggaaatcatctttgatgtttaccaggccgacgctgtggccacattccgaaagaataaccctggcaaaccctatgcccggatgtgcattagtggatttgatgagcctgtcccagacctctgcagcctcaagcggttgtcttaccagagtggggatgtccctctgatctttgccctggtggatcatggtgacatctccttctacagcttcagggacttcacgttgccccaggatgtggggcactgacctcacagctctgcagaggatggagcttgctccgggggaccgggactgtctgttctcagggaccatctcggctgcctcctgtacccagactctaacctgtagcttcagaggccagtctgggccttggccctgggtgtctgatactcacagagtgaaactgtgaccctctcccttccctgctgccttgcagtgacccctctggaactcaggactcgattttaaggacccaggaggtggggcagaagagaggactgtgtgcctttaacgagagggtgcctgcttcgtgctataaagccaaagccattaaaaatagatttcttt

SEQ ID NO: 675277 - DNA, 173 bp, Homo sapiens
ggaagctgccggtctgtgtggatgctcggggggggggataaggtcacagatcaacaggatcccaaggcagaagaatttttcttagtacagaacaaaatgaaaagtctcccatgtcttacttccattccacacagcaccctggcgccattccggggtaccgacgctcgcaattc

SEQ ID NO: 675278 - DNA, 2323 bp, Homo sapiens
ggtggcggcgcgcgcagcggcaggcggcggcgggatggagcccgatcccgagcccgcggccgtggaggttcccgcggggcgcgtgctcagcgcccgggagctcttcgccgcccgctcgcggtcgcagaagctgccccagcgctcgcatggccccaaggactttctgcccgacggctcggcagctcaggccgagcggctgcgccggtgccgggaagagctctggcagctgctggcagagcagcgcgtggagcgcctgggcagcttggtggctgccgagtggaggccagaagagggcttcgtggagttgaagtctcccgcgggcaaattctggcagaccatgggcttctcagagcagggccggcagcgccttcacccggaagaggccttgtatcttctggagtgtggctccatccacctcttccaccaagacctgccactgtctatccaggaagcttaccagctgctgctgaccgaccacactgtgaccttcctgcagtaccaggtcttcagccacctgaagaggttgggttatgtggttcgacgattccaaccaagctctgtcctgtccccgtatgagaggcagcttaacctggatgccagcgtgcagcacttggaggatggagatggcaagagaaagaggagcagctccagccctcggtccattaataagaaggccaaggccctggacaactccctgcaacccaagagtctggcagcctccagcccacctccctgcagccagcccagccaatgcccagaggagaaaccccaggagtcaagccccatgaagggcccagggggcccctttcagcttctggggtccctgggccccagccctggcccggccagggagggggtggggtgcagctgggagagtggcagagccgagaacggagtcacgggagccggtaagcggcgctggaacttcgagcagatctccttccccaacatggcttcagacagccgccacacccttctgcgcgccccagccccagagctgctcccggccaacgtggctgggcgggagacagacgctgagtcctggtgccagaagctgaaccagcgcaaggagaacctctccaggcgggaacgggagcaccacgcggaggccgcgcagttccaggaagatgtcaacgccgatcccgaggtgcagcgctgctccagctggcgggagtacaaggagctgctgcagcggcggcaggtgcagaggagccagcgccgggcccctcacctgtggggccagcccgtcaccccgctgctgagtcctggccaggccagctccccagccgtggtccttcagcatatctctgtgctgcagacaacacaccttcctgatggaggtgtccggctgttggagaagtctgggggcttggaaatcatctttgatgtttaccaggccgacgctgtggccacattccgaaagaataaccctggcaaaccctatgcccggatgtgcattagtggatttgatgagcctgtcccagacctctgcagcctcaagcggttgtcttaccagagtggggatgtccctctgatctttgccctggtggatcatggtgacatctccttctacagcttcagggacttcacgttgccccaggatgtggggcactgacctcacagctctgcagaggatggagcttgctccgggggaccgggactgtctgttctcagggaccatctcggctgcctcctgtacccagactctaacctgtagcttcagaggccagtctgggccttggccctgggtgtctgatactcacagagtgaaactgtgaccctctcccttccctgctgccttgcagtgacccctctggaactcaggactcgattttaaggacccaggaggtggggcagaagagaggactgtgtgcctttaacgagagggtgcctgcttcgtgctataaagccaaagccattaaaaatagatttcttttaaaaaaaaaaaaaaaaaaaaaaaaaaaaaaaaaaaaaaaaaaaaaaaaaaaaaaaaaaaaaaaaaaaaaaaaaaaaaaaaagacagaacagagacagaaaaaaaaaaaaaaaagagacggggggggggcgccaatagaacgtcccgtccgggagcaacgacagagcgcgcgcgctttgtagacacaggaggcggcccacacagaggagggaggaagagataccaacagagaagagacgagcagcgcggcgcgccagtaaagaacgcgccgcgggggagcggagggaagaaaagctgtgccgcgggcgggatagctggggagaagggagacacacaccatcagggggagggggagacaaaggagggagaacacagcacacggagagg

SEQ ID NO: 675279 - DNA, 182 bp, Homo sapiens
atagcgcgcagctgttgagaatgttcgtggcatccgagccagcattgtcacacagctagcgtgtgataatctccaaggccttggcatatgccccagtcggcagctgctgtttcctggaatagtccgtagtatccctgcaggtacttagagagttccagctcttattgcccaggctggagtgt

SEQ ID NO: 675280 - DNA, 2124 bp, Homo sapiens
ggtggcggcgcgcgcagcggcaggcggcggcgggatggagcccgatcccgagcccgcggccgtggaggttcccgcggggcgcgtgctcagcgcccgggagctcttcgccgcccgctcgcggtcgcagaagctgccccagcgctcgcatggccccaaggactttctgcccgacggctcggcagctcaggccgagcggctgcgccggtgccgggaagagctctggcagctgctggcagagcagcgcgtggagcgcctgggcagcttggtggctgccgagtggaggccagaagagggcttcgtggagttgaagtctcccgcgggcaaattctggcagaccatgggcttctcagagcagggccggcagcgccttcacccggaagaggccttgtatcttctggagtgtggctccatccacctcttccaccaagacctgccactgtctatccaggaagcttaccagctgctgctgaccgaccacactgtgaccttcctgcagtaccaggtcttcagccacctgaagaggttgggttatgtggttcgacgattccaaccaagctctgtcctgtccccgtatgagaggcagcttaacctggatgccagcgtgcagcacttggaggatggagatggcaagagaaagaggagcagctccagccctcggtccattaataagaaggccaaggccctggacaactccctgcaacccaagagtctggcagcctccagcccacctccctgcagccagcccagccaatgcccagaggagaaaccccaggagtcaagccccatgaagggcccagggggcccctttcagcttctggggtccctgggccccagccctggcccggccagggagggggtggggtgcagctgggagagtggcagagccgagaacggagtcacgggagccggtaagcggcgctggaacttcgagcagatctccttccccaacatggcttcagacagccgccacacccttctgcgcgccccagccccagagctgctcccggccaacgtggctgggcgggagacagacgctgagtcctggtgccagaagctgaaccagcgcaaggagaacctctccaggcgggaacgggagcaccacgcggaggccgcgcagttccaggaagatgtcaacgccgatcccgaggtgcagcgctgctccagctggcgggagtacaaggagctgctgcagcggcggcaggtgcagaggagccagcgccgggcccctcacctgtggggccagcccgtcaccccgctgctgagtcctggccaggccagctccccaggtaccccctcagcctgccacatcttcgagggccactggcagctgaggaatcacaggactttggaaagggcatggatgaactgggatggattgaggcttaaggaagatgtgggaggagggagtggacccacaagcacggtcagttctccggcggctgcagcagggcctgtgtgggaaggcttagagaagccgtggtccttcagcatatctctgtgctgcagacaacacaccttcctgatggaggtgtccggctgttggagaagtctgggggcttggaaatcatctttgatgtttaccaggccgacgctgtggccacattccgaaagaataaccctggcaaaccctatgcccggatgtgcattagtggatttgatgagcctgtcccagacctctgcagcctcaagcggttgtcttaccagagtggggatgtccctctgatctttgccctggtggatcatggtgacatctccttctacagcttcagggacttcacgttgccccaggatgtggggcactgacctcacagctctgcagaggatggagcttgctccgggggaccgggactgtctgttctcagggaccatctcggctgcctcctgtacccagactctaacctgtagcttcagaggccagtctgggccttggccctgggtgtctgatactcacagagtgaaactgtgaccctctcccttccctgctgccttgcagtgacccctctggaactcaggactcgattttaaggacccaggaggtggggcagaagagaggactgtgtgcctttaacgagagggtgcctgcttcgtgctataaagccaaagccattaaaaatagatttcttt

SEQ ID NO: 675281 - DNA, 292 bp, Homo sapiens
attcctttcccctcagatttcggcattcccaccctatgggagaaattattatagttgccattcttaggatgtttcccagataaattacaggaatcataagattgctaaacaaatgtaggtggctaatagaaaaagagaagcagtaagcctacttttttcatttacttattcagcaaatgtttatcaggcatctattatttgataggctttgtactgatttctggcttgacaatgatgaagaaattagacatgcccctttctgagctaagaagataggcaaaagggttacaca

SEQ ID NO: 675282 - DNA, 1460 bp, Homo sapiens
gactttagagaggtgccaacggaacgttctccctggtgtattgttgttggggcccccagaaaccaccattttcctgccaccacgagagaacgacccaccgtggttttacccagggtcgcttatatgaaaatccttccagagattatggttgggccccccaaagacctcctgggagggtattcattgtagctcgaccgaccaccgcgttgttttgatccacacaaaaggagatgtgtccaacgcttggttaattacccgccgctcaagcgcttgtcaacacaataccccacagggcggttgttgtgttccatctaagacggggggacaccctttctgtcagagatgaaattttcaacgggggtctacaggggagaaattttgtggttcccaataaggcgagaatttggcggggattcaaaacaaatttgttccccagggcgacccccgcttggggcgacccccctgggctccttgtgaaacattgtggggggatctcccccccacaagagttgtaatattccgcctggtgtgtcgacgttgttcttccacaggggagatgttttgggggacaaaatgcgaaccctcgggtgggtttttttaaaaaaaacgggggagagctttttgaaaaagaaggcggggaaaaaatccttggtgtgacagcacgctgccacacaccgcaagggcggtttccctctgcacagacacgaagatggcccctcccgtttgttttagcacgcccgtgttttgtggcaacacgtttttgttgccgccccaaaggtttgtgtacacccacatgctcgagaggcttccaagaccctctttcaccacgacggcagacctcgaatagggtgtctctttcaccacgaggggaagggggccatatttctctagcgggcaaatatttcatattgggtaatcttgtttaaagagccacaagacaagacgtggcatatattctctctctctcaaaaatacatatctgggagattatatatggctctcgatcttgtgaaaagctcgttttaagtccccggcagtaattgtgtcccctcgaatagtggagaataatggtggcactttgtttgtcacactctaggcacacacaagtaccctcttctaaatttgcccagtagggccgctgaaaattggggctgtaagtaacctcaagttgtgaaagttcttctcccgcttataaactgaggtgtagaaatctgagattttctaaaagaagctgtaaactagttgtgaaagcggctctaggagagcaactttgccaacactttaatgagggagtacacctggtcatttttataaattccctcaccacctgtaagattaaagtgttttaaatttcttttgtagtcggaaccaacattaaccccgatttttacaggaaaccccgggttttatttggattgtttttctgtaaaagggttccaaaaaaactggagtgaacttta

SEQ ID NO: 675283 - DNA, 1904 bp, Homo sapiens
ggtggcggcgcgcgcagcggcaggcggcggcgggatggagcccgatcccgagcccgcggccgtggaggttcccgcggggcgcgtgctcagcgcccgggagctcttcgccgcccgctcgcggtcgcagaagctgccccagcgctcgcatggccccaaggactttctgcccgacggctcggcagctcaggccgagcggctgcgccggtgccgggaagagctctggcagctgctggcagagcagcgcgtggagcgcctgggcagcttggtggctgccgagtggaggccagaagagggcttcgtggagttgaagtctcccgcgggcaaattctggcagaccatgggcttctcagagcagggccggcagcgccttcacccggaagaggccttgtatcttctggagtgtggctccatccacctcttccaccaagacctgccactgtctatccaggaagcttaccagctgctgctgaccgaccacactgtgaccttcctgcagtaccaggtcttcagccacctgaagaggttgggttatgtggttcgacgattccaaccaagctctgtcctgtccccgtatgagaggcagcttaacctggatgccagcgtgcagcacttggaggatggagatggcaagagaaagaggagcagctccagccctcggtccattaataagaaggccaaggccctggacaactccctgcaacccaagagtctggcagcctccagcccacctccctgcagccagcccagccaatgcccagaggagaaaccccaggagtcaagccccatgaagggcccagggggcccctttcagcttctggggtccctgggccccagccctggcccggccagggagggggtggggtgcagctgggagagtggcagagccgagaacggagtcacgggagccggtaagcggcgctggaacttcgagcagatctccttccccaacatggcttcagacagccgccacacccttctgcgcgccccagccccagagctgctcccggccaacgtggctgggcgggagacagacgctgagtcctggtgccagaagctgaaccagcgcaaggagaacctctccaggcgggaacgggagcaccacgcggaggccgcgcagttccaggaagatgtcaacgccgatcccgaggtgcagcgctgctccagctggcgggagtacaaggagctgctgcagcggcggcaggtgcagaggagccagcgccgggcccctcacctgtggggccagcccgtcaccccgctgctgagtcctggccaggccagctccccagacaacacaccttcctgatggaggtgtccggctgttggagaagtctgggggcttggaaatcatctttgatgtttaccaggccgacgctgtggccacattccgaaagaataaccctggcaaaccctatgcccggatgtgcattagtggatttgatgagcctgtcccagacctctgcagcctcaagcggttgtcttaccagagtggggatgtccctctgatctttgccctggtggatcatggtgacatctccttctacagcttcagggacttcacgttgccccaggatgtggggcactgacctcacagctctgcagaggatggagcttgctccgggggaccgggactgtctgttctcagggaccatctcggctgcctcctgtacccagactctaacctgtagcttcagaggccagtctgggccttggccctgggtgtctgatactcacagagtgaaactgtgaccctctcccttccctgctgccttgcagtgacccctctggaactcaggactcgattttaaggacccaggaggtggggcagaagagaggactgtgtgcctttaacgagagggtgcctgcttcgtgctataaagccaaagccattaaaaatagatttcttt

SEQ ID NO: 675284 - DNA, 369 bp, Homo sapiens
cgcttagaatggcgatcagaatgtcgatcacctcaggtgtaaaccagctcatcgtgccgcctcccgcagatgtctaccttagcacccaccaagatcggcgggatccctggcaagccgagcggcaaaccaacctggccctgggtcagggtttcactcagacgcaccggcagacgcagggtctggcccgcacagctgaactccaccaggctgcccgcgttgacgcctagcgtcgccgcgtcggccgggttgaccatcacgtaggcttccggcatgcgctgctggatcacgtgagagcgctgcgacatttcgtcactgccgaacaggtggtagtacggcgcgacacgccagccgtcgttcggattgaacgcg

SEQ ID NO: 675285 - DNA, 238 bp, Homo sapiens
gtctcccttcccccttttcggggggatttaggggtcaacattttttgtagccccggggttccccgggcttcccgtcattattggggcacctttcccccctttttgttttttccccccactaatttttccctttacatcccaacccccctttgggttttaaccccccccctgatactggccttttgtaaatggggtttgcctatttttggtggtccccctcttttgatgggggttttta

SEQ ID NO: 675286 - DNA, 861 bp, Homo sapiens
gtggacgtccccgtaagatggactgccagtgacacagctcgtgaggccttctggactgatcctaccaccaatcgtccaatgaaaagccgttgcgctgctctcaaggatgtctacaaaatcgggtattctggtactgttcctgtcgcccgagtgcgagactgatgttctcaaacccggtatggtggtcaccttttgctccaactcaaccgtttacaacggcacgtaccatctgtcgaactgcaccatgacagctttgacgtgacagctcttcctggggacaacgttggggcttcaatgtccacgaactgtgtctgtcacagagatgttacgtccgttgacaccatctgctggtgacctgcaaaggaatgaaaccaacccaagtggaagcagctggactccactgctcaggtgcttatcctgaaccatcccaggccatttaagcgccgtcctattgccctgtattggactgccacacgctccaaatgtgcctgacacagtttgctgagctctcgacggaaaagatcgctgccgcgtctggtaaaatgctgcgatatggcctaatcctggagtctgctgatgctgccattgtagatattgctcctggcaaaaccccagtgatgtggaaggtcccaaaaaatccacgtgggaccacgtgaacctgcggactcggacaacaccgcgatgggacaccaaagcagcgacagaagctgcggcaacgcaaagcccacgtgcaaaaacaaacgcaacgaaaacccagacagccccaccaacaggcgcaacaagccaacggggtatggcccagcagacacggcgacagacgaaccacaaaagtgccagcactggcaacgcgcaaagcctaac

SEQ ID NO: 675287 - DNA, 354 bp, Homo sapiens
ctatgtcctgtactctgttgcaagaggacaacttattacatatactcaactaaggcactattaccacaaattattacctggagtagccagattcttaagcttataggcttctttaattctaggcgcatgaacaccaaccaaaggtgaaggtagagcaacttgatggaatacttctggtgctatagtacaacttgtgtgaatatttagtgctcagagcattactactttcctttgtatgggtaggaggtgctttatattggttgtagtagtatgtctccaaaggaacctttcatcagttagtattcatgctttatatagctcagtataaggcagccctaattctacgagacggta

SEQ ID NO: 675288 - DNA, 272 bp, Homo sapiens
  misc_feature (192)..(192): n is a, c, g, or t
gtctgctggaagctggtgtccgcgaccaccctttcccgcaggtgcgctgtcccagggaaatgagagtgttttttctataagcccgtgagtggggctgctgctagtctttcagagatgccctgcccagagaggaggaatctagagaggcagtctggctacaacgtttttgctgagctgtggtgggctctgctngttcaaatttcccagtggctgtgtttacactgtgaagggaataccacctactgaaacctcagtaatggtggacacccttc

SEQ ID NO: 675289 - DNA, 870 bp, Homo sapiens
  misc_feature (474)..(474): n is a, c, g, or t
  misc_feature (490)..(490): n is a, c, g, or t
  misc_feature (492)..(492): n is a, c, g, or t
  misc_feature (506)..(506): n is a, c, g, or t
  misc_feature (519)..(519): n is a, c, g, or t
  misc_feature (539)..(539): n is a, c, g, or t
tgctacggagctcaggcgagggaccctacagctccctggtgtcttgccgcaaccaccaggaacgtggccattgagccagtgcagtctgtacttcgaatgtccgtctcctccattgggtgacccacgctagattctgtgagcattgaagcctggcatgagagccgaacggctgatgatctcgaggctgtactgcatggcgtgatctggactggctcgacagatgcacgaaccgagcttagttgggccctcatgcatgcagacacgtgcctggttgtacacgcctaaaacatcggattgctgcgttattgatgaatccttcgggaatcctcgatcccttaccgctataacggtgaatggcgcgcaacggggccggctgggggcctgagctgggaggccatcatcaacctggccacccagcccaagaggcccatgtccatccccatcatccctgacatccctatcgtggacgcccanagcggggaggactacnanagcttccttatgtncagcgatgacgtnctacgctctccatcgggcanccagaggcccagcgtctccgatgacactgagcacctggtgaatggccggatggactttgccttcccgggcagcaccaactccctgcacaggatgaccacgaccagtgctgctgcctatggcacccacctgagcccacacgtgccccaccgcgtgctaagcacatcctccagcctcacacgggactacaactcactgacccgctcagaacactcacactcgaccacactgccgaggggactactccagcctcacctcgtctcctcccatgggctccctcccatctgggaacacgggagggagcaggcttccgctgtctgggcctggggtccg

SEQ ID NO: 675290 - DNA, 140 bp, Homo sapiens
atggctagtgtattagtgggtgtagtgcgatgagcggacgtagtgacatggagtgtaaccagtgcgatggagcaggggtaagtgctgatggagtggggcaccaatgtcaaaggagcgggtcattagtgccgctggagttg

SEQ ID NO: 675291 - DNA, 680 bp, Homo sapiens
  misc_feature (241)..(241): n is a, c, g, or t
  misc_feature (315)..(315): n is a, c, g, or t
  misc_feature (331)..(331): n is a, c, g, or t
  misc_feature (333)..(333): n is a, c, g, or t
  misc_feature (347)..(347): n is a, c, g, or t
  misc_feature (360)..(360): n is a, c, g, or t
  misc_feature (380)..(380): n is a, c, g, or t
gaacagatatttctccagtcctggaagggaggcatgggagctattggcgcccatgaagaaagtgctggttgatcaaccctagagatccgtgatgctgcttattgagaaccttcggtagtcccgagccctactcgtctagcactgcgtggaatggcagcgacaagcagggtgccctgcgcttggaggcgtcgctgacgcgaggtagcgccgatcaactcaatccctgtgaacatctcgcagngcacaagcatggtgccagtagctccgattcgccgcgatcagtctccatgaacagtccctatcgtggacgcccanagcggggaggactacnanagcttccttatgtncagcgatgacgtnctacgctctccatcgggcanccagaggcccagcgtctccgatgacactgagcacctggtgaatggccggatggactttgccttcccgggcagcaccaactccctgcacaggatgaccacgaccagtgctgctgcctatggcacccacctgagcccacacgtgccccaccgcgtgctaagcacatcctccagcctcacacgggactacaactcactgacccgctcagaacactcacactcgaccacactgaccgagggacatactccaaccgtcacctccgtcatccttcccaacgaaatctccgcctgactgctggtgtg

SEQ ID NO: 675292 - DNA, 899 bp, Homo sapiens
  misc_feature (474)..(474): n is a, c, g, or t
  misc_feature (490)..(490): n is a, c, g, or t
  misc_feature (492)..(492): n is a, c, g, or t
  misc_feature (506)..(506): n is a, c, g, or t
  misc_feature (519)..(519): n is a, c, g, or t
  misc_feature (539)..(539): n is a, c, g, or t
tgctacggagctcaggcgagggaccctacagctccctggtgtcttgccgcaaccaccaggaacgtggccattgagccagtgcagtctgtacttcgaatgtccgtctcctccattgggtgacccacgctagattctgtgagcattgaagcctggcatgagagccgaacggctgatgatctcgaggctgtactgcatggcgtgatctggactggctcgacagatgcacgaaccgagcttagttgggccctcatgcatgcagacacgtgcctggttgtacacgcctaaaacatcggattgctgcgttattgatgaatccttcgggaatcctcgatcccttaccgctataacggtgaatggcgcgcaacggggccggctgggggcctgagctgggaggccatcatcaacctggccacccagcccaagaggcccatgtccatccccatcatccctgacatccctatcgtggacgcccanagcggggaggactacnanagcttccttatgtncagcgatgacgtnctacgctctccatcgggcanccagaggcccagcgtctccgatgacactgagcacctggtgaatggccggatggactttgccttcccgggcagcaccaactccctgcacaggatgaccacgaccagtgctgctgcctatggcacccacctgagcccacacgtgccccaccgcgtgctaagcacatcctccagcctcacacgggactacaactcactgacccgctcagaacactcacactcgaccacactggccaaggaataattccaccttcccttcggtttcttcccagaattttggcttaatggttggggggccgacaaggcccaccggctggtgttttttgccctggggcccacatctttcagagttagctggcagga

SEQ ID NO: 675293 - DNA, 868 bp, Homo sapiens
catggtggcgggcacctataatccccgctactcaggatgctgaggcaaggagaatcacttgaaccctaggaggcagaggttgtagtgagccgagatcgcaccgatctgctacttccgagcctgggcgatcagggactaatgactgtctctaaacttaataaataaataaataaatccaaaatgaagctacatgatgaagactgacctaatggacacagcatttgtaggacaaactcaacgatgtcgtaacactcccagatatactcggggactacgtgaagtaaatacttgagaatatttctagaagtttgaggaaactatatagttctcactatgtaacgcccactagtcacgtgcgaagctcaattgagacccagatagctacgcttaaacacaaagctaagcacgctgaggcccatcacagtcaatagctgctgagaacctagtgactcaagtgcaaatctcagaagcacagagaggaaaacgagtcaccgttacatatgcaggacgcagatgatagaggatcgacaagcgtgtttgactcattcacaaaggctggagaggccacgacaagaagatgaccgatgatgctcgaattgccagacagtaaatatctttttaaaactaaggcaactagagatttcaagaccagatagctaccttgagccttacaaggaacattgtttaaaaggcaagttccttgaaggaacacggtacaacactacactacccaacattgaaacactgtcggattcctacacagaagcgcaattcggagagccaccaccaccattgactaacagatgttggggtcaaagaccttgtatgtatagcgtcttctacaacgatatttccgcaatttaaagac

SEQ ID NO: 675294 - DNA, 924 bp, Homo sapiens
tcagggtttgatggtctaaaccgggttaccaaaggtggcaccatgggcgtcaccagcatcttcagtcggttaaacttaactatctgccgtgtcaatcgcgatagtttaaacttgttccgctgcagacttgctatcagtatcacaaaattgttagtatcagcgaccctcagccagtcccctcaccagttgatggggtaccagaatgttagaagagtgtccagaacgaatataaggtcttgttgcgggacagagcttcagcaaacttggtgagtctctccaatcagcagagagagcttcttgccacagcaccgtggtcaggacaaacttcctcaagccttgaccacttgtgagtgacatcgtgaatcaaacaggaccagactctggcttgaacctgcagaacaacatggctgactagggaaacttggacctttcggaagaagtcagcatgtgattgctgagcagtatcatactgtgttgaaactccaaggccaggtgttctgccaaaaagcgccttggtaccaaccaggattaatcagcaacctataaccaacgaaccgaccagggatagaaaccatgtcctgtcgagaatgttacgttccccgaacaccaacttgccaaagcttcaacagactgcagccccttatgcccggatcctatcgctcatcggcgttccccatttagctccaattctgggcctgtttggcaaaaagtactaaggcgtgtggggaacagagagagaggcgagtcagtgccccctgaggtgcggtcatgctactctcctgaagaaataggtctcttttatgcctttaccatctatcaggaattatatccaggatgctaatactcagacatctagcttttttctcacgttttgtattataaccacctatgtaatctcatgttgtgatatcttgtgtattacta

SEQ ID NO: 675295 - DNA, 223 bp, Homo sapiens
gctcgacgggattttgataagagcaaaccacacttgaaaaaagtatttttgagaccattgaagaatttgattgtggctcagtgcagtggctcatgtctgtaattccagcactttgggaggctgaggcaggagaatcgcttgaacctgggaggcagaggttgccgtgagccgagatcgcgccgttgcactccagcctgggcaacaagagcaaaactccatctcg

SEQ ID NO: 675296 - DNA, 763 bp, Homo sapiens
acacccagaggtccccttctcgccgtccgcctgcaactgcgaggtgtatgcccggggccgcttggatgtcgcccggacctgatgaggctgctgcactgggcctcagccagccctctcggatgctggtgctgccactcccgcctgtccctcaagcctctggctagtttgtcctccgatggagaccgatggatgggcccgtccccgtcggagcttgccggctccccagatacctggaccttccttcctccagtctgagctcgtccgcgcatggcttcatcgtcctccagaggccgcactccactacctgcgttattggacgactcagggtgtccccatacgacagatgcgtggtggacgaggagtcacagagggagccaggggccagtggggctccaggggcagaaaaagtgctacagaatgccccgtgtgctcaagggtcttcgagtacatgtcctaccttcagtgacacagcatcacccactcggaggtaaagcccttcgagtgtgacatctgtgggaaggcattcaagcgcgccagccacttggcactggagcattccattcacctggcgggtggtgggcggcccacggctgcccgttctgccctcgccgcttccgggatgcgggtgagctggcccagtcatagccggtttgcactcgtgggggaacgccagttcagggtccacactgcctcgccgttttggagcagacacctgctaaccaatgcggtggagctcctgagccggctgccggttgcccagtac

SEQ ID NO: 675297 - DNA, 130 bp, Homo sapiens
gtaatagcaaatgtcaggttaaaattgtatgtatcatctcacacacagtgcagatgtctgtgaatattgagttcaccaaccattttttcagttaaaaaatatttcaaaaacattttgaacaaacactcaa

SEQ ID NO: 675298 - DNA, 215 bp, Homo sapiens
ggtggcaaatagcaagagaattagacttagaagtggaggctaggccaggcgtggtggtttcaccatgttggtcaggctagtctcaatcccctgacctcaagtgcatccgtccgcctcggcctcccgacgtcctgggcattacaggcgtgcagccaccgcgcctggtccgtcttcttaagtctttctagattcacgttagcgtacacatatgcctt

SEQ ID NO: 675299 - DNA, 175 bp, Homo sapiens
ttatgtcgagtcctttctagagccttcagagattcaatgctaaacaaatttccttacgttggcatgaaggccctggacatgaccagaacgtttctggcctgggttttgtggtcatctacttctatgcagggaacactaaccggtggaaataacaagattttctacttatggaaat

SEQ ID NO: 675300 - DNA, 416 bp, Homo sapiens
  misc_feature (386)..(386): n is a, c, g, or t
ggcacgagaactggagaaagaggttcacggttaggtaagattgggtataagggaagtcctcactgcctaactggagctcccatatctgctctcaacatttaaaagcactttggccattgatgattgttcactttggattatgttcaaaatgtaataatcttgttttaaaaatcgccccccaccccggctgcacccagcccagtcagtatgagctgtactgaactgaagtgcattgccttgtaaacacaggtaaaatttcctatctgaattgttgagctcttttggttcacacccattgatgcctttcctgttcctaattgacctttttgaaaacctcacaagctgttttggtacaagttccacctcaattcaaaggaaaatgatantttaccttggttacaacattggaaagggga

SEQ ID NO: 675301 - DNA, 407 bp, Homo sapiens
ggggtgaggtgggctctgcaggtgcgaatggtccacacacacacttgtctgcgtaggcgtgctcagcacagctcagcagcagcgaagagcacctccgcacctcattctataagaacctggacacggctctcctcaccagcgtctccagctgcacagagaaaggactgctctctaaagggtgaagatgaagatgacattcgcgagtcgttcttgggagcatcagctaccactacagccgcctcgcactctcagggatgcagctgtgatggagaggttgggtatataaattaaaaagtagaaagacagcaggcaccaagaagagagagcccacacaccacacgagagggaaggcactgcctctcctcccactatcctccacatggacacagcaacctagagtgtcccct

SEQ ID NO: 675302 - DNA, 474 bp, Homo sapiens
ggacgcgtgggtcgacccacgcggtcgcagtatggctgtagccaggtgtaggtgaggatggggaaggggcccccctgcctcctggcttccctgagggctgggctggccaatcccagccctcagtcaagcccggaggcaaatgtgtgcagggaggagaggtgtccaggttgaagctttgggagcccttggaggcagcaaggcagactcgcctctgggacccagcacccagcttgggcctgcaggtggggactcaggagtgaatatcgtgggggctttgagcaagaccctctgggcccagcctcaccttccatactttgaagtcaaggagtggacctgtgctgtctcagtttgctctggggtctgggcagtcctgtggttagggcagaggcctcagagggccctagggacagactgacccaggtctgagcctcttgggagcgtgcggatggccggcctcagacaggctggttgtgg

SEQ ID NO: 675303 - DNA, 323 bp, Homo sapiens
ctagtttctgactatccttggatatggcatgatgagagacactcctatataagagagtcaagcgtgtgggaataaaatagtctcattcccacagtcagaggagaagagacatgtagcttgaaccatcgtccttcctctcaagctaaccagagggtgcagagcctaaggaagcgtggcggtagcagatcgagtaatggtcactaggtccatgacccactcccataagctcagagttgcaagaggtccctttctcttcttctcgcaggtccttcctttagtggctggttgttgcaccatctgcttggttggctgaagcgtgacat

SEQ ID NO: 675304 - DNA, 387 bp, Homo sapiens
  misc_feature (365)..(365): n is a, c, g, or t
atgtgggaggctgggcgtgggggctcatgcctgtaaccccagcactgtgggaggcgtgggcgtgggggctcatgtgtgtaaccccagcactgtgggaggccgggcacgggggctcagcctgtcatcccagcactgtggaggccgggcgccgtggctcacgcctgtaatcccagcactgtgggaggccgaggggggcggatcgcctgaggtcaggagtttgagaccatgcttgccaatatggtgaaccccgtctccactaaaaatacaaaaattagccgggcatggtggacacgcttgcaatcccagcactttgggaaggtgagggcgggcagatcacaaggtcaggagatcgagaccatcctgtncaagatgttgagaccgcgtctc

SEQ ID NO: 675305 - DNA, 558 bp, Homo sapiens
  misc_feature (3)..(4): n is a, c, g, or t
  misc_feature (34)..(34): n is a, c, g, or t
  misc_feature (73)..(73): n is a, c, g, or t
  misc_feature (92)..(92): n is a, c, g, or t
  misc_feature (143)..(143): n is a, c, g, or t
  misc_feature (145)..(146): n is a, c, g, or t
  misc_feature (190)..(190): n is a, c, g, or t
  misc_feature (195)..(195): n is a, c, g, or t
  misc_feature (197)..(197): n is a, c, g, or t
  misc_feature (200)..(200): n is a, c, g, or t
  misc_feature (214)..(214): n is a, c, g, or t
  misc_feature (404)..(404): n is a, c, g, or t
tannagaaattaccctcactaagggacaaaagcntcaaaagctgggcggtgcgaccgcgcggccgctcgtggntcccccggatctgcagggnttcggcacgagcccgggttccggcgcggggctctcatagtgctggagggcntnnattttaacgggaagagcacgcagagccgcaagctggtggaccanttgtncncgngggccaccggcacngaactgctccggttcccggaaagatcaactgaaatcggcaaacttctgagttcctacttgcaaaagaaaagtgacgtggaggatcactcggtgcacctgcttttttctgcaaatcgctgggaacaagtgccgttaattaaggaaaagttgagccagggcgtgaccctcgtcgtggacagatacgcatttnctggtgtggccttcaccggtgccaaggagaatttttccctagattggtgtaaacagccagacgtgggccttcccaaacccgacctgggtcctgttcctccagttacagctggcggatgctgccaagcgggggagcgtttggccatgagcgctat

SEQ ID NO: 675306 - DNA, 127 bp, Homo sapiens
attagggagggttattgccccaaccattgcaatgggaggtggagggacaaggcttcagcctcctcattgtctaaatgaggcctaaatgtgtgaagtgcgatttctgcaaacctgtcaccccaccacc

SEQ ID NO: 675307 - DNA, 369 bp, Homo sapiens
  misc_feature (29)..(29): n is a, c, g, or t
ctagacgatccgcgttaagcacaccccanccttaatagtacccatgcgctacataaagtcaaagtgggaaaaagcccaccggtgaggggctccctctctggaaaagtcagcctaccttgtcatttttcaacgatgcctactttgccacccagttacaacaccagtgaatttctccgcatcaaatggtctaagattgaagtggacaaaaatggaaaagatttgaaagagactactgtccttgtggcccaaaatggaaatatcaagattggtcaggactacaaagggagagtgtctgtgcccacacatcccgaggctgtgggcgatgcctccctcactgtggtccaagcttcttggcaagttattccgggt

SEQ ID NO: 675308 - DNA, 271 bp, Homo sapiens
  misc_feature (3)..(3): n is a, c, g, or t
  misc_feature (6)..(6): n is a, c, g, or t
  misc_feature (8)..(8): n is a, c, g, or t
tcnccngngccctttcaggatgaaagctgcggtctgaccttagccgtctcttcctgacggggagccaggtcggcatttctggcagcaagatgaacccccccagagcccctgggatcgagtgaaggacctggccactgtgtacgtggatgtgctcaaagacagcggcagagactatgtgtcccagtttgaaggctccgcttgaggaaaacagctaaacctaaagctccttgacaactgggacagcgtgacctacaccttcagcaagctgcgc

SEQ ID NO: 675309 - DNA, 502 bp, Homo sapiens
gtcgacacctaactcccactcccaacctcaacctaactcccactcccatccccaacctaactctcacccccaacctcaacctaactcccacccactcccactcccaacctcaacctaactcccaacctcaacctaactcccactcccatcctcaacctaactcccactcccaacctcaacctaactcccactcccaacctcaacctaactcccactcccaacctcaacctaactcccactcccatcttcaacctaactcccactcccaacctcaacctaactcccactcccactcccaacctcaacctcactcccactcccatccactcccactcccaacctcaaccgaactctcactcccaacctcaacctaactcccactcccaacctcaacctaactcccactcccactcccaacctcaacctcactcccactcccatccactcccactcccaacctcccactctcaacctcaacctaactcccactcccgtcgacgcg

SEQ ID NO: 675310 - DNA, 889 bp, Homo sapiens
  misc_feature (3)..(3): n is a, c, g, or t
  misc_feature (167)..(167): n is a, c, g, or t
  misc_feature (187)..(187): n is a, c, g, or t
  misc_feature (192)..(192): n is a, c, g, or t
  misc_feature (205)..(205): n is a, c, g, or t
  misc_feature (250)..(250): n is a, c, g, or t
  misc_feature (279)..(279): n is a, c, g, or t
  misc_feature (305)..(305): n is a, c, g, or t
  misc_feature (347)..(347): n is a, c, g, or t
  misc_feature (366)..(366): n is a, c, g, or t
  misc_feature (373)..(373): n is a, c, g, or t
  misc_feature (491)..(491): n is a, c, g, or t
  misc_feature (511)..(511): n is a, c, g, or t
  misc_feature (571)..(571): n is a, c, g, or t
  misc_feature (659)..(659): n is a, c, g, or t
  misc_feature (688)..(688): n is a, c, g, or t
  misc_feature (764)..(764): n is a, c, g, or t
  misc_feature (780)..(781): n is a, c, g, or t
  misc_feature (800)..(800): n is a, c, g, or t
  misc_feature (882)..(882): n is a, c, g, or t
gtnattattcaaaaacagtaaaaagctgagattctaccaaaactaatatatccatgtgggagaagagatacagtagggacagaaacaactcctgaccacattagagttaccttttgagccgcgtcattaggaggcaatactgtaaaactagacacaggtctcccgcngtgccactaggctcacccanaagantagcagagagcangaaaaaaaaaaacttctataaaagaatcatgctgagacacaagancagagagggagtgacattgcaaactcganagaggcagggggcctgggagacaggngtgctccaaagggcacccaacaccatcccccccctgatttcngtgacaaaagtggaaagcnacttgcntggagggactgggggaactgaggggggaactttcatcctgttaggaactccgctttccattcctgcgactactgtctagctcccagagagaaggatggatcacggagggggccacagncagcggggagcagcaggaantccctacggcacaagtctacagggggaaggacgcactgtgcgggcagcggtggcacacanggccagtctgacactgtaaccacaggctgggatgtagccaggacttggtctccttggaagacaggtctgatgtttggccaatccagtncttcagaccctgcctgaaacttgtatctnacgtgaacttaaagaataaaatgcatttctaccccgatctcgcccccaggactggcacgacaggcccacggcagantagatcttttcccagnnctgatcggtgcgtggaatnccagccaccacttctgattcgattccacagtgatcctgttctctgagtattttaaagaagccattgtcacccagtcagtgtncaggagt

SEQ ID NO: 675311 - DNA, 477 bp, Homo sapiens
  misc_feature (118)..(118): n is a, c, g, or t
  misc_feature (178)..(178): n is a, c, g, or t
  misc_feature (273)..(273): n is a, c, g, or t
ggggggggggggtgtgtgggggggggtgggggggtgggagggggggggggggagggggtgtgggggggtgtggggggtggggggatgggcggggtggggaggtgggggtgggtgggtngtgtaggggtggggggggtggggatgttaggtcttgcggtgggggggtgttgggggggtngggggagagggggggggggcgttgggggtgggccgggggtgtggtgtgggggggggggggtttggggggagtccgggggggtcttggggtagggntggcgttgagggtggggggggcgggcgtggtgggggcggcccgagtgtccctggggaagttggccccaagccaggggggggcggtccgccccccccattaaaacattaaaaccctcattcacagggggaaaccccctcagggtcaaacccctatccccccattttcctcctatccctcaacccggacatcattacgggggtttc

SEQ ID NO: 675312 - DNA, 517 bp, Homo sapiens
cagattattttaagctgaaggaacttgaggaatgacatgtacaggaagcactttttgacctttctctgaagcaggtcataaaatctaggaataattttctaaccttcttttgatgcaggtcataaaaccctcatgcgaaagatgccctccctatatccagaggaaaggataaagtatctgaacagttaggcctgtttaggcctaactttctccaatttgttacactgagctcatactttttctttgtcctattatatttctccatgactttcctctcttcatcaaaccaagcataaaaacattcaggtttaaccacttcttcagatcttcctttccttacaaaggctcccatgtcacataaaaaataaatgtgtatgtttttctcttgttaatctatcttttgttaccagggccccaagccaacgaacctaagatgggtagaaggaaaagatgtatttcctcctttatacttttaaaaattaaaaaaaaatcccaaaataaaaatctctgtttaaaa

SEQ ID NO: 675313 - DNA, 125 bp, Homo sapiens
actctagagcagcttatcactgggatgaggacgtcactgggatgtggaacgtcactgggatgaggaacgtcactgggatgaggaacgtcactgggatgaggaacgtcactgggcaggcggcgcct

SEQ ID NO: 675314 - DNA, 859 bp, Homo sapiens
ggcccgggacccgggctttctgtgaaacatggcggtaggctgggaccataacacaagcatgactatatgaaggaagaggaaggtttcctgaagatgaggcgatgaatcggaaaaaaactttaagttggtaaaagagtgggatgcctttccgagggttcctgagagctatgtagagacttcagccagtggaggtacagtttctctaatagcatttacaactatggttttattaaccataatggaattctcagtatatcaggatacatggatgaagtatgaatacgaggtagacaaggatttttctagcaaaattacgaattaatatagatattacgtgttgccatgaagtgtcaatatgtgtggagcggatgtatgggatttagcagaaacaatggtcgcatctgcagatggttagtttatgaaccaagagtatgtgatctttcaccacagcagaaagagtggcagaggatgttgaagtgatcagagtaggctacaagaagagcatcacttcaagatgtgatcttaaaaggtgtttaaaagttcataaaggctcttcaccaagagagatgattctcagggtctccaaaatgctgcgaattcaggcaatcattatgttacttacgtagcggggaatttcacctttacgggggaggcaatcacattcggggtcgtcacttggggcctgttaccaggattttacttctctgaaagatcacgtgttggaacggcccgcaattaccttaaggagcagaagtttatatccaccagtgccttttagtgggccgcatattttattacccccgtttgtgggaatacacacgccggcgttaataaacgggccagcagtaggtcacaatat

SEQ ID NO: 675315 - DNA, 335 bp, Homo sapiens
  misc_feature (230)..(230): n is a, c, g, or t
  misc_feature (246)..(246): n is a, c, g, or t
  misc_feature (276)..(276): n is a, c, g, or t
  misc_feature (324)..(324): n is a, c, g, or t
tgtcttcacttccttggtagtgtcttgtaatacacaaagttttaaatttttatgaagtcaaatgtatctacatttttctttggttgctcatgcttttggtgttgcatctaagaatccactgccaaatccaaggtcatgaagatttactcctatgttgtcttctaagaattttatagtttttgctattacataaggtctttgaggccattaagatctttggacttaacttntgtatatggatgtaangtcactgtcaaacatcattcttttgcattngggctgtccagggtatcccaggcattatttgttggaaatgcctacacntctttatattc

SEQ ID NO: 675316 - DNA, 132 bp, Homo sapiens
catgtatatacggtgcgcttccaccctcagcggatataatctcaagacaccttccgagcgtcagttcactacccttccaccctacagctccaccctcagcatgatgataatatcaatgacacctgccgagcc

SEQ ID NO: 675317 - DNA, 225 bp, Homo sapiens
  misc_feature (10)..(10): n is a, c, g, or t
  misc_feature (23)..(23): n is a, c, g, or t
  misc_feature (50)..(50): n is a, c, g, or t
  misc_feature (77)..(77): n is a, c, g, or t
  misc_feature (213)..(213): n is a, c, g, or t
  misc_feature (219)..(219): n is a, c, g, or t
ttgccccccnatcccgtaggggnccaaaagcccagctgcatttcccttgngaccgccactaactctgttttctgcanagttgtcttccctgcttctgtagtggtgagctgtgggaaacttttttttttttttttttgatgagtctcgtctgtcaccaggctggagtgcagtggcacaatctcggctcactgcaacctccgcctggtgacagancgagantccatc

SEQ ID NO: 675318 - DNA, 172 bp, Homo sapiens
atatatcttaaatactgtaagaggcatatctgagagtatactttaaaatatacaggcagtataaaataacttgtgcttggttggcaaatgaaaaatgatgcatgtattattattattttttttaaccaagcttgaatgtatccttactataagcttaaaaaaaaacaattct

SEQ ID NO: 675319 - DNA, 231 bp, Homo sapiens
  misc_feature (71)..(71): n is a, c, g, or t
cacccaagacgaaaccaccccaaagaaaaatcccagaacagaccaagaacaagcacggaaagggaggcagngaagaacagcctacaaaccaaaaaagcccagacccagacagagacacagccaaaacctaccagaggtacaaagaggagctggaaccatgcaaccggaagcgatcccaaacagcagaaaaagaaggaagcccccctaactcaataaaagaggccagcatca

SEQ ID NO: 675320 - DNA, 144 bp, Homo sapiens
tacctatctcgttaggcaagactttgcctctctcctagctactgagtataaatcctgtgtatagattcctctagaaaggcatacacaaggctcaacagcactagaatggcctctatgatactgcgacaaattcacgttgcaact

SEQ ID NO: 675321 - DNA, 452 bp, Homo sapiens
tcatcacggacaatcagtatgagatggtgtacggagaagtctttcaagaatgacggaataagagacctgtaataaaaaggaactgcagcaatctttgaaagacttccaaagaatgtatagagcacagtacgtaatacacttgccctgctccctctaccccttaccccacaaagtgcaactgacactcccacccagtctctgctccaccttacagaccacgtcacgtgtagtgtccattatgtgaagccctgttgtgccacagagtgtagccaggtcaccctgcagatagtcctagtgaacctcaccccgaggccctgcatgggccagaccctccatatgtacttggtccaactgcaactcatcatcggtgactggtaatcacaacatcgctgggccctttgggacctgcatgtaatgtgagaggctcaagaaagctcctcactgtggtaaat

SEQ ID NO: 675322 - DNA, 164 bp, Homo sapiens
ttttttttaaaactccccccccccccccctcccccccagggggggggggggttccgggccccccggggggggaagggggggcccctagggggggggcccccggccccttttcccggggaaggggggcagggccccccaaaaagggcccttggggggttttttta

SEQ ID NO: 675323 - DNA, 852 bp, Homo sapiens
cgggaggctgaagcaggagaatggcgtgaacctgggaggcggagcttgcagtgagcggagatcgcgccactgcactccagcctgggcgacagagcgagactccggctcaaaaaaaaaaagaaaaagaaaaagaaaaaagtggggtataagctgggcaaggtggctcatgctcgtaatcctagcactttgggggaccaaggcaggtggataacttgagcccatgttcaagaccagcctgaccaacatggagaaaccctgtctccactaaaaattacaaaattagccgggtgtggtggtgcatgcctgtaatcccagctactcggaagtttgagacgagaatctcttgaacccgggaggcggaggttgtggtgagccaagatcgtgccattggcactccagcctgggcaacaagagggaaactccgtttcaaaacaaaaaggaaccacgaaacgaatttgagaagtaacgcctcataatattgtgtccccagcttttaactttgaagctggttgcataatctggggaatagtcataattccatgtgttataacagtttaaaaagcctgcaaaagtgacttggcttgttactttctgcctcagattggactattttaaccaatatggtcgcgactagatcatagctcctagctgaataccttgagggtgtttcacaggttagggtctattaccacgaatttacacataaggccccaattttaacttgtatggatatcgtgatattgcctattctaataccatcttaatggcttaaatgctgccagataaggaatctgccaatttcacagttgaacacctttacacaggttgaaccatgaactcttccatgctcag

SEQ ID NO: 675324 - DNA, 158 bp, Homo sapiens
gacttcatttggtcaggctttgggaggaagtaaacagattgaaaaccaagtttgcttatcaacagactagtcaagataaattacgcaaaaatgagaaaagacactctgcttcattctgctagatttgaagtgaaaactttacagagacacaatgctga

SEQ ID NO: 675325 - DNA, 220 bp, Homo sapiens
agcggggaacaatcacttgaggaacatcacttaggaacaatcacttaggaacaatcacttaggaacaatcacttaggaacaatcacttaggaacaatcacttaacgggaagtgatggttcccgctaagtgatggtccccgttaagtgatggttcccgctaagtgatggttcccgctaagtgatggttcccgctaagggatggttcccgcggggtaccgag

SEQ ID NO: 675326 - DNA, 303 bp, Homo sapiens
  misc_feature (25)..(25): n is a, c, g, or t
  misc_feature (250)..(250): n is a, c, g, or t
  misc_feature (277)..(278): n is a, c, g, or t
gcccaggctggagtgcagtggtgtnatcttggtcactgaaacctccgcctcctgggttcaagtgattctcttcctcagcctcctgtaatcccagctactcgggaggctgaggcagaagaatcgcttgaacccaggagggggaggttacagtgagcggagatcgtgctactgcattgcagcctgggcgagagagcgagtctccatctcatataaaaaaaagaaaaagaaagaaagaaagcttgtctgttgngctgcctgcagggtggagttcagaggnnaaggtcaggagcctagtgacagctc

SEQ ID NO: 675327 - DNA, 409 bp, Homo sapiens
  misc_feature (12)..(12): n is a, c, g, or t
tgagacaggaantcagagccgagtgtggaagcagttggggtggggggtctctgacttgctcaggacaaactaggccaggggtttgcaaacgggttggcagagccctgaagtttcctaggggttgcctcaggagtccttggggagatgaagggggtggggagccgagcaggctgggcaattggccctcaaacagaacagctccccttgtagctgtcttacatatgggggttcagggtaagattttatttgcattaaggggttggctgctgaaaaaaagtgggaaaaccacggactagaccatcggctccaaatgggagtctgtgcttccttccccaggtatggagcacactcttcaccctaccctctaccacaggacacttgggatccagaggacacttggcatccagag

SEQ ID NO: 675328 - DNA, 220 bp, Homo sapiens
aagtctacaatgctctcgtttcctatgcatattgtctcatatgcatggtactgataacctagtgcgacgcagggatctcgtatagctgtaccatatccccaattcccacaatgctctcgttccctttcatattatcccatatccatggaaccgatagacatagatggcgacgcttgtagatcaggattcctgctagagtcagtcgcggtccgacgctcga

SEQ ID NO: 675329 - DNA, 404 bp, Homo sapiens
taaggatctctctgctcctcttcagtgggggctgtatacctgggtgaggaggagctcctgcatataccgatgggccaggaccaggcagcagaagaggccaatgcggtgctggggctggacacccgaggcgatcacattgtgatgctgtctgtgattcctggggaaagctgaggaccaagttgagttcagagcctagcggggtcacctgtggttgcttggaggagcggaggactcaaggtgccacgtccgagaaaagccttttctctctgggattgggctggagcacactttcctgacagagaagaggagtattacacagagccagaagttggggaatctgacgcagccccgaacagaggactcccaataaacactgaaagtctgaaatccccaaaggtgaactg

SEQ ID NO: 675330 - DNA, 829 bp, Homo sapiens
taacagtttaaattttaactatgtcatgtaagctataaatatttcactttaaaattagaatttaaaaaataaggaatttcaagagagctgacttaggcctggacatctgagtagacgtaacaaatcaacaaaggaataaaatcgtatgaatttcattctatattctgcctatacctacctgaatttgcccacctcctaacacaatttctgtctgtctgtcatctatctatctctcactcagtctctatctacacacacacaatatgtatgtatgtatgtgtatatatatgtgtgtgtgtgtgtgtatacacatatattttaaaagtttatttctcataacaattttcccagagggtgtaggcaaatatggtgcgtatgggcagagaaagaatggggagaaaaatcatatatacacacacacatatatatataatgtttggggccaaaacatgtaacatagctgagtttagattaaagaagtagggctgaatgaccaagcacaatatgagggcactgaaaagttacatagcaaaagacagtgatccagagaaagttgaaatttcgaggctgtgtgtgataaattcatcctccatcatctctcatcctccgtgcttccaacattatcagggttttgagatcatttccattctttttctgtactgagggttcattttcttgcttcaataaagtggattctctaatacctttgtcagaaggggtacataagaaatggtattccctctgggaaataaatgttgtgggagtacatattttttttgaagaattataggatatgggaccattattatctagaattcagaaatggtaa

SEQ ID NO: 675331 - DNA, 199 bp, Homo sapiens
cactcacttgtctacgtccggctgctttttgtctttttagtcagcagcggggttcacctgcgttgggctggcatggtctctctccgtgcacttgtgatcccaccacccttgcctcgccgcgtgctgggcttgcaggcgtgcgtgcagtggccgcggcctgcttatcttttttcattgtccagaactcatctcgtggcct

SEQ ID NO: 675332 - DNA, 1115 bp, Homo sapiens
ggcccctcgtctggcccccaccacgcctgggacgaggagcccaatgccactgctctgctctgcatgtactgatgacactctccgcacagctgatgtgactcatgacacatggtgcggtggtgtgtgtgtgtgtggtgtgtgcgggggtcggggctcccaaggagaacgccacagagaaaggtgcccttgagggagaactggtggggttggcgagaatctccaccactagaccacaaggagaggaggagagccccctgtgatgtccgcagcactagtggcgcctatcaccactccagctcttggccgcggcaccgaagagcgcgccggcgaatctctctttggcccgctggtctatagagcgcgcctttataacacataagagactcctcgtctcgcgctacgcgtgacgtgtgggcccccgtggtgccacaacgagcactcttatcaaccgcggagggggcgagagctgtcttcaacgcgggagagcgacccgcgggagaaagagaggagagggggcgaaagagggggagacgccgcgtgcggagaggggggggacaagcgagcgaaagcggcaagatatgagtggaaaggcccacagcaacgcccgagtctggagagcgcaacaggagcgagggcgaccgcggggggaccccacgaaagcgcagcgagagagagacaccaacggaccgcacccctacccgaagcggcccatgggtcgccccccccccgagcagacaggggacgatagcggggacacaccacaacaaaactctctctacacaacgggcgagcgcacacgagaaaggacgcccacacggggcgacccacacccctaccgcgggacaccacccaaaatcaccagcaaaaaagaacagacaactgagacaacacaagatagccccaagcaaagggcccactgtgtgacccaagcccccccaaagagtgtcgcctcatggactactcgggccccaccaacaagaatggggccccacagccacacaccagcaaaaatggcgaacggaaaaaacccacgaacgtacggcgcacaaggggaggagagaggcggaacaaaaaggggggcccacgatggtcagaacagaccgcgtgtgtggtga

SEQ ID NO: 675333 - DNA, 117 bp, Homo sapiens
aataggttaatttggcaaatataatacatgccttttttatcctcaaatgaacagtttcccaattacttcactctaacacctggtagtgctctttctcctgtgtgagacggtggttta

SEQ ID NO: 675334 - DNA, 447 bp, Homo sapiens
gagccggtaccgtagcgctgcatggtagactgcctgtaatctcagcacttggaaggcaaggtgggtggatacctgaggtcaagagttcgagaccagcctggtcaacatggtgaaaccccgtttctgctaaaaagacaaaaattggccaggcacggtggcatgtgcctgtcatcccagctactagggaagttgaggcaggagcatcgcttaaacccagaagccagaggttgcaatgagctgagatcccgctactgtactccagcctgggcgacagagtgagattctgtctttaaaaaaagaaaaagaaagaaagaaaagaaaagaaaaattgaaggggaagagagagaggaactgagatgaaaacactgagtgaggccaggcccagtggttgtaacatctgcagtcctagcacactgggaggctgaggcagtttaccatgcagcgcta

SEQ ID NO: 675335 - DNA, 1539 bp, Homo sapiens
  misc_feature (498)..(498): n is a, c, g, or t
  misc_feature (578)..(578): n is a, c, g, or t
  misc_feature (633)..(633): n is a, c, g, or t
  misc_feature (650)..(650): n is a, c, g, or t
gcttttttctcccaacacagtgcaagactccgtctcaaagaaaaaaaaaaaaaaaaattggaggtggttttattattggatttgtaggaatggcttatttttttcagaattacaaattctctttttctcaaattattattgtttttgaggactatttttctttccttagtcttggggcttgtgccttttcatttttcttaagtgggtgctctttcaaagaaacaagtttggtaatgtgtaagtggagcccagttttatctccatttttttcttttaatgggctcaggtgcttttgggtttgttggcaagaaaattcttttaccttacccattagaaattggccttggggtgcctttggctcaaaattcaattgtgaccattattattctgtggggatctcgtggaataactcatatttatatgtgctcattgtgactctatagtggtattctatattctcttatacaacaaagtctcccccacggtggctcttgtgantatatttggggggggcattataataagctatatattgggacaaatctctcaggatatttggggtaaaggttctcttaccnaatctctttttctccccaaggattcggctcttggagcttatctcaggggcgtccntttctcttttatattanacaggctttatatatattataagcgctttgggtccaaattctctttctcttttttaacaaaaaaaagagcgctctaaacgcgggggacattggcgcgacatcggcgggaaatgtcgcccatttggaacaatctctaattacagggctcccacacatttgcggggcggcacacagcactatttgcggcgacccaaaacaaaactcatttttttggggaaaacctcctttgcacaaatattaccccagttgggggacccatggggctttactatatatttttctcttgcccccactttttttatttgtggggcgggtctcttttctctacacacgcttttttttctttctccaaggccaactgggtgttgttcgtgggttggggttctgtcgggtgtgagacccaaaacggtctcttcgtgttactcatccctttgtcgcgtcacacatggtgttttttcgccctaaaaatatttcgtggggggggggaatagcccacatggtgacacaacagagaatcttcttcacattcacaccattttaaaacaggtaatttcgcgagggggcataatattaaaaaaggcgccttataaaaaaggggggacaattcgagacgggacccccggaaagcattgttggaaaaaaggagagagcacaaacaacggcggtagaatacaaacgagggggaaaacgaccggtggtaaagagagaccacaataaggaataaaccagcccgtgggtggataaaaacaagggagtcacagtttccgacaaaaagaaacgaacacagaaaagagggggggcgcagaacaactgacggccgaacgaccaacacatagaggtgctagcagaaaaacaacacgcacccagcgaacagagcagacacgaagaa

SEQ ID NO: 675336 - DNA, 600 bp, Homo sapiens
  misc_feature (161)..(161): n is a, c, g, or t
  misc_feature (224)..(224): n is a, c, g, or t
  misc_feature (468)..(468): n is a, c, g, or t
  misc_feature (533)..(533): n is a, c, g, or t
gtggttaaggaaaccctgaaaagcttcttggaaccctggaattttggggggctttttatatgaaggctttcaccaacgtaaggcatgactgattaactcactggccattggtgattcactcagccttcagcccctcccctccctggaggttgaggggtggngctggaagtcccaactctctaatcctgcctcgggctttcctgtttcaccctgaagctacctanggaaaccaagggggtagggtgacctaggggtcactggtaaccatctcattaacatgcgaaagacatcactcttgagattccaaaggtgttggggctctgtgccacgtaacacggatgaagagcaaatacatatttacaatatcacacacattacagacccccctgacttttgctctaaaggtctataccttgcctcatgctacctttcacctgattggcttccgctggccttgcgtcccctgangtgtagctcactgggtaggagggcccttaggaaagacagaaacctgagctgttttgtgggccacnccctgggaggaacttcaatttggtggtcacaaggagttgccgccccggcttttgtgatgggtggcct

SEQ ID NO: 675337 - DNA, 350 bp, Homo sapiens
ggcaaatatagccccaagaatcacaagattcgaggaccatgtaggtcttttacgtagcccaaatccataaattagtctcactttttgtatttatcgtttcatattaaaccctctatatcaaatgttcatcatgattttgtatgatttttataactattaaattcattttattagatttattctaaaattttttaatggtaaattcttaaactgtggaaaaccactgaaaggtgctatattaactattctcacaaagattatatacaagtattggaaaatactagagtttacggctaaacacataagtgtggaaaataaaaaatattataaaaaactaacaaaaaaaataa

SEQ ID NO: 675338 - DNA, 871 bp, Homo sapiens
gatatatattttagacagtgacatttcccagagagccccagagctctcaagctcctttctgtcagggtggggtggttcagcctgatcctgtcaccgtctgaggtgcctgctgtggcatcctcgtccccacatgcttactaatacattcccttccccatagaccatcaaaatcgtggaccaactggcctcttccttctccccgtgggaccaaaagtttaggggcctcagtcccctcaccgccactgaccctggtctagttcgtgtctcgtccgttcttccccctggcctgttctgtctctgaggctctgatgtcctccgatttcattccagtggctgggaggtcactgagtgctgcctctgccttcttgattgcctggactggccttgcttctacaagtatgctttctcccacagctgatggctggcaggaaccattaaattgttactacgggagggatgccgtgtggcagcgtggctgccccaggccagcagctgcgcttgactgtggctcaccatacatctgggtgcagccattccctggcagggtgccctcgtggcgttctcacttgttccattcccttcacgtgtgtgctaaggggtgggagtgcaggggcatgcgcagcaggggacggggcctggcctttacgcaatggggtcctggggcgcctttgaacggacaccgattgaagtttccgtacgagtctgaaagactccaacgaaattggtcccatttgctgcacctgacacacgacacacacccaccacacgactagcggagcgatcccccaaaggacacccccacccttggaccctcgggaaggaacccacgaccgcgggaccactggggggccaaccgcccgcagcacccaat

SEQ ID NO: 675339 - DNA, 875 bp, Homo sapiens
  misc_feature (275)..(275): n is a, c, g, or t
gatggagcaggtctcctggtcctcccggagcacggggggcggggagctccagctacttacatcaagcgcccttgggggtttccaactggtattctgtggttctcgtgggtgtcttattccccttttgccgtgggggcgggggctggcaggggaacatacctgcttgatctacatcactcgggtctcatgtctgaagggcctgtctcacctggacactctacctgggcctgggcgctcgagaatctgaggcgaccttcatcaccctccatctgccncaatgaccgcaggggtgaccccgtcaccaaggctggctgggcaggatcccacggacgtaggaccccaggtaggacgcagtgggcttcccccaggaaagagcacgagccagcactgcctgcctagggagggcacccgactagcaggcatggctggtggctaccgtttaaagaaatctttgtccatgtgggagtgggaggtgcttcgccctatgctggctgcgtaagccagcgtccatggctcttaccgaggcagtctgtaacagccgtgaggggccaccatgatgatggaggaacctggcggctcagaggaccctgaggtcaccgggcatccgaggcagagggaggggagaaggggagcatcctctggaaggatgatccgaacgtgaagggtgcagaacctgagagcgcgacaggcgagccgaatcccctacctggagggtcgtgcaacgaggaacatggcccggcaaagaaaggcccctgccaatgaggccggggaacctgggaccccgggaagaggcggcacacgccacgagcatccacaggtgccacactgccggggcccaagaaccgcgcgacatacaatgggccggcgcaaggccg

SEQ ID NO: 675340 - DNA, 401 bp, Homo sapiens
  misc_feature (93)..(93): n is a, c, g, or t
  misc_feature (131)..(131): n is a, c, g, or t
  misc_feature (157)..(157): n is a, c, g, or t
  misc_feature (189)..(189): n is a, c, g, or t
  misc_feature (228)..(228): n is a, c, g, or t
  misc_feature (241)..(241): n is a, c, g, or t
agccaaagtcccaattatgaaaactttggaaaattttccagaaaaccccctaaaatgtttcagcaacccaggccaaaagagaggccctggaancccaaggtgagaggaaactttaaaagttacacttatgnccaggcacggtggctcacaccgtaantccagcactttgggagactgaaatgggtggancacttgaggccaggagttcaggaccagcctggtcaatanggtgaaaccccanctctactaaaaatacaaaaattagcctggtgtggtggtgcatacctgtaatcccagccacttggcaggctgagacatgagaatcacttgcacccaggagacagaggctgcagtgagtgagatcatcccactgcactccaacctagacaacagagtgacac

SEQ ID NO: 675341 - DNA, 782 bp, Homo sapiens
  misc_feature (10)..(11): n is a, c, g, or t
  misc_feature (15)..(15): n is a, c, g, or t
  misc_feature (114)..(114): n is a, c, g, or t
  misc_feature (258)..(258): n is a, c, g, or t
  misc_feature (262)..(262): n is a, c, g, or t
  misc_feature (307)..(308): n is a, c, g, or t
  misc_feature (345)..(346): n is a, c, g, or t
  misc_feature (405)..(405): n is a, c, g, or t
  misc_feature (413)..(414): n is a, c, g, or t
  misc_feature (418)..(418): n is a, c, g, or t
  misc_feature (448)..(448): n is a, c, g, or t
  misc_feature (454)..(454): n is a, c, g, or t
  misc_feature (456)..(456): n is a, c, g, or t
  misc_feature (476)..(476): n is a, c, g, or t
  misc_feature (479)..(479): n is a, c, g, or t
  misc_feature (482)..(482): n is a, c, g, or t
  misc_feature (504)..(505): n is a, c, g, or t
  misc_feature (530)..(530): n is a, c, g, or t
  misc_feature (555)..(555): n is a, c, g, or t
  misc_feature (564)..(564): n is a, c, g, or t
  misc_feature (589)..(589): n is a, c, g, or t
  misc_feature (608)..(608): n is a, c, g, or t
  misc_feature (610)..(610): n is a, c, g, or t
  misc_feature (711)..(712): n is a, c, g, or t
  misc_feature (716)..(717): n is a, c, g, or t
agcgggagcnngtcnccgctggggccgggccgggcgggagtgcaggggacgtgagggcgcaagggccgggacatggggcccgccagccccgctgctcgcggtctaagtcgccgnccgggccagcctgccgctgccgctgctgctgccactattgctgctgcttctgcgcgcgcagcccgccatcgggagcctggccggtgggagccccggcgcggccgaggccccggggtcggcccaggtggctggactatgcgggcngccntaacccttcagccgggacctgcgcaccggccgctgggaaccagannccacagcgctctcgacgctgtctccgggacccgcagnngcgtgctggagtactgcagacagatgtacccggagctgcagattgcacgtgtggagcanggctacgnnaggnccatccccatggagcgctggtgcgggggtncccggngncggcgagctgcgcccacccncancancaggttgtgcccttccgctgcnntgcctggtgaatttgtgagtgaggncctgctggtgcctgaaggctgccgngttcttgcnccaggagcgcatggaccaatgtganagttcaacccggaggctcngnaggcacaggaggcctgcaggctcccagggcctcatcctgcaacggctcgggcattgctcttaccctgtggctcggatcggttccgggtgtggatatgtgtnnctgnncccctccaaggtaccccgaccatctgggacagcagtttggtgaccctcaaccggtcctgggcccg

SEQ ID NO: 675342 - DNA, 171 bp, Homo sapiens
gcagtatccaagaggctccttcggccttcttcctcttctgctctgagtactcgccattaaatcaaaggagaacatcctggcctgtccattggtgatgatactcagaaatggagatattataggaaaaagaaatcctttggaattttaactaaaatcactgcatatgggaaa

SEQ ID NO: 675343 - DNA, 765 bp, Homo sapiens
  misc_feature (10)..(11): n is a, c, g, or t
  misc_feature (15)..(15): n is a, c, g, or t
  misc_feature (114)..(114): n is a, c, g, or t
  misc_feature (258)..(258): n is a, c, g, or t
  misc_feature (262)..(262): n is a, c, g, or t
agcgggagcnngtcnccgctggggccgggccgggcgggagtgcaggggacgtgagggcgcaagggccgggacatggggcccgccagccccgctgctcgcggtctaagtcgccgnccgggccagcctgccgctgccgctgctgctgccactattgctgctgcttctgcgcgcgcagcccgccatcgggagcctggccggtgggagccccggcgcggccgaggccccggggtcggcccaggtggctggactatgcgggcngccntaacccttcagccgggacctgacgtcacctggctcgtcgtagggaatcgcaagaccacaacatggcgtctctacgacctgtgtgtctaccggggacctcgcgatgcagcagtgcctggtagatacatagcaggacaacgatagtatcctcggaagtctgacaagatttgggcacgtagtagtgatggcagggctacggcaagggcgcaatcccccacatgggaagacgtcatgagttgcggaggggtttcaccaggaaggcgggcgtgcatggagacacgcagaacactccaacacaacgcaagggattgtgtcaccatttccagacttgcacctgccctggcgttgaaacattcttggtgaaggtgacgtgcgcccatggcatgggttggccttggaaaggtgcgtggcccggatgtcctttggcacccgaggcagcggccagtgtggacccaagatgtcgagggagtttccacaccccagggagggcattcaagggaacgg

SEQ ID NO: 675344 - DNA, 1581 bp, Homo sapiens
tcacggggggcgagcccccacacaaactaggggggcgtatatatatattctgcgggccaccctcttttggtcgtgagtagtgtgccccccaccaactgtgtgtcgactacctatcagacggggggtggtgttgtgaggactcagactaactgtgtgagagcaatgttgttcgtgactcagcataccgctcgccttttcctcacaaagcgtttttcatctttctcgagccacatcgtttgggcctttctgctggtaggagaacaccagcaacaagacttgtggtattgttaggccaccagccacccctggtgggcaccgacaggtggttactagtattaccacaaggggaagcagaaaacacctttcggggggggtacattcccgttgtggataaaggggaagctcttctaatgtgggtcccccaccccaagagtgtgccgaaagaatgacacccatcatttaagttgtgctgtccaaacccctcctcagagagagagtcgtctgttgtgggaagattttggcgctcccctcccttctcctggggggggaacataattgtctcgtggcgccggtttgtgattatggccccccgcccggggggcgggtttttcttctcccacaagggaaaacatgatgtgtgagtaccccttgtgccgcatttattattctttggtggcgccgcattggtcctcaaaaaagggccttttgttggtggggacgaaaaccatgggtctgaattctcccccgtgggaggagcctttggtttaagccgggggaggagaatgacgttctaaccatttgtggcgaaattagtgcagcgttattctccgacgattgtttctgcgccacacacaggtttgtgcgccaaacaacgtgggtacaacactggggttggggagcaccctggagacgccgtgtcctccgcttttttaatagaggtgatatacacccttgtggcccacaaagtgattgggagattgagacactccacaagaaaaagtgtttgggttgtagaaaacacacgcgccgctttcgcgagggggggcccccccctctcaaaagggggcactccccccggggggtaaacaccctgagggcaccccacggttggttcttccctctcttgaacttttcacaaacacagcggaacacacccacactttctcttccacacctcttggaaccccttgggggcttggcactttggccccttcaacgagccaccttgtgtcaaagactcactttcactggtatatgagcacaccgagaattttgggtatacacagcacaacacgggttggtggagacctcacatggcccacacaacatggcctccaaaggagagttaagagacccctggagccacccagccccacgcaagaggcaccaacagagggaaagaagagagagccctcacctgctggggagagtccctgccaacacgctcagtgcccccacccaacacctgaatttcccctcctcacacagttgtccatgtagaccccttgtaagaggggaggggcctagggagccgcacccttgtcatgtaccatccaatataagtaccctgtgctcaaccca

SEQ ID NO: 675345 - DNA, 893 bp, Homo sapiens
  misc_feature (95)..(95): n is a, c, g, or t
  misc_feature (97)..(97): n is a, c, g, or t
  misc_feature (108)..(109): n is a, c, g, or t
  misc_feature (131)..(131): n is a, c, g, or t
  misc_feature (162)..(162): n is a, c, g, or t
  misc_feature (165)..(165): n is a, c, g, or t
  misc_feature (175)..(175): n is a, c, g, or t
  misc_feature (182)..(182): n is a, c, g, or t
  misc_feature (185)..(185): n is a, c, g, or t
  misc_feature (195)..(195): n is a, c, g, or t
  misc_feature (197)..(197): n is a, c, g, or t
  misc_feature (200)..(201): n is a, c, g, or t
  misc_feature (209)..(209): n is a, c, g, or t
  misc_feature (220)..(220): n is a, c, g, or t
  misc_feature (224)..(224): n is a, c, g, or t
  misc_feature (227)..(229): n is a, c, g, or t
  misc_feature (253)..(253): n is a, c, g, or t
  misc_feature (258)..(258): n is a, c, g, or t
  misc_feature (264)..(264): n is a, c, g, or t
  misc_feature (267)..(267): n is a, c, g, or t
  misc_feature (271)..(271): n is a, c, g, or t
  misc_feature (275)..(275): n is a, c, g, or t
  misc_feature (278)..(278): n is a, c, g, or t
  misc_feature (284)..(284): n is a, c, g, or t
  misc_feature (289)..(289): n is a, c, g, or t
  misc_feature (293)..(293): n is a, c, g, or t
  misc_feature (301)..(302): n is a, c, g, or t
  misc_feature (306)..(306): n is a, c, g, or t
ggcgccagtcccttgcggcgggggagagaaatcgcttggacttcggggcggcctcggacggccatgggctttaccctgtactcactgctgcaggngncctgtctggtnnaaacgccatcgcagtgctgcancgaaggagcgattcctcaagaacattggtgnggnaacaagaccnagggacntgnggtgatttgncngannggagccgnggaattaaatncacnagnnnaattgaaccttaatcgatctgtanagaanccggtngantgangagntgnccattntgatnattnaggtacannctcnaattgtgcaattgtgtggttacttttgcacttataatttgggagtggaactactcaggtgggaggaaaaagtgggaggacctccaggaaagaaggggactatttgcccagggtaggaaagggttcactttaactttgtgggtcatttcacttgtggacaattacttaataaatcttaaaggcttggagttaggacctggtggcatccttggggttccaacaccactcttggtttacagcagggctttgaagaaaattttaagaacaccgagggctttccctaattgaactgcgtggtaacaatattagttcgtaacacgttgtgtgggcgccttggtacggttccacttttaccacaagaaggattccgggattccattggaacaggcggcaggtcacatctcttcaagggaggcgttgggaaatatatctggagtgggccccgagggggttaacaactacggtcaagctccaagtggctggtggggtggacagcattgtgttcacccaccgggtgtgcacagacctgtggtgcggcatccctactcttatcaaagcgaataattgtgccataatcctcttccacta

SEQ ID NO: 675346 - DNA, 291 bp, Homo sapiens
cctgtgtgctcagctctcccctctggcagtgcgcacccaggagatggaatcccctgcccgcccagctcatgcccagctgtcctagtgttgggcatgtgggtggacccaagcttgtcttgctgcctgagttccagagagggaggaccctgggtgtggagggtgagggattcttgttgaagttttgtaaatacaagcccgagtgcttacagacgtccttgtggtgatccatctacgagtctgaccgtgcatgtgcatgcaatgctatgtgcacttgtgcctgtctgtatttac

SEQ ID NO: 675347 - DNA, 134 bp, Homo sapiens
tgcctgagtaggtggctatgtgctagagggcaagagtggagtctatcttaggaaaatcaaggcccgcaaaggcatataaatccttgtatgtcttcacccatgtaataaaggtgtttactgtcttgttaaacaac

SEQ ID NO: 675348 - DNA, 404 bp, Homo sapiens
  misc_feature (372)..(372): n is a, c, g, or t
  misc_feature (392)..(392): n is a, c, g, or t
ttcggcacagccatctggtcatttaaggtcttctctacactcttattctagttatccatttgtatcacttttttcaaggtttttagcttccttgtgatgggttagaacatgctcctttagctcggagaagtttgttattactgaccctctgaagcctacttctgtcaacttgtcaaactcattcttcatccagttttgtttctttgctggcaaggagctgtgattctttggataagaggcactctggtttttggaattttcagcttctctgctctgctttctccccatctttgtgggtttttgtttgggtgacctacagatgggggttttgggtgtaggatgtggctctttgttgatgttgatgctattccnttctgtttgttagttttccntctaacagtcgc

SEQ ID NO: 675349 - DNA, 163 bp, Homo sapiens
acagcactgagtcgtacaggatttagaacatgacatggaagagatcaatgctacgatggaatacattgaataaaaaggtcgcacaaagaattgcacagctacaggcaagctttgttagcattagtggggaagtttcaagtatgccttggcagccatatgctca

SEQ ID NO: 675350 - DNA, 240 bp, Homo sapiens
  misc_feature (162)..(162): n is a, c, g, or t
atattctattatatatataatgaacccattcataggatgttttttcagtttacttttgtaatccctctccatcgggattttttatttcatagtatgtcctgaaccattattctaggcccctgtcatgggataatttggaaaaaatagagaatgagtcccgtnctcccatccataaataactcaaaattttttccctttttaggatgaagaatatgaatatagttctgttacgtaatattt

SEQ ID NO: 675351 - DNA, 196 bp, Homo sapiens
tgggcagcaacacttgcagccaagagccaggcttggagcccctggaacctgaatccaccctgatgtcaattgttgggtgccccaactctgctcaatcctgaatcctgtgggattgaccaggggcccgccctctgctccacccctccagggacggaaatcaccggaacttttgggggaaccccgtatttgtcccgtg

SEQ ID NO: 675352 - DNA, 164 bp, Homo sapiens
attcaaacgttgatgcgtctctctctctccttctttctttgctgtttgtttctttctttgcttttctttctttcttcttgctttcttgccttctttcctgtctttctttctttccttccttctctcgctccatttcacacatactaagttgcccgccaatcgaa

SEQ ID NO: 675353 - DNA, 4240 bp, Homo sapiens
tagttcaactttcccatgagagtttttggaggaggtgtctcagggttgtcagggtcggccccgcctgcctctcaggtgtgtgtgatttcaggtgattacgtttttgaagaagaaggacaagttcatcagcctggtgttgaagcacatcggcacctcagcgcttatggacctgctgctgcgcctggtcagctgtgtggagccagccgggctccggcaggacgtcctgcacgtgagtgcgggagttccccccgttcccgagggcaggggtgctgcaggaagccagctggttaagtgcaggagctcagagcaccagggcgcccggcccccatctctccacctagcgtgcatttctccgtggggctgttaggggttcttgtcaaggattgtggcctgtaccttttccactgtcccgacttaactcgctcagaagcacagagcagagaggtcccttctccccgcagtctccagcctccggctctgtgaagaggccgaaatggactttcctcgcctgcctccttttcccctgccagcgcccacccctgtggcttagagcaggaggtcagtgaggtgctagccctgcgtccaggcctgtgcctgccaggagagccccggtggacagcagttccctgcagagccccgttgtttaccctggagtgtggatgcgtctgttctgatggtgtttagtcagtgagaacaggtgctacagttcccgaaaagaggaggatgccccccagagaagcccaggaaatccgtgctgacaaacttctgctcactgttcggccagctttgtttgtggtgaagtttaaaatagagtagagtaaaccctgaggcgctctgcctgtttcccagctcctggaatcaggactcatccgatgaccactctcactcttaggttagtaatgcttcctcagggaggagcttctcaccaggaatgactgaccgccaccaacctttacacagtggacacaggatcagtactagctgtggtcatagccgttagtgggaagcctgcagaactgtacgtcaggcagccttttagctgctttacttgattcacttcacgaagtagccacggggggacagctcatcccatttttggataaggaatttaggcacagggcgcagcagtgcggtgcggtagtcaggtacggcccaggcctgccagaccccgacactcacactgggcccccgttgcccttgagctttaccccacagtgttcgtgtagcctctccagggtggagttactcttcctcaacatgggaaggccccagtgctgcagggaacagctgaggcttctctggcttcagcatccagcggggctcctgagctatagcttgtgtggctcatttgcaccctggtccttaagagagaagtcctgaagacagagcttacatacgcaccattaggacagagggatggtggtcaccctttatcatcttttgagccactcccagaacctcccagaactcagtcattgtgtgttatgtgtgttctttctgggtctggggtgtgtcaggcaaagagtctatattctagaaaacgggtgcagtgctgcaccaaaggggaaaggttcctgttgtttacttagacttgagcagcgacactgaaaggcctctttttctctttcagtggctgaatgaagagaaggtcatccagaggcttgtggagttgatccacccgagccaggatgaagatgtgagtgtgctgcttaccgagcttcgtgcatcagtccaggcctgtgctgccaggtcacccactgctgcgggccagggggcgagggagggcaagtcatccctttcctaagatgaggatcggttaggtacttttctttctttaatcaagcactgacttctaggctggatttttttttctttttttttttgagatggcgtttcgctcttgttgcctgggctggagtgcagtggtgcagtctcggctcaccgcaacctccgcctcttgggttcaagcaattctcctgctcacccagtcgggtgagccaccacacccagcctctaggctgttttcttcttgttgttgttgttgtttaaatagagatgaggtctcactacattgctcaggctggtctcaaaaacctggcctcaagtgatcctcctacctcagcctcctaaagtgctgtggttgcaggagtgagccaccatgcctggcctacacttttttttcttaactgaaaaataatctatgtgtattataaaaataggacaggcgcggtggctcatgcctgtaatcccagcacttggggaggctgaggcgggccgatcacttgaggtcaggagttttgagaccagcctggccaacgtggcgaaaccctgtctctactaaaaattagcgaagtgtggtgtcaggtgcctgtaatcccagccactcaggaagctgaggcacaagaatcacttgaacccaggaaggggagcttgcagtgagccgagatcacaccactgtgctccagcctgggcgacagtgagattctgtctcaacaaacaagcaaaccaaagaacaattccagtagaattgtatcagtcgtctgtgaccgaatagcaaattaccctgaaatgtagttgcttatggcaagtatttttacctgtagcagtatcagtttctgtggatcaggcgtctgaatgtggcttagtggctcttctgttgagtctcacaaaatacagtcatctcagagctccactggggtagaggccagctccatggtcacagatggcttggcagcatccagttcctcagggctgtgggccgaggccgccctcagcattgcaccacatgggcgtctccacagggcagcacacaacgtggagctgagctttcccctcactcttaatgtatttggctctttagacctgggtggctgggtccagcccacactaaaagagatgggggctataaaggcatgaactccaggacgggattgctaggggccccctaggagccacccaccctggaagcacctaaggtgacaatggggctccctgtggtgatccctgttgagagtttggggtatatcccagtaggccttttcctagcattacacataccgatctatacatacaaccacgtgtccttggcagattggaaaacagtggtgctgactcgtgtctgaggccttcaccgctgcctggccaaccaccctactttgttctccatcagcccacagggctgatcagacagacaggagaggccacgttggcgtctgtaggaaacaaggaggccgccctgcctgatgttggcgtccgtaggaagcaaggaggccgccctgcctgagaactggagcccacccatgcatgtgggtgttgtgggctgatggcctgtcctgggtcccaaaggcagacctgagagctaatctggctgctttcttttctccctaaaatactcctgtgagtgtttgctttccctcagtcttcccacagcatgtgaaccaatgctgcagggagtcaggggttatttctctcttaatcacatttgtcttacctacagaacagccctacattgtcagcaggggcacgttcccatcacggattgcgtgttaatgtttccctagaaaagatgagtcctctgttttcttggtagcaacttccctattttcattagcttacaggactcattctgaataatagcagctacttattaccacatttaaaatatagtatcagtaacatggccacatattcagcatatttcaaaacgtggatcacaggtatagcccagtatctgcattgcatatctgaccattattagccctgttttgaattcctgaagatagttcaatgcagctttaaaaaaaagaaaactctaaccagatctacattttgacgacagaaaaggcagacacaggcttctttgaaatgaagctgttgtctggaatctttctttgtaggaaactggtttagagaaagtcccacatctttttcttttttttttttgagatggagtctcgctctgtcacccaggctggagtgcagtggtgcgatcttggctcactgcaagctccttctcccaggttcaagccattctcctgccctcagcctcccgagtagctgggactacaggcacccgccaccacgcccggctaattttttgtatttttagtagagatggggtttcaccgtgttagccaggatggtcttgatctcctgacctgatgatctgcctgccttggcctcccaaagtgctaggattacaggcctgagccattgtgcctggccaaaagtcccacatctt

SEQ ID NO: 675354 - DNA, 311 bp, Homo sapiens
atatggatgccatgtctcatacacatccttctctgtctagtacccaatcaatctcctcatcatcattatcaatctcttttttcacaatctttcattgcctatatacgatctgtttttttaactcgaacctactgttctttgtcttaattgcctcttcatattacccggtagtctaatcaacaatccttaagacctagactggatgaagctttgccactttccctggtgtacattgcctctttgtcttcaccaatttgatccatactctcatgacttgaaggattatatgtaattactgtctgtgcatggtc

SEQ ID NO: 675355 - DNA, 159 bp, Homo sapiens
taaatagtcgagattgacgaactgacagcctacagaaagaggaaccataatggactccaataggcagcagcagcgttttgcagagacagtgatcgtagacagtatggtagacaaacatacgggtactaccagtgtctactccaacacttgactataata

SEQ ID NO: 675356 - DNA, 203 bp, Homo sapiens
gatatttatatgataggcagcacacttaaaaatacaaaaattagccgggtatggtggcatgcgcctttagtcccagctatttaaaaggctgaggcagcctcgcttaagcccaggagttcaaggtaagaggattatttgagcacgggagttcaggctgtagtgagctgggattgcgccactgtattccagcctgggagatagaa

SEQ ID NO: 675357 - DNA, 1050 bp, Homo sapiens
  misc_feature (861)..(861): n is a, c, g, or t
  misc_feature (906)..(907): n is a, c, g, or t
  misc_feature (909)..(909): n is a, c, g, or t
  misc_feature (916)..(916): n is a, c, g, or t
  misc_feature (930)..(931): n is a, c, g, or t
  misc_feature (936)..(936): n is a, c, g, or t
  misc_feature (938)..(938): n is a, c, g, or t
  misc_feature (945)..(945): n is a, c, g, or t
  misc_feature (951)..(951): n is a, c, g, or t
  misc_feature (956)..(956): n is a, c, g, or t
  misc_feature (963)..(963): n is a, c, g, or t
  misc_feature (970)..(970): n is a, c, g, or t
  misc_feature (974)..(974): n is a, c, g, or t
  misc_feature (979)..(979): n is a, c, g, or t
  misc_feature (994)..(994): n is a, c, g, or t
  misc_feature (1006)..(1006): n is a, c, g, or t
  misc_feature (1011)..(1011): n is a, c, g, or t
  misc_feature (1022)..(1022): n is a, c, g, or t
  misc_feature (1025)..(1025): n is a, c, g, or t
  misc_feature (1028)..(1028): n is a, c, g, or t
  misc_feature (1030)..(1030): n is a, c, g, or t
  misc_feature (1046)..(1046): n is a, c, g, or t
agcgagcgggccgccgccattttggagcgatcggagtgccgcccgcggccccgagtcggtctcgagccgccggccggccgtgccggtgtccgtaggcgctgcgccctcggccgggcccatgtgtgtgcggcccgcccgaggccgcccgggctttgcctccaccagcgccctggcctccgctcgggcctccacacgggcctccgaagagctgccgcgacgcccggcccgcagggcaggtaaagagattataaatcttccactgaatgaaaaaaattttcttaaagctgcatatactccaagaaaaaaaccacaaatgtttttctgttttgtggctgaatgaagagaaggtcatccagaggcttgtggagttgatccacccgagccaggatgaagataggcagtcaaatgcttctcagactctctgtgacatagttaggctgggcagagaccagggcagtcagctgcaagaggctctggagccagacccgctcctcacagcgctggagtcgcaggactgtgtggagcagcttctgaagaacatgtttgatggagaccggacggagagctgcctcgtcagtgggactcaggtgttactcaccttgctggaaaccaggcgggttgggacagagggcttggtggactccttttctcagggactggaaaggtcatacgctgtcagcagcagcgtactacacggcatcgagcctcggctgaaggacttccaccagctcctgctcaacccgcccaagaagaaagcgatcctgaacaccattggtgtgctggaggagcccctggggaatgcccgtctgcatggcgcccgctcatggcagcactgttgacacaaacacacccaggatcaancaggagctctgccggtcaacacgatggacttactgctggacttgnncntttaagntacacctggaatannttttngnacttccnagtggnactantgatagncggtatntctncccangctgcccgtgagagnaggacaaagccngggancgagagcaggnggngcncncatgaacgggaccggnccgg

SEQ ID NO: 675358 - DNA, 823 bp, Homo sapiens
ggctccgccctctctgtcttctctgcagtgggagcagctctcctgccaagtcttcaccccctgaaaatgttcgcctgctccaatgttgtgtctccactccctccttggtcaagagcacctcacatgctgcgtgagccgtacgctatcgtgcagatggtgctgaaaggaccggagaatactgacagatgagagcctcagcagctttggtagtctaatgtcccctttacctcgattggttcatagccaaagctttccagaccagcgccatttcaggggacatcgacacggcagccaagtttctgtgtggagctggggctgccacaggttgggcgtggcctggtactgggggctggcatcggaactgtgtcgggagcctcatcatttggttttgccaggaacccttctctgaagcgacagttcttctcctacgccattctgggcttgccctctcggaggccatggcgctcttttgtctgatggtagcctttctcatcctcttgtgccatggtgagggagccgtctccacctcccataggttctcccgcgtcttgttggcccgtgttgttccttttcttaatacctccccagggagccctgaggcaacgtgctggctcagggcttttgcccgacgaagagaccacttaattctgtctcaaaccgcgatagagacagagaaagatgtgggggcggcgagcaccggaaagtttgaacaccggtttggggccgcccaagtaggacgcggccagcggccaaggaccgggcgaaacgggggtcccaaaaagccggggcccgttgcaccccggtgggcctggctacggcccaa

SEQ ID NO: 675359 - DNA, 744 bp, Homo sapiens
  misc_feature (198)..(198): n is a, c, g, or t
  misc_feature (251)..(251): n is a, c, g, or t
gggagagacacctgggcgcattcgcctaacagaactacagagcaagcaagagcattgaggggcatgtcgagcacgctggtgggtgggggacagtgtggtgaaggagggcaaaggagggggttagcccagaggagaacctggggaggcaggtcctggagctgggggtgcagcctcagagctgttgagcagctgggaagnctgctaactttgtgagcccaacctggagaggtctgatgggaatggttactggngagggccccacatcctgagctctgggaatcttgtgtgttcatgctgcagatggacttccaggacttgggtctagtgttgctgagggtggatctgcagaggtgagagaaatgacccctttggacttgggtctagtgttgctgaaggtggatttgcaagggtgagagacgtgacccctttgccctcgttgcagctctgcggccgtcacgatgttctggaagtttgacttgaacaccacgtcccatgttgacaagctgctggacaaggagcatgtgacgctgcaggagttaatggatgaagatgacatcttgcaggagtgtaaggctcagaaccagaagctgctggacttcctgtgcaggcagcagtgcatggaggagctggtgagcctcatcacacaggatccgcccctggacatggaggagaaggtccgcttcaacgtatgtacctaagctgtgacgtccatacccagcagtctcagcagccgcagcagttcct

SEQ ID NO: 675360 - DNA, 569 bp, Homo sapiens
tcgagtctgaccagtactggtcccactctgtcatagattttacatccgaagctgactaattacatctctccacccggcagctccaaattcgatatgggcggaggatgggctctgtctcattcattgctgtaatccaagtacttagtagattcctgggaccagcaagattttctgataatattggtggaattaagatgttgcagaattgaagccccaaagtgccagaaggaaccaagagctataaatagctttctaacagccttccacaccagggtgaggggcatgcagagatcttcacacacacagaatgccagaaaaacaattactacctcattatcaggaatgctaaagcagtcacatctcactcaactgagaataggcctttctgggcccccaaattccagtgacccagacctcagggaagattgccagaactcaagaagaggccaaagccactggggtacaggcgagggaggctgcgtaaggcatgtcagaacaggtggtgtacttagaacagagcagtgcacctttgatgtaatattatttgcaatactgttgctgtccacctg

SEQ ID NO: 675361 - DNA, 152 bp, Homo sapiens
cagacagctgcagattgtggagcgtggctaatggagctgctggtgtactacagacactgcaccgtttagttttgaaggccactttgaaccagttggctttccaggaactcttcagcaaggtgtagcgtggtccgatttggagcctggttccg

SEQ ID NO: 675362 - DNA, 1656 bp, Homo sapiens
  misc_feature (1467)..(1467): n is a, c, g, or t
  misc_feature (1512)..(1513): n is a, c, g, or t
  misc_feature (1515)..(1515): n is a, c, g, or t
  misc_feature (1522)..(1522): n is a, c, g, or t
  misc_feature (1536)..(1537): n is a, c, g, or t
  misc_feature (1542)..(1542): n is a, c, g, or t
  misc_feature (1544)..(1544): n is a, c, g, or t
  misc_feature (1551)..(1551): n is a, c, g, or t
  misc_feature (1557)..(1557): n is a, c, g, or t
  misc_feature (1562)..(1562): n is a, c, g, or t
  misc_feature (1569)..(1569): n is a, c, g, or t
  misc_feature (1576)..(1576): n is a, c, g, or t
  misc_feature (1580)..(1580): n is a, c, g, or t
  misc_feature (1585)..(1585): n is a, c, g, or t
  misc_feature (1600)..(1600): n is a, c, g, or t
  misc_feature (1612)..(1612): n is a, c, g, or t
  misc_feature (1617)..(1617): n is a, c, g, or t
  misc_feature (1628)..(1628): n is a, c, g, or t
  misc_feature (1631)..(1631): n is a, c, g, or t
  misc_feature (1634)..(1634): n is a, c, g, or t
  misc_feature (1636)..(1636): n is a, c, g, or t
  misc_feature (1652)..(1652): n is a, c, g, or t
agcgagcgggccgccgccattttggagcgatcggagtgccgcccgcggccccgagtcggtctcgagccgccggccggccgtgccggtgtccgtaggcgctgcgccctcggccgggcccatgtgtgtgcggcccgcccgaggccgcccgggctttgcctccaccagcgccctggcctccgctcgggcctccacacgggcctccgaagagctgccgcgacgcccggcccgcagggcaggtaaagagattataaatcttccactgaatgaaaaaaattttcttaaagctgcatatactccaagaaaaaaaccacaaatgtttttctgttttgcctgaatacatgatttaaacaagagatttccacagaagctctgcggccgtcacgatgttctggaagtttgacttgaacaccacgtcccatgttgacaagctgctggacaaggagcatgtgacgctgcaggagttaatggatgaagatgacatcttgcaggagtgtaaggctcagaaccagaagctgctggacttcctgtgcaggcagcagtgcatggaggagctggtgagcctcatcacacaggatccgcccctggacatggaggagaaggtccgcttcaaatatccaaacacagcctgtgagcttctgacttgtgatgtgccgcagatcagcgaccgcctcggtggggacgagagcctgctgagcctcctgtacgacttcttggaccatgagccgcctctcaatcctctgctcgccagttttttcagcaagaccattggcaatctcattgcaagaaaaaccgaacaggtgattacgtttttgaagaagaaggacaagttcatcagcctggtgttgaagcacatcggcacctcagcgcttatggacctgctgctgcgcctggtcagctgtgtggagccagccgggctccggcaggacgtcctgcactggctgaatgaagagaaggtcatccagaggcttgtggagttgatccacccgagccaggatgaagataggcagtcaaatgcttctcagactctctgtgacatagttaggctgggcagagaccagggcagtcagctgcaagaggctctggagccagacccgctcctcacagcgctggagtcgcaggactgtgtggagcagcttctgaagaacatgtttgatggagaccggacggagagctgcctcgtcagtgggactcaggtgttactcaccttgctggaaaccaggcgggttgggacagagggcttggtggactccttttctcagggactggaaaggtcatacgctgtcagcagcagcgtactacacggcatcgagcctcggctgaaggacttccaccagctcctgctcaacccgcccaagaagaaagcgatcctgaacaccattggtgtgctggaggagcccctggggaatgcccgtctgcatggcgcccgctcatggcagcactgttgacacaaacacacccaggatcaancaggagctctgccggtcaacacgatggacttactgctggacttgnncntttaagntacacctggaatannttttngnacttccnagtggnactantgatagncggtatntctncccangctgcccgtgagagnaggacaaagccngggancgagagcaggnggngcncncatgaacgggaccggnccgg

SEQ ID NO: 675363 - DNA, 119 bp, Homo sapiens
acgaatcggtcatcaccccaccagacgtgtaactggtctggacgaatcttggcgcattcgggaacgtcttccatagcggcatagacgatattggcgatcctcccgccggtgagacacag

SEQ ID NO: 675364 - DNA, 705 bp, Homo sapiens
  misc_feature (41)..(41): n is a, c, g, or t
cgcagcctttgaccttcgacgagatccaggaggtggaggtngatttttctcctttctttgcttttctcctttttctttttcctctctcttttttgctttcttcgttctatttttattcttttcttcttctttcttttcttttttgtctctcttatcttctttctttttctcttttttttctttcttattcttctcttctttttctttcttctttttctcttattttctctattctcttttttcttcttctttcttttttttttttctgttctttctttcttcttttctttttttttctgttccttttatttcccttctcttcttattttttctttctccttcttcttatctcttcgcttccttttttatctcttctctttcttctttcttttattttttttttcttttttttttttttttttcttatttcttttttttcttttttttttcttctttttttcttctcttcttttttctcttttctttttttttttttttctctttttttttttttctttttcttttttctttctctttttccttttttcctttttcccttcttcttctttttcttttctttttcattttttctctttccttttttttttttttcttcttcttttcttctttttttctttcttttttttcttttttttctctttttctttttcttttcttctcttctttcttcttcttttttcttcg

SEQ ID NO: 675365 - DNA, 288 bp, Homo sapiens
cacccaattatatactcaatatggttttactgtgccttacacaaagagaaactctatacagaatgtatgtcatgggtgggggtaacagagtctttcctgcactgttaggtgatgcacacagagcatgtccagaacatttctgtgcttattcaccaccaaagagatctaaagtaatgtatgtcgcctgaaatgggggttatgcctgacaattaagtggtttattggttttctgaaaggaggtgaccttatttttctaacccctatgctaaatacactttatattaacca

SEQ ID NO: 675366 - DNA, 2857 bp, Homo sapiens
  misc_feature (1349)..(1350): n is a, c, g, or t
  misc_feature (1355)..(1355): n is a, c, g, or t
  misc_feature (1465)..(1465): n is a, c, g, or t
  misc_feature (1552)..(1552): n is a, c, g, or t
  misc_feature (1570)..(1570): n is a, c, g, or t
  misc_feature (1572)..(1572): n is a, c, g, or t
  misc_feature (2668)..(2668): n is a, c, g, or t
  misc_feature (2713)..(2714): n is a, c, g, or t
  misc_feature (2716)..(2716): n is a, c, g, or t
  misc_feature (2723)..(2723): n is a, c, g, or t
  misc_feature (2737)..(2738): n is a, c, g, or t
  misc_feature (2743)..(2743): n is a, c, g, or t
  misc_feature (2745)..(2745): n is a, c, g, or t
  misc_feature (2752)..(2752): n is a, c, g, or t
  misc_feature (2758)..(2758): n is a, c, g, or t
  misc_feature (2763)..(2763): n is a, c, g, or t
  misc_feature (2770)..(2770): n is a, c, g, or t
  misc_feature (2777)..(2777): n is a, c, g, or t
  misc_feature (2781)..(2781): n is a, c, g, or t
  misc_feature (2786)..(2786): n is a, c, g, or t
  misc_feature (2801)..(2801): n is a, c, g, or t
  misc_feature (2813)..(2813): n is a, c, g, or t
  misc_feature (2818)..(2818): n is a, c, g, or t
  misc_feature (2829)..(2829): n is a, c, g, or t
  misc_feature (2832)..(2832): n is a, c, g, or t
  misc_feature (2835)..(2835): n is a, c, g, or t
  misc_feature (2837)..(2837): n is a, c, g, or t
  misc_feature (2853)..(2853): n is a, c, g, or t
agcgagcgggccgccgccattttggagcgatcggagtgccgcccgcggccccgagtcggtctcgagccgccggccggccgtgccggtgtccgtaggcgctgcgccctcggccgggcccatgtgtgtgcggcccgcccgaggccgcccgggctttgcctccaccagcgccctggcctccgctcgggcctccacacgggcctccgaagagctgccgcgacgcccggcccgcagggcaggtaaagagattataaatcttccactgaatgaaaaaaattttcttaaagctgcatatactccaagaaaaaaaccacaaatgtttttctgttttgcctgaatacatgatttaaacaagagatttccacagaagctctgcgcttggaaggctgagatgggaggactgcttgagcctgcagtgagctatgattgtggcactgcactccagcctggacaacatggcgaaacaccatctttaaaaataaaatccagtctgacaatgtttgtctttaattgaaatgactatttgcatttaatgcatttattgaaatggttgaatttatgtctggtatcttgctgttttttttttttattttgtctcctctgtttttgttgcttatctccttgtatttttattattagttttggtcttttggattaatccagttgttttaaattatactactagaaaaattcttctagcaggatcctatttcgtcgatggtcttttgtaatccacccaggcttccaccttctctgtggctagaaacaggaccgtccagaagtcacctgtaactgccctatcttgcaagttctgattttggcaaaaaaaaaaaaaaaaagccttgacaaggttggattcacttctttccctggattgtgtgtcatccaagtacgtgagacatctggtagtgcatttcagagagaggagtatctgatatgtgtgtggaggcagccatcttttcctgaaagtccttttaggaatcattatttctggtcctctgaagtttgccgctaccactcataaatatctatccacaccccttacaagaagaataaggaagatcttaagacctagaaggaaaactgattgcagaccaggcttggtggctcagtgcctgtaatcccagcactttgggaggccgaggagggcagattgcttgagctcagcagttcgaggccaacctgggcaacatagtgaatccctgtctctacagaaaaaaaaaaaaaccccaccccaaaatcaaaactgaaggtagtgtcagtgtatatatggagtcccttgtgctgaaagtcaaagcagcttcatttgggggcctcaagagctccagctctgggctcttcacctctaagcnnatggncagtgcccgcccagtggtgtgtatagatcggaggctgcagggcctcacccttagctgcagctgtcgcgtgctggggagcctgtgcaggagggtacaagtaggaaagtgcnatctgcatgggaagaaaaatgcagcgtccttgtagtgcggatggggtccaggagacccaggagctgcccagaggacctggtggcatnctgtagaaagcagccagntnggggccgtcacgatgttctggaagtttgacttgaacaccacgtcccatgttgacaagctgctggacaaggagcatgtgacgctgcaggagttaatggatgaagatgacatcttgcaggagtgtaaggctcagaaccagaagctgctggacttcctgtgcaggcagcagtgcatggaggagctggtgagcctcatcacacaggatccgcccctggacatggaggagaaggtccgcttcaaatatccaaacacagcctgtgagcttctgacttgtgatgtgccgcagatcagcgaccgcctcggtggggacgagagcctgctgagcctcctgtacgacttcttggaccatgagccgcctctcaatcctctgctcgccagttttttcagcaagaccattggcaatctcattgcaagaaaaaccgaacaggtgattacgtttttgaagaagaaggacaagttcatcagcctggtgttgaagcacatcggcacctcagcgcttatggacctgctgctgcgcctggtcagctgtgtggagccagccgggctccggcaggacgtcctgcactggctgaatgaagagaaggtcatccagaggcttgtggagttgatccacccgagccaggatgaagataggcagtcaaatgcttctcagactctctgtgacatagttaggctgggcagagaccagggcagtcagctgcaagaggctctggagccagacccgctcctcacagcgctggagtcgcaggactgtgtggagcagcttctgaagaacatgtttgatggagaccggacggagagctgcctcgtcagtgggactcaggtgttactcaccttgctggaaaccaggcgggttgggacagagggcttggtggactccttttctcagggactggaaaggtcatacgctgtcagcagcagcgtactacacggcatcgagcctcggctgaaggacttccaccagctcctgctcaacccgcccaagaagaaagcgatcctgaacaccattggtgtgctggaggagcccctggggaatgcccgtctgcatggcgcccgctcatggcagcactgttgacacaaacacacccaggatcaancaggagctctgccggtcaacacgatggacttactgctggacttgnncntttaagntacacctggaatannttttngnacttccnagtggnactantgatagncggtatntctncccangctgcccgtgagagnaggacaaagccngggancgagagcaggnggngcncncatgaacgggaccggnccgg

SEQ ID NO: 675367 - DNA, 2989 bp, Homo sapiens
  misc_feature (1481)..(1482): n is a, c, g, or t
  misc_feature (1487)..(1487): n is a, c, g, or t
  misc_feature (1597)..(1597): n is a, c, g, or t
  misc_feature (1684)..(1684): n is a, c, g, or t
  misc_feature (1702)..(1702): n is a, c, g, or t
  misc_feature (1704)..(1704): n is a, c, g, or t
  misc_feature (2800)..(2800): n is a, c, g, or t
  misc_feature (2845)..(2846): n is a, c, g, or t
  misc_feature (2848)..(2848): n is a, c, g, or t
  misc_feature (2855)..(2855): n is a, c, g, or t
  misc_feature (2869)..(2870): n is a, c, g, or t
  misc_feature (2875)..(2875): n is a, c, g, or t
  misc_feature (2877)..(2877): n is a, c, g, or t
  misc_feature (2884)..(2884): n is a, c, g, or t
  misc_feature (2890)..(2890): n is a, c, g, or t
  misc_feature (2895)..(2895): n is a, c, g, or t
  misc_feature (2902)..(2902): n is a, c, g, or t
  misc_feature (2909)..(2909): n is a, c, g, or t
  misc_feature (2913)..(2913): n is a, c, g, or t
  misc_feature (2918)..(2918): n is a, c, g, or t
  misc_feature (2933)..(2933): n is a, c, g, or t
  misc_feature (2945)..(2945): n is a, c, g, or t
  misc_feature (2950)..(2950): n is a, c, g, or t
  misc_feature (2961)..(2961): n is a, c, g, or t
  misc_feature (2964)..(2964): n is a, c, g, or t
  misc_feature (2967)..(2967): n is a, c, g, or t
  misc_feature (2969)..(2969): n is a, c, g, or t
  misc_feature (2985)..(2985): n is a, c, g, or t
agcgagcgggccgccgccattttggagcgatcggagtgccgcccgcggccccgagtcggtctcgagccgccggccggccgtgccggtgtccgtaggcgctgcgccctcggccgggcccatgtgtgtgcggcccgcccgaggccgcccgggctttgcctccaccagcgccctggcctccgctcgggcctccacacgggcctccgaagagctgccgcgacgcccggcccgcagggcaggtaaagagattataaatcttccactgaatgaaaaaaattttcttaaagctgcatatactccaagaaaaaaaccacaaatgtttttctgttttgcctgaatacatgatttaaacaagagatttccacagaagctctgcggcgctttcatggaactatatgatcatatgggcaacattctgttgcagtctaccttctgtctgacggatatgccatcctgaaaaaggaaagaagctgaacttcaagttcctttcatttagccttggctctgcgcttggaaggctgagatgggaggactgcttgagcctgcagtgagctatgattgtggcactgcactccagcctggacaacatggcgaaacaccatctttaaaaataaaatccagtctgacaatgtttgtctttaattgaaatgactatttgcatttaatgcatttattgaaatggttgaatttatgtctggtatcttgctgttttttttttttattttgtctcctctgtttttgttgcttatctccttgtatttttattattagttttggtcttttggattaatccagttgttttaaattatactactagaaaaattcttctagcaggatcctatttcgtcgatggtcttttgtaatccacccaggcttccaccttctctgtggctagaaacaggaccgtccagaagtcacctgtaactgccctatcttgcaagttctgattttggcaaaaaaaaaaaaaaaaagccttgacaaggttggattcacttctttccctggattgtgtgtcatccaagtacgtgagacatctggtagtgcatttcagagagaggagtatctgatatgtgtgtggaggcagccatcttttcctgaaagtccttttaggaatcattatttctggtcctctgaagtttgccgctaccactcataaatatctatccacaccccttacaagaagaataaggaagatcttaagacctagaaggaaaactgattgcagaccaggcttggtggctcagtgcctgtaatcccagcactttgggaggccgaggagggcagattgcttgagctcagcagttcgaggccaacctgggcaacatagtgaatccctgtctctacagaaaaaaaaaaaaaccccaccccaaaatcaaaactgaaggtagtgtcagtgtatatatggagtcccttgtgctgaaagtcaaagcagcttcatttgggggcctcaagagctccagctctgggctcttcacctctaagcnnatggncagtgcccgcccagtggtgtgtatagatcggaggctgcagggcctcacccttagctgcagctgtcgcgtgctggggagcctgtgcaggagggtacaagtaggaaagtgcnatctgcatgggaagaaaaatgcagcgtccttgtagtgcggatggggtccaggagacccaggagctgcccagaggacctggtggcatnctgtagaaagcagccagntnggggccgtcacgatgttctggaagtttgacttgaacaccacgtcccatgttgacaagctgctggacaaggagcatgtgacgctgcaggagttaatggatgaagatgacatcttgcaggagtgtaaggctcagaaccagaagctgctggacttcctgtgcaggcagcagtgcatggaggagctggtgagcctcatcacacaggatccgcccctggacatggaggagaaggtccgcttcaaatatccaaacacagcctgtgagcttctgacttgtgatgtgccgcagatcagcgaccgcctcggtggggacgagagcctgctgagcctcctgtacgacttcttggaccatgagccgcctctcaatcctctgctcgccagttttttcagcaagaccattggcaatctcattgcaagaaaaaccgaacaggtgattacgtttttgaagaagaaggacaagttcatcagcctggtgttgaagcacatcggcacctcagcgcttatggacctgctgctgcgcctggtcagctgtgtggagccagccgggctccggcaggacgtcctgcactggctgaatgaagagaaggtcatccagaggcttgtggagttgatccacccgagccaggatgaagataggcagtcaaatgcttctcagactctctgtgacatagttaggctgggcagagaccagggcagtcagctgcaagaggctctggagccagacccgctcctcacagcgctggagtcgcaggactgtgtggagcagcttctgaagaacatgtttgatggagaccggacggagagctgcctcgtcagtgggactcaggtgttactcaccttgctggaaaccaggcgggttgggacagagggcttggtggactccttttctcagggactggaaaggtcatacgctgtcagcagcagcgtactacacggcatcgagcctcggctgaaggacttccaccagctcctgctcaacccgcccaagaagaaagcgatcctgaacaccattggtgtgctggaggagcccctggggaatgcccgtctgcatggcgcccgctcatggcagcactgttgacacaaacacacccaggatcaancaggagctctgccggtcaacacgatggacttactgctggacttgnncntttaagntacacctggaatannttttngnacttccnagtggnactantgatagncggtatntctncccangctgcccgtgagagnaggacaaagccngggancgagagcaggnggngcncncatgaacgggaccggnccgg

SEQ ID NO: 675368 - DNA, 765 bp, Homo sapiens
agcggaggggaagtgatcgctcccggaggagcgcgagccgagcggccggcgcagcgtgagacagcacatcctgcccgcgcaggccccgacaccttcgggagccgcctgctaccaacgctgccgcctgcccaggagccgccgaccggctcggggatgcccagttccgccgctgcctaatgcgcgtccaggaaaccaacatgtctgacaaaagtgacttaaaagctgagctagagcgcaaaaagagcagcgcttagctacagataagagaagagaacgaaacggacaggacacgcacggagaggacacacgacaagaggctgatatgcagcacgacgaaagaacccgttcaggacgactctgatctggatcgcaaacgacgagagacagaggctttgctgcaaagccataggtatctcaccggagccgacatctagtgcagccgctgcatatcaaaacatgggatacctgttatctccattatttagtcccgaacccctatgtctccactccatcggaaatacagtgagccactcccaagtgcaagctgcgaaagccaacgaactcaaggccgactctggcggacacttaaccccgcaacgcacagacttgcattccacttgggccgtcgtcaaagggtccacccaccggtggactttccctgccccaacgggaaagtaacgcggtcctactacaaacgggacgaccacagacatcctctctggccacgccatcaagtcctgcacgacggatgacggaaccgatcga

SEQ ID NO: 675369 - DNA, 532 bp, Homo sapiens
  misc_feature (181)..(181): n is a, c, g, or t
  misc_feature (518)..(518): n is a, c, g, or t
gaacaagagaaattttgtatctctgttttgtactctgaaaacacctagaaataatgatgaccagtgacaatgaagatctctagaatacagtgtgatactaaatgctgttcctaccaaaaggaactggaatcgctgggaaaaatggtcctgtcgtaaaaacatgcttggaataacacacggngcccgaaaaaaactactaaggtaatgtgagaagaaaataggtgcccatctaaaagggtcccaaccagccaaagatgattcacaaaaacatcatgactgcaacagactgaatcaaatactaaaaaaacaaaaggaaatatcaaccaaaataagttcactggtcacctttgaaagctgctagaacactgaatcattattttgaaaactggtaaataaaacatatatactatctttactgaaaaaacttatttcagaagaaatgcaaactatcaaatcattattttgcaaccactaatgatatcatattggtggtctcaaagtgtgggccctacactaancacattagcactaa

SEQ ID NO: 675370 - DNA, 2577 bp, Homo sapiens
  misc_feature (1069)..(1070): n is a, c, g, or t
  misc_feature (1075)..(1075): n is a, c, g, or t
  misc_feature (1185)..(1185): n is a, c, g, or t
  misc_feature (1272)..(1272): n is a, c, g, or t
  misc_feature (1290)..(1290): n is a, c, g, or t
  misc_feature (1292)..(1292): n is a, c, g, or t
  misc_feature (2388)..(2388): n is a, c, g, or t
  misc_feature (2433)..(2434): n is a, c, g, or t
  misc_feature (2436)..(2436): n is a, c, g, or t
  misc_feature (2443)..(2443): n is a, c, g, or t
  misc_feature (2457)..(2458): n is a, c, g, or t
  misc_feature (2463)..(2463): n is a, c, g, or t
  misc_feature (2465)..(2465): n is a, c, g, or t
  misc_feature (2472)..(2472): n is a, c, g, or t
  misc_feature (2478)..(2478): n is a, c, g, or t
  misc_feature (2483)..(2483): n is a, c, g, or t
  misc_feature (2490)..(2490): n is a, c, g, or t
  misc_feature (2497)..(2497): n is a, c, g, or t
  misc_feature (2501)..(2501): n is a, c, g, or t
  misc_feature (2506)..(2506): n is a, c, g, or t
  misc_feature (2521)..(2521): n is a, c, g, or t
  misc_feature (2533)..(2533): n is a, c, g, or t
  misc_feature (2538)..(2538): n is a, c, g, or t
  misc_feature (2549)..(2549): n is a, c, g, or t
  misc_feature (2552)..(2552): n is a, c, g, or t
  misc_feature (2555)..(2555): n is a, c, g, or t
  misc_feature (2557)..(2557): n is a, c, g, or t
  misc_feature (2573)..(2573): n is a, c, g, or t
agcgagcgggccgccgccattttggagcgatcggagtgccgcccgcggccccgagtcggtctcgagccgccggccggccgtgccggtgtccgtaggcgctgcgccctcggccgggcccatgtgtgtgcggcccgcccgaggccgcccgggctttgcctccaccagcgccctggcctccgctcgggcctccacacgggcctccgaagagctgccgcgacgcccggcccgcagggcaggtaaagagattataaatcttccactgaatgaaaaaaattttcttaaagctgcatatactccaagaaaaaaaccacaaatgtttttctgttttgcctgaatacatgatttaaacaagagatttccacagaagctctgctctaccttctgtctgacggatatgccatcctgaaaaaggaaagaagctgaacttcaagttcctttcatttagccttggctctgcgcttccaccttctctgtggctagaaacaggaccgtccagaagtcacctgtaactgccctatcttgcaagttctgattttggcaaaaaaaaaaaaaaaaagccttgacaaggttggattcacttctttccctggattgtgtgtcatccaagtacgtgagacatctggtagtgcatttcagagagaggagtatctgatatgtgtgtggaggcagccatcttttcctgaaagtccttttaggaatcattatttctggtcctctgaagtttgccgctaccactcataaatatctatccacaccccttacaagaagaataaggaagatcttaagacctagaaggaaaactgattgcagaccaggcttggtggctcagtgcctgtaatcccagcactttgggaggccgaggagggcagattgcttgagctcagcagttcgaggccaacctgggcaacatagtgaatccctgtctctacagaaaaaaaaaaaaaccccaccccaaaatcaaaactgaaggtagtgtcagtgtatatatggagtcccttgtgctgaaagtcaaagcagcttcatttgggggcctcaagagctccagctctgggctcttcacctctaagcnnatggncagtgcccgcccagtggtgtgtatagatcggaggctgcagggcctcacccttagctgcagctgtcgcgtgctggggagcctgtgcaggagggtacaagtaggaaagtgcnatctgcatgggaagaaaaatgcagcgtccttgtagtgcggatggggtccaggagacccaggagctgcccagaggacctggtggcatnctgtagaaagcagccagntnggggccgtcacgatgttctggaagtttgacttgaacaccacgtcccatgttgacaagctgctggacaaggagcatgtgacgctgcaggagttaatggatgaagatgacatcttgcaggagtgtaaggctcagaaccagaagctgctggacttcctgtgcaggcagcagtgcatggaggagctggtgagcctcatcacacaggatccgcccctggacatggaggagaaggtccgcttcaaatatccaaacacagcctgtgagcttctgacttgtgatgtgccgcagatcagcgaccgcctcggtggggacgagagcctgctgagcctcctgtacgacttcttggaccatgagccgcctctcaatcctctgctcgccagttttttcagcaagaccattggcaatctcattgcaagaaaaaccgaacaggtgattacgtttttgaagaagaaggacaagttcatcagcctggtgttgaagcacatcggcacctcagcgcttatggacctgctgctgcgcctggtcagctgtgtggagccagccgggctccggcaggacgtcctgcactggctgaatgaagagaaggtcatccagaggcttgtggagttgatccacccgagccaggatgaagataggcagtcaaatgcttctcagactctctgtgacatagttaggctgggcagagaccagggcagtcagctgcaagaggctctggagccagacccgctcctcacagcgctggagtcgcaggactgtgtggagcagcttctgaagaacatgtttgatggagaccggacggagagctgcctcgtcagtgggactcaggtgttactcaccttgctggaaaccaggcgggttgggacagagggcttggtggactccttttctcagggactggaaaggtcatacgctgtcagcagcagcgtactacacggcatcgagcctcggctgaaggacttccaccagctcctgctcaacccgcccaagaagaaagcgatcctgaacaccattggtgtgctggaggagcccctggggaatgcccgtctgcatggcgcccgctcatggcagcactgttgacacaaacacacccaggatcaancaggagctctgccggtcaacacgatggacttactgctggacttgnncntttaagntacacctggaatannttttngnacttccnagtggnactantgatagncggtatntctncccangctgcccgtgagagnaggacaaagccngggancgagagcaggnggngcncncatgaacgggaccggnccgg

SEQ ID NO: 675371 - DNA, 974 bp, Homo sapiens
ggtgactgacacaccagggtacgtaggtcgtagctatggagcgtacctggactcatcttagtagggtagagactctttacctgtgcatccatgaagaaacctgtccatctatgtgagccacacagctgtttgttaccttggttacgactctgtacccgacatcgccttattacacgttgccggaggctgcggaagacttttatacaattctgacgcacggtaacacagtactacgcttcgactgacacgatctgctgtaatctgtacctcagacaaagggacctgcaactttacgtactatgaatttcacctgatactttaacaggcacttcccaaccattttgtactatggcccaacagtacacactcacataatttactacatcaagggcacacccgagactgagcacacactgacgaccacgctacttaggcaggctggctaccacagctacaccaacgttgaacagcaaattggcacgaaacacgttgagtgtacagacctaccagttgagctttcctccacacgcttcacgcaacgacgaacgagctaactccacacgagttgctgaggccacattgcaagctatcccaattaacgttttaaacttaaccggattgaggcaacctctcagtcgtccatatcccgcgttatactccctctacacgcaaacaccttatgaggaacaaacaccgaggccatatgacaattgggacacactccctttctgacgacaacaacgtcgtgcacaactgcgccacggccaccacaccgggaacacaacacaggcccttctggctttcccccacgtcattttcgcccaactcaatcgtcttggaacacagggttacagactgtctcgagctaccgagaccttcagcttggtaatcacacccaagcggctagttacaccgacacatacatctccatacataaatgacgtacagcgctcacttatcttagaacattcaca

SEQ ID NO: 675372 - DNA, 2729 bp, Homo sapiens
  misc_feature (1221)..(1222): n is a, c, g, or t
  misc_feature (1227)..(1227): n is a, c, g, or t
  misc_feature (1337)..(1337): n is a, c, g, or t
  misc_feature (1424)..(1424): n is a, c, g, or t
  misc_feature (1442)..(1442): n is a, c, g, or t
  misc_feature (1444)..(1444): n is a, c, g, or t
  misc_feature (2540)..(2540): n is a, c, g, or t
  misc_feature (2585)..(2586): n is a, c, g, or t
  misc_feature (2588)..(2588): n is a, c, g, or t
  misc_feature (2595)..(2595): n is a, c, g, or t
  misc_feature (2609)..(2610): n is a, c, g, or t
  misc_feature (2615)..(2615): n is a, c, g, or t
  misc_feature (2617)..(2617): n is a, c, g, or t
  misc_feature (2624)..(2624): n is a, c, g, or t
  misc_feature (2630)..(2630): n is a, c, g, or t
  misc_feature (2635)..(2635): n is a, c, g, or t
  misc_feature (2642)..(2642): n is a, c, g, or t
  misc_feature (2649)..(2649): n is a, c, g, or t
  misc_feature (2653)..(2653): n is a, c, g, or t
  misc_feature (2658)..(2658): n is a, c, g, or t
  misc_feature (2673)..(2673): n is a, c, g, or t
  misc_feature (2685)..(2685): n is a, c, g, or t
  misc_feature (2690)..(2690): n is a, c, g, or t
  misc_feature (2701)..(2701): n is a, c, g, or t
  misc_feature (2704)..(2704): n is a, c, g, or t
  misc_feature (2707)..(2707): n is a, c, g, or t
  misc_feature (2709)..(2709): n is a, c, g, or t
  misc_feature (2725)..(2725): n is a, c, g, or t
aaaaaaaaaagaaaagaaaaaaaaatgatttgtggccagacaggtaatagggcatttcagattctaattttctcttagcaacagtctctatcacagaatgttgttttttaaagggcgctttcatggaactatatgatcatatgggcaacattctgttgcagtctaccttctgtctgacggatatgccatcctgaaaaaggaaagaagctgaacttcaagttcctttcatttagccttggctctgcgcttggaaggctgagatgggaggactgcttgagcctgcagtgagctatgattgtggcactgcactccagcctggacaacatggcgaaacaccatctttaaaaataaaatccagtctgacaatgtttgtctttaattgaaatgactatttgcatttaatgcatttattgaaatggttgaatttatgtctggtatcttgctgttttttttttttattttgtctcctctgtttttgttgcttatctccttgtatttttattattagttttggtcttttggattaatccagttgttttaaattatactactagaaaaattcttctagcaggatcctatttcgtcgatggtcttttgtaatccacccaggcttccaccttctctgtggctagaaacaggaccgtccagaagtcacctgtaactgccctatcttgcaagttctgattttggcaaaaaaaaaaaaaaaaagccttgacaaggttggattcacttctttccctggattgtgtgtcatccaagtacgtgagacatctggtagtgcatttcagagagaggagtatctgatatgtgtgtggaggcagccatcttttcctgaaagtccttttaggaatcattatttctggtcctctgaagtttgccgctaccactcataaatatctatccacaccccttacaagaagaataaggaagatcttaagacctagaaggaaaactgattgcagaccaggcttggtggctcagtgcctgtaatcccagcactttgggaggccgaggagggcagattgcttgagctcagcagttcgaggccaacctgggcaacatagtgaatccctgtctctacagaaaaaaaaaaaaaccccaccccaaaatcaaaactgaaggtagtgtcagtgtatatatggagtcccttgtgctgaaagtcaaagcagcttcatttgggggcctcaagagctccagctctgggctcttcacctctaagcnnatggncagtgcccgcccagtggtgtgtatagatcggaggctgcagggcctcacccttagctgcagctgtcgcgtgctggggagcctgtgcaggagggtacaagtaggaaagtgcnatctgcatgggaagaaaaatgcagcgtccttgtagtgcggatggggtccaggagacccaggagctgcccagaggacctggtggcatnctgtagaaagcagccagntnggggccgtcacgatgttctggaagtttgacttgaacaccacgtcccatgttgacaagctgctggacaaggagcatgtgacgctgcaggagttaatggatgaagatgacatcttgcaggagtgtaaggctcagaaccagaagctgctggacttcctgtgcaggcagcagtgcatggaggagctggtgagcctcatcacacaggatccgcccctggacatggaggagaaggtccgcttcaaatatccaaacacagcctgtgagcttctgacttgtgatgtgccgcagatcagcgaccgcctcggtggggacgagagcctgctgagcctcctgtacgacttcttggaccatgagccgcctctcaatcctctgctcgccagttttttcagcaagaccattggcaatctcattgcaagaaaaaccgaacaggtgattacgtttttgaagaagaaggacaagttcatcagcctggtgttgaagcacatcggcacctcagcgcttatggacctgctgctgcgcctggtcagctgtgtggagccagccgggctccggcaggacgtcctgcactggctgaatgaagagaaggtcatccagaggcttgtggagttgatccacccgagccaggatgaagataggcagtcaaatgcttctcagactctctgtgacatagttaggctgggcagagaccagggcagtcagctgcaagaggctctggagccagacccgctcctcacagcgctggagtcgcaggactgtgtggagcagcttctgaagaacatgtttgatggagaccggacggagagctgcctcgtcagtgggactcaggtgttactcaccttgctggaaaccaggcgggttgggacagagggcttggtggactccttttctcagggactggaaaggtcatacgctgtcagcagcagcgtactacacggcatcgagcctcggctgaaggacttccaccagctcctgctcaacccgcccaagaagaaagcgatcctgaacaccattggtgtgctggaggagcccctggggaatgcccgtctgcatggcgcccgctcatggcagcactgttgacacaaacacacccaggatcaancaggagctctgccggtcaacacgatggacttactgctggacttgnncntttaagntacacctggaatannttttngnacttccnagtggnactantgatagncggtatntctncccangctgcccgtgagagnaggacaaagccngggancgagagcaggnggngcncncatgaacgggaccggnccgg

SEQ ID NO: 675373 - DNA, 1740 bp, Homo sapiens
  misc_feature (1551)..(1551): n is a, c, g, or t
  misc_feature (1596)..(1597): n is a, c, g, or t
  misc_feature (1599)..(1599): n is a, c, g, or t
  misc_feature (1606)..(1606): n is a, c, g, or t
  misc_feature (1620)..(1621): n is a, c, g, or t
  misc_feature (1626)..(1626): n is a, c, g, or t
  misc_feature (1628)..(1628): n is a, c, g, or t
  misc_feature (1635)..(1635): n is a, c, g, or t
  misc_feature (1641)..(1641): n is a, c, g, or t
  misc_feature (1646)..(1646): n is a, c, g, or t
  misc_feature (1653)..(1653): n is a, c, g, or t
  misc_feature (1660)..(1660): n is a, c, g, or t
  misc_feature (1664)..(1664): n is a, c, g, or t
  misc_feature (1669)..(1669): n is a, c, g, or t
  misc_feature (1684)..(1684): n is a, c, g, or t
  misc_feature (1696)..(1696): n is a, c, g, or t
  misc_feature (1701)..(1701): n is a, c, g, or t
  misc_feature (1712)..(1712): n is a, c, g, or t
  misc_feature (1715)..(1715): n is a, c, g, or t
  misc_feature (1718)..(1718): n is a, c, g, or t
  misc_feature (1720)..(1720): n is a, c, g, or t
  misc_feature (1736)..(1736): n is a, c, g, or t
agcgagcgggccgccgccattttggagcgatcggagtgccgcccgcggccccgagtcggtctcgagccgccggccggccgtgccggtgtccgtaggcgctgcgccctcggccgggcccatgtgtgtgcggcccgcccgaggccgcccgggctttgcctccaccagcgccctggcctccgctcgggcctccacacgggcctccgaagagctgccgcgacgcccggcccgcagggcaggtaaagagattataaatcttccactgaatgaaaaaaattttcttaaagctgcatatactccaagaaaaaaaccacaaatgtttttctgttttgcctgaatacatgatttaaacaagagatttccacagaagctctgctctaccttctgtctgacggatatgccatcctgaaaaaggaaagaagctgaacttcaagttcctttcatttagccttggctctgcggccgtcacgatgttctggaagtttgacttgaacaccacgtcccatgttgacaagctgctggacaaggagcatgtgacgctgcaggagttaatggatgaagatgacatcttgcaggagtgtaaggctcagaaccagaagctgctggacttcctgtgcaggcagcagtgcatggaggagctggtgagcctcatcacacaggatccgcccctggacatggaggagaaggtccgcttcaaatatccaaacacagcctgtgagcttctgacttgtgatgtgccgcagatcagcgaccgcctcggtggggacgagagcctgctgagcctcctgtacgacttcttggaccatgagccgcctctcaatcctctgctcgccagttttttcagcaagaccattggcaatctcattgcaagaaaaaccgaacaggtgattacgtttttgaagaagaaggacaagttcatcagcctggtgttgaagcacatcggcacctcagcgcttatggacctgctgctgcgcctggtcagctgtgtggagccagccgggctccggcaggacgtcctgcactggctgaatgaagagaaggtcatccagaggcttgtggagttgatccacccgagccaggatgaagataggcagtcaaatgcttctcagactctctgtgacatagttaggctgggcagagaccagggcagtcagctgcaagaggctctggagccagacccgctcctcacagcgctggagtcgcaggactgtgtggagcagcttctgaagaacatgtttgatggagaccggacggagagctgcctcgtcagtgggactcaggtgttactcaccttgctggaaaccaggcgggttgggacagagggcttggtggactccttttctcagggactggaaaggtcatacgctgtcagcagcagcgtactacacggcatcgagcctcggctgaaggacttccaccagctcctgctcaacccgcccaagaagaaagcgatcctgaacaccattggtgtgctggaggagcccctggggaatgcccgtctgcatggcgcccgctcatggcagcactgttgacacaaacacacccaggatcaancaggagctctgccggtcaacacgatggacttactgctggacttgnncntttaagntacacctggaatannttttngnacttccnagtggnactantgatagncggtatntctncccangctgcccgtgagagnaggacaaagccngggancgagagcaggnggngcncncatgaacgggaccggnccgg

SEQ ID NO: 675374 - DNA, 1655 bp, Homo sapiens
  misc_feature (1349)..(1350): n is a, c, g, or t
  misc_feature (1355)..(1355): n is a, c, g, or t
  misc_feature (1465)..(1465): n is a, c, g, or t
  misc_feature (1552)..(1552): n is a, c, g, or t
  misc_feature (1570)..(1570): n is a, c, g, or t
  misc_feature (1572)..(1572): n is a, c, g, or t
agcgagcgggccgccgccattttggagcgatcggagtgccgcccgcggccccgagtcggtctcgagccgccggccggccgtgccggtgtccgtaggcgctgcgccctcggccgggcccatgtgtgtgcggcccgcccgaggccgcccgggctttgcctccaccagcgccctggcctccgctcgggcctccacacgggcctccgaagagctgccgcgacgcccggcccgcagggcaggtaaagagattataaatcttccactgaatgaaaaaaattttcttaaagctgcatatactccaagaaaaaaaccacaaatgtttttctgttttgcctgaatacatgatttaaacaagagatttccacagaagctctgcgcttggaaggctgagatgggaggactgcttgagcctgcagtgagctatgattgtggcactgcactccagcctggacaacatggcgaaacaccatctttaaaaataaaatccagtctgacaatgtttgtctttaattgaaatgactatttgcatttaatgcatttattgaaatggttgaatttatgtctggtatcttgctgttttttttttttattttgtctcctctgtttttgttgcttatctccttgtatttttattattagttttggtcttttggattaatccagttgttttaaattatactactagaaaaattcttctagcaggatcctatttcgtcgatggtcttttgtaatccacccaggcttccaccttctctgtggctagaaacaggaccgtccagaagtcacctgtaactgccctatcttgcaagttctgattttggcaaaaaaaaaaaaaaaaagccttgacaaggttggattcacttctttccctggattgtgtgtcatccaagtacgtgagacatctggtagtgcatttcagagagaggagtatctgatatgtgtgtggaggcagccatcttttcctgaaagtccttttaggaatcattatttctggtcctctgaagtttgccgctaccactcataaatatctatccacaccccttacaagaagaataaggaagatcttaagacctagaaggaaaactgattgcagaccaggcttggtggctcagtgcctgtaatcccagcactttgggaggccgaggagggcagattgcttgagctcagcagttcgaggccaacctgggcaacatagtgaatccctgtctctacagaaaaaaaaaaaaaccccaccccaaaatcaaaactgaaggtagtgtcagtgtatatatggagtcccttgtgctgaaagtcaaagcagcttcatttgggggcctcaagagctccagctctgggctcttcacctctaagcnnatggncagtgcccgcccagtggtgtgtatagatcggaggctgcagggcctcacccttagctgcagctgtcgcgtgctggggagcctgtgcaggagggtacaagtaggaaagtgcnatctgcatgggaagaaaaatgcagcgtccttgtagtgcggatggggtccaggagacccaggagctgcccagaggacctggtggcatnctgtagaaagcagccagntnggtatctggggccaggagaggttttggagctgagatgagatgtgtagacaatcaagtaagttgaatagccaagccagagctgg

SEQ ID NO: 675375 - DNA, 784 bp, Homo sapiens
  misc_feature (223)..(223): n is a, c, g, or t
aactggcggatggaatatgattcccgctggccaaatggttatgaaaggcagaatctgcatcaaccctcctgggattaacaggaattgagccctcccctggtaatactttctgggctccaggggacccccttgtttccagacaagaagagataatagtcttccatgtttatggtgttttctgtgttttggtctccctggacccctttgggtgaagtattttttnccaagcgtctccaccatctgtttggggtagaacgtgttgattgggttgcacttgccccccacgcacccctaccgtcacgataatgttgtgagatgctgttaattctaccatacacgcccgtatccaccactccacggagaatgtaaaaagtgtgtttgtgaaagtctttcaacctgtagctctaatttcacgaacttgccccaagtattttgctactttactattatgggtaatactcttctctggcctagttcttacagagctacttaaatagaaatttacttttatggatagaagtaccagaattttgagaagaaactataattttcacccaattttaaggggaaaattgtccattatctaaaaatgttcttataatatctgccttcatcttacccttcatactctgaaattccctatagcagacagagctagggaaatatttaaaatttaccctatttattttttggaactaaatcacagccttaactataacattatgagagtaatgggaactactgctggctttaagtaaataaaagtcattgttttcaaccgtga

SEQ ID NO: 675376 - DNA, 237 bp, Homo sapiens
cggtacacctccaaagccactaccagcccctccaccaaaaccacatgctcactgcctgcctccatagcccccagctgatacccccagacacaaaccgatgttgaacatggtatgatgacaccatggcctcctgcccatgccactgagcctgccccctgataaccacctaccataagcctggcagatggagctcttgcagtgctggggttgtccttggctacggtggtacctgatgct

SEQ ID NO: 675377 - DNA, 831 bp, Homo sapiens
  misc_feature (504)..(504): n is a, c, g, or t
ggatatgggtgtctcaatggggaccttgtgtatcagtgttcccgatatagggtatctagtcttagatgctcccctgtccacaaaacgggatttttcccagatatggcggtctaccaataatttggtggacgccccgttcatacgtgtcacaggcgtgcgtgttgacaccacgctagggacgtccggttgggttaacgcttccgcctatctggtctttccatgtacgtcacagtaccgcgccacccctggccgattaactactgcgagggagcacaagaatttcgtagtgttgctaggacaccacaccagccgtaaggaagcctgggtccgccaaccccgaagctggcccaaacaaatgtgccaaaaacgcggtcttgttccccccctcgtggcggggtcctttaacccgctggggcacccctgacccgcgccataatcgccccccgtggtcgtgcccgccatagcattcgatcgagtggactacatatctgcccgcagtccacngtaacttgctcaggatttggatgctatcctccgtggctccccacgagatattggtgcgcccccataccgagtacaaaaatggcaacccctccagtcgctcccccccggtctttcctttaagggacctcgtccttccgcggacatctatgctgtttcttcccatatgcggccaacctatttaaagacgtcccccacattcagctttcggctcgtatgtccccgcacagcattcacgcggcggcggacacgcgccacatatgcaattgcactgctataggaggctgggaccaccgcccccctccatacgcccccatttcgcccacaaac

SEQ ID NO: 675378 - DNA, 505 bp, Homo sapiens
ccggcaacgtacaccttttttattaaggggcttctattgtgttctgaagttccatctctgtgacaacattaatatactttaaatacctgggatgtggtctggtacatacatggtggatgctgtgtgtgtattatatatactactatattatgaacacctgagtcatggaagtccttgcaaagtgtgccttaaaatcctcaacctttttaacttttctcatacatcgaagtcagtattcttatgaaggcccccatattgaaaaaagtcaccttgtcctgagaggttgtagccatcatcattttccagcggctgccatcttttattctgggaacgttttctgggttcactgacatcattactttgtactaagttttcctcgttgcttaaaaggctgctctgtagcaacaactgtctcatcccttcaaagcttttccaagcagtttagctatttgaaaagggggctttctaacttcatcttttcaaaataaactgctgggcatgcgtt

SEQ ID NO: 675379 - DNA, 650 bp, Homo sapiens
  misc_feature (420)..(420): n is a, c, g, or t
  misc_feature (498)..(498): n is a, c, g, or t
gttatattttacccagatagactcctggaattgtaggccccctaccaggagcctgttacctccttccaagaactactccccctccccagtgtctgcccccccccccacccctgccccgcgtcttctctctgggtggtggacagacaagaaaatctttgcacccactggcacctctcgacatcctgggaccctattccttcaggaaagccctctctctctcctccccgttctccatcagtcataactcctttctgaaaggggttggggacccagaaacatggttggactccttcaagtaatctggagcgagggcgagggctgccgctctgggaatcaggtgcgaaggtcaggaaggaagaagccagccttggttggctcatgccgcctgtgtgccccctgcctgcctgcctgcccccccgncgacccgtcttctgtaaggatcacggacaggaggctgcactgtcccccaggaacgaatgagcaccttgagggtctggnggtacctggagcaaggagaccggcagagggaagagggggtcgcttggtggaagagacatcacgcaggctcctgggtgggtttggagcaggtgaactctgtgttaataataccagaaaggtcttttggcggcgggtccttaggcctgtttccc

SEQ ID NO: 675380 - DNA, 212 bp, Homo sapiens
  misc_feature (51)..(51): n is a, c, g, or t
  misc_feature (93)..(93): n is a, c, g, or t
  misc_feature (109)..(109): n is a, c, g, or t
  misc_feature (116)..(116): n is a, c, g, or t
  misc_feature (118)..(118): n is a, c, g, or t
  misc_feature (169)..(169): n is a, c, g, or t
gccctcccgcgcttccccgggccacagggtcgcctgtcaacccggacagancccgcaagagcgtccattgggcggtcgcagcggcgccgagancaggaggaagccgganccgcgcngngccgtggatcccctcggcctcccgttggtatcttccatctcatgcgttcanattgtaacctcgcggcgggcgtgcagaccggacgcctcccgct

SEQ ID NO: 675381 - DNA, 138 bp, Homo sapiens
caattagggatttcttggggggtttaattttttttggaattttccataaaccagttattttctatttttacgcagataaaaatttgggcataaaatgtaaaaatagtaaaatgagaaaaataaaccttttttcccgta

SEQ ID NO: 675382 - DNA, 382 bp, Homo sapiens
ctacctgtctgaggaacccgagccctaccttgcagtctacctgcactcggagcccccgcccaatgagcgccactgctcggctagcccatggtagctggtgtgccggccagtacagcacgggcaagaccagtttcatccagtacctgctggagcaagaggtgccccgctcccgcgtggggcctgagcccaccacccgactgctttgtggccgtcatgcaccgggacactgagggcaccgtgcccggcaacgccctcgtcgtggacccggacaagcccttccggcaactacaaccctttcggaaacaccttcctcaacaggttcatgtgtgcccagctccctaatcaggtcctggagagcatcagcatcatcgaaaaccccggt

SEQ ID NO: 675383 - DNA, 726 bp, Homo sapiens
  misc_feature (508)..(508): n is a, c, g, or t
  misc_feature (638)..(638): n is a, c, g, or t
  misc_feature (647)..(647): n is a, c, g, or t
gatagcatgggcttaataaatgtgttcctaccagcttcttgccttctctgtagtactctgaattgctgtccatacctgcctcactcacttactctctcattcctttccttacttgatctctaccaggccatttttcatatttacatcaaagatacctgaagtgttggtatctgagaatatctggcactcctatgatctgagaagtgaccttttattgttacgatgactacagacctatatgtagatatgtagtcagaacaatactgataagcaactttgtaatcaaacatcttccagtgttaggaaggtgagaaacgttcataggcaagtctgctgttctatagcaccatcttctgtgtcccctagtcccccaggagctctttactttcccctctagttttgggtgtgcatgatgggagtctgtagtaggtgagttgtaatactggaccattctgccttgctatgggttgttgaagatagcacaattctattctgtgacccttgcccnttgcattcaccgtacttaccacctacctgtcctgtggctgttgagcagcataattatcccgggagaatgattcccctcatagacagacacaagcatccataccgtcctaggtaagtagtcacctggtgtnctgggaatntgctgggtggatcttgagccctgaacttttgtattagatcatacccctggtgagagtacaggccatttagacacgatac

SEQ ID NO: 675384 - DNA, 603 bp, Homo sapiens
  misc_feature (65)..(65): n is a, c, g, or t
  misc_feature (81)..(81): n is a, c, g, or t
  misc_feature (88)..(88): n is a, c, g, or t
  misc_feature (102)..(102): n is a, c, g, or t
  misc_feature (111)..(111): n is a, c, g, or t
  misc_feature (113)..(113): n is a, c, g, or t
  misc_feature (122)..(122): n is a, c, g, or t
  misc_feature (140)..(140): n is a, c, g, or t
  misc_feature (146)..(147): n is a, c, g, or t
  misc_feature (153)..(154): n is a, c, g, or t
  misc_feature (189)..(189): n is a, c, g, or t
  misc_feature (191)..(191): n is a, c, g, or t
  misc_feature (234)..(235): n is a, c, g, or t
  misc_feature (252)..(252): n is a, c, g, or t
  misc_feature (260)..(260): n is a, c, g, or t
  misc_feature (264)..(264): n is a, c, g, or t
  misc_feature (266)..(266): n is a, c, g, or t
  misc_feature (293)..(293): n is a, c, g, or t
  misc_feature (322)..(322): n is a, c, g, or t
  misc_feature (331)..(331): n is a, c, g, or t
  misc_feature (340)..(340): n is a, c, g, or t
  misc_feature (344)..(344): n is a, c, g, or t
  misc_feature (351)..(351): n is a, c, g, or t
  misc_feature (356)..(356): n is a, c, g, or t
  misc_feature (369)..(369): n is a, c, g, or t
  misc_feature (381)..(381): n is a, c, g, or t
  misc_feature (384)..(384): n is a, c, g, or t
  misc_feature (396)..(396): n is a, c, g, or t
  misc_feature (419)..(419): n is a, c, g, or t
  misc_feature (428)..(428): n is a, c, g, or t
  misc_feature (435)..(435): n is a, c, g, or t
  misc_feature (438)..(438): n is a, c, g, or t
  misc_feature (440)..(440): n is a, c, g, or t
  misc_feature (443)..(443): n is a, c, g, or t
  misc_feature (449)..(449): n is a, c, g, or t
  misc_feature (452)..(452): n is a, c, g, or t
  misc_feature (471)..(471): n is a, c, g, or t
  misc_feature (480)..(480): n is a, c, g, or t
  misc_feature (484)..(484): n is a, c, g, or t
  misc_feature (533)..(533): n is a, c, g, or t
  misc_feature (540)..(540): n is a, c, g, or t
  misc_feature (593)..(593): n is a, c, g, or t
cgggcgcgagccatggaggagggggcatcgtccccggggctgggctgcaggaagccgcacctggngaagctgaccctgggnatcacgngcatcctagaatcntccccaggngngactgaagngaccatcatagaaaagcntcctgnngaacgnnatatgatttcttcctggggacaaaagaataactgngngatgcctgaagatgtgaagaacttttacctggtgaccaatggnntccacatgacatggggngtgaagcngggngngcacatcattccactggggagcatggnaattaacagcatctcaaaactgactcagntcacccagncttccatgnattnacttccnaatgnacccactctgggngacctggggggnggnacacatgaagcnagtgatgatcagccagagaggcntcactttgnctctcgnagngnggnatttgngcngggttcatgcaatgggggnggggaagtntgcnttgtctacaaaagtggggaaccagcattagcgagaagacactgagatcngggtccnggacagagcgttatactggcattttctcacagacacctttactgcctattacngcctgctcat

SEQ ID NO: 675385 - DNA, 878 bp, Homo sapiens
gtttctacagtaaatgtacggcggcgaagtgctaaaagggaacggtcgatgaacaaactgtaattaataactttctctgtgaaagctttggaaaacatctttgtttattgtcctttttttgggtcacaccttgagggctgagataacagcctttgtgagtgcacaaactggggtacgtgctgaagctggtggcacagtaggacctttactttgggatgagccccactaccgttggttggctcacattgcttatagccattacaacattgggtaccatatgactatggagtctggtgaaacggtgtacagtgctgcgaggcgctatgttaaacattaaagaaggaaactggtaaaatactccttaactgactttcattctcgtaaggctctctcgtgaatttcgtgaagctgctggtattagcttaataatctgcggcattctaaaccggacgagctacccgacggattatactgggactctatggaatttgaaaagaacttggtcaggaataagattcttaaggcagtaactctgtacaacgctgctaggcatagggcaactactcgtgccaatttttacctgtgacaaacacaacttggtttccaacaattggggggggtcattacactgtgagttgacaccataattaggatggtggcagcaggttacacagggggcctatctccccttagggagctatcctcaacccctaagggggttaaactcacgtgggggcaacccccttaagttctcgcagaagggaggccaacaactggtccgggccacttaggaccccaggaaaagggattgcctcatggaataagggagggacaaaccaatggcacctatggtgtggaaactaaggctctatgaaggg

SEQ ID NO: 675386 - DNA, 276 bp, Homo sapiens
actctacaggatccccgacgagttgtccgagttatcttaacagtgacaacaacaacaaattggggagatatacagaagagaactccataactctttcgacatgtagtgaggcagagtctacgaagtaccctgaagcagttgggtgccgtgaatcctggtggtgcttcagccaatgatggcagcagggctggccaccgtggaaggcaagttgactgagggcttcctaactcaagtctttgtaccacaagacttctcagttgaccttcaaagcaccgg

SEQ ID NO: 675387 - DNA, 126 bp, Homo sapiens
gaaaccaatgtcttgatatgacgttggagaggggtgggtctcctgagccactcacatggaaagtcccttactcggccccttcccctcagtcagtatacaggcacaaggctctccctgccctctcca

SEQ ID NO: 675388 - DNA, 1167 bp, Homo sapiens
cggcgggtcgctatcgcggggggtactagtggcgccgccgccacgagagcaccaaacgctcgtactggcacctctgtatccatgatggacttggctgttggaaagaggactgtcaccgatccctgggacgctcagacggggtgacagatgtgccgttgcttccccatgtgttaccctacgtattgtaccttgtgattggtcatcaatcgctcctaattgcgtgggcttgggaaatggtgctgttcccaaatgtgtcagaagaaacagtgtctcccaccatgatgcacggaacagtgaacggacttagaaaatcaagtcactgaattgaagaaagagaaacgtttaacctaaagactccgcatctatttccttgaggaaggaatggaagctaggaatttacatggcgcccagctgaatgatatctagaaaagtagcattgagctcgaggtggaatgtagagaagtctgaagcgggaactccaggagagagacggagctgcgtcatcaaaggctccaaagcagtggagatgcttagctgaagcaggtggctctgaaatccagcgggtgacgagacagatgctcgaaagaaggtgcagcaggtggaagatctcgtaactataagaatactccttttggaaaaggatgtgacagcctgccaggcagaactgggaaaaggcctttgcagggacagagacggagaaggctcttcggtatgcgtttggaacagcagctttcagagatgaaagaagatgccgaggggggacttggcgaatgggtctggtctgggatgagaaagacagatgattgaggagttgaagctgttgagaaaaagaaagaaagttaatacgaggctaagagtgcggaacacctccgaagtggagtggtcacgcataagcaaggttgtgcactgagagaaagacacccgacggaccacggtggcgcgcgcccacgtgggaacagccgagcatgcaaactgtggtctgcccaccaatgttgaccacacaaggggcgaagacacatatacaaaggagacacagacgagtaaaacctgcaataaagcacgaacacctgatgtactacaaaacaaacaaaacaccgacgctatgtttgtgggcacagaaacgagcaggaggcaacacagtgaaggaaaggccaagtatagaagaga

SEQ ID NO: 675389 - DNA, 547 bp, Homo sapiens
  misc_feature (400)..(400): n is a, c, g, or t
  misc_feature (475)..(475): n is a, c, g, or t
  misc_feature (477)..(477): n is a, c, g, or t
aggtgtagggagtaaggaggctcccaggaaccggagctggaaatccgggcgaggtccagccgaggagcccaagagcgcagagtgatcccctcgtacgctgtgcaggccatgcggggagactggatgcaaactgcgatcagggaagacggagcgagcctcaacgaagcaggattgcagaatgccaagagaaagcctgttgcgtgagcgttacgtctgtgcgagagcttggttgtcatgtgccttagtagggtggtatgggactgagttgccaggaatgctggtagcgctgcgcgagtatcgcttaaaagggtgtgagcaagcccctggtcgcgaaagcatttataccggctccatggccacatggtgtcgccatctgagtgtcataacgtcgtggcttggntgagaggtagaccgtcggctgaagaagtggggcaaaagcctggaatacgctgtgtgtggcaccgagtgcgtgacnantccagcacaatgcatagggggtggcagacggcccaaataccacacgcatggacggcctcacgttccgtgt

SEQ ID NO: 675390 - DNA, 1837 bp, Homo sapiens
  misc_feature (882)..(882): n is a, c, g, or t
  misc_feature (911)..(911): n is a, c, g, or t
cgaacgagtgattctatggctatatacaagcgtacgtcgagaaggcacctaacgtatgctaggtcgcctacgcgtgcgtactagaatgcttgggtgacgccggtagacactctgtcagcaaaagagccacacttaatgacgccaggcacgatcatacgcatctatccttcatactagtctaccgcaccacgactcgttaggctctcgagctagtcgcgtcttgctatcgtatggatagcccctctcctaagccgactcatgctccatagtgcgctcctggtggaagcacatcaaagcatcatgggctcgtgctcgtatgtgtagttcatgagcaccaagcacgtgcgttagtcctgatgcgctggaatgaacggccaaagtacacctccgtaggagttccgggggatgcacgcaattcgaaataggttctgaaagctcatggcccgcgtggagtgccggcacgggcgatctggaagaaacgccgcgacgtccgcgaattccccattgggcggtccattcattggtagaagttgcaagggcccatgaggccaccaaatccattgttcctgagcttccatttcgaggacctattgcatcgtactatgaaaagcttgagggtgcgcctttttcatagcctttgcggtccccaaaaccccttcttcactaaggagccaccattaacacatagagaaaaccgagcggcttcccgcgagcagttcttatcgtgaccgcgtgagacctccattgcaattgccaggcccgcattatgaagagcgcggaagttcaaacagtcaaatgggagtttcaaaaagatgggataagacacaacctaaccatacagttttcatggcaaggccattccccaacgctcctagaaaaatntccccccccttaagatgattcacagaacncccacattttgtagcggattccgatagacggtggcgtaaccgattcacaccaggaaaaatacataatcggatatccgtaccaaagcagcccgtgagccacagagaacagttcgtagcaacaatataacacacgcgctaggtacacagcgggcacccacactgtttgtgcggggccccacgtaaggttctcttaatccacactaaatgtaagcccacgaaaaagtacactacacacagtaggacacttcaactataggtaggcaggtccacacagacacaaaaccaccagctatccaacgcacacagcataaacctaacaacacagagacgccccgatagcggggacaacccgacgacccagcctaacttgggcaaccgtgccagacccaccactagacagcccaggtgaaacacggtggtgataaacacacagacagcggcaacatacgtgcctggtcgccgaacgacaaaggaagagccccgtcaaagcgcagaccacaacacacaactcacccatgggaagacgtgtgaagtgacaaacactacagcgccggcaagaccaaatagtcaccccccgccagtagacagcgaccataaggacaagccgcaactcagaaggcagcacgcactcgcatacagcccaacctcagaccacgcggcctgcatacaaagagggctaggcagccaaaaggaccgagacagccacacagatcgacccatgaggcaccacgccaccaccccaattcggaccacagccggcagagacctagatcccacactggacaaacccatcaaactagaagaaacggcagggagcgcgcacgaactcacagcaccaacagccaccacgagacagcaccgaccaaagcagcgagcacgcacagtgagagcactacacgccgcccgacagaagcgagcaaacaaca

SEQ ID NO: 675391 - DNA, 752 bp, Homo sapiens
aggttatgggacccagtagacgggttcagatgtcaggaacggactatggttgtcatcaccacaggaatgacaccaaggcaagatgtatttcgtacacgcagactgcgataaagaagaataaccccaggaagtaccttcgtcagatgtaggagatggagagactgtggagttcgatcgttgttgtaccggcgcaaacgggtgcggaggcagcacaatcgttacaggtcctggtggtgttccagttcacggcagtaaactatgcagtcagacacgtaaccacttatagacgctatccagcgtcgtaggggtcctccacgcaattaccagcaaaattaccagaatagtgagagtggggaaaagaacgagggatcggagagtgctccacgaaggacaagcacacaaaaaacgcacgacccctacacgaaagagcgcagagtacccaacctctcactacactgacgagagacacactaatggggacagtcaaacccaaagatacatcccacacaccctcccatgtcgccgggaaagcacagatgaatgagaaagggaatggcaaagaacacacaccaagaggatgccaaagaaagaaacaaacaggtaacacacccaaatcgaacagccacgcaaaacatagacaactcagacgcacacatactaccacacgcacacgaaaaccacaaaaaagaagagccacaccatcaaaccaaaaaaacacaaacaaaacacaacaagaaagacacaaagcaaca

SEQ ID NO: 675392 - DNA, 240 bp, Homo sapiens
gaaaggtgtcccgtcctggcatatctgtacggaactggatattggcttgctgtatgtatgtgaccaggtagtgaacaagttctgacgcatctgctggtcaaagtaacccgcgtaggcgatgaacgcagcttactagagacagtccccagctattggtggacatctggtttttgatccgtttcacttgtttttttccatcgttcacgttcagcagactatgctcttcagaagggcagtgct

SEQ ID NO: 675393 - DNA, 258 bp, Homo sapiens
atgagactggggcctaataaaaaggagcgtctatacaggagcttaaatgggctgtaccttgtagcattgaggacaggcctgaattctgagaagcaaaagtggtaaaagtatcgtcagtccttttaagttggtggctgagcttggtgagctgtgtttttaaaagatctttagtccgttctacttttcttgaagacggaggaccgtaagggatataaagttttcactgaaacctactaagagcctgaaaaactgcttggc

SEQ ID NO: 675394 - DNA, 371 bp, Homo sapiens
ccttgctcggaggtgcttttcatagcatcctttttaattaaaggtcaaatacagattgctatatgatgtccgaaagaacctgatactacttcgagagtttctgctcagaagaaaatgagagttatcataataggtagctgtggcggtccatgccaggtgtggtgtgtcacatacagcgatgagagtggctttcacaccttttttttttttaagttcacaccctcctttacccccagcagtatctcaggttatagttatcagagatgcagcagtgacaaatggcattcttacttgtaacctcgtgtgatgatgcttatcattttgaaatagtattataaaaacctggtcccgtttcaccagacatgaatttc

SEQ ID NO: 675395 - DNA, 151 bp, Homo sapiens
accacagttaccaagaagacttatgagatctggcattcgacggcatgactactagctgctagcggcattataaaccatggctatgcccgggtgcgaagacaatccagaatagacccaccgtatgcatcctcaattgagctttcaagggtga

SEQ ID NO: 675396 - DNA, 139 bp, Homo sapiens
aggaagtcgatcgagccggtaccttttctttataaattacccagtctcgggtatttcttctagccttatgagaatgtactaataaacacatgtagcagcatatcgtttttttcgtgtgcacaacctggtcgacgattca

SEQ ID NO: 675397 - DNA, 138 bp, Homo sapiens
tcctcctccagggtcctctgcagaccaggctgagatggaggaacctgctaacatcgctggagattcttctagcctcccagtagggaggcgccagaaatgctatcaagctggcaggcggtgtcgtcactcttcatcctc

SEQ ID NO: 675398 - DNA, 457 bp, Homo sapiens
gtcagctcggccgaagttccgaatggaaatagatcttaagaagatgcacatatatccaactgaacccaacaattaaggttttcttccaggaatacaagaatggcttaacatgagacaactatctatctaattaactggatctatgaattaaagaaggaaaatcacatgatcatcccaagaggtacagaataaaaacatctaataaacatttacgttttaaaattctttataaatggccaacacagtgaaaccccgtctctaccaaaaatacaaaaaattagccaggcgtagtggtgggcacctgtaattctagctactcgggaggctgaggtgggtggatcactaggtctggagttcgagagcagcctggccaagatggtgaaaccccgtctctactgaaatcacaaaaattagctgggtgcgatggcgggcgcctgtagtcccagccattcggaag

SEQ ID NO: 675399 - DNA, 458 bp, Homo sapiens
tcattccttatgagaatctgatgcctgatgatctgaggtgtaacagtttgatttcgaaaccatctctccccagctcccttcccattcatggaaaaactgtctttcacaaagccagtccctggtgccaaaaaggttggtgactgcttaattagaaagtgagcatagaacttatcccaatcagatttgatggatgaatgaaaggaagaaaactgactgttcttagtgtttgctggaaagaggaaaaccatgagcaatgggataaattaaacatttcagttgaataaatgtttaccaaattgctaataaagaataggctctgtacttggccttgggcaaacaatagtgtaaaatatacagtctgccctctagttgcttattggagtgagcatagtacattctgataaatgtacaagagctagaatccagaacatagaattttccttgtggatttgtttaaa

SEQ ID NO: 675400 - DNA, 251 bp, Homo sapiens
tacaggcgtcgcgccaccacgctgactatttttgtatattagtagagatggggtttcaccacgtaggtcacgctgatcttgaacccctgaccttgtgatccgcccacctgagcctcccaaagtgctgggattgcaggtatgagccactgtgcctggccaggaagcagatttttaaaactatttttactttcttactatagcaacatgagatactgagggttaagatgaagcacaaaagacgaaaaactgcc

SEQ ID NO: 675401 - DNA, 409 bp, Homo sapiens
  misc_feature (338)..(338): n is a, c, g, or t
  misc_feature (346)..(346): n is a, c, g, or t
  misc_feature (386)..(386): n is a, c, g, or t
tcattccttatgagaatctgatgcctgatgatctgaggtgtaacagtttgatttcgaaaccatctctccccagctcccttcccattcatggaaaaactgtctttcacaaagccagtccctggtgccaaaaaggttggtgactgcttaattagaaagtgagcatagaacttatcccaatcagatttgatggatgaatgaaaggaagaaaactgactgttcttagtgtttgctggaaagaggaaaaccatgagcaatgggataaattaaacatttcagttgaataaatgtttaccaaattgctaataaagaataggctctgtactttgccataatatttnaaaacatnacctggttagagttctaagtggtacttatttttgtttggntaggggaaacctgaataaaaaca

SEQ ID NO: 675402 - DNA, 398 bp, Homo sapiens
caccaccactcatctgcgacagttgacagcacgagggtgaagcgcgagcatatgcacttgcggcaatcatcttgtcgcaggttgctattctagggcaagctggaggagagaaggctcaataatgccacctcgcaggcgcaacaccaggtgcaggctggactctttctggatgtcgtagtctgatagagtgcggccatcctccacctgtttgccggcaaatatcagacgctgctgctcaggtgggataccctccttgtcttgaattttaggctttgacattctcaatggtgtctctgggctcgacctcaatgggtgatggttttgccagtgagggtcttcacaaagatctgcatgtttgcgtcagctcggccgcctcgctgaagcagatgaggtggtgg

SEQ ID NO: 675403 - DNA, 830 bp, Homo sapiens
gtctgggtatggaaagcaagcctacgtagctcactattacgtataatccttttcttttcaagcatagtctgaggatagtgcactcatggtagaggaggaggtaggtagactttattgcctatcatggctcgcactctaagcccaactacatgtatctacatacatacaataccttctatatactaattatggtatatataatcctataccggtagttgtatctctacactgctacctcagactgccttgtgtactcactatttcactatgtacatccttatctgcctcctctataccaccactctcatcgttcctccgtcgttacaccacgcctgtcattcttcgctctctcttttcctccctctcccacagagcaatgttactctctctgctctctcgcgccttccatctccgctgcactcggtcccttgcacccattttgtcttgactactacatatccctctctctctgccttctccctctctgtcccccctctgcgtcccttcccgcttcttcctatctggctacggtccctcttcctctatcgcttcttgcctgctccgtaccatctctctcagtcccttctgcctccctgcctcctgcctctgctcctggcctttgtcctctaccctggtccctaaccctctggcgccgtctccgcccccttcctcgctctgcggtctgtcgtctcttccaccctccttgcactcggtcttgctcttcacatctgctatggctctgtttcttctctttcttggtctgtcttgccgtctcctctctcttggtctccctctcctcctccccctgtcctcactctccatatgtgact

SEQ ID NO: 675404 - DNA, 161 bp, Homo sapiens
acattgcatgatatagggtgaccagggcaactcatgacgcatattctctttaaaattgggacaagagtaaactagaccatatgcggtcttggcgtttcaccaacatatgtgactttgtacggaccgatacgtgaaacgaaataaatgtgttctcttagaag

SEQ ID NO: 675405 - DNA, 453 bp, Homo sapiens
gtagctgtgcccgccaaggtggggcattaccttggtggatcctgaagacataaccttggggcagagcttgggaacatgttgaaagtgtcttgaggtgcccttgggccatgtgtcgtgcgaggaccccagaatctaagcgcgtgttcccaaggttgccggcgttgattcatccgacaggccctgattcctgggagcaccaatcttgtacccctttacagaccttaatggctcccgaaaaaattcatagacttcagaaggcccttggattgccgctgaactcatccttgggcgcctgcgtaaattgttacggatgcgcccgagaagacagtgaatggcgcaggtagtgttgcaccccaaagaggaccacgtgacaactgttgagatgaccgggagaccccaatggggagtggagcctccaatagcgtcgccatacctactgttgagacccctaag

SEQ ID NO: 675406 - DNA, 368 bp, Homo sapiens
ttcattacgcaaatgaagtatagtgcgatagaaattgaaaccttggcgcattagatatcgtaccgcaaggcgagagatgaaagtattataacctagcactaatatatgcatggactaaccccttataccttctgacatatatgacttaactagcaaataactattgcaaggcagagccagtagctagagacccctcgaaaccagatcgagcttacctaaagaacatgctaaatatagcacacccttctatataggcttaatagttgggaacgatttatagtgtagaggcgactaatcttccgagccgggtcattgctggttgtccatagattataatcctagttcaactttcaatttgcctttattaa

SEQ ID NO: 675407 - DNA, 348 bp, Homo sapiens
tttccttgggggggccttgggccccctttttccctggttttcctttttaccttgggtggggcccccctgggttgggctccttccgggttttttggttccccccccgggcccctttttccttgtgttccattttgtgtaaggggcctgtgggggggcgccccccccaggctttttttagagacccccgtttttggggccttggggccccttcccccctttcccggttttttgccccggggagggggggttccccaactttttgttccctttagggggggtttggccccccgggggtgggccccccccccctttggtttttttcccccttttactttttttttgtgggga

SEQ ID NO: 675408 - DNA, 179 bp, Homo sapiens
ctaaaatgtgaggaaattgtgatttgttctctcccccccaaatgaattacccatttattattttctatcattttgaaacactgcagtttaccatgggaccctgtatatatttcttgccataatggtaaagggctgattgatatatttaagagttaataaatttgtgatttttgctgcca

SEQ ID NO: 675409 - DNA, 620 bp, Homo sapiens
cttttgtctttccgtggagctgtcggccatgagagtgtcgcagctgtgcagttatagcggtgtacaagatctaccccggacacgtggaggcgctacgccaggaccgacgggaaggtttccagttgtctataagtgcgaaatgcgagtcggctttcctattccaagaggaatcctcggcatgataaactggactgtcctctacagaaggaagcagcaaaaagggacagtcggaagacacattcacaaagaaaagaacccgccgagcagtcaaattccatgagtggccattactggtgcatctcttgcgtgatataatggccaatgaggaatcagaaccctgaagttagacatggctcacacgcgaacaagctatcagggctgctaaggaagcaacaaaaggataatgcaatgcatctaaaaagactgcaattggctgctgctaagaggcacctacaagagggcaggtaccctaagcacaccgaatgtgaacgccgtgttgacaaggttggcaggcatccccgcaggtggtggacaaaacggctaacactggcaagaattaagatttacgattcacacgactcggctatacacctcttacagacagaacacagacaaaacag

SEQ ID NO: 675410 - DNA, 85 bp, Homo sapiens
aagctaaggtgcccggtagctttaatgagcaccttttcctcactttgtccctccctctctactcttccccttctgtcgtcttctc

SEQ ID NO: 675411 - DNA, 822 bp, Homo sapiens
  misc_feature (2)..(2): n is a, c, g, or t
  misc_feature (64)..(64): n is a, c, g, or t
  misc_feature (66)..(66): n is a, c, g, or t
  misc_feature (77)..(78): n is a, c, g, or t
  misc_feature (82)..(82): n is a, c, g, or t
  misc_feature (110)..(110): n is a, c, g, or t
  misc_feature (122)..(124): n is a, c, g, or t
  misc_feature (129)..(129): n is a, c, g, or t
  misc_feature (142)..(142): n is a, c, g, or t
  misc_feature (174)..(174): n is a, c, g, or t
  misc_feature (199)..(200): n is a, c, g, or t
  misc_feature (210)..(211): n is a, c, g, or t
  misc_feature (228)..(228): n is a, c, g, or t
  misc_feature (235)..(235): n is a, c, g, or t
  misc_feature (251)..(253): n is a, c, g, or t
  misc_feature (257)..(258): n is a, c, g, or t
  misc_feature (262)..(262): n is a, c, g, or t
  misc_feature (264)..(264): n is a, c, g, or t
  misc_feature (268)..(269): n is a, c, g, or t
  misc_feature (274)..(274): n is a, c, g, or t
  misc_feature (276)..(276): n is a, c, g, or t
  misc_feature (279)..(279): n is a, c, g, or t
  misc_feature (291)..(291): n is a, c, g, or t
  misc_feature (294)..(294): n is a, c, g, or t
  misc_feature (297)..(297): n is a, c, g, or t
  misc_feature (300)..(300): n is a, c, g, or t
  misc_feature (306)..(306): n is a, c, g, or t
  misc_feature (308)..(308): n is a, c, g, or t
  misc_feature (318)..(318): n is a, c, g, or t
  misc_feature (326)..(326): n is a, c, g, or t
  misc_feature (333)..(333): n is a, c, g, or t
  misc_feature (339)..(339): n is a, c, g, or t
  misc_feature (341)..(341): n is a, c, g, or t
  misc_feature (353)..(353): n is a, c, g, or t
  misc_feature (356)..(356): n is a, c, g, or t
  misc_feature (364)..(364): n is a, c, g, or t
  misc_feature (366)..(366): n is a, c, g, or t
  misc_feature (372)..(372): n is a, c, g, or t
  misc_feature (377)..(377): n is a, c, g, or t
  misc_feature (379)..(380): n is a, c, g, or t
  misc_feature (386)..(386): n is a, c, g, or t
  misc_feature (404)..(404): n is a, c, g, or t
  misc_feature (409)..(410): n is a, c, g, or t
  misc_feature (431)..(432): n is a, c, g, or t
  misc_feature (455)..(460): n is a, c, g, or t
  misc_feature (462)..(463): n is a, c, g, or t
  misc_feature (468)..(468): n is a, c, g, or t
  misc_feature (477)..(477): n is a, c, g, or t
  misc_feature (486)..(486): n is a, c, g, or t
  misc_feature (490)..(490): n is a, c, g, or t
  misc_feature (504)..(504): n is a, c, g, or t
  misc_feature (517)..(517): n is a, c, g, or t
  misc_feature (528)..(528): n is a, c, g, or t
  misc_feature (545)..(545): n is a, c, g, or t
  misc_feature (644)..(644): n is a, c, g, or t
  misc_feature (710)..(710): n is a, c, g, or t
  misc_feature (731)..(731): n is a, c, g, or t
  misc_feature (798)..(798): n is a, c, g, or t
cnaaggaaaaacgttatgtcttattacaccatgatcctggctaatagcttttcaaaactttgananaaatcttaaannccgnttcccatgtcacctgaccctcacaaatntcccattatcannnacggnctgcctccccccncttcccacgccccctacccccccccccccctnccccccccccccccccccctccccnnccttcccccnnacaatccttcctccacngtggggngatgttattgggtggnnnggtnngttngngggnngggtntntgngtctggtctggngtnttntgngatttntntgcgtttttntgggtggntggggtnggggtntngttggggttgtngtntgggtggngngggggngttgngnngggtgnggggtgtggtggtgtcgngtttnnggggggggggggggggggggnnggggggggctcagtgtggggtcnnnnnngnntaagngccagttgntccattggntgcngggccatagtttcntccaccatatggnccccccatgtncctgctaccgccggagngtcgcgctcttcattgggcgcgtagttagggggttgctggttataatttccaaaatcattgtaatttccacttccataatttcctcctccatagttgtnataaccacctccgtagcccccaccctggttgccatatccaggtcctggtccgaaatttccaccgcnaccacgtgaatccccaaagcnaaagttgcctcctcttccactcctagaactctgaacttcctgcatttcttgtctagaaaaggctttnttacttctgcattatgaccattga

SEQ ID NO: 675412 - DNA, 908 bp, Homo sapiens
  misc_feature (577)..(577): n is a, c, g, or t
agaaacattgctgaagagagctggagatgtatgctaacagtgtttcgtcgcgagacgtaagaatgcaaggagggtaaaggatagagcgccagaaacatgattgagaaaacacacatggtttcaccatcttcgtgcagatctcttcatacatggctaagctcttgaatcacaaggcgagacagctaggggatatgatcgagctatgcacaaatacaatagagatcagttcgtcgtcgagaggagaaagcggaagtgaaaatttccataagatcctggcaggattgcctaccccagaactctttcgagacccctagtcgtgatgtgggggcacagagccaccttgcaagattggacacgagccagaagctgcagcgtgtgacacctgggcacctccggcggctgagtgcccaccggcctgtgaggtctcttcgaggggggaccccccgcccccaatttctggaactggccacacatgcttcgcgggtttgtgcgcccggggcgataattggtacgaaacaataactggcgtagttcgaaattacgtagacacccgtaatattatcaaaattctcgtgcnacagtggggaaaaaaacaacaaaaaaaaaacaaaaaaaaactttttttgcggccgcgtcctgcggccccataagaaaaaaggttttttctataagacccacatctgggttggcgcggagcgcgggcacccacgatggtgtttacggttaacacgtgtggtgcatatagcgtggttcccctagggacaacctcctgccgccaaggaaccaaggcggtgagggattctccaccaaataaaaacgcgcgcgcgggacacaggagggttttgaaccaatccagagggagtgaggggccaaagggaccttacaccgaggtcaaggaaccaattatc

SEQ ID NO: 675413 - DNA, 968 bp, Homo sapiens
  misc_feature (383)..(383): n is a, c, g, or t
tgcccccctcgagaagattttgataaccctccgctgttttataaggggccaaccgttaattttattgctcccaacactcctcccacgtggcgcccagccctcggggggaggttccacagctgagagagtttgtgtaaattattctcgggaccgacaaaattttacttgggggagtggtccaaactaacactatgagagagttgtgcccaacatgatggccccccacagtgtagcgcccttctcccaagaaaggggttaaaattcttgtggccccgaaagtggttaactaccgcctttctctcttgggtgtgtgaacacatatttctctgaaagaggttctccccccttcgtcccacgaaatatgccacgtttttagtttattnaggcccttctcttcccccccacggttgttctttccgcctatttttaccgtcccacttttcccttacacccttatttttgaaataattggttccaagattcaccacatattgcaaaaattggccttacatcttgggataataattttacacccttcttgccatcatactttaacattgagaatagaggagattggtcaaatagagggaacaatctgggtctatcgccctttttaaagtagttttttttaggagacgtgtccagaccaagttgttgttgcaagtagctggagttgtaacatctgcggtggacattttggcaccacatcccacccattaaggacttataaatgttgccacattattcgcccaaaccgggtggtattatcccccgtgacatccggcaccacacatttttttggagacgctggtcccgtgacccaaacacaaaacattttttttttttttacttgcttttttaacatttttttaacccccttaaatattgtcttttgggcccatattgtcccccaaaacccctcccagattgtgaaattttttttccccaaaaaaaaatttcccatttta

SEQ ID NO: 675414 - DNA, 278 bp, Homo sapiens
tggcgccagcgtttggctcttttggtcccggctggcgtgcaatggcaggctctcggctcactgcaacctctgcctcccaggttcaagtgcttctccggcctcagcctccctggtagctgggcctccgggtgcgtgctcaccaggctgggctattttggtattttaagtcgcgcgggggtttcaccatgtgggccaggcgggtctcaacactccggcactcgaggtgcatccatcgcctgggccattgccatatgcaagggtcccgagctcgcaaatcg

SEQ ID NO: 675415 - DNA, 146 bp, Homo sapiens
atttcatgcggtgagccatctgcattaacccctcccttgctgtgctcagcgtacacaaatgccaaggtcactaatcactcagttccataagctttaccttgctctccttatccccctcatagaatgtctgcattttggccaggcgc

SEQ ID NO: 675416 - DNA, 193 bp, Homo sapiens
ccggttcccagacagaaatatcatgttggcttctgttccttttctctccttctcagctgccagcaatcttaatgatctgaaggtctactgagattgctcacatgggtcccacagtcacatgttggaactcaacgccctcgatgcttaacacacccgaatgggcccagcactgatcatcagagcaaactccggc

SEQ ID NO: 675417 - DNA, 1069 bp, Homo sapiens
agcggaggatacctcacctctatctgtatagaaacaccctcaagggctgtttgtacactttccatctgttgaagctgtaatctcaggatatggtttatttcttatcctacaagaaaatttgtaatcataaattatacacataaaactcacaaatgcatatgtaaaacattgattcttcagttatgttccaaatgttttcttcaatgtttaggatatttaaataccttttacaattatcatcactcgattagactgccctatcatgtgggcacatagcaaacattaccttcatgaatgtactctgttttaaatcttttcttctttttcactcaccaaaaaatcagatacattttcatatcagactatcctgcctcaagttactcttcttcttaccaaatagagaaatttctctattaggagtttttttgctgtctttaatttacatatcataaatatccctatcaaataataaacaatggctcacgcctgtaatcccagcactttgggaggccgaggagggcggatcacaaggtcagcgagattgagaccatcctggctaacacagtgaaaccccgtctctactaaaaaatacaaaaaaacaaaacacaaaattatccgggtgttggcggccggttgcctgtagtcccagctactcacggaagcgctgagcgcagcgagcaagtgcggtgaaaccccgggagggcagaacctcgcagtggaacccgacacatgcccgcaccgtgggcccccaccctgggcgcctacaggacccgagtctccacgaatacacattgacatcgaagccgcgacaaccactcctatacacaacgccatccccacactgcacccacctacatcccaggcaaggcgcccccaccactaaagcgacggagacaactaccgctctcaagcccagccccaccaaagccaacgatattccgccccgctaacacgcgagaccccgtgggggcacacccacccccacgcggaacaccaacgccgaaacagcagcagacccccgctcggacaatctcacaccaccggagcgctcagcacacaacctcgaacg

SEQ ID NO: 675418 - DNA, 293 bp, Homo sapiens
  misc_feature (91)..(91): n is a, c, g, or t
gatcacgtgccatgtgaacagaagcaatgtgtgtccttctttttttttaattttttggagacgggagtctggctcagtcacccaggctggnagtgcagggcggcgatctcagctcactgcaagatccgcctcccaggttcacgccattctcctgcctcagtttcccgagtagctgggactacaggcgcccgccaccacaccgtggctactttttttggtattttaagtagagacgggatttcaccaggttagccaggagtggtctcgatctccgtgacctcgtgatccacccg

SEQ ID NO: 675419 - DNA, 519 bp, Homo sapiens
acggatacttgatcagcactatggagagccatgtagtggaaatgaagctctgcatcagcatacttgagcttctatcagtgagaaaactgaggctctgtcaatagccaataagggaatgaggttcttgcaaaaaacatgaatgggccacttggaagcagatactctagccccagtcaaagctttcatatgggttcagcctttagtaaacatcttgacccattcttgatcctgagccagaactactcagctaaaatgctcctgaattcctgacccacagaaattgtgagataactgtttattttcccaagctgttaagtttggcaataatttatggtgtagcaatagataattaacacaatcaaactaccaaagcttgctcaagaacagcttcacaatgtcctatatccgtaaaagaaatggaattcgtggttaaaacctttcaacagagaaaactccaggtctggatagtttcactgttgtattctatcaagcatataagacagacagaaaaaatgcagt

SEQ ID NO: 675420 - DNA, 158 bp, Homo sapiens
ttctgggtactctacaggatcttatggagaccacggtgagggggtcacacggttaggtagaagctgggcgtgacgaatctgctgtgaggcagacgttgggactgtacgaggctgacgggaggcacactgctgggcctggagggcccaccaagaatgca

SEQ ID NO: 675421 - DNA, 166 bp, Homo sapiens
attgccccctgccccccgcccccccagtttgtacggttgcaacagtgttccttttctgggttttaatttttgagcaaatgattgtgctgtgggaacagcacacagtgagggtgcctagcccaatgtctggcccaaagtaggtgcttaataaatatttgttcaatta

SEQ ID NO: 675422 - DNA, 238 bp, Homo sapiens
  misc_feature (27)..(27): n is a, c, g, or t
gaggatcccgcacagtggcacatgccntatccaacatttgagagactgaggtaggaggatgcttcagcccaggagttccagaccagcctgatcaacatggtgagacctcttctctacaaaaaaaaaaaaaaaaaaagggattagaaaacaggcttgtaaggagcaaaatggggggaaaggggaaaaataggagcaccagaattgtccaggggaggcgctcacaggggctggggacccg

SEQ ID NO: 675423 - DNA, 290 bp, Homo sapiens
cgacatatctataacatagaggtgagtggaccatgtactactagatcttaaggtgggttaagcttttccagatagtcaaatgttacctctctcctactcctctgatataacagtattgaatgaatgttggctacaaaatcaattcttggtgtcgttatgaatctcaatataaaacttttggaaaggttctgctagaacagccgggtcctaccaggcttgaaatatggattcgaagatgtctttggtctctttggatttttcactcagagctcattgttagcgcgtgctgt

SEQ ID NO: 675424 - DNA, 1302 bp, Homo sapiens
gctcacaggcagtcgggatgccgaaaggaaagaaggccgaagggagaagaaggtggctccggccccagccatgtcgtgaagaagcaggaggctgacatgaaagtggtgagattccctgtttggagatataggcctaagaatttgtggcttatggacgaggactatctcagaccgcagaacatgaagacctcaccctgctgtgtagaagatggtgcccggctaatatactagagttgctaagacggcctgagtacgtccatcgctcgtgagttaacggctgcgccattgatataggtgctcattccatagccgggaatatacacgcaatgtttatcaatcctctatgggtcctcatgcgtagcacagcaccgaaaaacaatggcataaacgtacaggcttgccgtataaaatggcgtagagtcccacgaccaaaatgtacctatggaacactatggtagaatcaatagaagtcgaagggacgaaatggataggcataagcatgtacctaagtatatgtgtacgcaaaagggtccgggcaagtaaatgcgagaagtgcgtgggcattattgtggcgaacacgtgtgggaacatggttcacggggttcatgtggaaatggaacgtacgcaaacacattgtacactttttcgggtatgcagtggtagggtatgaaaacgaatcgggttctatacgcgactcctttagagatatagcggcaacgtaaaatccataatgtacaagaagggcattccaaagaacgttggggaactgcgggatggcaacttttgacacatccacacggggaaaacgcggatgttaggaaatacaccgctaatatatcggggaatgggacacttggcgtaatcgtaggcgctctcgtatcacacttagtagggcgcagttgggcacagccgccattggggttggatatactgagataaaagaacacatctggcaggggagggcatcaccgccgatgtgaccataggggcgaaggtttatcttcgcaacaccggggatgcaccaccaccggcgtgccaataagtggtaacatgtggaggcagcaacacgacattcggtgtagaggattcgccacccacaggtggccacgaagggaaacccatatggtcaagacccatacaccatttgggtgtcggaccaccgtttgtacacaccgatgtcaacagcggggtttagcaagaagcgattcagaagcgacaacagcaaacctacaaatcaggcggaccggcgcgatgatatgtggaggaccgctcacatcggcgaccattgagggcattggagga

SEQ ID NO: 675425 - DNA, 981 bp, Homo sapiens
  misc_feature (875)..(875): n is a, c, g, or t
gcaagttggtccatgattgataaactatgagcgtgtacgccgtgatgtactgttactactgccttgccgcgcttgctaggtctccgagtctcccgtaattccagccgatgtggtcattcaccttttgtcacccacgatcactcaaggtagtgcgtgagctgcgaactctgtgggttggttaagacttatcgcgtggggacatacattacttggcgaatagccactatgtgagctagatgtcgcactcttcgactctatgctaataactcaatctatctgtctcctcacgatcaatgctactcgtcaagctacctttgattcgacctttctcgcgaatttcgctcttatagcagtggtcgtatcgactcgggagtcgagatactagaacgttggaaaaaaactatagctggaaaccaagacattgcaaactttgcttgttatcgcgcatatctttggaggggaaaggagcaaaaggctccaaattggccatccaaggtgggtccaaatcctacttgtacaggtagattaaactcatgaatcgagatggacgaaatggtcgtggcacataggcgtgatttccaaccaacagttaggtagacacctgtaaaacgacccaattgaccattgccatctacttgtagggcaaaacaaccaacaaaaagaattgccaccaaaagcggccaaagacattcatgcgcgcactcagaattttaggggttgtagaaatctctagaacgcgcctttggtacctaggtgtattgtgtgataccttgtctttaggggcatggaaaggaaactgcaacctgaagatgtctatcctgcacaatcttctcaacgttcatttgtgcatgcctggcccgagaaccccacaattncctcttacttttattactatccccggtactagtgcctctaggcgaggaactcaaaaaggcttagtccagcctgtctgagtgcgactttgttcgccggactgctgag

SEQ ID NO: 675426 - DNA, 141 bp, Homo sapiens
ctcgaccggggattacacatgtttgtttggaacattacatccttggaagccctgaagtgactatcaacattagtcagatattatttattggggatacccaaattaagaatatgaagtcgtgactgaaaatggccttattct

SEQ ID NO: 675427 - DNA, 119 bp, Homo sapiens
tacatgggccatttacttttagtacagtaaaatgtgtatgtgaatttctacagtatgtttgcccaaatgaattatatcttgaatacgcttaacaatatattctggaggcagctttcatt

SEQ ID NO: 675428 - DNA, 1657 bp, Homo sapiens
tgatttcactttccactccataacgctcctcatactaggcctactaaccaacatactaaccatataccaatgatggcgcgatgtaacactgagaacgcacataccaatggccaccacatcaccatcctgtccagagaatagggccttcgactacgggcatacatcgctaattatatatgcctcagaacgtttgttctatcttccgcaggagttgtttgctgacgacctgtttatccaacatgccaggctctagtcgctccgtactccaccactaaacttgatgtgaagggacgacatgcgctcaccctcaaagcaagggacattcaactcacacgtcttacagatccaccgtaagcacattccccagtcccataaaaccacattccgctattaactcgccagtctagagtacgttagtcgacattcatctcttgtagtcctcgatccctagtagaatcgttagatcactagaaaagcaacacactgataaatcctagagcttatcgtgtccaactgcaccatgcactctaattagcacaatttctaactgggagtgcatcgtaatctatcaccccctccgcattactagagccctgcaagatagttgactagtcgctagctcatcgacagtatgcgtacccatctgtctccgatacgaggcccatcttaagcggcctcctaccgaatatcacttcgtgtgagcccctgacacagggacttttcgccaccgagagaacatctcaatcgttccccctcttcattcaggggcctcccaacaccttatagtccctgccaacgtaaatcccgttgcatgttaccactagcccggcccccgaaacgttaaagattcactttctgccaacctttcgttaaccacttcccccaaacatctcattcccaccctcctctcaggggcctatcccagcacacggcaccggatccagccccttagacatataccctgcggggcccatttcacccggcacacaccctgcaatgagctagaacggacccatacatctactccgtcgggcacaatggaatcattccccgaacatcctaattccagactctcgacagcgggcgatccttccaccccacaacacaccacaccggcccaaaacgacaacacgcaacggagcagccagcacccacctcaccacacagaacacttccgcacacacccagacggagcgccacacacacgggtacaaaaccgccgataaccacaaacaagcaccactctgtcgcaacaccacaaagacagcgcacgcacgcccaaacatcaagcgacgcccgcgcaacacccaccaacgagcacaacgaccagctgaggccccgcctagcgtatcaaaaagcggaccgcggcgaccccgacgcgacaccacctggcgcaccacgggcggacacctcgcgcacgagggacccccctcaccaccgcaggcccagcgaccccacaactcacgcccacaccgccccacccagcaccaatcagcccccaccgcgcccaaacacacacaaccacccgacaacacggagacaccaccacccatcaacgccgcaaagcacacccccagccaacacatcaacaatagccacacccacaccagcagcacgcaccagagccacctccgacaccaccccccaccgcagacac

SEQ ID NO: 675429 - DNA, 1156 bp, Homo sapiens
gttttgtgggcccccacgagagagacctttggctactcttagggggtaggctctttttgtctcggtgcgaacttgttttcccggcttgcccgcttgctctccgaaggttgcctgcctgtgtacctatcacgtgggttaaaggctgctgctcgtcggtccgggattgtcgtccagagtcgcaatacgccatagggcgcaaccccgtcatagtcttgcattcctatgccggcgtcgactgtatgctttcggcgatgatcatgtaggcattgcttcccgtgcgatgactcttcttggatactggtacggcgtttgcgattgagttcgtaggtatagcggccagttgatcatgttggaagtcttcctagtaggttaccttaaggcagcctatcgtgtacatgccggcactgcttgcttttgcacatgactcatcatcttagctcgggctatctgaaagcatatgccaaatttcttgccttcaactcgaacgtgagagcctgtctcccgtcacgtctggtcaaatcttaagtccgagtctatagctaggcaagttgaggtggattgaacctcgacttcagtgcttacgcgagatctgtagcattagctctctcaatgtagcgccacattaggatggtatgatgagcagttctaccgtatcaaccctgacgatgaccattcggatattttactagattataggtatccgaaaggagcgtaccacgcattcgctactactcaacttgtcactcctagcacacatcagaccctgcgtactatgctcgcaacttgtaagactaagcgtaacaatgactaagcgaccgcgttagattccagtgccaacacctctcatgctcacactacggaggccctgcccccaagtaaccggcttttagcacaaatgggccattatcgaagattcacaaaaacaatagcctcatcatccccaccatcatagccaccatcaccctcctgaacctgcatacttctacattacgcctaatctactccacctcaatcacactacttcacccatatctaacaacgtaaaaattaaatgacagtttgaacatacaaacccacccaattcctccccacactcatcgccctaccacatacctcctacatatctcctttatataaatcacagacctctttgttc

SEQ ID NO: 675430 - DNA, 965 bp, Homo sapiens
gctctcaagcttggcagtcagtttggtggggttacacgcgggttcaacatgcgtatcgacaaagtgttatctctgtatcggggcccatctactcctggacacggcatgatgttcgtccgccaaccgcatcgcaacggtgtccagcatttcgcccaactctacatgtcatccaaacttcacacaacgaacgcgcaaaccatcgacaaacgacacgcagcgaccaaacgcattcggcgcaacgcacgctgcgtacacccacgctcaccagagggcctaatcaaccaacgaacctcgacaccacgtacgaaaatgaacgcctaaatcaaagtacccccgcgaaccagcccacgcgcacataaccaactaatccgcaaccgcgcacgcaacgcagacgccgacacacacactcacaacacagacacccgcacccacgacacacccacaacaccacgcaacccgcaactccggcaagcgaacacaaaccgaacacgacaccgcacgcacgaaacacgaacacacacagaaaaacacacaaacacacccccacacgccgacaacaacccctacccaccacaaacacgtcacgaaaaacccacgaaccgaacccaacacccccaaaaggcaaacaacaagcacgggaacaacaaagacaacgcccagggactaccaagaacaccatagaagcaaaagtacagcaaaactgattgaagaaaaaagggaacaacgaacatgacacgcactcctactaaacacagccagccaagcgttgcacaaaaccaacactcccagggctccagggtgaacatagtcagaaacaaatacatagcaccccgtctcagacaccctatcacctggtacagcaacgcaaagtccgcccagcatccatacatctactcctagtccccgccacaaagatacaaccagcagaccacccacaacgcacaccttcaatccacacggcatca

SEQ ID NO: 675431 - DNA, 1641 bp, Homo sapiens
  misc_feature (626)..(626): n is a, c, g, or t
  misc_feature (628)..(628): n is a, c, g, or t
  misc_feature (643)..(643): n is a, c, g, or t
gtctggctgaaaggagcgggcgcgccgggaccacccggcgatgctgtcgccgccgccgccgcctctgtagcgagcacccgagcccgccgcggagaaagaaatgaacacacctgtgagtactggatgcctgtgagcttgccattacctgcactgcaaagacacagggcggtggcctctgagaagcagctccttccccttcaccttggccttgcccttcctgctcacggtccaccatggagacgctgtctcaggactctctgctggaatgtcagatctgtttcaattactacagcccccggcgcaggcccaagtggctggactacaagcacacctgctgttcagtgtgcctgcagcagatgaggaccagccagaaggatgtgcggtgcccctggtgccgcggtgtcaccaagctgcctcccggcttctccgtgtcgcagctcccggacgacccggaggtcctggctgtcatcgccattccacacacttccgaacacacccgggtcttcatcaaacttcccagcaaggggtgctacatgctgcccctgcccatctccaaggagcgtgcgctgctgcccggagacatgggctgccgcctgctgcccgggagccagcagaagtccgtcacngnggtgaccatccctgntgaacagcagcctctgcaggggggggctccccaggaggcggtggaggaggagcaggacaggcggggcgtggtgaaaagctccaccgggtcgggggtgtgcactgtcatcttgggggcttgcgtcttggactccctcctcggcatcgtgcttcacaacatgtcttgcatttctaagcgcttcactgtgatatcctgtggctgaagagggctgcagggaagtctcttgtgggtgccaacttaggggttgagcaggttgatgatgagatcccagtgagaagatggggggcaacactgaccatttggtgctgagcgctggcctctgggttgcctcttgattaccccaagacagacacaaagggcagaaggtgcggtctcaacaagataccaggtgaattgttctgagtgttgatggcaacagcttggaagatgattgcatgcatcctcataatcatgtattcaatggactgtaatttatgatttttcaaaatcatgttacaagatagacatattctacttagacgttaaactgtacaagtgcgtacaatgtgaccttctctaaatgcggtagattcaaacaaagatgctctgtagacaagtagaattaaacctgcgaatccgtgtaaaaattcagtgaagacatgcactgctggcttctttattttttttttctttttattgaaacccagtcttcatttagttgctaaggcttttaatacattttgaatggcaccaaaacaaaataagtcaaaatggacagtcattttatttggaggaaatatttgaacaagtgtctccaatgtgttgtgttttgtcatgaaccttcattttcttcacttgtaattagagcttgctacgtgtttatggaactgaaagctcaacaggggagcaataaaccgagaaatcatgagaaatgtctaatcccatgggaaaacctgtatgccgattttcctcaagccatctcacaaaataagaatttcaatgttccaacacccacaccc

SEQ ID NO: 675432 - DNA, 481 bp, Homo sapiens
  misc_feature (88)..(88): n is a, c, g, or t
  misc_feature (101)..(101): n is a, c, g, or t
  misc_feature (182)..(182): n is a, c, g, or t
  misc_feature (186)..(186): n is a, c, g, or t
  misc_feature (196)..(196): n is a, c, g, or t
  misc_feature (198)..(198): n is a, c, g, or t
  misc_feature (218)..(218): n is a, c, g, or t
  misc_feature (225)..(225): n is a, c, g, or t
  misc_feature (476)..(476): n is a, c, g, or t
gtttgttaaaaggggaaccaaaaccaacccccagaccagattccttgaatgcctccccttgccttggccgttggaaggcttgttgaanggggaagatgccntttttgggaagggggccccgtagcctccagggcgtgcacctgtgaggcctggaccctgttaatactgcagtgagccatccntttngctccaggtngnctggtttttgtatatagtgncatagcnttctgctgacattcttagttgtggaaagggggaggggtcagctggcatgagaagtgcttggagttttttctttagttaagtgcagtaggtctaaaactttttaaagaaactgtggaactcatcattgtcagcaaaacaaagaactgcatcaatggaagttcaaaaaccctcggacctaaacacaatttgcaacattctgttgttttttatatgtttagaatgctgaaatgtttttgaagttaaataaacantatta

SEQ ID NO: 675433 - DNA, 457 bp, Homo sapiens
gtctggctgaaaggagcgggcgcgccgggaccacccggcgatgctgtcgccgccgccgccgcctctgtagcgagcacccgagcccgccgcggagaaaggctgaagaaagctcagtctcaattgtgtttcctgcctgtcagcctcttgcctcctaaacgtgtaccatttccacttgatgtcatcacgcagaaggggtgaaagagactcggtgacagatacagtgtggttggcaggtggaccctgctcatcgtagtcactcaaggactcaaactgatggagtcttggtcttgatgtgagcttgcaagatcattgcagcatcgggaaggaaatgctgcagggtcttgctctagcaattatgtgatcctacccagagatcacgtttggctgctaaggcctggactacgttcttcgtggagttgtgagggggctgcttgtgatcgcctaggagtggagagga

SEQ ID NO: 675434 - DNA, 814 bp, Homo sapiens
gctctcgcacggctgtttatccgccgatccggcgtcgcgtatctctgccggtcgcaagtggaagaagagatcgccgcgcgtggtcatagacgatggctccggaatgtgcaaaggctggtttggctggtggacgacgtctccccgaggccgtgtttcccttccagtcggtctggggcgccccagacaccagggcgtcatggtgggcatgggccaggaaggactcgcttacgtgggcgaggaggcgccatgagcaagcgtggcatccttgtactccgtgaaggtaccccattgagcatggacagtcgtcaaccaactgggtactgacatggacgaagatctggaaccacagcttctagcaacgagactgcgcgtaggccccgcgtagggagctagccagtgcttgctgacctgaggacccctctgaaccccaaggtctaacagatcagaagatgactgcaggctctgttcctctcccggcaatgttcctccctgaaggctccagattatgtttgagagcttcaagagcaccgggcatgtacgtggcatccagagcgtgctgtccctctacgcctctgggcgcaccactggcattgtcatggactctggagacggggtcacccacacggtgcccatctacgagggctacgccctcccccaagccatcctgcgtctggaccttggtggcgggaactgaccgatactcatgaagatcctccactgagcgagggtaaagttcacacagggcgaggcggggaaatcgtgcgcgacatcaaggagaagtgtgctacgtcgccctggatttcggggcagggga

SEQ ID NO: 675435 - DNA, 317 bp, Homo sapiens
gacagctggggactggtcaatcccagcagccatacttcaaccaatcatagactgccgagtgttcaaacaaggcaaacgtcaccctgtaaccaattcaggtgtttctgtacctcacttctgatttttttttgaacactttccctttttttggtctataaatttgttctgatcagaaggtacccctagagtctctatgaatttgccgtgattctgggggatgcctgcaccagtcattcactgctcaattaaactcctttaaatttaattcgactacattttaattttaacagttatgattatggccaagcccagctgcg

SEQ ID NO: 675436 - DNA, 611 bp, Homo sapiens
  misc_feature (116)..(116): n is a, c, g, or t
cttgggtcagatgaaaaagataaggatggttccaggacctctttccagacagaaaatgctttgtgaacacatcctttgttcgaagccattgccctgcaggcagcctgctccaattngaggattttggattgtacctgacattttgggacccccgatgatttgcatcaccagtacctatgaatgcctcatatggccgttattaaggacagtccatccagggtctcctcccctgctttgtactcgaaaaaatgttgaagtggcaaagtttcccccccgtgttttgggtgaaaccccagattcctttgaaaagcatattaaaagccttttgcaacgtagggttgccaatccagcatttttgaaagcttttgaaaaggacaaagcccctcctcctgaaaaatgcctaccagcgaaagggcattcagtccctccttaaggaggagggtgaacatataagggaaatggtgaagcaaatcaatgatatccccaatcatgtaaacttttgacccccccaggaggtgactcccccctgaattgaaccccattgaagggttaaacccatattgtaaaacaggtagaattatttaatttataaaaaggggttttgatgccca

SEQ ID NO: 675437 - DNA, 228 bp, Homo sapiens
gctgggcacaaagaccctgtctctaagaaaaaaaaaattttgaataggctgggtgtggctggctcacgcctgtaatcccagcactgtgggaggctgaggtgggagatctcttgagccctggaattcaagaccagtctagtctgggaaacacagcaagacccgccttgctgggcgcggtggctcacgcctgtaatcccagcactttggaaggctgggctgtgccagagg

SEQ ID NO: 675438 - DNA, 990 bp, Homo sapiens
  misc_feature (210)..(210): n is a, c, g, or t
gggtggaacggaggacgtcaccgtccagctgtctctcccctgtccccacatgtcttctaagtctgttggagccggccggcgctcacttgatcttcaggaagctcgtgagcctttggtgtgagccggggtagacggaagggtgggtgcaagagtgaataggcagagtaggtggtacatgcaatctagtccgagagtcgagacttccatggnacggagcaatgatgagcgtgatgggcgagcggcattgccgcgcagcgcagattcttcaagaggaggcccctccatgcttcactcagaacttcatcattccataaaaaggatgatccgacacagttccatgacatgggcagatgggatgcgttctcaggcatacgctgactacatcggattcatccttaccctcaacgaaggtgtgaaggggaagaagctgaccttcgagtacagagtctcctgaggccattgagaacactagtcgctcttctcaacacgctggacaggtggattgatgagactcctccagtggaccagccctctcggtttgggaataaggcatacaggacctggtatgccaaacttgatgaggaagcagaaaacttggtggccacagtggtccctacccatctggcagctgctgtgcctgaggtggctgtttacctaaaggagtcagtggggaactccacgcgcattgactacggcacagggcatgaggcagcttcgctgcttcctctgtggtctctgcaagattggggtgctccgggtggattgaccaaaatagctattgtcttcaaggtgttcaactcgggtaccttgaaggttatgcgggaaactccaggaaaagcatccaggatggaggcaggcgggcagccaggagtgtggggtctcgggatagattccaagtttctggccctacatctggggcaggttcgagagtgtatagaccaccaagaactgtagccaaacaccttgtgagtagaaggcgcgaatagaacc

SEQ ID NO: 675439 - DNA, 804 bp, Homo sapiens
aatgttacttataaatattcattatatttccggataataaatgagtataaaaggtgacttacggagtatgttcctctctatcaaattaataatgtgtaaatcatataagcagattgtttgagaaatagttttgttcaagggataagaataaaatatatattttgttcaatggatagaataagacagtatttctagagaaggtaaatatagataagctgtacgacgaaagtaatcgatagctgattagtttagagcattcgattagaaaagttacgttctgaggctttcataaagaaatgatactgtggttattcaatgatacctttgacataccatttattattagtgtcaatgatagtaactttgcaatgtagacctagctagtgttcttgcaaaggacttcatggtcccttagcagaagcacgaggcaataatgatcactgttctgggaaaaactacactaggaaaatgtgagaatctgatgcactaagctatcctagcttagggatatgcactgtctagacattatcagcatgtgtgggtgagatctcacgtgaacatgcagacgtgtgaaatccgtcccaaatcgcattgggtcctagtagagatacaaacttggatttgttcctttcccccaggtaaagtaactctggcattgaatattgtcttgccattaaaaactctatatgtgacacggagcgattcaaaggggtcctaattgacatctcaattttattgtctttgtcttttgtagccagctgtggggatcagagccgttaagtttatgggtctacgaatgggatg

SEQ ID NO: 675440 - DNA, 164 bp, Homo sapiens
cctgtcccatctcttggtgctgaggaggtctcaccaagctttcaatcattgtggaaggcaaagcggggaacaggtgtctcatatatgcagagcaggacgcagagagatagagagtggggggaggtgcatacacttttaaatgaccacatctcaggagaactcac

SEQ ID NO: 675441 - DNA, 316 bp, Homo sapiens
ctctgggatgcaagtgtcgggtgagaggagggaggctgaggaaatgtgggcaatttattgcttttcagaaagcggggagaagagatggtgccagtgacctaagtcacagtttcctcgaaaggtagaaattgctaacaattcaagttgacaactgccaatagcaacccaaccccgtttttctcaccataaatttgaattgttgggttacttttgagaatgttgaaatggagctctcctctcctactgcttggagcagttccaaccctgccctcaaatgtaaagacactttgcaccagaggacactttgcatccagag

SEQ ID NO: 675442 - DNA, 777 bp, Homo sapiens
  misc_feature (281)..(282): n is a, c, g, or t
gcccagttcacagtgctggtgactggacccagacccttggtaatgtgattgtattctgccttgatacagcccacaagggtcattgtgacatatcacagggtgttgcacccaggtggtttgagtctcctcttctgccttggtgctacccacaggtgtttgtgacatattgctgggtctgtgttatgagaatcttttgcttttgccctaaacatataggccattgtaacattgctgagtccaacacccaggtgatgtaacgcttcatcctggacctgtctacnnaggggattgtactgtatgtcttcaccaatcaccctggaaatgtgatttacttttcctgcctgttccctaatcacagggggtattgggacatactattgggtccagcacctagctgatgtgacatttttgtttttttaaggttctgcttaaaaagagattatgacatatgactgtccctaacactaaggtgatgtaacttctttttttttggctctggcttagaaggcattgagacatactgctgggcctagcctaagatgatgggaaggcctctgccctgatcctgactacggggagcattgggacatatttctttacccttacatcttttcttgagaccagctcaggtaatgccctttatactacgtgatgtgacattctcttctggcgggccctgccacagatagagagggactattgctggggcagcaaaaaggatggaatatttggctggtcctgacacaggagtactggatttatgttgggcctccacta

SEQ ID NO: 675443 - DNA, 495 bp, Homo sapiens
tacaacagctccaaatgcagacacgcaggaatgctgactcaccccgtcctcatgctcacctagatcctgtttgggctttgcctttggcttaacctgcagggtatttttcagaaataaggacctaggcattcctgccacttcttatccccacctggctgtggctcaccttgaaccaggaatcagagactggttctctgggccctggggctgggggtgctgcatcccagctttaacatttttattcttcgaccaggcacagtggctcacacctgtaatcccagcactttgggaggccaaggctggtctcgaacccccgacctcaggtgacccgcctgcctcggcctcctaaagtgctgggattataggcgtgggccactgcgcctggctacctcaagttataaacatttcatactaggaaattgtgtgtttccataaaagggtaaagtgaataatgatcatttacttttctacaacaatagtctcccttttagacat

SEQ ID NO: 675444 - DNA, 182 bp, Homo sapiens
tagaggatcccttatcgtgtgcacacccacccgatcaccttgcttactgatggtcagattcaaacagatattgtttcttgcacaaaaatttttgtataaattactttcaggctatatgtagtaaggtggatgtgaacacactgaataatgtaattgagagtcgggtcccgtggatgtatatg

SEQ ID NO: 675445 - DNA, 119 bp, Homo sapiens
gactaataactgccttcttcatagggctgggtgaagcattacatgaccagcgtcattaaggtccttagccctggcacttagtagcacccagtaaccctagctgttattttcactgttcc

SEQ ID NO: 675446 - DNA, 100 bp, Homo sapiens
tactacggatagcccaagaacacgaacgatacacgcgaatgacagcacagagcttgtgtgcgaggatactagggatagcccaagtagaccaagcgatgac

SEQ ID NO: 675447 - DNA, 200 bp, Homo sapiens
caatttttttgaaggggccccttttttggggatttgggggggttggggttaaccagcccttttttgccccccttttttggggtttttaaaaaaaaaagggcctccccccccccccccccccttggggggggggggggggggaaggggggttttccccccataaaatttttcccaaaaaaaggggcggttttggggggcca

SEQ ID NO: 675448 - DNA, 332 bp, Homo sapiens
aggctgaaaggtatgtctcccaggctggagggcagggcacaatcatagttcattgtaacctcaaacttctgggctcgagtgatcctcctgtctcggtctcccaggtagctgagattacatggcccatgtcacggtgcccatctctgcaaaaaatggaaagattggctgggcatggtggtgcatgtctgtagccccagctactcaggaggctgagttgggaagatcacctgagcccagggaggtcgaggctgcggtgggccatgattgtgccactgcactccagagttccagcttgggtgacagggcaagacactgtctcaaaaagaaaaaag

SEQ ID NO: 675449 - DNA, 178 bp, Homo sapiens
gatccgcttggcttattcaggtgggggctcccctgtacccctgcatccctgtggagagctcttcaagctgctgaaggagggccacctgcatggccaagccctgccaactgcacacacgacctgtacatgatcatgcgggagtgctggcatgccgtgccctcccagaggcccaccttca

SEQ ID NO: 675450 - DNA, 224 bp, Homo sapiens
aaaaaaagagtttttcccatgttgcccagactggttttgaactcccaccctcaagcaatcctcctgcctcaccctcccaaagtgttgagattaccaggtgtgaccccccaggctcccccccctaaaattttaaaccctttaaatggcccctggtagggttcctgctaggataaacccttaagcggctgttaaaaaaaataaaagggggccccgtttttgtgcca

SEQ ID NO: 675451 - DNA, 196 bp, Homo sapiens
tccactagtgtaggcatggttttatgcatctgtagtcccagctacttgggaggctgaggcaggagaattgtttgaacccaggaggcagaggttgcagtgagccgagatcgcgccattacactccagcctggtgacagagtgagactccatctcaaaaaaaaaaagtattaattaatcagctgggcacactagtgga

SEQ ID NO: 675452 - DNA, 105 bp, Homo sapiens
aagtcatgctgaattttaacgatctgtttgaatacatctggatccagatttgtctgaaacaacttaggatacaaagatggttcaattcgctttaaatactgatac

SEQ ID NO: 675453 - DNA, 1535 bp, Homo sapiens
tgtggatacaaagtctcgctctgtcccccaggcgggagtgcaggggggcaatctcggctcactggcaaggctcccacctccgggtgttcaacgcagatttctttctggcctccagcctcctctggaggtaatggggagattcacagggctatggcgcgccacctatggcccagttaatatttttttttttttttttttggagagacacaaagaaattcttggcgctgctgctggtctctccccagagggctgggagagtgagcaagaggggtgtgagatctctcgcggctccgctagctggccccagctctccgcgtcttcgcgcgggtgttcccacgcccttattctctcgctgggcctccaaccctcccgcgagagtatagcgcggagagtattatacaagaacaccccgcgcccacacacaccccgtcgggatatatattttgtgtggtgatattttatatatatataaagaacgacgggtgtgtttaacgcgcggtgtgtatagccacgagagtgtgtgtcctctcatatctctccgcgagagacatctggcgaggggatctctatctctctccacgcgcgcggcctctctcacacagagagtcgcgcgggaatatatagcagcgggcaacaaatgtgtttatataaataaaaaagagagagggggtgtacacccacatcgagtggttgggggccccgaggggcgggtggtctctctaacatatctgctctcgagagcactctcggagagggtgtgtatccccacgcccgcgctcactaaaaagtctctcccccacagaggaggggggcgggggggataattaacccgagggtgttttattagaagaccccaacgcgcggggcgcgcgggagaggagttgaaaaaatctctccccaagaggttctaaaaaaaagcacgggagagggagactactccacgacagcagaagatgctgggggggccatcatatacaaagaaaaaccactccctctacgcagaggagaagcggcgtgttcgaccaaagaggcaccccaacaacaactttttttttacaaaaaaacaggctggggaggggagacacacccccccccgggagaggggggcgtgccaccaccaagggggggggggcccccccccacgagggaatcaaaaaccaagagaacacgctgtatctacgctagagagaaacaccacggagaccactacatatcgatcttgtaggtgctccccagcagacgtggtgtgctctcccccggagtagttgtcgtcgcacaaaagtagttcgttctgctgtgtaggtaacaaacccgacgggaccacctatgagtgtcgttagtgagaacaaccactcactacgaagggagcgagcccgccaagcgagcgagagtaaaacaccgacagcgcaagaaaaaacgcggcggcttctagtgttgggcggctgtgtgtaataacccctccccttgtgtggtagaacaagccgctgctgtctttttaataaaaacaccaccaacatgcggtcccgtttcgtggt

SEQ ID NO: 675454 - DNA, 436 bp, Homo sapiens
  misc_feature (335)..(335): n is a, c, g, or t
  misc_feature (343)..(343): n is a, c, g, or t
aaggaattttactaagtaaattttgtttaaaaaatccccgtgaattaaaggaaaggaaatgaaaaaaaagattgtatcaatacgatgatttaaatcagtgttttgcaacttttttacccagtcatcagtgggagtgaatcagtaggaatgtggggaagggagtgaggggagaccccctttttgactcaacagtggtgacggtcggtgggtcctgcaaaccttaaaccaaaataaagggggggttgagccccaggagcccccccagttcttgaatgaccagcggagggcaggggccagcctgtggcaaaataggaaaaaaaaggacaggatggggncttccccntttttttcagccttaaattgttccttaaaccttcatgtccttttttttaatgtatgtttttgtttggtaaaataaaaaagtttgtaaccctga

SEQ ID NO: 675455 - DNA, 506 bp, Homo sapiens
  misc_feature (260)..(260): n is a, c, g, or t
  misc_feature (493)..(493): n is a, c, g, or t
ccagctatcaggaggcttaggcgggaggatgtcttgagcccaggaatttggaggctgcatggagctatgatggtgctactggcacttcagccgggaaatagagcaagacttggtctcttaaaacaaaaaaaaaggccccattttctgccttcggtgatttagcttcatcctgaatgggcgtctctgatgtggataaaattctacagcaattctagacttcatatccaccacacacggtccagaaggagagagagaacggncttctggtagtggtgtcagagaagcaagtgactttttccagaagcccccaacacatttctgatgcctcagtgaccagcttatgggctagggcatcggtggtgatgatgggcttaggctggggttgcctaaactcgtcactcgggggcaagggggtaggggatttcggtgatttatttaaaaggatcaggattgctacccagggagagagaaatggacatgctgttgggtcagncacgatgtctact

SEQ ID NO: 675456 - DNA, 103 bp, Homo sapiens
gctggtagaggatcccgcagaggctcaggatcacatcctcaatcaaggtagagaagaggcccaggaggtgttagccatgcctgtgtcttttatgggaaaagct

SEQ ID NO: 675457 - DNA, 1006 bp, Homo sapiens
tcttttttatttgttaatctagctcataatctattaatctagttttttctttcaaacaacccatttttaatttcattgatcttttgtatgcatttttgcatctcagtattgttcaattcttctctgatggttttttcttctagtagttttaggggttggtttgtacttgtatttctcatttctctaggtatgatgttagatcattaatttgagatctttctaacttttttaggtagatgtttagggctataaactttcctcttaacactgctttagtagcatcccagatatcttggtatgttagtgtctctgttttcatttatttcaaagaatattttgatttctgtcttggtttgttgtttactcaaaagtaattcaggaacaagttgtttaattatctatgtaattgtgtggtataggggagatcttcttggtattgatttctgtattatatccactggtgctctgaagagtgatggtaaggtatgatttacaatttaaattactttaaatttgagaatttccttatggacaaaatgtgatcaactcttgagagtatgtaccttgtataaatgagaagaaatgtaatataccaatggattgattgaggtgaagtgatcctggaagaatagtatgaaagggtccaatattggtacacatagatgacttaaaggtccagcactgtcagctacaagaacatggcctctatggatccagatatgtcacacagtagaggaacatagaattccttaacaatatagaggagagaaggaaagaaaaggccatactatatcagaaagggtacaaaacagaaagctaggtttatagtgaaaatctgagtattaataccaaatgtataggaatagattaaaatcattaacgcgagatagtacaactgtgattggatcaaagttatatcttttacgaaaagtagataactagcacatcaatactaccattgataaaaaggtgctaactagaagttgttttaacagaataataaaag

SEQ ID NO: 675458 - DNA, 161 bp, Homo sapiens
  misc_feature (7)..(7): n is a, c, g, or t
  misc_feature (70)..(70): n is a, c, g, or t
  misc_feature (104)..(104): n is a, c, g, or t
  misc_feature (134)..(134): n is a, c, g, or t
  misc_feature (137)..(137): n is a, c, g, or t
ggtgagncgacctgcggggttggtgaggttcttccatgcgacggcgtgttcgatcagtgtacgttcttcnaggggggggcgttgggcttgtgggtgaggtgggncgatgtgcgtcacagggcgggggaccgggnggntgcgggtaggggtggtgtcgcatt

SEQ ID NO: 675459 - DNA, 1025 bp, Homo sapiens
gaagaactaatgttagtataagtaacatgaaaacattctttcctccgcagtaagccatgctgtcactattaaacacactgaactgacaattacacgagcccaagtatctacaatcgaatcaagccaagatcattattaccctcgactggtcaacccaacacaggcatgctcataaggaagaggttaaaaaaagctaaaaggaactcggcaaacatcttaccccgccgtgttttaccaataaacatcacctctaacatcaaccaggtctttagaaggccccggctgaaccagtgacagcatgtacaacgggccgcggtaccctaaccgtgcgaaaggtagcataatcaagttgtgtccttaattagggacctgtgatgaatggctccacgagggttcagctgtctcttacttttaaccagtgaaattgacctgcccgtgaaagaggcgggcatgacacagcaagacgagaagacctatggagctttaattgtattatgcaaacagtacctaacgaaatccacaggtcctaaataccaaacctgcattaaaagattcgggttgggggcgactcggagcagatgccaactccgaaacagtaatatgctaagaacttcaccagtcaaagcgaactactatactccattgatccaataacttgaccaacggcacagttacctatggatacaagcgccatcctatctaaagttcatattcaacaataggttacgaccccatgtggatcaggacatcccaatggtgcagccgttttaaggtcgtaggtcacgattaggtcacgtgatcgcttaaccgaatatcaagaggtcataaatagtaaatctcctgacatagcacacaatagcttacaacgcctcccgaataatatcagtggatatacccccaccaaagttaaacaaaataaccaacaaagggcacaaatcacgagaaaacaacataacacaatacacataagcgcaaaggacatataacatatcaaacacataaaacaatacatataaccactactc

SEQ ID NO: 675460 - DNA, 511 bp, Homo sapiens
  misc_feature (340)..(340): n is a, c, g, or t
  misc_feature (501)..(501): n is a, c, g, or t
gtcttacaaaagtctagagaactttcagccaaaataccatcacatattgtcccttcccagttcccttcttctatgagaacactcactaaacacatgctgcactttctcactgtatattccatgtctcttcatgattctgtccacattgtgcattttttaaaaattttctgtaatgcactctgaaatatttatgaactctcaccatggccatgtctaatctgatgagttcatttttgagtttttaatttaaaatactatgtttttatacaaactacttttcaaatttgctacatcaattttttagtctcctaaaaatatattcattttttttaaaattttntgaaagcaaatgtactttataatctaacagtgatatttctactaatggaacctttgtggatctgtttgtactctttttctgctttcctttcaaatggtggaatatcatttccttgtgtacttaggatgcctttgaatggacaaatatttaattttttctcnggaaaaatta

SEQ ID NO: 675461 - DNA, 905 bp, Homo sapiens
ggccccactggctgctctgaaaccatctttgcattgttcctcatccgcctccttgctcgccgcagccgcctccgccgcgcgcttcctccggccggccgcggaactcggggcaggcttaatcggccagaaggtcccttgaaactctcgcattcctatttaaattccccttgcaatcgggattcaccggggagttgcccaaaccattgtcaggagggcagccctgtagacacccagcttcgggaaattacgcacagccaatgggacttttacacggcgccgacaccaccgggacctgtttgtggcacccgacgcgcacggacccacgtggaacggacgaccgcccctggaataaaccgggggacgttggtcactctgacgggacaactggggggaaacacagtgagctggtttgcacccactctaggaacggggtaacgaaccgagaggaaaacacgaagggggaacacgacaccgtggcttgggaggcaaaggcaacacacaccgtacaccgagatccgcgaccgcgacaccgcacaccgggtagacaactgggcttagaccgagacacaaacgcgaacatcggcacaatttggaccgcaactggcaggggcaaaacacccgctgtgagacgttccacagcgcatacaacggggggcgcacaaaagggccgggggcgcacaactgcactgtgagaacccgcggcaactgcgcatatcgcgacacggggccaatacgacacgcgaacaatgtcgtccacgagaaatacacccccacagagcgaggcacaacggacagaagaaaaaacagcaaacccccgagaacaagcgaaacggtgagacatgtgagcacttgacacgacaccgccggcgcccagaacaaacaaccacagcggccacacaacgcgg

SEQ ID NO: 675462 - DNA, 781 bp, Homo sapiens
gctgtgagtggtcagttatattagaggatctcgatgctaacaatcgcaacaggcaaactttgtgctcgctgttacccaaaaaatcaagatcacataatacagatgctgccctgctcccctgcatcagttatcctgcattcgccctggatgatgaagttctttttagccctacactcgataaagtggttagaaaattaaaaggaaaatatggatttaaacgtttcttgagagacgggtatagaacatcattggaagatcccaacagatgctactacaagccagctgaaattaagctatttagatggcattgaaatgtgaatttcccatatttttactttatatgaagacggatggaatttttagaggcaatcctatgcaagtccaggaatatcaagatcttttgactccagtacttcatcataccccaaaaggatatcctgttgaaccaaagtactattatgtgccagatgactttgtaaaaatgaaaaaaataaccctgggaaataaaaactaattactaaaaaactggggccgggatggaaaactggttcctttggggacaagaattatatatcaacacagaacatgctggatggtgaacttatgagcgcaaaaaatatttgacccctgtacaaagctaatggcccactcaaggatctacgaaaacaggagcgagaagtgttcccaatcaaggaaacatacgtgggattaaaaaaggtttactatcctatccacgtccctcagttgcaaggaaaaaatacattagaggacacacctaaga

SEQ ID NO: 675463 - DNA, 544 bp, Homo sapiens
  misc_feature (538)..(538): n is a, c, g, or t
cacgagctcggagattccattgataaggattataacttttaaaagcaacccgtcattacactgtcgtatgggaaacaggcgcaggtcgcactttgggggaaggaggtgctgccccattcagcacctatttaagacagaaaataagcagatgcatgagtgggagtccctctacaatgtgaccagagcagggagcacttcaccaagagcttctatgtatttcagagtaaacgcactcattggtataaaaaaaagagcccttctgtcagctaggcccctgaatgaatgacagacactcctgataatattttctagaaagcgtggcttctctccagcagctccaggccatcacttattcctcattttgacaaagtagcatccaacttcaggcacgaccgtatatataactccacatgcagctgagccatcataaacacgccaagtataaaggcatgtcaaaaagacattttacttccccaaagcatgggcccaagaagccattattataatagagtatgaatttctgctgcaggttattagnctatat

SEQ ID NO: 675464 - DNA, 244 bp, Homo sapiens
gtctgatcgctgagaccttcgtgctatggttcctgtccatcaccggcgccaccagctgcttcgtgggtctggcagttggtaggagggttcctctagtgcttctctgtaggccttttggtgtgggcttgtctctgttctactaacgtctgtgcatggggttaccctgttgaaaacaatgtggcttgataccttgacctggtggctgtgcaggagtgaaaggggcaggcccagagaagctgtggcg

SEQ ID NO: 675465 - DNA, 301 bp, Homo sapiens
agacgacacacatgcccacaagaacatcactaaaagctcaagcatcaggtggtggcaaccattgtggaaagaaaccctatgtccacaatctgggcaatgttaacaagttttcccacttagaactcatcaaccatccctagtacaaataacattacatcatcttactgaccactactagatttactgaatctatacctgggtatagctgttaccctatcatacaactcacagctacaaaaacgtatgaagttttaacaatacagccgagatgctagcttctcacctgtgaatatagttcaca

SEQ ID NO: 675466 - DNA, 298 bp, Homo sapiens
ggtgaaacaaactcatctgtgctgtagctagccgcgggacctttagccatgaactttgtgattttgtcttggagagcactgctggagagactcctgttgttgctatcagaactgctaaaggagagacgtttgtcatgcaggaggagttctcgcgtgatgggaaggctctaccgaggatcctgcagtattactatgatggcaatctgaagagacacctgatgtctgaacctatccgagacagcaatgatgttcctgtgaagattgagaaagcagagaattttgatgcaatagtgaataa

SEQ ID NO: 675467 - DNA, 765 bp, Homo sapiens
  misc_feature (432)..(432): n is a, c, g, or t
  misc_feature (754)..(754): n is a, c, g, or t
gcgctagcttttaagaacgtgtggggctgaccgaacgtagtctgcgacactaatacacactgtttattacaaacttcactctctcgaataagctgtaacaaaggagcgcacgcgtgcctcgactgaccagcctctgccagaagacagtttaccagccagggcctcattataaacctaagggcgctgaatgaccgggaaaggtaaatgcacgacaattgagctgcgtctgactgtgccactacctacaacaagcgcattaacatcagcttccacaggatcccttggcatgctaaacgtataaaagaatgggttcgtctggctaggcgcacctatcatgcgccaaggaaacacactatcattcgttcaaagcactttgaagcctgctgtattgacctaacaggacacactctacgacttaaacatggatgctgntccaaccattaattgcgttctggtacccatattaaaggctcatgaaacttcaacccacaggaacctgtttgcacgaaaaaaaacacagtgtactcccagatggaccatccaaatttaaaaataaacatttacgagcccggaggtggctacctgaaaccccgtttggcttttggatttctatggggggcaaaatgaagggtctttaaaccggaaaaagattagccagcccaggaagaaaaatggaaactttccttcaaatgaacccctgcctctccaaatggcacaaaccaacggcctgttactaagggttgtcttggaaatntaagacctgaa

SEQ ID NO: 675468 - DNA, 181 bp, Homo sapiens
taaattcgcggccgcgtcgacccagcgtacggcggccagtgttgacctggagaaattgcccagcgatgtcgaggccactcaatccgtgacgcaattgaccctcaccgaaggggccattggctaccgatccctggaagtgatttccggccagaaggccatggcgattcttcgtcgacgcggc

SEQ ID NO: 675469 - DNA, 705 bp, Homo sapiens
tcctcctagaagcagagaagccccagacagaatagctgcctcttcccttagtagtcactgcccatgcctcataccttccctcccccgaccctgtatttcctagttgggctggctgaaagcctaagtttcctgatctgggcctgaggtaaggcagtctgatgccaggtctgtggtggtggggatgtgtgttttatagttacagatgacatgtatgcagaacagacggaaaatccagagaatccattgagatgtcccatcaagctctatgatttctacctcttcaaatggtgaggctttattgtgacttgctgtccatgtgtgcgcatgtgtgtgtatgcgtgtgcatgctcacttgtgtgatcacttatcataggggagaggcattctctagtcccaaaccaagtaaaaacacttccagaaagctaaatttagaagcagccttgctctggctttccaaaggtgtgtcgatgtgcctagcacctgatagaaccacggggtcccgggtcccctacagtccacctttcatgacacacgggtatgaaggtaccagagaatcctaccttccatcacatattcgagcattggccctgctttcctgaccttgacccttttgtcacttgccatcattaatctaggtgagactcctcttcagcttttctccctttggcccctccaatgggttctcattacatagtattctttatg

SEQ ID NO: 675470 - DNA, 347 bp, Homo sapiens
aaaagttcaaattgttcaccttggtgtgaggccttttacaacctggctcagatctgcctttttagtctcagattgcagcgtcttatggaaatgttatctccatttttgaaccagttaacctaccaaaacaaaagaaaaatttggtcagtaatttatgatttcttcttttaggaattgaaatgttttaagtattgaaagagtgtaaaatcagagtgatcattgagtaaatcggtattacttatatactgtaattgaacctacatgttaaattccattttgatgttaaaaatatatttaaatttttcattggaatagaactaaaataaattgtgccaatgaattgttaa

SEQ ID NO: 675471 - DNA, 801 bp, Homo sapiens
atcatttgagtgaatgttcccaagtaggcattctaggctctatttaactgagtcacactgcataggaatttagaacctaacttttataggttatcaaaactgttgtcaccattgcacaattttgtcctaatatatacatagaaactttgtggggcatgttaagttacagtttgcacaagttcatctcatttgtattccattgattttttttttcttctaaacattttttcttcaaacagtatataacttttttaaggggatttctcttcttaagacacgcaaaaactatctgaagatttccagttggtcaaaaagtaatgattcctggactacactggtgtagctaatgtctttctagaacccagcgagttaccttaaagctgaattcatatttagctaacttcggggtcaatacgggatagcatgaattctgcatttgagaaactgacatagcgtgtcataacaatgaaactttctttctaaagaaagatactcacatgagttctgtgaagaatagtcataactagattaagatcggggtaaagtttaatagttcgaagtgcctgttggggataatgataggtaattcagatgaatccaggggacacacaaagttatcctgcagatatgtcgagggcccatctctcccccaaaaccccagagagctaacggggtaacagggtttactccagaaagttcccaattccatggtcctggcgttaccatgtcgcaaactaccttggcattgctcctttgaagtgccatttcgttatagtcctatccttcaggtaccatgttacc

SEQ ID NO: 675472 - DNA, 162 bp, Homo sapiens
ctggtgctggcaggaaaatgacgtggcgatctgggatacgcgtgacgcagcactacgccaacgcggattatctgccgcagcggcgcatatgcaccgcgcgacattctgggggataggcctttttacaaggcctgaggcttaggcttcgaacgcctgcgttaa

SEQ ID NO: 675473 - DNA, 328 bp, Homo sapiens
tatttccacagggtatgaaataagagtcgactgggcagtgaaggcatagctgatggccctgattttaacacatgtgacgttagtgagaatgcttttattgaaatcaatgacgtttaagctgagacctgaaaatcaaatagcatttagccaagcaccgtagggaagagaggatgggaacgaaacatttcagaagaaatagaatgtgaaaaggcaggatcttgtaacctttaaaaaacttttttataaagacctatgagatataaatactatatttttcattttagaaattgggggaaccaaagctctatattaagtgatttgtctaaga

SEQ ID NO: 675474 - DNA, 402 bp, Homo sapiens
  misc_feature (19)..(19): n is a, c, g, or t
  misc_feature (25)..(25): n is a, c, g, or t
  misc_feature (32)..(32): n is a, c, g, or t
  misc_feature (41)..(41): n is a, c, g, or t
  misc_feature (74)..(74): n is a, c, g, or t
  misc_feature (165)..(165): n is a, c, g, or t
  misc_feature (222)..(222): n is a, c, g, or t
  misc_feature (224)..(224): n is a, c, g, or t
  misc_feature (249)..(249): n is a, c, g, or t
  misc_feature (299)..(299): n is a, c, g, or t
  misc_feature (380)..(380): n is a, c, g, or t
gtaaagtgtccacattttncaaggnctagtantacataatnaggaccaggaaaaaaggttttacttacctaagnaaaacactatctatgttgacagttaagtcccaaaggcattcatggtgtatggatgaaagaattaaataatgcctgtgtctttggagaacancggaaagggtagtcaagggtgtgactgaaggctgagaaatttgggaatgctgggggngngaaaaatagaagagcactcaaagtnagtctgttcctacattcacattgtcttggagagacaggtttgcatagttntttacagaggcaggctctgagaggggtgagcctgggttttcagtcttagttctcttgatctttggaaagtcacttaacctnccaactagtctcctcatgtata

SEQ ID NO: 675475 - DNA, 273 bp, Homo sapiens
agcgaagttactaactggttcaaaaacgattatgtgcatgatgggcagtattgttgcagttcaatcaccagtattgcttccaccagatttgtggtctatatatgtgtgcatatggaatagatttccacagacccacaacacggaagcatggcacagaagatgggaaaaaatggggatactcatgtagttgtatactaaaccatagaagacttttgaaagagcagtgtcaaatggaaataaatgtgacaaattctccaggcagccatttcgtaa

SEQ ID NO: 675476 - DNA, 982 bp, Homo sapiens
gcgtggatgggcgtcgtgggcgcccgaaccctcgttgtgctactctcgggggtctttggcctgaccctgagctgggctgggtctcccactccagtgaggtatatctagacttccgtgtcccggtccggccgctgtgagtcccgcttcatcgccgtgggctacgtggacgacacgcaattcgtgcgggtcgacagtgacgcccgctacgcggcaaagagactggagccctgggtgcgccgtgggatagaagtcacgcgagtggtgccaggagtaattagtgtgaaccgtaaacaacaccgtgaaatgtagaatggccacgagtcaacaagaacgtgttcctgatctggcatccatgtaggcaaactctgcagtcggcttatcgtatctgactcaagaagactgagtgccagtgttctcaacacccactccagaattagttgtacttggccttgcgactatgcgggtgtctgggactggtgccgctctccttccgaggtgttactctggcaggaggagcccttactggacgtgctacacgtgattgacattcagcgcctgacttcgacgtggaaccttgcgctctttgtgactccgcaggagggatcacttggacgatctacaggaccccagctcattggcacatttttggtgactgcaggactgaggtcggtggaatctatgggggtggaggccttatctgggagggtcaggtgcgtggtgttgttcccctgtattgcctggacaaccgggaccggaaggactgtgcagcgctaggacggcccccaaggtatgcatgtgatcgtcacgcgtgctctctggaccatgaagtcaccctggggtgcttgggccatgagcttctacctgcggagattaccttgaccttggcgcgggtgtggaggacctgaccacgacacggggttctctgggaacatgcttcgggattaacctcctaatggatggggagtatcgttgtccagtgggt

SEQ ID NO: 675477 - DNA, 123 bp, Homo sapiens
aggcgctcagaggataccggacgtatcgggggtggtcgtcctcttagaccgagcgcgcagcttcgggagggacgcacatggagcgggagggaggaaggggacacccgcctagccagccaccac

SEQ ID NO: 675478 - DNA, 596 bp, Homo sapiens
  misc_feature (16)..(16): n is a, c, g, or t
  misc_feature (92)..(92): n is a, c, g, or t
  misc_feature (150)..(150): n is a, c, g, or t
  misc_feature (196)..(197): n is a, c, g, or t
  misc_feature (201)..(201): n is a, c, g, or t
  misc_feature (210)..(210): n is a, c, g, or t
  misc_feature (216)..(216): n is a, c, g, or t
  misc_feature (233)..(233): n is a, c, g, or t
  misc_feature (253)..(253): n is a, c, g, or t
  misc_feature (264)..(264): n is a, c, g, or t
  misc_feature (318)..(318): n is a, c, g, or t
  misc_feature (322)..(322): n is a, c, g, or t
  misc_feature (337)..(337): n is a, c, g, or t
  misc_feature (341)..(341): n is a, c, g, or t
  misc_feature (346)..(346): n is a, c, g, or t
  misc_feature (356)..(356): n is a, c, g, or t
  misc_feature (365)..(365): n is a, c, g, or t
  misc_feature (371)..(371): n is a, c, g, or t
  misc_feature (380)..(380): n is a, c, g, or t
  misc_feature (382)..(382): n is a, c, g, or t
  misc_feature (386)..(386): n is a, c, g, or t
  misc_feature (415)..(415): n is a, c, g, or t
  misc_feature (427)..(427): n is a, c, g, or t
  misc_feature (431)..(431): n is a, c, g, or t
  misc_feature (449)..(449): n is a, c, g, or t
  misc_feature (469)..(469): n is a, c, g, or t
  misc_feature (529)..(530): n is a, c, g, or t
  misc_feature (562)..(562): n is a, c, g, or t
aaaaaaaaaaaaaaanaagatgcaggagaaaagcctcaccaaccagcttcacgggggcaggcatctctgtccatcccatgcctttgggtcanagggggcagcaagaccaagaagaccacagccaggccctgggttcagcttcagagccancacccgctgcctcccccaacccccaatctcctgaaggaggagaatnnctanggacaaganccaganccctttccttcagcctntgcttcaccaagggggcctngactgcgcccnaactcctcctggcctgcccctcaggggtcccaggtcctcacctctgctcttcangcangaaaagggcaggganagangaatngaggaggganagggaggcngggacncagagaaanangagnggggaaagaagagacattaggagagaggncccttcacacanaganagaggccgagaaaataanggagaaggggggggctgaantgagacataagaaggaaagtgaaatttgggggaaaaggaattggaaaggaataggaaggnnttgggaagttcagacaagggaggcgcaggtgnaggaggacgatgggagggaaggaggagaggaaaa

SEQ ID NO: 675479 - DNA, 191 bp, Homo sapiens
tgaagatcctcggtgtcgccatgggccgccgcccgacccgttgttaccggtattgtaagagcaagccgtacccaaagtctcgcttctgccgaggtgtccatatgccaagattcgcatttttgacctcgggcggaaaaaggcaaaagttggaataagtttccgctttgtggcacatggtgtcagatgaatat

SEQ ID NO: 675480 - DNA, 348 bp, Homo sapiens
ccgagcggaacatgcagggaaagaaaaagaagacagaaagacagagagacagaaagaaagaaagaaagaaagaaagaaagaaagaaagagcaagctgcagacttaaatgtccctgtcggacagctttgaggagagtgggggttctcccagcatgcagtttaagatctgagaacagacagactgcctcctcaagtgggtccctgactgccaggtagcctaactgggaggcacctcccagtaggggcagactgacaccccatatggccaggtgcccctctgagacgaagcttccagaggaagaaccaggcagcaatatttgctgtgctgcaatatttgcttgttccgctg

SEQ ID NO: 675481 - DNA, 260 bp, Homo sapiens
agaaaaattagggcagggttaaaaaagatgaatttttctggtcaagttcataaaaatgaaaaatcaagaatgttgggtgggttttataaaaggctttaatttctttccttgaaaactttcataattttaaggatttcagggcaaagcagccttttttatgttggccactttttttattgtgaattaaaaatatatcccactcttattttgcaacttatttatgaaaatcgaacttcaataaaaatattcattattgggca

SEQ ID NO: 675482 - DNA, 174 bp, Homo sapiens
gtcttaaagaacctaataagctgggaccagtaaaatccacaggaattcactcttgccttgaagaacttttgaacactgtttaaccataaaaaaataataaaccaacggggctggaacctagtttctgaacccaattttaacagtcatatttggtgtctcctcagttacattggg

SEQ ID NO: 675483 - DNA, 467 bp, Homo sapiens
ttttttcttttcggaaatcttaacccctaagaaactaaggacggtgtttgggggggccttgggaatttttagcccccaaaaatattttgttccccaaaatttctgtaaacccggttaaacccgggtttaaagtccccgtttcttgcttggggcacttgggcccccaatgggtttaaattgccaaattgctaaggagctgaacccttgcccgggtttttacccccgggttactaaaaaaaaaatgaatgcccccaaaagggggttggggggggggtccccccaaaaacccaaaatgttagggggtttaaatttaggggtgttaaaaatgtcctccccagccaagccccggggcggttggcctttgaaccctttttggcccacccacccttggaaaattttttcctgattaaaaatcccccggggaaatttggaaaaaagggggaaataaattttttataaaagggtta

SEQ ID NO: 675484 - DNA, 117 bp, Homo sapiens
gtactctgaggatcccgaatctcgacagttgtgcactgcacagtacttattattaacaaaaataaaaataaatctattctgaagcaatttattccatatgcacaacttgtcgagatt

SEQ ID NO: 675485 - DNA, 123 bp, Homo sapiens
gtccggaggatcccagtggaagatgtgctacgcacaggatctagaagaatatgtcaaactataaacggcttgtgattgtgaatgacttggttcttggctggtgtttttcaatttcgctataat

SEQ ID NO: 675486 - DNA, 108 bp, Homo sapiens
tattgtaatgatatgtggtgttgtcctttattgataaggttcattacattaattaactttctatatgtgcagataacatgatattgtatgtagataataacaatgtat

SEQ ID NO: 675487 - DNA, 378 bp, Homo sapiens
tacgttgtagatgcctactgtaatatggtgtcatgattgccatgtatcactggagggatgaaggttcacctagcgtttcatacaagctgatcacagcaacaggatgcccagagcaacaaggaggctcttgcttgcatattgaaaatgaaggcgcctcttgtctcagttgtgaaataagcaaaggttatccacagagacgcggtctcatttttacttttacaaaggtgactatgctgaatctttttacgaaaagttcccctttcttctttgttacgccgtcaattttttttttagttgaagactttttaaaactttcccttcctgaacatttcaccatgagcccagactgccagggaactttggcaaagaggagagcag

SEQ ID NO: 675488 - DNA, 304 bp, Homo sapiens
gcacagctgcttaacttatcttggtcggtctgtcggcaactttgggaacaggaggaggatgtggtcagatcagtacttgctgagctaagtgaagcatgtcgtcatttctttttaatttgtctggctcacttctagtccctaactaaatgctcactcaagagttttagcttgaatgtcaaatgtcagaacattacttgggtgatgtgctctccatttctaggataagaagaaagagaagacatgaagtgaccactccagcctttcccaagttagacttcctctccttccaccccgtcgggtggcg

SEQ ID NO: 675489 - DNA, 374 bp, Homo sapiens
atgagatggaccatgcggtacgctgacggaccgggagcctgagcgctccacatcagatattaagggctctgaatcctatatctgtatatctctggagcagctgaggcttacacgagtgtgactgatgacagggattaccgctcattggacctcagcaagtgtgatccagattacctatagggacattgtgccaagatgaaccatggagtaactggcgatcaatacccgtgctaagtattacttacaggactccatgggcatgcctgccggaatcagatgggttcatccgattgctacattgtttggtgccacgcacattgggatatatccatgcatgtgggaatcttggaactgggtgttgagcctcttactgt

SEQ ID NO: 675490 - DNA, 271 bp, Homo sapiens
atctagaggacccccctcggggaccttattaaacattagttatatacatatgtgtattatatggtgtgtgtgtctcatattggggttacagctatactcagcaaatactaacaaaactgaagtagacacaaagagagcaatacaaattatagtaggatatctcaatcctaccactaaacagaagataaaaaacaagacgagaatattagctaagagaccccagaaatacaccaaggccgtcataaaaaccattcttttaaatcacggatcc

SEQ ID NO: 675491 - DNA, 442 bp, Homo sapiens
cttaaaatcaattatttacatggctggaaattaacatacttacttgatgtaggtgagagcgatcacaagtagtagggatgaaatttatagtaaatcatcctatggctggagacagtaatgaagagccccatccggttgatctgctgaccggaaggggactggttcattcagccttcagggacatgcacatcataagggaggccaagcaaaaatcaaagcaaacaatagctcacttgttgggcaaaaatatccatcgaattacacagacaggaataatgaccagtggagtcacctgctcaagggggacctttttaaaatgtgacagtcatctatgaatactgaaatgtgagggtcaaggggtccatcatcaacacacatcccaagggaaactcattagcacttccgggggggatgcaacaaacaaacaaaacaagggggcccc

SEQ ID NO: 675492 - DNA, 1520 bp, Homo sapiens
ggctcatgtcgcgacttgccaccgttactaccaggactacaccgtttagccagaaccattgacccaaataaagtataggcgctagactatttgcaagctgtgggcaatgagatataggtgagccgcaagggcaaagatgagagaacttatacaccgaaggcagtacctataggccgggacgtaagcccctagtacctatctgcatagagtggaattcaactgtagacaatcaactgtaagcgaaggcagagcccaccaggtggaagcacccgcacgcacagacgctagaccgagctaacctgaagcaaccagctcaagaagagcacgacccggtactcattgtcagctaagaatgagtccgggcacagcatgtgtgcatccagcgtatagaaagcgccagcacgaaaacgcgtccacgctgaaagcccatggggctagcctggtagcctcgggtcggtgcccccacacggatccaggaaatctttgacaagtgtaccaagactgttgaagatttagccgccgacaaagcaaacccacttcctggaaattgccccactttggtcaaatatttctaatactgagtgtgaagtgccgccataagcgagtgggaaacgaaggtgcgtactcggaggaccactaaatcggaaatataacaggctttcggtaacgtaggaaggaagttgagaacaaatatggttggaaagggacgccccactaagcttacggcgcccgtcaacagaatggcataggacgcacacccacaggtggacatcgcaacagaaggccgttctacaacagccttcgagaccatcccaccatcattaacacgtgacacaggcacagattccccgaaggagcggataattcaggaccttggaaaccttcctcttacaacgaaccgcaaaagtctgagaacgccaaatgcctaacttcaacaccctttacttacgaacacaaaacctgcaacttgcgtgaagcttatacaggtcagacccaatggaacaaagactggttctatccgtcccggaggatcaaagccctgggcggatcaggaatctatataccaccaatcgtgggaacgtcggggcacgactttgaagcacgccgcgccaattcattcgtaaccggagttcacagaatcacaacaaaaaggggcgacttaatttaaacgcactccaagatgtacaacaccccgatagcacagtgatctgcaccataagcgacagcggcttcccacccacacgtcaaaccgggaacgttcggccaaatcttacagccagcaggtctccccaaaaaaaataaccgcatcaagaatcaccacgcatagtagaaggaccggccgtggcaacagaacagcgggaacagggcgccagaaacccaaaacgggcggaaggggacaccacccggggcagtcaaacagagcccggcaaaaagggctcacaacgagcagcggccacccctaccaccagacaacagcggccgcaaagaggcactacaccagacaacccgacgaagcaaag

SEQ ID NO: 675493 - DNA, 541 bp, Homo sapiens
  misc_feature (1)..(1): n is a, c, g, or t
  misc_feature (4)..(5): n is a, c, g, or t
  misc_feature (14)..(14): n is a, c, g, or t
  misc_feature (17)..(17): n is a, c, g, or t
  misc_feature (32)..(32): n is a, c, g, or t
  misc_feature (40)..(40): n is a, c, g, or t
  misc_feature (42)..(42): n is a, c, g, or t
  misc_feature (47)..(47): n is a, c, g, or t
  misc_feature (52)..(52): n is a, c, g, or t
  misc_feature (56)..(56): n is a, c, g, or t
  misc_feature (61)..(61): n is a, c, g, or t
  misc_feature (64)..(64): n is a, c, g, or t
  misc_feature (70)..(70): n is a, c, g, or t
  misc_feature (73)..(73): n is a, c, g, or t
  misc_feature (112)..(112): n is a, c, g, or t
  misc_feature (117)..(118): n is a, c, g, or t
  misc_feature (126)..(126): n is a, c, g, or t
  misc_feature (137)..(137): n is a, c, g, or t
  misc_feature (142)..(142): n is a, c, g, or t
  misc_feature (150)..(150): n is a, c, g, or t
  misc_feature (160)..(161): n is a, c, g, or t
  misc_feature (169)..(169): n is a, c, g, or t
  misc_feature (188)..(189): n is a, c, g, or t
  misc_feature (197)..(197): n is a, c, g, or t
  misc_feature (215)..(215): n is a, c, g, or t
  misc_feature (288)..(288): n is a, c, g, or t
  misc_feature (305)..(307): n is a, c, g, or t
  misc_feature (309)..(310): n is a, c, g, or t
  misc_feature (314)..(314): n is a, c, g, or t
  misc_feature (316)..(316): n is a, c, g, or t
  misc_feature (321)..(321): n is a, c, g, or t
  misc_feature (323)..(323): n is a, c, g, or t
  misc_feature (327)..(327): n is a, c, g, or t
  misc_feature (329)..(329): n is a, c, g, or t
  misc_feature (332)..(332): n is a, c, g, or t
  misc_feature (341)..(341): n is a, c, g, or t
  misc_feature (365)..(365): n is a, c, g, or t
  misc_feature (371)..(371): n is a, c, g, or t
  misc_feature (374)..(374): n is a, c, g, or t
  misc_feature (386)..(386): n is a, c, g, or t
  misc_feature (407)..(409): n is a, c, g, or t
  misc_feature (413)..(413): n is a, c, g, or t
  misc_feature (415)..(415): n is a, c, g, or t
  misc_feature (431)..(431): n is a, c, g, or t
  misc_feature (433)..(433): n is a, c, g, or t
  misc_feature (436)..(436): n is a, c, g, or t
  misc_feature (439)..(439): n is a, c, g, or t
  misc_feature (460)..(462): n is a, c, g, or t
  misc_feature (480)..(480): n is a, c, g, or t
  misc_feature (507)..(507): n is a, c, g, or t
ngannctggaaggntcncattttttccatttnttttttcncncaaantttangaancttcnccnttaaanaanccaacaaccccccaaggcaaaaaattgaaaaaaaaaaantaaanncagggtcnaattttaaaanggaangaaaaaanaaaaacccanngcaccaanaaattgaaaaaaaaaaggnnaaaccccncccccccccccccggaanaggaaaaaagaatggggggggggcccagggcagcggggggaggggggcagggggggcaggggggggggggggnccccccccccccccccnnnanncccncnccaananaaananaanccggggccnttccaaaaaaaaaaacaggggtcnccaaancanaaagggaagggnaggaacaaccccccccccccnnncccncncaaggcacccgtcccncnccntanaacccgggaaagacacccccnnnccccgggccccgcccccncctgccgcccgggggtccccccccccnttccacccgagcccctcccccccccccccccggg

SEQ ID NO: 675494 - DNA, 511 bp, Homo sapiens
gtatctcagcagaattgcaacttctgattttaggttcttgtcaatctattctaactcttagcaaaagattcttgctgttcagcctcagaaacacttttatcttagtcgactttcctgaaatcatgctgtattgagctatgattcttactcaaatgtagttcctatgtcagaatctcatcaatgagaaatttcgcaagattgcgtgccaaaatatccagtaccacgcttgcatatttttacttcaaacagaattaacactgcatcttagacacagcgtggtttaccctgctagtcatctcaaacactgaagacggtgactgtactacatgattatttacctgctcagctcaggttcccattgttcacattcacatcaagacagatcagcactggcacaaccactgcttttattgggtatatcaagtgttaacagatccttcaatgtgtttctcaaaatctctgttggcctatggtaaagaaaaataaaatctattttgaaaactcaaaaaaa

SEQ ID NO: 675495 - DNA, 388 bp, Homo sapiens
  misc_feature (1)..(1): n is a, c, g, or t
  misc_feature (15)..(15): n is a, c, g, or t
  misc_feature (82)..(82): n is a, c, g, or t
nattcgtgaattggncagcctcctgagccagtagactctgagattccggcacagccaagtggtgaaggatttatgggcaganaaaggaaagtgatgtacagaacacagaagtgaggtacagaaacagctggattggttacaggttggcatttgccttattgaatacagtttgaacagatggctacatttgattgtccaaaactcagtgattggcacaagtgtaggctatggtccgtttatacctccacttgttatagttcacaatgtacagagaaacctttaggctgaacttaaaatatgtaaggaggcagctttaggctaaacttgatttaacaagtacccaaaaaagacccaagagagccccaataggccgggcacggtgaaacac

SEQ ID NO: 675496 - DNA, 196 bp, Homo sapiens
cacgcacagcaactgcctgactccagaagttaagctgcttcatgcacatgtatgggagaggacctaatcttcttgtacaacctatgttgtactagaagcatacgtgtatgaggcttatttttacacaagcatcttactcatgtcaacacagtgctctgacggcgggagtgatcaactccaagctcagggacgtttg

SEQ ID NO: 675497 - DNA, 699 bp, Homo sapiens
gtcacacccaatggtggcagaactgcttggattcccgtgcctggcaccccgacacctttctggggatggtaccacgggtggtgacccaccctgagccggcatcactcacatgtgcttcacagccccgttacacaccaccccgaggctccacgcccgaagagtggccagcgaaaatctagaggaggtgtctctctactgagggggctgaagaaaaatggcgcaccagcgaccagaagacagataggccctagcgtagactacccagtcatcccagacccctgcccccctgagactgttttctgagccctccggacctgagactgagtatttgtctttttcctttagccttagccagtgggtatgaggtgtcccgggggactgggtggcttccactccgccccattcccaagagggctctccctcccaccactgcgagccgggagcctctgcgtgtcctttcccagccgcctctgctcctcgggctcatcccacggttctgttgcctgtgctctgtttgtgttggagggaaggactggcggttctggtttttactctgtgaactttatttaaggaccttcttttttattggcggctccctggccctcggccgcttccccccgctctctgttgtacactttccatcgacccttgtttcagactaaaggcccaaacctaatcgtaaaaacagttaaaaatata

SEQ ID NO: 675498 - DNA, 468 bp, Homo sapiens
gacactacagtatctgtccctgggttggcagagacttgaaagcctttgtgacctggcttaatttgtttttcatcctatggtttttctaatggattttctggacttttgtaatcttgtaactattcaagctccactttctaaattttaagaacttcagtggaaagtttaaattgaaggtgctgtttgtagactcaccacccaacggacgcccagccaccacggcaaatccttgagtgttctctaagaatacgatgctggtcatcacagcttcagcatctcctgggttttgatgcttggctctttgctgatcttggcttcctggcttttcctccttcagttccttctcaccctctgctgtccttgtgtagtgatttggtgagagaaagcttttgtcccctgccctctgcactacatatgcggttcaagttttattattgcaataaaagtgctttatgctggcttttctca

SEQ ID NO: 675499 - DNA, 792 bp, Homo sapiens
gaactttaaggattggtcgagccacagacactcttcctgccagcattcctcacgtcattgcccgaagacacaaacaactaatgggcagcccctatacaaggacagttggctcctacagggaggtgactaagataaaccagaaagtcctgaacaaagacaagaatggccttataacatggtgtgatcacagcaagtatggtctaaaacagatgtccaatggtacaagacgcattcctgtgtcccctgaacaggcacgcatcctacaatcagcacgatgcgacctgcaattttagatcactgtgcgggcaaataggtggacaaacacagtctcatcacccatgaggtatgtagttaggagaagaggccttgtatgttaatccactggactgattacacatattcactggccgtaatcagaagaggtcagcttaaatacttcacccaggacctgtggggctctcttacagcgtggtactggcagatattgaagtacatatggtctcatgcgattgacaaaaatccttggaaatcccactgaagagatttgaacgtatgactagatgtatctggtccaattcctgcatatctatagctaagcaagcatcgcgcaaagcaacgcagtgcaatacatgataacgcacacacgaaccgaatgcaggaaaggaacacgaggcacattggagcaacccaaccagagcaagtcatgcagacgtagccaacacctaatggacgaacgtcgagcaacacgcacagccaggcagactccgtcagaccgacgcagcgaccacacac

SEQ ID NO: 675500 - DNA, 714 bp, Homo sapiens
ttcatcattaactgatcaaaatggtagatattgggccagggacggaagctctcgcctgtaatcctagcacttgtggaggccaaggtgggcagatcagttgaggccaggtgtacgagaccagcctggccaagatggcaaaaccccatctctactaagaaatacgaaaagaattagctaggcctggtagcacacgcctgttaatccctgctacttgggggactgaggcacaagaatcactatggacccaggaggcagagggttgcagtgagccaacatcatgccaactgtaccctagcccctgggcgacagtgagactgtatacattgaaaaacaaaaaaaaacaaaagggcacgggggacttaaaagaccaggttacacgccgggcgcgggactcacgcctgaaaagtcaccaaccactatatggagaggccagagacaggtggatcctgaggtcagagaacgagaaccatccctggccaaacatggctgcaagactccgctctctccactaaaacaatcacaaacaaaggtggagcgtagagatggcacgccaggtgaacccagcaagctaggcaggctgagaccaggaaactcacttgaaccccgggaagggtggcagaatgcagggagaccgaggacggagcccatctgcacatccagccggagacagaagtgaaatcggtccaaaacacaatagatcaaaaagacaagggg

SEQ ID NO: 675501 - DNA, 598 bp, Homo sapiens
gctgctccaaaaaatggaaattgcaaaacctccgaactccttcgggaaagcgaaacccaaggctccggcgcccagcctgactgactgcattggcacggtggacagtagagcagaatccattgacaagaagatttctcgattggctgctgagctagtgaagtataaggggaatttcagggcacttcaagaagatgagagagggtcctgcaaagaatatggtcaagcagaaagccttgcgagttttaaagcaaaagaggatgtatgagcagcagcgggacaatcttgcccaacagtcattcaacgatggaaccaatgcccaattataccatccagtctttgaaggacatcaagaccacggttgatgctatgcaaacactgggaagtacaaggaaatgaagaaggcatacaagcaagtgaagatcgagcagcaattttgcacgggaattttacaagagcagctagaggatatgatggaagatgcaaatgaaatccaagaagcactgagtcgcagtttatggaacccagaactggatgaagcatggatttaagaaaagggccaaggaaaggttgggatgcacataggtgatgagctctggtg

SEQ ID NO: 675502 - DNA, 120 bp, Homo sapiens
  misc_feature (7)..(7): n is a, c, g, or t
  misc_feature (112)..(112): n is a, c, g, or t
cgtaagnaagacgacaagaagggacaggggagtacaggcagaaagagaagagaaggaaaaagaagaccaagtaagacaaggtgaattttttgttggcttcaagtaacacttnggaaactg

SEQ ID NO: 675503 - DNA, 129 bp, Homo sapiens
  misc_feature (41)..(41): n is a, c, g, or t
cctatccggtcgctgctcgagatgcgcgatcaccaccgtgncgcgtgctcgaccagtacctggtcttcacgtgcttgtgttgatcgcgatgccgcagatggtctcccccggttgctcttattgatgtca

SEQ ID NO: 675504 - DNA, 1664 bp, Homo sapiens
ggatgtggtgtggtagctagtgtccgctgagccgctgtgttgtggggttgtcgcgccggtcggccgccctctcttgggggtagcagaggaggtgtctgtcgacgtttgttccttcggctggtttggagatgtgttcgcggagggaacacctcggttggtgtggctccggcccagctgcgttgagtagcgccgatgatggccgaccccgacggcgcttttggtgtggtggagtggcgtccgcctgtcgggggtcgccctgtctgatagcgtgccgcgcgtgagttaatgggtgtgtaagctgggctcgttacttgggggaagaaacgttgtactagacgacgggggcgagaaggacacacatagagggctgcttataatttgtctgacactcggacgaacggaacctgtgggtagagacaaaaattatgtcgcttcggggggggtgtgtcataatctcgagcttgggagacgcccgcgcgtcgtgtctgctgtgggtggagcgcgggtttgcgtgttcgggggtggtgcggttgctccccgtagcgagcatgcgttttatccggggctgtgtggcgtgagaaggtaatatgggcgcccctcacaggggggtgtgtttacgttaggcctcctgcggggtatggaacgttacacgcgggggggccctacttgttaatggggggccacaccttatagtgtgttcttaatgccgtccatcgctcctcgggcgcggcgttggcggtgtttggcccctcttcttagggggggacgcggtgtgaacaccccctctcgtgggtgcaagtgtggtggcccgcaggttgtgctttgtggtcgtcgcacgtgttacgcccacggtgtggggggtttccgccgctaagttgtgtttcaccggggggaggtttagccttggggaagccttttttctgtgggagggcgccacctgagttggtgacccactacttttataataggcgggggtatctatagaggggctggtttcccccgtcttgtgtgtcccgctctctgggttggggcccgcgtgtgtttggcggagctgttttttggagcactcttccacgggttccctcgagtggagagaaaagagctcttccaacgggggtcttttgtagaagtagatgtgtcacgcagttcgtagatggatgctttgtgtgccgtctgtgtggccccgcagcacgccaccagccgctgtggagagaggcgccctgtgtaggtagaaagatgggcaccagagttgtcttgtagaaaactctctcggcgcgcctctctaaaggtatactcgggctgggtttaaagggaatacacaccccaacctcgtgtttgtttctgtatgttcacataatagatttcttcgggagataacaccaccaccaccaccaccaccacataataataataacaccaccaccacaacggtagataaaccaccaccaataacaataataatatataaaatatatcctgaatggccacgagtttttttcataaatattctgcctacgtgtaaataatgggttcctctgaggttgttttatgagaaaattagcgccaatgtattaaaatccagtgttagggaatttcactggtcttacctaccataacttttattttgggattgaactattattaaattgtatcttatcctggga

SEQ ID NO: 675505 - DNA, 240 bp, Homo sapiens
gcggttatggtggaatagtgggagctgccccacatgctgcagatgcctcgccttcatagtggaagtcacagtggctggctcgggtccgacactttgatgggcaggtgcttgtacacgcaggttccgttgcgcacagcctttgggtccagcagtacgacacggttgtcacccacgcaccttggccaccgtgcaggttctccagggtccaggtctcattcacctgccggagagggatggcat

SEQ ID NO: 675506 - DNA, 278 bp, Homo sapiens
cctgcgtatcgcagtgtttgtgtccctgggtacttgagattagcggcgtggtgatatctcttaaggagcatgctgccttcaagcatctgtttaacaaagcacatcttgcactgcccttaatccatttaaccctgagtggacacagcacatgtttcagagagcacagggttggaggtcaggtcgttggtctgcaacacagcttttatgagcaggaggtcatctgcagttttccagcggcctagatccttggtcacctgaagtggctgtttactcttctt

SEQ ID NO: 675507 - DNA, 426 bp, Homo sapiens
ctatacgcgaatcacactgtaacactctcgtacattgctccatagtcctcatcctgctgggcctgctgctcttcaacaatgtaccccattgatgagtgacgatgtgcggcggcagaataagaaggccctgcaggcactgagggacgaggccagcagctctggctgctcagaaacagactccacagagctggctagcatcctctagggcccgccacgttgcccgaagccaccatgcagaaggccacagaagggatcaggacctgtctgccggcttgctgagcagctggactgcaggtgttaggaagggaacttaagactcaaggaggtggcccaggacacttgctgtgctcactgtggggccggctgctctgtggcctcctgcctcccctctgcctgcctgtggggccaagccctggggctgccact

SEQ ID NO: 675508 - DNA, 889 bp, Homo sapiens
  misc_feature (122)..(122): n is a, c, g, or t
  misc_feature (126)..(126): n is a, c, g, or t
  misc_feature (129)..(129): n is a, c, g, or t
  misc_feature (184)..(184): n is a, c, g, or t
  misc_feature (198)..(198): n is a, c, g, or t
  misc_feature (234)..(234): n is a, c, g, or t
  misc_feature (237)..(237): n is a, c, g, or t
  misc_feature (260)..(260): n is a, c, g, or t
  misc_feature (264)..(264): n is a, c, g, or t
  misc_feature (273)..(273): n is a, c, g, or t
  misc_feature (282)..(282): n is a, c, g, or t
  misc_feature (309)..(309): n is a, c, g, or t
  misc_feature (320)..(320): n is a, c, g, or t
  misc_feature (327)..(327): n is a, c, g, or t
  misc_feature (333)..(333): n is a, c, g, or t
  misc_feature (355)..(355): n is a, c, g, or t
  misc_feature (416)..(416): n is a, c, g, or t
  misc_feature (425)..(425): n is a, c, g, or t
  misc_feature (436)..(436): n is a, c, g, or t
  misc_feature (447)..(447): n is a, c, g, or t
  misc_feature (472)..(472): n is a, c, g, or t
  misc_feature (475)..(476): n is a, c, g, or t
  misc_feature (520)..(520): n is a, c, g, or t
  misc_feature (543)..(543): n is a, c, g, or t
  misc_feature (572)..(572): n is a, c, g, or t
  misc_feature (581)..(581): n is a, c, g, or t
  misc_feature (591)..(591): n is a, c, g, or t
  misc_feature (602)..(602): n is a, c, g, or t
  misc_feature (620)..(620): n is a, c, g, or t
  misc_feature (624)..(624): n is a, c, g, or t
  misc_feature (632)..(633): n is a, c, g, or t
  misc_feature (641)..(641): n is a, c, g, or t
  misc_feature (646)..(646): n is a, c, g, or t
  misc_feature (654)..(654): n is a, c, g, or t
  misc_feature (658)..(658): n is a, c, g, or t
  misc_feature (670)..(670): n is a, c, g, or t
  misc_feature (674)..(674): n is a, c, g, or t
  misc_feature (688)..(688): n is a, c, g, or t
  misc_feature (691)..(691): n is a, c, g, or t
  misc_feature (696)..(696): n is a, c, g, or t
  misc_feature (699)..(699): n is a, c, g, or t
  misc_feature (702)..(702): n is a, c, g, or t
  misc_feature (714)..(714): n is a, c, g, or t
  misc_feature (739)..(739): n is a, c, g, or t
  misc_feature (746)..(746): n is a, c, g, or t
  misc_feature (758)..(758): n is a, c, g, or t
  misc_feature (764)..(764): n is a, c, g, or t
  misc_feature (766)..(766): n is a, c, g, or t
  misc_feature (792)..(792): n is a, c, g, or t
  misc_feature (797)..(797): n is a, c, g, or t
  misc_feature (882)..(882): n is a, c, g, or t
ggtgggtgagtgcaccgcgttctcgcacgcgtcatggcggtcctcggagtacagctggtggatgaccctgctcactgccaccctcatgcacaggctggcgccacactgctccttcgcgcgcnggcngcnctgtaacggcagtttgttccgatacaagcacccgtctgaggaggagcatcgggcnctggcgagggaagncgaggcccagaggcaggaaagagcggtgggccaatngcnttagtgaggagaagccactgatntgtnccccgagangccccgttncagctggagaactgccccctcacgacngtggatgcacnggaggcntactantacatagctgggaccagcaaangagaataaaattgctgtgtatctggtgcctgcacacggtgacacaaatccatcaagatgtncctgaaagnaaaaaggctgnacttcagcgcngaggaggggggtgagcgctctgtangcnncaactttgcattaatcttcctgctgctggaatgctggtgaagtngtgcgggaggagaacctcgagcngggcctggagcatagatggccagcatganccagaactnagagccactnctgaagaagcngggctgggactgggcgcntccngtggccannctggctanccgcntgggactngcantggtgggctctntgcngggtgcctccctcnccnccccncgnctncggctggcccanacccaccgggacgcactgaccatgntggaggncacacccatgcngcagtntntcctgcacaccagcatcctgtgtacnctgtncaccctgtggctctggacacaccccaccgcacgggactccctgcaccacccgccgtttgggggagacgcgtatttccctgctgtncgattct

SEQ ID NO: 675509 - DNA, 122 bp, Homo sapiens
  misc_feature (74)..(74): n is a, c, g, or t
  misc_feature (97)..(97): n is a, c, g, or t
  misc_feature (107)..(107): n is a, c, g, or t
tgtcgtagagtgtatatggctgaatcatcgctacttcacgccaatgcgctcatatctttatctgcctcttcccnttacacatcggcgaggctatatnacggatcatntctctactcagaaac

SEQ ID NO: 675510 - DNA, 206 bp, Homo sapiens
gccacgtcggcttccggaggtgctgggatgacaggtgtgtgagccgccacgcctagctgtctctttgccattttttaatttcttgtttcatttttcctctctcccttgcctctctttttcttcttccttttattctttcctgtcttgttctttccttcctctctgtttctccctttctccctgaagaccctgaagattgcttgtgg

SEQ ID NO: 675511 - DNA, 139 bp, Homo sapiens
  misc_feature (124)..(124): n is a, c, g, or t
tgggttgaagctcagagaggcaggtccttgatgaccccataactcccactgcccctttaacaagggactcttaacgagccggatgataacccaaatcctaaacactgttgcctcatgacgcctncttccagcacacagc

SEQ ID NO: 675512 - DNA, 702 bp, Homo sapiens
cctacaaagagacttagtctcccacacaataataatgggagactttaacaccccactgtcaacagtagacagatcaacgagacagaaagttaacaaggatatccaggacttgaactcagctctgcaccaagcagacctaatagacatctatagaactctccaccccaaatcaacagaatatacattcttctcagcaccacatcgcatttattccaaaattgaccacatagttggaagtaaagcactcctcagcaaatgtaaaagaacagcaattataacaaactgtctctcagaccacagtgcaatcaaattagaactcaggattaagaaactcactcaaaaccgctcaactacatggaaactgaacaacctgctcctgaatgactactgggtacataactaaatgaaggcagaaataaggatgttatttgaaatcaatgagaacaaagacacaacataccagaatctctgggacacgttgtaaggcagtgcatagagggaaatttatagcactaaatgcccacaagagaaagcaggaaagatctaaaattgacaccctaacaccacaattaaaagaactagagaagcaagagcaacacattcgcagcagaaggcaagaatagctaagatcagagcagaactgaggagatgggacgaacgctcaagatcatgatccggactggttttggaagacctggtggc

SEQ ID NO: 675513 - DNA, 178 bp, Homo sapiens
gaacaacaatgcggacaatgtatcccactagactacaaggcataaattgtggcccacacttcactccatcctttgccaaccttggtcgcactaaccttaacacccgtgggcccccaaggggtgggccaggtggggagctgccccgtgggccgactggtctgagaccccggcgctctca

SEQ ID NO: 675514 - DNA, 745 bp, Homo sapiens
ggcggcgaagcgctctggagaatcccggacagccctgctccctgcagccaggtgtagtttcgggagccactgggtccaaagtgagagtccagcggtcttccagcgcttgggccacggtgggcggtcctggtgagcagaggtggagcgaccccattacgctacacagatgaaagtgctggaggttgggctggccctgcttctgggggccctgctgggaatcctgcctgttgctcggtagtgagccaggatctccactgtggagcatgcatgggctcgtggatgagatgaactagtaattgggaaattgcccaggtggacccctagatgaaagaccattcatgatgggatctttccggatacatgtccagtatggtcgagccagtcagtgtggtgtgaggtaactgttactgtttcccccataagcaaagtagtctcactctgggctttggatgaaattcgagctgcttgaaaagaggaccttggttgtactagaacactgaagaaagacatgactcagaaaataacagatttggctctgtctcattttggacagaatgctgcaggcttattccccatgcacctttgcttcctggctgcgaaagccttaatactttgtttctgctgtagaatttgttagcaacacagggagtcctgatcagacccttcttcagatccacatgactggtttttaatgtagcactgtggtatacatgcaacatccgttcaaaatctgagtcggagctaa

SEQ ID NO: 675515 - DNA, 544 bp, Homo sapiens
ccggtctaagcggatactaccgctactgagagacagtaacagtatcacctccagatgcgtcttgccaggccacctctcctacctaagagctaatggaacaatttgtgataggtttgtcagtgtcccccatcgactctctggggctagatcactatagttattaggcctctgctagcagccgtacatactagatccaaagtgtggcagcgaagaacagagtaccctctatcaagccccggtcatgataggaggtcacagccacagggaaacatgagctcagtggtcttggaacagctcactaagtcagtccttccttagcctggaagtcagtagtggagtcacaaagcccatgtgtatggccatctaggccttcacctggtctgtggactaatacctatgtgcttggtttacaggtccagtgtttcttcagcccatgacagatgagaaggggctatattgacgggcaaagaggaactgtagtatgaatattcctgagagcctggcttagtgctggcgcatctcttaaacctcattacaatgaggt

SEQ ID NO: 675516 - DNA, 185 bp, Homo sapiens
tgaaaagaactgtagatgcccggctgcaattaagtgaggaatagagtagtaggtagatagaagccaaaacctattgatgtacaagtacattacacaccacatgcagcgatatacagtttagagtaaaggaggatcaatagctaggctaacacgcctgaatatactaaccaagtaatagccacacc

SEQ ID NO: 675517 - DNA, 233 bp, Homo sapiens
aggtctagaggatcccttcagcacatatagtcaggcgtgagctaccatgcccagccaaggctaggtatttaaagtgtcaaggagttgatttcaagcttagatgcagtgacccccccccacccctgggaagaaaggtacattacatcacattggccatcttgaagtaagattcatggatagtataatcaaccacacacacattaaaacaacaacaacaataatataatactcta

SEQ ID NO: 675518 - DNA, 1016 bp, Homo sapiens
tgcaccacatcatcaacgtagatatctgcctatacactttaccaactaacttctttgggaataatagtatgagtcgcctcattaatgtcgatgatctctcactctagctatgccttatgaagtgatttaagttctatgcgcttgtctcgattttagatcattctcataatgctcagatagctactcccgtcgtaatcctttattgtgcctatctgctcgtacgtaggctaggctcagctcttgtgcaagcaacataaaggggccttctcattacataggtcttactactcttacgcaataacgttattgagacgggagaaactactctatcattatctcttaaaactttaactcgaatcgtctgccatactaatcagatcctcaaagcagtgatatatctgaacagctgctgtgcaatttgcctcctgaactctttaatctgagatctagtctcaagtcattcacacatggcattaatttcatttatacattcaatacccatacgattgataattttaccctgatcaagcaaggaacgtacctggcttggacctcgcatacttgttgacttcccggcgccctcggtaaaatccgccactatctttaaatacatgtggaagatgtgacttaaccggatcatagaatggtgccctgcatcccgctgaaatatgccatgtaagtcagtcatttaatatattatcattatctaactatgcttcttgacaaatctctatgatctgagtcagtctcatgcgaatcgacacggctcatcttatcaaaatctcgtgcaggcacctgaatccctactatgttttatgtcgcgtgtcggtcggagcctaccgctgaacattgttattgccaaattgaccataaggcatgccttgacgcgggttagggaatccaagtcatggtggcgccctgcttgcagagcttagtcccgacctgggatgtagggggccaaaaacgggagctagccagagcctggaaaacacaagaagacacaacgaactaaaaca

SEQ ID NO: 675519 - DNA, 220 bp, Homo sapiens
ggatcgatcagagcatacccctagttcaatactttcctataccccaaagctctatactttgaaggaaaacagatacagtatccaattatgacactttccttgcccaattaatagcactaggtacacccagtggctcatatttaacttaccccagcttcccaattcaaactggggggagaaaaactaaatcattgggagttacttgccaacttggaagttg

SEQ ID NO: 675520 - DNA, 395 bp, Homo sapiens
gcccacggcaggtgtactgagccagatgcatgacagagcaagactcggtataaataaaaaacaaaacaaaacaaaacaaacaaaaaaacaaaacagaaagaaagaaaagaatcttggcaaggcacagtggctcacacccgtaatcccagcactttgtgaggatggcttaagcccaggagtttgagactagcctggacaacatagtgataccttgtctccacaaataatttaaaaatgagctgggtgtggtggcatggatctgtggtctcagctactcaggaggctgaggtgggaggactgcttgagcctaggcagtggaggctgcaatgagccgtgagtgtgccactgcattccagcctgggtgacagagtgaaaccctgagtacaacctgccgg

SEQ ID NO: 675521 - DNA, 126 bp, Homo sapiens
gactcactggaacagaagcccacaaggctgaaagtatgcgatgtcatttgaattttgatccgaactctgctcctggggatgcaagagtttatgactaagtgcaaagtagtggtcccatggttgtga

SEQ ID NO: 675522 - DNA, 1055 bp, Homo sapiens
ggataaagccccaggtctcatatgcaaacaggcacttccgcgaaagcttacactaatgtttctggcatggagcgagccgtcgatggcgctgcgcatgcgatgccggctgttactacgatccatgtcgacatcacacagatggcacgaggaatcacatgaacgacagctccctcacggctcatgacgtggcccgagtgcctgtgctggatgacctgttgtgcctgaacttaggtcgctattgagtcgactatcttacctcgcactcgtgctcgacagtggacaaatccattggcagcatagctttgtgcactgactgaagtttgccccttgaacggacctatcgttgcacgcagctcaatcttcggattgcgctttcgttttccttcaaccgggccttcttccaaagggaaacgcgaccagacaccgtgtgcacccgtgtgctaatcgtgcacgctattgcgagaagtttccctctcaatatttactatccctattagactaaccccacgctaattgtgggcttagggcccccaccgaagatcattaagagtggccttggagaccgatagcgtggttattgccaagggaacacgaggaggcccccctttgagaaaggcgccgttaaatcacaggtggcgcccaaggaaccggccaggtaagacggaaggggcccatcgcgtggaaaacagtgaacaggcctttgtaagccttcagcgcaaagggcttttccgggcaccgcaactggaaaaaggccgataggcgagaggactgcaatggccgttgggcggaagtccgaaccccctgagagaacagtgggccgcaccacaagagtccgcaccccggaggccaaacccaaacggtggaccttttggcgggagggaaaggaaaaccaggccccctgcggagccccgccttagtggaaaagggcctgtaggcgaccgcagcatacgaccgccagcaatgagcacggttagacaccgagagggacaccacggcagtaggacaccaggcgcagggcgtacggataaggaaaggggaggcgcaccctactgcag

SEQ ID NO: 675523 - DNA, 1005 bp, Homo sapiens
  misc_feature (620)..(620): n is a, c, g, or t
  misc_feature (655)..(655): n is a, c, g, or t
  misc_feature (662)..(662): n is a, c, g, or t
  misc_feature (741)..(741): n is a, c, g, or t
  misc_feature (786)..(786): n is a, c, g, or t
  misc_feature (788)..(788): n is a, c, g, or t
  misc_feature (798)..(799): n is a, c, g, or t
  misc_feature (808)..(808): n is a, c, g, or t
  misc_feature (821)..(821): n is a, c, g, or t
  misc_feature (853)..(853): n is a, c, g, or t
  misc_feature (864)..(864): n is a, c, g, or t
  misc_feature (890)..(890): n is a, c, g, or t
  misc_feature (895)..(895): n is a, c, g, or t
  misc_feature (929)..(931): n is a, c, g, or t
  misc_feature (935)..(935): n is a, c, g, or t
  misc_feature (939)..(939): n is a, c, g, or t
ctggtacgaggatcagcagtgatttctttgaggaggagagcccgtttcttcactcacaggccatgtctgagtgtatcaagaagaacagagtgcccttttatgagatttgtctgcgtagaccactagcttggactggtgctctggatggctgaggttttaatgtgactggatgtcccttggagtagctcccaggctgtgctcttgtggttgggtgctcctcctggagggagagaaaagtctctcctaggtatttggttgtccacctcaaccacttgctgagtcttccgcaagaccaggcacctcggcagagatttctgggttgtcaggcagaaccgagcattcaagggtgataactcactggagtccctgaaatccctgatggacgcaccaggcggaattctccacgagtttgagcagcctcgggtttcccaccacctccaaatcatggaagacacacggtgcaggcagagcccccggagccatggccagcccttccggcagctccgaagccactggcaagccccgaggcagggatggccggcccaggagggaggaggacgacgtccctcccgaagagaagaggctgcggctgttgctggaggggggaagcgcacagcccnaggactgcgaggacggggaggacgcgccgcggccnggcaggnaggagaccggcacccagacaggtggcgacggcagaggagtgcagtggttcacacctgtaatcccagcactttgggaggncgaggctggcggatcacctgaggtcaggagttcgagaccagcctngncaacatggcnnaactgtctntactaaaaatacngaaattagccaggtgtgatggcacacacctgnaatcccagctncttgggaggctgaggcaggagaatcntttgnacctgggagacagaggttgcagtcagccgagatnnnaccnctgnacttcagccacctgggtgacagagcgagactctgtttcaaaaataaataaataaataaaatagaaa

SEQ ID NO: 675524 - DNA, 105 bp, Homo sapiens
tatgtctcctttttgagcctgacatgtctcgggtcgctgctatgatacccagatgcccagcccagggccaggcacacagcagagcgcaggacctcggatattaag

SEQ ID NO: 675525 - DNA, 480 bp, Homo sapiens
tcatcccatcctccagggcccacaagtccatgactgctgcctctacccccaaccctactgacctgaaatttggcccttgctttcatttctgggagcatacaacacttacaccaagcattgatgggttttattgacttcatttgagttgtggggccatggagagtgttccatgatccttgcttggtgttgaccaactcattgacttttctcctttgacttcacccttcccttttctactcacatcctctgtcatggattgctatgggaattctgagccctggttcctttattttgcagataacttcactcttctctgcaacgaatcccaaaagtatataattgagctgactgcaaggtacttgacacgcaagagactccacaaatgggattcagcctctggaaagtggtggtagttccagatttatgtggatgttactttgtttttccctataaaatatattatttaaactatcaaaaaaa

SEQ ID NO: 675526 - DNA, 377 bp, Homo sapiens
ttgggacagagacctatggcctgcaaagctgaactatttaccatctggctctcaagaaaagggaaaaaaaaatgcttatctttgtaccgcgacagtcttagattaagaggactttgtaccaccctgacgtcccaggcggccgtgagtccagccacccctgaaatgtacacaagtctgggctagggttgcagcagataacttcactcttctctgcaacgaatcccaaaagtatataattgagctgactgcaaggtacttgacacgcaagagactccacaaatgggattcagcctctggaaagtggtggtagttccagatttatgtggatgttactttgtttttccctataaaatatattatttaaactatcaaaaaaa

SEQ ID NO: 675527 - DNA, 129 bp, Homo sapiens
cccccccccttttttgggggtttcaaaaaaaagtgaacttgatcccccggctccccctaaacccagttgggccaaaatttaacgtgccaccagatcgaaaggttatagaaataaaactaatgagttcta

SEQ ID NO: 675528 - DNA, 838 bp, Homo sapiens
ggctgttcttctcacatgacaaaaatagcccccatctcaatcatataccaaatctctccctcataaaggtaagccttctcctcactctctcaatcttatccatcatagcaggcagtgaggtggataaaccaaacccagtacgcaaaatcttagcatactcctcaattccccacatagggatgccataatagcagttctaccgtacaaccctaaataaccattcttacatttacctcttcatattatcctaactattaccgaattcctactactcaagtttaaactccagcaccaggaccttaatatatctcgcaccctgaaacaagctaacatgataacacccttatttccatccaccctcctctccctaggaggctgcccccgtaacggcttttgcccaagtgggcattatcgaaggatcacaaaaaacaatagcctcatcatccccacaatcatagccacatcaccctccttaacctctattctacctacgcgtaatcaatccactcaaacaccataatccccatattaagcagtgtagaaatacagtgccgcgttgggaacattataaaaaccacaaccaattcttccacaaaattcattgccctaaaccagcttaatcctaactaatttcccctttaatactagtaatcttaatagcaccaacaacatcacctacaacccaagtttggggccccgccctcgaagagctctaacaccattgttggggccgcgccccacggtagtaacaggccaccggtcccacgacacggcgcacgtgtggtgttccaaaaaaacgggcgcggtcgcccccggttggctgtatagggcggcacgg

SEQ ID NO: 675529 - DNA, 416 bp, Homo sapiens
  misc_feature (21)..(21): n is a, c, g, or t
  misc_feature (39)..(40): n is a, c, g, or t
  misc_feature (55)..(55): n is a, c, g, or t
  misc_feature (59)..(59): n is a, c, g, or t
  misc_feature (69)..(69): n is a, c, g, or t
  misc_feature (79)..(79): n is a, c, g, or t
  misc_feature (251)..(251): n is a, c, g, or t
gtccgcgccgcgcggacccancgagcccgcgctcagacnncccagctccgccganaggncgctcgcgcngggtccttcntcttccccaggtgcaggcagagcccccggagccatggccagcccttccggcagctccgaagccactggcaagccccgaggcagggatggccggcccaggagggaggaggacgacgtccctcccgaagagaagaggctgcggctgttgctggaggggggaagcgcacagcccnaggactctccagggagtcggcgaacgcgccccgcccccccacaaagagcagacccccccccctaacaaaagagcgccgcgcacaaaagtcgccgtttttcaatatttttcgagcctctgcgtttctccaccacctcccacaatatacggcgaacgagctagaggt

SEQ ID NO: 675530 - DNA, 826 bp, Homo sapiens
  misc_feature (21)..(21): n is a, c, g, or t
  misc_feature (39)..(40): n is a, c, g, or t
  misc_feature (55)..(55): n is a, c, g, or t
  misc_feature (59)..(59): n is a, c, g, or t
  misc_feature (69)..(69): n is a, c, g, or t
  misc_feature (79)..(79): n is a, c, g, or t
  misc_feature (251)..(251): n is a, c, g, or t
  misc_feature (286)..(286): n is a, c, g, or t
  misc_feature (293)..(293): n is a, c, g, or t
  misc_feature (430)..(430): n is a, c, g, or t
  misc_feature (436)..(436): n is a, c, g, or t
  misc_feature (440)..(441): n is a, c, g, or t
  misc_feature (463)..(463): n is a, c, g, or t
gtccgcgccgcgcggacccancgagcccgcgctcagacnncccagctccgccganaggncgctcgcgcngggtccttcntcttccccaggtgcaggcagagcccccggagccatggccagcccttccggcagctccgaagccactggcaagccccgaggcagggatggccggcccaggagggaggaggacgacgtccctcccgaagagaagaggctgcggctgttgctggaggggggaagcgcacagcccnaggactgcgaggacggggaggacgcgccgcggccnggcaggnaggagaccggcacccagacaggtggcgacggcagaggacctctgcctcagtctcctcttctggaaagtgggattggaaaccacatctgcttctctcccagggactgctaggaagacaaagattagatggcccagganggaaantacnngtacagccaacttccttgaggnttcgtcttttgcatcagggtgtctcaaactcctgcccttaaaacacctgcaagagaatcatctaggtggcttgctcgctctgcatgcagaccctttagaatcagagtcagaatacctggggctggagccacaaaatgaaatgacatttcaacaagtttgtcatcacgtaagagagaatagataacttcactcttctctgcaacgaatcccaaaagtatataattgagctgactgcaaggtacttgacacgcaagagactccacaaatgggattcagcctctggaaagtggtggtagttccagatttatgtggatgttactttgtttttccctataaaatatattatttaaactatcaaaaaaa

SEQ ID NO: 675531 - DNA, 885 bp, Homo sapiens
  misc_feature (620)..(620): n is a, c, g, or t
  misc_feature (655)..(655): n is a, c, g, or t
  misc_feature (662)..(662): n is a, c, g, or t
ctggtacgaggatcagcagtgatttctttgaggaggagagcccgtttcttcactcacaggccatgtctgagtgtatcaagaagaacagagtgcccttttatgagatttgtctgcgtagaccactagcttggactggtgctctggatggctgaggttttaatgtgactggatgtcccttggagtagctcccaggctgtgctcttgtggttgggtgctcctcctggagggagagaaaagtctctcctaggtatttggttgtccacctcaaccacttgctgagtcttccgcaagaccaggcacctcggcagagatttctgggttgtcaggcagaaccgagcattcaagggtgataactcactggagtccctgaaatccctgatggacgcaccaggcggaattctccacgagtttgagcagcctcgggtttcccaccacctccaaatcatggaagacacacggtgcaggcagagcccccggagccatggccagcccttccggcagctccgaagccactggcaagccccgaggcagggatggccggcccaggagggaggaggacgacgtccctcccgaagagaagaggctgcggctgttgctggaggggggaagcgcacagcccnaggactgcgaggacggggaggacgcgccgcggccnggcaggnaggagaccggcacccagacaggtggcgacggcagaggaagataacttcactcttctctgcaacgaatcccaaaagtatataattgagctgactgcaaggtacttgacacgcaagagactccacaaatgggattcagcctctggaaagtggtggtagttccagatttatgtggatgttactttgtttttccctataaaatatattatttaaactatcaaaaaaa

SEQ ID NO: 675532 - DNA, 403 bp, Homo sapiens
caaactcccttactagacttcttaaaagcatcttgtattacaccagaactatcctaaagcaagtctacaacacaaagagcctcaacttaagaaaacatcatagtcttcaaggacagaagaaaatctttaaacttcacttcagcattatatatagacagtttcggtcttcagtattatagtcccagatttctggaacccttctaattggtcaggtttaagcaaatcaataacctctctctaatctaccacaggacttaagtcagcattatccatcaaaggaatataagtagttgcatgaataaggggtacatctacgaagacattttcagtctattgtatctttgatgaagcttacttcttccctgatccactaatcttgttaagtctcttggtggtagaacat

SEQ ID NO: 675533 - DNA, 123 bp, Homo sapiens
agtcacagtatgatcacaaatgggcaccgttaaaacagtaacaaaaaacacaccacacattgaaaaatccttgtcactaaacacagtggaccaacagaggcaactctcacagtgtcttaaggt

SEQ ID NO: 675534 - DNA, 276 bp, Homo sapiens
agtcatttcactattcaactagacaaccagcagcgtaaacttgagtaatggacgagggaataattgatatacactctttctttgtcattattgcgtctttatcttatgcatcagtattcttacgaaggaccttgtctcttccattcgagattgtgtgtcttatgaactgaacagatgttgcctttcatgtgatgtaactattaattttttcctgctcatacttcttaagcgattcctacctgcctctcatcatgaatcattgaagataattctcca

SEQ ID NO: 675535 - DNA, 276 bp, Homo sapiens
gggtcggccgtgcttggtgcatctcggctcatgtaacctctctccgggtttcagcaattctcctgcatcagacctctgagtagttgagattacaggtgcatgccaccatgcccagctaatatttgtatttttagtagagacagggttacaccatctaggccaggctggtcttgaactcctgacctcgtgatccacccgtcttggcctcccaaagtgctgggattacaggtgtgagccatcacgcccggactttttttttgagacgacgttccactc

SEQ ID NO: 675536 - DNA, 109 bp, Homo sapiens
tcccggttgggatcacaggtcttggtgaggagggtcttgactgaggagggtcttggtgaggcagcacaaactggaaggttgtgctagaggttgtgctgaggttagtgct

SEQ ID NO: 675537 - DNA, 290 bp, Homo sapiens
ttgctggttgagccctcccaacagacatgtatctggcagagttgggacattgagtgtgggggttgcggggaacatgtgacatctttggaatcatgacggtgccagagcggataccttgaaatgtactgttgggccgttatagaggtctaaaacagagacctgtggaagtgacttggtccggacagtgtggacattattcctatagtgggggcattcaagatctaggcctgtgattgactagcacaatacttaaagtattggtcaggattgattaaacaactcctgcctgt

SEQ ID NO: 675538 - DNA, 642 bp, Homo sapiens
  misc_feature (305)..(305): n is a, c, g, or t
gcgtgcccgaggctctcgcctcccccgtccgcatcggaggcagctcgagcccagtccggggcccattgcagcagcgccgagagcagcccagtagccatgcgctcatgtggccgggtggaactgcctacatcgacttacctcatggcggatgggacctgtcaggacgcgggcatcgtgggttacaaggactcgtcctccgtctgggccggcgtccccgggaaaaggttcgtcaagaattacgccagttgaggtgggtgtcctggttggcaaagaccggtccatgtttttagcgtgaatgtgcgctngacacttgggggtgccagaaactgttctggggtgatccgggactcactggctgcgtggataggagcggactttagccctggatcttcgtatccaagagcaccgttggggcccccctacctgttccaggtcactgctcaccaacgactggacatatagcgctaagtccgtgtcttgagtgggcatacagaatgtgtgtcccacgagctgagtttggacttcaagcagcgacgactgttactgacatgggctctgccgatccttcggctgttgccagctactgagcctcgtacttgtccccattccgcccttacatccggctcctacaacaagggttgg

SEQ ID NO: 675539 - DNA, 330 bp, Homo sapiens
gcaggaattcggcacgagctgcccagagggcgagcaggagccaccacagcttgcaccgtctgtgccacctccaggcacagtggactctgaacctcgggtgtccccagtagctcccatggaatctgggatatttcctgataagtattccctgcagtttggctttgggccttttgagttaccccctcagtggctctctgagacccgaaatagcaagaagaggctgcttcccccactgggcaataccccagaagagctgatccagacaaaggtgcccagagtgaacagggtggaacggaagatgagcagaaacaataaagtgagcatttttcc

SEQ ID NO: 675540 - DNA, 796 bp, Homo sapiens
  misc_feature (129)..(129): n is a, c, g, or t
  misc_feature (189)..(189): n is a, c, g, or t
  misc_feature (201)..(202): n is a, c, g, or t
  misc_feature (204)..(204): n is a, c, g, or t
  misc_feature (206)..(206): n is a, c, g, or t
  misc_feature (253)..(253): n is a, c, g, or t
  misc_feature (256)..(257): n is a, c, g, or t
  misc_feature (277)..(277): n is a, c, g, or t
  misc_feature (300)..(300): n is a, c, g, or t
  misc_feature (325)..(325): n is a, c, g, or t
gtattcaggtacggggctggggttcattgataaatactggcctgggctggacaattacatcggtgcccatggatctccatgctcaatcccttcagttggtacagtgacatagtgtatgtgatctgggtnagggatgggggacagataatagaacgagcaaagtaacctatacaggccagcatggaacancatctcccctgnncntnctcctggcttgtgacgctataagacagagcaggccacatgtccatcntgnnccccattcttgaaagctgcngggcctccttgcaggcttctggntctctggtcagagtgaactcttgcntcctgtattcaggcagctcagagcagaaagtaaggggcagagatccatacgtgtggccaggaagtagccaggtgaagagagactcggtgcgggcagggagaatgcctgggggtccctcacctggctaagggagataccgaagcctactgtggtactgaagacttctgggtactttccttctgctaacccagggagggttcctaagaaggaaggtgactttctctctgtatgttcttaagttgcactgggagatttctggacttgaaggcccactctctccagccagccactgccttctatgtaataataaagtgccttgagcttaggaatggggacagggggacagggtcagactagcgaatggagccgaaaatcaatcagcccaggatatagtagaataaaacttaataagaaatcaacaaatacacagggatcaacataatgttaattatttgattaacacaacaaaca

SEQ ID NO: 675541 - DNA, 155 bp, Homo sapiens
taaacagagtcacccaggcgggatggcagtggcacaaccatggctcacggcagccaagcctgggcaacagagtgagactctgtctcaaaaaaaaaaaggagagagacggggggcgggggctcaggccttttaccccagcacttggggagggggga

SEQ ID NO: 675542 - DNA, 929 bp, Homo sapiens
gccgtgtgcagctgttggtgggccctgtgtgggaccctgtgtggccctgaggatggtggaacctgcggtggcttccagcgagagggttatcggagcagtggacatcctgtgaggccgggggtcgcaggcctgtggaactggtgtgcctggggcccagaggcgcggcgagacgcctcggagtagagcgcaaggaccagaggataacggagtgaattgcccggacacccaaatgtttggcgaccgactatgatacagagggcacattgacagaatcaatgctccccttgggaggagacgcatcctaagtactcatatcttaccctttgccatattacagagggaacatcaagaagaattcagtaaggaatttactttaccttgagggggagccctttcattccttccaaaagggactatgaagaggatcctgagaacaagacacttatatattggcccaagtgatggccacaagaaacagtgaaaagcaacacaccgattgcccgagcgcccaatggcagtgcacaccagaacgggttatccacaaggggagcacattatgatgtatgagggacatacatacaggaggaagcacataaacaaatagtgggcgaaccacaaccagaatatggggagtatcagtaggggagaggttggattaacacgaggagatgggacgatcaccacgaacacgggggtaaaatgtgtttatgagtccaccaactcgcagtgcgagcaagattcacatagtagtgagtagtggagccgcagcaattcccaaagttcctcgtgtgggagccacaccagaggacgatattcagataccgcacaaagttacggtaatcccccccacaccaggtatgtgaagcggccaacggcaaggtggtcaccacaacagattggggtggtgacgaaaacaccaaacagaggaa

SEQ ID NO: 675543 - DNA, 857 bp, Homo sapiens
ggaaaaaataagtcaaattatctttcttgctgacaataagattctatacctagaaaatcctaaagattctccccaaagactcctagatctgataaacaacctcagcagtctcaggatacaaaatcaatgtacacatatcagtagcatttccatacccaatgacattcagctcagaagcaaattaaaaatgcaatatcatttatggtagccacacacacaaaaaataaaatatccggcaatatatctaaccaaggaggttaaagatctgtacaaggagaactgaaaacactactgaaagaaatcgcagatgacacaaacaaacggaaaaacattctatgcttatggatggaggaatcagtatcgtggaatgtttatactgcccaaacacatctacaaattcgatgctattcctatcaaatgtgtgagtcactgttcacagaattagaaataactgttccaaaattcatatggaaccaaaaaagagcccaaataatcaagacaattctaagcaaaaagaataaagctggaggaatcacattacttgattcaagctatactacaaggatgcagtaaccttaaaagatggtactggtacaaaatggcacatagaccatggattgatagagaaccagaataaaggtgcactacaaatactatatttgcaagtcacataacatggggaggaatctatcataagggtgttaacgaaatgaaggggcggctttcctttaaaaaaaaaaaaaaaaatttgggggcgggcgcggaaataaaattggggggcagagagaagaaaggtcggaagggaaaggggcacaaacggggtgaaagaggttgtaatctacacaggtgggggggga

SEQ ID NO: 675544 - DNA, 361 bp, Homo sapiens
  misc_feature (115)..(115): n is a, c, g, or t
ttttggaagaaagtgtgggtgaaagtacattccagaaatagtaaagctcccctgtgtttaaccgtgttggtctctgtgttcctgaaaaacaggaacagcatcttttaagctgttntaaggtgtctcgttagagccaaagtggaatcggaaggcagccagagctgaggctgccccaagatcagacttgtaagaattacgccgccgacttcaaacccagagagcatctttttttaggcgaaaacgcatatatttattttttgtaagttaaccattctttcacattagataataagttttgggggatccttttgtaatgacgtcctggaaatggaacatttgcagtaaaaaaatatatataatt

SEQ ID NO: 675545 - DNA, 222 bp, Homo sapiens
agcggaggggccccgcgcggtgcgcgctcacgcacgcgcacggcctcgcctgcgcgctcacgaggcctctcgcggcacgcgcgggcgaggagcatggagagaaagaggagaggaaagccaggacgagcaccagaagaaaaacacaagcgacgaggacgagcacagcatattaacaaacagcaaaagaaaaacacaagcgcaagcgagagaagagcaacacag

SEQ ID NO: 675546 - DNA, 145 bp, Homo sapiens
ttttttcccaaaaaaaaattttttaaaacccttttaaaaaaaccccaagcccccccccataaaagtccccccttgccaaaaaaaggaatttcctcccttttttccccccccccccatttaaaaaacctattttaatgtttgtgta

SEQ ID NO: 675547 - DNA, 185 bp, Homo sapiens
agggtgatgctgtcaagctatccgtaagcaatgaacatcatcccatcattttgagtaatatcgttcctatgtagatatggaggcgttacactctatcatttctcctttggtttagtaaactcctggagcagttgtggagctgaaagtgaggtctgtatctcagtcatcctgtagcattagggtga

SEQ ID NO: 675548 - DNA, 111 bp, Homo sapiens
tgctcgaattcaagcttctaacgatgtacggggacatgttggagatctctattgtaatctctattggagattacaatgattaaatcaataaataactgaaacttgaaaaaa

SEQ ID NO: 675549 - DNA, 386 bp, Homo sapiens
caaagaaagtttttattacaaaaacctttactacaaatcaatgttttattaagactaaagtcaggaccttgccaacttactgaatcataagaaaacacatgaggaaagtcaacatggtctttaggctgacttgaattattccttgactaaaaattctagggttatgtggacttttctgttaacatcctgacttagttcctttctttagcagcaaaaaaaacagcagaaattaaaattttggcagggttgttttccaaataaaggggaccaatttgaaatttggatttgaagggcaaaagcagcaagttaccacaatgaggggttttaccctcaagaaaaaaaagttggtttccgaagttttttttattttaaaaaaattttaaaat

SEQ ID NO: 675550 - DNA, 933 bp, Homo sapiens
ctaaagtacgagtaaaccttatctcataaacccaagtttatgtgtcagcctggtgtgtgcgtacctggattaatctgatgtctaggtgccttgtaagcattctaagagatgacctcaggctgggtgtggtgcgcttacagctgtaggtcccagacacttattaggaggccgaggtgtggcaagatacacgctagagttcaagaccagcctggacaacatggggaaactccatctgtactaagaaactaacaagtagaatagttgggcatggtgatgcatgcctgtaatcccagcttcacgggaagtctgaggcaggagaatgtgcttgaacctgggaggtcggagatggcagtcagcctagatcacattcattgcacttgcacgcccagtactgggtgacaaagctccgtctcatgaaagaaagataaaaaagaaaaaaccgagaggggccaaaataggggggggggcgaaacagggatgatgaaacgtgcaagccattggtgaaacacgagaagtgacgacgcaggcccccagctctgtgatggggcccagcagtggcgaacaagcggagggcacaacacaatatgagggggggcgtcaaacaaaggttcgggaaatggccgggggagaaccgcgggcgtaaaaaaaagagaccccggggcaaaagggagacacactgacggggtacggacatacgacgaaagatgacgcacaagatgaagggtggcaattaagacacaacaggataccttggaagacggggctcgtgagcacctagcacagggacagccacgactcaagaaagggaatagtaagggaaagagtgcagcatacataactatcggccttgaagacacgaagcaccaggaggatcagacacgagaataagagtgagcaccaggtaccgatctgaacaccgttgagcccacatag

SEQ ID NO: 675551 - DNA, 398 bp, Homo sapiens
  misc_feature (100)..(100): n is a, c, g, or t
gctttagaatttcttgaacctaggaggtggaggttgcagttagccaagatagcaccgctgcagtccagcctgggggacaagagcaaaactccgtcttaanaaaaaagaaacccagacatataatcaaaggtgtgtcattgtttaattgacaattttttctctcttccttagtaaagcataaaataatactgagttttacatttgatggcatctcgtattcaagaaatacagtagctctccaagtttataccccccaaaaaacaaaacaaaacaaaaaacatttgctgagtctccccactccctgaatggagatttctactttacctctttcctaatgtcccaggaaaagccccagatgagttgtgactggctcctttccctaggctcagcaagctgca

SEQ ID NO: 675552 - DNA, 515 bp, Homo sapiens
  misc_feature (217)..(217): n is a, c, g, or t
acatcttgcagcaggtagcagctcgagtggaaaaggcaagacttgctgcctggagtggggatgaagaaacatttaggggcaggaaggcatcaggtttgagacacagtgactggaggatggtggtggtaaggcggtccacccacctaacaggaagtgagagatgtgcagctacaaaattgtttgatttatttcaatacaaacatttttcagacttaanaaaaaagaaacccagacatataatcaaaggtgtgtcattgtttaattgacaattttttctctcttccttagtaaagcataaaataatactgagttttacatttgatggcatctcgtattcaagaaatacagtagctctccaagtttataccccccaaaaaacaaaacaaaacaaaaaacatttgctgagtctccccactccctgaatggagatttctactttacctctttcctaatgtcccaggaaaagccccagatgagttgtgactggctcctttccctaggctcagcaagctgca

SEQ ID NO: 675553 - DNA, 194 bp, Homo sapiens
cgaaaacgcgtcgtaagctgagtggagatgcacagaaataatctggtagacttgtttaagagctagtcccgaaatgcaacgtcaaatctacagaatcccaggtgaagctcagtaatctgtatttttatccgttctccccaaagtaattctgagtgtgcagctcggggtaccgaggctcgaagttcgataagtca

SEQ ID NO: 675554 - DNA, 203 bp, Homo sapiens
gggggggggggttctccccccccttttttttctttgggccgggggggggggaccttttttttccccgggacccggtttcccccttccccctttccaaaaaatttttttggtgcccctttaaagggggcccccccggggggggggggggtttttttggggggccccccgggggggttttttttttaaaccccttcccccggtta

SEQ ID NO: 675555 - DNA, 196 bp, Homo sapiens
gggtggagcgggaataggttagcaactgagcaaccgtcagtatagccggaacagaactgcagggaggaagcggctcagagatagagagccagaagatgggcaggggagcagcaacgagaggagcgacagcgggcaggcagcacgcgccggacgagggcgtgcaagaggaagacgacaaggaagagggacggaaaaa

SEQ ID NO: 675556 - DNA, 132 bp, Homo sapiens
ggagcctgggatactactgtctctgtccagtagagaggagcttctgggtcctgtatgccccttccgactcttacttgaatgcaccatctacaaacgtgtctatctctacccctaggcttcttagctcttcag

SEQ ID NO: 675557 - DNA, 585 bp, Homo sapiens
agcgggtgcggcgaggcggaatggcggcggtgcggactcgttctcaggcggcccgcggggtgcggttccgaggtcgccgcactcaaggtgctggcggagcactgcgggcgacgcggagggcggccgggcgcgtggggtgtcacgggcggggcgggccggggcctcgtgtgacctgtgggccgtgtgatgcggggccagggtagtgatggcggacccggggcgaggctcggttgagggacccgagcggggacttctcggtccgcggcctgagcgggtgccgcgcgggcggccctgtctagttcccaggaaagtatgtgatcggtggctgggcagtggttccaggccttgccaggccctgaagccctgccctgcaggctgtgcaaacatgaccagaccttttctggaataatcccgatccattgacagttatgtgggacactgcgggggtacagcaagatttacacagggacatatttccttaagaggtattgttggcactgttgttcgcaaaaccaacgcaaaattcgcgaaactatttagcaaggttcatcaatgacttgttggaattccatggacacttttcaa

SEQ ID NO: 675558 - DNA, 110 bp, Homo sapiens
  misc_feature (14)..(14): n is a, c, g, or t
tatctagagcctantccttacctcggacctgagtaatgaccttaacctcgtgacctatacctacggagcctttacctcttgagccttaacctacggagccttaacctacg

SEQ ID NO: 675559 - DNA, 631 bp, Homo sapiens
cggaaggaagtttgggaagttgcttcatataaaatgggttatgtttaggagccgtgggaagtccggctaagagcatagattggagctgctgagattgaacgctcctgaagtccagttaaactttgctcctaggtggcaccagcctagttactactgctcacgttcataggtcgccgttggggccagtctgggaccacgggtctgtctaaaatctctcttcagcgcagcaggttgtggttcactagacaggggtccgaactggtaaagctttcacaagtacagaggcgttgatatgtagtgggccagaatcgatgtgtcatcaatgttgactgctgacgcaccgtcttgccagcatatctgaatgagatccttcacagagctgctttagatgtgcgcgtccgctatagttactagacaatgcgttctaagagtgtgctacgttgtttagaggggccaaatggcctatatccgtgtctcggtaatagaaccgtagttccattatgatacagttcggtgctgacgttcatgagcacttcttccgcttgtctcatatcccaggtcttcgggaccgcgctgcttgtacctgtgatgtctggagcctgtaaacgatattgttcgagcacgattgacc

SEQ ID NO: 675560 - DNA, 502 bp, Homo sapiens
gagcgatcccccatcgggtcaccaacagggactagagtggcatgtctcataaagcatactgcatcaaggtccaagagacctggtacgcacagtcacacgcctgctggtcatccgctgggtgacccttggcgtgtcacctttctctgtctctacttcccatctgctaaatgcacgtgacagtctctgccctgttctctcacccaattaaagtcttaatgatgatggcaggcacgagagatgaaactgacgggccacaccagttcgatgtcttgtgtgtatactggttctctttccctccacagcctgaccatactgttccaacctgttgctctggtggttttacattccccgggcggcactacgaaggcttcctctccactcccaactttgacatgcatccagctgggtcttgactgggatgaccgttccgttttaaaggtcctcttggttaaagggtcccaagttttagttgatcttttttagacaccaggtttcatcgtgg

SEQ ID NO: 675561 - DNA, 584 bp, Homo sapiens
  misc_feature (11)..(11): n is a, c, g, or t
  misc_feature (140)..(140): n is a, c, g, or t
  misc_feature (143)..(143): n is a, c, g, or t
  misc_feature (149)..(149): n is a, c, g, or t
  misc_feature (154)..(154): n is a, c, g, or t
  misc_feature (161)..(161): n is a, c, g, or t
  misc_feature (175)..(175): n is a, c, g, or t
  misc_feature (178)..(178): n is a, c, g, or t
  misc_feature (189)..(189): n is a, c, g, or t
  misc_feature (193)..(193): n is a, c, g, or t
  misc_feature (198)..(198): n is a, c, g, or t
  misc_feature (200)..(200): n is a, c, g, or t
  misc_feature (213)..(213): n is a, c, g, or t
  misc_feature (223)..(225): n is a, c, g, or t
  misc_feature (232)..(232): n is a, c, g, or t
  misc_feature (239)..(240): n is a, c, g, or t
  misc_feature (267)..(267): n is a, c, g, or t
  misc_feature (278)..(278): n is a, c, g, or t
  misc_feature (281)..(281): n is a, c, g, or t
  misc_feature (283)..(283): n is a, c, g, or t
  misc_feature (309)..(309): n is a, c, g, or t
tgaatgggtcntgctaagaagacaagtgttgggattacaggtgtgggcacgcacccagccaaatgacactgattttttaaattaatttacagatcagtacaagccatgattttttttttttttggtaggagtcaccttgntantttttnctcanggttccntttttttgtctttncanttgtttcttantccnttgtntnccctgtaaccaanaattgtgggnnnctcgatnaccctannttaaaccatttctgcaaaattgcttcntaggggatgtngtngngcttcatcctgcagcacagaaggcancccccggttgccgctgttccatactagttatgtggggccgtttttgatcaccgggtttagggttgttgtttcccagctttcctccattttctggtggtttcctaaacatttcctctttggtcctttgggacttattttcttagatcgcttaaagacccccggcctcccttttgggagccccagcccagttgaatatagggctaaagggggaagaccccttggaccctgtaaggtgtcctctgtccagctaagtaatggtggtgggctgagatttc

SEQ ID NO: 675562 - DNA, 887 bp, Homo sapiens
  misc_feature (268)..(268): n is a, c, g, or t
  misc_feature (282)..(282): n is a, c, g, or t
  misc_feature (285)..(285): n is a, c, g, or t
  misc_feature (289)..(290): n is a, c, g, or t
  misc_feature (296)..(296): n is a, c, g, or t
  misc_feature (300)..(301): n is a, c, g, or t
  misc_feature (306)..(306): n is a, c, g, or t
  misc_feature (312)..(312): n is a, c, g, or t
  misc_feature (320)..(321): n is a, c, g, or t
  misc_feature (323)..(323): n is a, c, g, or t
  misc_feature (340)..(340): n is a, c, g, or t
  misc_feature (345)..(345): n is a, c, g, or t
  misc_feature (348)..(348): n is a, c, g, or t
  misc_feature (505)..(505): n is a, c, g, or t
  misc_feature (511)..(511): n is a, c, g, or t
ccgtgaacgcagcctgctgagtgatcatctccgattttcagacccctctcctccgtttttctctcccctgggaggccagttaaggtttgagtgaaggcccccgggactggggcggcgtggatcttacgcccaccaactagtgagggaggccatccggccacccgtctcttccttccccagctccgcaaaggaggcgttggcatttcaggtgtttgcttacagagttttcaaagatttttcaccctcccttagttgtgggaaaatgatncaacctacccaagngancttnncattangtcnnaattntaacgntgaggaanngnaagcctttgaatatgtntatgnctnaaacgtgtttgtttttgcaggagggagagtgctcattttacctgaataaatcaagattgagttggtgtggcacagtgctggcataggcctggggaaaggggtgaaatgctagagatctggtagatggatagaaagtggacagacgggttcgggtggnttttgnctcagcagggccctaaattcccaccaaatcctcctctgtctgtcttcaccaaggtctgaatctgtccccttggtaaataacgtttaaatggtctccgagcccctcttggtgcctgtaccttaaggagagaagaagagggctgatagctgaaggcagcaagccacgaacttagctttgttttgaaaattcacctctgggctgggattatatgcatgagatactgtgcctgaccatgtaataatacattttatgcctgaaagcctttggtttatcatatttctctgcaacaaaaatacatacaaaattaaaacttttttaaaattgtgttatcatgagtattaaatgtttcttttggattgagttgtcacaattataa

SEQ ID NO: 675563 - DNA, 740 bp, Homo sapiens
  misc_feature (121)..(121): n is a, c, g, or t
  misc_feature (135)..(135): n is a, c, g, or t
  misc_feature (138)..(138): n is a, c, g, or t
  misc_feature (142)..(143): n is a, c, g, or t
  misc_feature (149)..(149): n is a, c, g, or t
  misc_feature (153)..(154): n is a, c, g, or t
  misc_feature (159)..(159): n is a, c, g, or t
  misc_feature (165)..(165): n is a, c, g, or t
  misc_feature (173)..(174): n is a, c, g, or t
  misc_feature (176)..(176): n is a, c, g, or t
  misc_feature (193)..(193): n is a, c, g, or t
  misc_feature (198)..(198): n is a, c, g, or t
  misc_feature (201)..(201): n is a, c, g, or t
  misc_feature (358)..(358): n is a, c, g, or t
  misc_feature (364)..(364): n is a, c, g, or t
agcttggattccttgagggcggattttaaagaatccccccagaggcaccagggaggccaaggggccactgacgccagagccacagagtggggactctccctataggatggactaaatgatncaacctacccaagngancttnncattangtcnnaattntaacgntgaggaanngnaagcctttgaatatgtntatgnctnaaacgtgtttgtttttgcaggagggagagtgctcattttacctgaataaatcaagattgagttggtgtggcacagtgctggcataggcctggggaaaggggtgaaatgctagagatctggtagatggatagaaagtggacagacgggttcgggtggnttttgnctcagcagggccctaaattcccaccaaatcctcctctgtctgtcttcaccaaggtctgaatctgtccccttggtaaataacgtttaaatggtctccgagcccctcttggtgcctgtaccttaaggagagaagaagagggctgatagctgaaggcagcaagccacgaacttagctttgttttgaaaattcacctctgggctgggattatatgcatgagatactgtgcctgaccatgtaataatacattttatgcctgaaagcctttggtttatcatatttctctgcaacaaaaatacatacaaaattaaaacttttttaaaattgtgttatcatgagtattaaatgtttcttttggattgagttgtcacaattataa

SEQ ID NO: 675564 - DNA, 372 bp, Homo sapiens
  misc_feature (57)..(57): n is a, c, g, or t
  misc_feature (204)..(204): n is a, c, g, or t
ccgcggtaatgtcttacggtccccaagtctttttgttttgttttgtctttttcccanactcaaactggagccgaagacaaaacaaaaaataaacccaccatcaccaacaaaacacatgctcattggcatgatctgaggcattgttgataaataaagcagagcaatactggggaccgtccgtaagacataaccgcggccgcggtnatgtcttacgctgccttcttacaacattcagatgctgtcaccagtagtatcagctggggcttgaccagaaaagcatgagcagaatgagtgatgtggaaaaaaggatttctcatcaggatgaaccctgacacccgtaagacataaccgcggggggatactctaagaaca

SEQ ID NO: 675565 - DNA, 388 bp, Homo sapiens
tgcagatccttttcttgccacgactcgtcttgcagggaacgtctgtgtggactccgtgggggcacaaatggccccagcaggcacagacagaagagtgatgtgtcccttgtctctgcctattgcaccgtattccataaaaaataaacacttttttttggactgttttgtatattgctaatgcggtggcactctgggcactggcaggctgcagagagccgcgttgccattcatccaccagaatccatccagagacagccttgagggctgggatcttttggagctttcctttggaaggactacgcagtgcccgtctgtctggtgctctacacagtgctgtgaacatgaaattacacggctaaaaaccaaatacatccatgggtaggaaata

SEQ ID NO: 675566 - DNA, 333 bp, Homo sapiens
catagctgatgtaaaaccttatgttaactttgttttcctaaaggcgtaaatatgatgtttaaaatgaagtattacgtttgtacaaatatgctcaatgtatgcatataaatgtgcctttacaccatctatatagcccaataaagatgctattgtctaataacaagccattactaaaaaccttgtgggggggccagaaacccaattccaattatagagagttgtattacaactaactggccgacccaatacatctttaagactaggaaaaccatgcagtgcctaacttaatcttttgcacgctcatcctatttcgtcagctggcgtattattgta

SEQ ID NO: 675567 - DNA, 346 bp, Homo sapiens
attatataatagcgcttcccctccaacagaagaacatgtaccgattaatgattcattaaggcagtcactcctccagttccataggtaaaccgtctgttttctgtcttggaggatttgccttattacgaacatttcatattaaatggaatctgtatctattgtgtgccgttggtgcctggcgctttttcagtcactagctttatcctgtgtgtaaatctgtggcataggctgtatcagaccttcattccttgttatggctgagttctgttctattgtatggatataccacattttaatggtatggatataccacatgaatctatctgttgatggaagcgtcgcgcat

SEQ ID NO: 675568 - DNA, 120 bp, Homo sapiens
aaaatcagttctgccctgtgaaaagatccagccttccctgccgtcaaggtggcgtctacttcgggatttctgctgtggttgtggccttggtaaaggctcccctaagaccaaaggaaggct

SEQ ID NO: 675569 - DNA, 809 bp, Homo sapiens
  misc_feature (34)..(34): n is a, c, g, or t
  misc_feature (142)..(142): n is a, c, g, or t
  misc_feature (151)..(151): n is a, c, g, or t
  misc_feature (189)..(189): n is a, c, g, or t
  misc_feature (224)..(224): n is a, c, g, or t
  misc_feature (246)..(246): n is a, c, g, or t
  misc_feature (293)..(293): n is a, c, g, or t
  misc_feature (313)..(313): n is a, c, g, or t
  misc_feature (330)..(333): n is a, c, g, or t
  misc_feature (373)..(373): n is a, c, g, or t
  misc_feature (379)..(379): n is a, c, g, or t
  misc_feature (389)..(390): n is a, c, g, or t
  misc_feature (423)..(423): n is a, c, g, or t
  misc_feature (466)..(466): n is a, c, g, or t
  misc_feature (468)..(471): n is a, c, g, or t
  misc_feature (481)..(481): n is a, c, g, or t
  misc_feature (485)..(485): n is a, c, g, or t
  misc_feature (488)..(488): n is a, c, g, or t
  misc_feature (491)..(491): n is a, c, g, or t
  misc_feature (501)..(501): n is a, c, g, or t
  misc_feature (503)..(503): n is a, c, g, or t
  misc_feature (507)..(507): n is a, c, g, or t
  misc_feature (521)..(521): n is a, c, g, or t
  misc_feature (634)..(634): n is a, c, g, or t
  misc_feature (804)..(804): n is a, c, g, or t
tttaatatatgttctccatggggtatctctcagntcttctggctcctaggtactcctctttataacacactaagagagaatcatccaactctctctagccaaaagctttccctcatcttcttgaagctcttctgaccctttnggtactaanactctaatgcatagagttgggttggttggactgccctntctcagagtagatgaggtggaacttcatgaggtgnacttccctcaatgtcgttcttntcttcttttcagattggctctaccagtgcacctggacagggaggaancctggctcagcgggagtttnacaggcgactctccccnnnntttctggactgggcaccctttggggtcatgaccccccccnccatcngcatcccccnnctattgtggtactccagcaagaggaaatatganactcccaaaacgaagaagaacaaattggggcttccacagcccncnnnncccaagaaanccangcnccnctcgtaagananccangtgctttccagacnccaaagggtatcttaaatgcaatctcttctctcttagcccttggcactttctcctggatcctgccctgctctcagccatagtgaaggaccagccctaggagtctgcgagagcntccttggttccatcgtgaagccataaacaggaatgcctttgcaatagccttgagcctagagggccctctgatgcccactgaggtgctgttggtttattctggcacgtgaattctctcaggggtctaggaggggcattttggagactgcctgacaccacccctatcccctnccccc

SEQ ID NO: 675570 - DNA, 339 bp, Homo sapiens
actcttccagagagcctctggtacatagccactgtagcaattacaacggtaactaccacgtaagttaacacaaatcccattgacacatatatcagagataccaaagcacatacatagctatctcttccatccacaagtgataactactccactactacaaaggccgtggaatacagctgaataaaaagcagggaatggctggccagggtcctccaaaaccatagtctggatatgaacagaaacatacggacttggacactgcaccggggaaaggccgcaacaaccactccttacttgatacctccatagcaagtactgcagcatgtgcatatcaacaac

SEQ ID NO: 675571 - DNA, 733 bp, Homo sapiens
  misc_feature (34)..(34): n is a, c, g, or t
  misc_feature (142)..(142): n is a, c, g, or t
  misc_feature (151)..(151): n is a, c, g, or t
  misc_feature (189)..(189): n is a, c, g, or t
  misc_feature (224)..(224): n is a, c, g, or t
  misc_feature (246)..(246): n is a, c, g, or t
  misc_feature (293)..(293): n is a, c, g, or t
  misc_feature (313)..(313): n is a, c, g, or t
  misc_feature (330)..(333): n is a, c, g, or t
  misc_feature (373)..(373): n is a, c, g, or t
  misc_feature (379)..(379): n is a, c, g, or t
  misc_feature (389)..(390): n is a, c, g, or t
  misc_feature (423)..(423): n is a, c, g, or t
  misc_feature (466)..(466): n is a, c, g, or t
  misc_feature (468)..(471): n is a, c, g, or t
  misc_feature (481)..(481): n is a, c, g, or t
  misc_feature (485)..(485): n is a, c, g, or t
  misc_feature (488)..(488): n is a, c, g, or t
  misc_feature (491)..(491): n is a, c, g, or t
  misc_feature (501)..(501): n is a, c, g, or t
  misc_feature (503)..(503): n is a, c, g, or t
  misc_feature (507)..(507): n is a, c, g, or t
  misc_feature (521)..(521): n is a, c, g, or t
  misc_feature (728)..(728): n is a, c, g, or t
tttaatatatgttctccatggggtatctctcagntcttctggctcctaggtactcctctttataacacactaagagagaatcatccaactctctctagccaaaagctttccctcatcttcttgaagctcttctgaccctttnggtactaanactctaatgcatagagttgggttggttggactgccctntctcagagtagatgaggtggaacttcatgaggtgnacttccctcaatgtcgttcttntcttcttttcagattggctctaccagtgcacctggacagggaggaancctggctcagcgggagtttnacaggcgactctccccnnnntttctggactgggcaccctttggggtcatgaccccccccnccatcngcatcccccnnctattgtggtactccagcaagaggaaatatganactcccaaaacgaagaagaacaaattggggcttccacagcccncnnnncccaagaaanccangcnccnctcgtaagananccangtgctttccagacnccaaagggtatcttaaatgcaatctcttctctcttagcccttggttccatcgtgaagccataaacaggaatgcctttgcaatagccttgagcctagagggccctctgatgcccactgaggtgctgttggtttattctggcacgtgaattctctcaggggtctaggaggggcattttggagactgcctgacaccacccctatcccctnccccc

SEQ ID NO: 675572 - DNA, 264 bp, Homo sapiens
acgaccgtccgacgtgcattcccgattcctcttggttccaagtccaatatggcactcttaaaggatcagctgatttataatcttctaaaggaggacagaccccgagaataagattacagttgttgggttggtgctgttggcatggctgtgcatcagtatcttaatgaggcttggcagatgacttgctcttgttgatgtcatcgaggcaaatcgaggagagatgatggatctccacatggcagcctttcctagacaacaagatgt

SEQ ID NO: 675573 - DNA, 1070 bp, Homo sapiens
  misc_feature (185)..(185): n is a, c, g, or t
gatgagatccactgtcaagaggaacattggtagttgtgtccgtatggctgctaatggaagcctaatttgccaaatctgacatggagactcgacatggctgccagaaccattgtcaggtgaccgtggcaaattgtgacatagtgaaggttggataagaggctgtgtaaaagaagcatgacggaganctgcagctgcccttagcggcttgtgtggtctgccagtcactgtgagtttaggaaccttttccaatgtctcgaagctgaatggaaccactgagaggactcattagtgcgtggcccgcgagcggaactgatagttgcgaccaactagtgggtacccgcgtagttgttcacgtccgtggaacagcgatgctgcgcaatgcactacgaccccccttggaactgctttcattgggggcgaggacgacgcgcgggggatgcgcgaaactgggagggaagtctgggcacatgtcttggcctgaatccccatgcgcgttgttacatgcgtatctgggagtgggacctgcgttagggcgtgcctaccgaccgttggacccttactgcggaaacaaccggccagtgtacacaaggggcggcgctttcgactggaacgagaaacttgcgagagggcttcattcagggaaaagccctactccccgaaattggaggaagttctggaaccaggcttacaaaaggtgtgccccctcgtaagagaaagcctcttttttgggcaaattcggaggcatgtgctaaaggggcccccctggaatttaggaacctctttgatcgccgaagttccccaaaggtgataagattcacttgaaccacgcgggcccctggggagtataattacacgtcgtctgaggggagaaacgttaaaaatcactctcgcattgttcgggagaaggaagcaagtcgagcatgtcagagagtcggtcctgggccatattgcgtgcctcgtttccagacacgtgttcccttaggggggacggaacccgccctggacacgagaattggcgtcgtagttggaaaggccatatcgagtgaagcaatgcgatgtggaagggtccc

SEQ ID NO: 675574 - DNA, 288 bp, Homo sapiens
  misc_feature (119)..(119): n is a, c, g, or t
  misc_feature (247)..(247): n is a, c, g, or t
caggcatgtgcttgccagccccacacagcccacagcacgttgcttgcgatgaaacagcagaatcctatcttccttctacccggacggcgcgaaccgatgcaccaggctgccagcacggncatcaccatggcgggccattcaagtaacccaatccaatattccatgaaaccttccaactgataatggggtatctgaagctgatcacctgccagcgtcctgagcgctggcaggtgatcgcttgactaanccgctcgcttctcgcccttgagcatctttttctgcatttcc

SEQ ID NO: 675575 - DNA, 666 bp, Homo sapiens
  misc_feature (40)..(40): n is a, c, g, or t
  misc_feature (365)..(365): n is a, c, g, or t
cttccgccatccagggtgggaagatgaaaccgtttaaacnccccagataattgcttagagtcccagcacgcggactcgattttcttttaaaaaaaattctcatggtctagggagtatctagtcccatctgctaccaagctaaagacgttagaatagcaagtttcccttcatttccgacaagctttgctaaagttaaatatttgtagttttcaaatgaaaaatagtggacacaatagcagcaattgatttacaaacagttcaaacttagttccgttgtagaattcaagaacaggtgcaaagcatacatttcagcatttgttcattcaagatgtaaaatgtataaagtcgcatgtgctcacataccncttcttagaaagatgtttatatctttggaagttttacataaatcaaaggaagaaagcacatttaaaatgagaaactaagaccaatttctgtttttaatagaaaaaagaatgattgatgtatcctaagtactgttattggttgtggtgtcttaattcgccgcttggctagagtgaggtgcaacgtgatctgttaagagctgtcatcgtgaggtaacggttagttatatgtcatgttaaatgacaaacccgcactcagagcgtagaataatgtatcgacgagaatcatcagagctctgctcgt

SEQ ID NO: 675576 - DNA, 436 bp, Homo sapiens
gccgttcgggggttcctgggccgtggtgggcgagaccaggtgcccattttgcagatagggagactgaggctccgaccctcagcccgctcgttagggcgtgttatgtcttgggctggggtcttcgcgcccgtcctctcgatctgtcctagcagcagccctcgaagcggttcttttgaggctcttgccttacagaagtggaaactgagtcatggggaattggccatgggaaaaagacagtggcatctcaccttaatgagcatttactatgtgccaagtgcttcacgtgcattttcacactcttcagttcttggtgttaagtgctgttatgagcccgtctgacaagatgaggaatctgaggctcagggagggcatggaacttgccaaggccacacagtctgcacgtggtgagaatgggatttgatggaatttgaacctg

SEQ ID NO: 675577 - DNA, 843 bp, Homo sapiens
gccgagatgataccactgcacttaggctggccaccagagtaggactctgtctcaagaaattaaaaaaaaaaaaatgattgaactgaacagataaagggaaacatcttgagctaaattagcgaggaatatatgtaaaagaacagaggacgtttaaggatgtgagatacgcataattacgaaaatgaccatagtgaactatgaatctggaaagcagaaagggttgaattgctgaagagttcatctgcaaggtgaagatgattaggatatcttgcaaaatgtagtaataaagtgctttgaatagggaatgatttagttaaatttgtcttttaggatcagttggaagagttagattaaatgcaagaagggcaattaaattaaaaagaactgaattagtacatgggaaaggtcagaaaaaggacctagatgtgacagtttactgcatatagataatacttagagccataagatgatcagttggagttcaaagtgattggcttaatcttgagccacatccacatttaagggttgtgaagaagtggagccatctgggaagattgaaaaaaaaaaattagagaaatagggaaagcatcagaatatggtattttcaaagtcaaaggagaaataagcctcttataggttatcattaatacgaatgcctctgtgttgaggagggtggaggactgagtttatcaataatggggccattactttgagagaggagtttcaaaggaatgcagaattagacagctagatcacatgtgattataaaagtaggatgacctgaagattttatcttcaggccctattttatgacaatgagtgtgttgatggtgtaaactgatg

SEQ ID NO: 675578 - DNA, 204 bp, Homo sapiens
atttgggttttaactttaacagggcagttccgcttcacctccctttgatggagttccatccggggggtttcaacccccccgtcagtcctgaggcctcctgaccctgacgttgtgatacgccccccagagatctaagtttcttatattattattattgataataattattataatattattatgtaataaatttataagaaatga

SEQ ID NO: 675579 - DNA, 82 bp, Homo sapiens
aatagtaaattaaaacttttttttaaactaaaggggatccggggttaaccaccaactaatttaattcttgctttttatttta

SEQ ID NO: 675580 - DNA, 647 bp, Homo sapiens
tcagtacccgggacgtcagaatgcgcctgttccccctcctcggcccgagagcagagtccgacttctgcaggttccaggacccgctcaggtccgggctgacccgactcgctgtgcagcttcatggagaacttccaaaaggtggacaagatcggagagggcacgtacggagtcagtgtacaaaagccgagaaacaagttgacgggagaggtgagtggcgcttaagaaaatccgcctggacactgagactgcagggtgtgcccagtactgccatccgcagagatctctctgcttaaggagcttaaacatcctacatatttgtcaagctgctggatgtcattcacacagaaaataaactctacctggtctttgacatttctgcaccaagatctcacgaacattccatgatgcctctgctctcactgcattcctcttcccctcatcaagagctatctgttcccagctaggctccagggcctagctttctgccattctcatcgggtcctccaccgagaccttaaagctcagaatctgcttattaacacagaggggccatcaggctagcagactttggactagacaagcttttggagtcctgttcgtacttacacccatgagtgtaccctgggtaccgagctcctgaatctctg

SEQ ID NO: 675581 - DNA, 107 bp, Homo sapiens
gagtcggacctcagtacatggaggatggtaactccaagataactgacattagcagcccctgccacaggaccccctctgcatctcagctctaatctccatcctcctga

SEQ ID NO: 675582 - DNA, 336 bp, Homo sapiens
cgccacagcttctccgggctctggataccatcaatagccgagatactggctactgatgtgtctgtggacggatgaggaagggactgcaagccccaaggctgatgttcaattatgctacctggaagcacaaagagatgctgtttagcagatgtccctctaagctgtacagcgagccagtataccagcagcagcaagcgaaaggaagagtttgctgatatgtcaaatgttcattcacgtgggaagcaatgggcttctggactttgattcagaatatcaggagtctctgggacttggtctgattgatcattgatgtcccttgctgaatggacaggcccc

SEQ ID NO: 675583 - DNA, 423 bp, Homo sapiens
  misc_feature (22)..(22): n is a, c, g, or t
  misc_feature (217)..(217): n is a, c, g, or t
gtttcccaggctggagtacagnggcatgatcatagctcactgcagcctcataatcttgggttcaattgatattcctgcctcagcctcctgaaggccaggactacaggcacacgccactatgctcagctaatttttgtatttttttaatagacagggtctctcactatgtttttcaagctggtcttgacctcctggactcaagcaatcctcccctttngggggccctctgtctcccaaagtactgggattacaggcatgagccaccatatctgggccatcctgtcactttcaacctatttgagtctctgaatctaaaattagtctcttatagagagcatatagttggattatgttttcaatccaatctgccagtatcagccctttgattggagagtttaatccatttttaattaacttttctgg

SEQ ID NO: 675584 - DNA, 333 bp, Homo sapiens
cggatctcacgaaacacagaccggatcatcgtcagactactacgtatgaattctagaaggaagaagctaggaaagccgggctatagaaataggatagtccatggcctgctgagcctcgtgtatcatctcaaggaagggctggaacatggcgtggaagttcaggggctcgtacggagagcagggcatcaagctgcggacgatgcgggacttgggaaagaagaagtgaggcctccggtggggcaggctgaagggcaggtagtggtaggtatcctggggctcccgggtgaagaacctgtcctggaagagctcgtctatgatgctggacgcgcggct

SEQ ID NO: 675585 - DNA, 655 bp, Homo sapiens
gtccctcccgcggcgggggggttcttataaatagaccgggggcttcttattttttgtagcctcgtctcctcggtttccctcgggtgtaggcacccctctccaccgcgctcggtgttgggaccccccactcaggggagaacacagccgcgtggggcgcatatctccaactctcccgcgggctgttttatcctctgttgcctccgcggtgccgcggtgtatccactttttttccaccacgcgcgaagcccgcgctatttcgtgccccacttggcccctcttttggtgtgcccactatttggaacgcagagtggtgttcccaacaaacgcgaggctgtgcgtgacgcgctgccgcggaattttgctcgcggatatatattttggacacgccgcggctccctcgccggaagagcgtgggtggggccgccgcaacatctttttggtggacaccccgcgaggcttcccccggagtttccactcgcccatgttattgggtgccaccatgttcctctactcatatctggcttttttccccccccctaatttttctcctttcaacccccaaaaccccttgggtttaaaccccccccctaatttggccttttttaaaatgggttttattttttttttattttccctttttttggggggggtttta

SEQ ID NO: 675586 - DNA, 281 bp, Homo sapiens
tgatatttctctgttgtcgtggaggctgaggaggagaatcgcttgataccgggaggcggaggttgcagagagcctagatcgcgcattggactccaggctgggtaacagagcgagctccatgtaaaaaaaacaacaaccaaaaaacaggattgtgaggcctagagagagttcagtggaagggcctggggttcctactggacagttggaaatctggggagctgagtttcccagaagctgggggaccagctggcaggttttgggtagagcagcaggggaagaca

SEQ ID NO: 675587 - DNA, 430 bp, Homo sapiens
tatcagtatcacaaaggacaacaaaagttgtaggaactgttctagtttaaaggaaacagaagagatatgacagctgaatgtaatgtgcaatggatgattaaaaatacagctataaaggatattactgggataattgggaagttttgcatacggagtatattagatagtatttttgtaataatttaaattttgctgagagcaatcttgtagtgtggttgtgtagagcaatatatatcacactgaatttatgtgctgtggaagtatttagggatgaaatctaatgatgagtacaactaaatctcaaatggttcagaaatatgtgtgtgtgctcgtatgtattttacataaaacaaatatgtcacaatgttaactggtgaatctaaatgaagggtatatggttgttcattatactattctagcaataaaaaaa

SEQ ID NO: 675588 - DNA, 380 bp, Homo sapiens
tgaccttcgttctcttcacagctcagcatttttgcaagcaggtagcactatcccccttcacagttgtctgagggaccaggcttacgaggattaagccacatgccgggtccatatagctcctattgaccgggctggccaggagctgtgaaccagagtgtagatgagcctccgtatctttttttatttatctcttcattgcatctcttttcccctcaaattaatcatttcctttgtagatcacctgaagtgtataacaagcctatagccaacaactattttaaatattggcagaaaagacacatgccctcgagaactgccccccgaactctcataacaccaggcctgtgaaagatacctgggggcagtccttgtgggcctta

SEQ ID NO: 675589 - DNA, 89 bp, Homo sapiens
tcacctattaaagcaattttccccagcccaacttcactggcacttcagacaccacctccaacaacacagcaaccgtgatttccacagcg

SEQ ID NO: 675590 - DNA, 936 bp, Homo sapiens
gcactcagtgcccttactgctacgtctcagcaaggaggagactgtgctggcaacagtccagtgctctgcagacagcatcccacctgtcccatgcagtgctgacctgagtgagcatctgttggagtgagatttgcatgtgaccattgttgctctgcctgtgatgaactctgtgggtgctgtgtatctccaagtatatgaagaagtgcacattgtgaacacaaacaagcagttatatcttgttgtgcttgcccaccttaccacatgcatccattgtgcatccattgttgtggtgcacttgatgcccatccccattcaatgtgcagggcatccatgtgtcaatcccgagcattgcattgcacacggctgcatcatatcccaggcgacaggcacagcacactattcgcgatgtcccatcctccctgcaacagcccttatcccagacatgttgggcgcctcatagccaagcattgcaatggttgcatctattctgcccatttacattccctgccataccacgcaaagctgcgttggccccacaggattataggttggagataatagatacgcaccctctgccacgttggtcgccttccgtatggcattactacacctggccaacacaactataccacaatttgccaacacccacgttgccgtccaatgccatatatctgggcaccgtcaggtatctcgggtccagacacggtttacacgcacaccagcccagaacaacttgtagagttcatcagaccctatctgtgtcacctcataacgcaagcggacccgttaccctttgggcacacgccttatcgaaacgagtggacacgcaactagctgtatggttctaaaaagagaacagccgttacaaggaggaaagcacccgcactttactgtcccttacaacgacacttacactttaggattctatgtgggcaa

SEQ ID NO: 675591 - DNA, 1061 bp, Homo sapiens
aaaacatccgatcccacttccagcacgttttcgtcatcgtcaggctgcacaatccgtgctctgacagatgtctgttcatagtgtgcgctgtgaccacgtccagagatgtgccttcctttggtgcctcccatttcctaaaggggtacacatatatccctaagtcaaatgtgtccagggactatccttctatgggcgaacagtgattaaatgcacgaaaagtgctgctcagtaaactcggatgaagtttcggggccgatggacaatctcgtgacctcgccaggaatacctgaatagatctggcacgaaaagaatgtcaccaatgaccccatatcgagcccttctgacaagttttgccgttcatctactctggcttccaagaagaaggaacagtctaagccatatcgcaggagccgagctacagcagcactgtggggccattgtactgagcagtccgggactgcaagagctactacaaggccatggaactagactgccttgtagggatctccaatgagtacatagtagctcattagaacaggacacaaagagcgtaggtcttcaactagtacctagtagagcatgtcgatagcggtggcatttcacactgacacaccagacatcagaaatctttgctatgacccgaagcgagcactgctcgtccccagtcgcggctcaccgccaatcacacattcgaagcagatccaaagcagattgctcaaacggttgacagaccggcacccacaaacggctgcgaactcccgtggcccatgacgtcctgcaaacaaatggagcctacgacacgtttagccctcccactggtccacctaatgacggccactttgttcgaagcaaatgttgtagccccccctaacgggtcatcgcccctagcaaacggcaacgaaatgtacagtcgcctagcaccgcaacgacccgatgtgtgaacaaacatttgaaaaccgtgtcaagataaccacaactcgtagtcacccagaccaaactaaataacacaccctgcaaacaatctccgccgcggctaaacagtggctacaaatacccccaca

SEQ ID NO: 675592 - DNA, 594 bp, Homo sapiens
  misc_feature (58)..(58): n is a, c, g, or t
  misc_feature (60)..(60): n is a, c, g, or t
  misc_feature (65)..(65): n is a, c, g, or t
  misc_feature (71)..(71): n is a, c, g, or t
  misc_feature (73)..(73): n is a, c, g, or t
  misc_feature (81)..(82): n is a, c, g, or t
  misc_feature (85)..(85): n is a, c, g, or t
  misc_feature (96)..(97): n is a, c, g, or t
  misc_feature (106)..(106): n is a, c, g, or t
  misc_feature (109)..(109): n is a, c, g, or t
  misc_feature (125)..(125): n is a, c, g, or t
  misc_feature (154)..(154): n is a, c, g, or t
  misc_feature (174)..(174): n is a, c, g, or t
  misc_feature (199)..(199): n is a, c, g, or t
cgttatgtatagctgactcttgaggataaacgaccatcagaggagtctgagtcatgancntaacntctatncngagaaagnnagnatcatcactgnngaaaacatnggntttattttttccaggnctgagcaaataaggtgtataaaaaatggnaggtatctgtttaaatattnaactgattttataatagcaaccttntgctcctaggttacatagtgttaaatattgtgttcatttgtattttccaatccaataagaacttttttttttacctcggcaggaatctgtctgggaggacatcagagggtgaatttccaagttctgggacaacctagctgtggaaaagctttcggggttgggggggtatttcagagtgtccttaaaggtgtagcagacacagataaagacacggggagccaagtgaaacagcagtggagggttggcgggtgtatcacttttcggtattttatcacccccttccggcaacattatttatcgggaatctaccggccctttggtttttaagatacaggggctgggtttggtaacccaggcggttttcagggccatgagatgtgggagggggggatcct

SEQ ID NO: 675593 - DNA, 121 bp, Homo sapiens
gtgcagctgagcaactagcaaagtggatttctgacagaacggatgttcatattcggggttttcagaccacccaactactcttgtaccatttctttggccctcttagtgtcgcttgttggag

SEQ ID NO: 675594 - DNA, 1597 bp, Homo sapiens
  misc_feature (427)..(427): n is a, c, g, or t
gctgcgagatatccctgttcagttactggtctcagcccagcaatggtatggttgtattttcccgggccttctttccaggcttgaaacacagcatcgcgcacgacggagctgaggccctatgttgccctcgtctatctgcaggcgtctactctaccaatgctgtggctgacgtgccttctctgtgacttacctggagagccaaggtgtcagacacagtgtaaattcgtgagacatcgtgaggtgtatgaagctgctatcatctccactacgttgacgtcacccgcacgtgactcttaccactcatggccacatgcctacaagcagactcaaggagtgagtgcttgtgtgcatcgctcatctactgacccgtggggactcgtacacaccctgcgcctatatgagtgtattgttcaccactacatgcganggctggatcacataccttggtaataacccacgcgttgccctttgtagaccgtaccggacgagaacgctcgactttaccacgtgcttgacatgcggtggaacgtactggtccacgagcacagcgcaggtcgtcgactcatcatggacaccttaccgtgtcctcgtgtgggcggccctgttactgcgatgcgcaatacagggggcccaggggccctggggatccccttcgacgggccactcccacggagttcacccttgccccgggagggaccccgtgtcatggcgggggactcgggattcgaggtgttggccggttcttgtactttgcccattcagcagaggtttgccagtcaggaatttgtcatccctgccatcaatgcaagaggaagcgcaaaatcccctggaagcgtgaaaggccctctgcgacgcgtcacgtcaataggttgacaacaacaggacctgggcacaagtgagctggagtacgagtcatttgcacgggctgtgttcccaggtggcatcactgacgagctaccgcggcgaggcaagaatggcccttcaatggatggtcacgaaccaccacggcggggctgccggaggggaccatgtcgtctgttcagcaaaggtgacatacggaggcctcagaggacagctccatcaaacggggctgactgagtgacgcgcgccaatgtttggctgcccgcgtcaacacacgacccgctgtctgcaggacaagataacctgtgggggatcccctaacccgcacacttatgtggcgtggcgagagaatgacgtccccgatgagtacaccccacaggtggccttgccaagggtgacactgtaacgcacaagcccggctccactggggaggactcaacgcatggttaattgggccctgtggcactcatttgtacggaccctacagtttgcggtgaatgtcgcctcaactcgcgggacagaagctcaccctcgcgctcagcaagcgcatctctcgcacttcgtctctcctatcatcgtgatccccacagctagcgtccagtgtcaaagcaagcctgtcatcgttctgatccattcggcccattctggagcttccgatgccatcctgcacaaaacgtcggtctcgtcatgacgaccctcatcctggcccagtgcgatgatgtctccatatatgtac

SEQ ID NO: 675595 - DNA, 419 bp, Homo sapiens
  misc_feature (151)..(151): n is a, c, g, or t
  misc_feature (162)..(162): n is a, c, g, or t
  misc_feature (213)..(213): n is a, c, g, or t
  misc_feature (219)..(219): n is a, c, g, or t
  misc_feature (229)..(229): n is a, c, g, or t
  misc_feature (296)..(296): n is a, c, g, or t
  misc_feature (324)..(324): n is a, c, g, or t
  misc_feature (327)..(327): n is a, c, g, or t
  misc_feature (335)..(335): n is a, c, g, or t
  misc_feature (369)..(369): n is a, c, g, or t
gccacctatcgcgatgtgtgagtgtctacctcatatgcgtggagtgctgagactggggtctgtgctgttccgtacttcaacactcaccccttgtctcccctcagtgctatggcgtgtgcttggtggtgctgagcgctgcttactcctcgtntacagcctggnctcagccgcctcactcctggctgctggcctgtgctgcacgcccgtgccctngtggcnggacagggtncacctgctgctcacttcacctcttttctggcccctgtgcctcggtcctgcacacagctgatcctctntgtgcagctgcctttggggtgtgcagtnccntgaacaanactggactcagcacactcctgggaatcttgtacnaagacaaggagagacaggacttcatcttcaccatctaccactggtggcag

SEQ ID NO: 675596 - DNA, 476 bp, Homo sapiens
taacacgcgcttgaagcagggagatgggttacagggagccaagatactgccaccgaactccagcctggacaaccgagtgagactgtgtctcaaaaacaaacaaacaaactaaaaaaaaagctggaaagaaaaagggaaaaagaacaactgcagactcaattcatccttcatgaattaagacaaaaaatccgggcatggtggcgagtgcctgtaatcccagcaactcgggtggctgaggtacaagaatcactcgaaccccggaggcggaggctgccataagccaaaatggcaccactgaactccagcctgcggtgacagagtgagacccccatctcaaacaaacaaacaaacaaactataatgacttccagcctggttaactttaacaaaattccctagtaaaaaatttggaaagacccgatgacattttgcaactagattttttaattatatcaagaccgagtttcattctcttgc

SEQ ID NO: 675597 - DNA, 707 bp, Homo sapiens
  misc_feature (707)..(707): n is a, c, g, or t
cacggtggctcacgcctataatcccagcactttgggaggccaaggcaggcggatcgcctgaagtcaggagtttgagaccagcctggcaacatggcaaaaccctgtctctgctaaaaatacaaaaattagccaggcgtggtagcgggtgtctgtaattccaactattcgggaggatgaataggagaatcgttgtgagcccgggaggtagaggctgcagtgagctgagatcccactatgtgcactctagcgtgggcaaccaaagaagtgaaaactcccatcttaaagaaaaaaaaaacgaacaaaaacaaacaaaacactgtgtgtgtgggcgcccgccctgggccccttgagagaaaagagttttttttgggacccattgtcgtttgggggggcggcggggggccccacgtgttggggtttcgcgttaaccacgtgtggcccaaagaggggtgttcccacaggagaagacctccgggcgaacaagagcacaatagcgtggctctgggaggttttcctcacccaaatataaaaaaaaaagccgccgcggggggggaacacccgcgaggcggtttccttgaaaccaaattctcgcaggatggggagatcacagggaaggcacaataaccggggacccatctcacaaaacacggggggcccaaaggcaggaccaccagaaattaaaaaattgcgccgcgccgtgggggggn

SEQ ID NO: 675598 - DNA, 332 bp, Homo sapiens
  misc_feature (11)..(11): n is a, c, g, or t
  misc_feature (61)..(61): n is a, c, g, or t
  misc_feature (72)..(72): n is a, c, g, or t
  misc_feature (74)..(74): n is a, c, g, or t
  misc_feature (82)..(82): n is a, c, g, or t
  misc_feature (87)..(87): n is a, c, g, or t
  misc_feature (123)..(123): n is a, c, g, or t
  misc_feature (191)..(191): n is a, c, g, or t
  misc_feature (208)..(208): n is a, c, g, or t
  misc_feature (211)..(211): n is a, c, g, or t
  misc_feature (215)..(215): n is a, c, g, or t
  misc_feature (233)..(233): n is a, c, g, or t
  misc_feature (238)..(238): n is a, c, g, or t
  misc_feature (249)..(249): n is a, c, g, or t
  misc_feature (251)..(252): n is a, c, g, or t
  misc_feature (290)..(290): n is a, c, g, or t
ttcagaggttntgccctgcagaggctgaaggtggcatcccataggttttatagagcaggtngagaagctccntntttttatnttttnggaggaaactagatttggccgcattgatgttcagcntttttaaatatttttcagttaagcccatgttccgtttggtcatctggtaatcagtgttcagggtgganttgaagatgagcgggtnatntgtnttgagcgagttgttagcntggtnatttttgagcngnntgattgaatgataagtgtaaggattaaaggcacaagtnaggtagctggacaagggcgaagatatagaagtgattgtttta

SEQ ID NO: 675599 - DNA, 266 bp, Homo sapiens
gtgcccgtgacactagaggaccctcgcgcaggtatcatcgaccatgtgaatcagcatttcaatagcaaaaaaggcacatcaactgcgaagtatccttagttatgcaaatgctttttctagattcatgcttattcaatcattagggtactagacacatcagcctaacgtggcatctggacacttgaactggacttacctgactaatgaatcagtcttgacgtctatccctttgttactactgacctttactacggttactgacttga

SEQ ID NO: 675600 - DNA, 131 bp, Homo sapiens
aggtcacgggatagcgagagcttctctaggtcctatgatatataggcatcccagttgatgaaacccagcttggatttaaaattacttccagaaagtgtcaaagttaaacatccccccacagagagagcagt

SEQ ID NO: 675601 - DNA, 227 bp, Homo sapiens
cacgaggccaatgtaggcttgttgcagagggcactcatgaccttcccatatccccatcctgtggtcacctgggatttgggttccctggggcggtcatgcgaaataagaacccacggaaggacatctgaaccacccacagtttaaatagcgactcttcttgattactcagggatgtgctcatgttggaccctacccatgtcagtggtcttttcactctcaactatcgg

SEQ ID NO: 675602 - DNA, 652 bp, Homo sapiens
  misc_feature (6)..(6): n is a, c, g, or t
  misc_feature (92)..(92): n is a, c, g, or t
  misc_feature (114)..(114): n is a, c, g, or t
  misc_feature (117)..(117): n is a, c, g, or t
  misc_feature (127)..(127): n is a, c, g, or t
  misc_feature (138)..(138): n is a, c, g, or t
  misc_feature (144)..(144): n is a, c, g, or t
  misc_feature (146)..(147): n is a, c, g, or t
  misc_feature (150)..(150): n is a, c, g, or t
  misc_feature (154)..(155): n is a, c, g, or t
  misc_feature (158)..(158): n is a, c, g, or t
  misc_feature (160)..(160): n is a, c, g, or t
  misc_feature (166)..(166): n is a, c, g, or t
  misc_feature (170)..(170): n is a, c, g, or t
  misc_feature (179)..(179): n is a, c, g, or t
  misc_feature (183)..(183): n is a, c, g, or t
  misc_feature (196)..(196): n is a, c, g, or t
  misc_feature (198)..(201): n is a, c, g, or t
  misc_feature (203)..(203): n is a, c, g, or t
  misc_feature (209)..(209): n is a, c, g, or t
  misc_feature (219)..(219): n is a, c, g, or t
  misc_feature (224)..(225): n is a, c, g, or t
  misc_feature (244)..(244): n is a, c, g, or t
  misc_feature (247)..(247): n is a, c, g, or t
  misc_feature (251)..(251): n is a, c, g, or t
  misc_feature (253)..(254): n is a, c, g, or t
  misc_feature (258)..(258): n is a, c, g, or t
  misc_feature (264)..(264): n is a, c, g, or t
  misc_feature (266)..(266): n is a, c, g, or t
  misc_feature (268)..(268): n is a, c, g, or t
  misc_feature (272)..(272): n is a, c, g, or t
  misc_feature (277)..(277): n is a, c, g, or t
  misc_feature (360)..(360): n is a, c, g, or t
  misc_feature (395)..(395): n is a, c, g, or t
  misc_feature (528)..(528): n is a, c, g, or t
  misc_feature (547)..(547): n is a, c, g, or t
  misc_feature (552)..(552): n is a, c, g, or t
  misc_feature (571)..(571): n is a, c, g, or t
  misc_feature (575)..(575): n is a, c, g, or t
  misc_feature (583)..(583): n is a, c, g, or t
  misc_feature (643)..(643): n is a, c, g, or t
tcaatntacacacacacaagcacacacaatagcagaatgaaattacatttttcacatctaaaggtttatacctcaaagaaaataggcatgtntccaaaagacaattagaaagcnagncatccctccntttactttgantatggnannccntttnncancnactctntccnggccaaccnatgncgacttccgcctngnnnncncctgcngccttaaggntttannatataactgtattcaccanatngggngnngggngggggngntngggnttttnatgtaattaaaaatcaacttttggccgggtgcgggggctcacgcctattatcccagcactttgggagtgccgaggcgggtggntcacaaggtcaggagtttcgagaccagcctggccnatatgctgaaaccccatctctactaaaatgtatataaaattagctgggtgtggtgggacgcgcctctcgtcccagtcacttgggaggctgaggcaggagaatcgcttgaacccgggaggcggaggttgcagtnagccgagatcacgccactncactncagcctgggcaacagagtnagantccatctnataaaaacaaacaaacaaacaaacaaaaaaacttttgtttaagtggctgagactattgtnccagactta

SEQ ID NO: 675603 - DNA, 132 bp, Homo sapiens
aagatcactgtgtatccacgccttccaggcatcagatgcttccatgctgccttcttaccaacttacaaggtttttcttgctaatgaagcagggacctgcttaaagcacatggggggaaaacacagaccttaa

SEQ ID NO: 675604 - DNA, 490 bp, Homo sapiens
ttgttataaaaacacttgaatgagatacagatctggtcaaggatcatgtatgttactacttactattctggtacatggacattatacccctggcttggttactataaggatgtacatccactctattggttccctttttaccatcatggacagtagagagaggaaagggtaacagtaggaatttattcaaaatagagaggaactcattagtgagtggcctctccattctctctttggtttaccttcttctcattcgctggttagggattcttggattctttatccttgggcaaggaacaactgtctcttggtgcttatctccatagacacttaccagaactaacctggtggtcctcttggcagatttgtatccttgtactaggggagcgaagaagcactggatagattaccagtatgtcccgtatgccaacaaggggaaagagtgggttggctatgaacatgccatcagcttcagttacaaggcatggta

SEQ ID NO: 675605 - DNA, 552 bp, Homo sapiens
  misc_feature (208)..(208): n is a, c, g, or t
  misc_feature (224)..(224): n is a, c, g, or t
cggggggtgtggccctgccaacacctggattttggacttttaacctccagtacagtgagggaataaacttctgtgttttgttgttttgtttgtattgagacggagtctcgcgtgtgtcgcccacggctggagtagcagtggcgccactctcgcgctcacgtgcatgctcctgcctacccggtgttcactgccattcttcgtgcctcangcctccctgagtagcntggggactacatggcgcccaccaccacgctctggctacatttttgtgtatttttttagtagaagctggggtttcacgtgtgttagccaaggatggtctccatctcctgacctagtgatccgcctgcctcggcctcacaaagtgctgggattacaggtgtgagccaccgtgcccggcccaaatctccctcttttaagaggccaggcactggattcgggtccaccctaacccagcaaggcctcatcttaacttgattgcaccttgcaaagaccctaattccaaagaaggtcatgcccatgggtactgggtattaggacttggacatatat

SEQ ID NO: 675606 - DNA, 275 bp, Homo sapiens
  misc_feature (11)..(11): n is a, c, g, or t
  misc_feature (25)..(25): n is a, c, g, or t
  misc_feature (35)..(35): n is a, c, g, or t
  misc_feature (52)..(52): n is a, c, g, or t
  misc_feature (90)..(90): n is a, c, g, or t
  misc_feature (104)..(104): n is a, c, g, or t
  misc_feature (112)..(112): n is a, c, g, or t
  misc_feature (115)..(115): n is a, c, g, or t
  misc_feature (125)..(125): n is a, c, g, or t
  misc_feature (164)..(164): n is a, c, g, or t
  misc_feature (170)..(171): n is a, c, g, or t
  misc_feature (187)..(187): n is a, c, g, or t
  misc_feature (195)..(195): n is a, c, g, or t
  misc_feature (215)..(215): n is a, c, g, or t
  misc_feature (217)..(217): n is a, c, g, or t
  misc_feature (220)..(220): n is a, c, g, or t
  misc_feature (240)..(241): n is a, c, g, or t
  misc_feature (263)..(263): n is a, c, g, or t
  misc_feature (265)..(265): n is a, c, g, or t
acctggtcaantggttcaaggcccntagagggccnggaagtaaaatgctcancgttcatgttgttggatatgggaagtatgaactggaanaggatggtaccccntctagtgnggnttcaaattcntcttgtgaagtgatgcagctgacctacctgccaacctcncctctnntggcagattgtatcanccccattnctgatatcagggctttcacnanaanactcaaccttctcccctacnntaaaatagtcaaataaataaantncagtcacgtt

SEQ ID NO: 675607 - DNA, 561 bp, Homo sapiens
cctaaagtgctgggattacaggcatgagccactgcacctggccggttattctctctttacagataactatgaacagccttcacagagaatgaacaataggacaaatgggatgcacgtctggagggtggtagctacgtctgtaaagcgagagatactaaggctgcggctagagtatgcagccgtcgtcccatcgtcgtctggtgcgcgcgcttattgcgatactaaagagcgagtccgtatccgccagctagtagaacaggaggaacacaggaggcaagcgacgtatgggatacaagtgttacaagacccgacagtcaaaaattagatagttgtatgtgattgagacctgttccccctggacgactgctttgtacgactgcacataggattaagtcacaaagctgcagaggagattgaggccctttaactcccgtctgcaaaccaataaatgcgctaagcacacaactgtcattggaggcgccagcaaaataggctaacacgggacgagaatgtttcctcagattacacaacgcgccaggtacgatttagaagagtacgcac

SEQ ID NO: 675608 - DNA, 150 bp, Homo sapiens
cgatgtggaccctgaatagataggggggagtagagcagcagcagaaactcattctcaaacatcttctatcttcaggcgctcgatggcccggctctggcctttgttggctttctccttctggatttacactctatgagggcagcagatctt

SEQ ID NO: 675609 - DNA, 1438 bp, Homo sapiens
  misc_feature (1127)..(1127): n is a, c, g, or t
tggctgcgtctcctgcgagaaatgcagacttttctcagcaatcagactgtcgacattccagaaatcttgtcgactttactctgagagggacgcacagtttatcgtgaagggccccaaaaggacaccctcgcggagggactctcaatcactatcaatgtaacaactctcagcctatctttggaccacgaacaacaaaaaggaggcctcacgggttgtgcccaaatgtgcgtgtgggcgtatacacacagacaggggacacgtgcgcctaacgcgatatcgagacactattgtgtgtaaagctcaccattgatccaggcaaacattgaactcaaagcgtgagtgaataacacaaccggggggacatccccacggtgaaaaccaacgaaacggagggagcacaccattgcggaataagtaggcactcccacctactgccacccaacgatacaaggagtgcaggcctaacatcatcccagagggagacacaacaaggggaagacaccaatcgatgggtgaacagaaaagaacacgccggaacaacaacactactcataattgcgcgcgcacatagaaacaaaagaaaaaataagttctccgccgccggaacgagggggagcaattcacgagacgacaatgtggaaaagacaacgcacagaggcgtagatggagatccgcgaccgacggtagtagcacacacgaaggaggagacatcttacatctacaagagaaggcgcccaccgccgacgaagaaacacagacgacgaagcatgagacacgaagacttatgtagcgagcaccagccactatgagggaaggacggaggatgagcaaacaatcacgatagcgcacacacaaccgatagctgtacaccgcacacgacgtgaggcagtctacaacccaagcaagaatatcactcaccaagagaccgggcggggccaaatcaataaagaaaacaatacaccacacagagcaacgacgaaggccacaccaatacaacagacgaagcacggcagctcacaacagatcaaaaaccagacgcagaaggaggaaaacaaatacaaacagaggaagagaaaaacaaatcaacaaagtagggaacgaagcttggtggcaatcaaagcatgagnataaagggagcactaaccaatcgaactagaaaaaagaacacacaggagaagcggaaacacaccgcgatggacaaacaagaccgcagcaaaccgagacgccggcacgctagtagcaacaacagcacagaccgaaacacacacagacaccaacagcacacacaaacacaaggagaacagaacgacaaacgccccaccggctggcggcgacactaaacacaacgagacaaaccaaacgtagaaacgcaacagttccccccccacccgacagacgctgggcagaccacaacgcactgataagcaacacaacgccc

SEQ ID NO: 675610 - DNA, 113 bp, Homo sapiens
gtactaaatcaccacgatcaaacgggacaagcatcaagcacgcaaccatgcagctcaaaacgcttagcctagccacaccccctccatctgtgcttgtccacctccatctgtgc

SEQ ID NO: 675611 - DNA, 399 bp, Homo sapiens
aggtctacccagataatggcagagaacccagtggagctgaatgcttgatgtgagcgagatcacatcactgcactccagtctaggcaagcacagcgagactcagtctcaaaaaaaaaaaaaaagggaagcagtatctcgaaatcaatattgtaccttctgttgtaaaaaactaaaaaaaggtgggggcgggcccctttagccccagctacgggggggcctaaaaaaggagaatggtttgcccccagggaggcagagttttgcatgtggcgcatgatcaccccattgcactccagcctgggcaacagaggctgagactccatctcggaaaaaacattaattaacccctaggaaaagccaggacttattatccccaaagaagaagaagggaattaccaaaaa

SEQ ID NO: 675612 - DNA, 280 bp, Homo sapiens
accttaaaaccagagcaacattttaatagtcatgagatcaaggattcctgggaaggagaggagatgggaggctgttgcccgctagctttcaagacattcatctgcctgtggcaaggtcagtacctgggccagtccgaggagcatcttagttggcaaaccacgcagtccctggaccttgcaagccatctctgcccaccccatgcctggagcctttttctttaggtgagtccagcacgcataggtttgtgtggccactggtaggcatctttgttgaaggtat

SEQ ID NO: 675613 - DNA, 339 bp, Homo sapiens
aaaaatttccaacttttattaagttccagggtacatgtgcaggatgtgcaggtttgttacataggtaaacatgtaccatggtgctttgctgcacagatcatctcatcacccaggtatgaagcccagcatccattagctattcttcctgatgctctctctctgccgactccctgccctcaacaggccctagtgtgtgttgttccccatcatgtgtccatgtgttctcatcatttagctcccagaaaattttcaacatagacaaaagtggagagaaaagtataatgaaactccatgtattcattacccaatctaaactttcaacttcccagaactaatttt

SEQ ID NO: 675614 - DNA, 509 bp, Homo sapiens
gtccactgtcacccaggcttgatacagtagtgctatcacgctcactgcagccttgaactcctgggctaaggatactcgctacctgagcctcctgagtcgctaggactggtctccatctgttgtccacggctgaagtgtagtagtgctatcacagctgactgcagactcaaacttccaggctgaagcgatcctcccatctcaacctcccatgtgactgagattacgggtgcgtgcaagtaatgcccaactaatattcgggaattgacgtatacgtggattccagaggggtgacagtgacacgtgggaccattcccaagttgcaggaaaacaagctgaagacgcgcactgattctacattatgctcctatctcccggctgtctctccaggccccagaactttctccaatcagcctctacagagcacgctcatgactcacaatggcctaatttaggccataccctatgtcacggagtctccgcagatgagcctactgcccacaagagcctcc

SEQ ID NO: 675615 - DNA, 455 bp, Homo sapiens
ttttttttttttagtagagacaaggtttcaccatattggtcagactggtcttgaccagtctagaactcctgacctcaggtgatctacccgccttggcctcccaaagtgctggggttacaggcatgagccaccgcgcccggccaaccttcgtattttcaaagtgcccagtacactgcctggcacagggtacatattacaaaagtgtttgttgttattagatacagaaacggcaagctacgttaatgaaaatggcaactttcagctggcaaacggcaaagctcctaagtacaaatgctactgacaggacccatgggaaaagaaactttacctgatgccccctttctggagcatgtgctcattctcagagtgagggcttcccctagtcccggagggatttctaagttgaacctgcctctggcccaggctctgtgatccctacgacttaccctgactcc

SEQ ID NO: 675616 - DNA, 421 bp, Homo sapiens
aaagtctgagcaacagtgctcacatcactgatagtctgtgaacagtcactatgcgccattcatcctgtagtgacagatggactgacttacgtacatagatgcaacatattagtaaagcaatttcttacaaaaaaagtcacacattaaaccacagtattttaccgaatatactacagaaacgccataaaaactgccttcacttacgctctctctccccgtatccggcgagccaactggacgtctttgtacataatggtgactctcttagcgtgaatggaacacaagtagagtatcttcgcaacagacccaccaggtacgctatcgctagcctcctgacagcgcaccgatggctgcgctctgaaacctcaggatcggaaacagaccatcctgcgacgatcatccctcaccaaactctggaaag

SEQ ID NO: 675617 - DNA, 132 bp, Homo sapiens
cggtgaagtctgtaccctcttatactcattagtccccaatctggatcccattctctgaccatactctggctatccttgtgtgtaatctcatttgagagtgatcctcacgggttccccttggtccttatcgag

SEQ ID NO: 675618 - DNA, 220 bp, Homo sapiens
gaacacacaatggtggatgattttcaggttttagaagtagtaaaactaagccagatgtcaattcaggtttctcattctcatattacttttgagtcacaaacgctgcctattactctctggtacaaacacttcacacacacactcacacacacgcgcatacacacacatgacacacacacagacaacatgcacatacactctaaagtgctccccatatgaa

SEQ ID NO: 675619 - DNA, 490 bp, Homo sapiens
ctgccagtgggcttctctttgtctctcccagatacggtagatgggatcacaacatctaatctgagtctgtctttgtccttcattctgtatggcagtctccctttgtgatacaagcttactatgagcatactaatgaagacttcccggagccccgtcttgcttctcttccaggtgctctatcccctcgagatcctctggtgccaggcttgcttcactggccatcttgtgtcgtcactgtggagttcggaggccagtgttccacagtctatactgggaggagctgctgaatggggctctggtctctgggtgttcattaccctcatagaggctgagaataacagcaaggactgattcacacatgttctagaaccccagattgtgccatgttacctgataccaggggttctcaagcttgacaccattgacattttggactgggtaatcctgggttctgccgagctgtcctttgccctgtatgagatttactaat

SEQ ID NO: 675620 - DNA, 431 bp, Homo sapiens
ttcgagcatttgcacatcttttaacgcctgcccattgactgaagtcagggcgccactgcgaactaggtggctgggcacagcacgcgtgtgatgcgcacttgtgggtcacaagagtcctgacccgactcacatcgggccagccataggcattatgccatgaccacacccatggggaacaggacagttgtgactcacccaccaggaagaacgctggccagagatgagagattatgaggatgattttctttgcctgacctgatgagccagagctctgcccactgcgctgtctaccgttaccagctgagagaactccacctccagaggcccagagccttggaatggtagatcgcagcttgcagcggcttctattagggacacagagggtcagacaccaatctgtcctctgcttgctgccattagcgttaacgtct

SEQ ID NO: 675621 - DNA, 204 bp, Homo sapiens
  misc_feature (85)..(85): n is a, c, g, or t
tgtcaaactggccggcgcagtgcacgctgggccgccccggagcgtcgcagagcccgtcggagtcgtagtccgggacggcccgcgnatttgtccgatcggcagctcgggatccgggtcggggtgtcggccgggttgctgccgggcaccgtcgagcgttagcacccagcattgagctgccagcgctgtttctccctaagcaccctc

SEQ ID NO: 675622 - DNA, 435 bp, Homo sapiens
  misc_feature (313)..(313): n is a, c, g, or t
  misc_feature (358)..(358): n is a, c, g, or t
agatgcaagactctaactctgtcttttccctaggagcagcgtttatttacttatttattctttgagatggaattttgctcattgcccaggctggagtgcagtggcacgatctcggctcaccataacttccgcctcccaggttcaagcgattctcctgcctcagcctcccgagtagctgggattacaggcatgcaccaccacgcccagctaatattgtattattagtagagacggggtttctccatgttggtcaggctgttttcgaactctcaacctcaggtgatccacctacccaagcctcccaaagtgctgngattacaggcatgagccactgtgcccagccatcttctgggtattntaaatgtcatcctctaccctagtagagtagaggatagacctgagacaagcccatttgaaggtgtggaggggagaatg

SEQ ID NO: 675623 - DNA, 1145 bp, Homo sapiens
  misc_feature (532)..(532): n is a, c, g, or t
  misc_feature (620)..(620): n is a, c, g, or t
atgatgagggcatgagccacgtgggcacacggccagaagctctttatccgtaggtgtataggtgcccaaaggattttattgctatgtgtgtgatttaaaaagtgtgtgatagggtgttatggtgctagcgtttgagcttatctcagagaggctgagtgtgtccattgagtgagatcggatttcggagtatgaaggatagtgaggggttagtatagtgtgtgaagcggagtgagatgaggatcggggtttgcgtgtttgaccgtggtagggtgttcgcgagtatgtctctctcagcacgcatagtggttgaaaaagaacaatacctccctgctgagctcacagatcctgtgcctttgccagcctgtcgatgcagaaaatccaggctagtccatcttatgtgattggtgctggtgtactgggctgctctacttctgtgtccatatgcatgttaatggtattccatgcctttgcaattacttatggctgatcttgaattactcgctaagtctatgtagatacacaatgatacatnatcgggggtcagaaatgtctccgtactcaccagtgtctcagtgcggtttattacccacaagttgctactgtagcgtgagatcttaaantcgcatggttgcctcttcccatggtaaaactttctagagacactacacactttctgttaatacttctgtcaaaaagttgaacctttgaccccaagaatctcgggactatgacacatttcaatgttttaaccacgtgtaataaggacatccaacagctaaggggcgacacatagaacttatacccaagaacggtatatacctgaactagatttcgaaggtccatagcctagattctccacgggaagttacctacgatctagctacgccttcaaactacttctcaagcttataaataccaagcgcgatcaacccttctgagctacccccttctggcaatgcgcagaccatgtacataaataacggtcgtgcgccagaccccgtaatgggaattccctttctaccaaagtatcccggtaacagcgttctattaacccttaaaggacatcacaggttctaggaacactacggggagttaaagtggaaccacgtgtcgcctttataaattctccagggtgccccaaacag

SEQ ID NO: 675624 - DNA, 170 bp, Homo sapiens
taattctcaaggcgcttgtgtgcttctctgacctctacatggcctccctcagctgcctgctcaactaccgcgtggacttcacgcgttcgacccacgccgtacgccgctgcagcacgaggcacccctctggatggaccagctctgcaccggctgcatgaagacccccttcc

SEQ ID NO: 675625 - DNA, 620 bp, Homo sapiens
  misc_feature (20)..(20): n is a, c, g, or t
  misc_feature (68)..(68): n is a, c, g, or t
  misc_feature (110)..(110): n is a, c, g, or t
  misc_feature (122)..(124): n is a, c, g, or t
  misc_feature (143)..(144): n is a, c, g, or t
  misc_feature (148)..(149): n is a, c, g, or t
  misc_feature (157)..(159): n is a, c, g, or t
  misc_feature (183)..(183): n is a, c, g, or t
  misc_feature (194)..(194): n is a, c, g, or t
  misc_feature (196)..(196): n is a, c, g, or t
  misc_feature (201)..(201): n is a, c, g, or t
  misc_feature (257)..(257): n is a, c, g, or t
  misc_feature (259)..(259): n is a, c, g, or t
  misc_feature (270)..(270): n is a, c, g, or t
  misc_feature (280)..(280): n is a, c, g, or t
  misc_feature (342)..(342): n is a, c, g, or t
  misc_feature (372)..(372): n is a, c, g, or t
  misc_feature (377)..(377): n is a, c, g, or t
  misc_feature (390)..(392): n is a, c, g, or t
  misc_feature (394)..(394): n is a, c, g, or t
  misc_feature (411)..(411): n is a, c, g, or t
  misc_feature (419)..(419): n is a, c, g, or t
  misc_feature (431)..(431): n is a, c, g, or t
  misc_feature (435)..(435): n is a, c, g, or t
  misc_feature (529)..(531): n is a, c, g, or t
  misc_feature (600)..(600): n is a, c, g, or t
ttcatatgatcctatttggngcattttctaccatggtccaagatcattacatggatacagccaaggantgggccccaactttcaggaaaaaaaccacaaagaagaaaatnaaggaggctatnnnaaccccccagtagaaaatnngaannctggaacnnnaaaaaaaaaaagaggaaaaaaaanaatgcaacgantnaaagnacttggaaaaaattggtggaaagtggcacggtatacgagtaaggtcactgggcttngnatggcaaggcngctgcattgncagcccctccccgggcccaggtccttatcatgcctgccggcgtcattccctcaacgccttancctatctgtctgccctactccatccctccntcctntcatccggccgtnnntngcctctgccttcccccngtggcctnccccaccacagngggntacatggtaccatacacattctttgacttttcttgtgttgtgtttgatttgtttgttttcaaggctatccaggctaactcttcccggggatttnnntgggggggggggtggtccgctggggctggtttgctttaacctctcctttatcaagggatgatgactggntttaaagaaaaataaagctg

SEQ ID NO: 675626 - DNA, 109 bp, Homo sapiens
cagccgagacagcaatcccgccccggcctgtcgggagcggtggggcataggctggagagccccagagaggatctgactccgctttcacagtcctccagattattccaag

SEQ ID NO: 675627 - DNA, 151 bp, Homo sapiens
  misc_feature (9)..(9): n is a, c, g, or t
  misc_feature (66)..(66): n is a, c, g, or t
  misc_feature (148)..(149): n is a, c, g, or t
aaaatcaanctattattacaaaggactttaccaagccactgctgtgtcttcccccatcccatctgntggaagtcggcaagagcatgctagcaactttgtgttcgatgtcaaatcgtgcagatcagagcatcctaacgcaaagccgacnnaa

SEQ ID NO: 675628 - DNA, 109 bp, Homo sapiens
ctttctgtccggctgcgagaagccgacagaagggcaggagaaagaagcgagcaggaaggataggagagcgggcaaggagatagatataagtaagggagagagttatgta

SEQ ID NO: 675629 - DNA, 250 bp, Homo sapiens
  misc_feature (53)..(53): n is a, c, g, or t
  misc_feature (72)..(72): n is a, c, g, or t
  misc_feature (97)..(97): n is a, c, g, or t
  misc_feature (169)..(170): n is a, c, g, or t
ggcctggaacactgttaagagagaaaacagatcccaagctggattaggccaantgggcgcaagggaagctgnccctgccctgttatccgtggggctntggcgtcttggggatggcaccaaaggcaggacaaaccagagaaaagcagtgtaggacctggaacccagaganncctggaccccaagcggaaccaggttgggggtaagcagggggtacgccatggcccctctgagtcctgagctccggcgcctt

SEQ ID NO: 675630 - DNA, 299 bp, Homo sapiens
  misc_feature (9)..(9): n is a, c, g, or t
  misc_feature (47)..(47): n is a, c, g, or t
  misc_feature (108)..(108): n is a, c, g, or t
  misc_feature (178)..(178): n is a, c, g, or t
  misc_feature (231)..(231): n is a, c, g, or t
cgacacggntgcgaaaagacgacaaaaggggggcgttactcaccctntatccccagcagggaggctgaggcgagcggatcatctgaggtcaggagttcgagaccagcntggccagtatggtgaaaccccatctctactaaaatacaaaaatcagctgggcatggtggtggggcgcctntagtcccagctactcaggaggctgaggcaggagaattgctcgaactcgggagntggaggttgcagtgagctgagatcgcgccactgcactccagcttggcgacagagcgagactccatctc

SEQ ID NO: 675631 - DNA, 629 bp, Homo sapiens
aaggaaacactttcagttttgctgatatgttttagtttggtttatttcactaagttgggctattattacttccattttcttgagctttattttgcactttttctaacttcttgagttgaacgctcaatttgtcactctttcttgacattttttccattaatgcatatcacctttaactgtccctttgcatttccctttatttgcaacccacacttttgacatgtaattcttcctataattacaattttgatagtacatttattacaaatttggaatttccattttgagttcttctttaactcctgggaaatgcatttttatgttttcatatatttgcctttttttaagctatcctttttgcagctctaattttagaattctaatttgatcacagagaaatgtggccagagaatgggttcttccgggataatctttgaaatttgctgagaatttttttgtgaccctatacaagggcaaattttgtggatgttccacgtttacaccaaaaagaaaaatgtcgctttttatttggtctattcaccaccaagcttattacttgcattggtcaaatctttcattatcctaatcaaattctttgtctaccctgatcctccaaaagcagttcaaaa

SEQ ID NO: 675632 - DNA, 268 bp, Homo sapiens
agcggtcaagacagcctgggcacatggtgagacccttgttctataaaaaacacaaaaattagccaggtgtggtggcgcgcacctgtggtcccagctactcgggaggctgaggcaggaggattgcttgaacacaggggtagaggctgccatgttcgtgccactgcactccagcctgggtgacagagcatgaccctgtctcaaaaaaacaataaataaaataaaacagggatgaactggagaaactgtgaaggtgatcgtggggttgtaa

SEQ ID NO: 675633 - DNA, 196 bp, Homo sapiens
cggttggaaactctctatcgctagcatctgccaatggataggtggaagcctgggaagatctctttggaaacgggaatatcgtcaggtaacaagtacacagaagcattcgtcagaaactccttggtgaggctgggtgtcatcccccagagtataacattgcttttcatagagcagtgttggaacattctttgcgtag

SEQ ID NO: 675634 - DNA, 310 bp, Homo sapiens
aacagttggaaaacatagatggaacggacagtatcctcaagttatgcactgacctaagaagtaataaaaacctgaatagaactttaaccattacagaaattgacacttaaaaagaaacaggccgggcgcagtggctcacacctgtaatcccagctctcagggaggcagaggcgggaggatagcttgagcccaggagttcgagacctgcctgggcaatatagcgagaccccgttctccacaaaaagaaaaaaaaaagagacgaaaaaaaataagtgtaaaagaaacatcaaacccaaatgatttttaagag

SEQ ID NO: 675635 - DNA, 456 bp, Homo sapiens
ctcctctcgactagcgctctcaggtatactggcttgatacatggtacatctattagccacgcatgcgatgtctagattcaatatctgctcgcagcatgccatgggacatatagatgcataccttgtgcttcccacgaaatcatttattatttatttcgtctctcattcagcttctcttctactgagccataattcaagcccacaattatttgccatttgtccagctctctccactatcctgatggatccggttgtctccacatgtcatcttgttcaaaggcctctgctccattctaacctggcaggcgtagagcggtgccatgcaaaaagggagcagagaatgccaggacggcaggagaacaggggcctctgggctgaaccagcccaaaggctcctgtgcagcttcccagtgagaagcggttagactgtcagccaagcagaaagtgaggcagatcc

SEQ ID NO: 675636 - DNA, 410 bp, Homo sapiens
ggccatgtccccagaacctgcgaatattttagcttgcaaggaaaggggggctttggagatggaatttgggttgctaagcactgccctcagagtgggaacgtgatgctggcttttctgaggggccagtggaatcactgaggcccttgagaggggtggagggaagcaggaagtcaggcagagggagaagtgactgcagaggaaaggcaaagagacgcaacatagctggctttgaagatgaaggcaggggcccagaaaagtttctagaagctggaagtggaaaggcaaataattttcccctagagcgtccagtaggaacgcagacctgctgcaccctgaattcagccccagaaggcctttgctggagctctgtcccacagtactgtaggataagacatttgtgttgtttaaaa

SEQ ID NO: 675637 - DNA, 922 bp, Homo sapiens
  misc_feature (922)..(922): n is a, c, g, or t
ggacgcgtgggcggaggcgtgggcgctagcgcccggaggagaaaccgaagttgaaagtgtctcttagcagcgcgcgcgacaagaacggggcagccgagcatcatggcagacagcaggatgtggcataaacgatctttaggcagttacgatgacagaggacacgtagccgcgcaggatccgtcgaggcagagcacggcagtctcccgcctaagcaagagagatcgaagggatcctacggtttccatccgactcgcgtcttggcttctcggggactttcgtgctgaagccggggctcctggcggtgtcgctatcgtgtgacgtgtggcattgtgcagcatcccttctgaggctccagctgtgagtgcgatttccgccaggccgattccttgggcatcggacgatccctttgctgcctacggcacatcgtcccggtgaatggtggcagatgaccaagcggggtcttttctgctcgcgtggagccaatcgacctagctaagcgacgattttgaaggccttggtcgatccctcggatcaatgggctagatcgtgctctcgatagggatctattgttggcccaactaccggagggggggagtctttgggtccctctcccaagtagtcggacacattggggccattcctgaagcgtgcgtctttcgcgatcggttcctcattgcgcgcgaggccggttctggaggggtgggtcttggatgggttacatttgccggcgttggggtcattctcacgcaattcaaagagcagagggccatcggacaggcaaaagttgctgtgggagagagacccgacaacgttggtccccccggatgcttctgtgggaatgggcggtaacccccggtggggcccggttcattccttggagcgcgtccggcggctggcgaccttaagggagttttcagagctn

SEQ ID NO: 675638 - DNA, 425 bp, Homo sapiens
ccgtgttcccagggctgggaggacagctctggccctttttaggcctagcctcgtcccaagctaaatgtaagccagttgggctgtgttaaaggaagcagtgtttttggttcgattctgcctctgtagctcaaggggggcagcccccagagtcctgtgcattttgccaaggctccaaagttttgccaaatgcagggagttttccctttgggggaaaggagggccccttaagaagggtttatctgcgttcgtctcggtgggcttctcctgcatgggagttgtgttcctgtgcaagggggagctttgctccaggacaggatgactgttttccctatttttagggacaagtcccaagatgccagaaaggcagtctcccaaggacccacaaagcagacgtctcaattaaccccaagttttgaaaaaaaaaa

SEQ ID NO: 675639 - DNA, 138 bp, Homo sapiens
ggctaagtaagctcagcttggaccgaggggtgtacttcctgtgtaccagatccaggagatcttcagctccttgcagcccttcagatctcaggtgtacatgcaccccagcctgtcacctgccagcaccatgatcctact

SEQ ID NO: 675640 - DNA, 895 bp, Homo sapiens
gcgagtccgcctgtgggttacccacgtgtgaaccgtgatacttggggggcaccaacacgagtgtttgggcggggaccccacccacagaacggcatgggccagcccagaatactggtcgagggaagcacacccgcccccgcctttgcccgcggaaggacgcccccccgggggagctgtacacccggcgacgagaaaaaactttaatcctggacgaagaccgccacagcgagtgtcccccacaagggggcgtaccacggggtgcgccggccgcacgggagcacgtttgttttgagaggcaccccacggcctgtgagaaaccagttggcgcgcgacccctgaatttcgagccgcccccccgtgctatcgtgtgtcacgcccctctatttcgaggcggtctttttccatcgaggggcctccctgaataggggttgtatagagcccgatctcgcctgggggcccctcagtattgtagcccggttagtgtcaaagaaacacacaaaccactggtttggggtcatgttctttgcgtgaggacaaacttcccgtgtatcacattgcccccgcacatctcgtccggagcggtcacacaaatgtggcggagagaaaatacacatgggtggaggatgtcactgaacttctctgcaatcaaatatggaacaaatctctatggtgggcacaagtgatttcttgtaaatatgtatatctgaggggcatgacccccaactcgtagggttagccacccaggtaatacgcccaccccttaggggagcgcccccaacacgggtgagttccacccacataccccccctcttcgggagcgcccaaccggaggcacccttgcagccccggggttcgagccccccccggcaaaaggaacccgcccccaaaaaaaaca

SEQ ID NO: 675641 - DNA, 231 bp, Homo sapiens
cagccttccgggtcctcctcgccctggtatgatgccagcaccccatatggggggccctcccatgatgccaatgatgggccctcctcctcctgggatgatgccagtgggacctgctcctggaatgaggccgcccatgggaggccatatgccaatgatgcctgggcccccaatgatgagacctcctgcccgtcccatgatggtgcccactcggcccggaatgactcgaccaga

SEQ ID NO: 675642 - DNA, 103 bp, Homo sapiens
tgcagcagtgaaggaatttcacgcttcgatcctgcatatgcagctccaaagcgcccaggacgaccaggtcgctgctgcgttcggttcactggctcgcctacga

SEQ ID NO: 675643 - DNA, 800 bp, Homo sapiens
gcttcctgactgctgctgtcttctgtctgtgtcgccttcctctcgctgtcctggcacgcgaactcagcgtgcagaaaggcgatcgttgtggacgtataccagtgggagttcctggctgctgctgcgatcggttgcacgcagctgagcagtgagagcctcaagctgctccaaggagctcaacctggtgcttggacgagatcaacgaggggcggttgtcacgaccatgggcacaggcggctgcaaccacggagagacgggcaaatcggacactttggggccgcctacaagagatgagacccccagatttgaatgcctgtggccaagtgcttcaaaccgggcatgtagctgagcgcagatggtgcactctgtacgcttgacgttgacgactcctgaaacatccgctacgatctcctgaagcttgagccctgacacggagactggagggactcggatacatcgttggatgctgactctgccgagacctgaccctcacagtacacctttcgtgcagtgaccacgatgaaccatcaatggccttgttaccccgaaaggagatcccattactgggctccatggacggtcatctcacacataccccgcaattctaagccttgatttactccctgcctaccgagagtcctttgggggaccccagaggagagagtcacggtggaggaccaaaatgaacctcgattactgcttcctccttgaatgtaccgggcaggtccaaaggcttctactccgttggcagctgggggatgcctcgtgggcacagggacaaataactgagacccattgca

SEQ ID NO: 675644 - DNA, 109 bp, Homo sapiens
gagaatcagaacaaaaacaaagatttttatcagatgttatgatgcaaaacaagaaaaagaaaaaaaaaggaagagaaaattcaattttctgggtatgcacaaagaccat

SEQ ID NO: 675645 - DNA, 149 bp, Homo sapiens
cgtacacatatacacagatatgaggctaaaccctgtactaatagtaccacctaaagtaaagaaagctccgaggttaggaccttccaatcagccatctacatcagctcgtgaccggactaaattgatcctaggctttggaatataataag

SEQ ID NO: 675646 - DNA, 611 bp, Homo sapiens
actttctcaccccactgccgtttgaaggggccccttcagtggggcaaagaattcttcctttcgataatttcaaactggaaaaaatgtcctaatgaataggctatgcattgcggaaaagacctattgtatttaaaagggtaatcagttttgcaagagttcgcattggaataaatgaggcacactaaggcagtcgtatccgggttatctatgggattcattttgtggacttgtcatcgcagcacatcaaatgttataggcgcaagtgcctatgaaggtcaagggttcattagagcctatatcctatcgtactgcactttctgcatcgtgtagatctgggcacacgtatcctccgagtgacagacgcgtttctcccagatacttacatcaatccagagcatttgactttttataagtaccccccgatctgatctgccactccgtgggcatgtcacttatgccagtaattctatgtaggtcagtcatagtagagtcctatattcctatggcagaataattaagttcctgtaatgaataaatgtacgtgcagtggatagatgcgcctatgatgtggcatatcactaggtctagagttatacttcagcctactaaac

SEQ ID NO: 675647 - DNA, 510 bp, Homo sapiens
  misc_feature (12)..(12): n is a, c, g, or t
  misc_feature (411)..(411): n is a, c, g, or t
  misc_feature (505)..(505): n is a, c, g, or t
agtgtctctatntcgggtaaaggaaagaccaaaataactttccaagatgaaaagctaagagtgctgatctcatcacagacatagccagctcttcagttcagaccacctggaaaccctccccatgtcttttcagaacaatgtcctaagaaccataggggaagtggccataaaaaccatctttcctttgcagactggggtggggactctggccaatgccattctgttcttccataatatctttcccatcttgactgagcatcaaatgaggcccacacacaagattctcacccacatggccgtggcaaactccttggttcttctttccactggaatcccccacacaatggtgtcttttgtcctatggaaacccttgtccagtcttgagtgtaaactcgtgtttacaggtcttanagtcctgacctggtgatccgcccgcgtggacctcccaaggtgctggaattacaggcgtgagccaccactcctggcctatgccagcattctttanagttg

SEQ ID NO: 675648 - DNA, 150 bp, Homo sapiens
ctactgctgtactgggtactggttcgatgaactctttgtgccagttaccagtgctgccgagaatatgaagggagtatcgtcctgaatatgacgactgaaaatcactggccacgcagagagcccacgcagagagaacactggcacgactcg

SEQ ID NO: 675649 - DNA, 119 bp, Homo sapiens
gaagacttcgtagggttagcgaatttgaggtttcttggtattgcgcgtttctttttcttgctgacactacaaaagttcgctgccctcgggtttttaggcccgcctggggcccgttttcg

SEQ ID NO: 675650 - DNA, 359 bp, Homo sapiens
aggacaaaacaaatagtgtacgagtacctggataatacagccgtattagcaatgaggtagcaactttataagtacatattgttagactgtccatagtccacgcagagattacaactccacactatcagcaacaacatgctagacagttcctaagaaaactactattagaaacggcataaccacagagtataccttcatttgaccaactccatctcagtttagatgtgcagaaaggcagagatatatccagagtacgccacatgcgacatgttacttgatcgaattttctaaactcaggttacagcgacactgacagtaagataagggaagaaaacatggaggaatgacgtcctagttac

SEQ ID NO: 675651 - DNA, 295 bp, Homo sapiens
cataggagcaccacacgtatgaagcttctgtaaatcgtcacccgattgggatattcacgccagttaatttgactgaacaatgtcacccgaagagacaggttaaaagtcctctcccgttgggtgagaatgttgtgcacccactctggataccgggatccaatttctacaggcttcccgagattccctgtacattctcttagtgatgatggagttgtctatagaaacttcatctttctggaaatgtccatagagctgtgtttaacctcccagaacagaaggtcgacgcgggtaccga

SEQ ID NO: 675652 - DNA, 308 bp, Homo sapiens
atgctacctgatcctggtccctgtgctcatgcccgtcttagtggtcatctgcttgtgttctgtggtgtccaagtctgtattcacgtgtccttaggtaccatttcatgcttctccctttcgtactctttctcgtttctaaactgtgttcaacaacatcatttaaatcatgacggcattttcaagtagaagctgttgataactgaggtgaaaggacaggtgcctacttaggattctaagtactctcaattttgccacattctcctataattatgataggattgacttaaatccattagtctgtccttcac

SEQ ID NO: 675653 - DNA, 252 bp, Homo sapiens
tagattttttccatttataaattaattgaagcacagagaaaagggggaaaatgattaaagaaatttatgttttttaaacagaggattttgggttttacaccaacgaaaaagaaaaaccagatgaataagtttttaattttaattttttttcttttattctacatggtaggtctcgaagatgtctttaaatgtgattttataagctctaaggacagtcttgatcttgacagacaaacaattttttttttaccc

SEQ ID NO: 675654 - DNA, 745 bp, Homo sapiens
ggctccaggccgcacacctgagggtgggacccccgtgaggccgagccggtgtcggatcaaactcgtgagacctgagcagggcccaaacctgggaccggagtggggacgggcggaggaagccaagaggctcgagacctgaggctcgcccacccctctggctgcctgcctggaccctgctgccacttgggggaatttccttccctgacttccctgctgctggccacagccccagctccgtccagcccctggctccctggccccctgggcgggagagtgagccccgagacatccgaccacagacgcccggagggtcccgggcacccgttaggaccaacagaggacacacatccccggacgcagttgagtcaggaacccggctgacatacgagggagacgcgggagtcagcacggagcactgataacacacagaggatggtccaggaagcccgggggaccgccggggacggggggagcccccaggaaatggccaagtaggatcagcccccgacggaagggcacggcaggcaacagagaagacacagcacgggacagcttggaacatgcaccaacggcgcaagccgggggccgaagagaagcggcgggagacggaacaagaaaaggcgacttggggcgccggacgtgcgatgggccaacagggcaacagacgggaagacagggagatcaacagagaagccacacggaacaggagaagaggaaaggaacaaggacgcagagagaggaaaca

SEQ ID NO: 675655 - DNA, 195 bp, Homo sapiens
atacaatattctcatttaaacattacacagcatcattgtttataatcagaaactctgatccttctgtctggtggcacttagagtcttttacaccataatgcagcagtatagagggaggattttatagagaaatagggatagtcttcatgaccacaaataaataaaggaaaactaaactgcattgtggggttttga

SEQ ID NO: 675656 - DNA, 103 bp, Homo sapiens
  misc_feature (55)..(55): n is a, c, g, or t
caagccgccccctggcttctctggccttctgcctagggccctcccggcctgtgtncccagccccgccaccaccaccaccacaaaagcaccaggtgtgtgcccc

SEQ ID NO: 675657 - DNA, 778 bp, Homo sapiens
  misc_feature (259)..(259): n is a, c, g, or t
  misc_feature (632)..(632): n is a, c, g, or t
caatatctgggaagataccacatatgaagatggggcgaggtgttcaaggtaagaccgcagtcagcagggcaatggcctgtgaggagtttctcattataaaacacaaatgtgggattatggatctggttgtttctcttcgactcataacatcttcttcagaatgactctccccaccccgtgctatgtctttgaaagttttcgccatcgtttgaatttggcataccttacacgattgacatgataccttcttttcatcatnttaacgaacaaagcttatttttttggcccaagtgtcttcctgaagccaaagtttaagaaacacgattaagaacggttttgagtcacgccacaagacatgaaattagctaataaaaaacccttttccccccattgcctcataactcatttctcagaaaacaatcctggatgcaccctgtttaccagcaaggttaaaagtgcaagacccgaaagacctcacaatttttacactcaggcgaattactgttcatctaccctggctgaccctgcaatttgggagcgggcccttgtctgcctgtaaagggagaagaagagtgtttgtctggctggcctatatttgctcctgtagctcactctctgccaccagatttganttttgttgtaggccggttcgttaattggttttttcagaactgcgcatacctttttctaaataggctgggttttttgaattttattttatggatccctaggcccctccaagtttatttgatagaccaccttcaccttttggactttc

SEQ ID NO: 675658 - DNA, 513 bp, Homo sapiens
accccgatgcgaaagcacgggcagcatcttcactgtgctgggggagcttttaccactgctcctcccagtagaggaggacggaggcttatgagttgaataacttgccctgggtcacagccaataaataacagcctggatttgaacctggtcagttagttcaaaatccatcatctttcactagacctcattgccagtttagaggtactagagaagtttgcttcaagggaacaagagttctcttccttaggcccatatctctcaggatcctgcctccctaaacagaagagcttgcaacacaggacttgtgtaagctctcagcaatcagtaatgtggaaactaatcttgtcaaggagatgaccagttacaggatccttagtttaagaaaatctaaatggccttgggcttactcttacccaaatctagtcttttctacttcttccatcctgcctgtctagacccttaagttagacccccagaacctcattggactctttccaccgtgcttatctcaat

SEQ ID NO: 675659 - DNA, 586 bp, Homo sapiens
agacgctcttttcgcccagtggcgcccctctctccgcacgcgtccgttatcgcgggtgtagccgttccccgggctcggccctcgcccctttccgtgtggctgccttgcccctttatgccccctgtctggggtgtcttccccctcaggtcccctccgccccagtgtggtctcccccctcggggcgcccgaatctcgccgggcagcatgacttcttgcgtggggctctggggaccccatcgtcgccaggtggggcccccacaagaggcgccacccccgaggggtgggccccccatcctccaacctcggggaccacggagcgggcccccgcgggcccaccccgggccccacctgggcccacccgccaccccatgcctcttgcgaccacatggagaggaaccgacaactagcgcattaacaacatataaacacggtgataccacgacccactccaatttttatcccggggagaaatcttcttttcatataaatatactataatatcgctccccgacacccccctggagacataacttccgaccgcgccatccaacagctcttatattttctgtcacacaaataacaaaaa

SEQ ID NO: 675660 - DNA, 834 bp, Homo sapiens
  misc_feature (126)..(126): n is a, c, g, or t
  misc_feature (148)..(148): n is a, c, g, or t
  misc_feature (210)..(211): n is a, c, g, or t
  misc_feature (247)..(248): n is a, c, g, or t
  misc_feature (251)..(251): n is a, c, g, or t
  misc_feature (267)..(267): n is a, c, g, or t
  misc_feature (272)..(272): n is a, c, g, or t
  misc_feature (283)..(283): n is a, c, g, or t
  misc_feature (285)..(285): n is a, c, g, or t
  misc_feature (300)..(300): n is a, c, g, or t
  misc_feature (304)..(304): n is a, c, g, or t
  misc_feature (321)..(321): n is a, c, g, or t
  misc_feature (323)..(323): n is a, c, g, or t
  misc_feature (336)..(337): n is a, c, g, or t
  misc_feature (343)..(343): n is a, c, g, or t
  misc_feature (345)..(347): n is a, c, g, or t
  misc_feature (358)..(358): n is a, c, g, or t
gaaaagtttggtcgaggagtgatagcgggactcgttgacattggggaaactttgcaatgccccgaagacttaactcccgatgaggttgtggaactagaaaatcaagctgcactgaccaacctgaancagaagtacctgactgtgattncaaaccccaggtggttactggagcccatacctaggaaaggaggcaaggatgtattccaggtnnacatcccagagcacctgatccctttggggcatgaanngtnacaagtgtgggctccngaaangaatgttccananaaaccagctaaatcntggnaccttcaatttgccatngngacgcagacctgnntaaatnannntaaagatgaanttcccctgttcttgcaaagtcccaccccctatcactgtgctttaaaacaggtttcttttctctaataacgaagtagtgggtggtacttttttgggtgatgcctccctaggacacagcaatgtcctaagtcctttaccatagagaaaaggcagaactgcctgaacagatagcccttactgttatatttacccttattattttttattgttccatcaatagggatgccgtcccccactttttacgacggctattctaagactctactacctctatcgtgagattattaattctctctaatttatctttaattttttgttattatctgatgtgtgttatcttcaaatatatattagtttcgtcatattttatcaacgatgacctatcagtgcacagatactagaagagcggggaagttgtaagagtacttaatgcagacccacttaccgattacgaaacctgggttatattgagagggt

SEQ ID NO: 675661 - DNA, 524 bp, Homo sapiens
tggggtcaggaatccgagtggtgcagccgctattaaaggttcgtttgttcaacgattaaagtcctacgtgatctgagttcacgaccggcagttaatccaggtcgtagcttatctctgttgtgatacctccctgtacgaaaggacaagagaaataaggcctacttcacaaagcgccttcccccgtaaatgatatcatctcaacttagtattatacccatacccacccaagaacagggtttgttaagatggcagagcccggtaatcgcataaaacttaaaactttacagtcagaggttcaattcctcttcttaacaacatacccatggccaacctcctactcctcattgtacccattctaatcgcaatggcattcctaatgcttaccgaacgaaaaattctaggctatatacaactacgcaaaggccccaacgttgtaggcccctacgggctactacaacccttcgctgacgccataaaactcttcaccaaagagcccctaaaacccgccacatctaccatcaccc

SEQ ID NO: 675662 - DNA, 510 bp, Homo sapiens
  misc_feature (126)..(126): n is a, c, g, or t
  misc_feature (148)..(148): n is a, c, g, or t
  misc_feature (210)..(211): n is a, c, g, or t
  misc_feature (247)..(248): n is a, c, g, or t
  misc_feature (251)..(251): n is a, c, g, or t
  misc_feature (267)..(267): n is a, c, g, or t
  misc_feature (272)..(272): n is a, c, g, or t
  misc_feature (283)..(283): n is a, c, g, or t
  misc_feature (285)..(285): n is a, c, g, or t
  misc_feature (300)..(300): n is a, c, g, or t
  misc_feature (304)..(304): n is a, c, g, or t
  misc_feature (321)..(321): n is a, c, g, or t
  misc_feature (323)..(323): n is a, c, g, or t
  misc_feature (336)..(337): n is a, c, g, or t
  misc_feature (343)..(343): n is a, c, g, or t
  misc_feature (345)..(347): n is a, c, g, or t
  misc_feature (358)..(358): n is a, c, g, or t
gaaaagtttggtcgaggagtgatagcgggactcgttgacattggggaaactttgcaatgccccgaagacttaactcccgatgaggttgtggaactagaaaatcaagctgcactgaccaacctgaancagaagtacctgactgtgattncaaaccccaggtggttactggagcccatacctaggaaaggaggcaaggatgtattccaggtnnacatcccagagcacctgatccctttggggcatgaanngtnacaagtgtgggctccngaaangaatgttccananaaaccagctaaatcntggnaccttcaatttgccatngngacgcagacctgnntaaatnannntaaagatgaanttccttgtgtgatgcctccttaggcacacaggcaatgtctcaagtactttgaccttagggtagaaggcaaagctgccagtaaatgtctcagcattgctgctaattttggtcctgctagtttctggattgtacaaataaatgtgttgtagatg

SEQ ID NO: 675663 - DNA, 403 bp, Homo sapiens
cgttacacagtgtcccctacaacgtgacagcaccgtacgtgtcttgttttgtgctcatcaagtgtgcacacaggggctgtgcagtagttgtcgcacctgcctctcaggaacagctcctgacgggtaggacaaatagactccgctccctcgccccgggctgcgtgggcacagtggtcacctttctccagacctcatttcatttcattttttcctcttgatgaaacctgtccctctaccttgtaaaccattctgtattcccctactctccctaccggattttcacttgcctcctggtcaacataccactccatagtctccgtgcattgccgtctggatacagctgtggctcccacataggtttttttttcgagtcaaattaattcaattaagctttaaaacaaac

SEQ ID NO: 675664 - DNA, 450 bp, Homo sapiens
gaatgagggattgagcccaggagtttgagaccagcctgggcaacacagcgagatcctgtctctataaaaataaattaaggtatttttaaaaatttaaacgatcccttcttagccaggcacggtggctcacatatgtaatttcagcactctgggaggccaaggcaggtggatcacgaggtcaggagttcaagaccagcctggccaacatggggaaaccctgtctctactaaaaatacaaaaaaagctagctgggtgtggtgtcaggtgcctgtaatcccagctactccggagatccagccaggagaattgcttgaacccaagaggtggaggttgcagtgagccgagattacgcccctgcactccagcctgggcgacagagtgagactctgtctccaaaacaaaacaaaaacaaaacaaaaaatcgaaaaaaccccaacagtttcagagatg

SEQ ID NO: 675665 - DNA, 204 bp, Homo sapiens
  misc_feature (88)..(88): n is a, c, g, or t
ttttaaaaaaaaaaaagaccccggggccccaaagggtttgtttgtttggggccccaaacggccccccggtttttggggggtttagttnccacaagaacccttccattattttttttttgaaaaaaaggggaaacggggttttgggggttttttttccccggccccaaatttccaatcttttaaaaaaagggtgtttttccccca

SEQ ID NO: 675666 - DNA, 1247 bp, Homo sapiens
ggggccatggatgacactgcgtgccagtacggcggcgcctctgtctgaagaaggggaagtgacctccgtgcctccaggctctggccgtggaggataccggaggccccttctgcctcggccggtaaggccgaggacgagggggaaggaggccgagaggagaccgagcgtgaggggtccgggggcgagaaggcgcaggcagaagtccccagcgctgggggagaagagccttgccgaggaggactccgaggactgtgttgctgtgccctgcatgggacggaggaggtggagcttgccttgcggattgggcagccctggattgcccccggcccttccgaaattccagcggctctatgaactgcttggctgcccacggtactctggagcttgcaagccgagatcctgccccgccgggcctcccaggccgggagggccccaagagcgaagaggagagatccgatgaaggagccggaggccaaagacgaggaagagggaaaaaccacatattgcccaacggaatttcggatttggatgatgagccagttgacaccaaaggacttcctttgatttgaccgggagaacgcaccccaggaaggctcagaccgtgagccagaaaccggtgaggcccgcctttgacaaggtgctgtcgggacatttgagaggcccaggaagctgggaggacgcagatccttcggaccggggggcgaccctttttaggctgtgactcgggggtggccccaggcccgggatagcccccagattccgagttctccggggggggacgctctttccctagagagggggggattttgggtccccagttggtcctgcgcctaaagcggggcagaggcccggaccgtggtgggagcatggggcctctttttccagggcagagtttttgacaccttttgtgaagagagagagaaaagcccttaaggcccccaaaaggcgggtgctgggaagaacaggaaacaaggtgtgcagcagtggcggggcatgcaatattgagccccgtggcaggggggtggtggggttacttagaggcccacacaagaggaggggtggggcaacaagcctaacatcaagcgggggggggggggtgtgtagagcacaccaaacaccagagaggttgtcgagttaaagagacgtctctttacaacaaaaaccgagcttgggggtggtgctactgggggtctgatctttcttattctctttttttttttcttatattctattaagagcttaatagc

SEQ ID NO: 675667 - DNA, 123 bp, Homo sapiens
agacagctaagctttgacagctgactagtagtgggtcagagtgcgggcagaagggtcagggcattgatccacttgggcatccagtaatggctcagccagtcagaccggactgggtaagtggcg

SEQ ID NO: 675668 - DNA, 835 bp, Homo sapiens
attagctgttgagtccgccccggttcgtggcccaagcctttgtgatctcaggtgaccggggacaggacggacgcggggtccgtgaacgtgcttgattccaggccagatggaagagacgcggccggcgtttggccgcgtgctgctagcagtcttgaaccccagggttcggtgaccgatgtctggcttggtgctgctggcaggctaaggagggccgcatgcccgatgcttgctggcacgaggccccggtggtcagggcgtgatcctccgcgtcgagtcgcccggcctctcgccaccgccggaggctcccagggagctagcaggcgactggatacccgaggcacaggaacgacgcgtcgactgtcaaccggaagcgtcatgtcacacacagcccgggccacgaacgacacgtgagatcgcgaaaggcaggcgaaacagtcagaggggtccagacaggacggtcgtggacacgggagctcagccacacattcactcccaaaactttcctcggttcgctggagacaatatcagactcgtagggcacggtcgaacccgccagaggcaggccacccaaacccttggaagacagcaagaaagcagagccttgggcccacatcgtcttctaaccaccgagatggatggctccgccacaacgccagcgcccattagttgcccccaaaagtccaacgcgcaggatgggggaacacgaacccaggaagaaaccagggcagcacaaacctcccagaaggaacaaccattgaataacggcgaggaagtgacacgggctacgacgggccccatgagcgagcacaagcgatctgggaccacgtacgaacgg

SEQ ID NO: 675669 - DNA, 314 bp, Homo sapiens
agcgggcttctcggctccgttgctcccgcggcgcgaggcgctctcgctctcctcctcctccgccgtcgcccctcccgcagtcgcagaaccacggcacgatgaaaggacgcaatcaataaagagctcgacgggaccatcatctgtcaccaacgtagcagcagggccatcgatcgagcggtcgccggttccatggtgcgtgccgaaagggaaccaagcgcgccactgatcgccaccactgcatgagacgggaccgaccgacaagatgtacaacacatggctggctcaatcagcagcaccgacgcaaatgaaacccg

SEQ ID NO: 675670 - DNA, 510 bp, Homo sapiens
gtcgctaactaggattaggacggatcagaatctgacacatgtgggttaatcgaacagatgaggcggattgcgtgtgtgctgatgctccgagatgattccgacgaactgcacgggtagctcccagccggcgaaatccaccagacgaccgcctaattccttgtgcagctcgtgcaacgcagtggttgatagtgacatgaggaccccttcctgccgacgcgcgacgttgctgggtggtgcggcccacccggagccccctctgtcactgctgcctgagatcgtttcatccttcggcggaccccggcggggtctttctccagagtaatagtttatgctgtaatagtttatgctgtatagtttatgctgtaatagtttatgctgtaatagtttatgctgtaatagtttatgctgtaatagtttatgctgtaatagtttatgctgtaatagtttatgctgtaatagtttatgctgtaatagtttatgctgtaatagtttatgctgtaatagtttatg

SEQ ID NO: 675671 - DNA, 252 bp, Homo sapiens
ggggggggggttgcccccccccccccccggggggggccttttttttttttccgggtttttttttggggggggggcgcccccccccccccccgggtttttttttttccggggggggggttgggggggcccccttttttttttttcccccccccccgccttgggtttttgcccccccccccccccctggggcaagtttaaaaaaatttccacaggccccccgcatggaaataaagccccccccccaacccttga

SEQ ID NO: 675672 - DNA, 180 bp, Homo sapiens
aaacagatccacaagcagattttatcctcaccatcatcataataaattttgagatgtttatctcaccattgttatcatcatcaccctctccatcaccctctgcatcatattcaccaacaccctctccatcaacctctccatcatcatctccatcaccctctctatcatcctcaccatcat

SEQ ID NO: 675673 - DNA, 1278 bp, Homo sapiens
cgcatgggcgcgcgcagcggtgacgcgcgttcttagctgttgacgcgccggagccgcgaaagttcgaagctggaaactgcaggtgcacgagggaggaacgcgtggagcatgaaaaggcaggggggactccgtctgagacgaaaacgagcgcggataccagtccgggaaggccggagcatgcaaagtggatgtatcttcactggaagctttgtgtatgattcagggcgaagtcatctgatggaatgccacgagaagagttgatgtgctgagtcgcgagttgagtgtatgttctgggtttatcatatggggggaactacatccagtactggcgtgtccgttcatgtatgtcgaacgcagacgtgtctcgagatcccaggtcttcttgttgattgattccggccacgtgggacggttgatttcctcgggtcatctcaggattcgtgaacccttgcaggttgattagacgcgcgtgaccattccgtcttctgcccaagcttttatggtcgctgatgccgttgtaggcttgtaccggggggggcagtatggacttggatccgattgcgaccatcactttggacctgaacggaggcgtgtagttcctgtttcccctttactgccctaacttctagctgctctccttgctggccccattgtccaacctattgcgcaacccgtgatgctctattggtaccactgggtgttcattgcattcccagactggtgccattgctcttgtggcactgaacgcctcatttataccctttgtgcgaactttcttgaaacaggcgactgcttggaccctaagtagcgcattggttgagcatggattccaccgtcacttttcatcacacttgcgcttagcgccttgtaaatcttaagatgctgaccttcagtctggactccatttgcaccgattgttcttctttaacccatgcaacagagcataacttcctaccgtagatgggaatctcctgctgctagccgggcttctccaatgggctggcatgaaccccgaaaatttcccccaccgtggatcctccttgccccctggggaccttaccttaagaatgaacgttccgggcgggaaaacctgtcaacatgctttgcctgcaccccacttcccttctaggcttggctccccatggtggtgcacgctccctccgacacttgtgccttgggctctcagcccaatatgactttcccgtccgaacaccgcgcctcacctcggcatgtcctgcacccccagaccctgtctccgggacctctggccacgtcgtc

SEQ ID NO: 675674 - DNA, 775 bp, Homo sapiens
taggctacccaacaatttccctggatatcctcctgcaggtcaggagtcatctatttcccccttctggtcagatatccttatcactagatggctttccatccaatgggaggaggtgccataccacacaagtgccaagtagtggctacccagtgagctggaggctacccatgcgaccatgggaggttatccagcccctggaggctatccatggatgcacccacagaccaggggcgagcaccatccatatcccggagatccatccagagacaaggaattaggagatcccacacaggatggagagcagagcttaatcatggagttatccaccagacacacttcacaggacattatggccaggtggaccagcaacagagctaccaactaccatggaggctatacctggaggacagatgccataactcagatatcctggaggacacaaccctccttcaccatagtcagccctgccacagagacatcagagtcacacaaaggaacatatcacgaaccagcgtgccaaacatacgcagactactaagagatcgcacgaaaacttcctaacgacaaaggccacaacgaacgggtcccagcgagaccagactgcgacacacgcaacaggcacctgtaggcaggccaacccggaccccaccgatcacgaccgccagacccacatacacgccagccatcacaagcccacccagtgaccaggatcctaccaaactctcaatcacagccacgcggaactagaccacctgcacccgccaatccgccccac

SEQ ID NO: 675675 - DNA, 260 bp, Homo sapiens
actgtgaaaagagtaacatcttacagtgccatgcactttgcgacgtatcgtacgaagttgatgcttatgtccagaaatgacgcggccactcagcatatagaatgcacaaaacaacttgcagcagctatttcatgaggaatatgtagtgagagaggattcactgggcctggcaataggaacacatggtagtaacatccagcaagctaggaaggttcctggagttaccgccattgagctagataaagatactggaacataca

SEQ ID NO: 675676 - DNA, 907 bp, Homo sapiens
  misc_feature (256)..(256): n is a, c, g, or t
cctgaagttatatcttatcctaccaggcttcgggataatatcccatatggtaacttactactccggaaaaaaaagacccattggatacataggtatggtctgagctatgatatcaatggcttcctagggttatcgtgtgagcacaccatatatttacagtaggaatagacgtagacacaccgagcatatttcacctccgggtaccataatcatcggtatccccacgcgggtcaaagtatttagctgacttcgccanactccaggaagcaatatgaaatgatctgctgcagtgtcccgagccctaggattcattctttcttttcaccgtaggtggcctgatggcaatggtatagcaaaacctcatcattaggactatcgtacttaacacgacacgtaactacgtggtgtagctcatttccactaatgtcctatcaaagaggggctgtatggccatcataggaggtttccatcatgttttcccctatttctacaggttaaaccttaggaaccaaactacgcaaaaaatccatttcactatcatattcatcggggtaaatctaaactttcttccccaacaacattttcctcggcctaatccggaatgcccgaggttatcggatacccgatggatacaccagatgaaaatccatagtggaggcatccattctcaacaggagaatataaaaattcacgaggggagcctcgtgaagcgaaagctaaagtaggaggactccaaaccggggtaatatgaggcccggcacaaatgagacggtataaatgacaaagggggacccaggtgtgacccggccgcttaaaaaaaaaaaagggggggggaaaagggcgggaaaactaccgtcggtcacgcggcccggaagacaccgcgcccaccaccgggaggagggggggc

SEQ ID NO: 675677 - DNA, 263 bp, Homo sapiens
aggagtaatactggctgcctaccgagcctagaaaatcctatttacaactgcagtgtcctgcctttcatcgactattatatcatatggactcctctatactgccattagaagtatggaaaatgatatagctactgtatgtacacatgcacataatatttaaatttgctcttcattgataacaaccaaatatatactttatcaaatcacaatacaaatgctttatagtgttgaggacacatcttatgggggaaagggatggatcg

SEQ ID NO: 675678 - DNA, 786 bp, Homo sapiens
atttttctcattttgctttttaaaattcctttaaaaaagtgtgctgttaagccagtattaggtatctttattttgtaagtgaacattccagctgtttttttctggcagatctgatgctgatttgatgctgtatgaatctttttttttttttttttagttataaatttcatttaggtgaagtggttcgtattattttatacatacacattaagtactcagctaagataagtggcactagtaaggaattttattattttctttccgtggtcagcagcagttcgtggtgaagtgcattctttaggatactaaaaagtgcacaaatacagaatctatataatattttgagggtgggtggacacagtggccctccactagtggggacaatataccccagggatcacttgagcgaaggcacacaacagtggttaacctatccaacgttggctactaagcaaatggatttcccaaaaggtggtcctacccgatgaagacaaaaagagtgggggttacaaaatcacgggtgggtagtttcactcattggggggccgataactaaattaaacagtgggggcatcaaagcaagagtcttttgcagactacccaatactgcgggaagtaatcaattgcagccgctctgggtgtccgcaattatgtgacacccagggcttctttagtgggggacaaaaacaacggcgtctgcgtgaaccacctgtgtcgtcgtcacaagctgagttacaccagaatcaattagtgaacactcctcttaaatatttgccttctgtgaca

SEQ ID NO: 675679 - DNA, 144 bp, Homo sapiens
tctactaataatacaaagacattagccgggcgtggtggcaggcgcctgtagtcccagctgctctggagagctgaggcaatgagaatggaagtgaaccctcgtgtaggcggtagcttgcagatgaggccatagatacgccgccta

SEQ ID NO: 675680 - DNA, 125 bp, Homo sapiens
tggggcacacacacatattcaattatgcaacagtagactctaccgtgccaacctccgactcggatgcacgcctcggcacatagtccacattctcatcgtctatagtcgacgcggccgcgaattta

SEQ ID NO: 675681 - DNA, 87 bp, Homo sapiens
agaatctattttagaaaccttgagtttcctcaatgtggtcaaagcttcagtcatcattaaacttctctggaccaaagaaaaaaaaaa

SEQ ID NO: 675682 - DNA, 903 bp, Homo sapiens
  misc_feature (670)..(671): n is a, c, g, or t
  misc_feature (843)..(844): n is a, c, g, or t
  misc_feature (846)..(846): n is a, c, g, or t
  misc_feature (860)..(861): n is a, c, g, or t
tttgtcaatgtttggaatgcaatcaaaacagtagtcttcctggtttcaaggaaaggcaactgccatccccgagtcagaggggattgaagaattaccgccagcactctcatatgggcagcaagatccacagacgggtactgcccctatacttggccatatttaatccactttttcagggcgaagcccatattttccttaagagcaagccagccagcctcaatgtcgcaatagagttcctcctctgtggttttcccggaactggcaccatatccagaataatcatatgagaatatattacaattaatccgtgatcctagtcctatgtaaaagctgctcatttgaccaagatcaacagcatttccatgtgagaagagtaaagtgtatttcgcattgggtgaacaacgtacaaacatacaagcaattctgttgcctttactggttctagtcatgaacactcaatagcatctttttctctagaagaatactgccagtctgctcgttcagacagatgtaaagtccaacgcgtccggctttcatcacacatcagtgtgtaagttggatcaggtggcaaaaacgctaattttgaagcaatctcccctgacaaaggtgcacagcagaagaggcaacatagctcactaaatgaaagattattcatgctctgcacctgagnncgccgggccgaagcgccgggcagaaggggtcgagagagaaccgcagccgacgcgctgtcctccacaaggcgagaatcccgctccgggcgccgtccgactctctccgcctgcagactggcccgacagaggagcggggaaccagctacatgcccggcgccggggcgaagaaggnnanccgtcccaggggcnncctcacgctcccgagtctcgcctcgcgccggccctgctcctc

SEQ ID NO: 675683 - DNA, 214 bp, Homo sapiens
tcagcggaccttatgtgtggtgtatgatggaggtttgagaactgaagggagactggttgtccctgatgatttgcagcttcggagagagttgatttctgaggcacatcgtaccaggtatactgttcaccctggtaccaccaagatgtataaggacctgaagagaaatttttggtggaagcgcatgcgacgcgacattgcataacaccacacaatt

SEQ ID NO: 675684 - DNA, 466 bp, Homo sapiens
tgaaccaaatgtgacctgcacctcactgtcatcatcactgaggcctttttgaccgtctttgaacagcccaagaccattcttaccctggtagacctgatgactgagaagaaaaagcatgagacgaagcgctccatcaacgacgagatccacacacagctcctggcccacattctgacaggcatcgaagacatctgtggtcactactgtcaccaccactggagggactagcacaaccagcttaagaagaaacatgtgaagaaacgtcctatagctgtcgagcgctccaagtagccccagctcattgccttctaccacaagacggagatgaatcaggccatcgagctgatggagagcgtgtgcagtgacaagatcccctctgccgtctccaccgtatccatgcagaacatccaccccaagtccctgccttccgagcgcatcctgccagcactgtccaaggacaaggagg

SEQ ID NO: 675685 - DNA, 355 bp, Homo sapiens
gcgcagcttgagatatataaggacactcttctctcacactctactgtgacacacagtgccacacgcgattcacagccttaaccacaaaccaaagagagggctctttaaaaaatgcgccacaagccatggtggcacaaggaaaggggatacccggcttgcaaagaaaccggaaggaccaaggggaacaccctgtgcaggaaccaagggggaaacacactgagaggacaccccggaggttccagatctcttctctgtggacacagttccttaaccacagccatcggggtgggaacccttttcacacgagaccttatcacaagggacagccagggaaggtctgtcacatctcagggcc

SEQ ID NO: 675686 - DNA, 445 bp, Homo sapiens
  misc_feature (1)..(1): n is a, c, g, or t
  misc_feature (113)..(113): n is a, c, g, or t
  misc_feature (120)..(120): n is a, c, g, or t
  misc_feature (146)..(146): n is a, c, g, or t
  misc_feature (160)..(160): n is a, c, g, or t
  misc_feature (162)..(162): n is a, c, g, or t
  misc_feature (165)..(165): n is a, c, g, or t
  misc_feature (191)..(191): n is a, c, g, or t
  misc_feature (198)..(198): n is a, c, g, or t
  misc_feature (210)..(210): n is a, c, g, or t
  misc_feature (220)..(220): n is a, c, g, or t
  misc_feature (227)..(227): n is a, c, g, or t
  misc_feature (234)..(234): n is a, c, g, or t
  misc_feature (243)..(243): n is a, c, g, or t
  misc_feature (249)..(249): n is a, c, g, or t
  misc_feature (254)..(254): n is a, c, g, or t
  misc_feature (303)..(303): n is a, c, g, or t
  misc_feature (307)..(307): n is a, c, g, or t
  misc_feature (351)..(352): n is a, c, g, or t
  misc_feature (359)..(359): n is a, c, g, or t
  misc_feature (417)..(417): n is a, c, g, or t
  misc_feature (445)..(445): n is a, c, g, or t
nttttgtctctcatattttaggtatcttctcctttaattaacttatcaacctctcatggcaagaatttgagaaagtaaatttatactaaggttctaattttaatagggaaggnagaagtnacagctcagtgcaccatgaagttganacagatatggagananctnagccccacctctgtggaacaggaaanatgattngggagggagcanaggtgagcgngggaagngggtganggtggacangggggnggggnggtctccccacctcctcacattatgcctacacgaacacagacacatgcnggtncctttgcagaaacaaagttagggttcttcaagtcacaaagggannggcaggnacaacttttgcctcttagtcccacacaagggagctgtttcacactttacaagctgtgngggacacatcagagccctgggcactgtn

SEQ ID NO: 675687 - DNA, 370 bp, Homo sapiens
tcttcaaaaaatacaagaagaatgttaaacattttgttcctacaggttaaaatatctgctgcctattaggttcttctgtgacatgtgcctcccagcagtgaactaaatttgtcgacataaactggattgataaactatgctaaatataagatgttcacatatttttattatggtaaaaaaattttctaaatatgttagtacatgtttctatatttattgtgcctactgaagagaaggtgtggccctgaaggaaactgaaaagaaccgtcattagttttgacaaagacagagcccaaagacatggtaatagctttttgtgaccagtatggagatgttatagtgaaatagaattattttataaaataacccc

SEQ ID NO: 675688 - DNA, 250 bp, Homo sapiens
gcccgagttgaatatttaataaaagggcctttttgaaaagaaatcagatgaaggcataaaatttagtttttagttcttgaacaaaagcttaaaattcttggttttttcagggtttccccttcaaggtttttggagaagggaaggttttccaggttccatgggtgccaccttgagttctgtcccttcaccgggttgggcggggtatgtccctcccaatgccaatgtgtaaataaaggggtgttccccccca

SEQ ID NO: 675689 - DNA, 115 bp, Homo sapiens
tacgccgcgttctcgtatcaagacccgaccccactgggtgctgctacgcggcaaggaggaggctcggttctcctgacttccaggaggaagctccccagtgcgacactaaccagac

SEQ ID NO: 675690 - DNA, 114 bp, Homo sapiens
cacgagggctgaggaaaaagcgcgggcggcgccttcgggaggcgagcaggcatcagttggccgtgccgtaacatcgtcccgcgcgcggtgggtagcggcccagtaggcgcgtgg

SEQ ID NO: 675691 - DNA, 231 bp, Homo sapiens
ccccccgggtgggggggcccccgaatcattggggggggggaaaaacccttttttataagggggggggcccaaaaaattgggaaaaaaccaaaaggggaacccccttttaacccccccggttttggggggacttctttttgggaaaaacccgtggtttgtttaatttcccccccctgggggcccccccccaccctttgggattttggggggcaaaggggggccccctttcca

SEQ ID NO: 675692 - DNA, 233 bp, Homo sapiens
tggtcatgatcatgtgacgtggagctggcctcattgaatagaaaatggcaagcgaggatcagcttgctggcatctgtgaataagtcaatggctttctggagtcaccatcatttagggcttcaatagcagccacttttttatcctttgcctgatccatcatctcctccgttatctccgcattttcatctcccatttcttgaggcagcatcagggtctggttcaatcccaccttc

SEQ ID NO: 675693 - DNA, 670 bp, Homo sapiens
gcccctgtatggattgccacacggctcacattgcatgcaagtttgctagagctgaaggaaactattgatcgaccgctctggtaaaaagctggaaagatggccctacagattcttgaaatctggctgccatgctgccattgttgatatggttcctggacaatgcccatgtgtgttcgcagagctatctacacgactatccacctttggttcgcttcgctgtctcgtgaatattgagacaggacgagttgcggtgggtgtcatcaaagcagtggacaagaaggtcctgctgcgagctggtcacaggtcaccatatctctgcccacgactaggctcagaatggctagcctgaatattatccctaatacctgtcagcccactcttaatcagtggctggaagaacggtctcagaactgtgggtcctcaattggccatttagagtttacgtcgtaaaacgactggttaagtgactaaacaatgcagtcgataccacaccttcagacggacaaggatgaatgtcctgtggaccactttgcgtcgtcttccttgcgtgtggcagtcttcaacgttattagtctcttaaaatcagtacttggttaatggaaacaacttgaccaaaaatttgtcacagaattcttgagacccattaacaaaagttacattgaaaaacgta

SEQ ID NO: 675694 - DNA, 190 bp, Homo sapiens
ctctcaacaccttgagctagggattatgccccacctaagctcctgccatgggggcagatataaaaacttttcagaagacttcaggccaggagcagtgactcacacctataattccagcactttggcaggctgaggcgaacggatcacttgaggccaggagtttgagactagtctgcccttcatggcgaaa

SEQ ID NO: 675695 - DNA, 203 bp, Homo sapiens
ccctgccggtttgcgctcggtgatctgagccgcggtgtcgcggcggcccaggagctcaggtcctcgttcagggcgatgtactctttgccgtcgtaggcgtactggttatgcccgcgttggaggcgcccgtccggccccacgtcgcagccatacatcgtctgccaggtgtgagacccggactcgctctggttgtacgtagcgga

SEQ ID NO: 675696 - DNA, 285 bp, Homo sapiens
tcggcacctctggatgcaaagtgtcgagattatgggcgtgagccacacacccagccataacttcttagcatgacttttcccatttgttatgagttcaattgtgcctccccacaaaagatatgctgaaggcctaaccctcggcgcctcctaacgtgaccttatttggaaatagggctgttgcagatataactggtgaagatgaggtcatactggagtaggatgggccctgaatccaataggaccggtgtccttataagagaggagatggacactttgcatccagag

SEQ ID NO: 675697 - DNA, 103 bp, Homo sapiens
tggccagcattaacaactcttttatttgaaaacgtgggtggctctgaaaagagccttttgagttcacaggtgccccttctgtcgtcttctaaacagccgtata

SEQ ID NO: 675698 - DNA, 510 bp, Homo sapiens
  misc_feature (449)..(449): n is a, c, g, or t
tggccagcattaacaactcttttatttgaaaacgtgggtggctctgaaaagagccttttgagttcacaggtgccccttcgagacgcgggccgggctgggcaccttggcgtgacgtcagcctcacttgccctttgccttgtggtgactctccgtcttcttagggagcagtacggcctggatgttaggcaagacgccgccctgggtcatggtgactttgcccagcagcttgttcagttcctcgtcgttgcggatggccagctggaggtgacgagggatgatgcgcgtattattgttgtaccgagcagcgttggcgggcaggtgaaggtatatcgggggtcagatactcgaggaccgcagccatgtagacgggagcgcaggcaccactcgctccggtgagttgcctttgcgcacaggcggatgcactcgccctaccgggaactgaaggccancgcgggacgagcgcgacttggccttggcgcgggcgttgcgtccttgcgttccacggaccag

SEQ ID NO: 675699 - DNA, 887 bp, Homo sapiens
  misc_feature (374)..(374): n is a, c, g, or t
gattctcgacgagttggagtctatgcctctgaaaatggcgaactcaatgttggacttcgaacacaaggatactgcagcgatccgttagctcatcgtttcccattgcatggctcagtatgacttagtattggctgcgtcgagatgcatcggataggggggcagcggccaatgtctcaggatcggctcagatccgatcgcttttaactatagaaattcatcctaggtcgatgccacgggtgcagcgcaagagggtatcctagtcgtggaatctgagtatcgagcaatcgtctctacatggtgaacgacattactgaaggagtactctgcccggtgcaaggtctctgatgtttggattgtccctcaatcacttaganaaacggaaaggggagctctttcgaggcatcgagttttggcagtccatggaatttgcgtatacgcaatagttagctcgaatcgcatggcactaggcttagtcgggaatggatcacttgaattacgagacctttatcgggctctgcgcgacgtgtaggaaggatgaaccatctgttgagaagggaagatttctgaccccaaggagagctacacgaaactgggatgggccagatatatgcatatatacgccattgcttattacaagggggtatgcacttagaaacctcgccaccagtgaaccataacgtagggagaacagggaagggacctgggttagtctacaatcccaaaaaagggtgccttacctcgccgtaaattccaagaggtggaaaagcagttttgcaaccttatgacacccaccaaggcaacctttgtcggattgccgaataggggaaaattcggccggccaaaatgaagcccaccccgattgggaaacatgttttcccctttttccg

SEQ ID NO: 675700 - DNA, 606 bp, Homo sapiens
gctgttcaacaggattccgggcttgccacgccttccggtaagtttcaagcgaaagcctgtttgcggggtctctgttgcccgtcttagcctcgttcggtcgtgtgtcgcaacagcttgctgttgcgtccaccggagctatgtacgcaggcgcgttgcagcgatgccgtaaccgtgttgtgcgccctcatgggtgcctgtcaagcgctgattcgctcgtgagtcaatcgtgccgggtttccgccatatgctctgcccgtcttgttgacattggtttgcgccgttttccggactggtggagcagtcgcgtcaggtcattgcggcgcaggccccggaactggatgtgttcgatctacagtccgaccgttgttgggaaacggtgcgtagtggtggtgtaaatgtcgtcacctgggccgctttggcggtgcgcaaatacggaaggtcgtcgggcgcaaaccaacggcgataacggtatgtccctggatgtattgcttgcgtaggcacgtgaagagggcgtccgaattgagtgtgtggtgaatgagggctcaccatacggcgctttctggccatcaagcgcgtctctttatcaagtctgtactggcgccagat

SEQ ID NO: 675701 - DNA, 1501 bp, Homo sapiens
atttttttgagacagagtctcactggagtgcggttgtacaatattggctcactgcagcctctgccttctgtgcccaggcaattctcttgcctccaggagaattgcttgaacctgggaggcagaggttgcagtgtgccaagatcgtgcccctgcactccagcctgggtaacaaagcgagactctgtctcagaaaaaaaaaaagaaagttatctctaaaaataaggaattgcttaaaagcattattgtttttgattgagttactcttattaaaactaaaattttgtagttattctatttaattttaattgaatgtaatatcaaataatctaaccagtgatctgttggtgtgatggcctaatggcattattgtttttgattgagttactccttattaaaactaaaattttgtagttattctatttaattttaattgaatgtaatatcaaataatctaaccagtgatctgttggtgtgatggcctaatggcaaataaagtctttgcatacaagtttataatgatttgaaaatctcatgttaggaagagtcctttgagtacaactgtagagtaatagtagagtagagattgcatatgaaatgcatggcctctaatttttttccctttatttaaaccttcccctcctttgttatgtagtgtagcatattatttcccaaaagtgccactttatttcactgcatacaagttgagttttccttaaaattttttaggtgagtacccagaacatgaagatgggtgggctgccgcgtacaacacctccaactcagaagccccctagtccccctatgtcagggaaagggacacttgggtgagtatataagtagtaattgaaaaccatttcatgtagtattgtttaaaaatgaagcacaacatatttaaattattttttgaatatttgaagagagaacattttctttgtaggattgttgtttgtgtgtataacttcctcttctcttgggaaacacatttttatacttcagaaagatttgtttagaaattgtttttctagtgaattttaaatttgaggtaaaatcctagcccaagttcatagtttattgtaaattgcagtctaattttaattccttttctttcagaaaatgtatatagtcttttatattacagtttaactccaactatcctttttaagctgtgtagattataaaattctataaaacttataagaatattgagcttcaggccaggtgtgttggctcatgcctgtaattcccaaagtggggattttgagagaccaaagcgggcagatcacttgagcccaggagtttgagaccagcctgggcaacatggtgaagccctgtctctacgaaaaatacaaaaataagctgggtgtggtggcatgcacctgtagtcccagctacttgcgaggctgagacaggaggatcacctgagcccaggaggttgaggctgcagtgagccgtgatcatgccactgtgctgcagcctcagtggcagagtgagcccctgtctc

SEQ ID NO: 675702 - DNA, 87 bp, Homo sapiens
gtaacaaggaatcccccccttcccccccccgggtgaatttcatggaaaaggttttgataattttttttactttttaaggaacaaatg

SEQ ID NO: 675703 - DNA, 903 bp, Homo sapiens
ggggtcatgccctctccggtcagtgctgcttagaggtgctcgcgccgtctgctgctgctgctgccgccccgagtcttaggcccgaccctcgctcctgtgtccgtcggtccctcagcgcggtctcctgcgcaccgatctccttgcccgacgcggctcccggattgcagtatgggacggcgcggggcgctgatggacggtgctggatacctcgtgaggctagcagtgcgccagtctagggagatcttgtgcgaaaactcaaagaagataaagcaccccaagtagagcgtagacaaagcagtggctgaggctcaaaagcccgaaaagagggttctggaagcaaaggacactggcgttacagcccaaagatgatattgtagaccgagcaaaagatggaacgataccctgaagaggaggtttctctactgatcagagcttatgctattttatggaaagttgtgaagtggtctgtctagacttgaggtcaaatcgcttgtgctgtgaatagcagccatgaattcagaccgggatgaagccttctatccaacaagcgacactcgatccatggagatccgagtgcaacatgcatcatgccctgagcacaggaatacaagagctctgggcgagggagagaaaattcgctggaccttcatggttgaaagacgtagaaaatgggagcaaaggttttcggggctgacgcatactatgagaagctcatctaaggacattgatgtctgctaacaagtgtcctgcgaagcacaaccgcaacggcagggtttcgggccattgaaacaaggacagcgaactgggaaccttgaagcatacgtaatccccatggaaagacatccccaggaataaaaggccaatcatgggccgagcaacacggaatgaaaaaagcaggcagta

SEQ ID NO: 675704 - DNA, 301 bp, Homo sapiens
  misc_feature (104)..(104): n is a, c, g, or t
  misc_feature (151)..(151): n is a, c, g, or t
  misc_feature (199)..(199): n is a, c, g, or t
  misc_feature (276)..(276): n is a, c, g, or t
  misc_feature (284)..(284): n is a, c, g, or t
gcttcctcccaggcctcgcagggctcccttctcctctgcctggttagactcgggcacccaggaaagcctggccagggctcctttgggcctgggcccttgcactncctggtcagaaggggtggtgctgtccgtggccagcaacccgggcccngaggggtgggctactagagtcagagcgggtttggggctgaccagtttnggagaggagaaaagatctgagaatgtccttcttggtttgtcagtcatctcttccaaaagttgtgatggtggtgtccntatgtttngcctcttttggcttggt

SEQ ID NO: 675705 - DNA, 271 bp, Homo sapiens
aacgggtgatgcggttgcagtgagctgaggtcacctgcattccagcctgctgacagcgagactccatctcaaacagaaaatcatgtgcacaatcggactcacaattgattgcggatttacttgtatctatgcgctttcatgagctctgtttagccacccttcagaaaccatcaccctaacctgacggttctatttctgtggtaccagttctttcctcagaacacgaaacacctgaagtctccttaatctgctaatggctccagattgcaga

SEQ ID NO: 675706 - DNA, 1791 bp, Homo sapiens
ttcatcatgttaccgttggcttgtcgcggtgccactgttaacagcgttggtttgccgcctcccagtattactcgtgcttttagtggtcgtcgtccttgggtaatcatcagggcacggctcatttctgcactctggtcgggttcttgtgggttgcgctcccctccctctctttgttcctccctccctccctccgctttctgtcgttttcgccacacatgcacagtgtgtgcggcgcgcgtatttgtttgcgcccccagatcgcccccctgcaacggtttttatgttgtgcggtgtttacataatcactgcgcccgttcgtccggaacaacaacagggggggggtggcccacctgtcgtgctatatggtgtgttggtgaccacagaggattgttccctgtggtaggagtcatcctctattggccccccgtttctggcacccatcttggggggttggtcctcctttagagtgaagtgagggatatctcatctcccgccctgtcgccccaatttgttgggcgaaaaaattcagcggcaccgagagcagcacacaacacaaatgggaggaaatagattacaagagacacgaaggctggtgtgcgcgacccgcagccaagtgtgtcagcacagcaagaaccacaaatttttcggggaaggagtagtctctgtgggagaaagaagttcatagtcgccgtttgagactctttgtggaagggctccccaccccccccatatgggtgcccaagcaccacagcgattcctatatttggtggggcctttggtcctatatatccaccgaagggggaaatatgtggtggagggagaaatagtggtgcggcccctcctttccctgtggagagatggaacccacaatatgggggaggagtgcaccaaacaccaccgttggggcccaccgaaattttcgtacccacatggggatccccggagataaagttgggggagatatttcgttaaggcaccacatggccccccagagccccactgtaatatggttcgctgacacacgggtgtggccacaccgttatatatgggtcccccccacctcggggagatatacaatacgcttatggtatggagagcctgtgtggagagaaaagagagggggtcccacccccacgtccccctcccacagagacctctcccacgagaattgggtggggagaaaatacacatacacgcgcacggtcgttgtccacacgcacacagtgggccctcccgtgtgagataaaaagcctcggcgcacacagtgagacacacagagacccttgggcacacacagggtgatattccccctcatcacacattctataaaatatacaaaagtgtgtgagaaaaaaaaatgggagaacttttagagatgggttataagaatgtcaccgtgagataccacacaaactctataatttttgggttctccctcacactgttaaaccccaatatggaggtgcttctctataaataattgatattggttttcttagtgaaagatttacccaagagggctcttgagatgtgttaatattctcgcacaaggtgtgtgcctctaacacgccactttctgagattaccacactaatgtcctcatttctgccacacatcctctgctgaggagactcgttctagtcctcggtttgggatttattcttaaaggttctagaaaggccacattttacttcagccaaacttgattctatattgttgtttttcttaaagtgtccaaattgttttgttactagggtttcctatgttgttattaaaagtattcccctggtc

SEQ ID NO: 675707 - DNA, 397 bp, Homo sapiens
ggctgtatgagtgaccattctggagagccatctacttcacaggcagaagctctggggccacacagactcgggtttgaagctcgactctgttatttattaactgtgcatcttgggggaagtcatttaatctctcagaggctttttcctcctctaaaaaaggaagttaggctgggtgccgtggctcacacctatcatcccagcactttgggaagcgaacaggggcacatcacttgaggccaggagttcaagaccagcctggccaacatggcgaaccctgtctctattacaaatgcaaaaaaattagccaggcgtggtggctcacgcctgtagttcagctactcagaaggctgaggcagaactacttgaacccaggaggtggaggttgcagtgagccaag

SEQ ID NO: 675708 - DNA, 453 bp, Homo sapiens
tagtatagatttttttttttaattcccatcgattttaaggattatcctggggtcaaatttcaacattccaattcaatttctcaaaaatatttattgcatgaaaaagaattaaataatggcatttgcagttacctggatggaattggagaccattattctaagtaaagtaactcaggaatggaaaatcaaacattgtatgctctcactcataagtgggagctaagctacaaggatgcaaagtcgtaagaatgatgcaatggactttggaaactcggtgggaaagggtgggaggggggtgagggataaaggactacaaactgggtacagtgtatactactcaggtgatggatgcaccaaaatctaagaaatcaacactaaagaatttattcatgtaatcaaacaccacctgttccccaaaaacctatgggaataaaaaataaaaattaaaaaacc

SEQ ID NO: 675709 - DNA, 144 bp, Homo sapiens
  misc_feature (75)..(75): n is a, c, g, or t
  misc_feature (122)..(122): n is a, c, g, or t
cggggtccccaaaggggggaaaaagggcttccctggtcaaaaagttgggctttgacccaagggccatcatccctnaatgccccccatgggcccccccctgggttgatgatgataaaaaaaantccggcccttgggccctctcca

SEQ ID NO: 675710 - DNA, 102 bp, Homo sapiens
aggtggtcttcctgcagctgcccacccacccacacacactttttggtggcccttctttcccagtgccgtcggctacattttccggggtaccggagctcgaaa

SEQ ID NO: 675711 - DNA, 334 bp, Homo sapiens
cagaatcgagctcggtaccgttttgggctgtcggctgcagctgtcactttcagatatgcctgcgtatatgcaaaaccatctgtgaaccgggccctagtcttctcttcctctgtcaactgatcatgtcaactgatcatgatcatagggaactccccatgaggccactggtgcaggctagggcaaagaaggcagggtggcacgagcggagaccatgagcatttgagccacttcctcatgtaacttattcctcaggtgccttcaggacctgctagagcccaatcatgcatataacacttccacttgatgatggaatactgctgtgcacgacccaaaa

SEQ ID NO: 675712 - DNA, 699 bp, Homo sapiens
  misc_feature (8)..(8): n is a, c, g, or t
  misc_feature (10)..(10): n is a, c, g, or t
  misc_feature (82)..(82): n is a, c, g, or t
cggggatntnatttgatacattattgtttgagttatacaatgtctgtaggttttttatgtagttgctgagagacaacttganattgtggacatggtttaccctaggtgatgaggctgacttttttttgggcggggaatattagccggccttccagcttttgtgtgcctcattctagctttttcacagtctaccctttgtcatcctcgctgtcccccaaatggtcttttggtttccttgcttgacgggtttgtgttcctccctttccagcggccttactctccatgtgctttttatgtttactgttctttgtggatacctgtttttttttattgcgttttttgtctctttctgttggtttgcttcttgggttgcctgggtctctttagtcgttcttggtcgtcttctcttctcctctcgtgccttcctcttcttttcccgcttctgcctttcctttctttgttttttttccccttttttttttttttcttgccctgtgtttcttttctgcgggtttttttctttttgtttcttttccttttgtgctctgcctttcttttctcctccctgcttgctgctttgtgctcgcctttttctttttttttcttgtcttccccatgtcctcgttccttttattgtctgtctttttccctcttgtttggttgtttttttttgcctgttcgttaaaaacctaaaaataa

SEQ ID NO: 675713 - DNA, 109 bp, Homo sapiens
atcaccaagacctggaactctacacaacatattttgtcaccaagtaccctacttctaacctccctgtcttatgaattcgacacagggaggttagaagcaggatcttgga

SEQ ID NO: 675714 - DNA, 177 bp, Homo sapiens
tgattacgtgtgactgtgaggaacagaaagactgaacggatgatgcctacgtttctgacttaggcatctagatgattagaatgtgcttcaccaacgtacaaaaatatgggacagagtccgtttgtttacgtcagaggtaagtgacaattacccctgctcaaaacgtcgcgatcctct

SEQ ID NO: 675715 - DNA, 1143 bp, Homo sapiens
cagttcacctgaggtcaggagttcgagaccagcctaggcaacattgtgaaaccccatctctactaaaaaaaaaaaaaaaaaaaaaaaaaaaaaaatttttgggccgcttgggccctagaaaaatttttataaaaaccaatccggtagggagagcgcaaggggcgcccaagaagggcgacagggagaacaagtgggagcaaaaacgagggtaacgccaacagaggggagaaccccgggggagacaaagacagcaagaggcgcatggagatcactcccgcacactatacaagaaaacgcgcccaggggagagaacaccggacgagagagtatggaggaaaacacaaagatatacagagagggtggagagatacacgagagagggccccaactacaagcgggggggagctactctaaaccaaacgacgggggagagataccaaacaaagaggaagagcccagcgagaagaacacaagaaataaggaagccacacggaacgagggggggaaacagacgacagacagaggcacgaaacagagaggaaaggaaaagaaggaagaaggcaggaagaagaagaaaaaacaacaagaaaacgaagaaaagaaaagagagaaaaggagagagagaaaaagagagaagaggaaggaaagaggacaaagcagacgagagacgaagcgcagaagacagagggacagaagaagaaagagaccgacaagaggagacagaggaacgaaaggacggaggagagaacgagaaagaaaagcagaaaggagagaggaggcgaacagagaagaggcaagagagggagcagcaaggagaaaagaaggaagcgaaagagagaaggaagagagagagagaagaaagcaagaaggagaagagaaggagcgacgggaagcgcaagagagagacaaaacagagcaacaaaaaagcgacgaaacagagcgaagagaagagagcaggaaaggaaaaaacagaaggaaaaagagggagggaagagagagaaagcgagcaagacgaaagagaggagcacaaaacaaagaaacaaaacaaaaagagaagaaaagagacacaaggagaaaaaagacaacgagacagcagaaaaaaacaaacagaagagtccaacaagaagaaacagaaacaagaag

SEQ ID NO: 675716 - DNA, 1314 bp, Homo sapiens
ccccataacgatgaatagagcacctctcaatacatatggagttatttttaatgtcggcgttctctccgtgtgctgtgtgaacatgttgcgtgtctatgtggtgcctctgcctaagtttccttctgttgggacgactcttctgtatctgtattttcatcttcttttggggagataacttttggtgggtaatggtaaccgcttgtaaatgggtctttttcacgcgccatatgttggggcacccaatattctcggggattgtgtccacatatggcctttaaggggactacagttaacttaaaccctgtgccccctatagcgcacttctgataggccttaaaaaagggccccctgtgctaaaagtgtttaaagaggaaatctatagtgttctataagggaaggattcccaggccctattcccgggaaggggaactccccctgttttgcttgcagaaaatgctccagaaaattattttgggaatgctccgcattaaggaggttcctattttgcccccccagttgaaatgtccaaactgtttggtcttggcgcgtgtgttatttggggaactgtgctgggctttctcgttaagcgaccttcctgggccaccaataaggtggcacttgggaaatatttaacctttggttaaaaagctttctcccacccacactttgagccacaatattaataatgccaccagtggttgtaaaaaccccaaatgccccctgaaaaagctttagaaccacatctaatggagcctgggcaataaaatagggtaaattttatattataagggcagtcaccacaccggggtaaaaacactggaggatatatacctctataggaacatttctagacatctgtagagtgtttgtgtggtaaattggccccacaatataataatttttgtgcgctgcgctggaataataatcaggaattaaattgtgttaaaatggtgcacttccttgacaaataggaaaaataatggtaattttaaggcacctctaccgccacaacgggtataaatgccaacaccggtgtttaaaatggtgttggtggttgtgctaaattcttttccacataagaaattgtgaaacacttgagaactgacacaattatcctataatggagtttggttaatgaacttatgagcaaaggctggtttggccacgacacgtataacccacaaacttttataataaataatacagacaggcgtatcaacacttgtggaattttcttgtctaatctgaaatttgcattccactggtggtaacataggtatatgtattgttattaaagtaagtgacccatgtcca

SEQ ID NO: 675717 - DNA, 248 bp, Homo sapiens
acagatttcgtgaacaaggaaccttcacagattttgttatcaagtgtgatgacggcacagaatttcactgtcataaagtcgtcgtctgcgctcaggtcgacgcaatcaacgcaggaatgaagaatggcttcaaggtatgagctttttcagtcacgagaacgttcccgtcatgcacaattgtggctgaccgcaacaaggaggcacagacaggagaatacttgctgccggaaaaaaagtcatcgattgtc

SEQ ID NO: 675718 - DNA, 258 bp, Homo sapiens
ttgcaggaatttttttttaaaaggctttgccccttcctctcccggccttttaaagccaaaaaaaatgtctctttgccccccctttgttggggttttaaattggaaccccctttttttttgaaactattggatttaaagtaaggtttcatattatggcagcaaggaattaacttatgtttaaaagggggcccaatcatggacccaaagttgctgaagttttttttttagctgggaaagtaggggtttgcctggcttcca

SEQ ID NO: 675719 - DNA, 148 bp, Homo sapiens
acgggggttttttgggggccggggtaaccttccaccccccttgggggagggggggggttttccccccccccctttttttttggggaaaaaaaaattttttttaaaaggggggggttttttttggggaaaggaaaaaacccccttttta

SEQ ID NO: 675720 - DNA, 785 bp, Homo sapiens
ggttgccgccgctgctctagctgccgtcagtcaggctgcgcccgcgtcttcagggcccagtccctcggacccatcgccgcttctagaccctactgcggtctcggatattgccgggaaaatgtctgatgaattttcgttggcagatgcactacctgaacactcccctgccaaaacctctgctgtgagcaatacaaaacctggccaacctcctcaaggctggccaggctccaacccttggaataatccgagtgctccatcttcagtggcattcttggaattccaacaaattgaaaaaccttcacatgggtcgctctttggagacacagcacacaaacaggatagtgtatcctctccgtgcctcacagccggaccacctccaggacccccaagaacccttttcctccttccggaccatcatgtcccccaactggtggtccttatccagccccaactgtgccgggcctggccccacagggccatatcctacaccaaatatgccctttccagagctacccagacccatatggtgcacccacagatccagctgcagctggtcctttaggtccatggggatccatgtcttctggaccttgggcgcaaggaatgggagggcagtatcctattccctaatatgccatatccatctccaggcccatatccagcatctccatcctcccaaaagcacatgaggacagcaccaacctgttccatggaggcaccagttccacaggagcctggggaccacacagaccatatcttgccctacaggatcgtatcccaaacag

SEQ ID NO: 675721 - DNA, 1277 bp, Homo sapiens
  misc_feature (1256)..(1256): n is a, c, g, or t
taaggttagagggggaatgctggaaattggtaatggggtatgggaaactattgtcatataaggtaatggctagggtagagtgggtaggaagtttttcacataagaggtgtatagagttgggtcgtagcggaatcggggtgtatgctgtccagaattcataaaaacagggaaggtataaaagtctagggctctggggtgacaaaactatgttgggtgttaaagttctcaggggaaaggtgcgtcactagtgttggttcccataggaagaatcggtaggtggctgaggggtgtaccattctatacaatcacatgtgttcaggtggtatataccggctaataggaacaaatcaggcgcaaacgggtgccttgcggccgtaatacccgaatagttcgaaacacctgacaactcagtttccgggaactacccccttagcggacaaagggctcccacaagggggggatacccgggaagagggcccctcgtgccgaacggtgcgtggaacattacaccatcacatataaaggggcccaagggcgccccccccgactgccgcagagagataaacccaacacaggtagcaacacaagggcggcaccggcgcaccacgggggcatgcacgcacgggcccaacaagcgaaccccccactacaatacaccacaatggccgcgacaacacaatacaaacgggacaccggcacaacgggagtcagaactcccccccacgcacgaccatgcgacaccagaggacaccagcgcaggccccccaccacgacgcccacactcaccaggggccccaaagagaggaaccacggacgggcccacccccagacacaccagaagagatcggaagcaacaaccgccaactggatcacacgggggcccaccaacatcaacaacgggcagcgccaccagctcgagccgcgcaacgaggcacaccacagacctccaccaacgagccaccgccgagccacatcccgcaacaacctcacaatacccccaagaagggaccgcaccaaacccaggagggccccggagaaaccccagtgaagggaggacgcaccaccgacggcacacagcagccgtgggggagcaaaacgcgcgcgcgatacacacggtcgcacacagcacgtatgcgagcgaaagaaccgtaacaaagacacggcaccagccgccgcaccagccaggggacgcccccacccgtcagagagcgagcaccaagaggcacacgcgacgacgggccgtcccaagacgctanggtccacaatcaccgcagcct

SEQ ID NO: 675722 - DNA, 166 bp, Homo sapiens
  misc_feature (8)..(8): n is a, c, g, or t
agctcggnaccccctttacaggcccaaggccgcgacctcgtcgtttttgaaccccagttcgcgcagcaccgccgaatcggcgcgctcgcccgacatcttcccggcacggtggtgctgaccgatagcgcggcgccggggccggctgggtcacgccgcctgcggggga

SEQ ID NO: 675723 - DNA, 289 bp, Homo sapiens
tgggcccccctccaggattccgccaggtgtccctttcctccccctggggcccagagttatattatatataaagtctttaaatttggtgtgtcttggggtggggaggggcaccatcgcctgcccctggggtccttttttttattttatgaaaatcactatcgggactgccgtcctcgttgctgggggcatatgccccagcccctgttccaccccttctgttgcctgggcagggggaagggggggcccggtgcctgttattattaaacatgaattccattaaaaaaaaaaa

SEQ ID NO: 675724 - DNA, 229 bp, Homo sapiens
ccccctaaacttcctgtactgataaggaacatagaaaacgctctgcagaatgtgcatagccttggagttgttacacgagctgtacgtaagagtgatagacgaatgccattacactgtgcttggagatgcttttaaggaactgctttgtgagtagaccacatcccacgccaaagcagttttctcgttttgagatcagagccaagatctgctgtgcccgacagaactgcag

SEQ ID NO: 675725 - DNA, 649 bp, Homo sapiens
ctttaaggtctttgagatattctgatggcagagtacaaagttaaaggttaccaatagaattcaaattgtgtagtttttctcaataaaaatctattctctctttcttcaaaatatcattagaaaatgtcacctggagggaaggtcttggactattagagagaacttcaaattctaggctttatactatgaattccttccctagtttactatcttcaggcaccaacccattcccgcttcttcaacttcctccaactctctagaaagactttctcatgaaattattccataaggcctcaatcattttattcactttttattttaaatagaaatacctctgtaaagagtgagactttaggtgaatgactttccagcataatttttttctcagctgcattaaaaggtaaaaggaaatcttttctggaattgtaactaggagaagcagatcagatgagaactgtttggggagatgcaggagggaggagggagatgtcaggtcacttgctgtctacctcacatcacacagccccagggaagggcctgctaacccagattaaatcctaaagtctgcagagatgaaaataacattggctcaaatccttttgtttgtaatagaaatccttctttccaatcattctgggaattgcttcag

SEQ ID NO: 675726 - DNA, 599 bp, Homo sapiens
gggcttgaggccgggtgctgtagtctcttcgtccagagccttatgtaagagcttttctcgggaaacaggaagtcctgcttgccaagttggcagcacagggagtagtgcacggccttattccaacgacaccacggctccgaggccttaatcccgcagaactcaggccagttttctgtgcttccggtgcccctggttctcgctccaccatcgagccgcaccgcctctctttcccaccttcaggtcaccgcctagtgaactggcccagacgatctctgctgtgcttgagcccgagggtcttccaaccctcgaacctgaacctggacacatgcccagctagggacccaccatcgctgcatcctggcgacgaatgacctctagccagccaacacattacctcaccaccaaggaccatggggaccgacaccagaggattccctgcgcacaggcgcatgtgacctcacagggatgtcaccatggaagcgccgtgatcactaatcctagaacgggacatgggaagccctacatttgatacctgaggctagacgggatgggtggacgagaccacaaaggcaagaagcaggaaccaaaagaaggagatg

SEQ ID NO: 675727 - DNA, 786 bp, Homo sapiens
cactcacactacactcatccactcacaagctaatctagcggcgtgctcacttcagtccagtcggcattgcggctccgaggggcgcggcactggtgctggcgatggtgctcgcggcgatgctggtggcgccgccggcgacggtgcacgccatatcctgctccacggtgtacagcacgctgatgccgtgcctgcagtacgtgcagcagggcgggtcgccggcccggggctgctgcaccggcatccagaacctgctggccgaggccaacaacagccccgaccgccgcaccatctgcggctgcctgaagaacgtcgccaacggcgcctccggcgggccctacatcacccgcgccgccgcgctcccctccaagtgcaacgtcgccctcccctacaagatcagccccagcgtcgactgcaactcgatccactgaacgaactgaagcgccctggcccgtgtgtctgtcgacgtacgtctgccgtgtgaggagtcccatgtctggagaataaattgctgctactagtactgaagcttaggctaggccttggcggccagatccgtgtcgttctacctagtcgttgtgtgtggttaagggtcgatcgagttaattatccgcatgcagttcatggtgttgtggccctgggttgccggtaggttccacgagcagagcagagtggtgaactgatattgtgtgcgtcgtactacgtacgtgtctagtgtaactgtgcgtgctttagtctattaaattatcctcgttaaaacagaatataaccaaactaaacatcaaatta

SEQ ID NO: 675728 - DNA, 212 bp, Homo sapiens
ggaaaaaaaaaaaaccaagggcaatctatgaaactactagaaaaaagggaagaggtgggccaaggtattaagaaaggaggcaagggtttactacgacaatggatgaaaccactaaactctctttcactggcaaccaaaccatgaaaggggaacatgagacccattgagacaggcatatcaggggtaccgaggctcagaatccggtaatcatg

SEQ ID NO: 675729 - DNA, 403 bp, Homo sapiens
gatccccgacgagttgtccgagttacttcttgtttaaaaatactgacgtatatttgaaaactgtaggtgtgtttctattttatggtaggggctgcccttcctggaggcagtgggttccacaagccaactgattgtccccctgccaagtcaccaagggaagctgctaagctgcttattcccctcggtcctgattgtagggtcttcctgattgtcaacagctgtctgggatgcttcagtctcctaaaactggaaacgcagggtgcgagcagcacacactgcctcccgccactgccagccggagtgagcggcccgagagtatctgcaggttcccctgggggctgggggccgatgaagcctaatatcaagagccaagaatgtcatgtacatggaagtgcctacggac

SEQ ID NO: 675730 - DNA, 456 bp, Homo sapiens
ggggctgccctgggccttggccatgcctggccagccgccgagcagtccccacgccgcgctggctgtcgtcctcgcctccctcgccgcgcccccgtgcgcgtgcgggccttgccccccatggtgtcccggccagagcccgaggtgcgaggccatggactgcctgatgctggcgtgtagctgccagcgggctgctcgcacctgggcaggcttcaagtgtggacaactggaaggcagaacctgcggtgccatctaccagtgcttcgtgtggagcggcacggctgaggcccgcaagcgcaaggccaagtcctgtatctgccatgtcttgtggcggtaccacactcaacaggactgcattcctgcctctactgtgtcttcttacggctgttatcacgaacagcaagcatattcacgagcatgcgaaggcgaagcggaacaacctggccattgatctgatgt

SEQ ID NO: 675731 - DNA, 229 bp, Homo sapiens
tcttttttgagtcaactggtgtctccttcttctctggagatgctttgcttcattggggagggggtgttctaaaacactctttacgccggcttctattgtcttgggttaatcgtgtgaccgcggtggctggctcgatattgtcctaccctggggtttgtatagcttagttaaactttcgtttattgctataggttatcactgctgtttcccgcgggggtgtggcttggct

SEQ ID NO: 675732 - DNA, 1064 bp, Homo sapiens
  misc_feature (821)..(821): n is a, c, g, or t
ggtacctgtgggttatgaggccgaacaggcgccgtcggttcccaccgctggattaacgcctgctgacacagaagcaccgtccactgctgtgtggacgaagtggtgtcaaagggcatcaagtacacctgctgggtaggtgtggcgagacgaatgtgaagtgcgagtgcaagtcatgctggaatccctggttgtgagaagatgtatgagaagatcgaccttgatgtcgtgctccaatcaggcctgcctgcgcctgtcacgcgtggaccacaacgaatagccgatatatggtgaacagaccaaagcagagcaatcgctcgatcattcaatcgtagtcaggagcgtgaaccaatacggaatcttcatatgggaatcacgcatgtagtgcctggcaggtttgcctcaattcatcgttgcatgtaattatgggcctggtgaatggatttggttgtgttggtagttgcaccggagttcaagtgagaattgggtggcgatccctatcggtaatggcacacagatgactttctcaagtgatccactggaaccatatgccttctggaagtgggtgatcgaccaccaataccggtgatctatctgcaagaatacattgactccggtatccatatagttttcaagagttcacaggcagaatgaggctcgggaacctgattccacgttacctgaaagagaaaccctgaccccaataatgaaaacaatcgttggctataactaacacgaagtgctggccccgcagatgcccgcatgcgcctcatgaaaacatgatgttaactaggcggcggtatctgggacatcaagaacgctgnccggtcagggactacagtcacgggagacagctacgggtctgggtacaggcaagacacccaactgtgtcacagtgtgtcagggcgatctgacaaatgcgacatttagggtccaagagggcttgcacgcgataggtcacggcacccggtccggtggcaaatagagtcacacgggatcatgcggccctcacgcgcatgagctcgtcacattggggaaacttggtgacacaataacagctcatatgg

SEQ ID NO: 675733 - DNA, 855 bp, Homo sapiens
ggggcttacccccatggaaacctcaaggaaaactccagattccagaccttccttggaagaaaccttgaaatgacaatgaatgaaagtgaccatgatgctagagacatctatgtcagaccacagcaggtgactccagtcaggtggtcctggtcccacttgtcccagtgtaggtaagtatccctttcacatcctctccagtggtttaagaatgtcccacttcctaaggtgatccaaatgcatctctacatttaggaacagagacccgccttaagagatggatcgcacaccttgtgcaacagatgtgtctgattctctgaacctacaaaatagttatacatagtggaataaagaagggtaaccccaattcaaaaaaaaaaacaaagaaagacacaaaaagaaaaacggtacagaaagaaaaaaaaaagaggaagaaacaaaacatggagagagaaacagaaaaagcaacagacacacatataagacagaggaggagagacagcatcgagaccgcacagaagtgagcagtatgacaccacacgatgacgtgtgggacgtgaggcaacgagagcagctaagagcaaggtcggctgggaggggaaccgcaagcattgaagagcgacgacccaaccaggagagcagacaggagcagagagaaaaacaaaaaacagacgaggaagcgaagtacaacacgcagacggcgtcaacacagaaacgcagcagacaacaagacaccgggcagaaacgaagaaagagaaaggaacgaagcagacagagcggcgaaagaagcaagacggagcgcagcaagaaagaccaacacgacgtcaaacgagcaacgaaccagggcgacacaaaaca

SEQ ID NO: 675734 - DNA, 219 bp, Homo sapiens
ttatctggtctggttctgcctgacctggcttgtctggatcctctctggtatctgctttctccctggcctgccttgtctggcctgtccctggccagcttgacctgaccctggcctgaaatccccaggtctgacactggcatgcttggcctggcccctccttttggccctgccctggccctgccttagccctgtgctatcttagtccaaaggcaggacaag

SEQ ID NO: 675735 - DNA, 209 bp, Homo sapiens
ctacgaggatatttagtttaggtaaaaactaaagtctggtcttaatactgtagtattaaactactagtactaatttgagtaggataagtttggtatttttcaaacattggcaccctcggaaaggagaaacttacatactttaggcgacatttataggaaatccatctacataggtatttaaaaaacaaagcaagttctaattcccaggc

SEQ ID NO: 675736 - DNA, 193 bp, Homo sapiens
ctccggcgtcagtatttggctgactcgccacactccccggaagccctatgaagatgatctgctgctagatgcgtctggaggccctcggattcatcttatcttgttcaccgtcggtcgcctgactggccttcttttaacaaagtcatcactagacatcgtactacacgacacgtactacgttgtaactcacatc

SEQ ID NO: 675737 - DNA, 185 bp, Homo sapiens
  misc_feature (96)..(96): n is a, c, g, or t
cgcgcaaagtgaacccacatcggtattcgaattcatcggtaagtgctttcaacggagtacctcgattgctgtgacatttcttcattcatgataatntcaccacctcttacaggcaattcattatactcaacagccaacgataactatcgtaatacctcttgaaaagtcgcatgatcatgtatctg

SEQ ID NO: 675738 - DNA, 544 bp, Homo sapiens
atcccagtacttggggaggccaaggtgggcggatcatgaggtcaggaggttcaaagatcagcctgaccgaagcatggtgagaacctcgtccctactgaagaaatgacagaagagaattagccaggtatggtggcgtgcgacctgtatatcccagcatactcggtgaggttgagggcgggagaatcgacttgaacctggcacagctggatggttgcgaggtgagccagagatcacgccagtgccctccagccgtgggcgacagaggtgagactctttctcaaaaaaaaaaaacaaacgagacagcagaacacaaacagggaacaagaaagatcaacgccgggcgccatgggtgggcggggccgccacataggtccccaagtttactaccaaggagggccgggacgggcgggagaacaatgcggcttggaccttcctgggcgaggcacgacgggttggcttgggaagcccagatgatccaggccagctgggcacatcacaagcccggggtgctgaccacagggggaagactctggtgtccacacag

SEQ ID NO: 675739 - DNA, 170 bp, Homo sapiens
tcagcctcaagcagggctgcggccacgaccacgggccgtctttggcggaagaacacctccacaaagaccgcaatctcgattcggctctgcttcacgtactgagcgacgccgtgaacagcctcgccgtgatcgtgggcggcgtgttgatgtatttctcccactactactgg

SEQ ID NO: 675740 - DNA, 480 bp, Homo sapiens
cagggaaccactatcacgaaacagaaattctacctctctatactaatctccctacaaatctccttaatcataacatacatagcatagtaactaatcatatacatatattctttcgtaaacaaaacttatccccatcattggataatcatcacaccgatgtgaaggccaaccagtgcagaacgccttgtaacgcagtgtcactattattgtcccttatatctaatacctcgtagtaggcctgcccgttacccgtagatcaatcgcaatgattccacatctcacaatacccataggcctcacttaacatatttcatacattactgcactcatcaactgacccaaagaactatccaaatctcccttgtagaccatacaaaaattaaattatggtacatagactttacacaaatagactggtaatagatcaaggataccttcatatataggtacttcctacattatgtacttcccttgacagcc

SEQ ID NO: 675741 - DNA, 117 bp, Homo sapiens
gcacacctgccacgcgctcaccgcaacccaccctcacgctcgcgcactctcccacacacgcacactctcacgcgcacacccgacgcgaccacaccccctcgcactcgcactcgcgct

SEQ ID NO: 675742 - DNA, 386 bp, Homo sapiens
tttttttccccccgggtcccccctttaaaacccccgttaaaacagcctttttctcccaaagtgaaagggaaaccccaacagatttggcccagggattttccccttggtttaaaaggggcccccttcaggggtgggggatttttagggtaacggggctttttccccttttccccccccctttcccccaaattgcccccttttaaataacccctttttttgggtggaaccccggcagttttgcccccctcctaggatttgcccccgccttggagcctgcttaacggggcccttttcccttttccaaagggttcccttttaggggggggggtgagtttttttgtaaaaaaattaacccaaagcccaaaaaatttacccaaaacaattat

SEQ ID NO: 675743 - DNA, 629 bp, Homo sapiens
attgtgaagtatcccccaccacctttttggtatgggacgctgctttccgggccaatctactccctaatggaacacgggaagtatcaaagtgtctagccaggcagttgagggctgttggaactgtgactcaaatggagggtgagcccaccccagttaacctcacagagcctgccaggctggagtttagtttgtcctggtcttgtccttcggcaccgtactgattcctggccaccgtctatgagaactatgccctcgtttattcctgtacctgcatcatccaactttttcacgtggattttgcttggatcttggctagtaaccctaatctccctccggaaaccgtgggctctctaatttatatcctgagttctgataacattgatgtcaagaaggtgacggtcaccggcctggtgagctgccccaagctttcgtaaccaggttgttcaggggggctgctcccactccatgttactttctgttgctttcccctgccccaccgccccccattagggcaaacttatagaccacgcctatggaagctccccttaacatgtgcccttgccggtaccctggtgccatgtcgcatgcaaaataaacttgttgaaggacctatagaaaaaaagaaaaaa

SEQ ID NO: 675744 - DNA, 287 bp, Homo sapiens
gcagaatgggtggcaattttgatttgcattttcagaagagggccatcagttgaaactaagtagggggttttttttttggcaagacttggactctttcccctggcctgtttcatttatttgtattatctgcctgggccctgaggggtttgggtctctcctctcccctgcaggtttgggttttaaactgaggaactacaaagttgatgattttttttttttttttatgcctgcaatttttcctagctccccctagggggatagtaaatttatacttttgtttcccccca

SEQ ID NO: 675745 - DNA, 339 bp, Homo sapiens
cagcgtttggaaaacaggttttgtgggaccccccgccccgccccccgcaatcctttatagcagcagtagtggcttttccctcctgttttttgcaaccttttatacaaaactgtgctgtgaccctgcggtaggcctgggtctggcaaaaagaatacaaatgaaaccccttctttctctttccgtcccacaactctgtagagctctttgcccccttacccctttcccccttttgtatttaattttaaagtcagtgtactgcaaggaagctggatgccagataaatactatatttaactgggctgttatttaagatgtaataaagccgtttgccctgaggga

SEQ ID NO: 675746 - DNA, 868 bp, Homo sapiens
  misc_feature (152)..(152): n is a, c, g, or t
  misc_feature (507)..(507): n is a, c, g, or t
tctataagaaacaggctcccaccagacactgagtctgctggatgccttgcatcttgtagatttccctaagcctccagtaacattgtggccaccagcacctttctctgtgttgctatccgtctcctagtgacctagcaggaagctcaatcgcnatcccgaaggccagtgctattccattcagtggagtgaggccgtcaagagatgttttgaaagggttcttgcttctatcaatgtgatgccatcatcgtgtccttccctcaggaccagtccagcttccacggggcccatggctttcgtttcttacttgtgcatgcgatggtgaggggtataagccaatcaccaaggatcacatcctttgggtcgatcacgggctgggtagctcggccagggccagcctttgagggtggatgacttcacggggaatccctgaggtacgccttggggaccgccactagtgtctttaccttccttctggtattgccctatcggattgtccggctgatatantagatctcgtggtgggtcttcctagttaaaggggagggcgtatactagcagtggctgtggacacctatactagagacggtcatctgggacctgcagtcgcttgaaggttcacacgatactggtccatctgtgaacccttgggccctgttatggccaacggtgcttttctacaccctttcccaagcccaaggacagagcattctgcacgcgacacactctgtttcaacggaaagctcacgccccctggacgacttcacattgaccgcgtgggggcggcgaaccaccgggctgacagtagcggctggccgtgccgactacctggtttcgccatgggccgcctctttgttggcacccggggggc

SEQ ID NO: 675747 - DNA, 554 bp, Homo sapiens
tccctagatattctggctcatgccaactctgctctaagcagagacatctttcaaaactccacattactccctacttccacatttcccatagtacccaagacatccacctagacccctgtggtacttctaactttcttctactcctccaacctcccaccttaaaacatgcaacttttccttatcccccatctgtagtcaaccccgctgtttaggcgcaaaacaccacaccaccgtctgcattacccttaaagagcccacccagtttctatcacagaagcagtatcccatcccccaagcagctcttgtaggcctaaagcctatcgtttctcacctccttgctagtcacctactctgcccaacaaaatccccttttaacacaccagttctatctgttaaaaaagccaggaacttatcgcttagttcaggacctcaggctcattaaccaagctgtctagtagttcctgacccatatacttcactttcatggcaagccaacgccacttatccagtgaaccactatcacgagaaaaactctacctctctatactaatctc

SEQ ID NO: 675748 - DNA, 90 bp, Homo sapiens
gcggccgcctactactactactactgctcgaattcaagcttctaacgatgtacggggacatggaagcaataaattccctttaagagatct

SEQ ID NO: 675749 - DNA, 143 bp, Homo sapiens
  misc_feature (61)..(61): n is a, c, g, or t
atagatgtctataatcgttctttatattagattagcgtactaaaaaatcgactatcccatngtcagttagcattacattgtctgagcaccagaaaataaaatccatatattaataaaaacctatcttgaaaaactagtggagt

SEQ ID NO: 675750 - DNA, 458 bp, Homo sapiens
atttgggccttattggccggccggtttattaggattcaagggtggtttaaaattgggaaaacggcctttggattattccttagaatttggcggttaaggcaaggagggcccattgttatttccaactttttaaaggaattgggagcacccccaaaggggttaaattacccattttaattggccccagtccttaggccacccccttggtggttgttataacttttaacttcctttaaccccttaatttgaggttgagtttaatgacagtttgtatttgagggaaggttggaagttttaagcttaaatcctggttaagggttccatggaattagggaattcaattaatttaagccattagaaaaggtttagattaccgaaggtttaactgttggggtttaaggaccagtttttttaaggatcagccttggaactgtttcttttaaagcctggtggaagtt

SEQ ID NO: 675751 - DNA, 492 bp, Homo sapiens
  misc_feature (331)..(331): n is a, c, g, or t
tcgagatagcaattcctcaatcatcaaggctacggcattggggatgatgaatactcctgtgcgtattatgtctcgccggaatgcgatttgggtacaatgccagaagtaagcctcaatacacccatgctggacagaaggagatacagtaggatttctgttagacttgaatgaaaagcaaatgatcttctttttaaatggcaaccagctgcctcctgaaaagcaagtcatttcatctactgtatctggattttttgctgcagctagtttcatgtcatatcaacaatgtgagttcaattttggagcaagaccattcaaatacccaccatctatnaaatttagcacttttaatgactacgccttcctaacagctgaagaaaaaaatcattttgccaaggcacaggcgtcttgctctgttgaagcaagtcagtatccgagaaaactgctgttccctttgttgtgatgaggtagcagacacacaattgaagccatgtg

SEQ ID NO: 675752 - DNA, 478 bp, Homo sapiens
caccttataacagtgatactgtgcttgtccaccgagttcagcagttatttagagcgtcatggtcttatcaacttcggcatctataagaggataagagaccccgtaccaactaaaaagacaggaaaggtaattattataggctctggggtctcaggcgtggcagcagcgtcgacagttacaaagtgtttggaagtggagtgtcacacgtttgggaagccaggggatcgtagtggagtggaccgacgttgaccacaatttcgacaaaaggacaacctaatgtacgctgactcttggcagccaatggatggttaaacagggatcttggacgggacatcctactgggctgtgggtcagcaagacaagtaaatatggaactggccaagatcaagcagaaaatgcccactttatgaagccaacggacaagctgttcctaaagagaaagatgaaatggtagagcaagagtttaaccggttgctag

SEQ ID NO: 675753 - DNA, 964 bp, Homo sapiens
tcgggctggcggtaaggagtggcagcggcaaggcagcccgttgtttcgcgaaggctgtcggcgcgccgtggccctgtagggcacccggcacagcggccgttccccgaggcacccggcatgcgtcattcccacgcgtcacgatagcccaagaggaaggtcagctccgccgagtgcgccgtcaagatgaagaccccaaggagggagatcgcgcgcggggtaggtacgcgtaaacctccctgcaaacagttggaagcgacagcccgaaaaacgggcacgcggcggagagggataacgttcttcagcaccaacacagttttgccaaaccaggcacggcgaacacggggggccccccacagggccaacacgcaccagcggcccgaaaggtttgggctataggccaaaaggagaattaaaccatgaaatgaactttaacgcgtgctcgcgacacagagaggcgggcggcacacccggaaagaaccttggaggcgaggaggtctcccaagcctttctgtgcatttgaaacgccagcgagcacgaaaagaggaccgccaacgtttcgtgcactttaaagtgtaccccaagttatttcccagagtgttcctgtacttcccagctgggttccccgtagatcttccccctttgcgtgtgtgacaaacttccccaggaagggcaaacttatcttttgtctagttccaaaccataattgcggggctacacacgtgccaaacggatttatgataaacgatacggcttcaaaagaagccagcttttttctctcacaggaaccgggaggcggtatatttccccaatcttttgaattccccaagttttgtatcgaacccgtttgatacagacttgcctttgtatgttacaacacgaggcggtggacccctcgtattttggggcgtgggcttaggctcacactttccgccggggacaaccacctcgaggacaaacacaacgg

SEQ ID NO: 675754 - DNA, 410 bp, Homo sapiens
  misc_feature (18)..(18): n is a, c, g, or t
  misc_feature (86)..(86): n is a, c, g, or t
  misc_feature (89)..(89): n is a, c, g, or t
  misc_feature (98)..(98): n is a, c, g, or t
  misc_feature (103)..(104): n is a, c, g, or t
  misc_feature (107)..(107): n is a, c, g, or t
  misc_feature (112)..(113): n is a, c, g, or t
  misc_feature (115)..(115): n is a, c, g, or t
  misc_feature (117)..(121): n is a, c, g, or t
  misc_feature (131)..(132): n is a, c, g, or t
  misc_feature (135)..(135): n is a, c, g, or t
tgcatacaacgcgttggnagctctccatattgtcgacctgcaggcggcgcgaattcactagtgattgtgagctgagatcgcaccantgnactccagcntgggnnacngaganngncnnnnnctcaaaaaannaanaaaaaaaaaggtccgggcacagtgtctcaggcttgtattcccagcatttcggaaggctaagggggttggatcccctgaggtcgggagatcgagaccagcttgacacaaattggagaaaccccgtttttactgaaattacaaaattagccgacctgtgtgacgcatgctttaaatcccagatactcggaaggctgaggcaggagaatcgtttgaccccgcgagacagagtttgtgctgagctgagatcatgcggttgcactcccagctttggggac

SEQ ID NO: 675755 - DNA, 289 bp, Homo sapiens
gatcaagtcagattaaattaatatttattcaagagctgcccaggcgggagtgcagtggtgtgatctcagttcaccccaaccctctcctcccgggttcaaggcttcttctgcctcagcctcctgagtagccggaacaacaggtgcatgccaccacgctcagcatgcatatatgtgtgtgtgtgtgtgtgtgtgtgtatgtatatgtatatgtgtgtgtatttttagtagagatggagtttcgccattttggccaggctggtctcaaacttctgacgtcctttccacctag

SEQ ID NO: 675756 - DNA, 380 bp, Homo sapiens
  misc_feature (51)..(51): n is a, c, g, or t
  misc_feature (70)..(70): n is a, c, g, or t
  misc_feature (99)..(99): n is a, c, g, or t
  misc_feature (132)..(132): n is a, c, g, or t
  misc_feature (146)..(146): n is a, c, g, or t
  misc_feature (195)..(195): n is a, c, g, or t
  misc_feature (263)..(263): n is a, c, g, or t
  misc_feature (348)..(348): n is a, c, g, or t
cacagccagtataaataggtacttgattgatgaccttggggaaggaatganttgtgcccagtatgctaanctagctattctgccttatgggtgaaaaantctactgtttttggcccaggcacagtggctcanacctgtaatcccancacttcaggaatgtgaggcggacggatcacctgaggttgggagttcaanaccagcctgaccaacatggagaaaccccgtctttagtaaaaatacaaaattagccgggtgtggtgcanatgcctgtaatcccagctactcggaggctgagacaggagaactgcttgaacccaggaggcggaggttgcagtgagctgagatcgnaccattgtactccagcctaggcaacaagagcg

SEQ ID NO: 675757 - DNA, 501 bp, Homo sapiens
agcccctctagatactcaaggaagatagtaagagaggacggagaacaaagagtctataaaacaaccaaatggcagtagtaagttcttacctatcaataataaccttggaagtaaagggtttaaattctccaatcaaaagacatagagtgcgtgaatgggttaaaaaaaaaaaccgatctcaatagtatgctgtctacaagagactcacctcacctgcaaggacatgcctagactgaaagtgaagggatggaaaaagatactccatgctaatggaaatctaaagagtggcaggagtagctatacttatgtcagataaaatagactttaagttcaaaacttttaatggagacaacaaacatcattttataatgataaagggatcaattcatcaagaggtcttaacaattataaatatatatgcacccagcattggaatgcctgaatatataaagcaaatattaatggatctgaatggacagattgactgcaatgcattcatag

SEQ ID NO: 675758 - DNA, 411 bp, Homo sapiens
ggtcacagcttcctgtataggtcctcgtccaggttattttgctgcactgcatggcagaggctcgagcattcacagcctgtgctaaggctatcagttctgctgcattctcctcattgcggggccgtaggtggccggacatgctgatcacagaaactggtgcagggcctgataagccaatgtgcagctggcgcagcggtcgagaaaacttggcgaagttcgtcaccacaaagtcgtgatttgccagatcgtggccgcaaggatttaaagctaatcttcttaggtactttgacctgactgacgatgcctccacggatgtagtcggagaagttggaggtgtcacagatgctaaaggtataaggacccaggactttgatctccatgggctgatttccgttgagttcaaccatgccc

SEQ ID NO: 675759 - DNA, 371 bp, Homo sapiens
gcctgtaatcccaggacttgggaggccgagccgagatcacgccatgcactccagcctgggcaacaaaaaaaaaaaaaaaaaaaaaccaaaaaaactagtggctcgggcgggcctgtgggcctaccgaaagaagctttctagaaaacccactccggtggggcccgcggggcgccaagtagtagggtataccagcggacatggtggaccaaacgggtcgctcccaaaggagacactccggggcgccagagacccaaggggcggaggggagtctttcaccccaaatataaaacaccgccggggggggcacccggagcgtgttcgtggaagcacacttccaaaaggggcggttcgggagggcacacaagcggggg

SEQ ID NO: 675760 - DNA, 816 bp, Homo sapiens
aagaacacagcttattagtgaaagagacctgtggattgaaatggctgcagatagatcccgctcatgcccttctgagaggaactgtgtagccactagggacctacactttggcaaaaagtgaacactattcatgtacgaatgaaggacagaacgctcagatgggacgaatggcgattgtgctacggccatcccagagagacgggacagcaggtgcgatactaagcctcagtccaagaattattcagagagttcaaactgttcactctttctcttctccatctaatcccctaatcaggtagaactagcacggccagtagccgaaagcagtgtgtagcttacagatgcgataagtgggtaaggtacaaatggattcagtgggagggatcaaggtgtccgtcgttggaaagtgtggctcgaaggaaactctcggccttgatccatgtgctcctgcagaagcaaatcatgcaattcaaccacttcgagttacaatgaaatacatggaaaaactggattgttcgatgaccaatgacgaagatgaggaaacggggaaaccccgtagcacaacgtgctcgttcaatcctgtcaggactttgtggagccagtgaatgcttgtcactataagcacaataagcatctataccccgttataagtgtgtccacggtgtagacctataaaccaacgattgacttcttagcgttactcaggtgtcccacttggtcacattggatgaaactctgcggttgtaggcacaggtggtgaagactaaaagggagagttggctgcatgctctcgacaagttgccaacaaagacaaca

SEQ ID NO: 675761 - DNA, 210 bp, Homo sapiens
tagcagaagaagaaaagatgcttctctccttggagatgcggcagaaccagactgaaccaaggcacccagcaacactggagggaaacaagtcggagccagccaacaactccatcttcgtgcttcctaccagcaaacagcatgcatccagggcctcccaggtataggtgacactctgcctataccctacatgccctttgagatgctgtgaaa

SEQ ID NO: 675762 - DNA, 133 bp, Homo sapiens
atacagaccatttgaattctctaaagggaaagggcaaaagcatctaatcacaatagagttgaagagagctagatctctctctctagtgctgagcctcactctgtcagctgagactaatgtacctgcttctcaa

SEQ ID NO: 675763 - DNA, 643 bp, Homo sapiens
cccagggcacacccattccgtggtagcccaattggattttccgaccacacggcccccatgctgccactgtgtgtcccctgttgtgtcgtctgtgcgctccccccgttgagtgtgccctcttgtccgcatgggctgatgtacacttggtcggccttggagagaagggcgttttgcccccggatggcacgttcctcacagaggggagccagactcttatctgcccgcccgagctgggggcggtcagtaggcctgggccaagccccctaacctgcctcgacagccaggctcctccaggcctactgggttgagcggagcacccctgagccgccaggccacggtgtgtagtagcccccagtggatcgcctgaactttcagggcaatccacgggggtcctgctctaagagagccagtcaccagcacctctccctgcagaccctggaagggggtcgtgcacgtgcctgtgtgtgtgtggctcgagtgtattctgcgcgtgtgtttgacggcgagcggagggaggggagcatggtgtctcccgctccccccccctttggtgagccccctcagctgcccccctttactttgcattggacggcctgtcccaagatcctctctgtagggcagcagagagctttttgcaccttta

SEQ ID NO: 675764 - DNA, 394 bp, Homo sapiens
  misc_feature (68)..(68): n is a, c, g, or t
tagatttgtaattagtcagtatttaatatattttacccattgagctaaagcaaaaaagactcattatntatgatgcacaggattcaaagatgcctaaaattctgtattaaaaactatgtacactggtaatttaaatgttaaagttctaatatgcacatgttttccatgagctttttgtgcctatttgttttctgaatttatttttcaggaccaacatccttaacttggaagggaaaacatctctgatttgaacttgtatttatgtaccattcaattgtttccaaatggtccaatgggtataccatattttactactcttatattttacggaaaacatgaaaaagactgagaaactagccatttttgaatacagcaagggatagatgaggaaagg

SEQ ID NO: 675765 - DNA, 408 bp, Homo sapiens
  misc_feature (60)..(60): n is a, c, g, or t
catagtcaaatcatatcattccaaccctggcccctccaaaatctcaaatcctcacatttnagaaccagtcatgcttttccaatagtactgcaatgtcttaactcattcaagcattaactcaatagtccaaagtctgagattttatctgagacaaggcaagttttttctgcctatgagcctgcaaaaattaaagcgagttagttacatcctagatataatgggggtactggcattgggaaaatgcagatattccaaatatgagaaactgaccagaataaagggattacaggccctaagtacatctgtctgatgaggcactatttaaggctccaggatgatcttctttaacttaatgtctcatatccaggtcatgctgatgcgaggtgggtttccatggtcttgagcagc

SEQ ID NO: 675766 - DNA, 184 bp, Homo sapiens
  misc_feature (15)..(15): n is a, c, g, or t
ctgccattactcttntgccgtcatcatttcattaaaaaaagaatatttcaacaacaacaaaaagatatggtatcaaataaagggcggtggggactcttacccatgggtaagattattgctgtattgaccacaggtgttcctgatgctcttccatgcaagtagagtagttcagagtgaacggatc

SEQ ID NO: 675767 - DNA, 216 bp, Homo sapiens
  misc_feature (47)..(47): n is a, c, g, or t
cgtctggtgcatgggggtggctgctcggtggatggactcgtctcagnctccagcgagacgctgcttggtctccatgtcagcacgctgctccaggtccagccgtgtctgctctctgcccatgggaccgtccagcaaggcactgaaacccatctgttcacaggtcgaactcccgctttgaggggacaatgaagttaaggtacgcttcttcctccccac

SEQ ID NO: 675768 - DNA, 248 bp, Homo sapiens
  misc_feature (22)..(22): n is a, c, g, or t
gagagggggtctcacggtccantaggaacatgtagaaggtaaccacggggtgacagggaagtcggcggtatttactacctagcccccatcttcacttggttattccacttatttaaaatggtccagaaataagcaaatctccatatagcaggaagtagataagtgggtggcttcggggatgggaggaatggggaagcatggaggtctttcgtttggcaggggataaaattggtcctaaaaagtggact

SEQ ID NO: 675769 - DNA, 534 bp, Homo sapiens
  misc_feature (3)..(3): n is a, c, g, or t
  misc_feature (5)..(5): n is a, c, g, or t
  misc_feature (17)..(17): n is a, c, g, or t
tcngnccaaccccactncccccaccgggcccaaaagggggaaaagggggtttaataggggaaaatccggccctattttaaagatttttaggggaattaattgtaggacgaattgcatgaaactgtggtttgctccaaagatttccaagaattgtccgtattatacccccagtcatgtaacggctaaagtggttttgtttaacccaccgggaaatgcatccatttttaagcctaatggggggacagcttatgatcgcaaaacgacttgggatgttaaattaatccaatgggggcttaatcgcgaggactacttgatgttaatgcaaagagtccaaggtccctctgtttagaactattggggaagaattttgcattcaagatacatccccttctccgagtaaccattgttcacaaaccatgtgccccattttattctttggaccggagggcaacagtcccgtgctttctctatatgccacctagggcgtcgttgccctcttcccattaatttcgccgcaccctttactttctctct

SEQ ID NO: 675770 - DNA, 425 bp, Homo sapiens
  misc_feature (78)..(78): n is a, c, g, or t
ccaactcggttcaggctcatcaaagctttcaccttatgaagctggggctttgtgcatccttgaccctgtaaacatttnccctacccctgcccatcattaagacattcctcactcaaatttgacccatattaaaatttaaaatttcccatcccataaaatgaagactgggcttgtaatcccagcactttgggaagccccaggtgggtggatcacctgagctcaagagttcaagaccaccctgggcaacatggtgaaaccccgtctctactaaaatacaaaaaattatccaggtgtggtggcgtgcacctgtagacccagctactcaggatactgaggcaccagaatcgcttgagcctgggaggcagaggttgcagtgagccgagatcgctccactgcactccagcttgggctacagagtgagactc

SEQ ID NO: 675771 - DNA, 217 bp, Homo sapiens
gtggtggtggaattccacgtgcaaccaagcccggctaatttttgtgtttttagtagagactaggtttcaacatgttaggctgatctcaaactcctgacctcgtgatctgcccgcctcggccttccaaagtgctggggttacagacttgagccactgcacctggccatggggtggtttcttaattagatatagctgaaaagaacgctagaccaaatag

SEQ ID NO: 675772 - DNA, 156 bp, Homo sapiens
ccacaaaaaaacatatgtgtgtggggggggatcacctcaagcagctcagccaagatcatcaacatgtccctctctgtcttgctccccaacatgaatactttgtgtatgtgactgtatgtgaaccagattattttggtcagagctaaaacaatcata

SEQ ID NO: 675773 - DNA, 285 bp, Homo sapiens
  misc_feature (209)..(209): n is a, c, g, or t
tctagaggatcctctggctcagtgatcctcctgaatagctgggacacaggtgcgtacaccacacctggtaatttaaaaaaatttttttttttggtagagagagtgctcttcttggtggcaaggtggatctcagactctgggcttgagcagtcctcccaccttgtgctaccaaagttgtaggattacaggtgtgagcggccatgctgggntggcttctcttttggtattctaaaattcaaaggcctaagttatcaaatccctaaatctccaaatacggtcacagat

SEQ ID NO: 675774 - DNA, 881 bp, Homo sapiens
gcttcatttcctgttcctggcatctggggattccgagaatgatcccaggacctagatccgtatagattccgtgccagtcatcgttcctggcaaacgagcaatgcccttgttagtgtgccatgagtccttgactctccggcctggagacatccatctgcccactctcctaggaactgctgattaccaggaagtcaccatcggctctgcatgcccttccctcctggtcgagagatggcatcaagtgaccacattattgttctcttccagcttcacgttacagcagtggaagcgtgttgccgagttggatttcactgtcgttcaggtgaggatgaactgagactttcacactggaagatagttgaggaacgagtccttaagtaaccaagaaggagtggtgtctaaggcggagctttgggaagccagggaacggatatcgtgcccatagaatttcatagacatccagtgttcccagatggtttcacgaagggcctctctcgactccaggcagacgaacttagtcatgggcaaggagggtgggcgttcttcatcactccgggaccagccagagctccccaggcgacttctccatctctgtcaggcatgaggagtgacgttcaaacagcttcaaggtcatgcgagacagtccagggtacttactttctgtggacggagaagtttccatccctaattaaggcgggtagactactacgtggaccaagttccagctgccagactgtcagctgatcttgccttagagactgaacccgagaaagaaccagggttcaccgggccaaaggctggaccggaggtcccagggaggcccactcttagaggggtgtggaaaaggattcgaccttcgatgaccggaagcgtcggttccc

SEQ ID NO: 675775 - DNA, 200 bp, Homo sapiens
atccaccgaattccgttatctcctgacgtttctgatttttccactatgcacaccttttcagcatggttataactaggtattcttcccctctcacgccccatgggtgagtgagtccttgttggtgttgccttttagtttattcaatgcgatatctgtatcctaaccatgccacgactataagaggggataagtttacagac

SEQ ID NO: 675776 - DNA, 318 bp, Homo sapiens
tgcgcgcagaggtatacccgggtatgcatgcttacatgcccgcacctctctctagctcgtagtaccatgccctatctgaggccacccattgctcaccagtcagatcaatcttagcctggtacatcataaatgtatgcaccaaatgtgatacttcacttagtacactaaattattaattcacttgcctccaaaattgttctctctgaggctgagcattataacacaatgatctctgttccttttcattactgaaaatcgcctggagcttatttcagaacaacttccacttattatccattgacccccaaactccctaag

SEQ ID NO: 675777 - DNA, 795 bp, Homo sapiens
attcggaacgaggaaaaccgttcagttgggccgggcgcagtggctcacacctgtaaccccagcactttgggaggccgaggcgggcggatcacgaggtcaggagatcgagaccatcctggctaacatggtgaaacccatctctactaaaaaaaaaaaaaaaaaaaaaaaagaaaatattgtaaacctagtggcttataaacaacagaaatcagtttcagttttggaggctggaagcccaagatgaaagcaccagtagatgcaacctcttttgtaagggtgatggtcccatgatgaggctgtgcccctgccctgtgaccggatgacctcccaaatgccccacctaataccatccccttgcaggtgaggacttaagcaggtgggttttggggggacgtgctcaggccacagcagggtgcatgaagagccagtgagcctcattgagcccctctggtcagccagatctgacattgagcccagcattgaagatcaaagcaggtggggctttgggatgtgaagtgggttctgacgcggggccccacagacctgtctccgcgtgagctgcctgcaggcccctgcgtcattcctcagctgcgtgcgaggcctctggcttggagagcctccccgctgtgcacagttctctctttgccagggcagggcttggggcagcaccaggctggggcagaggaggaaagcaagaggacagacctccagaagagcagcggagggcgggtgaggatttccccatataccagtgtgtgttcatctacccatgaggaataaaaccatgcagcagca

SEQ ID NO: 675778 - DNA, 1119 bp, Homo sapiens
  misc_feature (77)..(77): n is a, c, g, or t
  misc_feature (302)..(302): n is a, c, g, or t
  misc_feature (403)..(403): n is a, c, g, or t
tccacctcctgggttcaagcgactatcctgcctcagcctcccgagtagctgggattacaggcacccgccatcatgcncagctaactgttttatttttgtagagatgggatttcaccatgttggccaggctggtctggaactcctgacctcaggtgatccgcccgcctcagcctcccacagtgttaggatgcaggcgtgagccactgcgcccggcgtaatttttgtttttagtagagatggggtttcatcatgttggccaggctggtcttgaactcctgacctcaggtgatccatcttcctcngcctcccaaagtgctgggattacaggcgtgagccgccacgtccggctaacaagtacttttttatttttattttattttttggatggagtctcactctgtcncccaggcggaggttgcagtgagctgacatcgtgccactgcactctagtctgggtgacagagcaagactccatctcaaaaaaaaaaaaaaagaaaatattgtaaacctagtggcttataaacaacagaaatcagtttcagttttggaggctggaagcccaagatgaaagcaccagtagatgcaacctcttttgtaagggtgatggtcccatgatgaggctgtgcccctgccctgtgaccggatgacctcccaaatgccccacctaataccatccccttgcaggtgaggacttaagcaggtgggttttggggggacgtgctcaggccacagcagggtgcatgaagagccagtgagcctcattgagcccctctggtcagccagatctgacattgagcccagcattgaagatcaaagcaggtggggctttgggatgtgaagtgggttctgacgcggggccccacagacctgtctccgcgtgagctgcctgcaggcccctgcgtcattcctcagctgcgtgcgaggcctctggcttggagagcctccccgctgtgcacagttctctctttgccagggcagggcttggggcagcaccaggctggggcagaggaggaaagcaagaggacagacctccagaagagcagcggagggcgggtgaggatttccccatataccagtgtgtgttcatctacccatgaggaataaaaccatgcagcagca

SEQ ID NO: 675779 - DNA, 186 bp, Homo sapiens
gacgctttgtgtgtcatgcactacggggattaagtacagtcccccaagatgagctgagcccccagagagagtctgacgtacaagtaacaggcccagtctcaggccccaattcgccagcctctccccgctctggatcctgactctaacactcgattctagtgctcatgggaagaacagaattgctcc

SEQ ID NO: 675780 - DNA, 1076 bp, Homo sapiens
ggcagacccagcgccgagcccgagccatggcgtcgagcggctccctaacaggcccgcctgtctgctcgtggccagcggcgccgccgaaggtgtgtcggcccagtccttcctccactgtttcacgatggccagcaccgccttcaacctgcaggtggccacccctggggggaaagccatggaatttgtggatgtgactgagagcaatgcacgctgggtgcaagacttccgcctcaaggcttactccagcctggccaacatgatgaaaccccatctctactaaaaacaaaaattacgccgggcgcagtggctcagccaactgaacgttttttttttttgagatggagtctcactctattgcccaggctggaacacagtgagctgacatcgtgccactgcactctagtctgggtgacagagcaagactccatctcaaaaaaaaaaaaaagagaaattttggtaaccctaggggtttataaccaacagcagaaatcagtttcagttttggaggctggaagcccaagatgaaagcaccagtagatgcaacctcttttgtaagggtgatggtcccatgatgaggctgtgcccctgccctgtgaccggatgacctcccaaatgccccacctaataccatccccttgcaggtgaggacttaagcaggtgggttttggggggacgtgctcaggccacagcagggtgcatgaagagccagtgagcctcattgagcccctctggtcagccagatctgacattgagcccagcattgaagatcaaagcaggtggggctttgggatgtgaagtgggttctgacgcggggccccacagacctgtctccgcgtgagctgcctgcaggcccctgcgtcattcctcagctgcgtgcgaggcctctggcttggagagcctccccgctgtgcacagttctctctttgccagggcagggcttggggcagcaccaggctggggcagaggaggaaagcaagaggacagacctccagaagagcagcggagggcgggtgaggatttccccatataccagtgtgtgttcatctacccatgaggaataaaaccatgcagcagca

SEQ ID NO: 675781 - DNA, 831 bp, Homo sapiens
  misc_feature (63)..(63): n is a, c, g, or t
  misc_feature (65)..(66): n is a, c, g, or t
  misc_feature (77)..(78): n is a, c, g, or t
  misc_feature (87)..(87): n is a, c, g, or t
  misc_feature (93)..(93): n is a, c, g, or t
  misc_feature (97)..(97): n is a, c, g, or t
  misc_feature (111)..(112): n is a, c, g, or t
ttgatctagcaggatcctatcccggctctgggtatgcggaaattggtcgggcgcgtggtgggngnntgtagtcccanntgcttgggnggctgnggcnggagaatcgcttgnncccgggaggcggaggttgcagtgagctgacatcgtgccactgcactctagtctgggtgacagagcaagactccatctcaaaaaaaaaaaaaaagaaaatattgtaaacctagtggcttataaacaacagaaatcagtttcagttttggaggctggaagcccaagatgaaagcaccagtagatgcaacctcttttgtaagggtgatggtcccatgatgaggctgtgcccctgccctgtgaccggatgacctcccaaatgccccacctaataccatccccttgcaggtgaggacttaagcaggtgggttttggggggacgtgctcaggccacagcagggtgcatgaagagccagtgagcctcattgagcccctctggtcagccagatctgacattgagcccagcattgaagatcaaagcaggtggggctttgggatgtgaagtgggttctgacgcggggccccacagacctgtctccgcgtgagctgcctgcaggcccctgcgtcattcctcagctgcgtgcgaggcctctggcttggagagcctccccgctgtgcacagttctctctttgccagggcagggcttggggcagcaccaggctggggcagaggaggaaagcaagaggacagacctccagaagagcagcggagggcgggtgaggatttccccatataccagtgtgtgttcatctacccatgaggaataaaaccatgcagcagca

SEQ ID NO: 675782 - DNA, 230 bp, Homo sapiens
agaaaaccccccagttggagggaggggggcttaaaaagccccttccaatgtatcttttcccaaatgaatttagcagttgtccttggtgagatgggatattggcgatttatgccttgtagcctttcccctgtggggcatttgtggtttggtaaaagtacaacaccaacctgtcccttctgggcatgttttggtggcatgtataatgcaataaactctggaaatgggttcca

SEQ ID NO: 675783 - DNA, 834 bp, Homo sapiens
  misc_feature (77)..(77): n is a, c, g, or t
tccacctcctgggttcaagcgactatcctgcctcagcctcccgagtagctgggattacaggcacccgccatcatgcncagctaactgttttatttttgtagagatgggatttcaccatgttggccaggctggtctggaactcctgacctcaggtgatccgcccgcctcagcctcccacagtgccgggattacaggcatgagccactgagcccagccagaaacatattaatactataaacaacagaaatcagtttcagttttggaggctggaagcccaagatgaaagcaccagtagatgcaacctcttttgtaagggtgatggtcccatgatgaggctgtgcccctgccctgtgaccggatgacctcccaaatgccccacctaataccatccccttgcaggtgaggacttaagcaggtgggttttggggggacgtgctcaggccacagcagggtgcatgaagagccagtgagcctcattgagcccctctggtcagccagatctgacattgagcccagcattgaagatcaaagcaggtggggctttgggatgtgaagtgggttctgacgcggggccccacagacctgtctccgcgtgagctgcctgcaggcccctgcgtcattcctcagctgcgtgcgaggcctctggcttggagagcctccccgctgtgcacagttctctctttgccagggcagggcttggggcagcaccaggctggggcagaggaggaaagcaagaggacagacctccagaagagcagcggagggcgggtgaggatttccccatataccagtgtgtgttcatctacccatgaggaataaaaccatgcagcagca

SEQ ID NO: 675784 - DNA, 499 bp, Homo sapiens
  misc_feature (317)..(317): n is a, c, g, or t
  misc_feature (376)..(376): n is a, c, g, or t
  misc_feature (399)..(399): n is a, c, g, or t
  misc_feature (454)..(454): n is a, c, g, or t
  misc_feature (479)..(480): n is a, c, g, or t
agccttcctcgtaaaagtagcacaagcccacttatgaatcactgagaaaaagtgaaaaacttgagttggcaaagatgcagagcatgcagtgcagatggcacatgaactctcctgaattcctctttttaccttaaatttagacagaatggcacgagctaacagggaccttttttccccttgtgggtttcctgcaggaacttcttttccaaaaccgcgcggcattttgaaacgcgggaacggaaaccatgaaaaaccaccctttaactttccccaaacgggtttgggcccttcccttaattctcgcgtaatttaacccngagattgactggaagcttcaagacgacaggcaggcaagtatacaagcccaaggcaaggncccaagctttcctgggggttaantaaaacacaacgacatttcgaacaggggaacaatggcgacaggggtccttttccntttttccaacccaactccccttacnncttctatgtgatcggaaag

SEQ ID NO: 675785 - DNA, 1051 bp, Homo sapiens
  misc_feature (261)..(261): n is a, c, g, or t
  misc_feature (263)..(264): n is a, c, g, or t
  misc_feature (275)..(276): n is a, c, g, or t
  misc_feature (285)..(285): n is a, c, g, or t
  misc_feature (291)..(291): n is a, c, g, or t
  misc_feature (295)..(295): n is a, c, g, or t
  misc_feature (309)..(310): n is a, c, g, or t
ggcagacccagcgccgagcccgagccatggcgtcgagcggctccctaacaggcccgcctgtctgctcgtggccagcggcgccgccgaaggtgtgtcggcccagtccttcctccactgtttcacgatggccagcactttgggaggccaaggtgggtggatcatctgaagtcgggagtttgggaaaagcctggctaacatggtgaaaccccatctctactaaaaaacaaaaatacaaaaagttagcctggcatggtggtgggngnntgtagtcccanntgcttgggnggctgnggcnggagaatcgcttgnncccgggaggcggaggttgcagtgagctgacatcgtgccactgcactctagtctgggtgacagagcaagactccatctcaagaaaaagcaaaaacagcgaaatcttttcgtgaaccctaggggcggctttctgaaagcagctgaacatcggttccagtgtggaagagctgggagtcccatcgttgagagccgcgcgagaaaatgcacccgcctttggtcgaggctgagtgtcccatgatgaggctgtgcccctgccctgtgaccggatgacctcccaaatgccccacctaataccatccccttgcaggtgaggacttaagcaggtgggttttggggggacgtgctcaggccacagcagggtgcatgaagagccagtgagcctcattgagcccctctggtcagccagatctgacattgagcccagcattgaagatcaaagcaggtggggctttgggatgtgaagtgggttctgacgcggggccccacagacctgtctccgcgtgagctgcctgcaggcccctgcgtcattcctcagctgcgtgcgaggcctctggcttggagagcctccccgctgtgcacagttctctctttgccagggcagggcttggggcagcaccaggctggggcagaggaggaaagcaagaggacagacctccagaagagcagcggagggcgggtgaggatttccccatataccagtgtgtgttcatctacccatgaggaataaaaccatgcagcagca

SEQ ID NO: 675786 - DNA, 418 bp, Homo sapiens
caaatgcagctggtagccttgcgcacgggcttccacctcaacgtaatagcgcgaatccaccagaatgtgcgcactttcacggctaatcaccacataacctgatccggtggagatccccagatgcggctgtttgttctgccgtgaggagagaagcactgcatccagttgttgcgccttaagccagctgcgcagcgaagcgagtaatgtcatctggattttccttcttacaggctatcgattaacaatttgcctttacggaacatcatcagacgcaggaacaccaccatcagcgcagttatgactgcccccagcgcgatccccgccatatagacgcccaggttagtgaccagcgccatgcccagatagcggactccgggaaccattgcactgcgcccagccagacagcggcggttgagcc

SEQ ID NO: 675787 - DNA, 1287 bp, Homo sapiens
ggcagacccagcgccgagcccgagccatggcgtcgagcggctccctaacaggcccgcctgtctgctcgtggccagcggcgccgccgaaggtgtgtcggcccagtccttcctccactgtttcacgatggccagcaccgccttcaacctgcaggtggccacccctggggggaaagccatggaatttgtggatgtgactgagagcaatgcacgctgggtgcaagacttccgcctcaaggcttacgccagccccgccaagctcgagtccatcgatggtgcccggtaccatgccctcctgatccccagctgtcctggggccctgaccgacctggccagcagtggctccctggcccgtatcctgcagcacttccactctgagagcaaacccatctgcgccgtcggccacggtgtcgctgccctgtgctgtgccaccaacgaggacagatcctgggtgttcgacagctacagcctgacagggccctctgtgtgtgagctcgtcagggcccccggcttcgcccgcctgccgctcgtggtggaggacttcgtgaaggattcgggcgcctgcttcagtgcaagcgagcctgacgctgtccacgtcgtgctggaccgccacctggtcacaggccagaatgccagctccaccgtcccggccgtgcagaacctgctcttcctctgtggcagccggaaatgaacctgctgggtagatgcaccccctgagacagcccaggtgtctccagaggcagccccgtctcaggcttcagggaccccgcctcttccctcctgacaagggccctggatggcagcctggtctggccctgatgggattgttggaggcctcctggaatcagctctgagggggtgtcggctctcctggagggtccaaacccccatcctcctgcatgttctctggtaggaggcagagaaaagaccccacgtgcctggagagctgtgctagctgctaggtggtcctcgggaattccaggctgggttttctagggaggactggttgtcacgtgtgtcactgttgactagacagacctgtctccgcgtgagctgcctgcaggcccctgcgtcattcctcagctgcgtgcgaggcctctggcttggagagcctccccgctgtgcacagttctctctttgccagggcagggcttggggcagcaccaggctggggcagaggaggaaagcaagaggacagacctccagaagagcagcggagggcgggtgaggatttccccatataccagtgtgtgttcatctacccatgaggaataaaaccatgcagcagca

SEQ ID NO: 675788 - DNA, 1454 bp, Homo sapiens
  misc_feature (77)..(77): n is a, c, g, or t
  misc_feature (302)..(302): n is a, c, g, or t
  misc_feature (403)..(403): n is a, c, g, or t
tccacctcctgggttcaagcgactatcctgcctcagcctcccgagtagctgggattacaggcacccgccatcatgcncagctaactgttttatttttgtagagatgggatttcaccatgttggccaggctggtctggaactcctgacctcaggtgatccgcccgcctcagcctcccacagtgttaggatgcaggcgtgagccactgcgcccggcgtaatttttgtttttagtagagatggggtttcatcatgttggccaggctggtcttgaactcctgacctcaggtgatccatcttcctcngcctcccaaagtgctgggattacaggcgtgagccgccacgtccggctaacaagtacttttttatttttattttattttttggatggagtctcactctgtcncccaggcggaggttgcagtgagctgacatcgtgccactgcactctagtctgggtgacagagcaagactccatctcaaaaaaaaaaaaaaagaaaatattgtaaacctagtggcttataaacaacagaaatcagtttcagttttggaggctggaagcccaagatgaaagcaccagtagatgcaacctcttttgtaagggtgatggtcccatgatgaggctgtgcccctgccctgtgaccggatgacctcccaaatgccccacctaataccatccccttgcaggtgaggacttaagcaggtgggttttggggggacgtgctcaggccacagcagggtgcatgaagagccagtgagcctcattgagcccctctggtcagccagatctgacattgagcccagcattgaagatcaaagcaggtggggctttgggatgtgaagtgggttctgacgcggggccccacagacctgtctccgcgtgagctgcctgcaggcccctgcgtcattcctcagctgcgtgcgaggcctctggcttggagagcctccccgctgtgcacagttctctctttgccagggcagggcttggggcagcaccaggctggggcagaggaggaaagcaagaggacagacctccagaagagcagcggagggcgggtgaggatttccccatataccagtgtgtgttcatctacccatgaggaataaaaccatgcagcagcatgcaaatggtgtcctggtgttcgcagcagaactgctcatggtaatggataagttgttttcatacagtgggttgtcaatatgtttaataattgttggtatctattaataagggcaatatattcatatggtggattatttggctattaaaatggaatgaagttattttaaaaaaaatggtgatggctggtgagtggatttacagtgagtaggtcggagctttgatgctatggtctacactcgttcgaaaaggggcacctgcggtgggaaaccgcgtggaaccgcggggattaaggggaagggaagagcgaattgtcaagaattggacaaaaaggggt

SEQ ID NO: 675789 - DNA, 728 bp, Homo sapiens
gcttacatggtgataagagtttaactctgatagccaaggatgactgcctgggaacttcttcctctcatcaaggcttagcttagccttgggtgtgggtatatcacaggtggtctccatggctagcccgagtgactcttatcgttcatgctaggctaaatgtatcttttaactgattcgttcatgcgataggatttagagaagagtttattatgctacaaattgtgatgttgtgtgtgtgtgtgtgtgtgtgtgtgtctctgcatgttggtaggagtttatcatctcaggtgccttactcatgtgtaataaaagttatgctagccagtttcaagactcaaaaaaaaaaaaacaacacaaaaaaaaaaaaaaaaaaaaaagagaacaaaaaaataaaaaaataggggggggggcgccaaaagatactccccgggggggggaccacatccatcgtcctaatccgcaccgttttgtcgtacaacacagggggcgctacaaatagagggcgccgccttattacatactgttggagcaaccgcgggcgcgcgccttcctaacacacccgtcctccccgccgctgggacgatcccgcgctgcacagggcacactcccgtgggacgacaccccccaccaacgatgggggggggcgcacacaagtgccggcccacctcaccccccacgagattaccgcccccgtggggacaaccacaacgttgccgcgagcaaagcgg

SEQ ID NO: 675790 - DNA, 234 bp, Homo sapiens
agtgagcgagatcgtgcactgtacccagcctgggggacaagagcgagacttcatctcaaaaaaaaaaaaaaataagtggggctttgttggtgcacattcatatagccccagctatgtgggaggctgaaacaggaagattgtttaaccccaggagttcaaagtaacaggaagtaaggatcccacaactgcccctcacccttgggttacagaattgagaccactgtctaaaaaaaa

SEQ ID NO: 675791 - DNA, 173 bp, Homo sapiens
gtactctctatcatctgctttctttgcctagccaatgtaacatgccaattattgcccagatgacaacacagacaccgataagcgctatagcagtaagcagaacaatattactatggtgtaagataccgttgggaactaccaaacttcgcagggaccttagtgcagggtatagg

SEQ ID NO: 675792 - DNA, 1373 bp, Homo sapiens
  misc_feature (1139)..(1139): n is a, c, g, or t
  misc_feature (1187)..(1187): n is a, c, g, or t
ggcagacccagcgccgagcccgagccatggcgtcgagcggctccctaacaggcccgcctgtctgctcgtggccagcggcgccgccgaaggtgtgtcggcccagtccttcctccactgtttcacgatggccagcaccgccttcaacctgcaggtggccacccctggggggaaagccatggaatttgtggatgtgactgagagcaatgcacgctgggtgcaagacttccgcctcaaggcttacgccagccccgccaagctcgagtccatcgatggtgcccggtaccatgccctcctgatccccagctgtcctggggccctgaccgacctggccagcagtggctccctggcccgtatcctgcagcacttccactctgagagcaaacccatctgcgccgtcggccacggtgtcgctgccctgtgctgtgccaccaacgaggacagatcctgggtgttcgacagctacagcctgacagggccctctgtgtgtgagctcgtcagggcccccggcttcgcccgcctgccgctcgtggtggaggacttcgtgaaggattcgggcgcctgcttcagtgcaagcgagcctgacgctgtccacgtcgtgctggaccgccacctggtcacaggccagaatgccagctccaccgtcccggccgtgcagaacctgctcttcctctgtggcagccggaaatgaacctgctgggtagatgcaccccctgagacagcccaggtgtctccagaggcagccccgtctcaggcttcagggaccccgcctcttccctcctgacaagggccctggatggcagcctggtctggccctgatgggattgttggaggcctcctggaatcagctctgagggggtgtcggctctcctggagggtccaaacccccatcctcctgcatgttctctggtaggaggcagagaaaagaccccacgtgcctggagagctgtgctagctgctaggtggtcctcgggaattccaggctgggttttctagggaggactggttgtcacgtgtgtcactgttgactagacagagtcggctcgggggtcctctgtgtgggtttgccctgctgtggcctgtctgccacccaccacctctttcactgttggtgggggccttgaggggagggcccagccggngggagctggctcagaactttggccaaaggtgaacggaattttttaggngcagcagcctcctgccccaaggccgaccggcactggcagcactttcctgttgaagaaatcttcctggcgtgtggtttcaaagtgtaagcacctcagtgatgcaccctgtcctaagcattgagaggcacgtttacttgtgaatatgagaccatgagattctcaatgataggaaagtgctgtcccccc

SEQ ID NO: 675793 - DNA, 120 bp, Homo sapiens
cttgtaatgtcgggcggagttgcgtatcgatgggcagtgcggaggcgcatatgatctaggctatatatccggagtatacgtagcggtaaggtaaaacggtactctagactatagtagcat

SEQ ID NO: 675794 - DNA, 1278 bp, Homo sapiens
  misc_feature (77)..(77): n is a, c, g, or t
  misc_feature (302)..(302): n is a, c, g, or t
  misc_feature (403)..(403): n is a, c, g, or t
tccacctcctgggttcaagcgactatcctgcctcagcctcccgagtagctgggattacaggcacccgccatcatgcncagctaactgttttatttttgtagagatgggatttcaccatgttggccaggctggtctggaactcctgacctcaggtgatccgcccgcctcagcctcccacagtgttaggatgcaggcgtgagccactgcgcccggcgtaatttttgtttttagtagagatggggtttcatcatgttggccaggctggtcttgaactcctgacctcaggtgatccatcttcctcngcctcccaaagtgctgggattacaggcgtgagccgccacgtccggctaacaagtacttttttatttttattttattttttggatggagtctcactctgtcncccaggcggaggttgcagtgagctgacatcgtgccactgcactctagtctgggtgacagagcaagactccatctcaaaaaaaaaaaaaaagaaaatattgtaaacctagtggcttataaacaacagaaatcagtttcagttttggaggctggaagcccaagatgaaagcaccagtagatgcaacctcttttgtaagggtgatggtcccatgatgaggctgtgcccctgccctgtgaccggatgacctcccaaatgccccacctaataccatccccttgcaggtgaggacttaagcaggtgggttttggggggacgtgctcaggccacagcagggtgcatgaagagccagtgagcctcattgagcccctctggtcagccagatctgacattgagcccagcattgaagatcaaagcaggtggggctttgggatgtgaagtgggttctgacgcggggccccacagacctgtctccgcgtgagctgcctgcaggcccctgcgtcattcctcagctgcgtgcgaggcctctggcttggagagcctccccgctgtgcacagttctctctttgccagggcagggcttggggcagcaccaggctggggcagaggaggaaagcaagaggacagacctccagaagagcagcggagggcgggtgaggatttccccatataccagtgtgtgttcatctacccatgaggaataaaaccatgcagcagcatgcaaatggtgtcctggtgttcgcagcagaactgctcatggtaatggataagttgttttcatacagtgggttgtcaatatgtttaataattgttggtatctattaataagggcaatatattcatatggtggattatttggctattaaaatggaatgaag

SEQ ID NO: 675795 - DNA, 917 bp, Homo sapiens
gacctagcatcagttcctccatcttccttcaaaattggtgcacattgacagaatggggagaaagatagcagggtggggggtggggcatgtgcccataggtctacatcctaaggtcaccttctgctctttgatggggattgaggcaaagagtgaaaaatttgtgttctgttgaatccaaaaggaagaagcaaaatgtgtcccaagacttctgttccatggaggaatttttttaactataaaaatatcatatatatatgaaaaaagagaatgctataagaaacaccaccaagattaagaaataaactattacaaagaaaaactgtgattgtagatttcttcctaatagcatcacctttcttcaaaccacaaccctgaaatttgggtgttagtaactcccagggcatgttcctcatatttttaatactatacttctatattatttcctaagcagacatttctggtattaatttgtggccattgtttcttaaaaattttggtagaaccccttggtttttgggtaacctggtggggtattccttttcctgccaggcattggggtctgggtaataaggcatccgaacacggtttgaattgggtacattgggcgcgggaaatttttcaatttccccattaatcgtgggtttgaacctctggtgtagagagttcccccccaaattgggggagttctccccctcgtttgtttttgtacaaagagttggcgcctaaatacatttagggaaggggttcttccacagcattctcacattagatgtgggaaaaaagcagttctaacacaatttccacagagtgttgagaagacaccataagtgatggcgcgtgcgccgtgtagaatttggggaagattagacgcaccaccctcttgttccgaggaaagttggagcgatctcaccaagaga

SEQ ID NO: 675796 - DNA, 486 bp, Homo sapiens
  misc_feature (465)..(465): n is a, c, g, or t
gttagtattggtggtaacatatgcaactatagcctcaaagtccaatgcatgtatatttgctctcaggtgaactttaatgccagagaaaacatcctgaattgacccattttcccactcttgtggtcctttgactacatactgtatttagtagaaactatattaaacataaagaattaaaattttcatttggtcagtattctatagaacgtggaaatgtccacattgcttaggtaggtcacttacagcagccaatgggaagatgtcttcagacaatgttgctttgctgcctgtttggatccttgtacattttactttacaagagagattccatagattcaaacaaatgcctgaactccctatgttcttctagcacagtgtttataagtaggctggagcttcaataatgaagatctcctgccaattccactaagtctaagaactgacaactctcaaaatgctttttcntccttgtgacttaatggttct

SEQ ID NO: 675797 - DNA, 161 bp, Homo sapiens
aacaggacaggcataacgaaagttaactaagctatactaaccccaggttggtatagcttagttaaacttatcgtttctggctaaaggttaatcactgctgtatcccgtgggggtgtggctaggctaagcgttttgagctgcattgccggaagcttgatcca

SEQ ID NO: 675798 - DNA, 356 bp, Homo sapiens
cgcgatcgcttcctctggtgctccaccacctacaactttgagaaggatggccacgtacggcttctgtccccatgaagccctgttcaccatgggcggcaacgctcaaggacagccctgcaattttccattccgcttccagggcacatcctattacagctgcaccactgaggaccgcacggattgctaccgctggtgcggcaccactgaggactactaccgcgacaagaagtatggcttctgccctgagaccgccatgtccactgttggtgggaacccatagggtgccccctgtgacttccccttcactttcctgggccacatatatgagagctgcaccagcgccagccgcatcgtgc

SEQ ID NO: 675799 - DNA, 200 bp, Homo sapiens
ctcatataggagtagtaacattttggctcatgaaagtcaatagccctttcatctccttagaataattgtcccatctccactgatggtgactaccatgggaacataacccacgagattaagcagagaacttccttgcatcgccttggaagggctattcccgttcaggagacttgtggcccggcagcctatcggggcaatat

SEQ ID NO: 675800 - DNA, 374 bp, Homo sapiens
  misc_feature (7)..(7): n is a, c, g, or t
  misc_feature (20)..(20): n is a, c, g, or t
aggccgntgcggttttgtgntggtacgcctcatccctgcccccaggggcactggcatggtttccgcccctgtgcctaaaaagctgctcatgatggctggtatcgatgattgttacccctcagcccgggggtgcactgcccccctgggcaattttgccaaggccccctttgatgccatttttaagacctacagctccctgccccccgccctttggaaggagactgtattccccaagtttccctatcaggggttcattgaccccctggtcaagaccccccccagagtttccgtgcaggggactcaggctccagctgtggctccaacatagggtttttatccaaaaaaaataaagtgaattaagggtgttcctgtta

SEQ ID NO: 675801 - DNA, 131 bp, Homo sapiens
tacctgctacttgtcaccttctactggctctactacaatctgccatttgtcctctggttaacagtcccttcctgtacaggtctaaaagtcttaattctaaatccacagtttaattcacaagctagtacttg

SEQ ID NO: 675802 - DNA, 898 bp, Homo sapiens
  misc_feature (13)..(13): n is a, c, g, or t
  misc_feature (17)..(17): n is a, c, g, or t
  misc_feature (22)..(22): n is a, c, g, or t
  misc_feature (30)..(30): n is a, c, g, or t
  misc_feature (36)..(36): n is a, c, g, or t
  misc_feature (38)..(38): n is a, c, g, or t
  misc_feature (84)..(84): n is a, c, g, or t
  misc_feature (563)..(563): n is a, c, g, or t
ccttggcgggctntttnacttncactgtgnataagnanaacagcttgctattacttcaagtttttttggaaaaaacacctgggnaaattcatcgcaagaagatcatcacctaggcacatcgccgtcaggttatccaaagttaagatgaaggaaagaatcttaagagctgtgagacagaaacaccacgtaacctataaaggaaaacctatcatattaacagcagatttctcagcagaaaccctacatgccagaagggattggagccctatcttcagcctccgtaaacaaaacaattatcagccaagaattttgtatccagcaaaactaaacctcatatatggtgcttagctatttattttgttatctattgttgttgctcaaactgttcaagctttggccattgggagctctttcacattggctcttgtgtacttttggcatgccctcatccactttgtttggagcacttcctctttctggcaccacaggatgctccaggctcatcttgtgttttcttctctgcattggccctagacttagtcatttctcctaggagccctggntcttttcttttttttttttttgatgaatggccttagaaacccagatcttggtgatgggggtgctcattgctactgtgatgacactgcttctcccatttctaatgaacagaactaggaatttttgtttgggtcccaccccatgtctctacctatcctcattctggtgccttcctgctcattccttagactcaacgttacttccctgtgctttacaatggttgagggtattgttggcaaaaatacaatccggccctctcttccccaccctcccaaatcggtccacaggcaagcgaactcagttgcgtgtcttttaaacccaacagtgcatattttgc

SEQ ID NO: 675803 - DNA, 267 bp, Homo sapiens
gttcccttccccaagaaacctattagatattatagtatccaatcatttatgacatggtcttcatagtacaatcccagctaggctagatattcccagtacatcatgaactcttctgttgctgcctccatgatggtcagcaacattcttaagaggtttgcagagtttaatcctccacgactaggtacatgaccagttcacaattttttattgcatatatattatcaaagttcttttgagagacacccctttctccgcgatctaagtgtg

SEQ ID NO: 675804 - DNA, 362 bp, Homo sapiens
ggcacgcgagggaagtgtagacatatggagagacacaaacacagttgtgcgatatagtgtattttcaaagacaccaagatgtgggaaatgagaaattattggtcactttcctgtttcatgaaactttggcttaagaaggtgctggatttcaagggttgtgaaggcatattggtaaagactggtttttgagatgcgtatgaatttgcgattaacttgactgaggtgattctgaccagacttgaggggtttaaggcggaaccggttaattttaggggaaatggaaaggcactgtgttccttatagcgcaacacaagtatctttcacatatattataagtgggctctcttagattaagtctcttc

SEQ ID NO: 675805 - DNA, 465 bp, Homo sapiens
tctcgatgcgagtgtcacaagaaatagttagtaggccgggcgcagggcttacacctgtaatcccagcacttgggaggccgaggcgggcggatcatgaggtcaggagatcgaggtttcagtgagctgaggtcgtgccattgcactccagcctgggcaacagtgtgagactccattaaaaaaaaaaaacaaacaagtgttttatttaattactgcaaatttgtgaatttggcagttttacttatgtctatttatttctattttttatcccatggtactcagagaagatacttggtatgacatctactttttcaaatctattgacccttatttagtttatgggcttatacatgttctatcctggaacatgtcccatgtgcacatgagaagaaggtgtatccaatggttgttcaagtcctctatttcctgacttacctatggtagggctgttctatccactgtcaaaag

SEQ ID NO: 675806 - DNA, 187 bp, Homo sapiens
  misc_feature (2)..(2): n is a, c, g, or t
  misc_feature (23)..(23): n is a, c, g, or t
  misc_feature (64)..(64): n is a, c, g, or t
  misc_feature (93)..(93): n is a, c, g, or t
  misc_feature (162)..(162): n is a, c, g, or t
gntaggacactggtgtggtcctntggatggggcccattctgccctgtgtcggaggcgcccttgntggctggggctgccctgggcccacaggtncaagttctgggtggaacagaaccgactgaataaacccactgccctacagccgcgtggtgcacacctacngcctccccagctgtggctgccaccc

SEQ ID NO: 675807 - DNA, 361 bp, Homo sapiens
cccgaccttgtcctcaggaatgtgctgactttttttaaggtcgcgtccctgtaataaagtattgggggaaagcatgtaactgacaaaggcctcttcaactttaaaatgtgacctgacctgtaaggagaggcgtgtcctctgatccagaggagagagactctgatttccctgccccgggcccttttcagcactccctgggcgctttgaacccctcctttcacccaatgaaaggaactcccctcattacccctctgcttattatgttattgtatgattttgttaaacttactggaaacaactcccaagcgtttttgtagttgctgtatttttttaaagaccaactaaaaaggctggagaaaga

SEQ ID NO: 675808 - DNA, 743 bp, Homo sapiens
gaagcgtccgcgccgcgaggagtgaggccctgctggattctgtgcggtgctcttgtcaagatggtgaagctgttcatcgaaagacctgtccccgtggaggctactagagcagcgagattcgctcactcttcgagcagtatgggaaggtgctggaatgtgacatcattaagaattacagggtttgtgcatcatagaagacaagacggcagctgaggatgctcatactgcaacctgcagccattacaagcttcatggggtgaacatcaagcgtggaagtccagcaatgaataatgagcaagaacctctaacaaagttgcatgttggcaacatcagtcccacctgcaccaataaggagcttcgagccaagtttgaggaggtatggtcctggtcatccaatgtgacatcgtgaaagattatgccttcgtacacatggatcgggcagaggatgcagtggaggccatcaggggccttgataacacagatgtttcaagtgcaacaccgagatgcaccgtgcatgtatgtccagccagtccggcgttatcactgcgcccgggatgggagcaccagcagcggctgctatcggtgcggtgaaacgcaggggcactggtccaaagagtgtccgatagatcgttcaggccgctgtaggcacgacttgtaccgacgcaatataatgagcaatacggagcattgcgtacgccttacaccatgagctatggattcattgtattacaactaacgcgtac

SEQ ID NO: 675809 - DNA, 1276 bp, Homo sapiens
gtagcctgtctgccttcggagcgaagggtacctgaccctggcagaagctcgtgagctctcgtgtggtatcgatgtgatagtgcatgtgccctgctgtgtgctgcactggtgctgatgctgtgtgcctggtgatgcctgtgatgctgtgctgtgatgtgatgcctgtgcatgcatgcttgtgcttgcttgtgctgtgtgcctcccatgtgcttgatgtgactgtgttctgaagcttgtcattcccttttgaacacagaccgtatagacctggctggctggcttgactttcctgtctaggcctcatacctttggtctaccccccttggtggaatgtctcggaacttcggaaaacgtgtgaaactttcagggggttccccagggacttaagccgcccgccctttggcctgacccactggccccaggctggctctaccgtataaacccctgtctgccgaaataagccgatctgggcctcttttggcgtgttaggcccgttactttgggtttggccccctttcggacgccccaaacagctttggtgttttcaccccaagtggctctgaaacacccgcacatgggagcgcggcccataaaaaccgttccccagaaaatagtttttccgtgcccgatttatgggcagcacggcgattattccccagtgagatggcagcactggcgtattttcccctttggcggcgcgccgtttaacatattttcccttttgggccacattttttccccacatattttccggaaaacaagcttgttgtgccccatttgggaccttggcacggaacattaacacccttttgcggcgatagcttgtgggccacgccttcattccttatcataaacatttacctgggacacaggcacatttggggcgcccgacttccctttggttggcacccacttgtgggtaaaacttttgcccccctgtagggcccacaaattttacccaaaggtccattagcacactttttaacaatatgcaccgcttttacttacatatgaatattgcgctacatacaatcgcgacccactattttattcacccccatttttttggcggacacagtaaatagtcgcccacatttttgtggcgcgcttgcaaccgtgtgagtaaaaaaaagacgctctccgccgcgcggacgcaacaatgtgggcagcacaaaacatactcccatgctacttttagcgtttccaatctggggcgaaaaaacgggcgcccgctctttttacaattccccgaaagagacattatgggggcacgagc

SEQ ID NO: 675810 - DNA, 178 bp, Homo sapiens
gttaggggctctgaagtatcttctacgaaggccgacagctccaataccctaacctgcaggatgctcagtccactgtcacaatcccttaaagaaaacattagtggccgtgacccagatacagagacggacgaaatgctttcactccattagctttgccaactccagcgtgctgatacaa

SEQ ID NO: 675811 - DNA, 843 bp, Homo sapiens
  misc_feature (578)..(578): n is a, c, g, or t
  misc_feature (798)..(798): n is a, c, g, or t
ctggaggaggcggagagcaatgtgttacagatgcagtgcaagctgttttgtcttttgacaagacctctacagtcctgggtggagagaggccgtggggctgctcagactctatgacatcggcgtccacctgatgacgcgcacacgtacagtccgcgacgtagtgattgcggaccccaggcggagcctgcagatctgatccgtgcaaccacgcaagcctgtgggccctagatgctagatccgacaatggccagccgagaagtagcattcgcatgcacagcgcatggacacgcgaggaccacgggtcgtgaagcgtcttccctgatctctggccggctccataggacagcaggtcaagttgtaatgcaggcccatgcagccaccggcatcctgcgcccgtgcgcagaccgcgtgcgagacaggagcgaggaggaccaagagtgcccgcgccactgaagcactgagggcagcccccatgccatacagaggagagagcgactagcgacgaatgacagatgtcctaggctcctgtcaggggccacacgcagctgagtgctgcgatgacgaaaggggtacgggcnagacagaccgtggagcacactagcaggcctgggagccacggcatgcacaccaggctgcatgcatttgtccagtctatccacccgcccacccgcccgccaccccaccggcagcgtccaggtgcggggccgggaaccacacaccccactgggccggccacagtctggacccgcacgtcctgtctcaaaagcagactcgggaactgcctgaatgtggtttggnacacgagacctcatcatattgatgagcgtaaaccaaggcattcct

SEQ ID NO: 675812 - DNA, 100 bp, Homo sapiens
atgatttttgtttgtcctgatatggtattttatatctttgtttctttttttttactaccatgttccttctcatctcttttcccccttctgtcgtcttctc

SEQ ID NO: 675813 - DNA, 175 bp, Homo sapiens
cgaaagattaatatggtacactaagaatgactgggaagcaaagttcagtcaaagagatttgattattctgggtgtcagaaacatgttgtgacacaagtgtgtactaacactggacagataataattggatgtgttatctccctcctggctttggtgtgtaccccatgtatgctat

SEQ ID NO: 675814 - DNA, 696 bp, Homo sapiens
acatcagactccgtgtccaaagaatgccagataggagaggcagaaggaaggaaaacatcccgtgaaaagccgtgacgatagggcatcgtaaggagcctctgatagacagctgctcgtaggcatcacgcacgtttgaatgctggtggcttagcaggtgatggagcaggctgtccccctgcctgttggcgtggttgccactgcgcactctaagttatttcatttgtgtagttttgctacttgcagagtttttaaacgtcaaaagcagcatacgtgtaagccttttgcctcctattttgagtatcagggcattgacattttctttagcctggggattgccatgaacagtgtgatgttggaggaacattaatactggaggaagccttgagttctacgccatgttcagttaaagggatgcaatctgtccccggcacacattcatagagcctttcttccccgggcctcaggtttctcctttgataaggtggaagaaaaggactagatccttcttgtaagggccctatctggaacttaacaacattcctgaatggcccacccttgttcccattgatcctccgtgacctcctttctctggctctagcagttgtccagccatacaagcaggtgtccctgagactcaagactgatagcaggtttgcacaggcagggccggaatgaaatgttcaacactttgtttac

SEQ ID NO: 675815 - DNA, 683 bp, Homo sapiens
atgcttcatttgtatgtcaaagctttgactctataagcaaacttgcttttttccaaaacaaaaagatgtctcaggtctgtctctgtgaatttctctaaccatgcttctcagtgtcctcagaactgtagtcctctctacctgctgaagatgttactacagaccttaatattttcctagatagtatctatacttagatcaaatagttgcgtagcagtatatgttacactttgtgtgttctatatgctgtgacacaactgtgtgattaacaggtatactttagtagacatttataactcaaggataccttcttatttaatctttgtcttatttttggtacttgtatcatgagatgctttcaggtgagtgcataatagctacagtgccatagttgtatgacccacagtacattctggggaaacaacgatttagtattgtacgcctttactgtttgatataccaaattcccgaatagattgtactctcattgacttatactgggacaccattaccaaatataatacatgtcactttcatacattaggcttaaaaaccagatgcagttccccggacgtctaaaccaaaccacttacaccgttttcagggaccgggggctctactaaaggtctatgctctgaaactctgtggagccagggcacagtttcatggcccatcggttcgtagac

SEQ ID NO: 675816 - DNA, 355 bp, Homo sapiens
agatgaaaacacatttagaggctgccgctctgctgtatgaaagaaacgcagatgggcgcgttgatggaagaaggctggagactccttagcgcatcttaactgtagctagtcgttaccaccccactcccctgctgctgacttcgctggactctgtggccccttcaaggccgattgtgcgtctactgtcagtacaaagagcactctgaggctacgctacacataactgcgggagatgagaggtggcatcaacctcaggctgcttgacacctgactcagaaattatcaggttttgctcagatcgaagtcatcctaaactgctgacgagcggaggtgggagacatctcctctacgtatt

SEQ ID NO: 675817 - DNA, 134 bp, Homo sapiens
aacgtcactgtcatttaaattattccacattcacccagacttttatgccacgatctccaatagagatgccggggtttgtggatttgatctaggggcggaattctgaacagaacaggaagaatccagacggtggc

SEQ ID NO: 675818 - DNA, 226 bp, Homo sapiens
ttgatattgctagggaggcgcttccaattatgtgcttttgcaggtggcctgcattaatgtgagcggttaggcggacggtcaatgctattgactgaatgacccagctgatggtttctataataactaagatggggataaggggtgtatgtgtgccttgtggttagaaacggactatggcatttttaatcttatagcgaaagcctatattgactgcgccctttcataa

SEQ ID NO: 675819 - DNA, 333 bp, Homo sapiens
  misc_feature (23)..(23): n is a, c, g, or t
  misc_feature (76)..(76): n is a, c, g, or t
  misc_feature (139)..(139): n is a, c, g, or t
gggatcactttaaccctattacnccttacccaagctttttttttttggaaacagtctcaaagctgggagtgcaatnggtgccatcaataactcactgtagcctcccatctccctgggttcaaagcagtcctcctacttnagcctcccaagtagggactacaggcgtccaccaccacacctgattttttgaatttttagtagagacgaggtctcactatgttactaggctggtcttgaacccctgagctcaagtgatctcctgccttgggctcccaaagtactgggattatatgcataagccacagcgcccagcctgtcgctttcttttctttc

SEQ ID NO: 675820 - DNA, 430 bp, Homo sapiens
ttggctcagatgacaaacctaagagatcatgagcaatcttctcctccatgtaccccgtaagccactgacatagacccatcaagcccaagtcgtagtaaggtatcgttgtcaggaaggcagatcgggatgaggttgggacccatcgatgacactattttccacgctccatcaggccgattgctccccctcaaaattgtaggactctatcctgacggtagtccgggttgactgctgaccctgcggatggggtgatttcctagcttcatgacctcttccacctttgtgtggcccaggaacatcatcccatgtggcgttgttttgcgcttcgtgttccttgggattcagggtgtgggctgttgtgaggatccagcggtcgcccagcagggactcgcccccgcgcccgtggatgttggtgaacacctgccatgtg

SEQ ID NO: 675821 - DNA, 196 bp, Homo sapiens
aggcggactttagagaaccccctgttggcggcctgctgagcatacagcacacacacaaacgcacggtacacacacgcacacacatgcgcacacagcacacaaacgcacggcacacacacgcacacacatgcacacacagcacacacgcaaacgcacagcacacacaaacgcacagcacacacgcacacacagcaca

SEQ ID NO: 675822 - DNA, 219 bp, Homo sapiens
atggatcccctgctcttccgacggggtggttgatggccatgtagcacctatcaatgtatttgtttgtttgagatggagttttgctcttgcttgctcaggctggagtgcagtggtgccatcttggctaactataaccttcacctcctgggttcaagcgattctcctgcctcagcctcctgaatagctgggactacaggcgcccgccaccccgtcgggtgg

SEQ ID NO: 675823 - DNA, 324 bp, Homo sapiens
cccccggggggggggggggggggggggggggttttccccccccgggaaaaaaaaaaaggggggggtttttttccccccggggtggggccccttttttttttcgggggaacaatttttttgggggtttttttttttttccaaaacgcggtgggggggggggggaaaaaaaaatcttttgcggcgcgggggggggtttttttatttttttggggggggggttttaaagccctttggggggggggcaaaactccccccggggggggtttttttttttttcccccccccctttgggggggggaatttttttttccccggggtttttta

SEQ ID NO: 675824 - DNA, 258 bp, Homo sapiens
tgagattgcaacaatgcactccagcctgtgcgacagagacagactgtttcaacaaacaaaacacggctaccacctaattaggaggctcactaattaccagtgccccgcaccggcagtaccgtgcagtatcaagtcagacaggagaatacctctatcgagcctctgagagaatagtgcgtcgagaaaacgttccctgttttgcagactaaggaagaacgaaggggtccagaaaaggttcgaaaaggttctttgaggcaa

SEQ ID NO: 675825 - DNA, 564 bp, Homo sapiens
tatgatttgttgttccaaaaattaacccgtctagttatttttagttcagtggtttaatctggcctaaagcggcggggaaaggtatcaacacccctagccgacaaatcacccgatctaggctgagggatagaatggtccaattgggtgtgaggagttaaattatatgttgggctttttttagggaatgttttttttgcattgacccttatttacatggtggcagaactcttgcccaaaaatggcgagttaaccatctacaccaaattaaagggggtattttacaaaaaagagggccttaccggcccttcaaacagaaccaaaccttcgtacccgggaacaaacgcgcggtccgggggcacaccacactttcttttccagaaacccgaccttggttggcaaaaaacccactactttgtgggccccccacacaattccttcccccgggaggaacccaaccccttcggggctgtcaactttctctccaacgggaaaaacactccacaacctaaaaatctttggctccccaaacctcttccgccatttttccccacattttcctttttc

SEQ ID NO: 675826 - DNA, 331 bp, Homo sapiens
  misc_feature (70)..(70): n is a, c, g, or t
aagtagtcgacgagcaggtagtagatgataaacatgacagcatggtcttatttcacaggactagtccggngcttcgtatcactagctgttgccttttacacctgttcagcacctgtcctgtcattggcctggacttcctctctgtgcccgtgtgtcctcctggactggggagccctctccttccatagtcactttctctctgccaaaatcatttcttcttggtggcccaagactcttttcctgagcccctgtggaaacttcaggaaggattgaatcgtctttgtgcttcggtcgaacggtacgagccgatcgtatcatgctactgttctgt

SEQ ID NO: 675827 - DNA, 978 bp, Homo sapiens
cccccgaggcccgagtggagaggtggaagagcgccgggcccgggtctgctggaggcgtggcgcctgtcggaacgctgagagcgcggggctactgctgggcaggcgcgagttctgctgcagcatccgcccccggcgtgacctgctggtcgcttcctggctgcggggaggagaatgtggccgccgttgctgggactgctccgtgagccctggccttggcgcggtcgcgggggagcccctgggcctgcagctggggatgggggcgtttcctacacgcagtggccagagtccggagccgcgtgacccgcgagtatttctactacgtggaccaccatgggccatgcttttcctggaatgattccgaaacattgacagaatttcatcaccgtgcttcaaagacccgcagttcctggtcaccttcttcatccgcgcctgagaacccaaaccgcagagcgggcgcatacggagggccggctttcccctttcctctcggcccttgctggcagagagcggcaacttcctgcgctgcgaagaccggccggtggtcttcccaggcaccttgcttgacccggggaccaacgggccctccgcagcctctcctacttgcggcgtgtggcggaggcccttgtccctgggttggccctttcggaggccgtgtggtccgccatgggatgtcccgctttggcgcggcgcaatagtggtgccggccccttggttacccataccctggggcggtcctggtatgcggttcgcggcgccgggcgttggcgcgccgttggtttgcggccctccgggggccagtgtggccatttccgagggcgtcacggttggcacgtttgatattcggacgataacgggggtcgccgggtggtgccgcccatgtggcagtgttcgcccttcggcgacggtgttgcggcctttggcatgtgggcccgtgcgggccgttcgccgccttcatccactgtgtgagccgtgtgcgcc

SEQ ID NO: 675828 - DNA, 690 bp, Homo sapiens
gttattaaaaaaaaaaaattgggccaggcacggtggctcacgcctgtaatcccagcactttgggaggccaaggccagcggatcacttgaggtcaggagttcaagaccagcctgaccaacatggagaaaccctgtctcaactaatagtacaaaattagccaggcgtggtggcgcatgcctgtgatcccagctactcgggaggctgaggcgggagaatcacttgaacccgggaggcggcggttgcagtgagccgagatcgtaccattgcactccagcctgggcaacaagagcgaaactccatttcaaaaaaaaaaaattggtgacagactcaatgatggaatgattggtcggaattaacacaaagcagacttttattcatataatgactttttctcttaagagtctcttttttaaaaaaccttaattctctaaaaccgaaatggttcatgcttctttttaacaatgattgtttaacctgtttggaatggttagcctggtgtggtggtgcacacctgtaatcccagctacttgggagactgagacatgagaatcgcttgagcctgggaggcggaggttgcaatgagccaagatcgtaccactgcactccagcctgggcgacagagcaagacactgtctctctctctctctccatatatatattggggacggcgcgatatatatatatatatgg

SEQ ID NO: 675829 - DNA, 225 bp, Homo sapiens
tttaatgtgaactcttgtggcaaaggaacttaaatggaaatgggtgaggtaattaaaaagtcactgaccttaaagtgaaaactgtggggtagaacacacctactgcggtaacaatgtacctgggtaggggcttattggcaatttaaaatgcgctttgtgtttcttcgaccgtgcgcggaggcgaagaataacttgtgttggcgggtggccacttttgacgaaaat

SEQ ID NO: 675830 - DNA, 1256 bp, Homo sapiens
  misc_feature (266)..(267): n is a, c, g, or t
  misc_feature (285)..(285): n is a, c, g, or t
  misc_feature (768)..(768): n is a, c, g, or t
  misc_feature (1242)..(1242): n is a, c, g, or t
ccgccttgttgaaaacttacctgtggcccgttagtcgggcgtgcttgataggacttccttgagggaccaaatggaacaatggagtgttgcccctgtagtgcttgcgaccaacttgccggacaaagggagagccctcaaggataccgagcaaccttgaagcccacggatcagcccaaagcgctctggcgtgcagtcgaagatggcttggcagtactactaggtagcttcatcccctagggcctcgtcttgcccagagccgatgggcnncacctagtggaacagacngtgtcagtttccttcgtagcttttcttgctcttcaatacagccctgtctggagaacagtcgtgaactggaacttggcgcattcaggcgccgtgcgttgggaacattccgcacgatcgtgactcgccttgtcacatcgcatacagcgacgacgcaggcacatgttcctatcagcgaagaatgttcctatcgacgactaggctagcaagtgaagtgcatagtttctcatgtcgctgctgatgtgtctcgggaaaagcccgcgtgttgtccctagcgctcaacgccacagaagtaccacagttcgtcgacttctgcgtccatcactgtgtcacgtgatgaccacatcacagaagcactacagtcagatccgtgacgccagccgccgtgaccagtgtcgaagaggcgagccaaacatttcaataggtcagacgtcagtacagcgacgcatgggcacccaagaactagcattacccaggcaaggtccnataagaagtccctgagccatagggtccaatatgactaggagcggacgtgcgcagaccgagcacacagggcccgtgcgccatacacagcaaggtgactgcccacgagggacctgagagggaaggaagaacccgatgagaaaacgtcctctcattcccagctcctagacttactggatcgtgagattcatcacgagtcacaaggcaccactgtgctaccagagcctgaggctagtggtctaccctacagcggagatgccagagacctcaatagcaccaatagagccaatccatgcagatggacgctgtgtggagatgctccaggatgacgggatcccgcacaagctcccatcagtccttcagggctgggcaatgtggatgatttttctaaagctggagaaaggaagaattgtgccttgcatattacttgagctaaaactgacaacctggatgtaaataggacccatctactgcttnattaataagtctag

SEQ ID NO: 675831 - DNA, 111 bp, Homo sapiens
  misc_feature (10)..(10): n is a, c, g, or t
ttctgatgancaaagtgccacggcagctgttccgcccgaggacccgtgttggaccacaccattatgcttctcgcctgatacgagaaaaacacccgcaactggtacggcggg

SEQ ID NO: 675832 - DNA, 271 bp, Homo sapiens
taactactactgacaaccagcactgaccaccctcaaagcttgcggccctcaactccagtcctcgatgcaatctgcaaagaacggctgtattaggcccattttacagagtgggaacacaaaaccaacaccaaagctcagagaggttaacagcttatcaagggtcaaagattgagcaagaaaagtgggaagactccaaaaaccaagctcttcccattataccagacatatttttctcgcagactttttctaaagatatagacatctctgaggc

SEQ ID NO: 675833 - DNA, 191 bp, Homo sapiens
tggcgaagtccttcccctgttcaaggcgacgcgggagggagatgcgctttcagtgaacccaggtactaacagcacacaacggctagtagcccggagaatgctacgaaacagctagcaagccttatgaagacacagataagaccagaaaggagaaactggcacttcgacccaaggcccggggtaccgagctc

SEQ ID NO: 675834 - DNA, 491 bp, Homo sapiens
  misc_feature (187)..(187): n is a, c, g, or t
  misc_feature (189)..(189): n is a, c, g, or t
  misc_feature (198)..(198): n is a, c, g, or t
  misc_feature (217)..(217): n is a, c, g, or t
aacgcgtgctctgagatctacattcacggcttgggcctggccatcaaccgcgccatcaacatcgcgctgcagctgcaggcgggcagcttcgggtccttgcaggtggctgccaatacctccaccgtggagcttgttgatgagctggagccagagaccgacacacgggagccactgactcggaattttntnccccccccngccccaaaccaactcagcncatccacatccgagtcttcagggtcacacccaagtaattgaaaagacactcctccacttatcccctccgtgatatggctcttcgcatgctgagtactggacctcggaccagagccatgtaagaaaaggcctgttccctggaagcccaaaggactctgcattgagggtgggggtaattgtctcttggtgggcccagttagtgggccttcctgagtgtgtgtatgcggtctgtaactattgccatataaataaaaaatcctgttgcactagtaaaa

SEQ ID NO: 675835 - DNA, 143 bp, Homo sapiens
tatctctggccccctcgtgttgatgcccccatgttcatcatgggtgtgaaccattagtaagtagtgacaatcagacctcaagactcatcagcaatgcctcctgcaccaccaactcgcttagcaccccgtggccaagggtcatc

SEQ ID NO: 675836 - DNA, 457 bp, Homo sapiens
gggtggggaggcaggcggggttggggccacgtgagcaaaatcccagtgagcactgatgaacacctccacttgcctaccagacagctgtgtgactgagcccgaggaggcataactagggcccccatagaatgcagaacaggggcgtggccttaatgctccaagcccattggtcaatgacaaagatgaaagggaaagggggtgtggccaggcagcagtatgtccagagggacctgtggctcacaaggaaagctgtccatgcaactgctgtccccgcctactctgaggggaggggccgccccctctgggagaggggaggggccgccccctctgggagaggggaggggccgccccctctgggagaggggaggggccgccccctctgggagaggggaggggccggcttttgctttaaaagctttaaaactttaaaaaatatatgtgtgtaaactttaaaaaa

SEQ ID NO: 675837 - DNA, 229 bp, Homo sapiens
  misc_feature (21)..(21): n is a, c, g, or t
ctcttgtcgccctagctgggnctacaggcaccagccaccacgcccggctaattttttatatttttagtagtgacggggtttcaccgtgttggccgggatggtctcgatctcctgacctcgtgatcctcccgcctcggcctccaaagtgctgggatgacaggcgtgagcaccgcgcccggcctacttgtgtattcttatagcaatccgcacattgggtatgaacttttca

SEQ ID NO: 675838 - DNA, 434 bp, Homo sapiens
gcttgaactcaggagatggaggtttcagtgagcctgagatcacgccactgcactccagcctggcaacatgagcgagacgtccatctcaaaaaaaaacaaaaaaaggttaaagaaagagaaaaggagactctcccttttaagaattggagaaagagaaaaatctcatataaaatatatgtgtgacgcgctgtgaatgtgccctgtgtgtatatattgaggaaaattatagagcgcgtgttcccttcgaacacaggccgtgtgtccctatatgcgatgttgtgtgagtgtgtgtatatttgtatgatagtgctctctttatatatctctcttcctattctctcttgtgttatgagggggtgttggtgaagaagagagaacagcacaagaggaggattatacccagagattttgtgtggagaaagggggggagaatt

SEQ ID NO: 675839 - DNA, 455 bp, Homo sapiens
aaaaaaacatggtgcagcagctgttttataatcacgtgaatagaaaaaaaaaaatatggaataatgaataaaagaaagattgaaaaaaataatgaaataaaaaataaaaactttgggggccgcctgggcccatgctattttaaactctaccaagtttatgcatgcggccgaatttcgggctcatttggccaattcgccttatagggagtcgttttacaatgaatgggccgtagtttaacaacgtagaaactggaaaaaccttggggttacccaattaaatcgctttgcataaaatccccttttagccatatggcttaatatccaaaaggccctaaccgatcgcctttccaaaaagttgccaaccctgaatggcaaatgaaaattgtaggcgttaatatttggtaaaatttggcggaaaattttggtataagcccttttttaaccctggcctgggg

SEQ ID NO: 675840 - DNA, 791 bp, Homo sapiens
gggcttgcgtgtgttgtctcggtgtgcgcccggctggtcgggcgaggcgtgctggcgtctacttcccgggctgtggcctggggctgcctctgatatccccagccgggctccgagctgcccttgcaggcgctgctcatggtcgacgagaggacattgtgagaaggggccggggaggccagagtagtggctgacgatatctggagcgaggtggcaatcgagaaattgggcggattgatctacttccaggaaggagggcgcatggatggatgaacctatcgtgtgacgaggaagccgattgatacgatttgtaggggcgtggtggacgtgcgaggttgtatgggtacggaaaacggcgctcgcgtcaataggtctgcgtagtattcgaccatgcgatgccttagggcaacgggtgctcttccggagtgagaaatgcgttctagcgttagaagggcagggaatgcgctgggcaaagggactagggcgtcacatgggaggttggggtaagaacagggagattcagacccatttgggtccttagtgaggggagttcgtcccaaaaagcaaaacgcttggggagtatacgccaacccccccgccgttgggcgcaaatggagagctttctcgcagttggctcccaattcgattggggcaattcgttggggtagcccaatgtgttccctttgggggaatgcccggggagttcctttcacgaccgctatggtgactccgtccttttccaggggagtggtcgacctggtgggggccccattctttgaggaggtcacttcctc

SEQ ID NO: 675841 - DNA, 950 bp, Homo sapiens
gcccgccacatggtgtggccatcactcagcccctacccctgccctgctcctaagggtagaaaactccaggttcccctgccacctgactgcccatgccactccaatgccccctgtgcatgctgccccttcctggatgcatgaaatgtgcctttatctcatgccatcctgcatgacttgcttgtgcatgatgcgtgggacatggctggaatgacgtggcaggcgtcattcagtcatccctgtgccatccccactctcacggccacacccactgcaccccaacctgggactgcagatggtgctagcttggatcgcagcctgcggaatcattgaactctgacgcgataacaaccgcgaagcgacgacgcactgacccgccgtaacacccacatcaaatcacccacacgatctcacgaccaacagcgctcatacacgggccacgctgacggtcctgagctggcacagcgacgcctgacgcggcagcggcacgtcccatgcgacacggctgcccaaccacccgcgcaccaccatgtctcgcggcccgcgcgagccgccaccagcttgcttggcgacacgcgctgcacagcatctcgccgcccctcgcgctccaccgccacgctggagaccgctcgacgcgcctcgcaccccgtcgaatggccccctgacccccattgcacccccacaacgcttcgacccccacgcgccaacacccctcgctcgcctcgcttgctcggtccccactctctagtaactctgcgcgcctgagtcacgagattccttgcgcccgtcggaccgctacgcctggtccatccgcgcgactctcctggcgcacccaccaacggaaccttggggagccctacgcaacccgctacaaccagtccccaactttggcccgcgcaccgcccccagcacccaccctacccttgcaccacacccaacccccccactccctg

SEQ ID NO: 675842 - DNA, 222 bp, Homo sapiens
  misc_feature (23)..(23): n is a, c, g, or t
catagctgagacactctcttaanatccaccgctacaggtctcctaaaaattaagagagtgattgctgttgaaggagatattgtcagaaccataggacacaaaaaccggtatgtcaaagtcccccgtggtcagatcatgatggacacagttttgacagtaattcttttgggccggtttccctaggacttctgcatgcccatgcaacacaggggcttggcagaa

SEQ ID NO: 675843 - DNA, 124 bp, Homo sapiens
tctggctggctatggaaagcctggcagtatggagccgggagtggagggcggtctgactgtgagtatggcagtcagtgatgcccatgactgtgcagagagcgagggcttgtcctgagctgtggct

SEQ ID NO: 675844 - DNA, 243 bp, Homo sapiens
  misc_feature (204)..(204): n is a, c, g, or t
tggtgccctcagcatttcttgttttcatacacaacagaggatgccccccctgcgatgtggaccaaagtaattccagtgttggaggggtgcatcatccaggcacgtaggggtcttcctggggcagtggaggagggtggaagtctggaaggccctcttccggggtgtgcatgtatcctgcccccgcggatgacccagagtactggngatgtgatccgcgggaagcggtggtaggcgagccgcgcg

SEQ ID NO: 675845 - DNA, 218 bp, Homo sapiens
  misc_feature (218)..(218): n is a, c, g, or t
gcatgcaggtcgacctctacgacgactccccgtacactacactctgcctgcctcacgcctcccggacgtgctggtattatcggtgtgagccactctgcctggcctgaacttctttttttttttttttttttttttttttttttttttttttttttttttttttttttaatttttttttttttttttatatttttttattattttttttttagtttctn

SEQ ID NO: 675846 - DNA, 509 bp, Homo sapiens
  misc_feature (128)..(128): n is a, c, g, or t
tttctatgagatatctgtgcatatcagcatgtcatgcatttcactctagattctgttgatctttgtattattcatctctttgttaattatctgatagaatctgactccttctctgtgttatcctgaanttctttgagtttcttctttgagttcctcacaacagctattttgaattctgtgtctgaaaggtcatatatctctgtttctccctgattggtccctggtgccttactaagttcatttggtgaggtcatgtttttctggatggtgttaatgcttatagatattctttggtgtctgggcattgaagagtttggcattgattttaatcttcacagtctgggcatgtttgtgtctgttcttgggaaggctttccaggtattcaaagggacttgggccccaagcccaataatagtgtggtttttgcagactcatggaagtaccaccttggtggtcttggatacgatcctgaaaaattctctgaattactaggcaaagactcttgttct

SEQ ID NO: 675847 - DNA, 120 bp, Homo sapiens
  misc_feature (20)..(20): n is a, c, g, or t
aaaaaggggggggtttcccnttttttttggcggggccaaaccccccccccccttgggtttgccccccccccgggggggatggctttcccccccctaaaaaaggcccttttttccgggtta

SEQ ID NO: 675848 - DNA, 252 bp, Homo sapiens
  misc_feature (187)..(187): n is a, c, g, or t
taccgggggggatttcggggggcccccccccccccccgaaaatacaaaaaatacaaggggtgagcaaggaggcggggtcactaaacccccctgcctttgttggtgggaatcaaaaacggtaaccccccctggaaggggtttttgcccccccttgcccccccctttagaaagtaaaccccccccctantgaaggagtagggaccccccccgggtatttcttttatacccaagaaatataatttgttctctcca

SEQ ID NO: 675849 - DNA, 103 bp, Homo sapiens
aattcagtcggcctgttacatggtgcggatcttgggaacagaactgttcagagtgaatctaaagtctgattttagttttcagagacacagctgttgtaactgg

SEQ ID NO: 675850 - DNA, 325 bp, Homo sapiens
ccccgatgtctctctgtggggtggctccgtgcggtgctggcccgccgcccgccctaccccccaagcagcggcagctggagccaccggctgggaaagacgggcatcccagagatccctcagcggtcagcggcgttccctgggaagggacgctctctctgatggggatgatacaactctgccagcaggaggagaggtatgggcaggtaggtcagcgtgcatcactatcacagagaagaatttgaatcctcactagaaaggggtaccatcctacttccagcttcatactatccctatatccaacagacatgagacgctgcagcatttt

SEQ ID NO: 675851 - DNA, 985 bp, Homo sapiens
agcgggtggctgtgcggtcccggattagctggctggcatgggacggttgagttaggctacgatggcggccgcgtgcggctgtgcgtgcctggctctgactctgtgagtgcggctgccttgtcggtagctgcagctaggctagcggtccaggctgagctggccgtgccagccggcgctgaggcagctagttcattccccgtctcaggttgacctgtacctgatggccctgtctgccgggctcctgggcggctgggagcttggccgagcgtcccccgagtgtgctagccgcgtgcggagtccttggcccctattggctgaagacgctgcgtgctatagccggacttgcttgctgtagccccattgcgttggacctgactcggtcgcctagtcccttggagtctcgtggctcgttgtatcttgcccttgtcttctcgaagccctgcattgcgttgggccagctgcctgttgcgagtttgcttgcagcaacagcggttgcgggttgctgacgttgccgtgggttccgttcagccagagacttgccgaagttagccattaggacccttcaacgggacttctgcgagatttcgggttcttgcttgccgcaacgcggagggggattccaagtgtgcctgtgcaactgaatcaaagagagcctcaggtgcgtacatttgcgatcgaccaacgttttgccatctgtggtgaccacatgaagggttgctcatccacctggtcttcagcctcaagttggaggcagtgcaaagctcaatcccacgaacaacaagggtatgcacatgttcctcaatctacgcggcgagtaccgaacgaagttaccggtgcggagcgtttatccttgggaacgcacattatgaggcggcactctggggcaacacagtctaaagccttagcagaagttataccctttattttcccatcgcaaagaaaaatggtcaccgcgcaagcttgtgccctcaccttgtctccagag

SEQ ID NO: 675852 - DNA, 645 bp, Homo sapiens
taaaccctgagtctgctctttaatgtgacaccgcccatttgttttgcccctgactgaggcggaaacaggaggggttctgggaaagtggctgccactgtgggcctgggttgccgcacagtcgtgcctccctgtggggacagaaacccacagggtctcgagcccgtgaaggcctcctcctattccaggaagggccacaacttagcagccgcctgcacctcctcagcccctgtgcagggtcaccactaggctggtttggacacccatttggcacaggcccctttatatttggtgcccgaagcgcagacatcttgagccgtccttgagaaggtccgaaggtccctgtgatcaggtggtcacacgggcggttgacacatgccgttggagtccacaaaagcttacaaccccctcaaaattgcttagacacgcataaaaaccaggaacactagcactagtttgtgaattgaaactttacatgtcatccccctcttgagcatccccttaaacatcttgagtatccatggagaacctcgtgactcatttcggaatactaggtatagtgagtgagaaaaccaaacatttcgccactgaacagacatcacatggccatttagttcccagacaccttgcaaacctcctttgggacat

SEQ ID NO: 675853 - DNA, 261 bp, Homo sapiens
agaggtgcatagtatttgagctctgtaatgtcgggtcgaagtagcgtatgatgggcagtggaggcggcgaatatgcatcctaggcctataatatcggagtatacgtagcggtaagtaaaaaccggtactctagaatatagtagagtggaaatttaaagcgctgatatcgatcgcgcgcagatctgtcatgatgatcattgcaattggatccatatatagggccggggttataattacctcaggtcgacgtcccatggccat

SEQ ID NO: 675854 - DNA, 323 bp, Homo sapiens
cgtattgtctttgtatatgtattcattacattatctcaagaatctcgtctccaccttgttgagaaatacccacaggtgtggaggggcaggccccctccaataactaaaatactaaaatgctcttggtgaacattatattaattttggagacagtctcactctgtcacccaggctgaagtgcagtggtgcaatctagagctcactgcaacctctgatacctggattcaagcaattctcctgccttgtgtctccttgagtagctggaactacagtgtgcctgacaccacgcttggctacttttccgtatcttcagatacagacca

SEQ ID NO: 675855 - DNA, 109 bp, Homo sapiens
ggaccctggtttgagcggggtttgcagcggaatcgggggttgtgttcgaattcataagaacaggcaggttagaagcaggctcttggtgaggggcaggatcttggtgagg

SEQ ID NO: 675856 - DNA, 90 bp, Homo sapiens
ggagtccacaggatcagagtggactttaaggattctgtttcactgaggccatctatccgatttcaaggaagccaagggcacatctccatc

SEQ ID NO: 675857 - DNA, 120 bp, Homo sapiens
tcatcgcatacagcgcttcgaccaatcgccaccagaacacttttgtacacctgtcccctctgccttcaagcgacagatccacgatcggtgacatcgtcgatcagtggcgcgacgtgcctg

SEQ ID NO: 675858 - DNA, 262 bp, Homo sapiens
agtgtcttcaagagtattaatttcagagtgtcttgcctttctttgttagaatgattcctatattagctattgttagaatggtactagcatagttgagaacatttacaagaatctatgtatctatctatgtatctatgtatctttctgtctgtctatctcactatctattggtgattgattgctattccagccctatttaagacagagggatgtgaataagagtatttacatcaacatggccggtatctcttgaaagaacact

SEQ ID NO: 675859 - DNA, 217 bp, Homo sapiens
aatccctgcacgaacacagaggattatctcttccaagttattttgtgaataatcaaattcgcataccactttctctgtctgtaaaagctgcaagtgttctgaagagttttctttaataacgaccctaaggaacgattgggttgtcatcctccaacaggatttgctgatattcaggtacacccgttcttccgaaatgttgattgcggttgcacgtcag

SEQ ID NO: 675860 - DNA, 411 bp, Homo sapiens
agtcagcctggctaacagactgatggaactcttatgcctgccaataagcaaagtgttgaacacgttcacaaaactatttatactagagagcaggcttgaaaagagctatacagaatcatgttctggaactcagcaaaccatcaggagctcgtaagtgagctccacgaaagaacttcaagcaacagatgtcccgtcgatgatccatattacggatataattctatatgtcaacggaggagatgaaaaaaaacaacatcccagagccagttgtcatcggaatagtctggtcaagtgtaatgagcactgtggaatggaacaaaaaaggggagcttgtagcagagcaagccatcaagcacttgaagcaatacagccctctacttgctgcctttactactcaaggtcagtctgagc

SEQ ID NO: 675861 - DNA, 330 bp, Homo sapiens
ctctgacctttggcctggcagtgccgagtggctcatgcctgtatcccaggctttgggcatcccaggcaggaggatggcttgagcccggcagttcaatgaccaacctgggcaacacagcaagacttgtctctacaatataatttgtttttaattagccaggcatggtggcacatgtctgtagtcctagctactcagcagactgaatgggaggactggttgagcctaggaggttgaggctgcagtgagccgtgatcacaccactgcactccagcctgggcaacagaacaagaccctgtctcaaaaaaataataataattgtatatatcctaa

SEQ ID NO: 675862 - DNA, 387 bp, Homo sapiens
  misc_feature (294)..(294): n is a, c, g, or t
cccgcgggtctgtctcttgctttaacagagtgtggacggaacagatacggggactctcttttagactccgaccgccctccgattttctctccgcttgcgacctccgggaccatcttcttgggcatcttctgcttctgggacctgccagcaccgcttttgtgggtaggttcttcttgtcaaccaaccatgagcttccagattcgtcagaattatttcaccgacgtggaggcaggcgtcaacagcctggtcaatttgtacctgtagggctcctacacctacctctctttggggttntatttcgaccgcgaagatgtggctctggaaggcgtgagccacttctttctccaaatgtgcccggagcgcgagggctaccaacgtcttctggat

SEQ ID NO: 675863 - DNA, 234 bp, Homo sapiens
  misc_feature (121)..(121): n is a, c, g, or t
  misc_feature (127)..(127): n is a, c, g, or t
acaacctgaattactcaacaaacgaaggttctgcatcatccgtagcaggttgagaagctgaactttctgttgatgagcttgatgtggatttacccgcaccgccagtaataaatttactgantaaatnttctaaatccattgtgccttgagtgtttgaaacgacgtcaccacgtttcaagtagttgacaccaccacctggtacgactttcaaatatttttcacccaataagccat

SEQ ID NO: 675864 - DNA, 1047 bp, Homo sapiens
gatccgtacagcgcgggtcagttctctgtgagacagcgctactcattaatctccggtctcgcgcgttctctcctaccctaaggtgcgtgcgcgtgcaccctgatggaacatgctgactgaaccagtgtgcacatctccccctgatgccccagagcctagtcttaacgatgtgctgaactacacggccgacaaagattatcacctcttcagtgtgtggactgactgcacttgacacaatgagcacccagattagtgctccgaggaacatgtcaggaatcaccagctgtctgtcgatgggtatgaggacccagcacttgttggagagacgagatgggcacttcgatatttcagagtggctaggtcacaaaatctaccatgttagactaactgaactaaaccttatggacacaactcgatctggtaagctagcacataccggatgtatcccatatggaatgggcgtatggagacatagacaactcacccatgtggggtcctttgcacggtttgaagagtgtgagcgttgcatagggggcccaggtagcaatgtattcaaaattggcaccttgggcactttcaagtcatgactctgatgaggacacgcaaagcattcgaaagcacgttccaattacaactatttggaaccttgaacgagaaccgcgtagcagcattggcatgagtagccgccctttcttactgttgagtaaaatccattgacgccaaaaaggccaacgttcgtggctccgcgcccgggatattggggcttcgtgtgacgacgcgaacgggacatttcgcaacacaccgtataacacaaacgacgttggttagcaccagtatcctttcggtttccggcgtttggggcgttaggagaggctttactcgcacagtggaaacacggcgaatttgcatctggaaggttgtatcccgccacgttggatcttccaatgggcttacttggacggcacttggaatttggcgtaagaacagagagaaacgaggccccctttcccaaagggattgggagccccaggggacggaattggaaac

SEQ ID NO: 675865 - DNA, 900 bp, Homo sapiens
tagacaggcaggcaagtcgtcagacaaccgatcccgtgggtaccgtgtgtggctctgccgggggccggggcttcttccgtgggggccgaggactggggccgtgggttctctagagtgaggaggggaccgaggctatgttggggaaccgggttcgagtccagtgagtggggtgctacggaggctccagagactactatagcagccggagtcagagtggtggctacagtgaccggagctcgggcgggtcctacgagagacagttacgacagttacgctagacacaacgagtaaaagacccttcctgctcaagatcgtccttccaatggctgtgtgtttaaagatgtgggagcttcgctgaagcgttaatgtgtaggtaaatgcatcctccttgtattcgccacgtttcgtagtcagtttcggtatctgatcttgtcaaacccagccgtgagccgcttctgacgccgggatggcctcgttactagacttttctttctaacggaagtgctgtcagtgggagggtctggcaagaacatttggagaggcatttacttgtttgaccaggagccatgagtctcaaaagaaatcgggggtgtgtgggtacacgggtatggcgtgaacgtgactgggtgagcgtggccttgttgactcggcaggggggtgtggccccatagaagttggggtgcgcaacgttcagtttctcgggagatcgggagggaggggtgattcgcgcctttggtcggatgctggcaagctcggggtttttctacccaactccgtggtgacgttctgaatgtgggtgtggggaggacccgggggggggtggccgacctgggcttgggcccagcccttgggtccactcggggagcgatgggttaaattggcgcgttacggcggaggtca

SEQ ID NO: 675866 - DNA, 286 bp, Homo sapiens
ctggcctgccttagagacatgactctggggcccaagcgatacctgtctcagcctcccaaagacactggaattagagccgcaagccacttagacaggccctgtaatggagtatactctcagaattaatagtccccctgaagattcagaaagtctgaattagtagtcactacattatgatgattgagtaaatcatttacacctcagtgcctcccattttgtttatcacgtaacagtgactaggcttgcatattcatttacaagcggataaacttctcatgattgtaga

SEQ ID NO: 675867 - DNA, 806 bp, Homo sapiens
cagtggaggacgggtctcaagctcctctctgtggggtgggacctgcacctcaaaagcgcgggggggctgcccctggctgaggggtcctggctttggcatgtagcaggcctgtggctgtcacctggccaggccgtccatcctggtcagtgtggccctggtcatcagggcagccccgtgtccaggtgctcagggaaatgaagtggccatggactgtcaggacatggccagggtggacagaccaggagctgaagtcaaagggtggaaatgtttttaagtgtggtcctaggccagggaccacgggagccaggctgacactgtgggtgaggggaggccatgcttgcttagaagatggattgctggccccctctttaccccaaaattgaatcctggggtgtgggagggtcaggggcttcccatgcagattggaccaggaatgagcacagaagggaagaggagaggcaaggaaacacgggactcccctagtccataggcttgttctttgtcctctttggaaacaggtggggctgggggtgggaggaggggagaggcttcactagcccagaaccccagtctcctcttttggctctaccagaggttgggcctgaatcagtcccaacagccccaacagggtgccagtgtttggtgaaaccactcaagttcagtggtttagtagtttctaaccttggttctaaaacatacatgtggatgcacagaaaaagctgatatattagggtagagaatttgtgcatgacttttgaaatgtttcctttaattatatatcatgcagttgaaatgaaaaaaaaaaa

SEQ ID NO: 675868 - DNA, 470 bp, Homo sapiens
ggtaccgaaaatgacatagaggcaggagaatggattgaacccgggaggcagaggttgcagtgagctatgatgtgccactgggctccagcctgggtgacggaactagaccctgtctctaaaaaaagaagaagaggtgtgtatccttctaaatgataaaacagatcactcccctgcttacataaaactttccggtggctggccaggcacggtggctcgcgcctgtggtcccagcactttgggaggccgtggtgggcggatcacgaggtcaggaaatcgagaccatcctggctaacgtggtgaaatcttgtctctactgggaacacaaaaaattgacccaggcatggtgactcatgcctgtggtccagcactttgggatgctggggcgggaggatcacttgagcccgggagtttgaggttgcagtgagctatgattgtgccactgggctccagcctgggtgacggaactagac

SEQ ID NO: 675869 - DNA, 3293 bp, Homo sapiens
atcttgagatcatttatggttttgcaattcaacctgaaaaatgaagtcaaagcttttatcaaaacaaagcatgtttagtgctctctgtctcactgtcttttagatgccagaccttagattttgtgatgactcctcaaccgtttagatctcggttatctcagagggatcatcagctttttaagaaaattttgagagaaaagcaagtgaagaaaagagtagtcagtgcccaacatcacggatctctcactgaacacaccatgcctggtattctctcacagtgatgtcaccatttctacctgccacgtatcggcgaaggttgggactcgactggtgtttgatcacgatgggaaaatcatccagaaaaccccctacccccaccccagagggaccacagtcagcgtgaagcagttattttctacgctacctgtgcgccataaggaatttcaaaggaatattaagaagtgagtgagcgctcatgggatctggttgtttagaagcatgcagcacctcctgcttcactctctctgtctctcctgctccaccatggccagaaacgtgcctgcttccccttcgccttctgccgtgattgtcagtttcttgagggctccccagccatgcttcctgtacagcctgcaaaactgaagaacctgctaaggccatcaaacctattgatcggaagtcagtccatcagatttgctctgggccggtggtactgagtctaagcactgcggtgaagaagatagtagaaaacagtctggatgctggtgccactaatattgatctaaagcttaaggactatggaatggatctcattgaagtttcaggcaatggatgtggggtagaagaagaaaacttcgaaggcttaatgatgtcaccatttctacctgccacgtatcggcgaaggttgggactcgactggtgtttgatcacgatgggaaaatcatccagaaaaccccctacccccaccccagagggaccacagtcagcgtgaagcagttattttctacgctacctgtgcgccataaggaatttcaaaggaatattaagaagaaacgtgcctgcttccccttcgccttctgccgtgattgtcagtttcttgagggctccccagccatgcttcctgtacagcctgcaaaactgactcctagaagtaccccaccccacccctgctccttggaggacaacgtgatcactgtattcagctctgtcaagaatggtccaggttcctctcctccttcctgatgtctgccattagcattggaataaagttcctgctgaaaatccacatctcccctgggtccggtgttctggaagtgagagagacaatgtcacacttcaaggaggcagctctctagacaggaaggttattcacgtcccatgtcaagtctagctagagttcagagcaattgagaagtgcaattttatctcctgcctttcattctataccctgcttctgaaccatcgtgttcaactgtgaaactcacactttggtgaccctgactccaaaacttaatacacccaaggtcagccccagtgatctgcttcatagcaaggactttgggtgggtcttcccagggagtagggcaccctcagagaatgtggctttggacttcatcacagctggggccttttgtgtcacttcagatctaaacttgtaaccgtgctagatctgtttctaatgtgacaacatcacgaaccacgagtccagaagcctaatccataatcctacctcctcatgacgaagtctcatgctctgtgctcaacatggttagctgcacaagatgtaaaccaaagcttcactgaaccctcgacccaaatcggtaactcaagtgcatcaatcataatgaacctccccgaactcagtatttatgattatttttgaggcagggtctcactctgtcgcccgggctggagtgcagtggcaggatcagggctccctgcagccccgacctcccaggctccagcgatcctcccgcctcagcctcctgagtagttgggagtagagatgcctcccacatcgcctggctaatttttgtatttttgtggagaggggatctcgccacgttgcccaggcttgaagccagatcaagcaattgggttccttcggatttccgaaatagaccccaatattctgcctttaccccggaggatgcagatgtaccttctctcaggccgatgacctcaggcctccacggtccctggagctctaggaaaggtgagcgcgatctcgcgcccacacccagtgctctgggtcataagcctggatctggaaaaacaaacgccctttgagaagacggggactccccaggatacccctctctcccctcgtccagcctccagcccacccgattcctccccacatcctccacctccccaggccccacccacctcctccaactcctccagggaaacccaagccctgcagcgcatggaacagaagaagtggaaccgatacttccggaacaaggctatctgagagcagttcttcctggccctcgggttcatgtaacggcataactggaaccaaagctcactgagcaagggtatatgagagcgggtctcctcgtacaggaagtagaagatgttttgtttgggggcctcgtcgtcctcctccatgtcattggccagatagctgaggacagaaatcaggttgctgctcaggggcaccaccaggagagacctccggctgaggtcagcttcccagagaggaaggtaagggaccgtccctagctcaggactggcacccaccctgcagagagccacgccttcctcaggagggctctgctggacagagacctgatcaagggcgtctcccactccttcaggatggagacaaaaacccaactggtggccgagagtggtggcttatgcctggaatcccagcacactgggaggccgaagcaggaggatcacttgaggccaggagtttgagacgggcctgggcaacatagcaagaccctcgtctctattaaaaatataaaaaatacgccaggcgcgtggctcatgcctgtaatcccagcactttggaaggctgaagcaggtggattgcttgagaccaggagtttgagaccagcctggtcaacacagagaaaccccatctatactaaaaatacaaaaatcagcctggtgcggtggcacacccattagtcctagctactcaggaggctgaagcataagaattgtgtgaacccaggaggcggaggttgcagtgagccaagattgggcccctccattccagcctgagagacacagcaacactcttgtcttgataaataaataaataaataaataaa

SEQ ID NO: 675870 - DNA, 249 bp, Homo sapiens
  misc_feature (12)..(12): n is a, c, g, or t
  misc_feature (55)..(55): n is a, c, g, or t
  misc_feature (58)..(58): n is a, c, g, or t
  misc_feature (68)..(68): n is a, c, g, or t
  misc_feature (98)..(98): n is a, c, g, or t
  misc_feature (110)..(110): n is a, c, g, or t
  misc_feature (113)..(113): n is a, c, g, or t
  misc_feature (123)..(124): n is a, c, g, or t
  misc_feature (188)..(188): n is a, c, g, or t
  misc_feature (201)..(201): n is a, c, g, or t
  misc_feature (216)..(216): n is a, c, g, or t
  misc_feature (221)..(221): n is a, c, g, or t
ctttaaccctanaaggtggggacctggggggagggacagggcaggcgggcccatnaanaaagcccctngttgcccagcactgtttgggtttgtttttntgtgcccagggnggntgccagcccnntgcctcctgcctgggggggcctggccctcctggctgttgcgacgcgggcttttggagcttgtcnccattggacagtntccctgatggacccncagtnttttcatgaataaattccttcaacgcca

SEQ ID NO: 675871 - DNA, 3726 bp, Homo sapiens
  misc_feature (1511)..(1511): n is a, c, g, or t
aataaaaattaaaaatagatgtagatgctatgttgctgaggctggcctcaaactcctggcctcaggtgatcctcccgccatgacctccaaaaccacagggattgtaggtgtgagcactgcacccagccttatgtttttttctacataaaaaacagcacaggattatcttccagagctaataaatatgttcaaataaccacaaccccattaaggaaaaatatcactgggcagcaaataatcaatccagaccaatatgatcacaattgctgtgaaggtgagaaaagttcatttttattatgtttccccaagagacgcactctattgttctcttgaaaacacacagctcatgtcctcctttagaacacacatcctctttaaagtaacatacaaacatgccaaaacaaggtaaaaaattacatctgaattctcacatttcaaatatatatgaaatatcaaataaaaatttatttttacaagaatttaggggaactactacatagctataaatgtaatatatatgttaactaagtatcatagataaaaaccatgctcccttcagcagcacgtgtaataatagatacaaagattgaaaggtaaaagatttaggatgaaaagaatcctctcttaaaaaggaaaacaaaattatatgtatgtgtatataacagttataatatccatcacacagctttatagaaacagcatctattcaaaaataccagtatttccaaaatatttaaaataatatttaaagtaataataatatttaaataaataaatatatttaataaatatttaaataaataaaataatatttaaataattctatacccatgtttttcaaaataaaccaataaaatagatagtatatattagacgtgttagtatatatatctgaggcatgttaaaaatcacaactgaattctcacaattcagtcacaaacctaaacagcaaataaaaatttctatcaccagaattatgtttttttctggtggggaactaccaatagctataaatagaagagattattatggaagtatcatagataaaaagagtgctcgcttcaggagcacatgtaataatacagaaacaaatttaaagataataaaatatttaggataaaaagaattgtctcttaaaaatgaaaagaaaattatctttatgtatatataacaactataactctcatcaaaaaactacaggaacagcatgttttcaaaagtacaacaatttccaaactatttgaaataaatctatgaataattcaatggccgacattttccatacaaaccaataaaatgcagagtgtgcatgaagctatctgttacaatctgtggcactgatatttcacaaaagaattctgtcccaatctgagcccctgcattgtgccttcaaatcctcctggactgcaagtccgtaagaaacaggacctccaggttccgccccagggaggttggaattcagcaatataaaaagggtggtggtgccgcaggaaagggtggaactggaaacnctcctggtttcttacttttctccaaggactcctagaaggaccccacccccctccccccacccctgctccttggaggacaacgtgatcactgtattcagctctgtcaagaatggtccaggttcttctagatgatctgcacaaatggttcctctcctccttcctgatgtctgccattagcattggaataaagttcctgctgaaaatccacatctcccctgggtccggtgttctggaagtgagagagacaatgtcacacttcaaggaggcagctctctagacaggaaggttattcacgtcccatgtcaagtctagctagagttcagagcaattgagaagtgcaattttatctcctgcctttcattctataccctgcttctgaaccatcgtgttcaactgtgaaactcacactttggtgaccctgactccaaaacttaatacacccaaggtcagccccagtgatctgcttcatagcaaggactttgggtgggtcttcccagggagtagggcaccctcagagaatgtggctttggacttcatcacagctggggccttttgtgtcacttcagatctaaacttgtaaccgtgctagatctgtttctaatgtgacaacatcacgaaccacgagtccagaagcctaatccataatcctacctcctcatgacgaagtctcatgctctgtgctcaacatggttagctgcacaagatgtaaaccaaagcttcactgaaccctcgacccaaatcggtaactcaagtgcatcaatcataatgaacctccccgaactcagtatttatgattatttttgaggcagggtctcactctgtcgcccgggctggagtgcagtggcaggatcagggctccctgcagccccgacctcccaggctccagcgatcctcccgcctcagcctcctgagtagttgggagtagagatgcctcccacatcgcctggctaatttttgtatttttgtggagaggggatctcgccacgttgcccaggcttgaagccagatcaagcaattgggttccttcggatttccgaaatagaccccaatattctgcctttaccccggaggatgcagatgtaccttctctcaggccgatgacctcaggcctccacggtccctggagctctaggaaaggtgagcgcgatctcgcgcccacacccagtgctctgggtcataagcctggatctggaaaaacaaacgccctttgagaagacggggactccccaggatacccctctctcccctcgtccagcctccagcccacccgattcctccccacatcctccacctccccaggccccacccacctcctccaactcctccagggaaacccaagccctgcagcgcatggaacagaagaagtggaaccgatacttccggaacaaggctatctgagagcagttcttcctggccctcgggttcatgtaacggcataactggaaccaaagctcactgagcaagggtatatgagagcgggtctcctcgtacaggaagtagaagatgttttgtttgggggcctcgtcgtcctcctccatgtcattggccagatagctgaggacagaaatcaggttgctgctcaggggcaccaccaggagagacctccggctgaggtcagcttcccagagaggaaggtaagggaccgtccctagctcaggactggcacccaccctgcagagagccacgccttcctcaggagggctctgctggacagagacctgatcaagggcgtctcccactccttcaggatggagacaaaaacccaactggtggccgagagtggtggcttatgcctggaatcccagcacactgggaggccgaagcaggaggatcacttgaggccaggagtttgagacgggcctgggcaacatagcaagaccctcgtctctattaaaaatataaaaaatacgccaggcgcgtggctcatgcctgtaatcccagcactttggaaggctgaagcaggtggattgcttgagaccaggagtttgagaccagcctggtcaacacagagaaaccccatctatactaaaaatacaaaaatcagcctggtgcggtggcacacccattagtcctagctactcaggaggctgaagcataagaattgtgtgaacccaggaggcggaggttgcagtgagccaagattgggcccctccattccagcctgagagacacagcaacactcttgtcttgataaataaataaataaataaataaa

SEQ ID NO: 675872 - DNA, 1048 bp, Homo sapiens
  misc_feature (297)..(297): n is a, c, g, or t
  misc_feature (453)..(453): n is a, c, g, or t
tcaattataaaaaagaagtatagtcaaaacacacacaagctacgttatcctactgctcccctcgccactacctttgttcgtctcgccaagcttctctctttagacacccgtttatttgccccaaatatattgttgtggattaaacccggacttctctgaatgttaccccccaacggtgggctaaattctaaatggttgccacccgcagacgatataaatatattgcaacccgttcacagagaactatcggggggttcccccaccccgcgggccgtccctatggcgccgcctgtgtgncagaggatccgcccggtgactcgggtggtgtttcaaagaaggtttctagatttaacaaaaaaaattccgggtgaagtaagcgcagcaaacactttactgtgtgagcaaacgcccccgccccacattttgtgagataagcacttcttgttcccgcgntcataagaaaccaatctccccgtctggttccgaccttgaaagaagaagagtttgtccccctcttgctcatacacaccacgtcctttcctggaaggaacattactttccctctctttgttggcgccaccactccgtaggaagaaactaatttttcttcttccagtggcctcctcgtgccccctgcactagagatgtttctatagattcacacccctcgtatgtacaacccaccgtgaaatatacggatataggacttcttctctttgtaaaaagagaaatagcatactccacactatagaggcgttccacgtcatagatttacacatatttgtgccccaatctcgcaccatgcggtcacaaattctgctcaaacacttgtttatgtactaccactgtccactatagctgccaaatgtgaggcccaccataacaatacaatggtgcacgcaaacggcattctttaatatataacagtaaattgctgtgggcctcctcaaaccacacgacccaattgcatctcaccccggagtacacacaacatggccagcgttagggttcacccaaaaaaacaatacaagggtcgttccccaaaaaa

SEQ ID NO: 675873 - DNA, 3255 bp, Homo sapiens
atcttgagatcatttatggttttgcaattcaacctgaaaaatgaagtcaaagcttttatcaaaacaaagcatgtttagtgctctctgtctcactgtcttttagatgccagaccttagattttgtgatgactcctcaaccgtttagatctcggttatctcagagggatcatcagctttttaagaaaattttgagagaaaagcaagtgaagaaaagagtagtcagtgcccaacatcacggatctctcactgaacacaccatgcctggtattctctcacagtgatgtcaccatttctacctgccacgtatcggcgaaggttgggactcgactggtgtttgatcacgatgggaaaatcatccagaaaaccccctacccccaccccagagggaccacagtcagcgtgaagcagttattttctacgctacctgtgcgccataaggaatttcaaaggaatattaagaagtacagaacctgctaaggccatcaaacctattgatcggaagtcagtccatcagatttgctctgggccggtggtactgagtctaagcactgcggtgaagaagatagtaggaaacagtctggatgctggtgccactaatattgatctaaagcttaaggactatggaatggatctcattgaagtttcaggcaatggatgtggggtagaagaagaaaacttcgaaggcttaatctctttcagctctgaaacatcacacatctaagattcgagagtttgccgacctaactcgggttgaaacttttggctttcgggggaaagctctgagctcactttgtgcactgagtgatgtcaccatttctacctgccacgtatcggcgaaggttgggactcgactggtgtttgatcacgatgggaaaatcatccagaaaaccccctacccccaccccagagggaccacagtcagcgtgaagcagttattttctacgctacctgtgcgccataaggaatttcaaaggaatattaagaagaaacgtgcctgcttccccttcgccttctgccgtgattgtcagtttcttgagggctccccagccatgcttcctgtacagcctgcaaaactgactcctagaagtaccccaccccacccctgctccttggaggacaacgtgatcactgtattcagctctgtcaagaatggtccaggttcttctagatgatctgcacaaatggttcctctcctccttcctgatgtctgccattagcattggaataaagttcctgctgaaaatccacatctcccctgggtccggtgttctggaagtgagagagacaatgtcacacttcaaggaggcagctctctagacaggaaggttattcacgtcccatgtcaagtctagctagagttcagagcaattgagaagtgcaattttatctcctgcctttcattctataccctgcttctgaaccatcgtgttcaactgtgaaactcacactttggtgaccctgactccaaaacttaatacacccaaggtcagccccagtgatctgcttcatagcaaggactttgggtgggtcttcccagggagtagggcaccctcagagaatgtggctttggacttcatcacagctggggccttttgtgtcacttcagatctaaacttgtaaccgtgctagatctgtttctaatgtgacaacatcacgaaccacgagtccagaagcctaatccataatcctacctcctcatgacgaagtctcatgctctgtgctcaacatggttagctgcacaagatgtaaaccaaagcttcactgaaccctcgacccaaatcggtaactcaagtgcatcaatcataatgaacctccccgaactcagtatttatgattatttttgaggcagggtctcactctgtcgcccgggctggagtgcagtggcaggatcagggctccctgcagccccgacctcccaggctccagcgatcctcccgcctcagcctcctgagtagttgggagtagagatgcctcccacatcgcctggctaatttttgtatttttgtggagaggggatctcgccacgttgcccaggcttgaagccagatcaagcaattgggttccttcggatttccgaaatagaccccaatattctgcctttaccccggaggatgcagatgtaccttctctcaggccgatgacctcaggcctccacggtccctggagctctaggaaaggtgagcgcgatctcgcgcccacacccagtgctctgggtcataagcctggatctggaaaaacaaacgccctttgagaagacggggactccccaggatacccctctctcccctcgtccagcctccagcccacccgattcctccccacatcctccacctccccaggccccacccacctcctccaactcctccagggaaacccaagccctgcagcgcatggaacagaagaagtggaaccgatacttccggaacaaggctatctgagagcagttcttcctggccctcgggttcatgtaacggcataactggaaccaaagctcactgagcaagggtatatgagagcgggtctcctcgtacaggaagtagaagatgttttgtttgggggcctcgtcgtcctcctccatgtcattggccagatagctgaggacagaaatcaggttgctgctcaggggcaccaccaggagagacctccggctgaggtcagcttcccagagaggaaggtaagggaccgtccctagctcaggactggcacccaccctgcagagagccacgccttcctcaggagggctctgctggacagagacctgatcaagggcgtctcccactccttcaggatggagacaaaaacccaactggtggccgagagtggtggcttatgcctggaatcccagcacactgggaggccgaagcaggaggatcacttgaggccaggagtttgagacgggcctgggcaacatagcaagaccctcgtctctattaaaaatataaaaaatacgccaggcgcgtggctcatgcctgtaatcccagcactttggaaggctgaagcaggtggattgcttgagaccaggagtttgagaccagcctggtcaacacagagaaaccccatctatactaaaaatacaaaaatcagcctggtgcggtggcacacccattagtcctagctactcaggaggctgaagcataagaattgtgtgaacccaggaggcggaggttgcagtgagccaagattgggcccctccattccagcctgagagacacagcaacactcttgtcttgataaataaataaataaataaataaa

SEQ ID NO: 675874 - DNA, 154 bp, Homo sapiens
  misc_feature (96)..(96): n is a, c, g, or t
ctcaagcagtgggccagtactgaaaatagtgggaaagaaagtctgcaactgaacaatgtgagatacttcaagttttaaacattttttgtatagatngggtttcccacgtttgcccaggctggtcttcaactcctcggctcaagcaacccttctg

SEQ ID NO: 675875 - DNA, 847 bp, Homo sapiens
  misc_feature (18)..(18): n is a, c, g, or t
  misc_feature (71)..(71): n is a, c, g, or t
  misc_feature (82)..(82): n is a, c, g, or t
  misc_feature (89)..(89): n is a, c, g, or t
  misc_feature (99)..(99): n is a, c, g, or t
  misc_feature (124)..(124): n is a, c, g, or t
  misc_feature (175)..(175): n is a, c, g, or t
  misc_feature (180)..(180): n is a, c, g, or t
  misc_feature (187)..(187): n is a, c, g, or t
  misc_feature (215)..(215): n is a, c, g, or t
  misc_feature (222)..(222): n is a, c, g, or t
  misc_feature (226)..(226): n is a, c, g, or t
  misc_feature (229)..(229): n is a, c, g, or t
  misc_feature (235)..(235): n is a, c, g, or t
  misc_feature (238)..(238): n is a, c, g, or t
  misc_feature (244)..(244): n is a, c, g, or t
  misc_feature (257)..(257): n is a, c, g, or t
  misc_feature (260)..(260): n is a, c, g, or t
  misc_feature (264)..(264): n is a, c, g, or t
  misc_feature (304)..(304): n is a, c, g, or t
  misc_feature (424)..(424): n is a, c, g, or t
  misc_feature (444)..(444): n is a, c, g, or t
  misc_feature (457)..(457): n is a, c, g, or t
  misc_feature (571)..(572): n is a, c, g, or t
  misc_feature (589)..(589): n is a, c, g, or t
  misc_feature (593)..(594): n is a, c, g, or t
  misc_feature (602)..(602): n is a, c, g, or t
  misc_feature (623)..(623): n is a, c, g, or t
  misc_feature (628)..(628): n is a, c, g, or t
  misc_feature (657)..(657): n is a, c, g, or t
  misc_feature (672)..(672): n is a, c, g, or t
  misc_feature (675)..(676): n is a, c, g, or t
  misc_feature (723)..(723): n is a, c, g, or t
  misc_feature (750)..(750): n is a, c, g, or t
  misc_feature (755)..(755): n is a, c, g, or t
  misc_feature (763)..(763): n is a, c, g, or t
  misc_feature (768)..(768): n is a, c, g, or t
  misc_feature (779)..(779): n is a, c, g, or t
  misc_feature (816)..(816): n is a, c, g, or t
cttccagtattaaaaaanaaaagacatttgcggacattttaaagccaactcttctatataatcggtttgangatctgaattngaaaatncccacatggntaatcatgttcttgatacacatttnctttttttttgagatggagtctcgctgttgcccaggctggggtacagtggngcgancttggcncactgcaacctccgcctcccgggttcangcgatantccngantcagcntcncaagtnactagggattacnggngtanaccaccatgccaggctaatttttttatgtttagtacaganggggtttcaccatgttggtcaggctggcttgatgcacatttcttataggtacattgggaaattgcttcctaaccacaataaacactgtgtacaggtttttaaaatgtccctggatacacnttaattttttgaagtcagtntggccaaacttgncagaaccaattattgctagctccaataaacctaagagctcaaactaaaaaactggtaaaaagaaaaatactcaggttctacaaacgtcccataatttgtctttaaataggcagnnaagatttaaaaaagagntggnnctgtctangaggtcttcagctaccttggnaggtnaatttaaaaacaaaaggttgatatactanaaaataagatgcttnagnncagctccaaaaacctttataaatacagccatttggaaggacgatccnggatcagaaattattccttgtgtatcnatatnatgtgcangtctnatttcagttgncataattgtctctgtaatttcctcctgagtagcggtnataaccaccctggtttatgccaatatagtct

SEQ ID NO: 675876 - DNA, 3831 bp, Homo sapiens
  misc_feature (3742)..(3742): n is a, c, g, or t
  misc_feature (3759)..(3759): n is a, c, g, or t
  misc_feature (3770)..(3770): n is a, c, g, or t
  misc_feature (3789)..(3789): n is a, c, g, or t
  misc_feature (3831)..(3831): n is a, c, g, or t
atcttgagatcatttatggttttgcaattcaacctgaaaaatgaagtcaaagcttttatcaaaacaaagcatgtttagtgctctctgtctcactgtcttttagatgccagaccttagattttgtgatgactcctcaaccgtttagatctcggttatctcagagggatcatcagctttttaagaaaattttgagagaaaagcaagtgaagaaaagagtagtcagtgcccaacatcacggatctctcactgaacacaccatgcctggtattctctcacagtgatgtcaccatttctacctgccacgtatcggcgaaggttgggactcgactggtgtttgatcacgatgggaaaatcatccagaaaaccccctacccccaccccagagggaccacagtcagcgtgaagcagttattttctacgctacctgtgcgccataaggaatttcaaaggaatattaagaagtacagaacctgctaaggccatcaaacctattgatcggaagtcagtccatcagatttgctctgggccggtggtactgagtctaagcactgcggtgaagaagatagtaggaaacagtctggatgctggtgccactaatattgatctaaagcttaaggactatggaatggatctcattgaagtttcaggcaatggatgtggggtagaagaagaaaacttcgaaggcttaatctctttcagctctgaaacatcacacatctaagattcgagagtttgccgacctaactcgggttgaaacttttggctttcgggggaaagctctgagctcactttgtgcactgagtgatgtcaccatttctacctgccacgtatcggcgaaggttgggactcgactggtgtttgatcacgatgggaaaatcatccagaaaaccccctacccccaccccagagggaccacagtcagcgtgaagcagttattttctacgctacctgtgcgccataaggaatttcaaaggaatattaagaagaacctgctaaggccatcaaacctattgatcggaagtcagtccatcagatttgctctgggccggtggtactgagtctaagcactgcggtgaagaagatagtagaaaacagtctggatgctggtgccactaatattgatctaaagcttaaggactatggaatggatctcattgaagtttcaggcaatggatgtggggtagaagaagaaaacttcgaaggcttaatgatgtcaccatttctacctgccacgtatcggcgaaggttgggactcgactggtgtttgatcacgatgggaaaatcatccagaaaaccccctacccccaccccagagggaccacagtcagcgtgaagcagttattttctacgctacctgtgcgccataaggaatttcaaaggaatattaagaagaaacgtgcctgcttccccttcgccttctgccgtgattgtcagtttcttgagggctccccagccatgcttcctgtacagcctgcaaaactgactcctagaagtaccccaccccacccctgctccttggaggacaacgtgatcactgtattcagctctgtcaagaatggtccaggttcctctcctccttcctgatgtctgccattagcattggaataaagttcctgctgaaaatccacatctcccctgggtccggtgttctggaagtgagagagacaatgtcacacttcaaggaggcagctctctagacaggaaggttattcacgtcccatgtcaagtctagctagagttcagagcaattgagaagtgcaattttatctcctgcctttcattctataccctgcttctgaaccatcgtgttcaactgtgaaactcacactttggtgaccctgactccaaaacttaatacacccaaggtcagccccagtgatctgcttcatagcaaggactttgggtgggtcttcccagggagtagggcaccctcagagaatgtggctttggacttcatcacagctggggccttttgtgtcacttcagatctaaacttgtaaccgtgctagatctgtttctaatgtgacaacatcacgaaccacgagtccagaagcctaatccataatcctacctcctcatgacgaagtctcatgctctgtgctcaacatggttagctgcacaagatgtaaaccaaagcttcactgaaccctcgacccaaatcggtaactcaagtgcatcaatcataatgaacctccccgaactcagtatttatgattatttttgaggcagggtctcactctgtcgcccgggctggagtgcagtggcaggatcagggctccctgcagccccgacctcccaggctccagcgatcctcccgcctcagcctcctgagtagttgggagtagagatgcctcccacatcgcctggctaatttttgtatttttgtggagaggggatctcgccacgttgcccaggcttgaagccagatcaagcaattgggttccttcggatttccgaaatagaccccaatattctgcctttaccccggaggatgcagatgtaccttctctcaggccgatgacctcaggcctccacggtccctggagctctaggaaaggtgagcgcgatctcgcgcccacacccagtgctctgggtcataagcctggatctggaaaaacaaacgccctttgagaagacggggactccccaggatacccctctctcccctcgtccagcctccagcccacccgattcctccccacatcctccacctccccaggccccacccacctcctccaactcctccagggaaacccaagccctgcagcgcatggaacagaagaagtggaaccgatacttccggaacaaggctatctgagagcagttcttcctggccctcgggttcatgtaacggcataactggaaccaaagctcactgagcaagggtatatgagagcgggtctcctcgtacaggaagtagaagatgttttgtttgggggcctcgtcgtcctcctccatgtcattggccagatagctgaggacagaaatcaggttgctgctcaggggcaccaccaggagagacctccggctgaggtcagcttcccagagaggaaggtaagggaccgtccctagctcaggactggcacccaccctgcagagagccacgccttcctcaggagggctctgctggacagagacctgatcaagggcgtctcccactccttcaggatggagacaaaaacccaactggtggccgagagtggtggcttatgcctggaatcccagcacactgggaggccgaagcaggaggatcacttgaggccaggagtttgagacgggcctgggcaacatagcaagaccctcgtctctattaaaaatataaaaaatacgccaggcgcgtggctcatgcctgtaatcccagcactttggaaggctgaagcaggtggattgcttgagaccaggagtttgagaccagcctggtcaacacagagaaaccccatctatactaaaaatacaaaaatcagcctggtgcggtggcacacccattagtcctagctactcaggaggctgaagcataagaattgtgtgaacccaggaggcggaggttgcagtgagccaagattgggcccctccattccagcctgagagacacagcaacactcttgtcttgataaataaataaataaataaataaacagtccaggtgtggtggcacagccctgtagtcggagctaataagaagctgaggtgggaggatcgcttgagcccaggatatggaggctgcggtgagctatgatctcancactgcactccagcttnggggacagggnaagtctgtctcaaaaaaanaaccagacactggacttccatttaaaacacaccacaacaaan

SEQ ID NO: 675877 - DNA, 253 bp, Homo sapiens
agagtgacgaaaaaggatagttctaccacttactggaattgtgaggtaagcaacaagagagttcatataggcaaatccgtatcgcatacatcttgcagttgtgatgcatagtgacagcacttcggtcgcagtacacgaattgaatgatttcatgtttccaagcaaaagcttctcagtgttacattttttatcaaccgtgtaccgagcaacgaacacacgttcccaagcagcagtattctaaggcgagcgagct

SEQ ID NO: 675878 - DNA, 598 bp, Homo sapiens
  misc_feature (101)..(101): n is a, c, g, or t
gctggaggaactcggcacgagaatgttttttgatgggaagtcacttaaaggatatccagggctgtatgttttttactagggcccggaaattacgaagtttnttgcatgtgagggcccggaaaataaggagagagccaagcagtggcagatataagactgtccttgacggtcggccattataatatgagctggggagaaaaagggggcaaacagacaatggcgccagtgccaaatacaagatcgcccgggatagcctaaccgaagccaagaaaataggtcccagggaagacaaaagccacaagggaaaggtggtaataggaacccgccagaaagggggaactaacgaacctgggaataagcggctgggggggaaagcgattaagagacatgccctgccaaaaacgagcggtacggtgatatgatctctgcaatcctaatccaggcaggacccaaccaactctttaagagatgccaagagcagaaaatccaaccttatggcaaagcaaaggcaaaggagttatttttaagcagacctaataaaacgcccctagggggtccgttagaggccttcttttgccccctggggcggcctcgcggt

SEQ ID NO: 675879 - DNA, 380 bp, Homo sapiens
caaaacgctcgcgggagtactggtagttgcggccctcgaacttgccgcccgcatggagcacggtgtacacatttccacagtgggcatgccagcataggagcccgtcttctggtgcgccacggggatgccgcggccgttgtcccggaccgtgatggagccatcctcgtggagggtgatgaccactcggtccgcgtggcccgccatcgcctcgtccaccgagttgtcgatcgcctcccaggcaaggtgatggagtccggaaaccccggtggagcccacgtacattcctggcctgaggcgcggcggcatcaagccctcgagggcgatgatgtcttctgcaccgtactcatcttcatcgggcacctctccatgtctcgccatcg

SEQ ID NO: 675880 - DNA, 2739 bp, Homo sapiens
tgtcactttctacacggcggcggatcgggtgttgcatccttggagagagctgagagctcgagtacagaacctgctaaggccatcaaacctattgatcggaagtcagtccatcagatttgctctgggccggtggtactgagtctaagcactgcggtgaagaagatagtagaaaacagtctggatgctggtgccactaatattgatctaaagcttaaggactatggaatggatctcattgaagtttcaggcaatggatgtggggtagaagaagaaaacttcgaaggcttaaagctctgaaacatcacacatctaagattcaagagtttgccgacctaactcgggttgaaacttttggctttcgggggaaagctctgagctcactttgtgcactgagtgatgtcaccatttctacctgccacgtatcggcgaaggttgggactcgactggtgtttgatcacgatgggaaaatcatccagaaaaccccctacccccaccccagagggaccacagtcagcgtgaagcagttattttctacgctacctgtgcgccataaggaatttcaaaggaatattaagaagccccacccctgctccttggaggacaacgtgatcactgtattcagctctgtcaagaatggtccaggttcttctagatgatctgcacaaatggttcctctcctccttcctgatgtctgccattagcattggaataaagttcctgctgaaaatccacatctcccctgggtccggtgttctggaagtgagagagacaatgtcacacttcaaggaggcagctctctagacaggaaggttattcacgtcccatgtcaagtctagctagagttcagagcaattgagaagtgcaattttatctcctgcctttcattctataccctgcttctgaaccatcgtgttcaactgtgaaactcacactttggtgaccctgactccaaaacttaatacacccaaggtcagccccagtgatctgcttcatagcaaggactttgggtgggtcttcccagggagtagggcaccctcagagaatgtggctttggacttcatcacagctggggccttttgtgtcacttcagatctaaacttgtaaccgtgctagatctgtttctaatgtgacaacatcacgaaccacgagtccagaagcctaatccataatcctacctcctcatgacgaagtctcatgctctgtgctcaacatggttagctgcacaagatgtaaaccaaagcttcactgaaccctcgacccaaatcggtaactcaagtgcatcaatcataatgaacctccccgaactcagtatttatgattatttttgaggcagggtctcactctgtcgcccgggctggagtgcagtggcaggatcagggctccctgcagccccgacctcccaggctccagcgatcctcccgcctcagcctcctgagtagttgggagtagagatgcctcccacatcgcctggctaatttttgtatttttgtggagaggggatctcgccacgttgcccaggcttgaagccagatcaagcaattgggttccttcggatttccgaaatagaccccaatattctgcctttaccccggaggatgcagatgtaccttctctcaggccgatgacctcaggcctccacggtccctggagctctaggaaaggtgagcgcgatctcgcgcccacacccagtgctctgggtcataagcctggatctggaaaaacaaacgccctttgagaagacggggactccccaggatacccctctctcccctcgtccagcctccagcccacccgattcctccccacatcctccacctccccaggccccacccacctcctccaactcctccagggaaacccaagccctgcagcgcatggaacagaagaagtggaaccgatacttccggaacaaggctatctgagagcagttcttcctggccctcgggttcatgtaacggcataactggaaccaaagctcactgagcaagggtatatgagagcgggtctcctcgtacaggaagtagaagatgttttgtttgggggcctcgtcgtcctcctccatgtcattggccagatagctgaggacagaaatcaggttgctgctcaggggcaccaccaggagagacctccggctgaggtcagcttcccagagaggaaggtaagggaccgtccctagctcaggactggcacccaccctgcagagagccacgccttcctcaggagggctctgctggacagagacctgatcaagggcgtctcccactccttcaggatggagacaaaaacccaactggtggccgagagtggtggcttatgcctggaatcccagcacactgggaggccgaagcaggaggatcacttgaggccaggagtttgagacgggcctgggcaacatagcaagaccctcgtctctattaaaaatataaaaaatacgccaggcgcgtggctcatgcctgtaatcccagcactttggaaggctgaagcaggtggattgcttgagaccaggagtttgagaccagcctggtcaacacagagaaaccccatctatactaaaaatacaaaaatcagcctggtgcggtggcacacccattagtcctagctactcaggaggctgaagcataagaattgtgtgaacccaggaggcggaggttgcagtgagccaagattgggcccctccattccagcctgagagacacagcaacactcttgtcttgataaataaataaataaataaataaa

SEQ ID NO: 675881 - DNA, 337 bp, Homo sapiens
gacacacatatcaatgaaaggacaaacatatagcagatgattgttatgtatctagtctcatcaagtacttgatcttcagaccaccttcagcccatctcaccacatccgtcccaagcccttaagagccagccaaccccaacccgccatgtactttaacaaaatagctacctttttattatacacagtacgactagcttctctagtccctggaagctacttcccctatatatatcaccaaggtacacctatgagcacaatccttctgctcccgtgaaaatccattactcctactacccttatccctcacctcatgagcttaaacagactgccaccgaag

SEQ ID NO: 675882 - DNA, 1477 bp, Homo sapiens
gacaaaacgccctgtattcctattgccaaaggttctaacttaactgtatatacctgcaagaacccatgcattttgtgcatcttattatattcctgtattgagctgcttgaatgtaaaacagtcccatccttcttgtcaactccaatctattggtggatccttataggcatttcatatctctttgtgctgtcaagattgggttccaaagcgcactggcgtcacttgtgctccaccagtgggtgctaacgcgctattttgcgagcttcataagatgccaccgttgtcttaaccagtgcactacgacggccacagtgccatatatactgtggtgtatacgccccacgcggcttctctccgtgggacaacacgctgtgaacatcacttcttacggggaaacctgtgtactctctcaacagttcctctaaagatcatacacacactgtggggttctcccttacacactttttacacacaacgtctaacacaccacacacccacaccaacacatacatacaatccaaagagacactacacacacaaacaacaccacgacacaataacacacacacaacaccacccacaacacacacaccaacacacaccataccacaccaaaccacacgacgaaaaacacaaccacccagccacacgcacacacactaccaccaacacagacacttcccaatcacagcaccacgactaccaccaccccacaacaccaatcaccatcacatatttacatcttcatgaaaccagcgacgagaccctctcgacgactaacctcacatcccaaacaatgcaatcacttacttctaatccaaatccacaactacaacaaataacaaatctcaccccgccttaagcatcacgacccctccttactcactattagatccaacctatacaacacaacatcatatctctctactcaacccaattacccccatacacatcattcaaacgacaagacaaacaaggccgaggccgaggcagcatgaaagaagtctaaacatagaagcgcagacggtcgagacacgcagcgcagaccagaacgcacaaaacaaaaaaagagaaagaaacagcacggcgcgcgtggagcaggatcaaggagcagagacagcgctagacacagccacgataaagcagaccaaacaaatcacacataccgtgtcaatcatagcttgcaatatatcacaaaatgaagccaactaacactcagcaatagatagagaacatcagagaatttaaactcaagactacaagaccagctacatacatctacactactatcaaaacatcacatgactatcacactaatactactctacaaactaaacacaacatacactccacacccagacagacaatgccatcacgactatgaataagacgtaacttaaacagttacatcatcaacatctaaaaattgtaacaccattactaaaccctcctatacaacatcatttaacactcacca

SEQ ID NO: 675883 - DNA, 615 bp, Homo sapiens
gcctgtgccaatggcttcacagcgagacaggcgtcttggctgcccacaatgataatggctagctccccggacatggacctggccacagtgtttctgcgtctcaaggaaggatgggggtgaagttgatcgaaccccacaagcaagggagacggtgcagtacagtgcatgtgctcttcctggactgtgaagtccagcacatcatccccttcatcctggtagtgaaatacggcgccgacattgaggagcagaacacattgtgagtagtaccttgacgtcgggacgcgagcgatctaccactacaggcatccagtgtggtagaagcaaagcatgtcaggccgattatcaggtccatgtcccccgagggtcatgccgtcgtgacaatggactcgaagcagctcccagtcgctgggtgcgtggcatgtggggtccaccgatgtatagcccaacaggggctaactgacaacagaccctacggttgcggaaggtaacggggaagcggcttctatgcgtaggacaatgcctagcctcgatggctaggctgctagcgagctttctcgcaactggaagggtcgcgtagaagagagaccttgaatttgggatagcccggatcaaggc

SEQ ID NO: 675884 - DNA, 3667 bp, Homo sapiens
  misc_feature (3642)..(3642): n is a, c, g, or t
atcttgagatcatttatggttttgcaattcaacctgaaaaatgaagtcaaagcttttatcaaaacaaagcatgtttagtgctctctgtctcactgtcttttagatgccagaccttagattttgtgatgactcctcaaccgtttagatctcggttatctcagagggatcatcagctttttaagaaaattttgagagaaaagcaagtgaagaaaagagtagtcagtgcccaacatcacggatctctcactgaacacaccatgcctggtattctctcacagtgatgtcaccatttctacctgccacgtatcggcgaaggttgggactcgactggtgtttgatcacgatgggaaaatcatccagaaaaccccctacccccaccccagagggaccacagtcagcgtgaagcagttattttctacgctacctgtgcgccataaggaatttcaaaggaatattaagaagtacagaacctgctaaggccatcaaacctattgatcggaagtcagtccatcagatttgctctgggccggtggtactgagtctaagcactgcggtgaagaagatagtaggaaacagtctggatgctggtgccactaatattgatctaaagcttaaggactatggaatggatctcattgaagtttcaggcaatggatgtggggtagaagaagaaaacttcgaaggcttaatctctttcagctctgaaacatcacacatctaagattcgagagtttgccgacctaactcgggttgaaacttttggctttcgggggaaagctctgagctcactttgtgcactgagtgatgtcaccatttctacctgccacgtatcggcgaaggttgggactcgactggtgtttgatcacgatgggaaaatcatccagaaaaccccctacccccaccccagagggaccacagtcagcgtgaagcagttattttctacgctacctgtgcgccataaggaatttcaaaggaatattaagaagaacctgctaaggccatcaaacctattgatcggaagtcagtccatcagatttgctctgggccggtggtactgagtctaagcactgcggtgaagaagatagtagaaaacagtctggatgctggtgccactaatattgatctaaagcttaaggactatggaatggatctcattgaagtttcaggcaatggatgtggggtagaagaagaaaacttcgaaggcttaatgatgtcaccatttctacctgccacgtatcggcgaaggttgggactcgactggtgtttgatcacgatgggaaaatcatccagaaaaccccctacccccaccccagagggaccacagtcagcgtgaagcagttattttctacgctacctgtgcgccataaggaatttcaaaggaatattaagaagaaacgtgcctgcttccccttcgccttctgccgtgattgtcagtttcttgagggctccccagccatgcttcctgtacagcctgcaaaactgactcctagaagtaccccaccccacccctgctccttggaggacaacgtgatcactgtattcagctctgtcaagaatggtccaggttcctctcctccttcctgatgtctgccattagcattggaataaagttcctgctgaaaatccacatctcccctgggtccggtgttctggaagtgagagagacaatgtcacacttcaaggaggcagctctctagacaggaaggttattcacgtcccatgtcaagtctagctagagttcagagcaattgagaagtgcaattttatctcctgcctttcattctataccctgcttctgaaccatcgtgttcaactgtgaaactcacactttggtgaccctgactccaaaacttaatacacccaaggtcagccccagtgatctgcttcatagcaaggactttgggtgggtcttcccagggagtagggcaccctcagagaatgtggctttggacttcatcacagctggggccttttgtgtcacttcagatctaaacttgtaaccgtgctagatctgtttctaatgtgacaacatcacgaaccacgagtccagaagcctaatccataatcctacctcctcatgacgaagtctcatgctctgtgctcaacatggttagctgcacaagatgtaaaccaaagcttcactgaaccctcgacccaaatcggtaactcaagtgcatcaatcataatgaacctccccgaactcagtatttatgattatttttgaggcagggtctcactctgtcgcccgggctggagtgcagtggcaggatcagggctccctgcagccccgacctcccaggctccagcgatcctcccgcctcagcctcctgagtagttgggagtagagatgcctcccacatcgcctggctaatttttgtatttttgtggagaggggatctcgccacgttgcccaggcttgaagccagatcaagcaattgggttccttcggatttccgaaatagaccccaatattctgcctttaccccggaggatgcagatgtaccttctctcaggccgatgacctcaggcctccacggtccctggagctctaggaaaggtgagcgcgatctcgcgcccacacccagtgctctgggtcataagcctggatctggaaaaacaaacgccctttgagaagacggggactccccaggatacccctctctcccctcgtccagcctccagcccacccgattcctccccacatcctccacctccccaggccccacccacctcctccaactcctccagggaaacccaagccctgcagcgcatggaacagaagaagtggaaccgatacttccggaacaaggctatctgagagcagttcttcctggccctcgggttcatgtaacggcataactggaaccaaagctcactgagcaagggtatatgagagcgggtctcctcgtacaggaagtagaagatgttttgtttgggggcctcgtcgtcctcctccatgtcattggccagatagagagaccacggaagagaatagtgatagcgcttggtatattgtcccagaaggtgaagccggccccggctggaaataaccgctatgacccatagccaggagatacttgtccgacaccctcagatctttgtcccaggccaggaatcttttaatgacaggatcctctgtgattagagagcagatgtcagtgtgagaagcaggacagggtttccgtgggagcagcagggcagcgaggagaagtgtgcctcccggggggaagtctcaggattgtggccgcgggtgaggtggatgggagaggggagaatgactttcactgggcaagggagagaggctcctgctctgagactcccctgagaagaggccgaaggaggccctgggtgtgagaatctacaggatgtagagctgggaatcagccaggaccccctccagcagacacggagggaccactgcagagtcataaaggaattcccatcatttcctcatgagacagtcacacatcagggtgtgaccatggccttggtatcccccactatggatggagacacttaggtttagaaaagtcagtaagagacattaagtttcagagggcacagctgaaaccacttttttgatttttgattttgtttttctttatttgatttttatttttatttatttattaatttatttcnagactgtgtctcacaaaaaaaaaac

SEQ ID NO: 675885 - DNA, 3125 bp, Homo sapiens
  misc_feature (3036)..(3036): n is a, c, g, or t
  misc_feature (3053)..(3053): n is a, c, g, or t
  misc_feature (3064)..(3064): n is a, c, g, or t
  misc_feature (3083)..(3083): n is a, c, g, or t
  misc_feature (3125)..(3125): n is a, c, g, or t
atcttgagatcatttatggttttgcaattcaacctgaaaaatgaagtcaaagcttttatcaaaacaaagcatgtttagtgctctctgtctcactgtcttttagatgccagaccttagattttgtgatgactcctcaaccgtttagatctcggttatctcagagggatcatcagctttttaagaaaattttgagagaaaagcaagtgaagaaaagagtagtcagtgcccaacatcacggatctctcactgaacacaccatgcctggtattctctcacagtgatgtcaccatttctacctgccacgtatcggcgaaggttgggactcgactggtgtttgatcacgatgggaaaatcatccagaaaaccccctacccccaccccagagggaccacagtcagcgtgaagcagttattttctacgctacctgtgcgccataaggaatttcaaaggaatattaagaagtacagaacctgctaaggccatcaaacctattgatcggaagtcagtccatcagatttgctctgggccggtggtactgagtctaagcactgcggtgaagaagatagtaggaaacagtctggatgctggtgccactaatattgatctaaagcttaaggactatggaatggatctcattgaagtttcaggcaatggatgtggggtagaagaagaaaacttcgaaggcttaatctctttcagctctgaaacatcacacatctaagattcgagagtttgccgacctaactcgggttgaaacttttggctttcgggggaaagctctgagctcactttgtgcactgagtgatgtcaccatttctacctgccacgtatcggcgaaggttgggactcgactggtgtttgatcacgatgggaaaatcatccagaaaaccccctacccccaccccagagggaccacagtcagcgtgaagcagttattttctacgctacctgtgcgccataaggaatttcaaaggaatattaagaagaacctgctaaggccatcaaacctattgatcggaagtcagtccatcagatttgctctgggccggtggtactgagtctaagcactgcggtgaagaagatagtagaaaacagtctggatgctggtgccactaatattgatctaaagcttaaggactatggaatggatctcattgaagtttcaggcaatggatgtggggtagaagaagaaaacttcgaaggcttaatgatgtcaccatttctacctgccacgtatcggcgaaggttgggactcgactggtgtttgatcacgatgggaaaatcatccagaaaaccccctacccccaccccagagggaccacagtcagcgtgaagcagttattttctacgctacctgtgcgccataaggaatttcaaaggaatattaagaagaaacgtgcctgcttccccttcgccttctgccgtgattgtcagtttcttgagggctccccagccatgcttcctgtacagcctgcaaaactgactcctagaagtaccccaccccacccctgctccttggaggacaacgtgatcactgtattcagctctgtcaagaatggtccaggttcctctcctccttcctgatgtctgccattagcattggaataaagttcctgctgaaaatccacatctcccctgggtccggtgttctggaagtgagagagacaatgtcacacttcaaggaggcagctctctagacaggaaggttattcacgtcccatgtcaagtctagctagagttcagagcaattgagaagtgcaattttatctcctgcctttcattctataccctgcttctgaaccatcgtgttcaactgtgaaactcacactttggtgaccctgactccaaaacttaatacacccaaggtcagccccagtgatctgcttcatagcaaggactttgggtgggtcttcccagggagtagggcaccctcagagaatgtggctttggacttcatcacagctggggccttttgtgtcacttcagatctaaacttgtaaccgtgctagatctgtttctaatgtgacaacatcacgaaccacgagtccagaagcctaatccataatcctacctcctcatgacgaagtctcatgctctgtgctcaacatggttagctgcacaagatgtaaaccaaagcttcactgaaccctcgacccaaatcggtaactcaagtgcatcaatcataatgaacctccccgaactcagtatttatgattatttttgaggcagggtctcactctgtcgcccgggctggagtgcagtggcaggatcagggctccctgcagccccgacctcccaggctccagcgatcctcccgcctcagcctcctgagtagttgggagtagagatgcctcccacatcgcctggctaatttttgtatttttgtggagaggggatctcgccacgttgcccaggcttgaagccagatcaagcaattgggttccttcggatttccgaaatagaccccaatattctgcctttaccccggaggatgcagatgtaccttctctcaggccgatgacctcaggcctccacggtccctggagctctaggaaaggtgagcgcgatctcgcgcccacacccagtgctctgggtcataagcctggatctggaaaaacaaacgccctttgagaagacggggactccccaggatacccctctctcccctcgtccagcctccagcccacccgattcctccccacatcctccacctccccaggccccacccacctcctccaactcctccagggaaacccaagccctgcagcgcatggaacagaagaagtggaaccgatacttccggaacaaggctatctgagagcagttcttcctggccctcgggttcatgtaacggcataactggaaccaaagctcactgagcaagggtatatgagagcgggtctcctcgtacaggaagtagaagatgttttgtttgggggcctcgtcgtcctcctccatgtcattggccagatagagctgaggtgggaggatcgcttgagcccaggatatggaggctgcggtgagctatgatctcancactgcactccagcttnggggacagggnaagtctgtctcaaaaaaanaaccagacactggacttccatttaaaacacaccacaacaaan

SEQ ID NO: 675886 - DNA, 3255 bp, Homo sapiens; identical to SEQ ID NO: 675873

SEQ ID NO: 675887 - DNA, 150 bp, Homo sapiens
tgcatggctcgggctgcttgtgccctcagcgctcgcgtcttttcctggcagttggacactgcttcctgttgtcctcggcctgtaacctgcctgttgccccctgtctccagagtccctccacgcgtcccctcccgtcacattgggtaccgc

SEQ ID NO: 675888 - DNA, 328 bp, Homo sapiens
ggttgaaacgttgctgtagacttcatagacagcaactgagtgccaagatcaatagtcatctctagatgtggggtctgcaacatgtttgtagagcctcctgtgcaaagatcctatgtctcagctctttctgtgtcttgttctctttcaaagtactctcccatcatcaattttcactcaaattctatttattcttcatgctgagttattatccccttcaagaacttattctgggtaatacagtagctagggttttattctagaattatatatgcatccttgaattttcccatgatatatgttgatgtttgttgttagtcacttgtaaaaa

SEQ ID NO: 675889 - DNA, 2732 bp, Homo sapiens
atcttgagatcatttatggttttgcaattcaacctgaaaaatgaagtcaaagcttttatcaaaacaaagcatgtttagtgctctctgtctcactgtcttttagatgccagaccttagattttgtgatgactcctcaaccgtttagatctcggttatctcagagggatcatcagctttttaagaaaattttgagagaaaagcaagtgaagaaaagagtagtcagtgcccaacatcacggatctctcactgaacacaccatgcctggtattctctcacagtgatgtcaccatttctacctgccacgtatcggcgaaggttgggactcgactggtgtttgatcacgatgggaaaatcatccagaaaaccccctacccccaccccagagggaccacagtcagcgtgaagcagttattttctacgctacctgtgcgccataaggaatttcaaaggaatattaagaagtaaacgtgcctgcttccccttcgccttctgccgtgattgtcagtttcttgagggctccccagccatgcttcctgtacagcctgcaaaactgactcctagaagtaccccaccccacccctgctccttggaggacaacgtgatcactgtattcagctctgtcaagaatggtccaggttcttctagatgatctgcacaaatggttcctctcctccttcctgatgtctgccattagcattggaataaagttcctgctgaaaatccacatctcccctgggtccggtgttctggaagtgagagagacaatgtcacacttcaaggaggcagctctctagacaggaaggttattcacgtcccatgtcaagtctagctagagttcagagcaattgagaagtgcaattttatctcctgcctttcattctataccctgcttctgaaccatcgtgttcaactgtgaaactcacactttggtgaccctgactccaaaacttaatacacccaaggtcagccccagtgatctgcttcatagcaaggactttgggtgggtcttcccagggagtagggcaccctcagagaatgtggctttggacttcatcacagctggggccttttgtgtcacttcagatctaaacttgtaaccgtgctagatctgtttctaatgtgacaacatcacgaaccacgagtccagaagcctaatccataatcctacctcctcatgacgaagtctcatgctctgtgctcaacatggttagctgcacaagatgtaaaccaaagcttcactgaaccctcgacccaaatcggtaactcaagtgcatcaatcataatgaacctccccgaactcagtatttatgattatttttgaggcagggtctcactctgtcgcccgggctggagtgcagtggcaggatcagggctccctgcagccccgacctcccaggctccagcgatcctcccgcctcagcctcctgagtagttgggagtagagatgcctcccacatcgcctggctaatttttgtatttttgtggagaggggatctcgccacgttgcccaggcttgaagccagatcaagcaattgggttccttcggatttccgaaatagaccccaatattctgcctttaccccggaggatgcagatgtaccttctctcaggccgatgacctcaggcctccacggtccctggagctctaggaaaggtgagcgcgatctcgcgcccacacccagtgctctgggtcataagcctggatctggaaaaacaaacgccctttgagaagacggggactccccaggatacccctctctcccctcgtccagcctccagcccacccgattcctccccacatcctccacctccccaggccccacccacctcctccaactcctccagggaaacccaagccctgcagcgcatggaacagaagaagtggaaccgatacttccggaacaaggctatctgagagcagttcttcctggccctcgggttcatgtaacggcataactggaaccaaagctcactgagcaagggtatatgagagcgggtctcctcgtacaggaagtagaagatgttttgtttgggggcctcgtcgtcctcctccatgtcattggccagatagctgaggacagaaatcaggttgctgctcaggggcaccaccaggagagacctccggctgaggtcagcttcccagagaggaaggtaagggaccgtccctagctcaggactggcacccaccctgcagagagccacgccttcctcaggagggctctgctggacagagacctgatcaagggcgtctcccactccttcaggatggagacaaaaacccaactggtggccgagagtggtggcttatgcctggaatcccagcacactgggaggccgaagcaggaggatcacttgaggccaggagtttgagacgggcctgggcaacatagcaagaccctcgtctctattaaaaatataaaaaatacgccaggcgcgtggctcatgcctgtaatcccagcactttggaaggctgaagcaggtggattgcttgagaccaggagtttgagaccagcctggtcaacacagagaaaccccatctatactaaaaatacaaaaatcagcctggtgcggtggcacacccattagtcctagctactcaggaggctgaagcataagaattgtgtgaacccaggaggcggaggttgcagtgagccaagattgggcccctccattccagcctgagagacacagcaacactcttgtcttgataaataaataaataaataaataaa

SEQ ID NO: 675890 - DNA, 2803 bp, Homo sapiens
atcttgagatcatttatggttttgcaattcaacctgaaaaatgaagtcaaagcttttatcaaaacaaagcatgtttagtgctctctgtctcactgtcttttagatgccagaccttagattttgtgatgactcctcaaccgtttagatctcggttatctcagagggatcatcagctttttaagaaaattttgagagaaaagcaagtgaagaaaagagtagtcagtgcccaacatcacggatctctcactgaacacaccatgcctggtattctctcacagtgatgtcaccatttctacctgccacgtatcggcgaaggttgggactcgactggtgtttgatcacgatgggaaaatcatccagaaaaccccctacccccaccccagagggaccacagtcagcgtgaagcagttattttctacgctacctgtgcgccataaggaatttcaaaggaatattaagaagtgagtgagcgctcatgggatctggttgtttagaagcatgcagcacctcctgcttcactctctctgtctctcctgctccaccatggccagaaacgtgcctgcttccccttcgccttctgccgtgattgtcagtttcttgagggctccccagccatgcttcctgtacagcctgcaaaactgaccccacccctgctccttggaggacaacgtgatcactgtattcagctctgtcaagaatggtccaggttcttctagatgatctgcacaaatggttcctctcctccttcctgatgtctgccattagcattggaataaagttcctgctgaaaatccacatctcccctgggtccggtgttctggaagtgagagagacaatgtcacacttcaaggaggcagctctctagacaggaaggttattcacgtcccatgtcaagtctagctagagttcagagcaattgagaagtgcaattttatctcctgcctttcattctataccctgcttctgaaccatcgtgttcaactgtgaaactcacactttggtgaccctgactccaaaacttaatacacccaaggtcagccccagtgatctgcttcatagcaaggactttgggtgggtcttcccagggagtagggcaccctcagagaatgtggctttggacttcatcacagctggggccttttgtgtcacttcagatctaaacttgtaaccgtgctagatctgtttctaatgtgacaacatcacgaaccacgagtccagaagcctaatccataatcctacctcctcatgacgaagtctcatgctctgtgctcaacatggttagctgcacaagatgtaaaccaaagcttcactgaaccctcgacccaaatcggtaactcaagtgcatcaatcataatgaacctccccgaactcagtatttatgattatttttgaggcagggtctcactctgtcgcccgggctggagtgcagtggcaggatcagggctccctgcagccccgacctcccaggctccagcgatcctcccgcctcagcctcctgagtagttgggagtagagatgcctcccacatcgcctggctaatttttgtatttttgtggagaggggatctcgccacgttgcccaggcttgaagccagatcaagcaattgggttccttcggatttccgaaatagaccccaatattctgcctttaccccggaggatgcagatgtaccttctctcaggccgatgacctcaggcctccacggtccctggagctctaggaaaggtgagcgcgatctcgcgcccacacccagtgctctgggtcataagcctggatctggaaaaacaaacgccctttgagaagacggggactccccaggatacccctctctcccctcgtccagcctccagcccacccgattcctccccacatcctccacctccccaggccccacccacctcctccaactcctccagggaaacccaagccctgcagcgcatggaacagaagaagtggaaccgatacttccggaacaaggctatctgagagcagttcttcctggccctcgggttcatgtaacggcataactggaaccaaagctcactgagcaagggtatatgagagcgggtctcctcgtacaggaagtagaagatgttttgtttgggggcctcgtcgtcctcctccatgtcattggccagatagctgaggacagaaatcaggttgctgctcaggggcaccaccaggagagacctccggctgaggtcagcttcccagagaggaaggtaagggaccgtccctagctcaggactggcacccaccctgcagagagccacgccttcctcaggagggctctgctggacagagacctgatcaagggcgtctcccactccttcaggatggagacaaaaacccaactggtggccgagagtggtggcttatgcctggaatcccagcacactgggaggccgaagcaggaggatcacttgaggccaggagtttgagacgggcctgggcaacatagcaagaccctcgtctctattaaaaatataaaaaatacgccaggcgcgtggctcatgcctgtaatcccagcactttggaaggctgaagcaggtggattgcttgagaccaggagtttgagaccagcctggtcaacacagagaaaccccatctatactaaaaatacaaaaatcagcctggtgcggtggcacacccattagtcctagctactcaggaggctgaagcataagaattgtgtgaacccaggaggcggaggttgcagtgagccaagattgggcccctccattccagcctgagagacacagcaacactcttgtcttgataaataaataaataaataaataaa

SEQ ID NO: 675891 - DNA, 842 bp, Homo sapiens
  misc_feature (39)..(39): n is a, c, g, or t
  misc_feature (63)..(63): n is a, c, g, or t
  misc_feature (127)..(127): n is a, c, g, or t
  misc_feature (132)..(132): n is a, c, g, or t
  misc_feature (185)..(185): n is a, c, g, or t
  misc_feature (217)..(217): n is a, c, g, or t
  misc_feature (220)..(220): n is a, c, g, or t
ggtaaagatggagctggaggaagagtcagccttgggagntgggctctgggcagcaggcggcancagtgaaggacaggacacacagttctagacctggtatggggagagatccccaggtggcgccagnctggncctgaatagggctctatcccaaggctgcataaagggcacactcagtgccccanagctcttcaggcccttcctgtgcctggcggcntcncacgctacccttttgtacctctgagaaggctctggacccacgcaggagcacacgtgtcgaccaggggcgagtatcttgtctcagggaccgtccgtatcgcagagccctgagccatgacccagccccagacaccaggtccagagtgctccagtctgaacctggtatcttcgttccaagcacagccattaccctcgttggagtcagactcaagcatctccaaagaagaacttttgagagcccaggcgctgagagagcagggtcagacactcccgagcctctcggtacagatgtaggggcagacacaggtaggcttgcagctgcgggaacagtgcacacctctgcacctaagcactcccattcctggccagcatccttggggctcatctcatacaatagcccacggtctcaagagctacctccttctccagatcttctcgtcctcagggctgggtcaccagatcagcagatgtagcgttacatgtactgccgatgcattgcggacaggcaggaagaagtttgaggggaaagggcaatagctttgggttacaattgcagggtaaattctacgtagtacttgggagatatcaaaaagtatgtactggatgggtgggcagaatgaaag

SEQ ID NO: 675892 - DNA, 1350 bp, Homo sapiens
gccattgaaatggaccagtgctggacaggcgaatctcactacctgcccggagctgccctgcaccgcgtacagacgtgtgtccctgagctgactgtggatcagtgtgtgacactggcagccctggctgacggcattaagatgcttcctgctggcactgcccgctgccagccagactgtccatctgcctgcctgccatgtggtgtgctgcatccctgactgtggcagtgatgcccatgcccatgacttccctggactgctgcttggtggagaagcttgcttcagtgaacacttgtgaaagaagcaggtgaggttagcagccgccacagcagcttggacgagctaacacccgcgcgcaaggccagaagcctggaccccacagcaggtccatgggcccacatggagtgcgagcaccaggcactaccctgacacggaatgctagacgattggttacatcggagtggggaaccagtcatcaaaagggggacagggacgggtggaccccggacgggacacaacagtaccgaagggaagccaagacacgcgcaggaacatggcagaaccgtaacacacatagactcacgcgcacgaaaatgaccggacagtaggcacacaaggcaatcaccaggagggcaaccgaacggataaccaaccggcacagtggacagcaccacaacacgagggggacgaaaaggaggacgaggagaacaagcgcgcaggcagaggcagctgagcgacgtaagcgggcgtacgtttgcagccacaaacggcacggaacgaggacgcatgccaaccccaccgacgagggacgaagacagtgccacggaagagccccggcagaaccgaggacgcggaaagcgatagtgacacgtcacccgggaacgggcaggacggaaacaccgagtccgaaagacagccagagaagtgacagcgcggatgacacacacaagtggccagaaaacgcgcgagagcagaacaagaacccgtgggcggagccgcacacgaccggagggaggacagcacacagacggacggcacaagaccaaaagggcgcacaagaggaagacaacgacaagacaacagcgggcgagcagagcccaccagaacgagactaaagccgcagcgaatagaggagggtcgccaaagagcacagagtgacacaccaaaagaacgacgagcgagaacgcgccgcaagagaagacgtcgggggacgcgcaacacagacgagaacagaggaggaaccgcaaaggaggcgaacaaggagaggacgagggacacgcgagacgagaagaagacagggagcggacgcacaggagggacagacacaggcgagggccgaagtcaagccgagaa

SEQ ID NO: 675893 - DNA, 477 bp, Homo sapiens
acccactgtacatagactagtggaggcactgaagctggctccatcttgctaatgtgtagtagatgaatcgaagacgacgtattaaagctggtattaagtaacagataatcttctctacttgctctttcacgctgtcaccagtaaacatatacttcatgtgatagaggaagtcacagatgggatccaagtaatttaaatgggtgctacactggtcaacattcagcagcatgtcataaaacgccacaccaatctctatcatacaacgagtactctcttgctgaaatctttgtaaaactggtccaacaagatggtatacataaagcaactggaatacggacttcactataggaagaagtaattccgtaagaaacttgggaatgagcgaaagtagtccgaagctaaaatggggcacacagactgtgccagagctaaagtatagctaccactcatctcagagtaggactgatgacaggccgt

SEQ ID NO: 675894 - DNA, 535 bp, Homo sapiens
gcagtaggggtggcttaagatcaggcagataacaagataacctgaaggactcgaataacatcgtatccagtgagtcctgcaagaattcaggctctttctcatccagcagctcccatgctgagcctggggcatgatgggtctaggtcttcttccacttcttggtacttttcaatttcatccatgtcaatagccaagccaacacgctgttgctccaatacgtaaaaggcacttctgtagggctggcatgagttagtcagtacaagacaacctgttgcctcttggtcctcctttttcacttgaccccagcgatgtctgcctatgtcaacagccatgcagacttgctgttcctctaatgagtgaaatgtgctgctgtaagactggtacgaggccaacatttcaggaggaattgagagagtcgaataaccttcatcccaggactcctgggggacttcctcctcttcagactcctgcagcatcctgggagacactggcccttgttcttcctcttcctcatcatcagttacatttactggaa

SEQ ID NO: 675895 - DNA, 220 bp, Homo sapiens
acgacttgataggtcatagcagtatcacgcgggcatcacggagctgcaggagagggtagatccagcgagaacttgactacactcacatggctccaggatgccctgtgccttcccagcccagtgggcctgctctaccagtgcacaggagtggaattctgaagctctggcctagaggacttcaggcccagaggcacacaaaacagtacataactcatcaatt

SEQ ID NO: 675896 - DNA, 351 bp, Homo sapiens
  misc_feature (108)..(108): n is a, c, g, or t
  misc_feature (222)..(223): n is a, c, g, or t
  misc_feature (272)..(272): n is a, c, g, or t
  misc_feature (298)..(299): n is a, c, g, or t
gaaaaaaaaaacccagaaagaaaaaaaaaaaaagaaaagacagatttgactgttgttttgggcacacaaacagatgttataggaccaagcctgaaaaattagatgttnggaaaggacagatttaggctctaagaaattcacacaagatgaggtctttaaaaaaaacgatttcctggatggtggagtttttaaaaacttaagcgccgcaaatgagataataannaagccacccctccaacctctcttcccttttaggcaccattcccagcttntatgggagggaacgatttcgaaccannacttaaggaattagtgcaaactgaaataaaaagaagaaaaggcaaacaacac

SEQ ID NO: 675897 - DNA, 214 bp, Homo sapiens
ggcgagtcgagtctaaggcttccgcctcatactccacattatttggcttgctctctagtgtatcatctcttatgttcagtatgttgttattattacgtgaaaagctttgccacatttctcacatttgtgtggttcctctccagctatacattatctgatgttgagtatgggttgtggactgcttaaagacctccccacatttttcagcgtctga

SEQ ID NO: 675898 - DNA, 927 bp, Homo sapiens
acactataaggatcccctgcctctgatgtcctgcagtaaaaggagagttacacagtaaattaatagtaagtgtgtgtatatgttatttaaaagtgatgtgacagggaagctgattattagagattattaacagaaaaacacttggaggtatgtgatgggatctgtgcagttgggacagatttcagtctcatctacgtttaaataactgaatagtgatatttgataaaagctataatagttaacagcagtccttattatgggtcagagtatgaagacttattgactaggtttaaaataaggaagggttacaggaactctaaggaatcatagatagcagctgtggaaagcagctccccacctcttgacctaggggaataaaggaggcagttgaaattactgctaacactgagatcttttaggggcaagtgttgtgctgctgttgctgtctcttgaagagtggccccatgggcatgggatcgagacttcaaactgagaaggaggctccagctgcctggtgctagtgtctctgatggagatgatgagattggttctcctagggttggataaattggatattgggttcagctgctgctgttgggcattaccactgttggggtgatgcagataaagagacaggaaggaacaagtcccttctctctctatccttgtctccctctagcagttgctattggtagaacctatggatcgagctgggaaatcagaaatcaggttgctgagtcccagcatcacagcagaatataaaggatggtttggcattggaagacagtaaccgaactggtctagtaggttcagacaatatctattgcagtgtgtttttgttcgctggacttctgtatataggagtgttttaagttttttgttttaaataacatttgtctataggaaatttgtaactacataaagttg

SEQ ID NO: 675899 - DNA, 85 bp, Homo sapiens
gctgatcctgtttatttggcagtaaaacgagacaatccagcagcccagtagggacaggtggacttaacccttctgtcgtcttctc

SEQ ID NO: 675900 - DNA, 1321 bp, Homo sapiens
  misc_feature (307)..(307): n is a, c, g, or t
cttagggcgtcttcttgactgaatctgactccattggaggctgtgaatccatggaacccagatgcacagtgcctgcgtggtcgtaccactgccccttagcactctgctcgcccgtggtgcatgagaccacgagacccccatgagcagcacgagcttgatcccacacgtgatgatgccatcatggctggtctccaagcctgcagcctcgcttgctcgtcagatccatgggtgtacatcgcaccattctcaatgggccacaaggcgccggtctgactcttccaggcttagcggagtgtcgacagatgtngtctcatcgattcctggaggctgccgcatggagtcactagggctgctctcatggttgggcctttgccgataaggacgaggctaagggtagtgccgcgaagactatacacgcataggacaaaccatggagtggacgggagcagtgggcaaagtccttactctccctaaaaggctaccccaatgcaacgttcgagacacatggggcagaccagcgtacaagacacaccagggatcctcgctgctggaggaacaggggagacatcataatgccaaccaccaaggcccttcgagtacacgctcgccactggggagtcaacgtgcctgacatggctagcggagcagctccgccgggggaaagtagcctccctgttggggcccttctaagcatggcgtcgggccacgatcacgcgcactgggagaggccatcagggcccatgttgttgccctttgggaaccttcacagggattgcgcttcgcttggggacccattctgggtgttcacccataggggtatcgacttggggccttgcgccatcacgaaggcccttccttccttagtttggcgcattcgctaacacccagtgagtgtgtgttggcgctcgtccctgggcgtgggttgagcgctagatggagcaccccttttggcgtgtgtcgtgcgttcattagggcttccctcctttcccacttagggggctttgtgtggaactcgcgttgtgggcgacgccttgcgcaccattacacaaaggcctaggccgccaaaaccgtcccaattgcgaggaccccgcgttattcagacccaatcgtcgcttggacgccccaagtgtggaagtatcgttcaagcccacaaaggagataaccttcggaacgcaaggcgatccacagtgcccattttccgtggcgcgacaggaaaggacccccccacaagagggggacccccccgcgtttaagtgccataggcccacccgggtctaacaaagtatgccttccacacgcattccatggaatataacgttcc

SEQ ID NO: 675901 - DNA, 445 bp, Homo sapiens
ctttgtacttctccttgatattaccctttgataaaaaaaaaaaaaaaaaaaaaaaaaaaaaaaaaaaaaaaaaaaaaaaaaaaaaaaaaaagatgaacaaaaaaaaactcaccataacagacaccatatcactttctttttctcgcctttttctttgcctgctctctccttccttcctttcttacccctctcgagcggggtgtcgcgtggcggtcgcggtcggttagcggcgctcgtggcgtgtcgtttgcagcggccaggttaggctgcttgcatttgtatcatatactctttttttgtctggctgcccacgtctagctgcgctggttgtaggtgcgtgcgggacgtagtatgtggttgggcctcctcgtctttgctgcgttgtcggtgtttatcatctcttcttttgtgtgtgtgctagactctgttgtagcgcctgcgtgcg

SEQ ID NO: 675902 - DNA, 176 bp, Homo sapiens
  misc_feature (176)..(176): n is a, c, g, or t
gggcggacattcagactgagcgtgcctaccaaagcagccgaccatctttcaaaacaaggaagaggggtcctgctgggggaaactggcaaggagaagctcccgcggtactacaagaaacaccggtctgggcttcaagaacacccaaggaggctattaagggcacctacatatgacan

SEQ ID NO: 675903 - DNA, 1656 bp, Homo sapiens
  misc_feature (1656)..(1656): n is a, c, g, or t
gctggagcggcggcggtgctgcagctagcgggtctgtgccgcggagcggaggtgcagctcggcttcccccgtgcaccctcgtctccctagaagcaattgccagaacgacgggtggtaaacaggacgggcaagtaccatagcataagtagatagcgacacacgtagtagggcaccaacaatagctacaagaaaagcatggagaaacgacaggataagcgagcagagcaccacatacgaagaagaactactcatacgagacggacagcacgctactgcatacatggtcaatagcatagcgaagcagaacacacaggataaagaggacgcagcagaccagacacaatataaaaaccaggatcaccacaacaagagaatgcaaaaggaaacaaacaagagagaggcgacagacacaggagagggagagaggggacaagacgacgaacagacaaagaatagacaaaacaggaagaagcgacaagaacaagggaggaagagaaggagacacacaataaaaacacacaggaacaacgagaaacacacaagagagatgagagacaagaaagacaacacgaagacaggacaacagacaagagaagcaatgagcacagaatacaaagaaagaacagaccagacacacgccacaacaaaagacaaaagagacagcaaacaacaccatgaaacacagctcaacatagaagaaaaaagaaagagacaacgaaagaaacggaagcagcaaagaagacgaggataagaggcggacaaggaaaaagaggagaaaagaaaaaagaatgaagaggagagaacgcaagaacgaagaggacaaaatgagaacacacacaaacaacagcacacaacacacaaacacaacatagaggacaaacagaaagaaaaacaagaacaacaaaaaaaaagacaagaacgacgagaaaggaaacaaagacagaagagacaaaacacacaaaagaggaagaacagagaaacaacaataaagccacacagaaagagaaagagcaaataaaaaagagacgagtagaggagagcaaagagagtagacaacaacaaggacaacgaagacaaaaaacgaagaaagaaatagcaggagagaaaaaaaaagaaacacacaaagacgagacatcacatacagtagaaagacagaggaagaaaagaaagacaacgaggagaagacaccaagaaagagacaaaaagacgagacccaaagtagacacaacagagaaaaaaaatagcgcgaaacgccgaagcgacgagacaaaacaataacagacgagaacaaaaaaagagaagacaccacaagcgcagctagtaacaacggccgacacacagaagacgaacgaaagcagacaggaagacaaggataaatagagagtaagatcagaaaataaagaataagataagtaggacgaaaaaaaaagcgaagaggcacgtacgtcagttaatgtagaaaacagaagaaagaaagagaagagaacagcaagagaagtagagacacaaagaagaagaaggatggaagacatacagagaagaacgactagggaacgaacgagtaataagagaaaacatagagaataagatagaaggataagacgaaagaagagtagtgaaaaaataattattggtgtttctatgctgacgcgcgan

SEQ ID NO: 675904 - DNA, 353 bp, Homo sapiens
  misc_feature (1)..(1): n is a, c, g, or t
  misc_feature (7)..(7): n is a, c, g, or t
  misc_feature (20)..(20): n is a, c, g, or t
  misc_feature (38)..(38): n is a, c, g, or t
  misc_feature (42)..(42): n is a, c, g, or t
  misc_feature (138)..(139): n is a, c, g, or t
  misc_feature (141)..(142): n is a, c, g, or t
  misc_feature (144)..(145): n is a, c, g, or t
  misc_feature (189)..(189): n is a, c, g, or t
  misc_feature (193)..(193): n is a, c, g, or t
  misc_feature (208)..(208): n is a, c, g, or t
  misc_feature (238)..(238): n is a, c, g, or t
  misc_feature (240)..(240): n is a, c, g, or t
  misc_feature (249)..(249): n is a, c, g, or t
  misc_feature (268)..(268): n is a, c, g, or t
  misc_feature (325)..(325): n is a, c, g, or t
naaattnaatccaaattttnttaaggatttcaggttanatanttcaaatttctagaatggaatggaatcattttgggactggaaaaatggcataaacactgacgtcccttaaaacttcaattttataaagaaaattcnncnncnnaccacatcccctttatgtaacaagactacgcgtattatctacancttnactttggcaatagcnatttcctaaagaatgaaaaagatgattttncnacttccgtnccttaaaaatgggattctntctttgaagttcagaaaaagctgcatttcggtgaactatggttaaaaaaaaaaagcncatagtgtctaatcaaagcaaaggaaat

SEQ ID NO: 675905 - DNA, 460 bp, Homo sapiens
tattgatcaaagagacatattgcaaaagtccagagagtataaaacatattcagacccagtctaggccttactccagagtcgagctagttctgcaccttctagaatgtgtatcaaagaagtgtgagcttgcatgatttaaaattcaataagaacttgcaatacaagattccgggtagatgttgttcggctatgtccccagccgaatctcatattgaattgtagtacccataatctccacatgttgtgggagggacccagtgtggaggtaatacagggatttcctccgatgctattcgcagtgatagataagttctcatgcagatctgatgtgttttataatggggcttccccccttcgtctcgtgcgtctcattcgttcttcttgccaccacgttgaagaaaggacactgcttgttttccgctttccaccattgattatcagttccctgattccttcctag

SEQ ID NO: 675906 - DNA, 106 bp, Homo sapiens
acggtgcacacgttatgaacgggaagaatggcgtggcatggtggctcctggaaaagctcacccaggcagaggtgccctgagctcggggccttggttttcttgtccc

SEQ ID NO: 675907 - DNA, 817 bp, Homo sapiens
ggactctatgagctagcccgtagtgctgttgtatactgggaaagtgctttgtaccgaggtatgcagtgactatacccacagacatgaaaatcaaccttagcgagtaaagatgacccaaagcattaagaatgacaggacaagagaaagtcagaatcggctactaaatactgcccctacatctttcctgtgagcccgagggcctcagtccataggctagtgagtcatcttgccctctgaagcttacttttggcttctttggtttcaagcaattgagaaactgtcacattgccccgtgatgttttgacagttctcctatgtgctcctggtagtgccacgtaacgggaagaaccaagtgtgcgcattctcttctccactggactttaccgttacttgttagtctacagccccactgtttccacccatccccttagccaacctctgtcttctgtgaattattctgagcaatattgtcctatcctcttttactatatggagttctctcctctttatatcctgagactttgacaccagatgtagactattctatctggcagctggaaatgaaaaattctttgtctgtacctcatgcctatctggtaatgtctactgggttattctctctttgagggtggctttctctggaacattggttagagcagcttagttgtcgtgtttctgggattctcttccccatatttgcgtaacatattggtctaatatattctatgcctattttcgtggcattatgctcaccataaagatatgaacctgatatagacaaggtactacctttttcaaattctgaaaggctatttac

SEQ ID NO: 675908 - DNA, 217 bp, Homo sapiens
ggtcatctagaggatcccgcagcgtcgtcagaggggagagatagtccggcaagtcagttccacggcatctgctgtcgccgaagtcgccgctgcatggtccaggtggtctcgtgctggccgtgctgcatgaagagcgtgttcaggacgaggaaacctggaccgatgataatgcatggggagcagcaggcatagtcccctacccaaaatgcacgctggg

SEQ ID NO: 675909 - DNA, 142 bp, Homo sapiens
cacgaggtggtgacctggcattctgtgaacttgccgtcataatgatacttgttcacggcctatgggactgggaatatcctgccttcaggcaattcggacgttgtcctggataattagccatgcatgcactcatggcgcttga

SEQ ID NO: 675910 - DNA, 428 bp, Homo sapiens
ggtaacagctatgacatatgaggaactgtggctagttcttcctgtgagtataaactgtttaggcgagaacatggtagctgtcttctcataccttagattgtcatttcacaaacagtgctcagaacccaaactagtggactactattagtaacgcgagacaggtttcagctcactacatggaaggaagacaatctcttatgtatgggtggtagagaacactcagaaaccaactgacattgaatagaggtggctggactaaaactcagtaactctaaagcctctttgaatgcttgagcctacgactttgtgatatatgtttaaacttatggccaaatctggatgtttttcaggagttcatgaagtcatacaaaagtttgaactaataggtttaagtctggggtccctgagtcactccttttacaagtctc

SEQ ID NO: 675911 - DNA, 2634 bp, Homo sapiens
atcttgagatcatttatggttttgcaattcaacctgaaaaatgaagtcaaagcttttatcaaaacaaagcatgtttagtgctctctgtctcactgtcttttagatgccagaccttagattttgtgatgactcctcaaccgtttagatctcggttatctcagagggatcatcagctttttaagaaaattttgagagaaaagcaagtgaagaaaagagtagtcagtgcccaacatcacggatctctcactgaacacaccatgcctggtattctctcacagtgatgtcaccatttctacctgccacgtatcggcgaaggttgggactcgactggtgtttgatcacgatgggaaaatcatccagaaaacaaacgtgcctgcttccccttcgccttctgccgtgattgtcagtttcttgagggctccccagccatgcttcctgtacagcctgcaaaactgactcctagaagtaccccaccccacccctgctccttggaggacaacgtgatcactgtattcagctctgtcaagaatggtccaggttcttctagatgatctgcacaaatggttcctctcctccttcctgatgtctgccattagcattggaataaagttcctgctgaaaatccacatctcccctgggtccggtgttctggaagtgagagagacaatgtcacacttcaaggaggcagctctctagacaggaaggttattcacgtcccatgtcaagtctagctagagttcagagcaattgagaagtgcaattttatctcctgcctttcattctataccctgcttctgaaccatcgtgttcaactgtgaaactcacactttggtgaccctgactccaaaacttaatacacccaaggtcagccccagtgatctgcttcatagcaaggactttgggtgggtcttcccagggagtagggcaccctcagagaatgtggctttggacttcatcacagctggggccttttgtgtcacttcagatctaaacttgtaaccgtgctagatctgtttctaatgtgacaacatcacgaaccacgagtccagaagcctaatccataatcctacctcctcatgacgaagtctcatgctctgtgctcaacatggttagctgcacaagatgtaaaccaaagcttcactgaaccctcgacccaaatcggtaactcaagtgcatcaatcataatgaacctccccgaactcagtatttatgattatttttgaggcagggtctcactctgtcgcccgggctggagtgcagtggcaggatcagggctccctgcagccccgacctcccaggctccagcgatcctcccgcctcagcctcctgagtagttgggagtagagatgcctcccacatcgcctggctaatttttgtatttttgtggagaggggatctcgccacgttgcccaggcttgaagccagatcaagcaattgggttccttcggatttccgaaatagaccccaatattctgcctttaccccggaggatgcagatgtaccttctctcaggccgatgacctcaggcctccacggtccctggagctctaggaaaggtgagcgcgatctcgcgcccacacccagtgctctgggtcataagcctggatctggaaaaacaaacgccctttgagaagacggggactccccaggatacccctctctcccctcgtccagcctccagcccacccgattcctccccacatcctccacctccccaggccccacccacctcctccaactcctccagggaaacccaagccctgcagcgcatggaacagaagaagtggaaccgatacttccggaacaaggctatctgagagcagttcttcctggccctcgggttcatgtaacggcataactggaaccaaagctcactgagcaagggtatatgagagcgggtctcctcgtacaggaagtagaagatgttttgtttgggggcctcgtcgtcctcctccatgtcattggccagatagctgaggacagaaatcaggttgctgctcaggggcaccaccaggagagacctccggctgaggtcagcttcccagagaggaaggtaagggaccgtccctagctcaggactggcacccaccctgcagagagccacgccttcctcaggagggctctgctggacagagacctgatcaagggcgtctcccactccttcaggatggagacaaaaacccaactggtggccgagagtggtggcttatgcctggaatcccagcacactgggaggccgaagcaggaggatcacttgaggccaggagtttgagacgggcctgggcaacatagcaagaccctcgtctctattaaaaatataaaaaatacgccaggcgcgtggctcatgcctgtaatcccagcactttggaaggctgaagcaggtggattgcttgagaccaggagtttgagaccagcctggtcaacacagagaaaccccatctatactaaaaatacaaaaatcagcctggtgcggtggcacacccattagtcctagctactcaggaggctgaagcataagaattgtgtgaacccaggaggcggaggttgcagtgagccaagattgggcccctccattccagcctgagagacacagcaacactcttgtcttgataaataaataaataaataaataaa

SEQ ID NO: 675912 - DNA, 218 bp, Homo sapiens
  misc_feature (76)..(76): n is a, c, g, or t
  misc_feature (110)..(110): n is a, c, g, or t
  misc_feature (127)..(127): n is a, c, g, or t
  misc_feature (147)..(147): n is a, c, g, or t
  misc_feature (198)..(199): n is a, c, g, or t
ttgagaaggaacagattcagtcagaggggatgtagtaagttaaaatggtgttatccactcactagatgtatgaccnatttctgataaatacatcaaaatactactttctncatcaaaatacaactantaaaatagagaaacggacangtatgaatgatggttcttaggctacaaagtggcctctaaacaagaggtggnnaagttcaagtctattgttt

SEQ ID NO: 675913 - DNA, 1557 bp, Homo sapiens
taaattttattttattttggaaacagagtctcactctatcacccaggcgggaaaccaggggcacaatctcgggcttcactgtgaaacctctccacctctccagggtttcaagcatattcctcctgtgtgtctcagctctccccgagtatagcgtgggattacggggtggacccaggcccaagcgccgatcccccacaacagcctcactcagcgattgtgaccgtggaactctctgtgtgtcttcttagcgggccgtgcgtggtgcctcctgtgggcgggaaatctcctctcccccacactctcgttcatctcaaatgtgtggtgggctcctccctctgtgggcctttacacctgtggctgtgccctatacaggccccgccgggttctcctcgtctcagaggggggaatgtgtggtgcgtgggtggaaagcttttcgctcctgtgggtgtgcctttttttctcaatctctgtggtggggccacaagcctgtgtgtggtgggtgtgtggctcttctcgcttaaacatatcttcatatcgaggcccttgggggggaggtctcaccatttcctctctctcccctctcagcgtggccatctcttacccccgagggcgcgcggagaattcttcgcggggtgggctcccctcaggggacacgtgggggacagcgtggggcgtgctgtgggggggccccgtggttccatacgcgggggccctacaccacgagggcgggggcctcttccccccttcagaggagaaaccgcgtggtttgtgtccatgtgggcgggggaataatccgcgtggtcctcgtgtctgtgctgtgtggcccaggcataatctcccttgtggggtgggccctccacaattcttcccgtgggggggcccccgaagaggaacccccgttgggcagtgcggtcaacggaacagaacgccagaaaggaggacgccaagcccccgggagaagagccccccctctaatatagaaacaacccgtagggccccccgggaggagacttagaaaaagcccaagagggacttcacaaggcttccaagggacatctttctcccttctgctggcacacacgggggagaacaaggcgggttcacaaaggggggacaaggcgcagtgtgggcggcacacttaggtgtcccccttagagggacctgaaaatctaactttaggcggaaggaacatttccctatccacaccagggggagattagttttaggaaacccccctatttatcctggggaaaagcatctccgctggagaatacgaggcggcccacagaaaaacccgggcggtggacccaccaattggctatccaagggggcgaggcaatgtagtacccccacaaagactaaatccgacagaagagggaaacccgcacaaccaggtagagcacgcgcacagagtgaagtggcaacgccaggaggtgatcccatctggacaaacgacatgaacagaagcacagcaacgacacaaacgcagcgcagcaacaacagaaagaaggaccggcaggacgacaaccaacctagcaccccgcgatagtaaacaca

SEQ ID NO: 675914 - DNA, 3537 bp, Homo sapiens
  misc_feature (3512)..(3512): n is a, c, g, or t
atcttgagatcatttatggttttgcaattcaacctgaaaaatgaagtcaaagcttttatcaaaacaaagcatgtttagtgctctctgtctcactgtcttttagatgccagaccttagattttgtgatgactcctcaaccgtttagatctcggttatctcagagggatcatcagctttttaagaaaattttgagagaaaagcaagtgaagaaaagagtagtcagtgcccaacatcacggatctctcactgaacacaccatgcctggtattctctcacagtgatgtcaccatttctacctgccacgtatcggcgaaggttgggactcgactggtgtttgatcacgatgggaaaatcatccagaaaaccccctacccccaccccagagggaccacagtcagcgtgaagcagttattttctacgctacctgtgcgccataaggaatttcaaaggaatattaagaagtacagaacctgctaaggccatcaaacctattgatcggaagtcagtccatcagatttgctctgggccggtggtactgagtctaagcactgcggtgaagaagatagtaggaaacagtctggatgctggtgccactaatattgatctaaagcttaaggactatggaatggatctcattgaagtttcaggcaatggatgtggggtagaagaagaaaacttcgaaggcttaatctctttcagctctgaaacatcacacatctaagattcgagagtttgccgacctaactcgggttgaaacttttggctttcgggggaaagctctgagctcactttgtgcactgagtgatgtcaccatttctacctgccacgtatcggcgaaggttgggactcgactggtgtttgatcacgatgggaaaatcatccagaaaaccccctacccccaccccagagggaccacagtcagcgtgaagcagttattttctacgctacctgtgcgccataaggaatttcaaaggaatattaagaagaacctgctaaggccatcaaacctattgatcggaagtcagtccatcagatttgctctgggccggtggtactgagtctaagcactgcggtgaagaagatagtagaaaacagtctggatgctggtgccactaatattgatctaaagcttaaggactatggaatggatctcattgaagtttcaggcaatggatgtggggtagaagaagaaaacttcgaaggcttaatgatgtcaccatttctacctgccacgtatcggcgaaggttgggactcgactggtgtttgatcacgatgggaaaatcatccagaaaaccccctacccccaccccagagggaccacagtcagcgtgaagcagttattttctacgctacctgtgcgccataaggaatttcaaaggaatattaagaagaaacgtgcctgcttccccttcgccttctgccgtgattgtcagtttcttgagggctccccagccatgcttcctgtacagcctgcaaaactgactcctagaagtaccccaccccacccctgctccttggaggacaacgtgatcactgtattcagctctgtcaagaatggtccaggttcctctcctccttcctgatgtctgccattagcattggaataaagttcctgctgaaaatccacatctcccctgggtccggtgttctggaagtgagagagacaatgtcacacttcaaggaggcagctctctagacaggaaggttattcacgtcccatgtcaagtctagctagagttcagagcaattgagaagtgcaattttatctcctgcctttcattctataccctgcttctgaaccatcgtgttcaactgtgaaactcacactttggtgaccctgactccaaaacttaatacacccaaggtcagccccagtgatctgcttcatagcaaggactttgggtgggtcttcccagggagtagggcaccctcagagaatgtggctttggacttcatcacagctggggccttttgtgtcacttcagatctaaacttgtaaccgtgctagatctgtttctaatgtgacaacatcacgaaccacgagtccagaagcctaatccataatcctacctcctcatgacgaagtctcatgctctgtgctcaacatggttagctgcacaagatgtaaaccaaagcttcactgaaccctcgacccaaatcggtaactcaagtgcatcaatcataatgaacctccccgaactcagtatttatgattatttttgaggcagggtctcactctgtcgcccgggctggagtgcagtggcaggatcagggctccctgcagccccgacctcccaggctccagcgatcctcccgcctcagcctcctgagtagttgggagtagagatgcctcccacatcgcctggctaatttttgtatttttgtggagaggggatctcgccacgttgcccaggcttgaagccagatcaagcaattgggttccttcggatttccgaaatagaccccaatattctgcctttaccccggaggatgcagatgtaccttctctcaggccgatgacctcaggcctccacggtccctggagctctaggaaaggtgagcgcgatctcgcgcccacacccagtgctctgggtcataagcctggatcttcctccagggaaacccaagccctgcagcgcatggaacagaagaagtggaaccgatacttccggaacaaggctatctgagagcagttcttcctggccctcgggttcatgtaacggcataactggaaccaaagctcactgagcaagggtatatgagagcgggtctcctcgtacaggaagtagaagatgttttgtttgggggcctcgtcgtcctcctccatgtcattggccagatagagagaccacggaagagaatagtgatagcgcttggtatattgtcccagaaggtgaagccggccccggctggaaataaccgctatgacccatagccaggagatacttgtccgacaccctcagatctttgtcccaggccaggaatcttttaatgacaggatcctctgtgattagagagcagatgtcagtgtgagaagcaggacagggtttccgtgggagcagcagggcagcgaggagaagtgtgcctcccggggggaagtctcaggattgtggccgcgggtgaggtggatgggagaggggagaatgactttcactgggcaagggagagaggctcctgctctgagactcccctgagaagaggccgaaggaggccctgggtgtgagaatctacaggatgtagagctgggaatcagccaggaccccctccagcagacacggagggaccactgcagagtcataaaggaattcccatcatttcctcatgagacagtcacacatcagggtgtgaccatggccttggtatcccccactatggatggagacacttaggtttagaaaagtcagtaagagacattaagtttcagagggcacagctgaaaccacttttttgatttttgattttgtttttctttatttgatttttatttttatttatttattaatttatttcnagactgtgtctcacaaaaaaaaaac

SEQ ID NO: 675915 - DNA, 2624 bp, Homo sapiens
atcttgagatcatttatggttttgcaattcaacctgaaaaatgaagtcaaagcttttatcaaaacaaagcatgtttagtgctctctgtctcactgtcttttagatgccagaccttagattttgtgatgactcctcaaccgtttagatctcggttatctcagagggatcatcagctttttaagaaaattttgagagaaaagcaagtgaagaaaagagtagtcagtgcccaacatcacggatctctcactgaacacaccatgcctggtattctctcacagtgatgtcaccatttctacctgccacgtatcggcgaaggttgggactcgactggtgtttgatcacgatgggaaaatcatccagaaaaccccctacccccaccccagagggaccacagtcagcgtgaagcagttattttctacgctacctgtgcgccataaggaatttcaaaggaatattaagaagtccccacccctgctccttggaggacaacgtgatcactgtattcagctctgtcaagaatggtccaggttcttctagatgatctgcacaaatggttcctctcctccttcctgatgtctgccattagcattggaataaagttcctgctgaaaatccacatctcccctgggtccggtgttctggaagtgagagagacaatgtcacacttcaaggaggcagctctctagacaggaaggttattcacgtcccatgtcaagtctagctagagttcagagcaattgagaagtgcaattttatctcctgcctttcattctataccctgcttctgaaccatcgtgttcaactgtgaaactcacactttggtgaccctgactccaaaacttaatacacccaaggtcagccccagtgatctgcttcatagcaaggactttgggtgggtcttcccagggagtagggcaccctcagagaatgtggctttggacttcatcacagctggggccttttgtgtcacttcagatctaaacttgtaaccgtgctagatctgtttctaatgtgacaacatcacgaaccacgagtccagaagcctaatccataatcctacctcctcatgacgaagtctcatgctctgtgctcaacatggttagctgcacaagatgtaaaccaaagcttcactgaaccctcgacccaaatcggtaactcaagtgcatcaatcataatgaacctccccgaactcagtatttatgattatttttgaggcagggtctcactctgtcgcccgggctggagtgcagtggcaggatcagggctccctgcagccccgacctcccaggctccagcgatcctcccgcctcagcctcctgagtagttgggagtagagatgcctcccacatcgcctggctaatttttgtatttttgtggagaggggatctcgccacgttgcccaggcttgaagccagatcaagcaattgggttccttcggatttccgaaatagaccccaatattctgcctttaccccggaggatgcagatgtaccttctctcaggccgatgacctcaggcctccacggtccctggagctctaggaaaggtgagcgcgatctcgcgcccacacccagtgctctgggtcataagcctggatctggaaaaacaaacgccctttgagaagacggggactccccaggatacccctctctcccctcgtccagcctccagcccacccgattcctccccacatcctccacctccccaggccccacccacctcctccaactcctccagggaaacccaagccctgcagcgcatggaacagaagaagtggaaccgatacttccggaacaaggctatctgagagcagttcttcctggccctcgggttcatgtaacggcataactggaaccaaagctcactgagcaagggtatatgagagcgggtctcctcgtacaggaagtagaagatgttttgtttgggggcctcgtcgtcctcctccatgtcattggccagatagctgaggacagaaatcaggttgctgctcaggggcaccaccaggagagacctccggctgaggtcagcttcccagagaggaaggtaagggaccgtccctagctcaggactggcacccaccctgcagagagccacgccttcctcaggagggctctgctggacagagacctgatcaagggcgtctcccactccttcaggatggagacaaaaacccaactggtggccgagagtggtggcttatgcctggaatcccagcacactgggaggccgaagcaggaggatcacttgaggccaggagtttgagacgggcctgggcaacatagcaagaccctcgtctctattaaaaatataaaaaatacgccaggcgcgtggctcatgcctgtaatcccagcactttggaaggctgaagcaggtggattgcttgagaccaggagtttgagaccagcctggtcaacacagagaaaccccatctatactaaaaatacaaaaatcagcctggtgcggtggcacacccattagtcctagctactcaggaggctgaagcataagaattgtgtgaacccaggaggcggaggttgcagtgagccaagattgggcccctccattccagcctgagagacacagcaacactcttgtcttgataaataaataaataaataaataaa

SEQ ID NO: 675916 - DNA, 264 bp, Homo sapiens
tctgctcggaccacagcaaggaaacaatcaccgagtgaaaagatacccagaaaatgagagaaaatatttgcaaaacctacattgccgaaggggcaaatatctgaatacataaggaattccactcaactcaatagtcgcaaatcaaacaacctgtttgaatgacagcccctggacctaaaatcggtttctctcgagaagcaatgttccgagagcatccctctgaagagttgcggacgtgcaggacagtgggatcctcgtagcagt

SEQ ID NO: 675917 - DNA, 2630 bp, Homo sapiens
atcttgagatcatttatggttttgcaattcaacctgaaaaatgaagtcaaagcttttatcaaaacaaagcatgtttagtgctctctgtctcactgtcttttagatgccagaccttagattttgtgatgactcctcaaccgtttagatctcggttatctcagagggatcatcagctttttaagaaaattttgagagaaaagcaagtgaagaaaagagtagtcagtgcccaacatcacggatctctcactgaacacaccatgcctggtattctctcacagtgatgtcaccatttctacctgccacgtatcggcgaaggttgggactcgactggtgtttgatcacgatgggaaaatcatccagaaaaccccctacccccaccccagagggaccacagtcagcgtgaagcagttattttctacgctacctgtgcgccataaggaatttcaaaggaatattaagaagtacagaacctgctaaggccatcaaacctattgatcggaagtcagtccatcagatttgctctgggccggtggtactgagtctaagcactgcggtgaagaagatagtaggaaacagtctggatgctggtgccactaatattgatctaaagcttaaggactatggaatggatctcattgaagtttcaggcaatggatgtggggtagaagaagaaaacttcgaaggcttaatctctttcagctctgaaacatcacacatctaagattcgagagtttgccgacctaactcgggttgaaacttttggctttcgggggaaagctctgagctcactttgtgcactgagtgatgtcaccatttctacctgccacgtatcggcgaaggttgggactcgactggtgtttgatcacgatgggaaaatcatccagaaaaccccctacccccaccccagagggaccacagtcagcgtgaagcagttattttctacgctacctgtgcgccataaggaatttcaaaggaatattaagaagaacctgctaaggccatcaaacctattgatcggaagtcagtccatcagatttgctctgggccggtggtactgagtctaagcactgcggtgaagaagatagtagaaaacagtctggatgctggtgccactaatattgatctaaagcttaaggactatggaatggatctcattgaagtttcaggcaatggatgtggggtagaagaagaaaacttcgaaggcttaatgatgtcaccatttctacctgccacgtatcggcgaaggttgggactcgactggtgtttgatcacgatgggaaaatcatccagaaaaccccctacccccaccccagagggaccacagtcagcgtgaagcagttattttctacgctacctgtgcgccataaggaatttcaaaggaatattaagaagaaacgtgcctgcttccccttcgccttctgccgtgattgtcagtttcttgagggctccccagccatgcttcctgtacagcctgcaaaactgactcctagaagtaccccaccccacccctgctccttggaggacaacgtgatcactgtattcagctctgtcaagaatggtccaggttcctctcctccttcctgatgtctgccattagcattggaataaagttcctgctgaaaatccacatctcccctgggtccggtgttctggaagtgagagagacaatgtcacacttcaaggaggcagctctctagacaggaaggttattcacgtcccatgtcaagtctagctagagttcagagcaattgagaagtgcaattttatctcctgcctttcattctataccctgcttctgaaccatcgtgttcaactgtgaaactcacactttggtgaccctgactccaaaacttaatacacccaaggtcagccccagtgatctgcttcatagcaaggactttgggtgggtcttcccagggagtagggcaccctcagagaatgtggctttggacttcatcacagctggggccttttgtgtcacttcagatctaaacttgtaaccgtgctagatctgtttctaatgtgacaacatcacgaaccacgagtccagaagcctaatccataatcctacctcctcatgacgaagtctcatgctctgtgctcaacatggttagctgcacaagatgtaaaccaaagcttcactgaaccctcgacccaaatcggtaactcaagtgcatcaatcataatgaacctccccgaactcagtatttatgattatttttgaggcagggtctcactctgtcgcccgggctggagtgcagtggcaggatcagggctccctgcagccccgacctcccaggctccagcgatcctcccgcctcagcctcctgagtagttgggagtagagatgcctcccacatcgcctggctaatttttgtatttttgtggagaggggatctcgccacgttgcccaggcttgaagccagatcaagcaattgggttccttcggatttccgaaatagaccccaatattctgcctttaccccggaggatgcagatgtaccttctctcaggccgatgacctcaggcctccacggtccctggagctctaggaaaggtgagcgcgatctcgcgcccacacccagtgctctgggtcataagcctggatctgaaagtggtaccgactaatt

SEQ ID NO: 675918 - DNA, 640 bp, Homo sapiens
  misc_feature (2)..(2): n is a, c, g, or t
  misc_feature (10)..(10): n is a, c, g, or t
  misc_feature (18)..(18): n is a, c, g, or t
  misc_feature (27)..(27): n is a, c, g, or t
  misc_feature (37)..(37): n is a, c, g, or t
  misc_feature (46)..(46): n is a, c, g, or t
  misc_feature (88)..(88): n is a, c, g, or t
  misc_feature (103)..(103): n is a, c, g, or t
  misc_feature (109)..(110): n is a, c, g, or t
  misc_feature (135)..(135): n is a, c, g, or t
  misc_feature (156)..(156): n is a, c, g, or t
  misc_feature (158)..(158): n is a, c, g, or t
  misc_feature (169)..(169): n is a, c, g, or t
  misc_feature (174)..(174): n is a, c, g, or t
  misc_feature (226)..(226): n is a, c, g, or t
  misc_feature (228)..(228): n is a, c, g, or t
  misc_feature (234)..(234): n is a, c, g, or t
  misc_feature (250)..(250): n is a, c, g, or t
  misc_feature (269)..(270): n is a, c, g, or t
  misc_feature (291)..(291): n is a, c, g, or t
  misc_feature (293)..(293): n is a, c, g, or t
  misc_feature (295)..(295): n is a, c, g, or t
  misc_feature (304)..(305): n is a, c, g, or t
  misc_feature (309)..(309): n is a, c, g, or t
  misc_feature (326)..(326): n is a, c, g, or t
  misc_feature (347)..(349): n is a, c, g, or t
  misc_feature (351)..(352): n is a, c, g, or t
  misc_feature (360)..(360): n is a, c, g, or t
  misc_feature (364)..(364): n is a, c, g, or t
  misc_feature (370)..(370): n is a, c, g, or t
  misc_feature (378)..(378): n is a, c, g, or t
  misc_feature (383)..(383): n is a, c, g, or t
  misc_feature (392)..(392): n is a, c, g, or t
  misc_feature (415)..(415): n is a, c, g, or t
  misc_feature (419)..(420): n is a, c, g, or t
  misc_feature (447)..(447): n is a, c, g, or t
  misc_feature (450)..(451): n is a, c, g, or t
  misc_feature (487)..(487): n is a, c, g, or t
  misc_feature (494)..(494): n is a, c, g, or t
  misc_feature (500)..(500): n is a, c, g, or t
  misc_feature (511)..(511): n is a, c, g, or t
  misc_feature (513)..(513): n is a, c, g, or t
  misc_feature (522)..(522): n is a, c, g, or t
  misc_feature (544)..(544): n is a, c, g, or t
  misc_feature (635)..(635): n is a, c, g, or t
cngcacctcnggcgccgncgccgtccngcgcagaacnatcggccgngagcgcggaagagttgagcgctgcgcgggcggactccttggnactggcttagcgcanccatcnnatcttcccagacaccctgggaccgntccaacgagcggctcctccangnggagcccttgnagggnatggccggcaccattacttccaaccgagtggtagctcattccacctcccctnangggtgnaccgcctcttggtggnagtcaggtcactggataannccatcgacaataacgacaaangncntgattgagnncggntattgattagagtttcnaggaggccctcgccatctacnnncnntgtggcangcgnaaaatnatcctgtnggaanagggacaanatgtatggtcggaacgaactagnttgnncgctacatcaaactctggacagggaanaanngcaccaggaaatatgtctctatctactatcaaggtnctggctngtcgcnaagctcgcgananccaggccangctaaaggaccaggcagctaanggacaaggccctgcagagcatggctgccatgtcgtctgcacagatcatctccgccacggccttccacagtagcatggccctcgcccggggncccgg

SEQ ID NO: 675919 - DNA, 644 bp, Homo sapiens
cgcagtggctcacgcctgtaattccagcactttgggaggccgaggcgggcggatcactaggtcaggagattgagaccatcctggctaacacgctgaaatcccgtctctactaaaaatgcaaaaaaaagttagccaggcgtggtggcgggcgcctgtagtcccagctactcgggaggctgaggcaggagaatggcgtgaacccgggaggcggagtttgcagtgagccaagatcatgccactgcactccagcctgggtgatagagcgagactccgtctcaaaaaaaaaaataattaaatatctaccatacaaaaaaaaaaagaagaaaaaaaaaaaaaaacagtgtgtggggcgcgcgccggggcccccggaaaaagctttctcgaaacccttccgggtgggggcgcgcgggggccccgtgggttaggggaacccggggccacaaaggggttccccgagggaaaatccgcgggcaatggacatagggcggtggggttttcccccacaatataaaaagagcgccgcggggggaacacggcgggtgtttgctgaaacaatttccgaggagggggttgcgggaggccacataacgggtgttctttcacacggggggtcccaggggaggcccgcaattttcaattaccag

SEQ ID NO: 675920 - DNA, 2316 bp, Homo sapiens
atcttgagatcatttatggttttgcaattcaacctgaaaaatgaagtcaaagcttttatcaaaacaaagcatgtttagtgctctctgtctcactgtcttttagatgccagaccttagattttgtgatgactcctcaaccgtttagatctcggttatctcagagggatcatcagctttttaagaaaattttgagagaaaagcaagtgaagaaaagagtagtcagtgcccaacatcacggatctctcactgaacacaccatgcctggtattctctcacagtgatgtcaccatttctacctgccacgtatcggcgaaggttgggactcgactggtgtttgatcacgatgggaaaatcatccagaaaaccccctacccccaccccagagggaccacagtcagcgtgaagcagttattttctacgctacctgtgcgccataaggaatttcaaaggaatattaagaagtacagaacctgctaaggccatcaaacctattgatcggaagtcagtccatcagatttgctctgggccggtggtactgagtctaagcactgcggtgaagaagatagtaggaaacagtctggatgctggtgccactaatattgatctaaagcttaaggactatggaatggatctcattgaagtttcaggcaatggatgtggggtagaagaagaaaacttcgaaggcttaatctctttcagctctgaaacatcacacatctaagattcgagagtttgccgacctaactcgggttgaaacttttggctttcgggggaaagctctgagctcactttgtgcactgagtgatgtcaccatttctacctgccacgtatcggcgaaggttgggactcgactggtgtttgatcacgatgggaaaatcatccagaaaaccccctacccccaccccagagggaccacagtcagcgtgaagcagttattttctacgctacctgtgcgccataaggaatttcaaaggaatattaagaagaacctgctaaggccatcaaacctattgatcggaagtcagtccatcagatttgctctgggccggtggtactgagtctaagcactgcggtgaagaagatagtagaaaacagtctggatgctggtgccactaatattgatctaaagcttaaggactatggaatggatctcattgaagtttcaggcaatggatgtggggtagaagaagaaaacttcgaaggcttaatgatgtcaccatttctacctgccacgtatcggcgaaggttgggactcgactggtgtttgatcacgatgggaaaatcatccagaaaaccccctacccccaccccagagggaccacagtcagcgtgaagcagttattttctacgctacctgtgcgccataaggaatttcaaaggaatattaagaagaaacgtgcctgcttccccttcgccttctgccgtgattgtcagtttcttgagggctccccagccatgcttcctgtacagcctgcaaaactgactcctagaagtaccccaccccacccctgctccttggaggacaacgtgatcactgtattcagctctgtcaagaatggtccaggttcctctcctccttcctgatgtctgccattagcattggaataaagttcctgctgaaaatccacatctcccctgggtccggtgttctggaagtgagagagacaatgtcacacttcaaggaggcagctctctagacaggaaggttattcacgtcccatgtcaagtctagctagagttcagagcaattgagaagtgcaattttatctcctgcctttcattctataccctgcttctgaaccatcgtgttcaactgtgaaactcacactttggtgaccctgactccaaaacttaatacacccaaggtcagccccagtgatctgcttcatagcaaggactttgggtgggtcttcccagggagtagggcaccctcagagaatgtggctttggacttcatcacagctggggccttttgtgtcacttcagatctaaacttgtaaccgtgctagatctgtttctaatgtgacaacatcacgaaccacgagtccagaagcctaatccataatcctacctcctcatgacgaagtctcatgctctgtgctcaacatggttagctgcacaagatgtaaaccaaagcttcactgaaccctcgacccaaatcggtaactcaagtgcatcaatcataatgaacctccccgaactcagtatttatgattatttttgaggcagggtctcactctgtcgcccgggctggagtgcaagcaatcctcttgcctcaggactttgaggctgcagtgagttgagattggccactcc

SEQ ID NO: 675921 - DNA, 990 bp, Homo sapiens
  misc_feature (277)..(277): n is a, c, g, or t
ggagagagagaactagtctcgagttattttttttcttgtttttaaaaacaattctctaggtgcacggtgcccaaggggtcattctagaacacggggtggcgcaccacccgcttagaagcaaggagaaacaacgaagaaagggcaaactaattgcaagaaggcagccagagcttctcccagtatgtcccgctgtgtcgtcaggaccctttccccgagagcttgggcaggtggcgcagctccggggctgtggccacgaggcagggcgttggtatcacgntatccgtggtcaggggcaataagccaagcgtgtcgtggaaggagtcgggggagtccaggaaggactggtgggggaactcaccaggccattgtgcgtgacattgggggctgacaggcgtgaaatctgccaaggccggagggacccctgaggcctcatcgctcacgagggggtcctattccgggaaggagtgcctgaatgtgcgaattcccgaggcactgtcgtcttcacaggcaagtaagggaaaagccatgtccttgaacagggagatagggaaagtatgtggccctctagccctcacctcaagagagacggctcacaggtataaatggagcaggaggaacagatgtgcccagatagtggggtcctagtcgcgggccgctaatagcccatgcgcaaaacgagaccttctcgttcagaatgcaagccgtcaggaatgcgccggtatgaaatgcagggttcatacggggggttaccacaacagagaaagcattgcctacggggggaccacaagccccgtgtgtaagcctcggggatcacgcaacgataacaagcggcgcacaggggtgatcactgggaaggcgccctagggcccagaatcggggaagccccccatgggggcccggtgcaaatgtggttggtgggggcccaagtcgtggccctccaaagaagaccaggagacactccggaagtaaactgggcaccaaagattgagc

SEQ ID NO: 675922 - DNA, 394 bp, Homo sapiens
cgagatcagccggctcagctgcccaagtgcgggatacaggcgtgaacacgcgccggctcattgccattctgagcgttagatcgaaccttgcaaagtcgggcactagatgccactgagactttagagaaatctgcttatcctggaattactcttctgggagtgctgcgggaagcactgcagttgggaggtactgggtctaaaaagagcttcatttgcataaaatacatgttggatggtttggttggctaaggactcaatggagccctagtaattgggtgaggtcgagtgggtagaaaataaaaagaagcattcctttcttccccaaccttcttttcctcaccacaaccttcaccattacggtgttacttcataaaataatgaagtaacaccgtaa

SEQ ID NO: 675923 - DNA, 1839 bp, Homo sapiens
cacttcccccagcaagcagacgtttccggttgttctctctctctccttcccacatcaaccgcaaaagccatcagccccagtgatctgcttcatagcaaggactttgggtgggtcttcccagggagtagggcaccctcagagaatgtggctttggacttcatcacagctggggccttttgtgtcacttcagatctaaacttgtaaccgtgctagatctgtttctaatgtgacaacatcacgaaccacgagtccagaagcctaatccataatcctacctcctcatgacgaagtctcatgctctgtgctcaacatggttagctgcacaagatgtaaaccaaagcttcactgaaccctcgacccaaatcggtaactcaagtgcatcaatcataatgaacctccccgaactcagtatttatgattatttttgaggcagggtctcactctgtcgcccgggctggagtgcagtggcaggatcagggctccctgcagccccgacctcccaggctccagcgatcctcccgcctcagcctcctgagtagttgggagtagagatgcctcccacatcgcctggctaatttttgtatttttgtggagaggggatctcgccacgttgcccaggcttgaagccagatcaagcaattgggttccttcggatttccgaaatagaccccaatattctgcctttaccccggaggatgcagatgtaccttctctcaggccgatgacctcaggcctccacggtccctggagctctaggaaaggtgagcgcgatctcgcgcccacacccagtgctctgggtcataagcctggatctggaaaaacaaacgccctttgagaagacggggactccccaggatacccctctctcccctcgtccagcctccagcccacccgattcctccccacatcctccacctccccaggccccacccacctcctccaactcctccagggaaacccaagccctgcagcgcatggaacagaagaagtggaaccgatacttccggaacaaggctatctgagagcagttcttcctggccctcgggttcatgtaacggcataactggaaccaaagctcactgagcaagggtatatgagagcgggtctcctcgtacaggaagtagaagatgttttgtttgggggcctcgtcgtcctcctccatgtcattggccagatagctgaggacagaaatcaggttgctgctcaggggcaccaccaggagagacctccggctgaggtcagcttcccagagaggaaggtaagggaccgtccctagctcaggactggcacccaccctgcagagagccacgccttcctcaggagggctctgctggacagagacctgatcaagggcgtctcccactccttcaggatggagacaaaaacccaactggtggccgagagtggtggcttatgcctggaatcccagcacactgggaggccgaagcaggaggatcacttgaggccaggagtttgagacgggcctgggcaacatagcaagaccctcgtctctattaaaaatataaaaaatacgccaggcgcgtggctcatgcctgtaatcccagcactttggaaggctgaagcaggtggattgcttgagaccaggagtttgagaccagcctggtcaacacagagaaaccccatctatactaaaaatacaaaaatcagcctggtgcggtggcacacccattagtcctagctactcaggaggctgaagcataagaattgtgtgaacccaggaggcggaggttgcagtgagccaagattgggcccctccattccagcctgagagacacagcaacactcttgtcttgataaataaataaataaataaataaa

SEQ ID NO: 675924 - DNA, 1768 bp, Homo sapiens
gaattccggctctctggggtaaaggcagaatattggggtctatttcggaaatccgaagaacccaattgcttgatctggcttcaagcctgggcaacgtggcgagatcccctctccacaaaaatacaaaaactaaccgtgctagatctgtttctaatgtgacaacatcacgaaccacgagtccagaagcctaatccataatcctacctcctcatgacgaagtctcatgctctgtgctcaacatggttagctgcacaagatgtaaaccaaagcttcactgaaccctcgacccaaatcggtaactcaagtgcatcaatcataatgaacctccccgaactcagtatttatgattatttttgaggcagggtctcactctgtcgcccgggctggagtgcagtggcaggatcagggctccctgcagccccgacctcccaggctccagcgatcctcccgcctcagcctcctgagtagttgggagtagagatgcctcccacatcgcctggctaatttttgtatttttgtggagaggggatctcgccacgttgcccaggcttgaagccagatcaagcaattgggttccttcggatttccgaaatagaccccaatattctgcctttaccccggaggatgcagatgtaccttctctcaggccgatgacctcaggcctccacggtccctggagctctaggaaaggtgagcgcgatctcgcgcccacacccagtgctctgggtcataagcctggatctggaaaaacaaacgccctttgagaagacggggactccccaggatacccctctctcccctcgtccagcctccagcccacccgattcctccccacatcctccacctccccaggccccacccacctcctccaactcctccagggaaacccaagccctgcagcgcatggaacagaagaagtggaaccgatacttccggaacaaggctatctgagagcagttcttcctggccctcgggttcatgtaacggcataactggaaccaaagctcactgagcaagggtatatgagagcgggtctcctcgtacaggaagtagaagatgttttgtttgggggcctcgtcgtcctcctccatgtcattggccagatagctgaggacagaaatcaggttgctgctcaggggcaccaccaggagagacctccggctgaggtcagcttcccagagaggaaggtaagggaccgtccctagctcaggactggcacccaccctgcagagagccacgccttcctcaggagggctctgctggacagagacctgatcaagggcgtctcccactccttcaggatggagacaaaaacccaactggtggccgagagtggtggcttatgcctggaatcccagcacactgggaggccgaagcaggaggatcacttgaggccaggagtttgagacgggcctgggcaacatagcaagaccctcgtctctattaaaaatataaaaaatacgccaggcgcgtggctcatgcctgtaatcccagcactttggaaggctgaagcaggtggattgcttgagaccaggagtttgagaccagcctggtcaacacagagaaaccccatctatactaaaaatacaaaaatcagcctggtgcggtggcacacccattagtcctagctactcaggaggctgaagcataagaattgtgtgaacccaggaggcggaggttgcagtgagccaagattgggcccctccattccagcctgagagacacagcaacactcttgtcttgataaataaataaataaataaataaa

SEQ ID NO: 675925 - DNA, 151 bp, Homo sapiens
aattgtagcctttgtgggatgccctgtgtagattattcagggccacagtttgattaatctacacagggcatccttcaaaggctacaattaaggctgcccctttgtagattattcattttgtggcactgaataatctccacagggccatctc

SEQ ID NO: 675926 - DNA, 111 bp, Homo sapiens
aaatcccatcaccatctaccaggagcgagatccctccaaaatcaagtggggcgatgctgccgctgagtacgtcgtgaagtccactggcgtctacaccaccatgaagaaggc

SEQ ID NO: 675927 - DNA, 3068 bp, Homo sapiens
  misc_feature (1511)..(1511): n is a, c, g, or t
  misc_feature (2979)..(2979): n is a, c, g, or t
  misc_feature (2996)..(2996): n is a, c, g, or t
  misc_feature (3007)..(3007): n is a, c, g, or t
  misc_feature (3026)..(3026): n is a, c, g, or t
  misc_feature (3068)..(3068): n is a, c, g, or t
aataaaaattaaaaatagatgtagatgctatgttgctgaggctggcctcaaactcctggcctcaggtgatcctcccgccatgacctccaaaaccacagggattgtaggtgtgagcactgcacccagccttatgtttttttctacataaaaaacagcacaggattatcttccagagctaataaatatgttcaaataaccacaaccccattaaggaaaaatatcactgggcagcaaataatcaatccagaccaatatgatcacaattgctgtgaaggtgagaaaagttcatttttattatgtttccccaagagacgcactctattgttctcttgaaaacacacagctcatgtcctcctttagaacacacatcctctttaaagtaacatacaaacatgccaaaacaaggtaaaaaattacatctgaattctcacatttcaaatatatatgaaatatcaaataaaaatttatttttacaagaatttaggggaactactacatagctataaatgtaatatatatgttaactaagtatcatagataaaaaccatgctcccttcagcagcacgtgtaataatagatacaaagattgaaaggtaaaagatttaggatgaaaagaatcctctcttaaaaaggaaaacaaaattatatgtatgtgtatataacagttataatatccatcacacagctttatagaaacagcatctattcaaaaataccagtatttccaaaatatttaaaataatatttaaagtaataataatatttaaataaataaatatatttaataaatatttaaataaataaaataatatttaaataattctatacccatgtttttcaaaataaaccaataaaatagatagtatatattagacgtgttagtatatatatctgaggcatgttaaaaatcacaactgaattctcacaattcagtcacaaacctaaacagcaaataaaaatttctatcaccagaattatgtttttttctggtggggaactaccaatagctataaatagaagagattattatggaagtatcatagataaaaagagtgctcgcttcaggagcacatgtaataatacagaaacaaatttaaagataataaaatatttaggataaaaagaattgtctcttaaaaatgaaaagaaaattatctttatgtatatataacaactataactctcatcaaaaaactacaggaacagcatgttttcaaaagtacaacaatttccaaactatttgaaataaatctatgaataattcaatggccgacattttccatacaaaccaataaaatgcagagtgtgcatgaagctatctgttacaatctgtggcactgatatttcacaaaagaattctgtcccaatctgagcccctgcattgtgccttcaaatcctcctggactgcaagtccgtaagaaacaggacctccaggttccgccccagggaggttggaattcagcaatataaaaagggtggtggtgccgcaggaaagggtggaactggaaacnctcctggtttcttacttttctccaaggactcctagaaggaccccacccccctccccccacccctgctccttggaggacaacgtgatcactgtattcagctctgtcaagaatggtccaggttcttctagatgatctgcacaaatggttcctctcctccttcctgatgtctgccattagcattggaataaagttcctgctgaaaatccacatctcccctgggtccggtgttcttctctcaggccgatgacctcaggcctccacggtccctggagctctaggaaaggtgagcgcgatctcgcgcccacacccagtgctctgggtcataagcctggatctggaaaaacaaacgccctttgagaagacggggactccccaggatacccctctctcccctcgtccagcctccagcccacccgattcctccccacatcctccacctccccaggccccacccacctcctccaactcctccagggaaacccaagccctgcagcgcatggaacagaagaagtggaaccgatacttccggaacaaggctatctgagagcagttcttcctggccctcgggttcatgtaacggcataactggaaccaaagctcactgagcaagggtatatgagagcgggtctcctcgtacaggaagtagaagatgttttgtttgggggcctcgtcgtcctcctccatgtcattggccagatagctgaggacagaaatcaggttgctgctcaggggcaccaccaggagagacctccggctgaggtcagcttcccagagaggaaggtaagggaccgtccctagctcaggactggcacccaccctgcagagagccacgccttcctcaggagggctctgctggacagagacctgatcaagggcgtctcccactccttcaggatggagacaaaaacccaactggtggccgagagtggtggcttatgcctggaatcccagcacactgggaggccgaagcaggaggatcacttgaggccaggagtttgagacgggcctgggcaacatagcaagaccctcgtctctattaaaaatataaaaaatacgccaggcgcgtggctcatgcctgtaatcccagcactttggaaggctgaagcaggtggattgcttgagaccaggagtttgagaccagcctggtcaacacagagaaaccccatctatactaaaaatacaaaaatcagcctggtgcggtggcacacccattagtcctagctactcaggaggctgaagcataagaattgtgtgaacccaggaggcggaggttgcagtgagccaagattgggcccctccattccagcctgagagacacagcaacactcttgtcttgataaataaataaataaataaataaacagtccaggtgtggtggcacagccctgtagtcggagctaataagaagctgaggtgggaggatcgcttgagcccaggatatggaggctgcggtgagctatgatctcancactgcactccagcttnggggacagggnaagtctgtctcaaaaaaanaaccagacactggacttccatttaaaacacaccacaacaaan

SEQ ID NO: 675928 - DNA, 2275 bp, Homo sapiens
  misc_feature (1511)..(1511): n is a, c, g, or t
aataaaaattaaaaatagatgtagatgctatgttgctgaggctggcctcaaactcctggcctcaggtgatcctcccgccatgacctccaaaaccacagggattgtaggtgtgagcactgcacccagccttatgtttttttctacataaaaaacagcacaggattatcttccagagctaataaatatgttcaaataaccacaaccccattaaggaaaaatatcactgggcagcaaataatcaatccagaccaatatgatcacaattgctgtgaaggtgagaaaagttcatttttattatgtttccccaagagacgcactctattgttctcttgaaaacacacagctcatgtcctcctttagaacacacatcctctttaaagtaacatacaaacatgccaaaacaaggtaaaaaattacatctgaattctcacatttcaaatatatatgaaatatcaaataaaaatttatttttacaagaatttaggggaactactacatagctataaatgtaatatatatgttaactaagtatcatagataaaaaccatgctcccttcagcagcacgtgtaataatagatacaaagattgaaaggtaaaagatttaggatgaaaagaatcctctcttaaaaaggaaaacaaaattatatgtatgtgtatataacagttataatatccatcacacagctttatagaaacagcatctattcaaaaataccagtatttccaaaatatttaaaataatatttaaagtaataataatatttaaataaataaatatatttaataaatatttaaataaataaaataatatttaaataattctatacccatgtttttcaaaataaaccaataaaatagatagtatatattagacgtgttagtatatatatctgaggcatgttaaaaatcacaactgaattctcacaattcagtcacaaacctaaacagcaaataaaaatttctatcaccagaattatgtttttttctggtggggaactaccaatagctataaatagaagagattattatggaagtatcatagataaaaagagtgctcgcttcaggagcacatgtaataatacagaaacaaatttaaagataataaaatatttaggataaaaagaattgtctcttaaaaatgaaaagaaaattatctttatgtatatataacaactataactctcatcaaaaaactacaggaacagcatgttttcaaaagtacaacaatttccaaactatttgaaataaatctatgaataattcaatggccgacattttccatacaaaccaataaaatgcagagtgtgcatgaagctatctgttacaatctgtggcactgatatttcacaaaagaattctgtcccaatctgagcccctgcattgtgccttcaaatcctcctggactgcaagtccgtaagaaacaggacctccaggttccgccccagggaggttggaattcagcaatataaaaagggtggtggtgccgcaggaaagggtggaactggaaacnctcctggtttcttacttttctccaaggactcctagaaggaccccacccccctccccccacccctgctccttggaggacaacgtgatcactgtattcagctctgtcaagaatggtccaggttcttctagatgatctgcacaaatggttcctctcctccttcctgatgtctgccattagcattggaataaagttcctgctgaaaatccacatctcccctgggtccggtgttctggaagtgagagagacaatgtcacacttcaaggaggcagctctctagacaggaaggttattcacgtcccatgtcaagtctagctagagttcagagcaattgagaagtgcaattttatctcctgcctttcattctataccctgcttctgaaccatcgtgttcaactgtgaaactcacactttggtgaccctgactccaaaacttaatacacccaaggtcagccccagtgatctgcttcatagcaaggactttgggtgggtcttcccagggagtagggcaccctcagagaatgtggctttggacttcatcacagctggggccttttgtgtcacttcagatctaaacttgtaaccgtgctagatctgtttctaatgtgacaacatcacgaaccacgagtccagaagcctaatccataatcctctctccaccttccagcagatgtggaccagcaagcctgagtatgatgaggcaggccctccattgtccacaggaagtgcttataaagtcaggacaggttctccaaggatcccctcga

SEQ ID NO: 675929 - DNA, 1967 bp, Homo sapiens
  misc_feature (1511)..(1511): n is a, c, g, or t
aataaaaattaaaaatagatgtagatgctatgttgctgaggctggcctcaaactcctggcctcaggtgatcctcccgccatgacctccaaaaccacagggattgtaggtgtgagcactgcacccagccttatgtttttttctacataaaaaacagcacaggattatcttccagagctaataaatatgttcaaataaccacaaccccattaaggaaaaatatcactgggcagcaaataatcaatccagaccaatatgatcacaattgctgtgaaggtgagaaaagttcatttttattatgtttccccaagagacgcactctattgttctcttgaaaacacacagctcatgtcctcctttagaacacacatcctctttaaagtaacatacaaacatgccaaaacaaggtaaaaaattacatctgaattctcacatttcaaatatatatgaaatatcaaataaaaatttatttttacaagaatttaggggaactactacatagctataaatgtaatatatatgttaactaagtatcatagataaaaaccatgctcccttcagcagcacgtgtaataatagatacaaagattgaaaggtaaaagatttaggatgaaaagaatcctctcttaaaaaggaaaacaaaattatatgtatgtgtatataacagttataatatccatcacacagctttatagaaacagcatctattcaaaaataccagtatttccaaaatatttaaaataatatttaaagtaataataatatttaaataaataaatatatttaataaatatttaaataaataaaataatatttaaataattctatacccatgtttttcaaaataaaccaataaaatagatagtatatattagacgtgttagtatatatatctgaggcatgttaaaaatcacaactgaattctcacaattcagtcacaaacctaaacagcaaataaaaatttctatcaccagaattatgtttttttctggtggggaactaccaatagctataaatagaagagattattatggaagtatcatagataaaaagagtgctcgcttcaggagcacatgtaataatacagaaacaaatttaaagataataaaatatttaggataaaaagaattgtctcttaaaaatgaaaagaaaattatctttatgtatatataacaactataactctcatcaaaaaactacaggaacagcatgttttcaaaagtacaacaatttccaaactatttgaaataaatctatgaataattcaatggccgacattttccatacaaaccaataaaatgcagagtgtgcatgaagctatctgttacaatctgtggcactgatatttcacaaaagaattctgtcccaatctgagcccctgcattgtgccttcaaatcctcctggactgcaagtccgtaagaaacaggacctccaggttccgccccagggaggttggaattcagcaatataaaaagggtggtggtgccgcaggaaagggtggaactggaaacnctcctggtttcttacttttctccaaggactcctagaaggaccccacccccctccccccacccctgctccttggaggacaacgtgatcactgtattcagctctgtcaagaatggtccaggttcttctagatgatctgcacaaatggttcctctcctccttcctgatgtctgccattagcattggaataaagttcctgctgaaaatccacatctcccctgggtccggtgttctggaagtgagagagacaatgtcacacttcaaggaggcagctctctagacaggaaggttattcacgtcccatgtcaagtctagctagagttcagagcaattgagaagtgcaattttatctcctgcctttcattctataccctgcttctgaaccatcgtgttcaactgtgaaactcacactttggtgaccctgactccaaaacttaatacacccaaggtcagccccag

SEQ ID NO: 675930 - DNA, 121 bp, Homo sapiens
tcacagcgttatatcagaatagtattctccccaaatcaaccatttaatgtattctaaaagggaaaaaatgacaccattacatagacttagaagtgaatgtaggctgggcgcggtgtatccg

SEQ ID NO: 675931 - DNA, 803 bp, Homo sapiens
  misc_feature (54)..(54): n is a, c, g, or t
ggaaaacagttggcgccgccgccgccggggcctcatttccaggtcagcccccgngctgacgctggcgttgcgtcccccgggagcttgcgctaggcgaaaccggctgcgcgcgctttgtgtggctccaagtccgctcctaacgctcccttgcccggtccggggtccccggcgcaaggttaggggcccactctgacgggcgggggaagacacagccgggggggggaggcaccgccgggtttggccagggatgtgttccgttggccttcagggggaagaaaaaggcctttcaggaaggtttgaaaagacaggttttcaatttccacactcaaaggaaaggtttggagccaaagcatgtgtgtttgtctcaagtggggtacgaaaatttacgggaagaaaaattcctttgggttgggaaaattaaataacggggcgaaaaggaattttgggcgcacctgtgtgaattcacagagtcatttttatattcaacggaggaagacgaatttgtgggagttccaagacggaccctttttaagaaagggttggaaggaaaattcccatgtggcacgcgtatttgttgaccttgaacaaaggcactcttttaatatttggtggggcttaaacgctggcacccagggtgtgtttgtgagggcaaaagaaaatcttccctcttttttccctttctttccaaaagaaaaagaaaacactataatgtgagggttgtgcggggacaatacagcacacaaatgtgcgcactcattttaagaaacagagaaagacgttaatttattgtgggaattcccaaa

SEQ ID NO: 675932 - DNA, 951 bp, Homo sapiens
ataataactgtaagcgcgtacgcggaatcgggatgaatctacttaagaaatggtatcataggacaggtctgtaataaaacggaaacgaacctcaagtgtaaagtataaataaatagagttcattcatatcagactatatagctgttacggtagatcgtggtgtggaaatgggatgatgtcaagtatccattcaacgtgagggagaaacgcacacatggacaaaacagtacctctaatggctccatggtatatgattaatatatatatatatatatatgtctcatcctatatgtatatatataaggaaacttgccttatttctgaagttgctgggtgggatttctctgttctttcaccccctgggggaacacctcagttaaagcaagatcagtctgttggccgagagtggtggctcacgcctgtaatcccagcactttgggagtccgaggcgcgtggatcacctgaggtcaagttctagaccagcctggccaacatggcgaaaccccatctctactaaaaataaaaaataataataaagtgaaaaaaataaaaaaaattagccgggaaaaaaaaaaaaaaaaaaaaaaaaaaaaaaaaaaaaaaagaaaaaaaaaaaaaaaacaaatgaaacaaaaaggagaagtggggcgggcgctacaaaatatgtacaccggcgagagagggaaccagcagacggaaacggggcacacagaagtgtagaggaagaaaaaaaaagtagaccccccacagattgtggggagcacaaatcaacacgagacgaggaaccgacgcggcggcggcgactaaacacccagggcggccgagcaaaaacaaacaggcaatagagggaacgtatgcggagaggaagacacaaccaaatatagaggggcggaaaaacaaagagcaggagacaaccgccaagaagaagagaagaggtcgcagtagcgaaat

SEQ ID NO: 675933 - DNA, 1016 bp, Homo sapiens
  misc_feature (14)..(14): n is a, c, g, or t
  misc_feature (124)..(124): n is a, c, g, or t
  misc_feature (184)..(184): n is a, c, g, or t
  misc_feature (237)..(237): n is a, c, g, or t
  misc_feature (301)..(301): n is a, c, g, or t
  misc_feature (464)..(464): n is a, c, g, or t
  misc_feature (575)..(575): n is a, c, g, or t
  misc_feature (579)..(579): n is a, c, g, or t
  misc_feature (586)..(586): n is a, c, g, or t
ggtggcctcaggangcttggatattaattcttctgtgaaaggggctcgttctgtcagattctctgatgcattcaatattccactcataacttttgttgatgtccctggctttctccctggcacngaacaggaaaacgggggcctcctccggcatggtcccaagcttctctacgcatttgcttangccactgtacccaaaatcacagtcctcaccaggaaggcctatggaggtgcctntgttttcatgggctctaagcacctttgtggttatccccactatccctggcccaccgcagaaatngcagtcatgggagccaagggcgctgtggaggtcctcttccaagggcatgagaatgtggaagctgctcaggcaaagtacatcgagaagtttgccaaccctttccccgcagcagtgcgagggtttgtggatcacctcatcccaccttctcccaaacgtgcccgantctgctgtgacctggatgtcttggccagcaagaaggtacaacgtccttggagaaaacatgcaaatattccattgtaaacaaatcaaaggaaaagaaaccaagaactgaatnactntctgccnattcacatcccattcctgcctttggcaatcatgaaacctgggaatccaaatagttggataacttagaataactaagttcattaaattctagaaagatctctttggtgccttactgtacaatcatttactttcttaaacatttcaagtggtatatccttgagcattaaattcgatttccacacggtgcgaaatctgacaatctcaatacaactagaacgaccactagtacacagtgtcatcatctagagctgattctaatttcacacctctgggtatggtactttatcctctcgagtaagttaaacatatccataggtgagatacatagtaagtcccacggcaaagtaacccttaggcttaagttccttatctcacaaatagggtatatgccctatctaccctaatcctccatgattggcgctaagtgatg

SEQ ID NO: 675934 - DNA, 620 bp, Homo sapiens
  misc_feature (551)..(551): n is a, c, g, or t
ggcccccaacgcggccgcgtctcctccctcggcgtagtccgcggagcgagccacagcgcgcggggtgagccatcgagagggcgcagagacggcggggctgcctgcagacctgacagacctgcacgggctccggccggacggtgagccagtgctgcgtgactgcgagtggtggactccgtaactggaccggtggtagcggagctgatcggcgggagggctatctgagccagacggtgtgaggcggcgaggcgaggccgagccgcgagcgacatgggggaccgggagcagctgctgcagcgggcgcggctgtgcctgagcaggcggagcgctacgacgaacattggccctccgcctattgaaggccggtgaccagagccttggaacacacttaaacgaagggaattccttattaagggacttcccacggcttgattccatggcaagttggctggcgagacaacctcaccctctggacgagcgaccagcaggatgaagaagcaggagaaggcaactgaagatccttcaggtcccctggcccttccttcaccatncaccccatcatcaccgattcttccttgccacaatcactaaatatctagtgctaaacctatctgtattgg

SEQ ID NO: 675935 - DNA, 259 bp, Homo sapiens
cccttaaggttgggggcacccgggccgaccccccgggttttttttattggggaccttggccccggggggttttttccccccccccccccgcctttccccctgggggtttttttttagggttcccccccccccctttttttccccccccttttgggggtttgggggtttttttttccccggggggggggggggggcccccggggttttcttttcccttttttttgccccttttttttaaaggggcccccttttaatttta

SEQ ID NO: 675936 - DNA, 145 bp, Homo sapiens
cggaacagtggcttcgaaggggagctctgggtgaggacccaactgtggctccgctgctgctgttgtgaccatggacttggctggaggttcagggaccgcttcggttgaagcatctgactcggtcttgggtgatacggggtcttgc

SEQ ID NO: 675937 - DNA, 139 bp, Homo sapiens
ggggaccttcctgatccagcttctcatacaggaactcctccactcgggcactggggttgggctgcagcagctacctctgtctgcctcaagatcttctctgtccacgttcttgtgtgctgtcgtgcccggtgcgcagggc

SEQ ID NO: 675938 - DNA, 524 bp, Homo sapiens
aaaaatctataaacaaacccagtgaagattatattgtaatatcatttaataaaaattattattagctatctaaacttgggcaaactcttcactttttgtattaggccattcttgtgctgctatgaagaaatatccgagactggataatttataaaataagaagtttggctcacagttctgcaagctgtgcaagaagaatagcagcatctgcttctggggtggcctcaggaagcttccaatcatggcagaaagcaaagccaggtcgccatgggttgggcagatcctgaagagaaccaacttgagtctgacagtccttccagaacacggcacccacctccaccatataacacagccaagtgaaacactaaggaggctctgtaaggcatgactctgaagaaggccactatcttttatgccgtgacaccatttctcagaacacatcacatggcccctgagtggtcaggagtccagagaaaaacagtcaagccctcctttaatagtaaaatttttgtctgaccctctca

SEQ ID NO: 675939 - DNA, 162 bp, Homo sapiens
agcagtcacccaatgtcactcttcttcaagatgaagatcggagccatgacacatgttaactaagcacagactgaatggttactcagaagataccactgcgaggtgaagtaaacatcagccgagcatcttctctttccaaaattttctgagtctgatcatcat

SEQ ID NO: 675940 - DNA, 797 bp, Homo sapiens
tccgtctttgctcctaacatctatgtactggattatctaaagtgaaaccacagcagcttactccagagttcaagtccaaaggccattgttatctcaacactggtaccagagacagttgaactacaaacactatgatggctcctacagcacctttggggagcgatatggcaggaacccagggcaaacacctggctcacagcctttgtcctgaagactttggcccaagctcgagcctacatcttcatcgatgaaagcacacattacccaagccctcatatggctctcccagaggcaagaagggaccaatgcctgttccaggagctctgggtcacttgctcaaacaattgccataaaagggaggagtcacacagatgaagttgaccctctccgcctatatcaccatgcgcccttcttgagattcctctcacagctcactcacccttgttgtcccgcaagtgcccgtgttttgcctgaagtcagcctggcaagacagccacacaggaaggggaccatggcacgccattgtattataccaaagcactgctggccatatgcttttgtgcccgtgcaagataaacccaggcacaagaggaagggaaggaactccaaagtcactttactgagaaagctgtgcacaaaaagacaacccttgcccatttgggacgccccttcagaaaaagcaaaggcccagtgggcaatttttagaaacccaggtccctctgctagggggaaataaatctaatggcccctcgctatttcaacggcacagccaaccgggggaatgtacctgaacacat

SEQ ID NO: 675941 - DNA, 361 bp, Homo sapiens
tcatcaccctatggagtcctcttcgttttaaaattctgactgtggtgttacggaaggaccttctaggtgaaagggtaaccgaaataacaaaggttccatttcgtccttcagcaaattcaaaagcttgagagcgagtcatacaatgtgattatttgataattctctctatattctgatagaagaaccagagggatataaaagacagaaaggtaaaatgggatggcatatggtaacaactggaggcttagaacctagcagatcggggtcaccatgttggatgaatgtgaagggtaattatgccgggaggggtcacaagaagaatcttaaatgaagcttctaaggataggcagggtttcgatga

SEQ ID NO: 675942 - DNA, 396 bp, Homo sapiens
aatggggaagaagaattggggaagtagtacaaggggaagggaaatttaatagaggtgtgactgccttatctggcatcaatgggagaggaggtctttggtcctgaggaggctcgaagctcccagtgtagggagatgctaggaaggagaagtggatggggaaagcccacaagaccgaaaccctacacaaagaactacagacaactaaggagtgctgggagtgggaggggcttctgctgggaggagcacagcagctggttatcaatatgtaatggtcatccctgaaggcatgtgcaggtaacattacacatgctgagcaggttaaaaattaaggaacatgagcccatgagtctgaaagagatcaaaaatgcaggacatgggagggtttggagtcgacgc

SEQ ID NO: 675943 - DNA, 185 bp, Homo sapiens
tgtgtctctaccggtctcaaccccactcgggcagaggttctcataacagaagaatctgttatggctaaacctgctctcacatgaaactctctctatccctctatggcctcctcccttcctctctctaggagaattattgagttcatacagccagctgcttctctgtcgacgcggccgcgaattta

SEQ ID NO: 675944 - DNA, 145 bp, Homo sapiens
  misc_feature (12)..(12): n is a, c, g, or t
  misc_feature (18)..(18): n is a, c, g, or t
  misc_feature (65)..(65): n is a, c, g, or t
  misc_feature (70)..(70): n is a, c, g, or t
ctactctcctanttgtantttgtggtcctatcaaagtgtcgtatctgggagatgacctgccttancctgntctataacagttttgtttgctgctgtgtctttagaacagtgcctggcacacagtaagcactcaataaatctttga

SEQ ID NO: 675945 - DNA, 153 bp, Homo sapiens
ctccccgttgtactgttgaccagtacccgactatagctcaatacattattcatgcttttactgctctctctctcggataataaagagggaaaaagttacatcatacttcaatttggtttcaccacgtaatggtctccaacccataagaggacc

SEQ ID NO: 675946 - DNA, 388 bp, Homo sapiens
agatcctttccatccacctgataaatctttctatttaagagctataaaacaccagctaaaggtctagctggtaatctagaaattgtgtgcccttgaagcattcctaacagaaaacatgaaattattcatctggcctgagactgtttaatgagaacctgaaagagactattggtttcccaggttcaatcctcattacagacaaaggttttcattcacaaactgagcatcagggtatcattgaattttgctggcttagttctgttttacacaatggttcatttcttagcaaagtggaaaacaaaattcagccagagtgtgctggtagtgtagtgttcatgcggaatatttaaatgaaggtgtagtgcaatggttttcaaccctgggtgtt

SEQ ID NO: 675947 - DNA, 180 bp, Homo sapiens
gatttttaaaaccattttattccttttattaaatttattctaaaattttttaatggtaaattcttaaactgtggaaacccctgaaggtgcttattaactgttctcccaaatttgtacaaatattggattattcccttagtttacacctgtccaaaaaatgtggaaaataaacttttttta

SEQ ID NO: 675948 - DNA, 1148 bp, Homo sapiens
ggcagtaactaatacggttctatggtagcgaggctggtgtggcgcaaacaccaaattgcggatgacgccggtgcagcggggtgggcccggtggtgccctgtgtggccctgggtatggggaacctgctggtggcttccgcggaggtttcggcagtggcatccggtggccggggtcgcggccgtggacggtggccggggccgaggacgcggagctcgcggaggcaaggccgaggataaggagtggatgcccgtaaccaagttgtgccgcttggccaaggacatgaagatcaagtccctgtgaggagatctatcatcttctccctgcccattaaggaatcagagatcattgactttcttcctgaggggcctctctcaaggatgagggttaagaagattatgccaggtgcagaagcagacccgtgccggcacagctgcaaccaggttcaaggcattatgtatgctatcggggactacaaatggacaacgtcggatcatgggtgtaaagtgcttccaatggagtgttggccaaccagacaatcctgataggagccatcaatccatggccaaagctctccataagtccacgtgcagccagaggctactgggggaacaaggatcggggaaggccccacgaattgtccctttgacaagcgtgacatggccgatgcgagatctgttgctggtaacgccttacatcccttgaacacaggggcactggggatcggaactcccgaaaacttgtgccttaagaagcatgctccatgattggctgggtattcagatgactgataacaagcttaagacccgggcagtgcacagtggcaacacttgggacaaatttacggccaaaggacaccttttgatgcccattactaaaaacttacaggttacgttgacccccggacctcttggaaagagagattggcatttcaaccaaagataatccgttattcaaggaagtttcaacttgaacacactttggttaaagaacccagacccagaagtcttccccgtgcacgacggacactacagggtatcacagttgttgttaccaccacatagggtaaaataacacggaaaagatacgatgaattaaggcgtcaaacaatacaacacaaacaccgcacgatcagaagaacgcaagtagag

SEQ ID NO: 675949 - DNA, 1027 bp, Homo sapiens
  misc_feature (44)..(44): n is a, c, g, or t
  misc_feature (111)..(111): n is a, c, g, or t
  misc_feature (305)..(305): n is a, c, g, or t
  misc_feature (310)..(310): n is a, c, g, or t
  misc_feature (312)..(312): n is a, c, g, or t
  misc_feature (740)..(740): n is a, c, g, or t
tggtgacaggtgcctcacaaaaaaaaaaaaaaaaacaacccggnccacggaaaagcagggcctgggtcccccacgattgaaaagtgcctttcccattcagcctcctgtgcntctgtgggccctgtgtgtggaccctgtggagaccctgtggtttcaagccacgggtgtgggccctcgagcccgcttaggggttacccccgtgtgcgccttttctgtgcgcgcctgtgcgcgccggccgccctgtgtgtgcctttgtgcagaagggcgggaagctgtgcctttctctcctctcagagccacaaganccccngngagaagctttgtgcgcgagggggtggaagcgtgaagtttcctccttcgtgtgcaacagaactttcggaagaattatcaggcgaaagagcggaagccgagtgtttctctctcttcagacaacagaaccgcggggcggggcgcgggcccaggggggcaccaccggcgaagagggcggagagactgtgggttctcgtggtctcgagacaacaacaacccggggagagacaacacgcggggaaagagggcaaagaagacagagccttttctctcagagacaaaaagagaaacaccgtggtgtgtgggcgcccactgtgtgcgcctcttccgcgcctatgttgggggggagaacttatatcagcttgcggagaggcgccgccggatatatcctagagggggggcgtgccacattcatatagagatctcctctnatctcgccgtgttgtgtgtgcaggaagcgcccccttttataaatataaaatctccgagggggggtccgagaagagaaaaccccagaggttttataagcaacaggggggggtctctccccgccgtggtgtgcgcaacacaagcatgtggcggcgaaaaaacacccccaaaaaggaggcccgcccctcttctgtgagaaaatctcctactatatacaccaaaaccgcgaagaggggggttctcctcttcccccccccaaaaggagcccccaagaggggggcgccgaaaa

SEQ ID NO: 675950 - DNA, 458 bp, Homo sapiens
cagacctaaccccacgtgcattttgggacaattgctttttaaattttttttatgccaaaaatccttcattgtgattggtagtttcacgtcagatataccaagcgactgtgtgtggggtttgacaactgtggaaaggcgagcagaaaactccggcgatctgaggccatggaggtggttgctgcatttgagagggagtagggggctagatgtggctcctagtgcaaaccggaaaccatggcaccttccagagccgtggtctcaaggagtcagagcagggctggccctcagtagctgcagggagctttgatgcaacttatttgtaagaaggatttttaaattttttatgggtagaattgtagtcaggaaaacagaaagggcttgaaatttaataagtgctgctggaaggggattttccaagcctggaagggtattcagcagctgtggtggggttaggtctg

SEQ ID NO: 675951 - DNA, 959 bp, Homo sapiens
gggggggggggtggggggggggaggttgggggggggcggggggtgcgggtgggggcggtgcgcgtgggtggcggtggtcgcggggggttgggtggttgcgggggaggtttgggagcgcgagggtgcgaggatgtgtgagaaggcgtgggagggagaagatggggtggggggggggggtgggtagcggggggaggatagtggggcgggggggcgcgtgttgtggtggggggtcgcgcgggggcgtggggcggtagggtgcgggcgggggcgagcgcagaggaacgagaggggggagagggggggcgagcgtggtaggcgggggaggaggggacagcgagggccggcaggagggcgcggtgggggggaaggagggccgaagaggggggaggggtggtagtgcgagcgagcgagaagcgggtggggggggaggagggcaggccgggaggtgaggatgggggggagggggggcccgcgggtggggagcggggggcgggcgggcccggtggtgggggggggggaggagcggcggcggggggaggtgtgtgggaaagatcgggagcggacggggtggcggtaccaagcagaggaggagtgctggagccgccttggggggagaggacggcgtggcggggggcgtgttggggttaggtgccaggggggagtatcgagttgcagggggggcggcgcagttgcttgccgctggttggggggtcgggctcgcgagcgaagttgttcgccgcggtggcagcattgcggcagctgttttctccccactaggtgctgtgttcagatgtgtggtgttgtggacgaagagtatgcgcgcccggataattatcacctggtaggtagatagcaatcagtattgttctggccccctaggggcacctttaaaggcgaaaaagttttttgggaaaaaacaattttttgaaaagaaagagggaaaataacccaaaagaagg

SEQ ID NO: 675952 - DNA, 3026 bp, Homo sapiens
  misc_feature (2937)..(2937): n is a, c, g, or t
  misc_feature (2954)..(2954): n is a, c, g, or t
  misc_feature (2965)..(2965): n is a, c, g, or t
  misc_feature (2984)..(2984): n is a, c, g, or t
  misc_feature (3026)..(3026): n is a, c, g, or t
atcttgagatcatttatggttttgcaattcaacctgaaaaatgaagtcaaagcttttatcaaaacaaagcatgtttagtgctctctgtctcactgtcttttagatgccagaccttagattttgtgatgactcctcaaccgtttagatctcggttatctcagagggatcatcagctttttaagaaaattttgagagaaaagcaagtgaagaaaagagtagtcagtgcccaacatcacggatctctcactgaacacaccatgcctggtattctctcacagtgatgtcaccatttctacctgccacgtatcggcgaaggttgggactcgactggtgtttgatcacgatgggaaaatcatccagaaaaccccctacccccaccccagagggaccacagtcagcgtgaagcagttattttctacgctacctgtgcgccataaggaatttcaaaggaatattaagaagtacagaacctgctaaggccatcaaacctattgatcggaagtcagtccatcagatttgctctgggccggtggtactgagtctaagcactgcggtgaagaagatagtaggaaacagtctggatgctggtgccactaatattgatctaaagcttaaggactatggaatggatctcattgaagtttcaggcaatggatgtggggtagaagaagaaaacttcgaaggcttaatctctttcagctctgaaacatcacacatctaagattcgagagtttgccgacctaactcgggttgaaacttttggctttcgggggaaagctctgagctcactttgtgcactgagtgatgtcaccatttctacctgccacgtatcggcgaaggttgggactcgactggtgtttgatcacgatgggaaaatcatccagaaaaccccctacccccaccccagagggaccacagtcagcgtgaagcagttattttctacgctacctgtgcgccataaggaatttcaaaggaatattaagaagaaacgtgcctgcttccccttcgccttctgccgtgattgtcagtttcttgagggctccccagccatgcttcctgtacagcctgcaaaactgactcctagaagtaccccaccccacccctgctccttggaggacaacgtgatcactgtattcagctctgtcaagaatggtccaggttcttctagatgatctgcacaaatggttcctctcctccttcctgatgtctgccattagcattggaataaagttcctgctgaaaatccacatctcccctgggtccggtgttctggaagtgagagagacaatgtcacacttcaaggaggcagctctctagacaggaaggttattcacgtcccatgtcaagtctagctagagttcagagcaattgagaagtgcaattttatctcctgcctttcattctataccctgcttctgaaccatcgtgttcaactgtgaaactcacactttggtgaccctgactccaaaacttaatacacccaaggtcagccccagtccagcgatcctcccgcctcagcctcctgagtagttgggagtagagatgcctcccacatcgcctggctaatttttgtatttttgtggagaggggatctcgccacgttgcccaggcttgaagccagatcaagcaattgggttccttcggatttccgaaatagaccccaatattctgcctttaccccggaggatgcagatgtaccttctctcaggccgatgacctcaggcctccacggtccctggagctctaggaaaggtgagcgcgatctcgcgcccacacccagtgctctgggtcataagcctggatctggaaaaacaaacgccctttgagaagacggggactccccaggatacccctctctcccctcgtccagcctccagcccacccgattcctccccacatcctccacctccccaggccccacccacctcctccaactcctccagggaaacccaagccctgcagcgcatggaacagaagaagtggaaccgatacttccggaacaaggctatctgagagcagttcttcctggccctcgggttcatgtaacggcataactggaaccaaagctcactgagcaagggtatatgagagcgggtctcctcgtacaggaagtagaagatgttttgtttgggggcctcgtcgtcctcctccatgtcattggccagatagctgaggacagaaatcaggttgctgctcaggggcaccaccaggagagacctccggctgaggtcagcttcccagagaggaaggtaagggaccgtccctagctcaggactggcacccaccctgcagagagccacgccttcctcaggagggctctgctggacagagacctgatcaagggcgtctcccactccttcaggatggagacaaaaacccaactggtggccgagagtggtggcttatgcctggaatcccagcacactgggaggccgaagcaggaggatcacttgaggccaggagtttgagacgggcctgggcaacatagcaagaccctcgtctctattaaaaatataaaaaatacgccaggcgcgtggctcatgcctgtaatcccagcactttggaaggctgaagcaggtggattgcttgagaccaggagtttgagaccagcctggtcaacacagagaaaccccatctatactaaaaatacaaaaatcagcctggtgcggtggcacacccattagtcctagctactcaggaggctgaagcataagaattgtgtgaacccaggaggcggaggttgcagtgagccaagattgggcccctccattccagcctgagagacacagcaacactcttgtcttgataaataaataaataaataaataaacagtccaggtgtggtggcacagccctgtagtcggagctaataagaagctgaggtgggaggatcgcttgagcccaggatatggaggctgcggtgagctatgatctcancactgcactccagcttnggggacagggnaagtctgtctcaaaaaaanaaccagacactggacttccatttaaaacacaccacaacaaan

SEQ ID NO: 675953 - DNA, 204 bp, Homo sapiens
agcagactctagtggatcccccttgcgcgcaggcgcgatctcactactgatcagcacggtagttttgacctgctccgtttccgacctgggccggttcacccggtgcttaggcaacctgagggcccgccgctcccggaaggtcaccatattgatgccgaacttagtgcggacacccgaatgaatagaccactacagcccagaact

SEQ ID NO: 675954 - DNA, 569 bp, Homo sapiens
gacagtattgactttttgcctcatcaatgtcgggaatgctatacattatagggctaggatatataatctcaaatgtccgcatggcatccgaaatggcataacatctcaaaacaaaatatcctacaagtgttccttgtgctagacttaggcgacggactgaggataaaagcaccagggggataatcttggctcagatccctaaaacgtatctatgaatttaactggctttacaatatccccttcccctgatatctggggtcagctgcctacagttgagtatgcaatgttcacagaacatctgccctggctacaattcatgactcaaaactgcatgagtaatcacagtctctaacagcatccatactatgacattcattacgttggtttgggggaagaaaagaagttcaggtatgtttcatggatccccaggatccttccaatctggacatgattgggctgattccagatggtagttctgaaatatcattagggtaagtcagcgtcatttggcactgataaagtgaaatatcaggaattcctataccacgtacagctgataccatctcact

SEQ ID NO: 675955 - DNA, 1815 bp, Homo sapiens
  misc_feature (1511)..(1511): n is a, c, g, or t
aataaaaattaaaaatagatgtagatgctatgttgctgaggctggcctcaaactcctggcctcaggtgatcctcccgccatgacctccaaaaccacagggattgtaggtgtgagcactgcacccagccttatgtttttttctacataaaaaacagcacaggattatcttccagagctaataaatatgttcaaataaccacaaccccattaaggaaaaatatcactgggcagcaaataatcaatccagaccaatatgatcacaattgctgtgaaggtgagaaaagttcatttttattatgtttccccaagagacgcactctattgttctcttgaaaacacacagctcatgtcctcctttagaacacacatcctctttaaagtaacatacaaacatgccaaaacaaggtaaaaaattacatctgaattctcacatttcaaatatatatgaaatatcaaataaaaatttatttttacaagaatttaggggaactactacatagctataaatgtaatatatatgttaactaagtatcatagataaaaaccatgctcccttcagcagcacgtgtaataatagatacaaagattgaaaggtaaaagatttaggatgaaaagaatcctctcttaaaaaggaaaacaaaattatatgtatgtgtatataacagttataatatccatcacacagctttatagaaacagcatctattcaaaaataccagtatttccaaaatatttaaaataatatttaaagtaataataatatttaaataaataaatatatttaataaatatttaaataaataaaataatatttaaataattctatacccatgtttttcaaaataaaccaataaaatagatagtatatattagacgtgttagtatatatatctgaggcatgttaaaaatcacaactgaattctcacaattcagtcacaaacctaaacagcaaataaaaatttctatcaccagaattatgtttttttctggtggggaactaccaatagctataaatagaagagattattatggaagtatcatagataaaaagagtgctcgcttcaggagcacatgtaataatacagaaacaaatttaaagataataaaatatttaggataaaaagaattgtctcttaaaaatgaaaagaaaattatctttatgtatatataacaactataactctcatcaaaaaactacaggaacagcatgttttcaaaagtacaacaatttccaaactatttgaaataaatctatgaataattcaatggccgacattttccatacaaaccaataaaatgcagagtgtgcatgaagctatctgttacaatctgtggcactgatatttcacaaaagaattctgtcccaatctgagcccctgcattgtgccttcaaatcctcctggactgcaagtccgtaagaaacaggacctccaggttccgccccagggaggttggaattcagcaatataaaaagggtggtggtgccgcaggaaagggtggaactggaaacnctcctggtttcttacttttctccaaggactcctagaaggaccccacccccctccccccacccctgctccttggaggacaacgtgatcactgtattcagctctgtcaagaatggtccaggttcttctagatgatctgcacaaatggttcctctcctccttcctgatgtctgccattagcattggaacttgacctgccatgtgtgcctgccttcctggccagctgtgcttgttatcttccattctcacagctgtctttgaagcatagaataaagaatgtgtgtttctttcctgtatacatgacctt

SEQ ID NO: 675956 - DNA, 104 bp, Homo sapiens
gaccggtcctagtacggcgcagtgtctggaattctggctttgctgcagttgtctgtgagctgggcagagagagcagagtgcatgcaggggccaggcgtgtgctc

SEQ ID NO: 675957 - DNA, 124 bp, Homo sapiens
catgacggggggggtatactacggtcaatgctctgaaatctgtgcgagcaaaccacagtttcatgcccatcgtcctagaattacttcccctaaaaatctttgaaatagggcccgtacatgcaag

SEQ ID NO: 675958 - DNA, 763 bp, Homo sapiens
  misc_feature (100)..(100): n is a, c, g, or t
  misc_feature (393)..(393): n is a, c, g, or t
  misc_feature (464)..(464): n is a, c, g, or t
  misc_feature (489)..(489): n is a, c, g, or t
  misc_feature (560)..(560): n is a, c, g, or t
  misc_feature (582)..(582): n is a, c, g, or t
  misc_feature (584)..(584): n is a, c, g, or t
  misc_feature (613)..(613): n is a, c, g, or t
  misc_feature (653)..(653): n is a, c, g, or t
  misc_feature (698)..(698): n is a, c, g, or t
  misc_feature (732)..(732): n is a, c, g, or t
  misc_feature (751)..(751): n is a, c, g, or t
acaactaatacttacctttagccccctgccctgcccccccccttaaaccattgtaccccccccccaaaatttaaaagccccggaactaaaaagaagaatntcccccctcttaaacacacactttaatccccacatcttcttgtccctttaaaaattttttttataaaaaagattatataaatacattctcaaaaaaccctctcttttaaaaaaaacacctttttaaaaatagatggcaaaagggcggccataaacaaaaaaatataccccctttttttattcggcccaaaattggtgggccccccccccaaaaaagaaaaacaacaccacccccccctggtgtgcccacccccccccaaaaaaaaaaaaaaattccccctcctcctccttttnttttagaaagaaaaaaaaaaaaaaaaaaaacccccccttttggaaaaacaaaaaaaagagatttttttttnttataaaacaaaaaaaaaaataatnttttttgcggccacaaaaacaaaataaaaaaaccccccccacaaaataaaaataaaaataggaaagaacancagaaacatacacaaaaaaaantnttttcttctcttgacaccccccccccctntcttttttttaatataaacaaagaaaacaatacaaccccnccccgatggtggttgtttctcctcctttctcctccacacaaaaanaacaatacataataattctctctccccttccccnccaccaaagtgttgtgttntctctccgcccc

SEQ ID NO: 675959 - DNA, 472 bp, Homo sapiens
  misc_feature (1)..(1): n is a, c, g, or t
  misc_feature (81)..(81): n is a, c, g, or t
  misc_feature (94)..(94): n is a, c, g, or t
  misc_feature (105)..(105): n is a, c, g, or t
  misc_feature (200)..(200): n is a, c, g, or t
  misc_feature (291)..(291): n is a, c, g, or t
  misc_feature (295)..(295): n is a, c, g, or t
  misc_feature (321)..(322): n is a, c, g, or t
  misc_feature (368)..(368): n is a, c, g, or t
  misc_feature (428)..(428): n is a, c, g, or t
ntcccacccaccctggaaaatggcctcctccaaacctacccccgtctgagccgtcatcctccctgcaatgccgtggttggnaggcaggaccccngggagggagcnacaggctgtggccacctcttccaggcaccctggactccctgcctgacccctgccctacctatagacccagccgtcctcagggccacgaaggggcnaagacagctctggagctgccatcaacctgctgtgactttggccaagcccctgcgccctggctggccttcagttcccatatcaaatgacacncaangagaaacaatgggggcaggttcaaannacaaagtgggagaggggggtacatgagagcttggccactggggctncccagattggcagacaggggggtgggtttcccccagtggcgagtgagagggggggaggtntgtggaggttcctgccccacatgcctatgggcgccccagcaaga

SEQ ID NO: 675960 - DNA, 373 bp, Homo sapiens
  misc_feature (18)..(18): n is a, c, g, or t
tgtacactgtactccagncctaggtgacagagcaggttctgtctcaaaaaaaaaaaaaaaaaatcacaattataattaataaaataaaaaagtccttaaataccaacactctagccccattaaaggtgtgtttctaattaccttatgaaaacttctagatcctatattaactccccagagcagggccccatattaaagcataaaaaaaaaaaaagcaacgtattaaaaaatggctataattttcctccaataagggaaggcgcctagggaagggctatggatgggttccacccccaagctacctggctaatacaaaacgtctcacggattcatacttggggcataagggggggtcgcacatatttatcaaggt

SEQ ID NO: 675961 - DNA, 980 bp, Homo sapiens
tgtcactttctacacggcggcggatcgggtgttgcatccttggagagagctgagagctcgagtacagaacctgctaaggccatcaaacctattgatcggaagtcagtccatcagatttgctctgggccggtggtactgagtctaagcactgcggtgaagaagatagtagaaaacagtctggatgctggtgccactaatattgatctaaagcttaaggactatggaatggatctcattgaagtttcaggcaatggatgtggggtagaagaagaaaacttcgaaggcttaaagctctgaaacatcacacatctaagattcaagagtttgccgacctaactcgggttgaaacttttggctttcgggggaaagctctgagctcactttgtgcactgagtgatgtcaccatttctacctgccacgtatcggcgaaggttgggactcgactggtgtttgatcacgatgggaaaatcatccagaaaaccccctacccccaccccagagggaccacagtcagcgtgaagcagttattttctacgctacctgtgcgccataaggaatttcaaaggaatattaagaagccccacccctgctccttggaggacaacgtgatcactgtattcagctctgtcaagaatggtccaggttcttctagatgatctgcacaaatggttcctctcctccttcctgatgtctgccattagcattggaataaagttcctgctgaaaatccacatctcccctgggtccggtgttctggaagtgagagagacaatgtcacacttcaaggaggcagctctctagacaggaaggttattcacgtcccatgtcaagtctagctagagttcagagcaattgagaagtgcaattttatctcctgcctttcattctataccctgcttctgaaccatcgtgttcaactgtgaaactcacactttggtgaccctgactccaaaacttaatacacccaaggtcagccccag

SEQ ID NO: 675962 - DNA, 1603 bp, Homo sapiens
  misc_feature (1514)..(1514): n is a, c, g, or t
  misc_feature (1531)..(1531): n is a, c, g, or t
  misc_feature (1542)..(1542): n is a, c, g, or t
  misc_feature (1561)..(1561): n is a, c, g, or t
  misc_feature (1603)..(1603): n is a, c, g, or t
ggatctggaaaaacaaacgcgctttgagaagacggggactccccaggatacccctctctcccctcgtccagcttccagcgatcctcccgcctcagcctcctgagtagttgggagtagagatgcctcccacatcgcctggctaatttttgtatttttgtggagaggggatctcgccacgttgcccaggcttgaagccagatcaagcaattgggttccttcggatttccgaaatagaccccaatattctgcctttaccccggaggatgcagatgtaccttctctcaggccgatgacctcaggcctccacggtccctggagctctaggaaaggtgagcgcgatctcgcgcccacacccagtgctctgggtcataagcctggatctggaaaaacaaacgccctttgagaagacggggactccccaggatacccctctctcccctcgtccagcctccagcccacccgattcctccccacatcctccacctccccaggccccacccacctcctccaactcctccagggaaacccaagccctgcagcgcatggaacagaagaagtggaaccgatacttccggaacaaggctatctgagagcagttcttcctggccctcgggttcatgtaacggcataactggaaccaaagctcactgagcaagggtatatgagagcgggtctcctcgtacaggaagtagaagatgttttgtttgggggcctcgtcgtcctcctccatgtcattggccagatagctgaggacagaaatcaggttgctgctcaggggcaccaccaggagagacctccggctgaggtcagcttcccagagaggaaggtaagggaccgtccctagctcaggactggcacccaccctgcagagagccacgccttcctcaggagggctctgctggacagagacctgatcaagggcgtctcccactccttcaggatggagacaaaaacccaactggtggccgagagtggtggcttatgcctggaatcccagcacactgggaggccgaagcaggaggatcacttgaggccaggagtttgagacgggcctgggcaacatagcaagaccctcgtctctattaaaaatataaaaaatacgccaggcgcgtggctcatgcctgtaatcccagcactttggaaggctgaagcaggtggattgcttgagaccaggagtttgagaccagcctggtcaacacagagaaaccccatctatactaaaaatacaaaaatcagcctggtgcggtggcacacccattagtcctagctactcaggaggctgaagcataagaattgtgtgaacccaggaggcggaggttgcagtgagccaagattgggcccctccattccagcctgagagacacagcaacactcttgtcttgataaataaataaataaataaataaacagtccaggtgtggtggcacagccctgtagtcggagctaataagaagctgaggtgggaggatcgcttgagcccaggatatggaggctgcggtgagctatgatctcancactgcactccagcttnggggacagggnaagtctgtctcaaaaaaanaaccagacactggacttccatttaaaacacaccacaacaaan

SEQ ID NO: 675963 - DNA, 1419 bp, Homo sapiens
tgtcactttctacacggcggcggatcgggtgttgcatccttggagagagctgagagctcgagtacagaacctgctaaggccatcaaacctattgatcggaagtcagcccatcagatttgctctgggccggtagtactgagtctaagcactgcggtgaagaagatggtagaaaacagtctggatgctggtgccactaatattgatctaaagcttaaggactatggaatggatctcattgaagtttcaggcaatggatgtggggtagaagaagaaaacttcgaaggcttaatgatgtcaccatttctacctgccacgtatcggcgaaggttgggactcgactggtgtttgatcacgatgggaaaatcatccagaaaaccccctacccccaccccagagggaccacagtcagcgtgaagcagttattttctacgctacctgtgcgccataaggaatttcaaaggaatattaagaagaaacgtgcctgcttccccttcgccttctgccgtgattgtcagtttcttgagggctccccagccatgcttcctgtacagcctgcaaaacttacagaacctgctaaggccatcaaacctattgatcggaagtcagtccatcagatttgctctgggccggtggtactgagtctaagcactgcggtgaagaagatagtaggaaacagtctggatgctggtgccactaatattgatctaaagcttaaggactatggaatggatctcattgaagtttcaggcaatggatgtggggtagaagaagaaaacttcgaaggcttaatctctttcagctctgaaacatcacacatctaagattcgagagtttgccgacctaactcgggttgaaacttttggctttcgggggaaagctctgagctcactttgtgcactgagtgatgtcaccatttctacctgccacgtatcggcgaaggttgggactcgactggtgtttgatcacgatgggaaaatcatccagaaaaccccctacccccaccccagagggaccacagtcagcgtgaagcagttattttctacgctacctgtgcgccataaggaatttcaaaggaatattaagaaaacgtgcctgcttccccttcgccttctgccgtgattgtcagtttcttgagggctccccagccatgcttcctgtacagcctgcaaaactgactcctagaagtaccccatgcagaagttggaagacgagggaaggcatcacagaggctgtggggtgaaccgacttcaaggaatgggtccttcccttcagaaccacatgtgtgcgggacacccagacagaaaacacaaatgcaaagtcaagtggagggcatttggaaggagcagtgaagccaagccaggaaacaccaagatggcgagccagtgtggttgtagagattgcagagagggacaagataag

SEQ ID NO: 675964 - DNA, 885 bp, Homo sapiens
  misc_feature (156)..(156): n is a, c, g, or t
  misc_feature (860)..(860): n is a, c, g, or t
gggggaggggcagggggcccccccctttgagggttggggaagaaaatttctttaaacccggagggatcggccccaattaatcaagatttaaaccctgcccccccaccttgggaaaaaaaaaaaaattttttttttccccccccccccccccccccnccaaaaaaaaaaaaaaaaaaaagactgtaggagcatctggtgggaggtggtggagggagaactgtgggtttggaagctgcgccctccccccagccatgcgttggaacaggaacacagttacatggagaacaaccttaccttgtccgacaccctcagatctttgtcccaggccaggaatcttttaatgacaggatcctctgtgattagagagcagatgtcagtgtgagaagcaggacagggtttccgtgggagcagcagggcagcgaggagaagtgtgcctcccggggggaagtctcaggattgtggccgcgggtgaggtggatgggagaggggagaatgactttcactgggcaagggagagaggctcctgctctgagactcccctgagaagaggccgaaggaggccctgggtgtgagaatctacaggatgtagagctgggaatcagccaggaccccctccagcagacacggagggaccactgcagagtcataaaggaattcccatcatttcctcatgagacagtcacacatcagggtgtgaccatggccttggtatcccccactatggatggagacacttaggtttagaaaagtcagtaagagacattaagtttcagagggcacagctgaaaccacttttttgatttttgattttgtttttctttatttgatttttatttttatttatttattaatttatttcnagactgtgtctcacaaaaaaaaaac

SEQ ID NO: 675965 - DNA, 572 bp, Homo sapiens
ataggttggataaagggataactgtgggggaaacggatcgttgttcttttaaaagtggtaagttgcggtattgtgagcccacgagccgctggaggaagtcaatgacgttggaaatcctagggtgactatcggcatgcctctataatctttcacctaccaccctaacaatcgtacccgtaccgtactacgtacacgggaaacgggaggcatctagtacctcaagggaacgcgcagggattccgagagcaggcgatgcagcaatgtatatctcacccgacctcggggtcatataccgccccgccagcttggaaccggccgaaataggcgggcctaggaaagaattaaatattgaccacggaacggcatgagtggttggtggataggtaacgcacttgattggatccgcctggggtactctggccgcagcgaatggcgctaacacgtttgtggattcaactaccgccttatcaaagaaatacgacgccactccagggacggatcggccggggaagcataaagtctatacagaccgctattgaagttggacataacctgagagggatgagggcacg

SEQ ID NO: 675966 - DNA, 1022 bp, Homo sapiens
tggacttctcgagatagagtgcgcgcctccttcgccgacgctctgcagtcctcagcgcagttatggcccagttcttcccgtctgtggggacacgaccgacggaggaatccttgcttcagggactcgggaccctgctggagcccttcctcgggtttaggggatgtggggaccaggaggaaagtcaggatccctaagagtctgccctgcctggatggatgagtggcttcgttctccacctagattcttctccacaggagtccagcatacttccatgaacatggagagtgctgttcgctcgctgaccattcttatcccgagtcccccaggccttatctgcagaaagcaggcagatctctgtgtgctatgcccaaaactgccccaagatgatggaagttggggccagagccagcgccctcgggcatagtccactgcagcagtacactaccaacagatcaatagataaccccatccggccagtgtagaaagagcgaagcacgtgctagggtcacaggtccatcagactcctgcatggatcccagcagagtccagatggcacactaggttccgtctggacgccccttgctgtgcacaagccaggtctactggaggcatagtgccctttcctggcaactacagatgaatcagagaggcaaccagtgtgttctggatggccagtcttgaagcttccggaggatgtgcgggaaatgactgccgtgacgaaagcggggtgaaactcagcagggccaggtggttaggtgaaaccgatggggggatcccagtgatgtgcagaactccggacgtaatgaagtacagccagaagagggtccactcttcagatactggcaattggtcattcagatgcggtttggagacaatgggaacagaagccccttcggttaatggaccgggcacatccggagagaatgacccccaaaaaggggggggagaacaaaagcccggggggataagggggggaaggaaggaggggccagacgttgagacccacgatggcacagccaacc

SEQ ID NO: 675967 - DNA, 903 bp, Homo sapiens
taaatagacagaacggactgtgatcgttcgtgaaaacgccgtaagtaatgtatacggcgatgtagtttgaacgctggtggctctaagaggattatcaccttcagaagtcatgctgtgttcataatgctagagtatcctgtacgacagacggcactaagcaccctataccttgcgtagctgtacatggattaaaaatacaaatatacctactcgaaggcagagtccgaatgcatgagaacctcaccgaaatagctagtaccagcatactttagagcaactggcatttccaggtagacagcgaaccagatcatcatgataagccccaaaagtaagtggagcaatgcattgtatcgagttcgaagtgcgaatctatagtaactcggtcgaccctgagttgaatcgactgcgattgatactgttgcatggatatctttagatacaaaacatttaaattgggcccagcaggaatccctcatatatcccctttggtgagagatcctaagctgtatagctgctcaccacgaggataccagtgtcttaagggaggagctcacgcgaaaaaaaaagccttggttagaagatgagtaaagaagaatttgagacagcccatagataaagacctacgatagacaggcccaccaattgatgtaaacagcgtgcatcgtcttcaagcaagcgcaactattctaataaaagatgcccgatagccatataatctgaacctcctcatcataccaaattggtaccaagtctatccaggcctaatagtaacgaaactaaatgcttagtaataaaggtagtcaatgacaaaccttgtctcactccctcgtaggccctgcagtctgattaaaaccagctgaaactgacaatgaacagttcaattatctgcaccacgaaaaaaac

SEQ ID NO: 675968 - DNA, 1601 bp, Homo sapiens
atcttgagatcatttatggttttgcaattcaacctgaaaaatgaagtcaaagcttttatcaaaacaaagcatgtttagtgctctctgtctcactgtcttttagatgccagaccttagattttgtgatgactcctcaaccgtttagatctcggttatctcagagggatcatcagctttttaagaaaattttgagagaaaagcaagtgaagaaaagagtagtcagtgcccaacatcacggatctctcactgaacacaccatgcctggtattctctcacagtgatgtcaccatttctacctgccacgtatcggcgaaggttgggactcgactggtgtttgatcacgatgggaaaatcatccagaaaaccccctacccccaccccagagggaccacagtcagcgtgaagcagttattttctacgctacctgtgcgccataaggaatttcaaaggaatattaagaagtacagaacctgctaaggccatcaaacctattgatcggaagtcagtccatcagatttgctctgggccggtggtactgagtctaagcactgcggtgaagaagatagtaggaaacagtctggatgctggtgccactaatattgatctaaagcttaaggactatggaatggatctcattgaagtttcaggcaatggatgtggggtagaagaagaaaacttcgaaggcttaatctctttcagctctgaaacatcacacatctaagattcgagagtttgccgacctaactcgggttgaaacttttggctttcgggggaaagctctgagctcactttgtgcactgagtgatgtcaccatttctacctgccacgtatcggcgaaggttgggactcgactggtgtttgatcacgatgggaaaatcatccagaaaaccccctacccccaccccagagggaccacagtcagcgtgaagcagttattttctacgctacctgtgcgccataaggaatttcaaaggaatattaagaagaacctgctaaggccatcaaacctattgatcggaagtcagtccatcagatttgctctgggccggtggtactgagtctaagcactgcggtgaagaagatagtagaaaacagtctggatgctggtgccactaatattgatctaaagcttaaggactatggaatggatctcattgaagtttcaggcaatggatgtggggtagaagaagaaaacttcgaaggcttaaagctctgaaacatcacacatctaagattcaagagtttgccgacctaactcgggttgaaacttttggctttcgggggaaagctctgagctcactttgtgcactgaggtgataaaatatttttatccattcacttgaccccttagaaaaacctctctgaaaattaattggaatcattattatttacagttttctgtctcaatatctcagcttccagcttctgaattctgttttgtctcactgccaatctaagtcctagtacttctgaaatgtgagcaataaatgaatgaaatgaagcaaatagtattgttaaaaaaattggttacccttattaaaacagtaacttctcaatttgaacataacatatagataataaatgatagttaccaaaaaaaa

SEQ ID NO: 675969 - DNA, 1296 bp, Homo sapiens
atcttgagatcatttatggttttgcaattcaacctgaaaaatgaagtcaaagcttttatcaaaacaaagcatgtttagtgctctctgtctcactgtcttttagatgccagaccttagattttgtgatgactcctcaaccgtttagatctcggttatctcagagggatcatcagctttttaagaaaattttgagagaaaagcaagtgaagaaaagagtagtcagtgcccaacatcacggatctctcactgaacacaccatgcctggtattctctcacagtgatgtcaccatttctacctgccacgtatcggcgaaggttgggactcgactggtgtttgatcacgatgggaaaatcatccagaaaaccccctacccccaccccagagggaccacagtcagcgtgaagcagttattttctacgctacctgtgcgccataaggaatttcaaaggaatattaagaagtaaacgtgcctgcttccccttcgccttctgccgtgattgtcagtttcttgagggctccccagccatgcttcctgtacagcctgcaaaactgactcctagaagtaccccaccccacccctgctccttggaggacaacgtgatcactgtattcagctctgtcaagaatggtccaggttcttctagatgatctgcacaaatggttcctctcctccttcctgatgtctgccattagcattggaataaagttcctgctgaaaatccacatctcccctgggtccggtgttctggaagtgagagagacaatgtcacacttcaaggaggcagctctctagacaggaaggttattcacgtcccatgtcaagtctagctagagttcagagcaattgagaagtgcaattttatctcctgcctttcattctataccctgcttctgaaccatcgtgttcaactgtgaaactcacactttggtgaccctgactccaaaacttaatacacccaaggtcagccccagtgatctagcttcatagcgaggacactcagggtgcgtctcccaggcagtcaggcaccctcatccagacctgctcccttcgccacttcatccacacctcagggctttatccgtggtcccttccgcactcctcacctccgtcacattgttgctagacactctctaccaccttcacttgctgacccaccatccgcaacacctaggaatcccagaacgccctcacttcctcactcctccctccctcctcaccaacgtatcctagcccatgtgcgtcccgccgcgaccgccgtgcaccgcatgtcaaccagcgcttactctgcacgccg

SEQ ID NO: 675970 - DNA, 2084 bp, Homo sapiens
  misc_feature (1620)..(1620): n is a, c, g, or t
  misc_feature (1810)..(1810): n is a, c, g, or t
  misc_feature (2003)..(2003): n is a, c, g, or t
  misc_feature (2009)..(2009): n is a, c, g, or t
  misc_feature (2019)..(2019): n is a, c, g, or t
  misc_feature (2021)..(2021): n is a, c, g, or t
atcttgagatcatttatggttttgcaattcaacctgaaaaatgaagtcaaagcttttatcaaaacaaagcatgtttagtgctctctgtctcactgtcttttagatgccagaccttagattttgtgatgactcctcaaccgtttagatctcggttatctcagagggatcatcagctttttaagaaaattttgagagaaaagcaagtgaagaaaagagtagtcagtgcccaacatcacggatctctcactgaacacaccatgcctggtattctctcacagtgatgtcaccatttctacctgccacgtatcggcgaaggttgggactcgactggtgtttgatcacgatgggaaaatcatccagaaaaccccctacccccaccccagagggaccacagtcagcgtgaagcagttattttctacgctacctgtgcgccataaggaatttcaaaggaatattaagaagtacagaacctgctaaggccatcaaacctattgatcggaagtcagtccatcagatttgctctgggccggtggtactgagtctaagcactgcggtgaagaagatagtaggaaacagtctggatgctggtgccactaatattgatctaaagcttaaggactatggaatggatctcattgaagtttcaggcaatggatgtggggtagaagaagaaaacttcgaaggcttaatctctttcagctctgaaacatcacacatctaagattcgagagtttgccgacctaactcgggttgaaacttttggctttcgggggaaagctctgagctcactttgtgcactgagtgatgtcaccatttctacctgccacgtatcggcgaaggttgggactcgactggtgtttgatcacgatgggaaaatcatccagaaaaccccctacccccaccccagagggaccacagtcagcgtgaagcagttattttctacgctacctgtgcgccataaggaatttcaaaggaatattaagaagaacctgctaaggccatcaaacctattgatcggaagtcagtccatcagatttgctctgggccggtggtactgagtctaagcactgcggtgaagaagatagtagaaaacagtctggatgctggtgccactaatattgatctaaagcttaaggactatggaatggatctcattgaagtttcaggcaatggatgtggggtagaagaagaaaacttcgaaggcttaaagctctgaaacatcacacatctaagattcaagagtttgccgacctaactcgggttgaaacttttggctttcgggggaaagctctgagctcactttgtgcactgagtgatgtcaccatttctacctgccacgtatcggcgaaggttgggactcgactggtgtttgatcacgatgggaaaatcatccagaaaaccccctacccccaccccagagggaccacagtcagcgtgaagcagttattttctacgctacctgtgcgccataaggaatttcaaaggaatattaagaagaaacgtgcctgcttccccttcgccttctgccgtgattgtcagtttcttgagggctccccagccatgcttcctgtacagcctgcaaaactgactcctagaagtaccccatgagtcaattaaacntcttttcttcataaattccccagtttccagtagttctttatagcagtgtgaaaacagactaatggacccttctggttgaaggaatgtagccattctgcttgtttaagtatttcctttctattcatctctatttcccgggaggtgtttatccaagtgcaataggagatattggtgactgcagagtcccctnagtgttctgctagtaaatagttgaaggttgatcagtgatctccagcattttcagtctggcatggaaaagcccccatgtaactggtaaaggtatcagtaagcaccaggaggtatctaaatccaccaggagccataggcatcatgttgatgtccatttaccagtcttcctggcaagattctctgaattgtactgncttgcnaaaagagtangnagggggatgatcccagtggctcacgctgtattccaagacttgggagacaatccgggtaagatc

SEQ ID NO: 675971 - DNA, 240 bp, Homo sapiens
  misc_feature (108)..(109): n is a, c, g, or t
  misc_feature (116)..(116): n is a, c, g, or t
  misc_feature (119)..(119): n is a, c, g, or t
  misc_feature (121)..(121): n is a, c, g, or t
  misc_feature (143)..(143): n is a, c, g, or t
  misc_feature (151)..(152): n is a, c, g, or t
  misc_feature (171)..(171): n is a, c, g, or t
  misc_feature (200)..(201): n is a, c, g, or t
ttctattttatctaagaaatccttccaaaaccaaggtaactaagattttctcttacttttcttcaagaagttttatattttagctcttcatttaagctggactcattnntatatancangnaagggatagttcatttttacanatactatnnatgccagcactgttgtacnagataccttccatgaatcctggcatcttnncaaaaaaaaacaacaacaactgaccataatatgtggatg

SEQ ID NO: 675972 - DNA, 366 bp, Homo sapiens
cacggaccgtgctggtcatcgtcctttgacttttactgtcgcagacatgagtcttgctctgtcattcatagctggagtacagtggctccatttcagctcaccgaagcctccacctcccaggttcaagcagttctcctgcctcaacctcccgagtaaccgggattcacaggtgtgtgccaccacacccgactaattttaatattttaggtagagacggggtttcaccactgtaggccaggctggatcttgacctcctgacctcaggtgatccacccacctcgaactcccaaagtactgggattataggcgtgagccacggaatccagcctcatccttcttataaccaatacacatgatgctgtatct

SEQ ID NO: 675973 - DNA, 1094 bp, Homo sapiens
  misc_feature (55)..(55): n is a, c, g, or t
  misc_feature (58)..(58): n is a, c, g, or t
  misc_feature (70)..(74): n is a, c, g, or t
  misc_feature (1005)..(1005): n is a, c, g, or t
  misc_feature (1022)..(1022): n is a, c, g, or t
  misc_feature (1033)..(1033): n is a, c, g, or t
  misc_feature (1052)..(1052): n is a, c, g, or t
  misc_feature (1094)..(1094): n is a, c, g, or t
tgtattggtggtgctctctgattggtggtgctttggtaatgtaggcgggctttgncgntaaaacctttgnnnnntgtattggtggtgctctcatataccctcgggttcatgtaacggcataactggaaccaaagctcactgagcaagggtatatgagagcgggtctcctcgtacaggaagtagaagatgttttgtttgggggcctcgtcgtcctcctccatgtcattggccagatagctgaggacagaaatcaggttgctgctcaggggcaccaccaggagagacctccggctgaggtcagcttcccagagaggaaggtaagggaccgtccctagctcaggactggcacccaccctgcagagagccacgccttcctcaggagggctctgctggacagagacctgatcaagggcgtctcccactccttcaggatggagacaaaaacccaactggtggccgagagtggtggcttatgcctggaatcccagcacactgggaggccgaagcaggaggatcacttgaggccaggagtttgagacgggcctgggcaacatagcaagaccctcgtctctattaaaaatataaaaaatacgccaggcgcgtggctcatgcctgtaatcccagcactttggaaggctgaagcaggtggattgcttgagaccaggagtttgagaccagcctggtcaacacagagaaaccccatctatactaaaaatacaaaaatcagcctggtgcggtggcacacccattagtcctagctactcaggaggctgaagcataagaattgtgtgaacccaggaggcggaggttgcagtgagccaagattgggcccctccattccagcctgagagacacagcaacactcttgtcttgataaataaataaataaataaataaacagtccaggtgtggtggcacagccctgtagtcggagctaataagaagctgaggtgggaggatcgcttgagcccaggatatggaggctgcggtgagctatgatctcancactgcactccagcttnggggacagggnaagtctgtctcaaaaaaanaaccagacactggacttccatttaaaacacaccacaacaaan

SEQ ID NO: 675974 - DNA, 538 bp, Homo sapiens
  misc_feature (81)..(81): n is a, c, g, or t
  misc_feature (257)..(257): n is a, c, g, or t
  misc_feature (261)..(261): n is a, c, g, or t
  misc_feature (437)..(437): n is a, c, g, or t
  misc_feature (452)..(452): n is a, c, g, or t
  misc_feature (478)..(478): n is a, c, g, or t
  misc_feature (482)..(482): n is a, c, g, or t
cagacaaggatgtggagaaatcggagccctcatacttgctggtgagaatgtaaaatggtacagctgctgtaagaaaacagnctggcagttccccaaaatattcaacatatagttaccatatgactcagcaaatatactcctaggtatatatacccatgagacatgaaaacacacttctaacacagaaacttgtacacagattatcattcataatgtctagaaagtagaatcaactcaaatgtctatcagctaatgantggnttaacaaatatgcctatacattagaatgttaattattcagcagtaaaaagcaatgaagtacagatacgtgctacaacataggtgaaccttgacgacatgctcagagaaagaagccagttcacaaagtactgcacattgtatgatttcatttatgtgaaatgcccaggattggcaantccttagggacaggnagtagactaacggttgggggttgggnaggnttaggggagtaggactcctaattggtggtacggttctttgagggatgatggaaatc

SEQ ID NO: 675975 - DNA, 202 bp, Homo sapiens
atctagaggatctctctgtggtgcatgcatgtgtagaccctgtggagactacttaattcacaccgggtgtctgatgtgtagactcctgtggagacctacttaattcacaccgggtgtcctgacgtgtagaccctgtggagacctacttaattcacaccggtggtcttacgtgttgacgcctttggagacctacttaattcag

SEQ ID NO: 675976 - DNA, 1012 bp, Homo sapiens
ggtggcctcagcgaagatgggccgggcgggtaccatgggtggtggcagcagaggtgggaggtgcggggcggcatggcggtagaggaggctgtggtcctcagtgggctgttggtggaggtatggctcgggccagcagtgggaacggtccagacgaggaggcctggggggcacttcgggcgccgcaagctagctagcttcgagagctgtgcccaggaggtgagcaatcagccctacctctgtgagagtggtcactggctgcggggagactggctgctgcagctacctactatgagctctggtggttctggctggctctgtgactgtcctcatcctctttagactgctgttgcgccttccgcacgcgacgtagctaaactcaggctgaatacaacaggagtgggagcgtgaaatcaacttgttggcctatcattgggggcatgtcgcatggggttggtcctttcccttaccgtgttcagtggttgatcttcggttcctcagcagcttcaagcccccagcctacgaggattgtggttcaccgccggtgcacgagcagcccagccttataatgtggccgcagggcggccttgacttgcttccagtgaacaaactggtggtcctcctcatccagctgcctgccactttgaaggaacgaatgttgaaggttgtttcgtcccaccagatgtgcccccctcatcaggagggtgagccgggcatgggttacccctgcttaatgccccctcgtgtcggtatcgcggttagctgggactcggttttgagctctgcctgtctgcgtcggtgaggtagccgtcagcagttggttaaggccctcgactggggaatttcccgttgttacccaggtgtacggaatttcatggggactccaggaggaccacaattgtgaggggtggttgcacaacagataattgtttaccctcacaataaagtggggatggtgtaccacagtatagaaaaaacggaaagtcgctagaaatatatatgaggactatcatac

SEQ ID NO: 675977 - DNA, 860 bp, Homo sapiens
ctttcccttcagaaggacggttagtaaatgtggaaacaaatgaagaacacaaagtaagatgatagaaataaattcaaatatatctttagttacaataactgtcaaaggtactgaacttttaagttccaagacaaagatggttaccactgcatttccaaaaatccaggtatatgcagtggtaagtgctatgcctaagtctataaactttcacacactggttaaacaataccacgctgcacacaatacctatatcacgcaaataataatcacaacgtaaagctgggatagctatagtaagaaataaccaatttcagactgcaaagcatggttacagattaaaaagattattacaattgtgataaaagattacaatattctgaaggatacagttctaatttatatctgaagtctgttaaaatttttttataaagctaaaattaatgaattatacggggaagttaaacaaattttcagtaggagatttgagcataaatgtctctgtaaatgatgtgaccaagcaggtcttaacactctggtaaagctatgtgggcccagtggagctctaccaaaatactgcactgtgattataactggtttcatgttgtatattactgctacaacactgggtggaataccacattccttttacacacagtcatgcgccatgtttaacaaaatgccacctacttcacgataactgacagacggggagcaggtggaatacaggaacctctcaaatttctccccatggtttgaattacttaccctctcactgctattcacatttccttacttctttgagccggactgctgcgccaaacggagttaggagctaataccgcctctgtagtcgaagtggc

SEQ ID NO: 675978 - DNA, 987 bp, Homo sapiens
  misc_feature (184)..(184): n is a, c, g, or t
  misc_feature (260)..(260): n is a, c, g, or t
  misc_feature (288)..(288): n is a, c, g, or t
  misc_feature (297)..(297): n is a, c, g, or t
  misc_feature (544)..(544): n is a, c, g, or t
  misc_feature (570)..(570): n is a, c, g, or t
agcgggaatgcttccgaagctggacgacgcctgtgtgtctggcctttccttcttcttctcttccccgggcaggcacagtgtgggcgtgtgtagtctcgctatgcccctggcgataagtatgctagcgtcagatccaatacggtactctcgacagcataagctcagccactttgcgttcattctngcgtaccacaatgtagagctacgatattgaacccaatgttctggtagaacgtgcattatcctaggaaggagaggtngtgcgacagaaagtgacaggacaattgnaacatttancccacaatcagcgactaaccccgcgtgctctcgccagagagagactgataccagatatgatactctcagaacgatggttgtgtgaccaggttcaggtagggtcccaaactaaaggagcgaggggacaatgagtatgaattcaccgtgagatgtcatataccgcgcattgtcccgttcccctctgatacggagtcagtcattgtggcgcaaatatctttccaattctcatcttcgtaacgggaatgcntcactaaggaaactactatactacanacatacgaagcgactaggcgtgaggatagtaagagagcaggaagagatttgactggaccgattgcgtgaaaagaaatctaggaagctcctaccaccataatagctttgttgcaatggtaccatggcaatagacactctggaccatggtggactatctgcaggccaggagcggaagcgagagcacggattggcgtgaattgcagacacacgggtctaagctgatatgcagaggtctgcgcatctatcgcagggaaacgggggaacatggtttgaagcgcctctactccaggaaacaattgacgcgattagaccgaatcacgcggagcttacgacacgaacaaaggaaataaccgatgtccaggaaagtcctcttggggtactatgtagggaaacgagatgctggaagaaagtggaccg

SEQ ID NO: 675979 - DNA, 595 bp, Homo sapiens
  misc_feature (487)..(487): n is a, c, g, or t
  misc_feature (518)..(518): n is a, c, g, or t
  misc_feature (529)..(529): n is a, c, g, or t
  misc_feature (535)..(535): n is a, c, g, or t
  misc_feature (540)..(540): n is a, c, g, or t
  misc_feature (569)..(569): n is a, c, g, or t
  misc_feature (579)..(579): n is a, c, g, or t
tcggggcagagaaaagggggtgctgcatcttcttcctcacctccagctctctcacctcgggttgccttgctcactgggctccgctaaccactcaggctgctcagtgctggcacacattgccttcttttctcattgggtccagcaattgaggagagggttgggggattgtttcctcctcaatgtagcaaattctcaggaaaatacagtccatatcttcctctcagctcttccagtcaccaaatacttacgtggctcctttgtccaggacataaaacaccgtggacaacacctaattaaaagcctacaaaactgcttactgacagttttgaatgtgagacacttgtgtaatttaaatgtaaggtacaggttttaatttctgagtttcttctatttttatttaaaagaagaaaataattttcagttttaattggaataaatgagtacttccacaagactatatacctgaaaattcccgtgccgattcggngagttgtctgcagttcagctggaattccatntctccagtcantcggancttgntgaagctcatctctctggtttgttgaaanagagtgagtnctgggcctgtatggac

SEQ ID NO: 675980 - DNA, 124 bp, Homo sapiens
tgggtagcccagcaatcctaggactggggcgaagtgcagcagacacgtaagagcggagcctgtggaagagtagccaggcaatcctcagactgagtgcgaaagcacagggaccactacagaggcg

SEQ ID NO: 675981 - DNA, 370 bp, Homo sapiens
gaggttttccaactgttggaggcgcctttggggctgcccctttgtttggagtcactgggggcttccaagggtttccctcgaccctctgttgtcctgggatggctgtcgggaactgtatcacctgggttctgtcccctggctctgtatcaggccctttatttaaaagtgggccccagtggggtgtgtttgtttcctgcttttttggagcctggaaggaaagggcttcaggaggaggcttttaggctggaggggccaaatggaggaggccaacaactaacccttgccccctggggttatgggtgggggcggtgactgccccaaacttggttttgtaattatttgtacaggaataaaccccccttcgctccga

SEQ ID NO: 675982 - DNA, 245 bp, Homo sapiens
  misc_feature (194)..(194): n is a, c, g, or t
catgcatgtgctgcaggtgattgaggatccctgggcacctggaatgggggcagcaaggctgaagcctcccacacataccccagccctctacagcggtacagtgaggaccccacagtacccctgccctctgagactgatggctacgttgcccccctgacctgcagcccagctgaatattaaccagcagatgttcnggccccagcccccttcgccccgagagggccctctttgcctgctgcccgacc

SEQ ID NO: 675983 - DNA, 226 bp, Homo sapiens
cacgaggcgaatgtgcatacttcatctgtctgtacccagatggcgtcttctatgacctgcacattatgcatgcattccacctaacctgattcaaagggggctcctgactccctgggggactggactgtggacccacctgacccagccatcccctatgacaccttctaaccggcaacagccgcttttatccacccccatgctgcccaactctgctacgaacccccca

SEQ ID NO: 675984 - DNA, 293 bp, Homo sapiens
aaccgttaattccttggtttaagcagttgctaagttttttaattttaggctcaaaggcccataggaggttttaaaatttatgtttagtccgataggtgaggtttttgatattttgaattttaaccccttttatgatacatcccagtaacctcatttttgaagtctttttttggactttaatgttctctctgttttaatagttgaagtatgaaatgtaactattataaactgttgctgaaaacataaatgtttgtaacttacaaacatgataaataaattaaaaattccctcca

SEQ ID NO: 675985 - DNA, 368 bp, Homo sapiens
gtgtgatgatatctcaatgtattttaatttgcatttctctattggtcagtggtgttgagcaccttttcatatgcctgattgccatttgtgtttcttcttttgagaaatgtctgtccaaatcttttgcccgtgttttgattggattattagcttttttcctatagtcgtttgatctctttatatcttcttgttattaagccctggtcaaatagatagtttgtagatattttctcccattctgtgggtatgtctcttcaccctgtggggtacaaaagttcccttttctctgcatacttgccagcattttttattgcctctcttctgcatataaggtatttttactggggtgtgatgatatctcaatgtag

SEQ ID NO: 675986 - DNA, 278 bp, Homo sapiens
  misc_feature (27)..(27): n is a, c, g, or t
  misc_feature (56)..(56): n is a, c, g, or t
  misc_feature (176)..(176): n is a, c, g, or t
aaaccaaccaaccaaccaaccaaccanaaaaaccttaggattttcccaaccaaggnggttgaaggactgctgcaggggaacctacaaaacactgctgaaagaaatcatagatgacacaaacaaatggaaacgcatgccatgcccatgaatgggtagaatcaatattgtgaaaatgnccatactgccaaaagcaatctacaaattcaatgcaatccccatcaagataccaccatcattcttcacagagttagaaaaatcaattcaaaaaaatcatatgg

SEQ ID NO: 675987 - DNA, 218 bp, Homo sapiens
  misc_feature (78)..(78): n is a, c, g, or t
  misc_feature (80)..(80): n is a, c, g, or t
  misc_feature (101)..(101): n is a, c, g, or t
tgtaatttaccttttagtaatcagaaaaatttccaatccatttttatcttaggtttgggtgggtgtgattaaaacttntnatttttattaatgtgaataanccaaagggtgattgtttttgacacacggcattgtgccatagtaaaatgggtagtatccttctcagttaacctttaatactctgtacacactattctgaaatactgtgggggggggag

SEQ ID NO: 675988 - DNA, 1248 bp, Homo sapiens
acaatatgattccacccagtgggcgacattccatgtgcaccgtcaaggctgagaacgggaagctagtcatacaatggaaatcccatcacctatcttccaggagcgagatccctccagaaatcaagatggggcgatgctggcgctagagatacgtcgtggagtccactggcgtcttcaccaccataggagaaggctgggtgctcattagcaggggggagccataaagggtcatcatctctgaccccatctgctgacgcccccatgtacgtcatgggtgtgaaccatgagaagtatgacaaaagcctcaagatcatcagcaaatgactcctgcacacaccaaagtgctatagcaacccaggacaaaggacaaaccactgacaacataagcgtcatcgaggaaaggaactcaatgaacaacagaccatgcacaacacatgccacccagaagaaagaaggaatagaacaacaaacgagaaaacaagagagagcagaatagaccgaagagagaaacaccaaaaacaacaaaaccactgacactacaagaaacatgacaaaagaaagagaagaaaaggacaaacacagaacatgaaaacgggaacagcaaacaaaaaggaccaatagacaatacacgaagaatcccaacaacaagcccaagcagctacgacacacggagaagaacaccacgacacgaggcaagacacaacaaaaaagaccataacacacaaaaagaatgacacactacaaaaaaaaagcagaaaaaaccaagagcaaaacaaaaagaaacaccaaaacaaaaggacaaacaagaagacaaaaaagaaacacaaacaaagaaaaccacagaaataaaaaaaagaaaaacacaaaacaacaaaacaaaaaaaaaaaaagaagaataagacacaaaaacacaaaaataaaaaaagaaaacaagaaaaaaacaaccaaagaaccaaaaagaaagagagacaaaagaccacaaaacaacaaagaagaaaaacggaaacacaaacagtagataaacaaaaaaggataacgtataggacggtaaaagagcaaaaagacgatcaacgtaacaacaagataaaagatgaatgaaaagagacaataataaaataacaagaacaaacagataaaaatatatatcaagaaaagattaaaaaagtagaagtagaaagaagtatgaaaatttagaatcacagaagaataaaagataatgaaactattagtaaaatatatataaaataa

SEQ ID NO: 675989 - DNA, 146 bp, Homo sapiens
acgcgagcccttcggcgcgagcacaagcttcggttgaccggtcacttcaagctcctagccactgcctgctggtgaccctgtggcggccaactccaccgccgaagttcacccctgtcggtgcacgcactccctgtgacaagttcctg

SEQ ID NO: 675990 - DNA, 114 bp, Homo sapiens
agtcggtaccgcgtgctcgatatcgaggatggcctggggactggtgctgcactcgggtcgaatgtcatcaggaatgagcagctgccctgcagtacttggccgatgtggacaggt

SEQ ID NO: 675991 - DNA, 106 bp, Homo sapiens
gcttggtcgatctacaggatcttaaaacaccgcaatctcgggaggatcacttgatctcaggagtttgagaccatcctgggcaacatagtgagacctggtctcttga

SEQ ID NO: 675992 - DNA, 84 bp, Homo sapiens
ggatttgctggtgcagtacagctaggcttaatagggctcgaattcgaggaattcgagcttctaacgttagaagcttgaattcga

SEQ ID NO: 675993 - DNA, 464 bp, Homo sapiens
  misc_feature (31)..(31): n is a, c, g, or t
  misc_feature (34)..(34): n is a, c, g, or t
  misc_feature (45)..(45): n is a, c, g, or t
  misc_feature (102)..(102): n is a, c, g, or t
  misc_feature (413)..(413): n is a, c, g, or t
  misc_feature (442)..(442): n is a, c, g, or t
  misc_feature (452)..(452): n is a, c, g, or t
attcggcacaggggccggccggagccgcacnagnccgcgattccnacgggcgatgctgggggctttccggtcggggccgcagcgcttccggagccgcggganggaatggattttcttctgtgtattgctgacacgaacaggagacggaaatactgagtagaagagggcggttccctggctaaggccccaccctcaagcctggatacccgcggccctaaatgagaagaggcgtttctgtttggggcccaaaaagttgccttttgacccaccacgccccctatcctgcccccatataaaccccaaaccccaacctccagagcataccagcaggtgaggagatacgaggcaagccgacttgacggcaaaacgacgtaggcagagaaagagagaagaggagggacgtctggacaccnagagatgttttgggttcggggcagtcagngcgggaattncaggcccttggt

SEQ ID NO: 675994 - DNA, 224 bp, Homo sapiens
aggactgattgatcccaggagttcaaggctgcagtaagctgtgcctgggtgacagagcaagaccctgtctctcaagaaaaaaaaaaaaaaaaaaaaagggttgggcgtgggtggctcatgcttgtattcccagaattgggaggttgagccggttggttcatgaggtcggaaattggaaaccatcgtggccaacatgtgaaaaccgtgccttctatgtcaggttt

SEQ ID NO: 675995 - DNA, 701 bp, Homo sapiens
  misc_feature (357)..(357): n is a, c, g, or t
  misc_feature (368)..(368): n is a, c, g, or t
  misc_feature (422)..(422): n is a, c, g, or t
  misc_feature (502)..(502): n is a, c, g, or t
  misc_feature (690)..(690): n is a, c, g, or t
gactttggtagtgccagtgtgactcatccacaatgatttctccagtgctcatcttgttctcgagttttctctgccatgttgctattgcaggacggacctgtcccaagccagatgatttaccattttccacagtggtcccgttaaaaacattctatgagccaggagaagagattacgtattcctgcaagccgggctatgtgtcccgaggagggatgagaaagtttatctgccctctcacaggactgtggccctatcaacactctgaaatgttcacccagagtatgtccttttgctggaatcttagaaatagtggagccgtacgctatacgactttttgaatatcccaacacgatcagnttttcttgtanacactgggttttatctgaatggcgctgattctgccaagtgcactgaggaagganaactggcgcccggagcttacctgtctgtgctcccatcatctgccctccaccatccatacctacgtttgcaacactatcgngtttataagccatcagctggaaacaatatccctctatcgggacacagcagtgttgaatgtttgccacaacatgcgatgttgggaacatgataccatttacctgcacgacacatggcaattggactaagattaccagaatgcagctaagtaaatgccgcatcccatcaagaccagaccatggatttgangactatgcttg

SEQ ID NO: 675996 - DNA, 523 bp, Homo sapiens
cagaccgacacagacctatgctcatagatgccgtagcacagcgtcaagcatgccacaggcctgcgcacagacacacaatcgacgtggagtcacatatgcacacaaccaccggcccacagtatgcacacagatgctgacgtacacacagacacatgcacacagggtacacacaaacacagcagtcacatctccacacacacctatgcagcacccagtatacacacaattgccgccacggacgggtgcagagagacgcacatagacagtacatgcaaacatatatccacgtagatgcagacagattccctcacagaaacatatgcaaccagacaccacagagacttgcagacatgtggacccagacccagtctcaatgcaaagacagcacacacaaggacatactacacagacgtgcacacacaggtctcatatgcacggaagacacacaccatgcagacagatacagacacatagaacatgccaccacacacacaaatgcacacagacacacaagcacgacagt

SEQ ID NO: 675997 - DNA, 606 bp, Homo sapiens
tggagccacactataatagctaacataccacgtacctacatagtactactatactaataggttaagtacgtacagtccctataccatagcgtaccataacctactaggtaggcaagacagtaacatacactacagaggagcagctagctaacagtataagtagctagacaatacataccagaacacagctagcgagggtacaatactaggccgtagccacataaccctactaaggtaaggtaagaataaaccaagataaggataacatagatattaccctagaataagctactactatacacaaaactatacaacaatatacagacctaacacacaagaaaaggggcctacccgaaaggaaaagaccacctagagggaacaccagaaagagtaccaaaggctagtagaagaataggacacacaaacaagctaaacaaccctagaaaacaatgtagaagccaaggaagcagcggaaggattgaagtacaacgaatagaaaccctccaaagccacgtcaacagaactagtaacggcacatatagggtagagcccaaagcacgaaacagctagctgaaaaagacaggcaacaacaacagaagaaaccag

SEQ ID NO: 675998 - DNA, 365 bp, Homo sapiens
tgtggcaaccgaatgcagggacaccagctgggggagcttctgctggaggagctgttgtgtctctctgctcgtgcctgctcttgctgcctgcaatctctggttttggttgtccttgctttctttgggttaggattggctgtgcactgggagcttccgccagctttggtttctcatcgcctgcctctgtttttgaattgaaggtggccagttcctcagcctccgctgtaagctgcaagaaagcggaggaagctgtattattggctggtggtgctggggcgctgtaagcctgtgagggcatcggggtactgcaggatgagctggtaggcgtcaggatttccatggcatccatggaatcctcattttgg

SEQ ID NO: 675999 - DNA, 184 bp, Homo sapiens
ttgaaattaaggcccacaaggcgccgttgacagcttcccactgataaaccaattgccggtgatacgcctcatcttctaagttgccgagctgtgtcaacatttgggtacgcatacgcgacatcaaggtggcaaagtaaatgctatcactatgcaaattcaacacggcattataaaaggcagcggg

SEQ ID NO: 676000 - DNA, 114 bp, Homo sapiens
gtgcggtaccttgacgtacaaccagtgcatcaaatatcgcttcagggcttgtcttttttcaggcattaacccaaggtggggggggggcaaaaatgcggcaaccggttggccgga

SEQ ID NO: 676001 - DNA, 1210 bp, Homo sapiens
  misc_feature (1016)..(1016): n is a, c, g, or t
  misc_feature (1191)..(1191): n is a, c, g, or t
atcttgagatcatttatggttttgcaattcaacctgaaaaatgaagtcaaagcttttatcaaaacaaagcatgtttagtgctctctgtctcactgtcttttagatgccagaccttagattttgtgatgactcctcaaccgtttagatctcggttatctcagagggatcatcagctttttaagaaaattttgagagaaaagcaagtgaagaaaagagtagtcagtgcccaacatcacggatctctcactgaacacaccatgcctggtattctctcacagtgatgtcaccatttctacctgccacgtatcggcgaaggttgggactcgactggtgtttgatcacgatgggaaaatcatccagaaaaccccctacccccaccccagagggaccacagtcagcgtgaagcagttattttctacgctacctgtgcgccataaggaatttcaaaggaatattaagaagtacagaacctgctaaggccatcaaacctattgatcggaagtcagtccatcagatttgctctgggccggtggtactgagtctaagcactgcggtgaagaagatagtaggaaacagtctggatgctggtgccactaatattgatctaaagcttaaggactatggaatggatctcattgaagtttcaggcaatggatgtggggtagaagaagaaaacttcgaaggcttaatctctttcagctctgaaacatcacacatctaagattcgagagtttgccgacctaactcgggttgaaacttttggctttcgggggaaagctctgagctcactttgtgcactgagtgatgtcaccatttctacctgccacgtatcggcgaaggttgggactcgactggtgtttgatcacgatgggaaaatcatccagaaaaccccctacccccaccccagagggaccacagtcagcgtgaagcagttattttctacgctacctgtgcgccataaggaatttcaaaggaatattaagaaggtacagtaaattaatcctggttttcaagantattggttaatgcacatgagcaaaagatttactaaagatgtttattcttcagttgattctcttcccataatttattgagaaatgctttatttgcatttctcattaaagacttaacttcaggatgatttacttttttctttttatcacataatgtttattaggactgggaaacatngtgagactctgtctctatg

SEQ ID NO: 676002 - DNA, 869 bp, Homo sapiens
  misc_feature (1)..(1): n is a, c, g, or t
ncaaaaagtggagtacggtggaatccagttagagcagtgtaatgttaatgagtgtatgtttattgtttattgtcgactgtaagtgcgtgactgaagctctagtcagttggaacccgtccccttggtgtcccccccgaggttattcccacaattggcgttcttcccccggttaggcccacatcctttttgcgaagactccccaatcctctcttgacacacaatatcgtgtttcctttcccggccccgcgaaaattgccccgggtcttgcccccattcgcgcggggctccattctagctatgtggtttccacgcctctctgtagtttgggacacgacaataggtcactctgggggcccggcgccctcttctcctacaagaaaggagcggtttcggcccccaaagcgggcgctcatcccccgaagttccccctattcccggggttcacccttggtgccactgaactcttgccccacagaagcacccgattgtcctcatttaagttttatccgggggagagtacgtaccggtgtttccccccacacactttcggagcacgcacgcacgaaagtccccgccacggcgtacatcgggaaatccccccaggcgatagcagaccgactgaggtaaaacatcccattcacttcgcgtaggtccacacttacttatgttctcgtacgccccgagaatatgtgagaaattcatgtcgacaagagtagcgacagacacatctgctggtcgcagaacaggcaaatcctcgataaaggaacataagagccccccccaccaacccgcgggggaccaaattcggaggacccccccccctcccaccatttgggaacccctaacaaaaaattttacacaacaaaaca

SEQ ID NO: 676003 - DNA, 1259 bp, Homo sapiens
atcttgagatcatttatggttttgcaattcaacctgaaaaatgaagtcaaagcttttatcaaaacaaagcatgtttagtgctctctgtctcactgtcttttagatgccagaccttagattttgtgatgactcctcaaccgtttagatctcggttatctcagagggatcatcagctttttaagaaaattttgagagaaaagcaagtgaagaaaagagtagtcagtgcccaacatcacggatctctcactgaacacaccatgcctggtattctctcacagtgatgtcaccatttctacctgccacgtatcggcgaaggttgggactcgactggtgtttgatcacgatgggaaaatcatccagaaaaccccctacccccaccccagagggaccacagtcagcgtgaagcagttattttctacgctacctgtgcgccataaggaatttcaaaggaatattaagaagtgagtgagcgctcatgggatctggttgtttagaagcatgcagcacctcctgcttcactctctctgtctctcctgctccaccatggccagaaacgtgcctgcttccccttcgccttctgccgtgattgtcagtttcttgagggctccccagccatgcttcctgtacagcctgcaaaactgaagaacctgctaaggccatcaaacctattgatcggaagtcagtccatcagatttgctctgggccggtggtactgagtctaagcactgcggtgaagaagatagtagaaaacagtctggatgctggtgccactaatattgatctaaagcttaaggactatggaatggatctcattgaagtttcaggcaatggatgtggggtagaagaagaaaacttcgaaggcttaaagctctgaaacatcacacatctaagattcaagagtttgccgacctaactcgggttgaaacttttggctttcgggggaaagctctgagctcactttgtgcactgaggtgataaaatatttttatccattcacttgaccccttagaaaaacctctctgaaaattaattggaatcattattatttacagttttctgtctcaatatctcagcttccagcttctgaattctgttttgtctcactgccaatctaagtcctagtacttctgaaatgtgagcaataaatgaatgaaatgaagcaaatagtattgttaaaaaaattggttacccttattaaaacagtaacttctcaatttgaacataacatatagataataaatgatagttaccaaaaaaaa

SEQ ID NO: 676004 - DNA, 968 bp, Homo sapiens
  misc_feature (879)..(879): n is a, c, g, or t
  misc_feature (896)..(896): n is a, c, g, or t
  misc_feature (907)..(907): n is a, c, g, or t
  misc_feature (926)..(926): n is a, c, g, or t
  misc_feature (968)..(968): n is a, c, g, or t
aataaaaattaaaaatagatgtagatgctatgttgctgaggctggcctcaaactcctggcctcaggtgatcctcccgccatgacctccaaaaccacagggattgtaggtgtgagcactgcacccagccttatgtttttttctacataaaaaacagcacaggattatcttccagagctaataaatatgttcaaataaccacaaccccattaaggaaaaatatcactgggcagcaaataatcaatccagaccaatatgatcacaattgctgtgaaggtgagaaaagttcatttttattatgtttccccaagagacgcactctattgttctcttgaaaacacacagctcatgcctggaatcccagcacactgggaggccgaagcaggaggatcacttgaggccaggagtttgagacgggcctgggcaacatagcaagaccctcgtctctattaaaaatataaaaaatacgccaggcgcgtggctcatgcctgtaatcccagcactttggaaggctgaagcaggtggattgcttgagaccaggagtttgagaccagcctggtcaacacagagaaaccccatctatactaaaaatacaaaaatcagcctggtgcggtggcacacccattagtcctagctactcaggaggctgaagcataagaattgtgtgaacccaggaggcggaggttgcagtgagccaagattgggcccctccattccagcctgagagacacagcaacactcttgtcttgataaataaataaataaataaataaacagtccaggtgtggtggcacagccctgtagtcggagctaataagaagctgaggtgggaggatcgcttgagcccaggatatggaggctgcggtgagctatgatctcancactgcactccagcttnggggacagggnaagtctgtctcaaaaaaanaaccagacactggacttccatttaaaacacaccacaacaaan

SEQ ID NO: 676005 - DNA, 528 bp, Homo sapiens
  misc_feature (26)..(26): n is a, c, g, or t
  misc_feature (151)..(151): n is a, c, g, or t
  misc_feature (200)..(200): n is a, c, g, or t
  misc_feature (310)..(310): n is a, c, g, or t
  misc_feature (326)..(326): n is a, c, g, or t
  misc_feature (378)..(378): n is a, c, g, or t
  misc_feature (453)..(453): n is a, c, g, or t
  misc_feature (503)..(503): n is a, c, g, or t
ggtagtagctggaagtacaggcgcangccaccacacccagctaatttttgtatttttagtagagacggggtttcaccattggccaggctggtctcgaactcctgacctcgtgatacgcctgcctcagcctcccaaagtgctgggattacangcatgagccaccgcgcccggccattttgtaatttttttttttggtgganggaggatagaagctcagccacctcttgcccagtctgcagcaggtcagccaggaaccttcaaccatctctgcagccagagcctgtcttcaggtggacagagccatctcgcnttgtcacccaggctcnggtacatggcacagtctcagtcactgcagcttcaactctggggctcaacgantctgccaactcagctcccaagtaactggggatacagtgtgtgccaccacgcctggctaattttgtattttagtanaagaggggtttcgccaggttggcagatggtctcaaattcttgcctcaggngagctgcctcagcttcctgtgggat

SEQ ID NO: 676006 - DNA, 470 bp, Homo sapiens
ctagaggacccgaccatccacatcacttctctgttagtctgggagagtgtatgtgtcgagattatcattcttctaagatttctacttattgcgtagaggtgtttgcagatctctgatgtagtagattctgtgggatcgggtgggatatccccctttatcattttttatcgtgtctatttgattcttctctcttttttctttattagtcttgctagcgggtctatcaattttgttgatcctttcaaaaaaccagctcctggattcattgattttttgaagggtttttcgtgtctctatttccttcagttctgctctgattttagttatctcttgccttctgctagcttttgaatgtgtttgctcttgcttttctagttcttttaattgtgatgtcagggtgtcagatttggatctttcctgctttctcctgtgggcatttagtgctataaatttccctctacacactgctt

SEQ ID NO: 676007 - DNA, 227 bp, Homo sapiens
ctgatattacctgcaatggccccttcactgtgctggttaaggagtcttgtgactggaatgggagacgtgaggcagaagcaggaagcagcagacatgctctggagaccgtgagtgacagatagtcgaacagagcataaccttcttaccatccccttctcggctagggtgtctcgaagaggctctgagccccatggcgccgggcccctgaggcgtggtaccgatctcga

SEQ ID NO: 676008 - DNA, 278 bp, Homo sapiens
ttggccaaattgggtacctgtcgtgtatgcctgcttcctggatgacaaccaaatcatcaccagctctggggatgccacctgtgccctgtgggacattgagacaggccagcagacaggtgtggttagtgctggacacagttggggatgtgatgtccctgtccctgtcccccgatgaccgcactgtagtgtcagtgcgcctgtgatgcctctatcaagctgaggaacgatgcgggataccaatgtgcctgaccagacctaacatcggacatgaatccgaa

SEQ ID NO: 676009 - DNA, 319 bp, Homo sapiens
cgccatttacaactatctggaaaaacagttttatgacagtgggcaacaggcggtgaaggttatagtggtcccaggagaaggcacacaaaagaggtgagccctacacctacaatctattaatgcaattgatttgttgcctgcaggcattttccagatcataatgcatgtatggtcttccaagcagaatatagtaatttcaatgaattgaggagacaaaaataagaatttggggagtttaaggcagctaaacatttgggcctgagttccagaggagaaagaactatgcagaaaagagatccagagatagttgtaaatggcg

SEQ ID NO: 676010 - DNA, 160 bp, Homo sapiens
gtcacgtcggccgggcatggctgcatggagcccggccgcggcagcccttttcctccgcgggatccggggcattccacttaaccatcggatgtttgccactagaacttagggggagctcagagtaacccaattctcaaagaaagttccacggctaagctat

SEQ ID NO: 676011 - DNA, 102 bp, Homo sapiens
gttggctaacgtggtcggtggagaggctggagagagaggcagggtctagtcatttcatgtcaaagggtctggttttattaagtgaggaaactcagtcagata

SEQ ID NO: 676012 - DNA, 153 bp, Homo sapiens
cccccaaaaaaaaaagcccctttttaaaaagcctttttttaaacaaaaaagttttcccccccgggaaaaaaaatttttggaaaaagggttaaggtttttaaagttaaagggggggcccaattttccgggtaaaaaaaatttttttcgccccca

SEQ ID NO: 676013 - DNA, 1071 bp, Homo sapiens
  misc_feature (472)..(472): n is a, c, g, or t
  misc_feature (571)..(571): n is a, c, g, or t
ggagagagagaactagtctcgagtgtttttattgtttttgaaaaaacaaattaaaaactttatgggaggtatcaagcatctaaattgggatcaattggatacatcgtgggcccatttggcagaaccataacaggttggcactttggcaaagatgtgcaatctgggctgtcggggtcttttcatggctacatggggggtctacccctggctcttcccttctcccggacctggcatcctggtgcctccacagtccggcccggcctccggtcgccacgggttggaagacccaaggcccgggaggagaagaaccctggtctggcacaggggggctgggtctgggctggcgagacgcacaagagaggggcacagggcagtgtatagcctcggcacaacagggggaggggggcagggcaagggagatcgcgtttactccctactatcctgggggtctgagagcccccggggccagggngcacaggcacaacaagaggtggccctaatgtacaaggcccattggtgggctccacagggaaggcctggctgagtgggttcactaactccacatccccantttacacccggacagctctaatgtggggcaaaaaccccccgggataatctcccggagcacaaatattacacccagagtttccagtggatagaaactcccagaaactcttgtaacccagtgtgtctgtgggtttatcacccattcctgtgggttcactgagaagtgtagggaaacaaaggggtacgtggcagaaagctcccttccgtgggcccgtgggaaaaaccagatctgggagggggaaagcgaactctacagccaccacacgggtatatcctcgccatcaactcccccgagaggaagatttcggaaacacaacaaaagctgcgggacgaaagaaacacaacaccgagtacaactaaacaacaaaaggtcccgatgcaaccacagggatccgcgacatcgggacccatgggggagaacggtaaacaaattcaccccatctccccccatcaagcagacggccaggagacaatgacctcgggtaaccggaaaaaaggggt

SEQ ID NO: 676014 - DNA, 132 bp, Homo sapiens
cgcaccgctggcctggacgacgatctctgggtcctcgatgtcccttgctctgcaccatccgatccagctgatggtggtatctccggactgggcttttgcacactggatcaacaaaagccaaacaaaaaataa

SEQ ID NO: 676015 - DNA, 160 bp, Homo sapiens
tgggccattaccggggaattcataaaaaacaatagcctcatcatcccccccataatggccctattaccctccttgacctctacttctccctgggcctaatcttctccaacctctatcaccttctcccatatctaacaagtaaaaaaaaatgtacggtttg

SEQ ID NO: 676016 - DNA, 659 bp, Homo sapiens
  misc_feature (30)..(30): n is a, c, g, or t
  misc_feature (64)..(64): n is a, c, g, or t
  misc_feature (68)..(68): n is a, c, g, or t
  misc_feature (72)..(72): n is a, c, g, or t
  misc_feature (75)..(75): n is a, c, g, or t
  misc_feature (94)..(94): n is a, c, g, or t
  misc_feature (96)..(96): n is a, c, g, or t
  misc_feature (99)..(100): n is a, c, g, or t
  misc_feature (102)..(102): n is a, c, g, or t
  misc_feature (107)..(107): n is a, c, g, or t
  misc_feature (110)..(110): n is a, c, g, or t
  misc_feature (117)..(117): n is a, c, g, or t
  misc_feature (120)..(120): n is a, c, g, or t
  misc_feature (124)..(125): n is a, c, g, or t
  misc_feature (135)..(135): n is a, c, g, or t
  misc_feature (138)..(138): n is a, c, g, or t
  misc_feature (145)..(146): n is a, c, g, or t
  misc_feature (148)..(148): n is a, c, g, or t
  misc_feature (155)..(155): n is a, c, g, or t
  misc_feature (169)..(169): n is a, c, g, or t
  misc_feature (172)..(173): n is a, c, g, or t
  misc_feature (176)..(176): n is a, c, g, or t
  misc_feature (182)..(182): n is a, c, g, or t
  misc_feature (207)..(207): n is a, c, g, or t
  misc_feature (215)..(215): n is a, c, g, or t
  misc_feature (219)..(219): n is a, c, g, or t
  misc_feature (223)..(224): n is a, c, g, or t
  misc_feature (227)..(228): n is a, c, g, or t
  misc_feature (235)..(235): n is a, c, g, or t
  misc_feature (237)..(237): n is a, c, g, or t
  misc_feature (239)..(239): n is a, c, g, or t
  misc_feature (243)..(243): n is a, c, g, or t
  misc_feature (245)..(245): n is a, c, g, or t
  misc_feature (250)..(250): n is a, c, g, or t
  misc_feature (252)..(252): n is a, c, g, or t
  misc_feature (261)..(261): n is a, c, g, or t
  misc_feature (265)..(265): n is a, c, g, or t
  misc_feature (270)..(270): n is a, c, g, or t
  misc_feature (276)..(276): n is a, c, g, or t
  misc_feature (282)..(283): n is a, c, g, or t
  misc_feature (285)..(285): n is a, c, g, or t
  misc_feature (287)..(287): n is a, c, g, or t
  misc_feature (293)..(293): n is a, c, g, or t
  misc_feature (330)..(330): n is a, c, g, or t
  misc_feature (336)..(336): n is a, c, g, or t
  misc_feature (338)..(338): n is a, c, g, or t
  misc_feature (341)..(341): n is a, c, g, or t
  misc_feature (345)..(345): n is a, c, g, or t
  misc_feature (358)..(358): n is a, c, g, or t
  misc_feature (386)..(386): n is a, c, g, or t
  misc_feature (434)..(434): n is a, c, g, or t
  misc_feature (477)..(477): n is a, c, g, or t
  misc_feature (491)..(491): n is a, c, g, or t
  misc_feature (579)..(579): n is a, c, g, or t
  misc_feature (657)..(657): n is a, c, g, or t
cttactcaccccggtgcatgcgggattgcnggagagaacgcggggatggagccgggcaggaacnaganaaancangaaaccaggtaaaaagaananatnntngaggngangaaaaanaanaaanncatcccatcngcntgcatcnntnagcctcncaaagaagcacaanaannganagcccngggaactgtggaaattgaactcaanagaatcangaanatannggnnctgggcnanantgcnancttcntngaggatgcngtanaaatntaaaanaaaaanntntnaaccanaaaaaggcggaatctgctatggaaaagctcggcaccnacggtngngtntgtnctgtgctgctttngtctctggatccatcgttccctggagcnggtggaaataaacataaaataatattaagcagtgtgctattacatgcngatgctggtcatggtggaaggctttggggggaaggaggcagtnctgaggacgctganggacaccccgatgatggtccacacaggcccctgctgctgctgctgcccctgctgtccacggctgctgctcaccaggaagaagcttcanctgctgatgttggggcctttccaatacgccttcttgaagataacgctgaccctggtgggcctgtttctcatccccgangg

SEQ ID NO: 676017 - DNA, 175 bp, Homo sapiens
gtgaagaagctggatctcatagatactaaatggtggatctaggcgcagctgagcggatagcaccgggacatatattggaatggatgaggtctggcacccatgagcagtccagacgaggactatggatcttacgttgcgcacatataggctaggaggatacatatgcaagcacggc

SEQ ID NO: 676018 - DNA, 751 bp, Homo sapiens
  misc_feature (383)..(383): n is a, c, g, or t
  misc_feature (430)..(430): n is a, c, g, or t
  misc_feature (652)..(652): n is a, c, g, or t
  misc_feature (683)..(683): n is a, c, g, or t
  misc_feature (690)..(690): n is a, c, g, or t
tccttagaagaaagggcgccctgagctcttatatctcctaattgacacacattatacactatcaaatcctatcattcttggccagacacgatggctcatgcctgcaatcccaggactttgggaggccaaggccgtcagatcaccaaaggtcatttgttcaagactggggtggccaacatggaggaaccccatctctactaaaaatatggaaggaaaagataaatggctaataaaaaacatgggggccgccttagaccatccgactgtagactaaagcgagtttatgcatgcagccggagttcagactcacttggccaatttaccctaaagtgagggggattcatttcactggccgtggatttacaacaaacagactgagaaanccttggcgtgtccgaacttaatcaccttgtagcaaatccacctttcnacagctggtgaaactcgaaagaggcccaaaaccgtcgaacttacaacgaaggcgcatcgcgaacggcaaagtggaattgccggcgttaatattcgcgtgaaaattgcgtaaaattactagggaattacctgattatataaccaaagggccgaagacggtataaacccttaaaagcaaaaaaataggcccggatggggtaaagggatttccaaaatgggaaanaatggcctttaaactacctaggctccaaagnaaaaggnggaaaaacggcttttgggcggggcccaccacgtgaacaatacactaaaacccctattaaac

SEQ ID NO: 676019 - DNA, 198 bp, Homo sapiens
aggtcagtaacgatatttggagtcagcacggtagctcacgtgtcgaaggaacttgtacagggaggcatgcaccgacatgttgaatacacgtcgaccaggatccatattaacgatatttggagatgagcacggttctcacaatgttgaaggaactagtatagggaggcatgcacccgcagtggtgaatacacgtcgagc

SEQ ID NO: 676020 - DNA, 318 bp, Homo sapiens
gctccttcgcgcactccagtcatgctctctctccgtactgccgcctgccggtcggctccagtgtccccacctgtgcctccgataccagcccgaatggagtagacacatctttgtggcctgtgaagggagcccttatgtgccagtccactttgatgcttctgtggaggactctaccttcggtcagagctgtgtgatatgctgatatccctcaacctcatcctctccacagctgcctcttccctcttccttccctgctgtgaaagaagtaactacagttagggctcctattcaacacacacatgcttccctttctggtgg

SEQ ID NO: 676021 - DNA, 940 bp, Homo sapiens
gctctcaagcttggcgtttgtattgtgtggggtcacacgcggtttcaacatgcgtatcgaaaagtgttatatttgttcggggcccatctatcctggacacggcatgatgttctgtcctgcaatcgattgcagatgggtgtgcacgatctcgcaaatctagaaggttgtctataaataactttaggcaaagaatgcgcaatcctcgcaaagtgaaggtggaccagacgcatccggaaagcacggctggtaaagagctgacagtggatcattcagttcgaatttgagcaagcgtcagaaatgaacctatcaaataccagcgagagctatggaataaaactattgatgcgatgaagagagttgaagaaatcagaccagaagcgccaagctaagtttactaatggccagatgggtagagcaactaaagagctacacgaaagtttcaggatactcaaggagaagtcaagcaaaagcatccatcgtttatccgagcccctcttggcggctaagggaacacagtggggcagagcacccatggttgccggccgtttacaagaggatgtggactggaagatgctccttaaggaatctctgttacccattgtcttctatgtacatttgaaaatgccccttggattcttggaacctgcttaaattatttatcttcttacatcaggtgccttgaatgcagaagggattcaaaagacatctttcctgcctgcatctacttatatccgatttcgcgtttcgatgctttcagggtgaaccttcggttgatgttctagtatccggaaattcccggaaccctgaaggagtgtggcgccaaggtgggccattgggatgtgcaggcgctctgtggtactctggcgcactgtttctgttcacaaaattttcgccacctctggtaagggagacaaaaagaggggaatttttcggttcaaaa

SEQ ID NO: 676022 - DNA, 169 bp, Homo sapiens
atcccacaggttcgggctacccctctcttagagccagcgcgctgattccagcttacacacttcttagggataaatatgacttatttttcaaaatcgtttttaatttacactgtgtgttagtgtacaattgttaaccttgtcagatggatcatgtgtataagaatgtagg

SEQ ID NO: 676023 - DNA, 202 bp, Homo sapiens
tctcgtcaactggtggattatatcacttgaatgctgggcgaagaccgagatcactttagtcgatgcagggcccacgtgataagcagatgttttaacgggggtatgtttcgtcttgcgtccgctcctccggcccccacgcccatcgcgtccgcatcctgggggagcgatcgctgaaatcgcccattgagtccgacttggatgc

SEQ ID NO: 676024 - DNA, 241 bp, Homo sapiens
  misc_feature (99)..(99): n is a, c, g, or t
aactcccaggttcatgccattctgccgcctaagcctcccaaagtgctgggattacaggtgtgagccaccgtgcccggccttagatgtagaattttcccnaaagagaattctttgagttctgtttcagttatttttgattgagacaagtgtcatgtacctacataggtatagtttgcatttgctgtaaactcttgtgtggactatacagatagattgagtagtatagctgtattgtggttct

SEQ ID NO: 676025 - DNA, 161 bp, Homo sapiens
gacgacgaagcgtagaacctacataaccattcttaatttaactatttatattatcctaactactacctgcattcctactattaattaataatcaagaacaatgaccctaatactatctcgcagctgaaacaagctaacatgactaacaccacataatacca

SEQ ID NO: 676026 - DNA, 129 bp, Homo sapiens
tagtcggcaactaaaaatgattatggatactagtataaaatatcaggttcgtcctttagtgttgtcgtattgttctcatttgttttgatgttcagtttgatatagtcattgtcgggtggtgattagtct

SEQ ID NO: 676027 - DNA, 613 bp, Homo sapiens
  misc_feature (577)..(577): n is a, c, g, or t
  misc_feature (579)..(581): n is a, c, g, or t
ttttgagggggcccgcggcccaatattaatcatctcacccatcctaaatacttcccccgccttgggccccacccaaccttttgtccccccctcttattgcccccccctcccccatttaaaaggccccaaaaacccctttttgggggcccccccctttttttaaaaacccccttttttgtggggtttttttaagccccagaaaacccctctttttttaaaaagggcgaatttctttttcctttttcaacaattgaaaacgcccctgtggcccgcgcggggttttttaattttttataaaaatttccccggcccaaaaaattgtttttatttaaaaggcctttccctcccccccggtgtttttaaaaccttttcttgaattaatataagggtgtgcccaaaacccttctctataaaacaaattttccccttaaaaaggccattttggcccatatggcccaagggggttccctaaaatttttgttttaaaattttgggggccccccccccctttttctatgtatgtgacaaaagccttttttttttcccttccaaaagcatatattctcagttttgaaancnnnccctcgagactagttctctctctctctctcac

SEQ ID NO: 676028 - DNA, 100 bp, Homo sapiens
cgtgctgccagtttctacccgcccccccttttttgcttttcggggcgattggggctgattgggctcatcggggcttgtctgtggcttcatctgtggcctt

SEQ ID NO: 676029 - DNA, 139 bp, Homo sapiens
aaccgttctagaggatcacctgcttacgtgggagtattcctttttctacactcacaacaaaataactaatactaacatctcagactgctcaggaaatagaaacctgtctgaatatcctgccctgcatcatcctagtcct

SEQ ID NO: 676030 - DNA, 108 bp, Homo sapiens
ctgctgctccatagaggtgctgcggtgctgctgctccctagccttcatgttctgtcttcctccttagccagaacgccactcccttccacacatccccttcttctctcc

SEQ ID NO: 676031 - DNA, 964 bp, Homo sapiens
gatcccagtctcagaaacacagataaaattgcaacattcatctcatatcctccaacagctattccctgttctattggactccctagcagtcatctccttgtaagattatttacttacacattggtttagtggtgtatatacccacaaaaacttatgctctataaggacatggattcttatatgtttgtaacttgatgtttcctagttccttgaacagcacgttgatatacagtatgtgctcaataaatagttgttatatgcataaataaaaaatattatatttatttatttattattattatttttgagaaggagtcttgctctgatcgcccaggctggaagtgtagtggcgcgatcaccagactcactgcaaactctgcctcccgggttcaagcaattctcctgactcagacctccagagtagctgggagtacagccatgtgccaaacatgcccagctaatgatcagtataaggtatccagtataaataatggctcgctcaacgggtttcaacaacttaccatgttatgaggtatataaattagtactactggagaaaccaggaataaactatcgaggatagctcaggtacatgaagctagactccagatacaagaagtcatgtcaatacctgtgaaaactgtgcacttgttacataccattcattcaatatggcgaaaggataacagcgcactccgactacatagcgctatcgcataacgcgcacaccgatagcctcaaggcgaaatccaccaccaagataacacgccaccggaaccttagacaggaccacaggagaagaaccaactacatctggcacatacaagaggagccagaacaaagggacaaataaaaggacgagagcgacagaaacacaccacaaagaaggaaagaagcacataaagcatccgaccaccacataacacaaaataggcaacgagacacaacacccataaaacgcaaa

SEQ ID NO: 676032 - DNA, 889 bp, Homo sapiens
cttgcttatcaaactgtgcgccccaatagtttagatagcctccgtggtacccgcagaataattcttctcgggaaaaagttttcccggacaacggttttttcaacaccagacgtggtaccacagcccaaagggtccccctgcgctcaaggtcctttgatctttaggagggtgcgcagccccctttggtagtcataggtgcctcccacgccctgtcacaactggacacccaaggcttagaacattaagggatgggaacgggttataacactgcccccctcggggctgtgtaaagcaatttccccttttctagggccagtcaccggcaatttcttcttctgatcgttgtacactggcgtgacaaccgtcgaaagagggtgacactgggcaccgctgttaaatgtctcttcaatcagtaccacccacccataagagtcacccggtgtcccgtcacccccgcatgccaaagctacaaatggttctcggaggacccacgaattggctggtagtgcaaccccgtgttcgttagatgcacactgcataaaagggtcttaaaaacagacttcttgtttttacggcggcctctttaaagtggaacccccgtatgttgcggccccctccagagcccaccccgttagtaaaaaaggaaaaaaaattattcatgtttctgaaaactttggtatctttgtgaataaaccacaattagatttctttttgaataaacaagatcttcaattggcgtatcataatctatcaaagcttagagctccagaatactcccaaaagagaaaatatctccacccttacattctcctctgtaaaaataagaaaatgaactcttgcacccacaaccattaaaaaaaataatcaagaaaaaaacagcaacaaaaca

SEQ ID NO: 676033 - DNA, 239 bp, Homo sapiens
aatttgatcctgtcattatgatgttagctgattattttgctcgttaggttgatgcagtttcttcctggcatcgatggtctttacagtttggcatgtttttgcagtggctggtaccggttgttcctttacatgtttagtgcttccttcaggggctcttgtagggcaggcctggtggtgatggtttcctgcatcacatctctgtagagactcttctgtgatggacccagcaaagcccactc

SEQ ID NO: 676034 - DNA, 562 bp, Homo sapiens
gatggcttccgcaccagggtcgtgcagctgtggtctctaagaaggagacgtaacaattcatgagtagtgaagccacacgctccattaataaagttccctaacagaagagacaaacctaaactcagtgcctcagaagctttggggtctgcagcgctcccctcccactcctctgcaatttcacagcattctaaaggaagtacgtcccccgatttactgatgcaccaggggccaccagacactgcagaaattataaaatcattacctcagaaatacagaaggaaacctatgtctcaagaggaaatggaatttatccagcgtgggggtccagagtgaccgtcgtggctgctgcttgtcaccagacagaagggttagctttacaataaaggacttccacaatgtcaaatgaaaagtcatatattaaacaaccttaataaatattctgtgagcagaatgaagtacagaaactccaggtggtcacttgtatctcctacactgtgtatctcggtcagctgccccacaagctgccctgtacacttattaaagtctacatttttaaatgcta

SEQ ID NO: 676035 - DNA, 180 bp, Homo sapiens
ttgtgactatgaatgatatctggcggggaagagaagtagcacaagatgctactaagcgcctgtgcaagtctactcagctaagagctgcgggtgtcaggcctgcgtccggtgtgagatggcagccgagctaggttctgattcacctggtggacccaggtgtgcctgggattccattggggg

SEQ ID NO: 676036 - DNA, 115 bp, Homo sapiens
  misc_feature (47)..(47): n is a, c, g, or t
ctactctctctctctctgtctctctttctctgactatacctactctnactatagatatatcgaatcgatatgtgtatatccagatctgtctatagatatatctgtatcttgatag

SEQ ID NO: 676037 - DNA, 156 bp, Homo sapiens
tgcctttaaacaggagtgggaagcagttagataaggagaggaaaggctggctgatgaacaaactccattatccttgcttttgtgtttctactcaagtgttttaactaatgggctgtttagagagagtttgccctggtgaaattaaaagcaaaaaat

SEQ ID NO: 676038 - DNA, 161 bp, Homo sapiens
tagagaatcccccgtcagagcagttcttatgtaagtgctgactcccttaacaattacctcatatctcttctggctgtagggtgactcagtggaatccattttgtaaacaccgacaattagttgttaacacacccagtgtgttaggccagaagggcatgctc

SEQ ID NO: 676039 - DNA, 120 bp, Homo sapiens
tcctggatcaatgcagtgcatccaccgtgaacttgcgagtgacctggtggtggcccaccacgaaatgggccacatccagctagtttcatgcagctacaaagacttaccgtgtggcgcttg

SEQ ID NO: 676040 - DNA, 254 bp, Homo sapiens
  misc_feature (148)..(148): n is a, c, g, or t
  misc_feature (183)..(183): n is a, c, g, or t
ttccaggacaccttgtggataccaaaacctacagatgcccaagtttgttatataaaatggtgtagtagttgcatataacctatgcacaaccttctgtatattttaaaccatctctagattttttataatacttaatacaatgtaaatnctatgtaaataattttatactgtattttaaaattngtatttttttactgtcattgtgtttttcctgaatatttgtgcattgctattggttgaatctgcatatatga

SEQ ID NO: 676041 - DNA, 333 bp, Homo sapiens
accagcagcgtagatcacctgggcatgatctggaccatcatccttaggttcgccatccaggacatctccgtgggaatagacctcggctaggaagggctccttctctggtgccagagaacagacagccctcgtataacaacgtcaatgtgcggagacttccaccatcagctggaaggatggtcttgccttccatgccctgatccagcggcatagaccagagctgattgagtatgactagctgaggaaggacgaccctgtcaccaatctgaacaatgccttcgaagtggctgagaaataccacaaaatccccaagatgctggatgcagaggacat

SEQ ID NO: 676042 - DNA, 208 bp, Homo sapiens
ggggtgtcttagtgctgctattgggatacggtgtacaaatatttgctataatccccattttcagttccttgggatatatatccaggagtggaatggctgaatcatatggtaattgtatgtttagctgcgggacagacccccatactgttttccacagtgactgccccgttttacattcccggcagcaatgcacaaaggctcccatctc

SEQ ID NO: 676043 - DNA, 141 bp, Homo sapiens
gcttcgtctgtatcgccataatcacagacagtccatacttctcctatctctcccagtcctagctgctgacatcactatactactaacagaccgcaagctcaataccacgcttcttcgaccccgccgcgaggatgagagccc

SEQ ID NO: 676044 - DNA, 727 bp, Homo sapiens
cccctcagcaatgctctcgcagttaccacatgatccttcgtgtatcttgccttccatttcccttgggtggatggttgggtagtgtggggttatcctggtttggtggtttactcagacaacgggccctcatacgggatgggtgcacctgtgaacccccaccactcctgggctgaggagcgtgtcacatgatgcctgttgtgtgatggtacttggaagccgtcatagagttttggttgtgtgatagaccgcatacatgacatccaacaatcatgctccaccagcagctacagctgctcctcagtcatgctcatgtggaacctctacttatgaggtttcgaatggtgcttggagccattggcacgcaatggaagcttgagaacccttgctgcatgatctaccaccgatactgcaaccacctatgtaccatgtgtatccagaagcggcacatcagccccttgcagcatcagcatcttatagtagttgaacatgtcgccataccaggactgcccatcaacatccacaaactcttgtggtcagcttcacaggctgacgtctcaaagcccagattcggggtgagctggcgaggaagaagccaaagttcgatgtgcatgatgtggcctcatgcgtccaaaggatattcccatgtgtctgaccttgacttgccccaggtagcaaaccaagcagtaccagaccattttgccacttcgcgatcgtcatacggcggacg

SEQ ID NO: 676045 - DNA, 545 bp, Homo sapiens
  misc_feature (428)..(428): n is a, c, g, or t
  misc_feature (466)..(466): n is a, c, g, or t
  misc_feature (511)..(511): n is a, c, g, or t
  misc_feature (522)..(522): n is a, c, g, or t
ttcagtaattccctaattcctagtttacctctttacacctaccctgaaaacttcagtatactcttcttataacctggttgttcaagatctcatggcaccacttttgagtggcagtcttgggagtttttctcatcaccactgttaaatttgcctctgttgtatttatttccctttccaagattctactttgggagaggtgaagctaattaatttgataaattgtgtcagtgggcgccatgagaaattttggcgtcggcaagcctttgatatcaattatcaactgacaaaatatagagaaggcattttgctgtgttcatgtgcatctctgtcctgcaggaaccatcttattacagattctcagtgggttgggggaggatggtggcactggtgtctggtagcacggaaaagcatccttttttttttttccnttttgagaatccggatctaggtaatttggtaaactccnggagggacataatatcattcacggggtataagcccctaatggccncgggtctggcntcccaattaataataagtaaaaa

SEQ ID NO: 676046 - DNA, 198 bp, Homo sapiens
gccagacttccgcccaagcatgaacaggacttgaccatctttccaacccctggggaagacattttcaacttactttgggaggacacagcttcagcacagcctcttcttccggccagcccgctgcgaacccttcaccagctaccgcgaggaggagggagagatgcgctgtgtggggtgtttttttacataaagcgaact

SEQ ID NO: 676047 - DNA, 170 bp, Homo sapiens
tggttgggggactgaacaaactctgtattatcagcttcagtttctccccctagtcctccttcaacacataggaggatctccccttctttctgctcacgggctttatctaggcttccccagtgcccccaggacagcgtggctatgtttacagcgtcagcctgtgcttaaga

SEQ ID NO: 676048 - DNA, 788 bp, Homo sapiens
cctgtctggactgtggagctcggttctgcaaacactggccatctaactgctctgcatgaaggagagtaaagggtggaaaagacggttacttggttttgagtaagccaccacacacatgatgccgaccacaaggagggcgatgcagatgccgcatatgaaatgggcaacccattgagcaatccctgcagctcctacacctcgcacccgccacacccatttttttttccggaacctacaacacgcccacaccggcgatgagttcttttttttccaccgccccccccgcgggattccccgccattctggaggtcgccgccaccacccctacgggccactagatgcgtccgcaagcaacgacctcccaccccacaacccctccaccgactcgtctcccaatttccaccaccacacattcgagccgccaccataacatacaaaatcccataatcccctacactcctccaccctcacatacgtcgtcatatttatcacaacccccccccccccccgctcgcccacactagcttttctacgtttccacctctaacacgcacccagccccctaaacctacaagataccgccggttgatcgcgaccgtcaggacaaacactccccacactgcaaccctgccagcagacccaacctcccgcaccccaacccagccacacgttccccccaccccactaaccacccacacatttccacgccatcccccctctcacaacataagcaacgcactaacaacaaccaccccctctcccctttctttgcatcccgcccataccag

SEQ ID NO: 676049 - DNA, 164 bp, Homo sapiens
caaggttgctgggtgctgtgggattgcacataaatctcccaggtattgccagtcttctgagcctcaggcaagcttgtgattaaatgactccagtagtttgaggacagtccttactgtcagaaggttctttggaagcaaaagcagacataggcatgagagggtaa

SEQ ID NO: 676050 - DNA, 523 bp, Homo sapiens
  misc_feature (136)..(136): n is a, c, g, or t
  misc_feature (433)..(433): n is a, c, g, or t
ttccgggttgtgcatcctagttctttataggccctccaatatgcacattaataagtgtttccttttccattcatttgtggagtcatcagggttccaaatcagggtgtcaagaggtactgcctctcttctctactgngaatgatggttcccctatctcttcaccttccctattttctcttttccttttgggcctactgtaagaaacatactgcttgtctccaaatttctctgatgcatgcagagctgcctgcttttcagctgcggttagggtttggcttaggagcagcataacatctctccatgaggggtcaaacacctgagttaaatttgggaaagcttctttatacctatcggagtcatcagaaaatcagcctaagtatccctttatttgcctaaggtcatgcaatgagacaggaacttgaaccctagtggnatcacctccattggtcatttcctgcaggggtaagagtgaagctgggggagtggggaattttggagatagtggaatagaggagctgatggg

SEQ ID NO: 676051 - DNA, 127 bp, Homo sapiens
gccggcaaaccccccctccccgggtttttggggttgggggaggatttttgggcgggcccccgtgttaattttttccggggcccccgcatggaaattaagccccccgggctgccttggggccctccca

SEQ ID NO: 676052 - DNA, 304 bp, Homo sapiens
  misc_feature (16)..(16): n is a, c, g, or t
  misc_feature (27)..(27): n is a, c, g, or t
  misc_feature (62)..(62): n is a, c, g, or t
  misc_feature (281)..(281): n is a, c, g, or t
  misc_feature (295)..(295): n is a, c, g, or t
  misc_feature (302)..(302): n is a, c, g, or t
acccaggctggagtgnagtggcacganctccgctcactgcaagctccacctcccaggttcanaccatcctcctgcctcagcctcccgagttgcagggactacagcacccgccacaatgcccggctatttttttgtgtttttagtagagatggggtttcactatgttagccaggatggtcttgatctcctgacctcattacccgccgactccggctcccaaagtgctggaattacaggcgtgagacaccgcgcctggtctccatcaaatgactttttaaatnaaatacggttctcncctcctnaa

SEQ ID NO: 676053 - DNA, 429 bp, Homo sapiens
  misc_feature (62)..(62): n is a, c, g, or t
cctttcttgaagaaaaattgtaaaaattacactttgggaggccgaggcgggaggatcgcttnaggtctggagttcgagaccagcctggccaacatggcgaaaccctgtctctgctaaaaatacaaaggttggctgggcgtggtggcacaccctgtgatcccagctggttgcgaggctgaggcgggagaattgcatgggcccgggaggcggaggttgcggtgagctgagatggtgccactgggtgacagagcgagactctgtctcaaaaaaaaaaaaaattggaaaaatcagccaggtgccgtgggtgcatgccagctatttgggaggctgagacaggagaatcacttgagcctgggaggcagaggttgcagtgagcccagagcacaccactgcactccagcctgggcaacagagcaagactctgtctca

SEQ ID NO: 676054 - DNA, 298 bp, Homo sapiens
  misc_feature (33)..(34): n is a, c, g, or t
  misc_feature (55)..(55): n is a, c, g, or t
  misc_feature (108)..(108): n is a, c, g, or t
  misc_feature (111)..(111): n is a, c, g, or t
  misc_feature (114)..(114): n is a, c, g, or t
  misc_feature (152)..(152): n is a, c, g, or t
  misc_feature (224)..(224): n is a, c, g, or t
  misc_feature (240)..(240): n is a, c, g, or t
actttttgaaagtctcccttttaaattgccccnncgatttagattttacatgttncccttggtttattcttgggctttctggatttaaaactttggctggactaagcnaangcnaggttataatttagctaatagtagtttcccgcccattntgatgattatgatttcctttggtttaactaagctggactagttcctttcataaggaaatgatactgtagccnaatgtaaataaagccngtgagtccagcccccagtggggtttgttaaaaataaactaaagatttttaacctctga

SEQ ID NO: 676055 - DNA, 165 bp, Homo sapiens
agcctttctattaggctcttaggtaaggattacacatgcaaggcatccccgttccagtagttcaccctctaaatcaccacggatcaaaagggacaaggcatcaaggcacgcagcaatcagctcaaaacgcttagcctagccacacccccacgggaaaacagcagt

SEQ ID NO: 676056 - DNA, 864 bp, Homo sapiens
agcacggagacgacgacgggtgcagagcacttccctgagccctgccgccggtcgcgttcgcccctgcagtacccaagtcgtgatgaaaatcgggcggctcaaagcgcgtggtaagaaccgccgggggtgtaggcccccgccggaagggtcgcggtgcccttgagaagtgtaaacccggtgtacggcaccgttcaccacaggggggcggccttctaaaccttaccgcccgccggttaaaataacatacaatacgggggaaggcaaaaaatatttaaaactccgggggaagatgggtccccgtgtgtgggcaacgacacagtgccccccgtgttttgggttaagcttcccgtcgccctttaaacaccaaggcgttaaataaatataaggtacccagtttcacaatgttggggccgcccttcgatgcgccccgtcctggttgatcactctccccgtcacatggaaaaggcgttctttggaatttcttcaaagacccctatcaagggggccatatcggctcaaattatacgagttgttcacacaccgccgcccgttgtacgagtaatacaagggccaccaccctgtcttacaaattctggcgcagagtcatgtagccactcgttgtgcagtttcttgcacgcaagccatgcccccaatcaaacggataatgacatacgtgggtgtctcttcagcacccccaattctggaacccaatcgtctacatcggtgtcatatttaagtgggaattggtaactcgcccccactaaccaaacgagtttaacactaccggaggaaagaaaccccccattttaaaataggggcacccaagcaaaataattaaaaaaaacccccccagcccacaaaaca

SEQ ID NO: 676057 - DNA, 157 bp, Homo sapiens
  misc_feature (38)..(38): n is a, c, g, or t
  misc_feature (83)..(83): n is a, c, g, or t
  misc_feature (142)..(142): n is a, c, g, or t
aagcagcccggaggagactgacggtccctgggaccctnaaggtcacccgggcggccccctcactgaccctccaaacgcccctntcctcgccctgcctcctgccattcccggctgagtctcagcatggcggatgggagcagcnatgcggctagggaac

SEQ ID NO: 676058 - DNA, 101 bp, Homo sapiens
  misc_feature (5)..(5): n is a, c, g, or t
aaacntgcagtgagaaataatgtatttttctatctgttttatatgtatgttatataacattcagaaagaatttttttcttgattgagaaaaggatacaaaa

SEQ ID NO: 676059 - DNA, 415 bp, Homo sapiens
ctacgctgctcacagtgatgactccgaatatgtgttttgtttaatgtacatcctgactctttagtcgaaaactaaaacccgtagagaatccttcctgtgtgtgccgccgcacctaggagggtgcctctccatccacaggcaatgcatgtccacagtcagctgggtctgctcggtagccctcatctccttatagtgaatgctgtgacgctcctctggtcctactggccgccggtgttgacaactttccagctgcagaaaaaggtcttaggtttttttttttggtttttttttttttgggaaaggaagtctcgcttggtccccagggtgggatggcattggggggaacccgagttggcccattggaccccaacccggttgtgccgaagtagaaacccggtctaaaaaaccaaacaaa

SEQ ID NO: 676060 - DNA, 2712 bp, Homo sapiens
  misc_feature (3)..(3): n is a, c, g, or t
  misc_feature (6)..(7): n is a, c, g, or t
  misc_feature (11)..(11): n is a, c, g, or t
aanacnnatcngtgcgcaggcgcccatcttagttggtcttctagtccggtaaacagagggcctgcccccgacagcttctgcttccgggtcacgccttgacagcggctttcaacccccacctcagcccagcaattcggcagtttggagcatgtgaacaccttgagccttgatgagttccagtatgtggtatattatgcagagcattcagagcaaatactctctctccgagcgcttaatccgaacaattgctgccatccgttccttcccacatgataatgtagaggacctcatcagagggggagcagatgtgaactgcactcatggcacactgaagcccttgcactgtgcctgtatggtgtcagatgctgactgtgtggagttacttctggaaaaaggagccgaggtgaatgccctggatgggtataaccgaacagccctccactatgcagcagagaaagatgaggcttgtgtggaggtcctattggagtatggtgcaaaccccaatgctttggatggcaacagagataccccacttcactgggcagcctttaagaacaatgctgagtgtgtgcgggctctcctagagagcggggcctctgtcaatgccctggattacaacaatgatacaccgctcagctgggctgccatgaagggaaatcttgagagtgtcagcatccttctggattatggcgcagaggtcagagtcatcaacctaataggccagacacccatctcccgcctggtggctctgctagtcaggggacttggaacagagaaagaggactcttgctttgagctcctccacagagctgttggacactttgaattgaggaaaaatggcaccatgccacgagaggtggccagagacccgcagctatgtgaaaaactgactgttctgtgctcagctccaggaactctaaaaacactcgctcgctatgccgtgcgccgtagcctgggactccagtatctccccgatgcagtgaagggccttccactgccagcttctttgaaggaatacctgttacttttagaatagccggagaagatgtttgcaccatcgtgcaggcagctctgggtgaggttgtccctgcagtactccttgtcacagaaaacagaaaaacagttgttcctgttgtgtggtttatagatttcgaagcaacatgtcacaacaataacctccatagcacctccccttcccaaaccaaacaacccaacaaaaaaaatccctcacttttgttttctgtttattgcttacctggctttttatattgcattttgcaaaagaagaggtctccctcaatcctcccctttagggaaggagtcaacagtgtaactaaatttctctaggaagatggaaagtacttaaataatgtgtgtgtggttttcctttggggacgtggttaacggtccagaagaatcccttctagaaagcattttaggccagccatggtggctcacgtctgtaatcccaggactttgggaggctgaggcaggtggatcacctgaggtcaggagttcgagcccagcctgaccaatatgatgaaaccccgtctctactaaaaatacaaaaattagctgggcatggtggcatgcgcctgtaatcccagctactcaggaggctgagacagaagaatcgcttgaacctgtgaggcagaggttgcagtgagccaagatcgcgccattgcactccagcctggacaacaagagcaaaactgtctcaaaaaaaaaaaaaaaaataaataaaaccctttttattggcgtctgggaacaaactttagggaaattcccaattttcggttaacagccaattgtggtgtctcccaaagattgaagacattcctatataaccctcaaatgtggttgcaggatctcccagaaaactgtgggcactggattgacaactcccttacgtgtgcccagtgtcttccgtgggggccattttggccaagggaccgggaacctcttttccccctttcatccgaagggggacaccacaggcaaggttctatggccctcctattatctgtgtttggggttttgttcgccccacaagggggtctcaccaaggttaggcctcctggagacattaccccgaaaggagcgctcctgggtaaactacaccgcggtgccatacagataccgtctccttgagatcttacaacagggtccctgaaagagactctccctctttagaaaagtactccctgtggaagacaaaccctcttttctcgctgtggtgacaatgatggccaacgctgattttgattacaccatcagttctcgctgtggtgaagaaacactaccagagtggtggtgtgttccacattacaatggggggagagattaccacccccaagggcgccagaagtgttcgccctatatagacaccatttaaagcgggccttggttggtgtgtactacccccaagcactaggtgggtaagaagagaaacgactcattatagtggagggacctgatgcgaggcttgacccgcatttatctgcccccccaaggtgtgggagatctcattgctacaaatatccccccaggggttgtcacataggatggtttaccacaccttgtgtgagtttaatgatgtaggggaaagatttaatgatttttcttcctgtttcaccaattgaggttccgtggcgaccacccatgttggggcatgttctatattgggagcattttatatacaccaagtcaaca

SEQ ID NO: 676061 - DNA, 631 bp, Homo sapiens
  misc_feature (3)..(3): n is a, c, g, or t
  misc_feature (6)..(7): n is a, c, g, or t
  misc_feature (11)..(11): n is a, c, g, or t
  misc_feature (499)..(500): n is a, c, g, or t
  misc_feature (503)..(503): n is a, c, g, or t
  misc_feature (505)..(505): n is a, c, g, or t
  misc_feature (507)..(507): n is a, c, g, or t
aanacnnatcngtgcgcaggcgcccatcttagttggtcttctagtccggtaaacagagggcctgcccccgacagcttctgcttccgggtcacgccttgacagcggctttcaacccccacctcagcccagcaattcggcagtttggagcatgtgaacaccttgagccttgatgagttccagtatgtggtatattatgcagagcattcagagcaaatactctctctccgagcgcttaatccgaacaattgctgccatccgttccttcccacatgataatgtagaggacctcatcagagggggagcagatgtgaactgcactcatggcacactgaagcccttgcactgtgcctgtatggtgtcagatgctgactgtgtggagttacttctggaaaaaggagccgaggtaatgtttttaacacattcacattaatgactcactaaaacttgagcttcatgttttcttagaatttctccccatcactcctccatctgtcgaccnnccncnantctgaacttctaactcaaggtaatgttggcatagccaatattaaggaaaatgtaatggtaaatatataaaatgatctaaggatttcattcttttacctttctgtccccaccctgcttgccccca

SEQ ID NO: 676062 - DNA, 497 bp, Homo sapiens
  misc_feature (365)..(366): n is a, c, g, or t
  misc_feature (369)..(369): n is a, c, g, or t
  misc_feature (371)..(371): n is a, c, g, or t
  misc_feature (373)..(373): n is a, c, g, or t
ttggacattgacataatattaatagaaaaggaaacaggaactagcactgtatctataaaatagtgagagttagaactctctgtcccctggactcagttctgaattctgtcctgctgggcaagccagagctgaacacactgactgaagttgtcttctgcccacagggagcagatgtgaactgcactcatggcacactgaagcccttgcactgtgcctgtatggtgtcagatgctgactgtgtggagttacttctggaaaaaggagccgaggtaatgtttttaacacattcacattaatgactcactaaaacttgagcttcatgttttcttagaatttctccccatcactcctccatctgtcgaccnnccncnantctgaacttctaactcaaggtaatgttggcatagccaatattaaggaaaatgtaatggtaaatatataaaatgatctaaggatttcattcttttacctttctgtccccaccctgcttgccccca

SEQ ID NO: 676063 - DNA, 640 bp, Homo sapiens
tatggggccaatttaaaatagtttaattaaagacattgcttttcccacttacaatacagtgtttataaagtgcaaggtttatttccttccccggtgtgcttatgtttccatattcaagtattgagaagtgcccaagtaacttacttatagcagcttaactttttaaaacgtgccacagaaattggctacgaattagaggtcctctcaaagtgtttctaaagtggtggtggaacaagtgctacattcttaccacgtggggtgggcttataactaaaccctcttctcaagtgggtgggcccgtggaggaagccaccaaccagagaggggaggagcctccaacccaccgagggaaactcccccagaggcaattccctccgtggcagtggcctctcctgggaactctcgtggtatcacagcttggcgtgtgaactaagtggggggtgtgcaacacttgttctctcccgagacctcattctcagtggtgtggaggttttacagcaatttcttctccctttcctacaggcgaggctcgtggaatccctttactcagagccccgagttgtgaataatttttcatttatacaacttgttgctccgagaaaactcctctcgagggtatggggcccctcattgcggttaa

SEQ ID NO: 676064 - DNA, 1365 bp, Homo sapiens
  misc_feature (3)..(3): n is a, c, g, or t
  misc_feature (6)..(7): n is a, c, g, or t
  misc_feature (11)..(11): n is a, c, g, or t
aanacnnatcngtgcgcaggcgcccatcttagttggtcttctagtccggtaaacagagggcctgcccccgacagcttctgcttccgggtcacgccttgacagcggctttcaacccccacctcagcccagcaattcggcagtttggagcatgtgaacaccttgagccttgatgagttccagtatgtggtatattatgcagagcattcagagcaaatactctctctccgagcgcttaatccgaacaattgctgccatccgttccttcccacatgataatgtagaggacctcatcagagggggagcagatgtgaactgcactcatggcacactgaagcccttgcactgtgcctgtatggtgtcagatgctgactgtgtggagttacttctggaaaaaggagccgaggtgaatgccctggatgggtataaccgaacagccctccactatgcagcagagaaagatgaggcttgtgtggaggtcctattggagtatggtgcaaaccccaatgctttggatggcaacagagataccccacttcactgggcagcctttaagaacaatgctgagtgtgtgcgggctctcctagagagcggggcctctgtcaatgccctggattacaacaatgatacaccgctcagctgggctgccatgaagggaaatcttgagagtgtcagcatccttctggattatggcgcagaggtcagagtcatcaacctaataggccagacacccatctcccgcctggtggctctgctagtcaggggacttggaacagagaaagaggactcttgctttgagctcctccacagagctgttggacactttgaattgaggaaaaatggcaccatgccacgagaggtggccagagacccgcagctatgtgaaaaactgactgttctgtgctcagctccaggaactctaaaaacactcgctcgctatgccgtgcgccgtagcctgggactccagtatctccccgatgcagtgaagggccttccactgccagcttctttgaaggaatacctgttacttttagaatagccggagaagatgtttgcaccatcgtgcaggcagctctgggtgaggttgtccctgcagtactccttgtcacagaaaacagaaaaacagttgttcctgttgtgtggtttatagatttcgaagcaacatgtcacaacaataacctccatagcacctccccttcccaaaccaaacaacccaacaaaaaaaatccctcacttttgttttctgtttattgcttacctggctttttatattgcattttgcaaaagaagaggtctccctcaatcctcccctttagggaaggagtcaacagtgtaactaaatttctctaggaagatggaaagtactta

SEQ ID NO: 676065 - DNA, 139 bp, Homo sapiens
ctacggtgagcccaacatcgtctcaagacttttaacaattcctaaaatccttcaaggacttttggagacaagatctcactctgttgcccaagctggagcacagtagtgcaatcatagttcactgcagcctcaatttcct

SEQ ID NO: 676066 - DNA, 125 bp, Homo sapiens
ggcctccatggttgctgcgaactggtccaggtacagttcctttagaggttcctcaggtgaaagcaaagagaactgatgatggcaagggattagggatgcagttagaagtgggcccgttggggcca

SEQ ID NO: 676067 - DNA, 463 bp, Homo sapiens
cgttatgatgtatcagcacctgcctgaaaaagaccacttaacttggacgaaccctttggcagcctcagatcgtccttgaagagaatgactgaaacactatgggccatgcactgtgtgtctgctctcggggaactgtcatcattgacaataagcgctacctcttcatccagaaactgggggaggggtgagtgttcgaaaatcactttgctggtccccagggtatttgaaggacatcagtgtgcacatgatccgggcataaaggttttctctctagcctctaactcacctgacagagcccagctacgtggtggtcaagaaagtggattgtggagccaggcctcctagattcgccatgtattaccttgataagctgtggtttttttcctctgcttattagagctaattatgcttccctggtagggctgtgaggattaaattagatcatgcatatcaaacatctcac

SEQ ID NO: 676068 - DNA, 2486 bp, Homo sapiens
ggcacgagggtatttgctctgaatgctctgcataatataccacatgataatgtagaggacctcatcagagggggagcagatgtgaactgcactcatggcacactgaagcccttgcactgtgcctgtatggtgtcagatgctgactgtgtggagttacttctggaaaaaggagccgaggtgaatgccctggatgggtataaccgaacagccctccactatgcagcagagaaagatgaggcttgtgtggaggtcctattggagtatggtgcaaaccccaatgctttggatggcaacagagataccccacttcactgggcagcctttaagaacaatgctgagtgtgtgcgggctctcctagagagcggggcctctgtcaatgccctggattacaacaatgatacaccgctcagctgggctgccatgaagggaaatcttgagagtgtcagcatccttctggattatggcgcagaggtcagagtcatcaacctaataggccagacacccatctcccgcctggtggctctgctagtcaggggacttggaacagagaaagaggactcttgctttgagctcctccacagagctgttggacactttgaattgaggaaaaatggcaccatgccacgagaggtggccagagacccgcagctatgtgaaaaactgactgttctgtgctcagctccaggaactctaaaaacactcgctcgctatgccgtgcgccgtagcctgggactccagtatctccccgatgcagtgaagggccttccactgccagcttctttgaaggaatacctgttacttttagaatagccggagaagatgtttgcaccatcgtgcaggcagctctgggtgaggttgtccctgcagtactccttgtcacagaaaacagaaaaacagttgttcctgttgtgtggtttatagatttcgaagcaacatgtcacaacaataacctccatagcacctccccttcccaaaccaaacaacccaacaaaaaaaatccctcacttttgttttctgtttattgcttacctggctttttatattgcattttgcaaaagaagaggtctccctcaatcctcccctttagggaaggagtcaacagtgtaactaaatttctctaggaagatggaaagtacttaaataatgtgtgtgtggttttcctttggggacgtggttaacggtccagaagaatcccttctagaaagcattttaggccagccatggtggctcacgtctgtaatcccaggactttgggaggctgaggcaggtggatcacctgaggtcaggagttcgagcccagcctgaccaatatgatgaaaccccgtctctactaaaaatacaaaaattagctgggcatggtggcatgcgcctgtaatcccagctactcaggaggctgagacagaagaatcgcttgaacctgtgaggcagaggttgcagtgagccaagatcgcgccattgcactccagcctggacaacaagagcaaaactgtctcaaaaaaaaaaaaaaaaataaataaaaccctttttattggcgtctgggaacaaactttagggaaattcccaattttcggttaacagccaattgtggtgtctcccaaagattgaagacattcctatataaccctcaaatgtggttgcaggatctcccagaaaactgtgggcactggattgacaactcccttacgtgtgcccagtgtcttccgtgggggccattttggccaagggaccgggaacctcttttccccctttcatccgaagggggacaccacaggcaaggttctatggccctcctattatctgtgtttggggttttgttcgccccacaagggggtctcaccaaggttaggcctcctggagacattaccccgaaaggagcgctcctgggtaaactacaccgcggtgccatacagataccgtctccttgagatcttacaacagggtccctgaaagagactctccctctttagaaaagtactccctgtggaagacaaaccctcttttctcgctgtggtgacaatgatggccaacgctgattttgattacaccatcagttctcgctgtggtgaagaaacactaccagagtggtggtgtgttccacattacaatggggggagagattaccacccccaagggcgccagaagtgttcgccctatatagacaccatttaaagcgggccttggttggtgtgtactacccccaagcactaggtgggtaagaagagaaacgactcattatagtggagggacctgatgcgaggcttgacccgcatttatctgcccccccaaggtgtgggagatctcattgctacaaatatccccccaggggttgtcacataggatggtttaccacaccttgtgtgagtttaatgatgtaggggaaagatttaatgatttttcttcctgtttcaccaattgaggttccgtggcgaccacccatgttggggcatgttctatattgggagcattttatatacaccaagtcaaca

SEQ ID NO: 676069 - DNA, 375 bp, Homo sapiens
gacgtgctttgaaatctactaacgttccgtcctcatctctgttccagtggtgtccaatctttaggcttccttgtgccacactggaagaggaatagtcttaggccacaaataaaatatactaatgatagccgatgagttaaaaaaaaaaaaatttgcaggctgggcgcggtggatcacacctgtaatcccagcactttgggaggccgaggtgggaggatcacaaggtcaagagatagagaccatcctggctaacacgatgaaaccccgtctctactaaaaatacaaaacattagccaggcttggtggcacaggcctgttattcgcagctactcgggaggctgagccaggagaattgcttgaacccgggaggcggag

SEQ ID NO: 676070 - DNA, 474 bp, Homo sapiens
gagcccactgacctagcagttagttatttttcataggcgcatctttagtcttcctagtcatagctttagcgtgaacacatcagagtacagtgtacaacatgtgttgttctgtgtgcttactgttaccactgagttttatccttttagatgatgtcttattgctcctcagcatccttatttttcagattgaagaaccctctttaacatttcctgtaggacaggtctgatgttgatgaaattcctcagcttttgtttgtctgggaaagtctgtctccttcatgtctgaaggatttttcactggatacactagggtaaaagtttactttccttcagcactttaaatatgccaagccactgtctcctgcccagtgagttctcctctgagaagtcgttgccaggcgtactggagctgcgttgtacgtgatttgttgttttttctcttgctgcttttagaaccctttcttcatctttgat

SEQ ID NO: 676071 - DNA, 2739 bp, Homo sapiens
  misc_feature (3)..(3): n is a, c, g, or t
  misc_feature (6)..(7): n is a, c, g, or t
  misc_feature (11)..(11): n is a, c, g, or t
aanacnnatcngtgcgcaggcgcccatcttagttggtcttctagtccggtaaacagagggcctgcccccgacagcttctgcttccgggtcacgccttgacagcggctttcaacccccacctcagcccagcaattcggcagtttggagcatgtgaacaccttgagccttgatgagttccagtatgtggtatattatgcagagcattcagagcaaatactctctctccgagcgcttaatccgaacaattgctgccatccgttccttcccacatgataatgtagaggacctcatcagagggggagcagatgtgaactgcactcatggcacactgaagcccttgcactgtgcctgtatggtgtcagatgctgactgtgtggagttacttctggaaaaaggagccgaggtgaatgctctctggaattgggggtttaataaaaacccggaaaacaaggcccctcctctgctaacctatgcagcagagaaagatgaggcttgtgtggaggtcctattggagtatggtgcaaaccccaatgctttggatggcaacagagataccccacttcactgggcagcctttaagaacaatgctgagtgtgtgcgggctctcctagagagcggggcctctgtcaatgccctggattacaacaatgatacaccgctcagctgggctgccatgaagggaaatcttgagagtgtcagcatccttctggattatggcgcagaggtcagagtcatcaacctaataggccagacacccatctcccgcctggtggctctgctagtcaggggacttggaacagagaaagaggactcttgctttgagctcctccacagagctgttggacactttgaattgaggaaaaatggcaccatgccacgagaggtggccagagacccgcagctatgtgaaaaactgactgttctgtgctcagctccaggaactctaaaaacactcgctcgctatgccgtgcgccgtagcctgggactccagtatctccccgatgcagtgaagggccttccactgccagcttctttgaaggaatacctgttacttttagaatagccggagaagatgtttgcaccatcgtgcaggcagctctgggtgaggttgtccctgcagtactccttgtcacagaaaacagaaaaacagttgttcctgttgtgtggtttatagatttcgaagcaacatgtcacaacaataacctccatagcacctccccttcccaaaccaaacaacccaacaaaaaaaatccctcacttttgttttctgtttattgcttacctggctttttatattgcattttgcaaaagaagaggtctccctcaatcctcccctttagggaaggagtcaacagtgtaactaaatttctctaggaagatggaaagtacttaaataatgtgtgtgtggttttcctttggggacgtggttaacggtccagaagaatcccttctagaaagcattttaggccagccatggtggctcacgtctgtaatcccaggactttgggaggctgaggcaggtggatcacctgaggtcaggagttcgagcccagcctgaccaatatgatgaaaccccgtctctactaaaaatacaaaaattagctgggcatggtggcatgcgcctgtaatcccagctactcaggaggctgagacagaagaatcgcttgaacctgtgaggcagaggttgcagtgagccaagatcgcgccattgcactccagcctggacaacaagagcaaaactgtctcaaaaaaaaaaaaaaaaataaataaaaccctttttattggcgtctgggaacaaactttagggaaattcccaattttcggttaacagccaattgtggtgtctcccaaagattgaagacattcctatataaccctcaaatgtggttgcaggatctcccagaaaactgtgggcactggattgacaactcccttacgtgtgcccagtgtcttccgtgggggccattttggccaagggaccgggaacctcttttccccctttcatccgaagggggacaccacaggcaaggttctatggccctcctattatctgtgtttggggttttgttcgccccacaagggggtctcaccaaggttaggcctcctggagacattaccccgaaaggagcgctcctgggtaaactacaccgcggtgccatacagataccgtctccttgagatcttacaacagggtccctgaaagagactctccctctttagaaaagtactccctgtggaagacaaaccctcttttctcgctgtggtgacaatgatggccaacgctgattttgattacaccatcagttctcgctgtggtgaagaaacactaccagagtggtggtgtgttccacattacaatggggggagagattaccacccccaagggcgccagaagtgttcgccctatatagacaccatttaaagcgggccttggttggtgtgtactacccccaagcactaggtgggtaagaagagaaacgactcattatagtggagggacctgatgcgaggcttgacccgcatttatctgcccccccaaggtgtgggagatctcattgctacaaatatccccccaggggttgtcacataggatggtttaccacaccttgtgtgagtttaatgatgtaggggaaagatttaatgatttttcttcctgtttcaccaattgaggttccgtggcgaccacccatgttggggcatgttctatattgggagcattttatatacaccaagtcaaca

SEQ ID NO: 676072 - DNA, 247 bp, Homo sapiens
aggaatgtgataggtagtgtagtggctgacactagtatgagggtgtactgtcactataggacgtttcccttgcagtggctggtagcagtggatgcaatgatgtcatggctgatgctacgtttaacagtagtggtcatagagtaacgtactggtgaaggtggtcactggcttctgtgtcacgggagtcgaggtgtaagagctgctgaaggccacctgcgtcgtggtcacacagtaaggggtacggctg

SEQ ID NO: 676073 - DNA, 811 bp, Homo sapiens
acgtgacccctcaaaatcatggcaaggcaacgccacttatctcaggtgaaccaatcgtatctcagaatgataaactcatagacgtctctgtactatagtctcacctgactaagagtctccttaacttataacattcgcagggcagcggaacctgaatcgatattgaatatcttctgtcgggaagcactgtgtatccccaccgttgtctatcatcagccgatgaggcgagccaggactaagtaaacgcttgagacgcggcatgatacttcctattctacaccctagtaggctcccttcccctactcatcgcactaatttacactcacaaaccctaggctcactaaacattctactactcactctcactgcccaagaactatcaaactcctgagccaacaacttaatatgactagcttacacaatagctttatagtaaagatacctctttacaggactccacttatgactccctaaagcccatgtcgaagcccccatcgctgggtcaaatagtacttgccgcaagtactcttgaaaactaggcggctatggtataatacgcctcacactcatttctcaacccccttgacaaaaaaaatagctaccccttccttgtatatcccctatgagggcataattctcacaagctccaatctgcctacgacaaaaagacctaaaaatcgctcaatgcatacctcttcaatcagcacatagcctcgtagtaaagacattttattcaaaacccctgaagttcacggggcaagcatctcataatcgccacggcttaatcccataatatttgctagaaatacag

SEQ ID NO: 676074 - DNA, 2674 bp, Homo sapiens
  misc_feature (3)..(3): n is a, c, g, or t
  misc_feature (6)..(7): n is a, c, g, or t
  misc_feature (11)..(11): n is a, c, g, or t
aanacnnatcngtgcgcaggcgcccatcttagttggtcttctagtccggtaaacagagggcctgcccccgacagcttctgcttccgggtcacgccttgacagcggctttcaacccccacctcagcccagcaattcggcagtttggagcatgtgaacaccttgagccttgatgagttccagtatgtggtatattatgcagagcattcagagcaaatactctctctccgagcgcttaatccgaacaattgctgccatccgttccttcccacatgataatgtagaggacctcatcagagggggagcagatgtgaactgcactcatggcacactgaagcccttgcactgtgcctgtatggtgtcagatgctgactgtgtggagttacttctggaaaaaggagccgaggtatgcagcagagaaagatgaggcttgtgtggaggtcctattggagtatggtgcaaaccccaatgctttggatggcaacagagataccccacttcactgggcagcctttaagaacaatgctgagtgtgtgcgggctctcctagagagcggggcctctgtcaatgccctggattacaacaatgatacaccgctcagctgggctgccatgaagggaaatcttgagagtgtcagcatccttctggattatggcgcagaggtcagagtcatcaacctaataggccagacacccatctcccgcctggtggctctgctagtcaggggacttggaacagagaaagaggactcttgctttgagctcctccacagagctgttggacactttgaattgaggaaaaatggcaccatgccacgagaggtggccagagacccgcagctatgtgaaaaactgactgttctgtgctcagctccaggaactctaaaaacactcgctcgctatgccgtgcgccgtagcctgggactccagtatctccccgatgcagtgaagggccttccactgccagcttctttgaaggaatacctgttacttttagaatagccggagaagatgtttgcaccatcgtgcaggcagctctgggtgaggttgtccctgcagtactccttgtcacagaaaacagaaaaacagttgttcctgttgtgtggtttatagatttcgaagcaacatgtcacaacaataacctccatagcacctccccttcccaaaccaaacaacccaacaaaaaaaatccctcacttttgttttctgtttattgcttacctggctttttatattgcattttgcaaaagaagaggtctccctcaatcctcccctttagggaaggagtcaacagtgtaactaaatttctctaggaagatggaaagtacttaaataatgtgtgtgtggttttcctttggggacgtggttaacggtccagaagaatcccttctagaaagcattttaggccagccatggtggctcacgtctgtaatcccaggactttgggaggctgaggcaggtggatcacctgaggtcaggagttcgagcccagcctgaccaatatgatgaaaccccgtctctactaaaaatacaaaaattagctgggcatggtggcatgcgcctgtaatcccagctactcaggaggctgagacagaagaatcgcttgaacctgtgaggcagaggttgcagtgagccaagatcgcgccattgcactccagcctggacaacaagagcaaaactgtctcaaaaaaaaaaaaaaaaataaataaaaccctttttattggcgtctgggaacaaactttagggaaattcccaattttcggttaacagccaattgtggtgtctcccaaagattgaagacattcctatataaccctcaaatgtggttgcaggatctcccagaaaactgtgggcactggattgacaactcccttacgtgtgcccagtgtcttccgtgggggccattttggccaagggaccgggaacctcttttccccctttcatccgaagggggacaccacaggcaaggttctatggccctcctattatctgtgtttggggttttgttcgccccacaagggggtctcaccaaggttaggcctcctggagacattaccccgaaaggagcgctcctgggtaaactacaccgcggtgccatacagataccgtctccttgagatcttacaacagggtccctgaaagagactctccctctttagaaaagtactccctgtggaagacaaaccctcttttctcgctgtggtgacaatgatggccaacgctgattttgattacaccatcagttctcgctgtggtgaagaaacactaccagagtggtggtgtgttccacattacaatggggggagagattaccacccccaagggcgccagaagtgttcgccctatatagacaccatttaaagcgggccttggttggtgtgtactacccccaagcactaggtgggtaagaagagaaacgactcattatagtggagggacctgatgcgaggcttgacccgcatttatctgcccccccaaggtgtgggagatctcattgctacaaatatccccccaggggttgtcacataggatggtttaccacaccttgtgtgagtttaatgatgtaggggaaagatttaatgatttttcttcctgtttcaccaattgaggttccgtggcgaccacccatgttggggcatgttctatattgggagcattttatatacaccaagtcaaca

SEQ ID NO: 676075 - DNA, 858 bp, Homo sapiens
  misc_feature (42)..(42): n is a, c, g, or t
  misc_feature (68)..(69): n is a, c, g, or t
  misc_feature (102)..(102): n is a, c, g, or t
  misc_feature (105)..(105): n is a, c, g, or t
  misc_feature (175)..(175): n is a, c, g, or t
  misc_feature (192)..(193): n is a, c, g, or t
  misc_feature (206)..(206): n is a, c, g, or t
  misc_feature (455)..(455): n is a, c, g, or t
  misc_feature (490)..(490): n is a, c, g, or t
  misc_feature (581)..(581): n is a, c, g, or t
  misc_feature (607)..(607): n is a, c, g, or t
  misc_feature (832)..(832): n is a, c, g, or t
  misc_feature (834)..(834): n is a, c, g, or t
ttcccagcgcccgcggcgcccgaggactgcgcgctgcggccnttcccgcgcgccccacgcgcccacgnntttcgcgggacccggcgttgctacgggctcccntgnggagcgctcagaccgcccccccgcgcgccgctcgctggcctgtactacgcaccctgggcacgcccggccngtaccccggcccgtgtnnccgccgcccgagnccccgccgctggagagcgccgagccgctggggcccgccgccgatctgtgggccgacgtgacctcaccgagttcgaccagtacctcatactgcagccggactcggcccgacgcccccgggctcccgtaccacgtggcactggccaaactgggcccgcgcgccatgtcctgcccagaggagagcagcctgatctccgcgctgtcggacgccagcagcgcggtctattacagcgcgtgcatctccggctagngccgccggcgccgccccgggtccctgcagcgcttncctcccgcagcccccgcgaccgatccgaccgcgacgctgccgctctgctctctaacatacgcgtgtatgtttggttccatgtcacagcccncctaggagccagtgatgctcggcctngcgcccgttccacctcccaggccacccttcctgggcttctgggccacctgccctcggggggcccctgcgagggtgcctggagttcccacgtgtcccggggcttttccaggaagcccgagcccaggacctgttggcagagttgccagggtaacatttttgaagcacctgctccttttcttgcagtgtattttctacaaccagattgtattaatattttttactttncnttttaaaaaaatatacctaatacg

SEQ ID NO: 676076 - DNA, 2812 bp, Homo sapiens
  misc_feature (3)..(3): n is a, c, g, or t
  misc_feature (6)..(7): n is a, c, g, or t
  misc_feature (11)..(11): n is a, c, g, or t
aanacnnatcngtgcgcaggcgcccatcttagttggtcttctagtccggtaaacagagggcctgcccccgacagcttctgcttccgggtcacgccttgacagcggctttcaacccccacctcagcccagcaattcggcagtttggagcatgtgaacaccttgagccttgatgagttccagtatgtggtatattatgcagagcattcagagcaaatactctctctccgagcgcttaatccgaacaattgctgccatccgttccttcccacatgataatgtagaggacctcatcagagggagcatggtggccatagaaagtggattgctggtccagctttcctgcctgatgataaggtttccagtgctttgatacataagattgtcttcagtgatgtccgggagcagatgtgaactgcactcatggcacactgaagcccttgcactgtgcctgtatggtgtcagatgctgactgtgtggagttacttctggaaaaaggagccgaggtgaatgccctggatgggtataaccgaacagccctccactatgcagcagagaaagatgaggcttgtgtggaggtcctattggagtatggtgcaaaccccaatgctttggatggcaacagagataccccacttcactgggcagcctttaagaacaatgctgagtgtgtgcgggctctcctagagagcggggcctctgtcaatgccctggattacaacaatgatacaccgctcagctgggctgccatgaagggaaatcttgagagtgtcagcatccttctggattatggcgcagaggtcagagtcatcaacctaataggccagacacccatctcccgcctggtggctctgctagtcaggggacttggaacagagaaagaggactcttgctttgagctcctccacagagctgttggacactttgaattgaggaaaaatggcaccatgccacgagaggtggccagagacccgcagctatgtgaaaaactgactgttctgtgctcagctccaggaactctaaaaacactcgctcgctatgccgtgcgccgtagcctgggactccagtatctccccgatgcagtgaagggccttccactgccagcttctttgaaggaatacctgttacttttagaatagccggagaagatgtttgcaccatcgtgcaggcagctctgggtgaggttgtccctgcagtactccttgtcacagaaaacagaaaaacagttgttcctgttgtgtggtttatagatttcgaagcaacatgtcacaacaataacctccatagcacctccccttcccaaaccaaacaacccaacaaaaaaaatccctcacttttgttttctgtttattgcttacctggctttttatattgcattttgcaaaagaagaggtctccctcaatcctcccctttagggaaggagtcaacagtgtaactaaatttctctaggaagatggaaagtacttaaataatgtgtgtgtggttttcctttggggacgtggttaacggtccagaagaatcccttctagaaagcattttaggccagccatggtggctcacgtctgtaatcccaggactttgggaggctgaggcaggtggatcacctgaggtcaggagttcgagcccagcctgaccaatatgatgaaaccccgtctctactaaaaatacaaaaattagctgggcatggtggcatgcgcctgtaatcccagctactcaggaggctgagacagaagaatcgcttgaacctgtgaggcagaggttgcagtgagccaagatcgcgccattgcactccagcctggacaacaagagcaaaactgtctcaaaaaaaaaaaaaaaaataaataaaaccctttttattggcgtctgggaacaaactttagggaaattcccaattttcggttaacagccaattgtggtgtctcccaaagattgaagacattcctatataaccctcaaatgtggttgcaggatctcccagaaaactgtgggcactggattgacaactcccttacgtgtgcccagtgtcttccgtgggggccattttggccaagggaccgggaacctcttttccccctttcatccgaagggggacaccacaggcaaggttctatggccctcctattatctgtgtttggggttttgttcgccccacaagggggtctcaccaaggttaggcctcctggagacattaccccgaaaggagcgctcctgggtaaactacaccgcggtgccatacagataccgtctccttgagatcttacaacagggtccctgaaagagactctccctctttagaaaagtactccctgtggaagacaaaccctcttttctcgctgtggtgacaatgatggccaacgctgattttgattacaccatcagttctcgctgtggtgaagaaacactaccagagtggtggtgtgttccacattacaatggggggagagattaccacccccaagggcgccagaagtgttcgccctatatagacaccatttaaagcgggccttggttggtgtgtactacccccaagcactaggtgggtaagaagagaaacgactcattatagtggagggacctgatgcgaggcttgacccgcatttatctgcccccccaaggtgtgggagatctcattgctacaaatatccccccaggggttgtcacataggatggtttaccacaccttgtgtgagtttaatgatgtaggggaaagatttaatgatttttcttcctgtttcaccaattgaggttccgtggcgaccacccatgttggggcatgttctatattgggagcattttatatacaccaagtcaaca

SEQ ID NO: 676077 - DNA, 2578 bp, Homo sapiens
ttggacattgacataatattaatagaaaaggaaacaggaactagcactgtatctataaaatagtgagagttagaactctctgtcccctggactcagttctgaattctgtcctgctgggcaagccagagctgaacacactgactgaagttgtcttctgcccacagggagcagatgtgaactgcactcatggcacactgaagcccttgcactgtgcctgtatggtgtcagatgctgactgtgtggagttacttctggaaaaaggagccgaggtgaatgccctggatgggtataaccgaacagccctccactatgcagcagagaaagatgaggcttgtgtggaggtcctattggagtatggtgcaaaccccaatgctttggatggcaacagagataccccacttcactgggcagcctttaagaacaatgctgagtgtgtgcgggctctcctagagagcggggcctctgtcaatgccctggattacaacaatgatacaccgctcagctgggctgccatgaagggaaatcttgagagtgtcagcatccttctggattatggcgcagaggtcagagtcatcaacctaataggccagacacccatctcccgcctggtggctctgctagtcaggggacttggaacagagaaagaggactcttgctttgagctcctccacagagctgttggacactttgaattgaggaaaaatggcaccatgccacgagaggtggccagagacccgcagctatgtgaaaaactgactgttctgtgctcagctccaggaactctaaaaacactcgctcgctatgccgtgcgccgtagcctgggactccagtatctccccgatgcagtgaagggccttccactgccagcttctttgaaggaatacctgttacttttagaatagccggagaagatgtttgcaccatcgtgcaggcagctctgggtgaggttgtccctgcagtactccttgtcacagaaaacagaaaaacagttgttcctgttgtgtggtttatagatttcgaagcaacatgtcacaacaataacctccatagcacctccccttcccaaaccaaacaacccaacaaaaaaaatccctcacttttgttttctgtttattgcttacctggctttttatattgcattttgcaaaagaagaggtctccctcaatcctcccctttagggaaggagtcaacagtgtaactaaatttctctaggaagatggaaagtacttaaataatgtgtgtgtggttttcctttggggacgtggttaacggtccagaagaatcccttctagaaagcattttaggccagccatggtggctcacgtctgtaatcccaggactttgggaggctgaggcaggtggatcacctgaggtcaggagttcgagcccagcctgaccaatatgatgaaaccccgtctctactaaaaatacaaaaattagctgggcatggtggcatgcgcctgtaatcccagctactcaggaggctgagacagaagaatcgcttgaacctgtgaggcagaggttgcagtgagccaagatcgcgccattgcactccagcctggacaacaagagcaaaactgtctcaaaaaaaaaaaaaaaaataaataaaaccctttttattggcgtctgggaacaaactttagggaaattcccaattttcggttaacagccaattgtggtgtctcccaaagattgaagacattcctatataaccctcaaatgtggttgcaggatctcccagaaaactgtgggcactggattgacaactcccttacgtgtgcccagtgtcttccgtgggggccattttggccaagggaccgggaacctcttttccccctttcatccgaagggggacaccacaggcaaggttctatggccctcctattatctgtgtttggggttttgttcgccccacaagggggtctcaccaaggttaggcctcctggagacattaccccgaaaggagcgctcctgggtaaactacaccgcggtgccatacagataccgtctccttgagatcttacaacagggtccctgaaagagactctccctctttagaaaagtactccctgtggaagacaaaccctcttttctcgctgtggtgacaatgatggccaacgctgattttgattacaccatcagttctcgctgtggtgaagaaacactaccagagtggtggtgtgttccacattacaatggggggagagattaccacccccaagggcgccagaagtgttcgccctatatagacaccatttaaagcgggccttggttggtgtgtactacccccaagcactaggtgggtaagaagagaaacgactcattatagtggagggacctgatgcgaggcttgacccgcatttatctgcccccccaaggtgtgggagatctcattgctacaaatatccccccaggggttgtcacataggatggtttaccacaccttgtgtgagtttaatgatgtaggggaaagatttaatgatttttcttcctgtttcaccaattgaggttccgtggcgaccacccatgttggggcatgttctatattgggagcattttatatacaccaagtcaaca

SEQ ID NO: 676078 - DNA, 2948 bp, Homo sapiens
  misc_feature (3)..(3): n is a, c, g, or t
  misc_feature (6)..(7): n is a, c, g, or t
  misc_feature (11)..(11): n is a, c, g, or t
aanacnnatcngtgcgcaggcgcccatcttagttggtcttctagtccggtaaacagagggcctgcccccgacagcttctgcttccgggtcacgccttgacagcggctttcaacccccacctcagcccagcaattcgtaccggacctaccgggattgctgcgatctgtttagagcccgtgcagaaagtgacaccgcacgtccttgcgtttcgtgcccttgccccccgccccctagcctcagcgagacagctgccgcgggccctcccgcagcaggcagtttggagcatgtgaacaccttgagccttgatgagttccagtatgtggtatattatgcagagcattcagagcaaatactctctctccgagcgcttaatccgaacaattgctgccatccgttccttcccacatgataatgtagaggacctcatcagagggagcatggtggccatagaaagtggattgctggtccagctttcctgcctgatgataaggtttccagtgctttgatacataagattgtcttcagtgatgtccgggagcagatgtgaactgcactcatggcacactgaagcccttgcactgtgcctgtatggtgtcagatgctgactgtgtggagttacttctggaaaaaggagccgaggtgaatgccctggatgggtataaccgaacagccctccactatgcagcagagaaagatgaggcttgtgtggaggtcctattggagtatggtgcaaaccccaatgctttggatggcaacagagataccccacttcactgggcagcctttaagaacaatgctgagtgtgtgcgggctctcctagagagcggggcctctgtcaatgccctggattacaacaatgatacaccgctcagctgggctgccatgaagggaaatcttgagagtgtcagcatccttctggattatggcgcagaggtcagagtcatcaacctaataggccagacacccatctcccgcctggtggctctgctagtcaggggacttggaacagagaaagaggactcttgctttgagctcctccacagagctgttggacactttgaattgaggaaaaatggcaccatgccacgagaggtggccagagacccgcagctatgtgaaaaactgactgttctgtgctcagctccaggaactctaaaaacactcgctcgctatgccgtgcgccgtagcctgggactccagtatctccccgatgcagtgaagggccttccactgccagcttctttgaaggaatacctgttacttttagaatagccggagaagatgtttgcaccatcgtgcaggcagctctgggtgaggttgtccctgcagtactccttgtcacagaaaacagaaaaacagttgttcctgttgtgtggtttatagatttcgaagcaacatgtcacaacaataacctccatagcacctccccttcccaaaccaaacaacccaacaaaaaaaatccctcacttttgttttctgtttattgcttacctggctttttatattgcattttgcaaaagaagaggtctccctcaatcctcccctttagggaaggagtcaacagtgtaactaaatttctctaggaagatggaaagtacttaaataatgtgtgtgtggttttcctttggggacgtggttaacggtccagaagaatcccttctagaaagcattttaggccagccatggtggctcacgtctgtaatcccaggactttgggaggctgaggcaggtggatcacctgaggtcaggagttcgagcccagcctgaccaatatgatgaaaccccgtctctactaaaaatacaaaaattagctgggcatggtggcatgcgcctgtaatcccagctactcaggaggctgagacagaagaatcgcttgaacctgtgaggcagaggttgcagtgagccaagatcgcgccattgcactccagcctggacaacaagagcaaaactgtctcaaaaaaaaaaaaaaaaataaataaaaccctttttattggcgtctgggaacaaactttagggaaattcccaattttcggttaacagccaattgtggtgtctcccaaagattgaagacattcctatataaccctcaaatgtggttgcaggatctcccagaaaactgtgggcactggattgacaactcccttacgtgtgcccagtgtcttccgtgggggccattttggccaagggaccgggaacctcttttccccctttcatccgaagggggacaccacaggcaaggttctatggccctcctattatctgtgtttggggttttgttcgccccacaagggggtctcaccaaggttaggcctcctggagacattaccccgaaaggagcgctcctgggtaaactacaccgcggtgccatacagataccgtctccttgagatcttacaacagggtccctgaaagagactctccctctttagaaaagtactccctgtggaagacaaaccctcttttctcgctgtggtgacaatgatggccaacgctgattttgattacaccatcagttctcgctgtggtgaagaaacactaccagagtggtggtgtgttccacattacaatggggggagagattaccacccccaagggcgccagaagtgttcgccctatatagacaccatttaaagcgggccttggttggtgtgtactacccccaagcactaggtgggtaagaagagaaacgactcattatagtggagggacctgatgcgaggcttgacccgcatttatctgcccccccaaggtgtgggagatctcattgctacaaatatccccccaggggttgtcacataggatggtttaccacaccttgtgtgagtttaatgatgtaggggaaagatttaatgatttttcttcctgtttcaccaattgaggttccgtggcgaccacccatgttggggcatgttctatattgggagcattttatatacaccaagtcaaca

SEQ ID NO: 676079 - DNA, 376 bp, Homo sapiens
agagcatcccttccagcgccatccttccatgggttaaccagtagaatcattaccatgtcctggttttccaaggattttcccaatggagtagtgaccattcaacatcccaggaaaccctttagtcctaggcataccagacatttggtcaccccaataaccagaaccttgacttcccacagaacagactcaggggcacctctttctgaagtttgtatgggtggaagcacatggggatgtacattgatgacatgcttctgtccagctgctttggctccatgcccagttggtgtaggtcatctatgtgttgcgcatagttgcagaccatacattctcatcatgtaggcttctgctgagtggatatacccggggagggggg

SEQ ID NO: 676080 - DNA, 463 bp, Homo sapiens
ccttccatggaaagacctggagagattggctcactcctgaggacacgcttttctttctagctggagtgaagactgggacatgcgtggctacataaagatggccaaagaccagaataacaactgcagaatcgccatgctggccagccttcctattgtgtgagctgatggatggtgaagaggaaggacttgactggggatggcacatacatgggaggaattcatctgaaatctaccagcccctgccatgtgggatgcacactggaatcactgaagattcaagtgtgatttgaattctgtgacgctttcataatggtaaatgttaccactattttgattactgctataaccagctttgcattattgattcactgaatgactttagattttttttttgctttaaaaggatggaaaaaattttacctgtttaaataaaacttaatttcacttggagtggaggggcttc

SEQ ID NO: 676081 - DNA, 828 bp, Homo sapiens
  misc_feature (61)..(61): n is a, c, g, or t
tgctacttgccgataatatacaacagaaagccggccgcagttttatggaacagagatgggnctagcgtggctacataaagatggccaaagaccagaataacaactgcagaatcgccatgctggccagccttcctattgtgtgagctgatggatggtgaagaggaaggacttgactggggatggcacatacatgggaggaattcatctgaaatctaccagcccctgccatgtgggatgcacactggaatcactgaagattcaagtgtgatttgaattctgtgacgctttcataatggtaaatgttaccactattttgattactgctataaccagctttgcattattgattcactgaatgactttagattttttttttgctttaaaaggatggaaaaaattttacctgtttaaataaaacttaatttcacttggagtggaggggcttctcacccgcagccctcgctaccccctttactactgcgtatcaaaccaccacccccccctccgttcacatccaacgattattggccgtatacccgcccgccgcgtgctatacgcgtgtcctctattctaccgccgcctcgcatcgtaccatgacgctccgccctcttccttccgcgtcctctcgacccgcgacgccacccgcacttaaccgcccgcccgcgatacccccaccccccctggaaccctctccctcacccactctctcctcaccttattagctccgccccccgttacacacctttgtcggcgcacttcacccctaccccctaaccgtacccgatcgcccaagcaccccgcccccgttccttatccccagatatatat

SEQ ID NO: 676082 - DNA, 599 bp, Homo sapiens
ctcacgagcgcagaggagtgccttatccccgacacttgactgggctgtggtagggtgggcatgtgggcccctggtgcccgggctggggacagagcccttgtttcgtgacttaggattttgatgtcggttcccactggttctctatacgagggccaagctgagacaggctagcaggccaggaggccacacggtgtagagctaataacgagatctgcgcacattgcagagagtcataatatctacggcctgtcgctactagcgggtcggcatttaacataggaatctctattttcgaaataagggatggtctatgaggcatactaggtacgactttgatgtgatcctttgctccctcccttccatcaagtggatcgtggtctgtgtgactgaacccacacagagtgtcatgggtgacagtccctggttgaagtagctccacgcctggcttctgtggacagtcagattcttgtccttctcacaaggggctcatttagcatttggaggctgggtgctgtggctcacgcctgcaatccctagcactttgggagactgaggcgggcggcatcatgaggtcggagatcgcgacctcctggctaacg

SEQ ID NO: 676083 - DNA, 451 bp, Homo sapiens
  misc_feature (53)..(53): n is a, c, g, or t
  misc_feature (60)..(60): n is a, c, g, or t
ccccgatgctaggacatatctgacgggacgacacaacaaccgccctacttggnatcgaanctgggtcttgcgtggctacataaagatggccaaagaccagaataacaactgcagaatcgccatgctggccagccttcctattgtgtgagctgatggatggtgaagaggaaggacttgactggggatggcacatacatgggaggaattcatctgaaatctaccagcccctgccatgtgggatgcacactggaatcactgaagattcaagtgtgatttgaattctgtgacgctttcataatggtaaatgttaccactattttgattactgctataaccagctttgcattattgattcactgaatgactttagattttttttttgctttaaaaggatggaaaaaattttacctgtttaaataaaacttaatttcacttggagtggaggggcttc

SEQ ID NO: 676084 - DNA, 947 bp, Homo sapiens
agagagccgcggggtctgcccgtggttactatgaatgtatgctgttggaggacatctcgatccaaagaacagccgttcctgtgcggcccttcgtgccctcctgctttcattttttaaagaaatcttgagtgcttgagggccttggaactgattttttttttttggttccagccaaattagcagggtataaatggcacctaggtaagagcagagctgcggctcggtgacttgatactgggggcagcccgatgctgtgtgtggggcaggggaggcatccttacgggagaggcaggcccagccatggggcacctctgggaaggggaggggaccatgaggcagccagcccctggccaggggcgactgtgcccaccgcaggcagcgctccaagtgcgggaatggccaggatggcgccctctgtgggagtctaagggttagctttaacgtttcttctccacccaggggccacaggtgataaaagtaggatcctagggcggagcttaaaaattatgccagaaagccaaaggtttcccctcgttggggcctgccttaacatttgccttggttgggtacatctttggccggatgaatcaagaaggcaatctgtgacaaagtctgagggtctcctttatgtttgcccctcacacactaagagaagtgggagtctccctctgggaatggttggcatcactgcatcctggaacggatgggttaaattcactcgtgtccgcatcggaatcggatctaccagtgtgtggaacccaggggctaccggacacgctacaagaagagacgaggggtgggagcgggcacggaacgtggccgcgggacaagagcaggcaaggaatcggccggcacagtccagaagcaaacagactagcaggaagtggaaagagcatacagaacagcggcaagcacaaccaacaacaggcgctgttgtagccgtcacg

SEQ ID NO: 676085 - DNA, 375 bp, Homo sapiens
tatcccaggtgtatataatgacatctgtctcgtcaggttaacccttctatcgcaggccttgttatcaatggtactgattggcctccctctatcacaggccttgttaccaatggtaatgaataacctccctctatctcaggccttgttaccaatggtactgaatgacctccctctatcccaggccttgttatcaatggtactgattggcctccctctatcccaggccttgtcaccaatggtactggataacctcccactatcccaggccttgttaccaagactactgatggacctccttataatatctatttcaggattgtttactgtctccagtttgtttaataaaatgttaaactttaacttttgggtcgacgc

SEQ ID NO: 676086 - DNA, 765 bp, Homo sapiens
gaagcttgctaaagtgtccgtgggaacgctcggtccccagtcaggatatgtggatcattgtcccttggctgttgccatagaaggatcctggtcatcgagtagatgctaagatattgatcactcatgttaacccaaactacgccgtggcggaaccggcgcgatagcatgaacaaagttccacgcatagtgctgctcgaggatcatgacctcgtgtcgtatcactcaggagtcagatgcgagagctcgaatttccatgattgattgcgcacgagccactggaaaagactatctttctcatggcaggacagaattcattcagaacatcagcgaacaaattgaaaccattaagaaagaaaaggcaagacggacggcacagcatcaacacagtgcgatgatccctgagggggcacccccgatgtccagtacggaacctttggcaagaagattacttgatgaacaattcgtgccaatcgttgtctaccattctgtggcgctcagaacaatacgtcaggcattcttctcatttgtagacaaggatctgctgggaaacctgcttgctccggtcctgcttcaaccacaagggtgcattgccgtgataaggggtgctgatggtatgaccacggatcccctggtcacaggtgatgaacggtagaaaaggcccccaggaagacctatgcaggatattgggggggttggacaacaaaattcaggaattcaggaatctgtggagccttctctcacaccatctgaatatttgacgagatg

SEQ ID NO: 676087 - DNA, 809 bp, Homo sapiens
  misc_feature (809)..(809): n is a, c, g, or t
ctcggtggctcacgcctgtaatcccagcactttgggagactgatgcaagcagatcacttgaggtcagaagtttgagaccagcctggccaacatggtgaaacccccatctctactaaaaatacaaaaattagccagactggtggcacgcgcctgtaatcccagctattcaggaggctgaggcaggagaatcgcttgaacccagtaggcagaggttgcagtgagccaagattgtgccactgcactccagcctgggtgacagagcgacacgctgctcaaaaaaaaaaggctggggtggtgactcacatgcttaatcccagcacttggggaggatgaggcgggaggatcaccaggtcaggattgacagaccagcctgatcaaccatcgtgaaaccccatctctactaaaaatacaaaaattagcaggcatggtggccgcacaccttgtaatcccagctattaggaggctgaggcaggagaatgcttgaacccaggaggcagaggtgcagtaagccgagttgcaagcaccactgcacctccagccctgggaacagacgcaaggacctgtcctccaaaaacaacaacacacgacccaaaaacaacccgtgctcgggcgcctcgacctgaaaaagctttacgacaccaccggtggcgcggggggcccagaggtaagcacaccgggtcacggcgccccagaagacaccggccccacacacgcgcggctctccccaaaaaaaccccggggcccggcggtcgtacaactccagtgggtgggggccacggcccaacggtccggagacccacggcgggggn

SEQ ID NO: 676088 - DNA, 408 bp, Homo sapiens
aagaggcagagctcttgcacgtacagctgatgggagaagggtaagctctgagcctagaagggtgcatgtggaatacaccccctcatacaacatacctgtctaagcataaaaaatagtgaggagtcacaaaatatgtctaaattatgaaatgactgccttacatgaagcataggaaactgtgacgttcttataaagcagcacatttaagctattcttatttttaaattagaaaattatatccatgcattaccttttataagaaatgtggatagtaattccgtgttctacaaccacatccaggaagagcttgcatataggaatgaaactgtcatcttgccagtcctgtgctatgttatttcacttaatcctctcagaaacctataagacaggtgcacagcaggaaaccag

SEQ ID NO: 676089 - DNA, 870 bp, Homo sapiens
  misc_feature (59)..(59): n is a, c, g, or t
  misc_feature (65)..(65): n is a, c, g, or t
  misc_feature (74)..(74): n is a, c, g, or t
  misc_feature (78)..(78): n is a, c, g, or t
  misc_feature (81)..(81): n is a, c, g, or t
  misc_feature (84)..(84): n is a, c, g, or t
  misc_feature (86)..(86): n is a, c, g, or t
  misc_feature (88)..(88): n is a, c, g, or t
  misc_feature (94)..(94): n is a, c, g, or t
  misc_feature (121)..(121): n is a, c, g, or t
  misc_feature (180)..(180): n is a, c, g, or t
  misc_feature (182)..(182): n is a, c, g, or t
  misc_feature (186)..(186): n is a, c, g, or t
  misc_feature (201)..(201): n is a, c, g, or t
  misc_feature (203)..(203): n is a, c, g, or t
  misc_feature (208)..(208): n is a, c, g, or t
  misc_feature (213)..(213): n is a, c, g, or t
  misc_feature (220)..(220): n is a, c, g, or t
  misc_feature (230)..(230): n is a, c, g, or t
  misc_feature (236)..(237): n is a, c, g, or t
  misc_feature (266)..(266): n is a, c, g, or t
  misc_feature (274)..(274): n is a, c, g, or t
  misc_feature (345)..(345): n is a, c, g, or t
  misc_feature (416)..(416): n is a, c, g, or t
  misc_feature (419)..(419): n is a, c, g, or t
  misc_feature (621)..(621): n is a, c, g, or t
  misc_feature (624)..(624): n is a, c, g, or t
  misc_feature (656)..(657): n is a, c, g, or t
  misc_feature (664)..(664): n is a, c, g, or t
  misc_feature (669)..(669): n is a, c, g, or t
  misc_feature (681)..(681): n is a, c, g, or t
  misc_feature (688)..(688): n is a, c, g, or t
  misc_feature (694)..(694): n is a, c, g, or t
  misc_feature (702)..(702): n is a, c, g, or t
  misc_feature (728)..(728): n is a, c, g, or t
  misc_feature (773)..(773): n is a, c, g, or t
  misc_feature (776)..(776): n is a, c, g, or t
  misc_feature (786)..(786): n is a, c, g, or t
  misc_feature (798)..(799): n is a, c, g, or t
taccaaataggcatcatggcgcagatctggctgctagtgttttttttacagttggtttnttaacntcttttttnttcntanttntntntcaatnttctctggatgatcaagaaactctttntgcctcaccctaatcactgaagtaatgaaaggagatacccgcagcaaggactgcaactntnaatnctgcaatcacacctntnttttnctganttttcantaacattgtngttttnnttggttgttttggttgttcatcatctgtnttgtccantgaagcttgactattcatagaagaactcatacaagctgtgtttgtttcctctgcaatttccaaatcttctntttgaattgtgtgatccaacatctccataaaatggtccctgatttcttcagctgactcatcgtcaaatttntantcacacaacattacagtggatccaggaaggggaacaaagactcgataagggaggacgtggaactctttttcagaatctttttttttctggaatttcattcaaaagcagatcctcaaatagcatttcacaacgatcagcaactgtgttcaatatatccctctttactgcctgcacagcatctttaactttgggtttactgctntgnatataagctctgcatttcacagcacccttaanntttacanaaccnctacatatcttnacttttncttttnatcttttntcttaattcattatcaacttctttanactcttacatcaaaataattactattttctttattatttccctanaanattttttctntccttctaatanntcacaatcttcatctttaacttttccattaatcaaataaacaccattttctatttccttttcccatctttt

SEQ ID NO: 676090 - DNA, 170 bp, Homo sapiens
gcactgtagatcgctcttcaccgtgatagaagaaattcaaagtgggcttatcttcagtaaacgggtttagaaatcctttgggcaaataacgaattctcaattcatatttccactcctcggggggtgtgagcaatgctctatacttctccctcgacacgtggagacgccca

SEQ ID NO: 676091 - DNA, 217 bp, Homo sapiens
gctgccgcctactactactaagttcgcggccgctcgaccagactttatgaatacacaagtgcttgcagagctcatactactgcccagtcttttttcttctttcttccttcctttcttcatctcttcctctctctctttgttaattagttaaatcctatctgcacaataacacatttccccagagcaagacgaagagatgaagaaaggaaggtcgacg

SEQ ID NO: 676092 - DNA, 936 bp, Homo sapiens
aaaataagcgtaggagtaggcctcgggttattcggacgaggggtaccgggagcggataagcggacccagagagcctgagcagcccactgtcgcccgcggactagttacacatcacaccccgggaggagcctgcagctgccgcagccggccccagtcaccatcaactgcaaccatgagcatgcgaggcctgagaaccagcagccgacatgaactgcaagacacagagagagagaagagagagacaaagaagcagtggagagaacacacaaccacagggaccacaagagacacgacaggaagacaaaagtagcagcaacaagcagaagacaacaaggcacacaaaaaagaacaggcaagagagaacaaaagaaacagaaaacaaagacacacaacgaagccgccgaataaccaccacaccaaacgcaacgcagaaaacggccgaccaacgcacagaccaccgaccgacgagacgagatccgacaagcgcgacacagcaacgcaccccacccccacacagcacagagccccacacaaagcacccgccaaccagtagcgaccctccaccagcacaccgcaaccgagccacacacggaacggcagccgcaaacaccaccgggcaccacgacgaccgcacagcggcaaacggcacagacagcgagacagaccgcccacggcacgaggaacggacgaagaaaaccgcggagacaaacgccgacacgaagcgacagcacaacgcagcagcgcatggcaaccgcgacgaacaccgcgcgggaaggcagagccaaggagagcgaagacgacagaggacggagagcgcgcgaacacacacacaaccgacccgaccaccgaacagcagcacgacgagcacgaagacacgagagcacccgcccgcaccgaacacagagcacacgcaggaacaccgaaacgaacgacaca

SEQ ID NO: 676093 - DNA, 240 bp, Homo sapiens
gtggttgcaatgctctgggaaatgagtactgacgcatcacagagtgagtcaggagtaaataaatatcctgaacaaactaataatgattagttaaattccaacagttatataaaatctctcaacagaaaagcctaggaccagatggattcatagctgagttttaccagatgtcaaagaggagctggtacaaatatttctgaaagtattccaaaccttgaggagaaaggctcctccttaatg

SEQ ID NO: 676094 - DNA, 2159 bp, Homo sapiens
ctggacctgtccatgcccctggaccagtactcccccagctttcccgacatcgcggatcactacgtaagctccgtcagggcgaggattccgtcttctctcatgagaccggctgaccgaggagccctgcctgtcccgaacacccagttccatgcttgccaatgtgcggactctaaagcgccgtgtgacgtgtacagcttcagaacgcccgcatccccaggactccagcacgtacaggcatgtagacgcgcgtcgacccagcgagtccacgtgactgaggcgccacgcgacctgttcgcgttaacccgtgctaccaccattatcactgtctggacaggcagaccggacatgactatccacggggaccattccttgtgctgggccgtgctctgtcaaccacacaacatcaggcatcagccgtctcgcgcgtccacactactctactccagccgtgactggatgaggatggctgacagaatggaggcaggaatcgtttggctagtcccatgcccgatcgttctattcgcacctacgcgcaggacttgtttcggaacgcgaacaagcgccctaccccttgtccacctcgaggcgaacttgaccctggagcgtgcctggggcacggtggggggacgccaaaatgagaacagggtcatgcctaaagttgcaagaagcctatcgcttggaggctgttctcctgttcgggttgggtctggttttgagccctttcaacctcgataggggccctcgtcgcatgtctgtgttggccaggtgactttggtgctcaaggggttacaggcaaagtacgtggaagggttcaggtgcatttcggtgcctcgaggtggaggtggtgaccttctgccccattattaggagtcgatgcccaagtggggatagataatgtcccgagacacagaggtttgcatcacgttggtgagcaaatagcctgtggaccagaagggattggtgcgggaaagccaagattggtggacctcgctgttggtaccagggggaccagaccccaaaaatggggatcctggcatatgtgcttaggcacagcccatgtgtcacaagcagaaaaattcacagcctgtgaaagggctgtcacaaacaccgctagagcactgggacacagtattatcacaaacacgcgctgtcgccatgctattctctctgctgcgctcgcatatgtcgtgtcctgctcgtacgatatacagaaagaaggatacgcaacccacgatcacacagatgctgagcacaacgacaaaaaacacgcacgactgacacaacacacagaggaacaccgaaacagagcaaggagagacggaacgacaagagagaagacaccagaaggcagagacgagagagagagcaagagaagagacgcgtgcaagacgaagagacaatcgagagaacgcagaggaaacgatcgcaaagcaaaaggagagaggacgaggacggcagagagaggaggacaacgagaaacggacacggaagaaggagaggagagcagcctgaggaacagacggccgcggccgagcggagagaaagaggaagggaaggggagagagcgaagcagctggcgaggcgagagagcagagcgagagaggaaaagagagccagagcagaacgaggaccgcgcacggagagagggggcagaaatcgaagaccaagacgtgaagcgcgccaagacgacgagggacgagagagagcagagagacgagggaggaggacagagagaaggagagagtcagaggagaaacggagaacagatagacggcaagcagacacggcaagggaaacgctgggacggcaggcagaaggaaagcacgagaaagagaacagagcagaaagaggagaagacccggcaggagcgaagcgcaggacgtaggagaacgagagcagaacagaagaagaatgcacgacgagagaagacgaggaagaaagacacgagacacagaggagccaccaacgacgacagcaagagcagaacagacacacgagacaagacgagaacacggagacagcagaagagagaagggagcgaaggcagcggaagcgagcagagaacgaaccacacgagggacagcaagacggaagaacgagacacaaaacacaacacacagaagaaagagcacccagcaacagagcgaacgacaaacaac

SEQ ID NO: 676095 - DNA, 935 bp, Homo sapiens
gcccggtgcggggtccagagggtctcgtcgtgtgagttgcgcgtgtgttgaatgtgtttattgagatcgggcgattgtttccggttggggttcttagtaacgctcccccgtcgttgtctgtcgggggttctccgcccccgtaggccccctaaggcctcatgccagttggcaagatctcctgtgcctccttgctcccccgtagctgggtcgagccgcttgtgcccttctccaaggaccggcgtctctgtcctggcccccctcagggcgcccctgtgttcttgctggtgaagaacccctctccagccgcgcttggatttgcccggcccccgggctgtgataacagccagcgtgggggctcgttggtcccccccaccgtggaagccccccagttgctggctgactgatcgtgtaagatacatgtggctcccgccagagggggcgccaccccccagggggtaatctccacattcttctggacacactgtgcaagaaatttccttttttataagaacaagacggtttctggacacctcatttggtcctaaaaccttcggcgctcactgatgactagctctttcgcttaagccactcgatgacaattgtggggctgcccctttctataaaagcatgaggtggtggctctctccccatccactgattcgacgaaaaatagtgcacgcatgctgttgtcggccccaagaagttcgtgcggtgcgccgcaaaaaaccaccacgtttcttgttttataaagagggcgtccacccccccattgtccgatgggtgtaatagcaatccagaggtagactggctactgcaacaagacgataatgtgtagatgacccggcgggtccgaacaatgagatagttacgtgtgggggcgccacgcagaacaaacacgcgcggaacaaaaccccttatttcccccaaacaaaaca

SEQ ID NO: 676096 - DNA, 210 bp, Homo sapiens
cttttttactgggtttttaaccaaatggttgggtatggggagccccactaaaagtttagaacttccagtgtttttcggaatttttaaaaaaaactgtaaacaaaaaggctggggtttttgttttgttttgggggtttgttttgtttggttttacaattaggttactgaacccctccaaggttatgtaaaaaaaaacctttttttgtccca

SEQ ID NO: 676097 - DNA, 183 bp, Homo sapiens
aacaaggcgctcgtaaacccttccaaaggaaaggagaatgttttggggacccctcttggtttttttttttggggggggcagttttaagttattagtttttaaaaacaggcctttttaatggaaacaacttgaccaaaaatttgtcccagaattttgagaccccttaaaaaagtttaatgggga

SEQ ID NO: 676098 - DNA, 876 bp, Homo sapiens
  misc_feature (7)..(7): n is a, c, g, or t
  misc_feature (366)..(366): n is a, c, g, or t
  misc_feature (428)..(428): n is a, c, g, or t
  misc_feature (506)..(506): n is a, c, g, or t
  misc_feature (640)..(640): n is a, c, g, or t
agcggangagaagagaaatgaactgtggcatcgctcctgccttctgaacagctctactccgattaaaaaaaaaaaatctcactgtgttctttgtaaaatggtactgcatagtgatgaatttcacccattcatcgaggcacttcttccacatgtccgtgcaattgcctatacttggttcaacctgcaggctcgaaaacgcaagtactttaaaaagcatggagaagcgaatgtccaaggatgaagaaagagccagtcaaagatgagcttctcagtggaaaagcctggaaatcaaacagaaggtgggcatcccaggctccttgtccaaactggcgcaaaggatattcggccagggagtatcgagcaggnactttggtgctccaccggtggactgtgcaagaaaggcacccggtgctggtgttcttatccanatcccgaaccagaaagggtaacgattaggagacatcgactgggctgtcgacagggcagacacaagtcctggcgtctgngatctaagtcatggctgatccttgttccaaaggcatcccgcttggacaagtacccgatggagagcgggtcatgagaatccccgacattggccacaaaacccagcacttttgtggttccagccacatcatatcancagtaatcagttaagggagcttgatttgtttttgggcatactacgtgcaggagcaagattcgtggacaatcaggaagtcccaagccacaatgatcctggcaagaatcctccagggttacctttgaggatagttttgtacaatcttggagtcttcaatggttcagaacttgtaagaagtatccagaaacgcgcataacccagggaactggagtcaattcccaattgggaaaatccaa

SEQ ID NO: 676099 - DNA, 206 bp, Homo sapiens
tggtaaatgctattaaatcaaccaggaaaaagttctcgtgattatgccagctaatagtggtaatcctcactgagtgataaaaatagtttatgaattgaaaatctaccgctgcatggtgtatgatcaaatagttcatcaaaatgaatctttgctcggtggactgaattcttaccatgctgccattaaaataaatgtgccaagtggta

SEQ ID NO: 676100 - DNA, 344 bp, Homo sapiens
ggccctaagggttgacccggaggccagtggaattgcctggtgtccccgggggagggccaaggcctgttgagttgattttccaggtggggccccagcctttcccccttgcccagcacaaaggtggtccccccagggacagccaggcccctgctccttttgcccttcctgggggaagggagctgccttttgtccctgtaactgctttccttatggcccagcccggcccctcagacttgtttgaaactgccctggcagcttttttgtttcctttggggattcccaccagccaggggcttgatttttatgttttttaaacccccttaaataaaaagtttgttgcctta

SEQ ID NO: 676101 - DNA, 407 bp, Homo sapiens
cggcacgagggttggtctgacttatttttagagctctgtcctggggcagggcttggctactggcgaggctgctcccacctgtcggctacccttggagttcacaattcgctgctgtggtttcgcggctcgaagccatcgctggagtcaggcccacctgctgccagagctcgttcctggccgtttccgctggattgcagagggaggacagtgttggacctaggcgtgggttccctgggcgtgtcccttggggtcttagctctctgggaggagggttctacttattcgggagagcggtaacaacgtaatcccgtcacctctcctggcgctgagagagcgccccccaaagtaagatcagcgtcaggcccacgccctatttggtgaataaataaaagcaaactaggaattga

SEQ ID NO: 676102 - DNA, 561 bp, Homo sapiens
  misc_feature (418)..(418): n is a, c, g, or t
agattcagagagcaaatgtgcaggtttgttacatggctataatatattgtgtgatgctgagatttgggcttcaactgaacctgtcacccaaatagtgaacatagttacccaataagtagtttttcaacccttgcctccctccttccctttccctttttggagtcctcagggtctactgttcccttctttatgtctatgtgtacccaatgtttagttcccacttacaagtgagaacatgtggtatttggatttctgttccagtgattaattcacttaggataatggactccagctgcacccatgctgctgcaaaggacataatttcattctttttttatgggtgtaggtgtaccacatgttccttatccaattcactgttgctgggcacctaagttgattccacgtctgtgctattgtnaatagtgctgcaataaacatgcaagcgcaagtgtctttttggtataacaatttattttgactacatggtttgatctatagcataaaccacattcattttataaataggtattcactttaataattacatattacagtacttgt

SEQ ID NO: 676103 - DNA, 243 bp, Homo sapiens
  misc_feature (43)..(43): n is a, c, g, or t
ggtgggtgactctacaggatcttaaaaagggagcatatctggntgagaaaggggtagggacgtggagtctattttaaggctaaggagaaaggattttgagtttcctcaaggttatatcttgaaactcaagagaatgggaaaaaagtttaaaagcatgttgaagttaagctgcgggctgcattgcttctcagatacctgctactcagcttccctcctcattcactctgctccagccactctgat

SEQ ID NO: 676104 - DNA, 432 bp, Homo sapiens
aactcctacgatagccacattcttaaattcatatatcatccaaaaactttaaactcaatttgcaaacacaatctacataacactggctctagggtgtatagaatctagacccagatactaatatttcaactaaaacctagctgctccctacaaaaatgaacagtaagttttaaatatattactagagtattaaccaaatctaaacacacacaaatgagttagccaagagaacagggataactgtaggaaaaacagtatgtgtttctttttaatgtctgatggcacctataattatataaactaattcagactccacaacttcaacagctacagcaattttaagaacccccgaggcatagtatataaatcaggcgaatttcacacctcttggtggcaccgcaaaatgaaaagtattgaggtaatccgtgaggg

SEQ ID NO: 676105 - DNA, 339 bp, Homo sapiens
gcacgagattgaatgaaggctcattgttattttatgaaccattaagacaaattagaccaggcatggtggctcacacctgtaatcctagcactttgggaggccgaggcgggcagatcacgaggtcaggagttcaagaccagcctggccaacatagtgaaaccccgtctctgctaaaaatacaaaacaattagccaggcatggtggcagtcgcctgtaattccagctacttgggaggctgaggcaagaagaattgcttgaacctgggagccagaggttgcagtgagccgagatcacgccactgcactgcagcctgggtaacagtgcgagactccatctcca

SEQ ID NO: 676106 - DNA, 137 bp, Homo sapiens
ccttctactttataattcatcccaaagtgtataccaaatatccttcactgggtgcatggctcacacaaacatatacagaatactacccagcaattaaaagaataataaactatttagctgttcccagctagttcaga

SEQ ID NO: 676107 - DNA, 224 bp, Homo sapiens
aagccgcactgtcacgaatggcaacctccgccaggcccacttcaaaactgcggttgagcaggtgtaggagttctggatcgacacggcgcgcggcaaccgcgggcttcggccaggcgaggaatttcatggcgccccacggcgtttcgttggacaggccaatgtggcggatcttgccggcctttacctgttcatccagggcttcgagcgtttcctccagtacgcgg

SEQ ID NO: 676108 - DNA, 381 bp, Homo sapiens
  misc_feature (20)..(20): n is a, c, g, or t
  misc_feature (108)..(108): n is a, c, g, or t
  misc_feature (249)..(249): n is a, c, g, or t
tgttgttctttcattagagntgggctggcgacggcggtatgtaggctgtgctggcaaggggtggttgggtgaatcgtggattatcgattatagaacaggctcctctangtgggtttggggcaccgccaagtccttagagttttaagcgtttgtgctcgtagttctcaggcggatacatgtgtgatgggaggtatctagatttagggctaggcatagtggggtatctaatcccagtttgggtcctagctntcgtgggttaaaattaatcgttgaggctaagatggatttgggttgggtttaggtggatcttaggcttatgacagcttggttgcattttaatcttagctggtgcagataacatgtggccactctttacgccgg

SEQ ID NO: 676109 - DNA, 296 bp, Homo sapiens
ctatgcactgtaatggaaatcacgagacgaaaacgccctataatcccagcattctgaaaggccacggagggaaaatgcttgagcccaggagtttgaaagcatcctgagcaacatgtagagaccccatctctacaaaaaatataaaaaattagcaaggcatagtggcatgcatctgtggtcagctactcgggagactgaggtaggagaatcgcttgaacctgggagatggcggttgtggtgagccgagatcgcgccattgcacaccagcctgggcaccaagagctaaactccgtctc

SEQ ID NO: 676110 - DNA, 889 bp, Homo sapiens
  misc_feature (883)..(883): n is a, c, g, or t
gatagaagtaatcaggagacaagcggggggtcgattcaacagtctagatatctttttatcgttacccttgccctcaagcctttgttatgtccaaaaatagtccttgcgtaatgtggtgttcagaacggaattgatagctggtaccccagtctctttgaaacatctggtacattggctgaatgctagtgctcaatatcattatggtcagtttgcaatggtgctgatctgggtgatcaagcctcagtccccttcataagttagccctctcctttttaaacaattacgtgtgcacagagaggtcaccttgttcaggacattgcattttcaggcttgtggtgatagataagatcgagcaaggcaagtgttcataatgagtttccaatgtggacctgatgttctagcatgtgattacttcactcctggactgtgactttcagtgggagatggaagtttttcagagaactgaactgtggaaaaatgacctttccttaacttgaaagctactttaaaaaatttggggtctggaccaaaagaagagggatattcggttgacgttcagatgacagataaggtgggagtatgactaatccaaaagatgggttacttgagaaagggcatgtaaagattttgacaatcctgtcggaagattccagaggagtctaattgtcagtagcagtaagaaggtttctgcgaagagtcacgaacgtgcctttggtatttacgtgggggaatggtaatgagagttggcctttaaaaatctttgggggaaggaaacaagtgggcggcgaaatatacaatggggcgaaatataactcacaggtatggtgtacagggggaaatattgtaaaagagaatgtttatatgcgtttgttttaatatgggngcaagc

SEQ ID NO: 676111 - DNA, 107 bp, Homo sapiens
tgcacagtgctccagaatcctccaagatagagggacaacaggtcgcaaataaacacgaccaacgaagcagcagcagagaccaaaccatgaggccagacatagggtcc

SEQ ID NO: 676112 - DNA, 708 bp, Homo sapiens
tctctctctcacacaacacacacacacacacgacgagggtgggcggtggggcgagagagacaagaaagagaggagggggagagagagagagagagagaaaacaaaaactgggggagagaaaaaaaaaaaactatatctataccgaggaagaggggatgcttctctctctctccccctcttttttttttttctctcacaaaaaaaatatttctctctcaacacacacaaaaaaaaaaaaaaaaaaaaaaaaaaaaaaacaacaaaagaaaccgcgagagagaaaagagaaagaaaaggaaaaaggagggaggaagacaacaaatggcggggcggcaggacagaggccagagagagcaacaaagaacgagggagggggcaagcaacggcacggggggggagaaataaatttcttttataataaaaagagaactaaccaccttctcaccaataaaaacaaaaaaatcaaacaacaaacaaccccccctataattacatcaatacaacaaaaaacacaaaacaccaaaaaataacatagacgagacacaaaacaaacaaaacggaggggggggcggcacaacaaaacacaaaagacgccgcggaggggcgccacagaaacagagaccgaaccggccactccgtcgacttgtgacacgaacacggggcgccacaaaacaaaacaggcaaccggccacagaagaaaaagccgcc

SEQ ID NO: 676113 - DNA, 312 bp, Homo sapiens
cccgtactagccctgacaggaggctgaggagtggtgagtggggacatggcagtggctgagctgatgctcagctgactccatgagaagggaagtgaccttcacatgtgggtgatacttggacagcaccgctctaccgtgccttcatgcaaccgactgagtaacaccctggggcacacactgtgtggcagtgctcgggccagtgttagtacttgtgatgggagaccgcctgtggaatacctgggtgctgtcgggctagctcgggggcttgtcggggcttgtcgggcgcttgtcgggccttgtctggggaccttg

SEQ ID NO: 676114 - DNA, 873 bp, Homo sapiens
gagatgatatggccttgtggtaattgaaagtcggacggggcgtcgtgggcgactcgtgtgttctacgcgtgtaggaaaaagtaagcatgagacatctatgtggcgataatggatgattcctagaagtaagccggagatggcgataacatgtgcagtcggatgatgcattttctccttgtagctaaactctagtactgggagtgatgctataaagtaatgatagcacgccagaattgtttcgatgtacgaatgtttactctagagttgaacgtaatgcaagatggctccagtagatgggtggacagcaaccatgttcatgcatagaatgtagaagtggaacaatttgttgaaagagtcatggcgcaataaagcagaggaatggagggccacggtgtattggaaggagagtaagaatgaataagcgtacgatcacgctttccacgagaaggggggagaatcgatgtacacgagagttcagaggaatcccagagtggcaccacgcgaagggagagggctcctatcggccctatctgtcctgcttactgtctgctgagatagtcgtcgccataaaaagtacaacagagatgagggcagtgccgttggccttgtgccatttgggtcgagttgtttgcccgaaggaaatagctgtgggaaggagactgtgggaaatgatagcactgacttgtcgttgattgaacaaagctagcgctttatcgagcacctgaagggctgatgacatgttgacacggaatgaaatattcgaaaacaggatatttggatggtattaatcgaggctaagagtgaaagcgccttgaatgccaggtaacaacaaaggggaagtttgtacaaggggttgaaaaaaaggcatgaaga

SEQ ID NO: 676115 - DNA, 108 bp, Homo sapiens
cttcggatggggggggaggcgatatcctagaaccagtcgtcggcgaggtagcaaggatgacggagcgggggaagaatcaaagcacggttaaacatgcatacaagttcc

SEQ ID NO: 676116 - DNA, 1153 bp, Homo sapiens
gccgagagggaggaggcccaactggtgatgctagctgctgctgctgctgccgccgccgccgcctctattgctgatactctagtggggctggaatgggtggttcctattcgcaccatctgccaaccagagacagaggtgaaaaaaaaaaccgtgcagccactgctgcctgtaagggttctggcgtgctgcatccggacatcaggtcacaaggaaaactgtgcttcagatatggcactcatctccactcctttaaaccagcattactccgaggatcatcagacactggtgctatccacgggacacagcagactggaagtgacgaccatataccacaggcagccacccaccccagtcagcatagctcgcagcaccatcagaactccgaggaatcaagcaacacagataaccacggccagcaccctgcctcagaacacgaaaatcaaaaaccaacaagcactccatatagcacaaggacacaaggtccaacgaaagtggcagacctacagggcagagaagcaccagaggcactcactcggatgccctaacacgcatgccacatagaagaccctccaggcaccaacgctcacagacatacagataagcagctagcatccaggagcaagacccaaggcatcaacagcttgacagcacagcaacatcaagcagcgcacagcgatcagagcagccggcgagccaggcaagcccacgggctgatgacacgaaacaaaagccacagctcacggcaagcgacacgcccgcgctgcacgagccgcgacacgcgacacaatactcacccaacacgagcccgcaacgcaagaacgaacaagagaaacggccaaaaccaaacgcacagcagaccaagcagcacccgagaccgccaacgagcacaaccaaggcccgcaccaccaaagaagccggaaagaggccaaaccacaacgccccgcacacgcacacccaccacggcacaaggaccccgcaacagaacaacacgtcccacccagcacgcgccctaaccacacgctcgtctgcaactgagacaacacacaacctcacaagagaacagataaaacaacaaaaacagaaacacgacacaacacagcacaccacagccagcaaccgcgccaaccagcgcagaaacccacagcgcacaagc

SEQ ID NO: 676117 - DNA, 117 bp, Homo sapiens
  misc_feature (98)..(98): n is a, c, g, or t
ggaggtgggagccctgggccaaaatggcggcctacctgcagtggcggcgcttcgttttcttcgacaaggagctggagatccctccgctgagctatganggggccgctcccggggcca

SEQ ID NO: 676118 - DNA, 137 bp, Homo sapiens
agcggacagcactgtattggcgtacagaatctttgcggatgtcactgtacacttcatgatggagttgaatgtgtagttctgctggatagccacaggagtccatgcccaggaaggaaggctggaacagtgcctcaggg

SEQ ID NO: 676119 - DNA, 330 bp, Homo sapiens
  misc_feature (23)..(23): n is a, c, g, or t
  misc_feature (26)..(26): n is a, c, g, or t
  misc_feature (52)..(52): n is a, c, g, or t
  misc_feature (81)..(81): n is a, c, g, or t
  misc_feature (83)..(83): n is a, c, g, or t
  misc_feature (122)..(122): n is a, c, g, or t
  misc_feature (186)..(186): n is a, c, g, or t
  misc_feature (191)..(191): n is a, c, g, or t
cttccgcactcgggcgcacgggntgngatctcgagcagcctgtctgtcgtcnttttggcgcccccgctccccgcggtggtntngcacaccgatcctgggcttcgctcgatttgccgccgagngcctcccagacctagaggggcgctggctggagcagcgggtcgtctgtgtcctctctcctctgcnccgcnccggggatccgaaggtgcggggctctgaggaggtgacgcgcggggcctcccgaccctggccttgcccgcattctccctctctcccaggtgtgagcagcctatcagtcaccatgtccgcagcctggatcccggctctcgg

SEQ ID NO: 676120 - DNA, 770 bp, Homo sapiens
atgaaaaaaatgtagtacctctaaaggtattcaagaaacaatgtttatgaatctcactagtccattatagttgggtaccataattattttaggtaacaaagcaggttaggttttggttaatgtatctgtgcttaacaaacatcagttttggtggtggtggttgtggtgtggtggtggtggttttgagacggagtctcgctctgtcgcccaggctggagtacagtggtgcgatctcggctcactgcaagctccacctcctgggttcacgccagtctcctgcctcagccttctgagtagctgggactacaggcacccgcacacgggcccgggctaattttagtattcacagtagaagacggggtttcaccgtgtttagccacaagtgctctccatctcctgacctcgtgatccgcccgtctcagcctcccaaagtgctgggattacaggcatgagcaaccgcgccttggcccaaaacatcagtttttgaaagtagggctacagggtgacttaatattggtcatgggtggggcaccttattaatggtgaacggctaataaacacattgaatccgtataaagctccttttgagggcaaatcctcctaaagtggcctagggctcccgtggcgtaaggtacataattcccagcccccaaggtttcttgaggtctttataagataccaagtgagcattcttaaagctcacaaactattttccagaaaagaggagacccaatttttgttatgttataacaacctttggttgtaacact

SEQ ID NO: 676121 - DNA, 1403 bp, Homo sapiens
  misc_feature (470)..(470): n is a, c, g, or t
  misc_feature (798)..(798): n is a, c, g, or t
tgtttggaaagggattctcactctgttgcccaggctggaatgcgggggtacgctctcagctcacgtgaacctccacctcccaggtatacaagcagttctctgcccaaccctcccgaggtaggctgggagattaccagggccgccctgccacaacgcccgggatattgatcgggtatttattagaaagaagaatgggggtcgttcaccatcttgaccagggctgggtcttaaacgtcctagatggtgttgatccaccacacctcgagggctcccaaaggtgctgtgggatttacagtggcattagagcatacctggtggcctgtggcccccctttttctttaaactatattaagagagaaaataagtgttaccaccctttaggtattcagagactatataaatcttttcattacagggggtcacaggggcgaaatttaaggtattttacaacaaagcgcctcttgtgctcncatgagaaagttggggtctcccgtagggaaagtgtgtggacagtgcaatgaaaattgtgtgtcggcgagaaattgtggccaacacacaccaggggggggtgaagttacatccgagtggggagaagaggacatcactctaaagataaaaagtttttctttgaaaggtatatttaaacaaaggtgtggggcttttagaggagcatatacaacaagaattgaaaaggggggggagacaacacacatttcttacaaacagttgtgcgcaaccactaaatttgttgtaccccacttccgtaaaagtggaacttgtgtccgcgttcaacgaggnatataatgttcgtttcgtcccccaacagatgttgtttcggtggtatagttatgtacgcccccccccacaaaagagagagccccccccccttattaacagacatttgtggcgtgcctactctaataatgtggacgcacatatctcgcgctcaaaaggataaccgattttattctacaccaaatcattgtggtgtagttccttacaagagaggcccctctcactattagtggggtcggggggaaatagaaagccatccctcgataagagtaaataacagccgtgtgtcgttttaccaacagcataacaggctgctcttgaagaaaagtccccgcggataaattctgtcgccaagtgtagagaaaagttgcccccgattagaagtggttgaagatattatcttttccccgaggtcgtctaaacccactgttttcgttcgccgaagcaaaacatcacttctaccggtggaacttactcatacttgctgtgatataaaatagagggccacacataaatattgacgtggtgtagggtcctggtggggaacattcacaaacaccgcgcgggggtatagataatcctcgttgatcgacggagaactgacgaga

SEQ ID NO: 676122 - DNA, 188 bp, Homo sapiens
gcagaagatcacacctgtcctcccagctactcgggaggctggcgcatgagaacgggacagcacttactattccccacactcttgcccggcttcacaggcaacttgcaagaacccacataggatgtgctggtaattatcagagttcagcaccatggccggctataaaaaccacatacaaaaatcactgc

SEQ ID NO: 676123 - DNA, 1008 bp, Homo sapiens
  misc_feature (382)..(382): n is a, c, g, or t
  misc_feature (703)..(703): n is a, c, g, or t
agcggggcgccggcgcctgacgcggagggaaggagctacgagtagccgtcgagaggccggggagccagtcgaggaccgacccagtgctgagccaggcagccgccgcacgtcgcccccgactggtcggacgtccaccggtacatcgttcatgagtgaccacttgatagcttcctacctgatgagatacagcacgaagtccaatccactgaaccatcagctttgaggccacatagatttcttctatctctggagtcataggataacattaaaagcactgggagagaaggatgcaagcaggcaacgtttgtgtacaaatggcggcgccgaaattgctgactccgcattgtgcctgctgcagtgaagccgatctcccagaaatggnagagggcgtcgaaggtgcactggttgcagcgctctcaagctctcgtgaatgccacaaggtcagaagaggggtcgccatctcgcacttctcgtcatgccggaaggggaacgaaagtacctattgcacagatcgtgatgcctaatccaacgtacattctactgtcctgattgattggaagctgtaaggcacctaacgacaggtgtaggcggaccgagtgtcgctgagggtactggaaactagccacccacgctttgacttcggctcgtaggagtatgcccccagatgcccaggtagtctgcttggccaattcccgcctttccnttgaatgctgaggaatgcaccagacaagttcaacaaacaaaggtttgaacgaattgcgaggaacaggacgaatcgaacgagagagacaacagaccagcagggatcacggcacacaaatgattccatgccgcatacaaagtgggccggcaaagaggctaggaaggctctcttcgggtgaaagggaaggagaaccaagggaggggatgcctgagggaggaagccaattaagatcgtccttattttaattttcctttttcctcttctttcctttccttttttttaacacaacttttaccctggcccct

SEQ ID NO: 676124 - DNA, 215 bp, Homo sapiens
gtgtgtgctgctgcgtttgtgtgtgtgctgtgcccgtgtgtgtgctgtgttcatgcgtgtgctgtgtgttgtgtgtgtagctgcagggtgatgcataacagtatgacgtgctttttcaggatgggaacattgcagcatgtcaagatttgccgcaggtggcagcgtgtggtccgcagctcgcaattcggtaatccatggtccatagcttgtttccc

SEQ ID NO: 676125 - DNA, 694 bp, Homo sapiens
tctggatataggatacactggtctcacagaatgaggtgtgaactgttcccctcttctttttcatagtttgtgaaagttagacctatattattcttaaaatgttaacatagaattcatcgagcgaagctgtctgagtctggagttagccatttgtgagaagtttcataaattaataatccaatctctttgttacagatctattcaggtttctatatctattcgagtcagttttggtaaatagtatctttctagtgaatttgtcaatgtcatctaagttatctaatttggtggcctacagttgttcataatattcccataatactctttatcaagcgtagggcctggtacacaatatcatttccttcattcctaatttcataatttgagtgttcttcattttttcctggtcagcctagttatgggtttgtcacttttgttaaatctttgcaaaaaaacaagcaaattggtggtatcagtgattctctcaattgtttttctattctctatttcatttatttctgctctaatctttattattttctttcttcactggctatgcaatttattttcctcttctttacgttatataaggtgggagtctaggttattgatttaggcatgatctactgtttaacatatagactttcagaagtttaaatttctgtcttagccttgcttagatgcatcctaagtt

SEQ ID NO: 676126 - DNA, 130 bp, Homo sapiens
ggcacatctgacccagtcgggagggaggacagggagtcggaaggaggaggacagagtgagggcacagagacgcagagcacgggctggcaaggatggagaccctgtgtgggaggacagacactcgtggaga

SEQ ID NO: 676127 - DNA, 680 bp, Homo sapiens
  misc_feature (148)..(148): n is a, c, g, or t
ggagtatgagggagatgctgagatactccagtaaaatgtttatttccttttccaaaacaagagctgaattctttcttctgctagcagctctgaggggtaccgccaaccggtttgggggtctctgctcagctagttcctggctttgctnttgactaattacttacttccagggtctcagtgccttgtctctaaaaagaagccgagttcaagtctacagacccttatctgaaacccttaaggctagctgtgtctcataggtctgatgttttggactttagaaatgcaatccagcagataggccatatacctagtgatgcccacagcaaggtctagggcagccacccgtaatcacagtgatagttaccacagtgggataaagagaccagaactagcctcatgatggttccaattagggcttgctctaaacgcgtgtgtcaaaaataaatgtaggattttagagctttttggattctagaacggaggataaggggccgtaaacctcactgttgaactcagagaagctcctaaataaatgctaattatgatgagtactgttgttatttttttttgttttattttacttgccgagacagagtctcactccagcttaggcaacaagagtgaaactctgtctcaatcaatccatcaatcaatcaataaaatagaggtcatgctgacta

SEQ ID NO: 676128 - DNA, 93 bp, Homo sapiens
  misc_feature (15)..(15): n is a, c, g, or t
  misc_feature (86)..(86): n is a, c, g, or t
ccttttaaacttttnactgattttttttttctttcccccagagttaagcccaaaggaaaacctttcaataaaggatcatttgcccnctggtga

SEQ ID NO: 676129 - DNA, 383 bp, Homo sapiens
aagttggcacatctgcactgattccccgcacaggttgcgcttccggccattttaccacagaatggcgttcctctggtgtgttctgtgtaagtcccctcattcaatgtaggccagtttggaaaagtccaggcccagcttgattttttcttccagcctgtggcttcgtgtcatactcagaagcgtcccccttcgtgtacttctttccctggaagcttaagtcgtgtgtattccagaaccaggcgatatgaattggccacatctgggagaaatggccccacagctcgggctcagaatatggaggtgtccctctctgtgtcgcctctcccgcgtgtgtcacagtaccacagtgtcatgcgcatggttctggtctccgctcgtccctt

SEQ ID NO: 676130 - DNA, 103 bp, Homo sapiens
agtagcctggcccaacattactcgcccccgcagatgacgccgatcgtcgagcgcgccgacgccggaccagagcgaaagcatttgccaagaatgttttcattaa

SEQ ID NO: 676131 - DNA, 174 bp, Homo sapiens
cgtggtgacatgccggcggcaaggtcgcttcctcggcccgggctcgatgccgattgtactgctcgcccagaaagccggacgtgaggttcttgaccgagctgtccttggggaacgagtagcggcgctcaaactccagacgcacggttgcctggtaggtcttgtggtcgaagccga

SEQ ID NO: 676132 - DNA, 138 bp, Homo sapiens
tgatggcgctgagccactctattgcagcttgaagcgcggatgggggtgaggctgttcaatcgcacaacccgcagtgtgtcgttatctgaagtgggtgcagagtttgtcgagacgattactccagcagcagcgccatca

SEQ ID NO: 676133 - DNA, 186 bp, Homo sapiens
gacgtctcgtgagatggtacatggatcccacgaaaagctcggaaaaaagaagtgtccattgtcaaagaaacttgtttgccacctacttgtccttttaccaggtcctcccattgtacctgtgcactagagcgttagtcttaagagagcatctattctcatgacacccttgatctggagtctcacgga

SEQ ID NO: 676134 - DNA, 516 bp, Homo sapiens
acatcaaaaaccctactttattttttgttttgcaataccatttaccttttaaataacccttttatagaagggtttggtttagtttaaacagaaaaaaaagggaaaaattttaggtttcaaaacccctccccctggacaaattttaaaaaaaaaaaaaaagcccccttttttcaaatgggtcaatgggaccaaagttttcaggggctaattatgtctaattccttttgcccaaatgggcaaggggattaaaaagaaaacccaccttttacaatcactggcttaaagaaataacacatgttggatttttttggaagggaaagaagggttttggttcttcaatacacagaaaggtggattcacattttccccacaaaaagggaaaaaaactttgacggggttgaaacttgaaaaaaattagctttatttgaaaatataaaattttttggtttttttccctagatacaaagtccccggaggggctttcccccccccaaaatttttacggtttaatggttt

SEQ ID NO: 676135 - DNA, 215 bp, Homo sapiens
gtaaaactaatggtccccacaattatttttctacccctgacatggctttccaaaaaacccataatttgaatcaacccaaccccccccagcctaattattgggatcatccctttacttttttttaaccaaatcaacaacaacctatttaggggttccccaaccttttcctcgggccccctaacaacccccctcctaattttaactccctggctcca

SEQ ID NO: 676136 - DNA, 379 bp, Homo sapiens
tgagacagggtcttgctctgtggcccaggctgcagtaccgtgggacgatctcggctaactgcaaccttggcctccccggctcaagcaattcttctgcctcagcctcccaagtagagaacaaagaaaactgtaatcaggctgggcacagtggctcacacctgtaatccagcaccttgcgggccgatgcgggcagactgcttgagcccaggagtttgagaccagcctgggcaacatggtaaaacctgtctctacaaaaaatacaaaaattagccaggtatagtggcatgcacctgtagtctcagctattcagaaggctgaggcaggaggctggcttgaggttgcagtgagcggagatcgcagcactgcactccagcctggg

SEQ ID NO: 676137 - DNA, 786 bp, Homo sapiens
  misc_feature (6)..(6): n is a, c, g, or t
  misc_feature (669)..(669): n is a, c, g, or t
agaatngttttttttctttttgggtgtcttaggatcacacggtgcgtgattctgcagctggctgtcagtgcatctgggaggtaatgctgtgtctgtacagaactgcttccttctgtttggtggctgtgtggatatcccataacgagggtgtgcctgtgtgttccttaccaggccagtgtggctcctcctaatgaaccgaacaatgtcttggtccacgtgccttttaactggtgtctgtagttaagtacctggaagtgatatctgggctgaaggatacatgtgtctgtaacaggtcattggataggttcaacccaatgggtctccaaaggggctgtgctgattttaactctctggtagcataggaggagcctgcctgttgccgtgtagctttgctacggtgcgattccactatattaattgatggtgtctggttaccagtgaggttgaacatttattttttttaggaggtagggtcccccaggtgtgggagtgctggggctgcaaccccagtttctgggtaccttgaagccttgacctctggggcctcgggtggtccaaccaactatcgtccccccaggtgtgggaataacaggcagttgccacaatgcctggtaactgggcataaaatggagaaggggaatttgccgtgttgcccaggttgggccttgngcttctgacgtaggggaaccgcccgtttggtacccaggttctgaaaatggcaggcaatgacattgatcttgttaaaaactctcttaattattggtgccatcatacaattcattttag

SEQ ID NO: 676138 - DNA, 108 bp, Homo sapiens
gtgaaattgagttcaccatatcccctcctctttctccctcctcctcttcttcatctggcgcttccacctatttccgggcaactttagcaggacccttatgcaccatca

SEQ ID NO: 676139 - DNA, 1651 bp, Homo sapiens
  misc_feature (1151)..(1151): n is a, c, g, or t
tgggcttggatcgggtcctggttttatctggccgaggtggtacaaaactgctgcctgaggtgagactgggcgtgagcctcagtgaccgggatggctcctgggccccgcctgggctggtggctggtgtgctgggagcctgttgggctgagtcgtggatctggggactgtctgccctgatgagctgtgtggactgatgtgatgtgtgtctgtggctgctgtgtgttctgatgccctggtgtcggtgctgtgctgtgaacttgttctgccaacgactgtgctgcttccttggagcttgttcacggctgtgaatgattggatgtgatgtgatgcatgctgtgcatgctgtgcatgtgatgtgatgcctgccccctgtgtgtcctgcatgctgaccctgaccatgtctgtgcctgcctgcctgctttgtgcccctgtgtgtgattccgaagatgtgaatgtggctgtgtcctgtgtgctcacacagctttagctatctgttggtgcaaaactgcatgatgtgctggtgaaacaaagacgtaaagccccttcgaatggactggggtgaattacgctaagccgaaaggagatggcaagaaaggacttgtgaggtggattgacgtgtaatttagacaaatgtaaaatgggttgactgctgttgtgtgccagatgttaacaattgtgcatggaaggttgaagaagatgttacgaaatggctcaaccaatggttgctgtgtatgacagattgattaaagactctgtgccccatgggttgaaaatttgactggcccacttccacgccagcctttgcccgatttgtgcccttgtgtggacccttcctacttgacggatttgttaacattaagcttaatttttaagaattggcagggacgtggccatagatgtgcattgaacaggaaccattcacccttggacgaggtgtacttttaaaaagagccatgataggggaaaacacccggaagggaatatgccattcaccttgacagtcacctgatgtgcacctgaaattttctttccgagtgtgaacactatcgtattataattaaagcccattaatgaagacgcacttttgacccttccggattgaaaggaccttatcagattaagaaaacgaaagagtggagtatataacattntgttaccaccgacacccacatatatatcaaacagcgtcacctcaagtttcatacatacatagaggacaacgttatacgataggtccgtttcccatcgtttttcattcgaaccaccgttacagttaacccattccgcccgttttaatagccgaaattcaacagcatcattaagggggagagagctgtagagggcaaaccctttgtaaacatttagatgtgcgatgaaagaaataaaataaatatatagtatagatatgagtaaaattaaataatatgagaagagtaaagaagataagtatagaataagagtagataagaataggagcagaagtaaaaaacgtggagaaagtgaagaagaggagcaagacaaaattagatatcgacaagcaagagcgggagtagagggagagaatggagtgaagatagtagaataaagtagcaagagtagaagagggaattagaaaataataggagggcatagatgtattctataagaggtc

SEQ ID NO: 676140 - DNA, 145 bp, Homo sapiens
cgggctatttctcccgtgcccggaccatcacgagacctgcacggcagatctggcgtgtgccgccctccgagctgcagatcccgcccctaagcatcccccgggactgggcacaccctgctttgggcgggacctgcgggcatttgtg

SEQ ID NO: 676141 - DNA, 281 bp, Homo sapiens
  misc_feature (186)..(186): n is a, c, g, or t
  misc_feature (225)..(225): n is a, c, g, or t
cccatgcgaagtttccactatggcttccagcactgtcccggtgagcgctgctggctcggctaattttttgtatttttagtagagacggggtttcaccatgttagccataatagtctcgatctcttgacctcgtgatccgcccacctcggcctcccaaagtgctgggattacaggcgtgagcaccgnaccctgcctcaactgtctgcatttctaccatttttgttnttttatatgtacgttcccacaacaccagtatttttcaagggtaaaattttacataa

SEQ ID NO: 676142 - DNA, 993 bp, Homo sapiens
tcctctccatgatggccccagagcacccgaatgctcatggacatgtccctcgcccaggccaacgcggttctccctttacttccttgtacttccttgcgtctcgcgggttattgtggcgcctaaaatgatcagtcccgtttggcctcctcccaaagctaggtccttctggcactcctcgtgtgtggagccgaaccctcgagtcgggcaaacattgaccctgcttcgtccaagctgaattcttgtaagtctccctggctctcgttgagctctctgcggtgcacagtcttctctttccttgtgatggatgttgtcttggtgcgagccttgtacagtgggggcgaattgccatcagggcaagagctcagtgatccaagtgttccagcaggcgtgggctgtgcggtgatagacgtggagcgtgatggcccggcacgtcgtgcagccaggataccctgcccaccggcgcatcgtagaggtcttcggcacgtgaggtcttgctggagaacggcgacattagagatcgcaaggtcctgggggacctgatctttaaaacagcctgaccggcggcaagctgctcaacgaccatcagcccaccccgagattcggaaaggagatgatgaaggagacgttcaagtacttcctccggggataccgctacgtgattctggatatcacccctgctgtagagacaaagaagttggctcaaagtacatgaaagcacaccgggggtaggtataacctgggcaaccggggacacaacaggtggcacggggtggatgcggaggaaacagcctggaaaccgaagaacgcaaaagcccgcaatccaatgcccaggtgccctgacaaggagaaagcccgcatggcccgccatgtctagaaaactcggggaaatggagtgcacccaaaggcacaagtacaacactggccacatgagcggaaaggccggaaaacgccagaaagatgggacaaagcggggcaagaaacctatgaacaaca

SEQ ID NO: 676143 - DNA, 257 bp, Homo sapiens
  misc_feature (60)..(61): n is a, c, g, or t
  misc_feature (99)..(99): n is a, c, g, or t
  misc_feature (112)..(112): n is a, c, g, or t
  misc_feature (123)..(123): n is a, c, g, or t
  misc_feature (159)..(159): n is a, c, g, or t
  misc_feature (164)..(164): n is a, c, g, or t
  misc_feature (199)..(199): n is a, c, g, or t
  misc_feature (206)..(206): n is a, c, g, or t
gacggataggcagatctgtctcaaaaaaaaaagaaaagaaagatacttttctttcctttnngctattaataataatactttatactgccaatgagtcantatcccttatgcnttcctcttatntttactactccccaaatgtcgccttactctatgatngtggngctccatttattttattcagtcaaacttactagtngcctgtngatctagaaatgccctccacccttcagaattcacgggatctgggcctcgtg

SEQ ID NO: 676144 - DNA, 782 bp, Homo sapiens
  misc_feature (246)..(247): n is a, c, g, or t
  misc_feature (334)..(334): n is a, c, g, or t
aggtaagtagtagatacgccatatatagggaaaagatagtatactacgtaccgtaaggcgcacctaggcgcgggcgaacccctatacaacacgccacatactagcagctaggtagcacgataggtactacggggacctaccgcagcagctaccccagggcccacgggccagccccgccgccctacgcaacctaggcagccgccgccgtaggaagagtaacagtatagtagaatatataggctaccnngcgaagtaatataatagcactagtagtaggctattaggtaggggtactataaagtatagtaggtactagacacacactagctagtanggtatacccctagggatatataagtagaaatagccgtaatagcaggtaggacccccaaaagtaacaagggcatatattaaacggattactacagtaaacactataaaagaggataggtagtatacgtaggtatataggctaaaaggatagggctaccgactatatacctataggctaactaccatagcagggactactagcaaagtatataggctataatatagaagtactatataaaagtactaagtaataagcaataatagctaaagggagagggagaatactataatactactaggcggcacataactaataatatataggctagccctatagccagtagctagaataactaatagctagacataagccccttagggctacctaataggaaggctagcttaaagggtaaggaattaaaaaacccgaggccagggttatagccaac

SEQ ID NO: 676145 - DNA, 173 bp, Homo sapiens
  misc_feature (1)..(1): n is a, c, g, or t
ntagccacagtttcagtgttcatatcatctatccttcccagctttccacccacagtgctcaattcacacagtcacccatttcaagtccagtttcttcatttggcagtcatgcagggtgtctcatcaccatttctcatcacatttcaagcattttgggtcaacgcgttccatca

SEQ ID NO: 676146 - DNA, 906 bp, Homo sapiens
  misc_feature (287)..(287): n is a, c, g, or t
gatggcgtgatgtctcacggaaagttctccgttctcagacatgggtccctcgtgcattcctgcctcggcaagcgcaggatgtagtgcatcgtttgggcaaggtgaagacgcttcctctaacggatgacccagtccaatccgcggtccagctcacagacttcctgggatacaaggctggtatgaactcaacatcgatgacgcgtgacagtccgaatatggcccgcagaatccaatggtgaaatccagagaaaggaaggatggtcggacgggacttgtagaccatttgntacgactagcaccgataccactgtgatgggctgtgttggggctatttcgttggggcgtaccagtgtaacatacactgcttcgcatagtctgggcgaggaccgctctcacacgtaacgtcggtactattgactgcagtcacaactctatgctcgaattgtaatgttaagtagagtcggttttactaatatacgtaactttgggtaacttgaaactcattacacgtaaggaaagtgcgcttgttacgcacatgtaactcgcaagcacataaagggtaggcaatgacgtgtacttgggctaggaactcagtatgtgagacaggaattaaagaatagtgtagaccaaacgattctaaggatgacgcttatttaactgaatgatgtaatatagagcccagaccccaattgattgccgctatagcagggggcgtcccttgttcgtccaaagggaaccgtaacacgtggagactggaacccttgcactgggggacgtaatgccccaagggtttggaattgtgcagcgtttacccagtttgcgcactgaaagcagacttcctcgtgcaactagcgttaagcgcggcttgaacgtaagagggcttataggaaagcgaacgtaagaggc

SEQ ID NO: 676147 - DNA, 473 bp, Homo sapiens
  misc_feature (155)..(155): n is a, c, g, or t
cccggatgtgcggtctactaacaataaaaaattgaaaattaaaatgacagattgttgctacatatctgatggagggtttaaaatgtaaaatgtctgtttaaaaaagtctacgatttagtgtggtcaagtttatgaggaatgggtattcacatacnaagatagagatgtgattcagtataacttcagtgatcagaaacgggaaagttcaaatgaagagcattaagagtgttcttttactttcttactcacagaatttatcctaaggagataatcagagataatactattagaagagcaacacgttggtaacaattcagtgtccagtgtagaccgtgccaaacgtctaagtggattgcttaagcaaagatgggcaccagtgtgtgaggaactgtcttgcatcattaaggcatataaagaatataaagaaggagtccctgtgtctcagtgatttagaaccagtctctgaacagcaa

SEQ ID NO: 676148 - DNA, 266 bp, Homo sapiens
gtcttggaagaactgcacagtatgagaatagtgggtcagttttctccaggatccagaaagtatatcaagcagcttggggtgaagaaaggacccggcttctccaacaacacacaggcctgcagtaagatggggctggggctggtttggggtggaggataagtgacagccaaggtttgtcagcatgcagaagggtggctgactcatggactaagggctgcggaagccagtggttggccttaattcttggatcctgggaaacttctgga

SEQ ID NO: 676149 - DNA, 150 bp, Homo sapiens
agccgtcacgagcgtaatgctaggcatctttccacaagaaaatctgcgcaagtgacccaaggcatctcccagggggtagaacatccttgtgcacaagacactcttgtagcactaaatgcgcatggcgttggtgtgtgcttcacatcctca

SEQ ID NO: 676150 - DNA, 176 bp, Homo sapiens
  misc_feature (117)..(117): n is a, c, g, or t
actattagtgtggtacttacttccaccaatattatttgtctctaggatacacgtgtttaccgaagtattgttcgataggaataactaggcaggggaggtacagacaaactggtgtangatcaaaaggaccatttcactgtttacttgggggtgtatgtgtggccaaccttgatcgt

SEQ ID NO: 676151 - DNA, 438 bp, Homo sapiens
cacatgcgtataatatagtaaaacccagcccatgacccctatcaggggccctctcagacctctctattgacactccggctatacatgtgatattactttcacttcatatacgctcctcatactataggctactaaccaacacacttaccatataccaatgatggcgcgatgtgacacgaggcacataccaagggcaccacacaccacctgtgcagggctttgacacgggataatcctatttattacctcagaaggttttttcttcgcaagaattttctgagccttttaacacttcagactatcccctaacccccaactatagggggcactgggccccaacaggcattaccccgcttaatcccctataagtcccacttcttaacacattcgcattactcgcatcaagagtgtcaatcacctgagctcaccatagtcttg

SEQ ID NO: 676152 - DNA, 179 bp, Homo sapiens
agcatgcacggtattctcatggtgcggggcacagtgcgatgctgagtcctctactcgcagcgttgcgtgtcaccatgtctatgcgtccggaatacctctttaatctggcttgacgtttgtctagtggatccaagtttgttcactgtcagtaatacagacgacctaacttgtggaagcag

SEQ ID NO: 676153 - DNA, 381 bp, Homo sapiens
  misc_feature (357)..(357): n is a, c, g, or t
gtcgaccggggtgttaagcatatcccagtgtaggtcacctaacagaacaaactctgaagctagatggggggcgatcaattcacaaatggtgtccagggcacagctgggagctgaggggggtcggtagcaggcggcaacagtgagagacttatttctggagagagtaattttcaaaattagtagttcgaactgtttgggtatggacctggaaagtatgacattactttgcaggctatctctgcagtagactgcatatcctccccctttggcagttctatcttgacggaagatgttatagttgggtatggaaatctctgaatttttggtggccttcctgagccaggattcagacacgtngacgcgcccgcgaatttagtagta

SEQ ID NO: 676154 - DNA, 521 bp, Homo sapiens
ataatcagctcggtaccgtctgagcagctggagttagagggcgtctgtctgtgcggtaagggagagggcagttccggccgctggacgactcatgccaggtctgtggaaatgctggtgagagcagacgtgttggcagtgtagctgtggcggatgtacacagggaagttgatggagccctgcctcgtgtacccgatggatcatccgatcccgaacatcctggtacccttctgctgatgagagtaggagacaaagtcctcggatgactctccaaggctctgtgtctcctgtgtgtcatcatagcccgaaatgtagaaaggctcattaggtaataagatctggacgtccattgtcataaattgccttgaccttcggaaatggttgcaaactccttgtaaaccagggatctcatttgtctacttttgcatagatagtatgacctggttgagccaggaatactggaggctggcctagaataaatacttgccgaggatgtcctggtaggccgcagtttaacctcggtc

SEQ ID NO: 676155 - DNA, 332 bp, Homo sapiens
  misc_feature (5)..(5): n is a, c, g, or t
ggcantatatatcaaatatgtagggacagattagtttaatcagaagtaattcactgtgatgacatctgtgtgaccttttaggtaaaatatctgtgtttactcaatataaactatgtctaaaactgacatactcaactagaactcatatgaatcctttaaatttcaagtggagtaaaatcactggtttgaatatctaacagctcccatttgaccacaagtatccttctgatcactattttggggacatgcagaagcagcatattctaaggtattgttacgtcaagacagaactaagagtacctactaaagcttgaagtaatctgtctttagaa

SEQ ID NO: 676156 - DNA, 203 bp, Homo sapiens
cttctaggagtcgaacctgcaagagtgaggaccttgtctttcgactcgctcgatcccagactcgatgttgactagggatgggctttgtagttcggcatccatttaatttgtattgctttagccttataccctttatacctgaattttatttaaaatagtgagaaaaaattcaagacatttttgctatcatagcaaactgcaga

SEQ ID NO: 676157 - DNA, 330 bp, Homo sapiens
tccgggctctcatggataccgggacggtgcgagtagagtgttctgaggacactgctggggcgggtgcggtggtgggagggcattggttgggcagactgcccaaaagtccagcttcttaggtcagagctctgttgcccatcctgcggtggtcttgcgagggaatgcccaggcatccttggttcacagagcctccctctggtgggccccaatgggcttgctgctgtccatctatccatgaggacccgggggtcctcatgatttagggggctgtggttccaagggaagctgtagggcactaaaaatgacggggtacggagctcggaattttcg

SEQ ID NO: 676158 - DNA, 841 bp, Homo sapiens
tccttggtccagaaaaattatttttattattggatagtgagtgaagtaaagatgtgagttattcactatagaggtttaatcacccaaggtggccttcattatggtataaaatataaccttatatctcatctggtaatcctataaactattatatccccagtaagaaaggaggtcactattttctccttccttttttggtgtctttcttggcctggttatatatccacctatatataaagtttatcatatggaatataagtcttcttactatatatcaagaggaagaaaaagtaaaagcaccaaaaacccaaactatgtgcccaacagccctatagaccaattcccacatctccagccagtgtggctgtgccctctccgagaatctcgtgtgttttctctgtggggctctctctctctccaaccccaagccacttgtgggctgtggccccctgcggaatctctatatgtgttattcctccgtggggctctctactctctcgcctctcgcccccccaagctctccccaattataaaagtatataagcgcccccgccgacaaaccccccattctcctatagctgtgtgtgtgtcatcgaggggtgtgccggagcggtctccacacccaaattgtgatggtggggcgctcttgtgtttcccagagaaagcatgaaacaccatcttttttatgtgggctccaggtgtgcacatgtttgtggaatctaaggaaagggttcacccaaaatgcgggtgtgggaagaaggggcgcgtggcccctttctctccttttttaaactcccactctaatacagagaggggggtttaaaccataaaaattacttca

SEQ ID NO: 676159 - DNA, 323 bp, Homo sapiens
ggtggcctaccaagcagatgttctgaaagactcattatggtactggactaatgcaaatccatccttagaccagatgtgcaccaccttcttggaggaagatctggctttattggtggtgagcagggtaatctctatttaaatgtggacgctcatggaagcaattccctaatggtgagtgcatgggtgccttatatgaggggtgtctggcggtgtgttggcacaaatgcacaagttcatgtctgcacacactcggattggacagtccaggagtcaaagacatccaaaagtcgggaaacaagtacctcaggtagagagccgggcaa

SEQ ID NO: 676160 - DNA, 258 bp, Homo sapiens
tgagcccagcgccactacatacatgagaatattataatctgaagaagaagaagttgaattgatcagtgtgcctatttccagtagttcgcagatagtgatcctgcgaatagttgttcatgcactttaacagatgaaactgtacagccttatttagactctttgcctgagattgagtgctatgttgatcgcctctgagactacttccatttgcttattgccagctctagaaatgccgtatctggagtttgctttagttaa

SEQ ID NO: 676161 - DNA, 470 bp, Homo sapiens
agccttaaacctgcaagttcctcacccccgtctgcctgagggacccaatggaaagaagcacagcatgaaggagacctgtgccaaacccaaaaactgtcttctgtttagactgtacagagcaacccttgctcacggtgcatgatggaaaatacacaacaatcaagccgaggtgaactgcaccagaatcaccatccatcaagacccgatcacacacacacacttcaccccgatacaacatcatgtttagtttttcttaaaaaaaaaaagagagaaagcttctgataaactttaatccttgtcgttattcatgcttttgtgggcagattggagaagtgctttgggtgttttatttttcagtgtttagttatttaactggaagagaattgtaactgctgggtacagttgtatgtgaataatgtaaattggacaatgggaggagaggatctgtgaataaaacagaatacaaggga

SEQ ID NO: 676162 - DNA, 499 bp, Homo sapiens
attctagaggccgaggcagccgacatgttttttttttttggaatcttccttttttttggaatagcttacaatacgcaaacttccacacggggtggtgaacgatgccgctgggagtaaatcgtgtgggtcccatatggtccaggcggggaccagacatggcacctagggaagaactgccaggcaagagacaagagtagcgcaccagcaggcgaccacacacaaacggggcgagggagacacagggccggccacgcacaccaacccccaaacggcgacacccccacgtgtgcggcgacaacaacttgggcgtacccacacccctgcgtcgcgccgcccataaaagagagcttaggaaaaggagcagggcgggacgaacaagcgggcggtcgcgcacagcacgcacaccctgcgcgaccacaaaaccagagaaaaaacgagacccggaacgactcacctgccaaaaagcagacgccgaaaaaacaaacaacccggggacaag

SEQ ID NO: 676163 - DNA, 752 bp, Homo sapiens
  misc_feature (26)..(26): n is a, c, g, or t
  misc_feature (85)..(85): n is a, c, g, or t
  misc_feature (113)..(113): n is a, c, g, or t
  misc_feature (119)..(122): n is a, c, g, or t
  misc_feature (131)..(131): n is a, c, g, or t
  misc_feature (134)..(134): n is a, c, g, or t
  misc_feature (141)..(142): n is a, c, g, or t
  misc_feature (144)..(145): n is a, c, g, or t
  misc_feature (147)..(147): n is a, c, g, or t
  misc_feature (151)..(155): n is a, c, g, or t
  misc_feature (160)..(160): n is a, c, g, or t
  misc_feature (163)..(163): n is a, c, g, or t
  misc_feature (167)..(170): n is a, c, g, or t
  misc_feature (176)..(178): n is a, c, g, or t
  misc_feature (190)..(193): n is a, c, g, or t
  misc_feature (196)..(197): n is a, c, g, or t
  misc_feature (199)..(199): n is a, c, g, or t
  misc_feature (215)..(216): n is a, c, g, or t
  misc_feature (227)..(228): n is a, c, g, or t
  misc_feature (233)..(233): n is a, c, g, or t
  misc_feature (239)..(240): n is a, c, g, or t
  misc_feature (242)..(243): n is a, c, g, or t
  misc_feature (248)..(251): n is a, c, g, or t
  misc_feature (254)..(254): n is a, c, g, or t
  misc_feature (257)..(257): n is a, c, g, or t
  misc_feature (259)..(263): n is a, c, g, or t
  misc_feature (268)..(269): n is a, c, g, or t
  misc_feature (271)..(271): n is a, c, g, or t
  misc_feature (274)..(274): n is a, c, g, or t
  misc_feature (281)..(281): n is a, c, g, or t
  misc_feature (301)..(301): n is a, c, g, or t
  misc_feature (317)..(317): n is a, c, g, or t
  misc_feature (326)..(326): n is a, c, g, or t
  misc_feature (422)..(423): n is a, c, g, or t
  misc_feature (428)..(428): n is a, c, g, or t
  misc_feature (432)..(433): n is a, c, g, or t
  misc_feature (458)..(460): n is a, c, g, or t
  misc_feature (462)..(464): n is a, c, g, or t
  misc_feature (467)..(468): n is a, c, g, or t
  misc_feature (470)..(470): n is a, c, g, or t
  misc_feature (472)..(474): n is a, c, g, or t
  misc_feature (476)..(478): n is a, c, g, or t
  misc_feature (480)..(482): n is a, c, g, or t
  misc_feature (485)..(485): n is a, c, g, or t
  misc_feature (493)..(495): n is a, c, g, or t
  misc_feature (558)..(558): n is a, c, g, or t
  misc_feature (569)..(569): n is a, c, g, or t
  misc_feature (575)..(575): n is a, c, g, or t
  misc_feature (583)..(584): n is a, c, g, or t
  misc_feature (587)..(588): n is a, c, g, or t
  misc_feature (595)..(595): n is a, c, g, or t
  misc_feature (628)..(628): n is a, c, g, or t
  misc_feature (668)..(670): n is a, c, g, or t
  misc_feature (751)..(751): n is a, c, g, or t
cactatataacaattttttacaaaanatcattcttttacctttccttaattccctttatcttcatctttttcctccttctcctcntcttttctttcttctacttctttatacncaaagnnnnccccttctnccnccatctnncnnantaannnnnctccnccnccannnnatccannncttatccactcnnnntcnnancaaccatatcataccnnccttctcattnnatttncctccnnannaccannnnttncancnnnnncttcnnanacnatttctnatccaataacctcctatatnctttccctttaccttnatcttcatncatcatataaccatcccttctcactccattcccgccccctccttccctcttccctcttccctctcccttcccagccctcccttccttcctcttccnncaatncatnntacccacattttcttccttcctccnnnannnaannanannnannntnnnttntttttatnnntccttcctccatttaattttactctcccattccccataatatctcctttacccaatcccaagncccatcctttnacaagnctcctatnntcnnctttccntatctatttttacctccctcctccctttcttgncccccacctgacgtcttgctgcagagtctgacactggatnnncccccctcaccccgcccctggtcccactcctgcccccgccctacctccgccccaccccatcatctgtgggacactggagtnt

SEQ ID NO: 676164 - DNA, 172 bp, Homo sapiens
cgtacccaagactgtactggatgcaggttggttgtagactggtcaccgtctctgggctcaccctcacgtactccaccaggatgagctctatggagtgccgacagaggcaccagaggttcatgctgaatggacaatgggcaaggcctattatgatccatggaggacatgatta

SEQ ID NO: 676165 - DNA, 162 bp, Homo sapiens
gttccaaactagaatcaaccccagttattctctcacatcgattcacgcacagggacggttttttttctcagaccagaaatattcccaaaacggcggcccaggcctggtccaagcgctgactgatactaccaagtcttctgtggggtggactgagcacacatc

SEQ ID NO: 676166 - DNA, 573 bp, Homo sapiens
acaaaggcaggtaatatgcaatatagaagccgagaaatacatgatagaagttcacaaaacacatatgtcaacagaaagttgtttggatggtgtctgtgaagttagaatatttaaaaacataggtgttcaggaaagacatacagactggtccacgtgggcttgttagcaggcagaggaaccctgctttccaaacactgatatacgtccatgagtcacggcatgtgggaaggttgccatggacacctgtatcttaacaggatgctatagtgtttacgaaagctacacacacagagaaagcccagggaagcctgtaggctaggcgctatgcttttaggagggctgcaggaaccaaacctagtgtaatcctgttggttagctccatgcaagacttcatggaagagtccccagagtaggctactttaggcaggcttccatgaatggtcctcagatcatgtgatgtctacggcatagatgacagctgccctatttacacagaagctgcagaagtcgagaggcatgtggatttgctcttgggagttcaatgttgcagggtagagtagtcttggttgataa

SEQ ID NO: 676167 - DNA, 391 bp, Homo sapiens
cggattggcacgaatcagtcaggcacatatgagactctgtctcaaaatagtaatacgtaggtcataaagcatttaagtgagatgtctttgggctggagtgaagcgtagcacttaagcggtggctttgcatgtcttgataaaaagtaatgagtagtttgcctcaatacagcttcaactaaaattcggattttgagctcaaaaaatgttatgcccttcatagaaattaaggggaatggaaatcttttcttaacattttacacctctaccccttaaattttaagaactgtactttacaaaaatgtgcaattttcatacagcatcccagtgttgatcatggaggttaatgattctttattgttagggacctatcttgtaattcccgagttattta

SEQ ID NO: 676168 - DNA, 840 bp, Homo sapiens
gagcaattgagatttaagaaatttggtcacagatcctagcactttgggagactgaggcaggagaattgcttgacccaggctggtttcaaattcctgggctcaaagcgatccgcctgccttggcctcccaaagtgctgggattacaggcatgagccactgcacccggccagaaattctgataagagctgacattgcagtcttgagtctttttttttttttggacagagttccagtcggggccagaagaacaggactctattcttaaaaacaaaaaagaacacagcgcaataacgggcccacaacagagaaagtccacagagaaagaatgtgacaaagatgttgtgggcacaaacaagagaattagcggcggccccagaagacatctatctgagggccacacaattggcgacacgacaagaagccccggggatgaaaaacaaccacgaagaagcaagagagcaacgagcaaaggttgcgaagacacaagagaggagttaccgcctatgtgacacacccccgggtgggagaaaacacccgagagagggaaacatataccgacaaagacgcacgaggaaagagaggggaggaaagtcggacgcgacaaagagacaagaaaagcgataggagaggacggagcccacaaaagaagggccacaagacggacaacggatcgccaaaacacacgacaaagacgaaccaaaggcgggggccgcagatatcaagaacggcgggccgacccctacccccgaccagggtgcggagcaaaacaagaagaagacggggagatcacagcagacggggctaaccacacacacggagagaggagagggaagcacaaac

SEQ ID NO: 676169 - DNA, 91 bp, Homo sapiens
aagtacgtttttgctcagttcatgcgtgaacaatttaaacatcgccaccataagggtcaaatgtagtgtttttaataaactgtccaccaaa

SEQ ID NO: 676170 - DNA, 440 bp, Homo sapiens
  misc_feature (173)..(173): n is a, c, g, or t
  misc_feature (235)..(235): n is a, c, g, or t
  misc_feature (261)..(261): n is a, c, g, or t
  misc_feature (292)..(293): n is a, c, g, or t
ggtgtttcttatgagcttggaagatttctagtgctttccatgcactagcttatttgttctttatgacagttctattttattctgattttaaagatgaaaaaacaaacacacacaagttaactgtacagaatgaactcggtggcacaactcagcggggcagagccatgaatcanaacctcagcagctagtgttggaacactcatgtgactgtaataaccttgggcaatgttacttnagacctttctgtgcctcatgttttcntttacccgttaagtaggggatcgtatattannataactacctcgtaaaagtttctcgtgaaggactaaaaggagatattgtaacatgtcttgaaatatgtgcctcgcatgtagctacgtcctctgggtaattatagactaaaagctggccttcatcttctacagataagttgaaaaatg

SEQ ID NO: 676171 - DNA, 323 bp, Homo sapiens
tttatttaaaataaattatttgggatacaggcacaggcatttacgcctgtaatctcagcattttgagcattgcttgagcccaggagttcaggaccagcctgggtaacatagcaagaccctgtctctacaagaaattaacaaattagctgggtgtgatggtgtgcctgtagtcttagactgctcagcaggctgaagcaggagaatcacttgagcccaggagttctaaatttcagtgagccatgatcacaccattgcattccagcctgggtgatagaccaagaccctatctctaaacaaacaaacaaacaaaaaatgaataaaaa

SEQ ID NO: 676172 - DNA, 127 bp, Homo sapiens
gcacggaggccttttccgcagacagagcactggggccttcccgagccccggtggcgtttccaaccccccgcccgaaaacccggtcaatcgtgggacaaagcacaccccccccttggaaccccggaac

SEQ ID NO: 676173 - DNA, 1268 bp, Homo sapiens
  misc_feature (111)..(111): n is a, c, g, or t
  misc_feature (1268)..(1268): n is a, c, g, or t
cagcctcatggatattaacatacatatcgctcaccgcaaatctaagaacataataacgcatactgtgaataaagaagagcactcgacaactactcgactagccgatcctantaaataataaagagtacttacacacacttcccgacgtatgatacatacagtacattatacccacacacaccacaccacctttaagataagaaccagtagagtgatcgtgccaatccgacactgtgatggaatgaatacgcgcacatcgcgcactgataggaaaatgaattacagtacaatcacatctctccctcgaccattctatatgtaaccgcaccactaacacaaacctaccaatcacatgagtatctagtagatccgcgtgcccccctcagaatacgctcaatacctggtgttcaccacactccgaagcacgcaccgtaccatatcgccatactatccatacagagtccaacccgatctgcaacaacataacgccctctcagtttcgttacaccgcgtgccctatctattttcaaccatcaatactcctatcatatatgtgactacacttttttctatatacgcaccgagccaccactactggccgctttatgttaattgtgatgtagggtcaactgacacctaataccaccattatcgcactctccttacccacttaacctcacccattcacgttaccccacaccataccacaacaccacgttcaacaaatgatagaacttactgtattcgaccaagcatacatcctcataccgagcagtaacccgttcacatagcattttcgaaccatatacagagactcgatcgacgatcaaacacgctagtctagattaattatgcccgatatagcatcacgtctaactcaacttctccgacctgctaccctgtgtcggacataatataccctacaccacataactcatcaaccgcacacatttcgacccacccattctcgttaaaaatataaacaataagtaagaaattcgccccatctctcgattacttaagtccagatccgaataaactaacagacatcgcaccacccccttcaacacaattattacaaaagtaactccacatcacatcttcataaccagtaataagtagtatcgcagccgctagctctcacataccacatgtagactcgccgcgatgaatacaaattcactataccatacataatatgacgatcgccctcacactcgacatactatacactctaaatgaaacggatctattaagctgcaccaatn

SEQ ID NO: 676174 - DNA, 373 bp, Homo sapiens
tcggtccgatcgtgaaataggtaggtgcgtgtctgtgtagaaagaagtagacatgggagacttttcattttgttctgtactaagaaaaatccttctgccttgggatcctgctaattggtgaccttacccccaaccctgtgctctctaaaacatgtgctgtgtccactcagagttgaatggattaagggcggtgcaagatgtgctttgttaaacagatgcttgaaggcagcatgctcgttaagagtcatcaccactccctaatctcaagtacccagagacacaaacgctgtggaaggccacagggtcctctgcctaggaaaaccagagacctttgttcacttgtttatctgctgacctacctatttcacaatcg

SEQ ID NO: 676175 - DNA, 958 bp, Homo sapiens
gcgggctacacgttaaaaacactaatggggagcgcgcgaagctgaacttgtgctgctctgatgtgtggtgcctgttagcctgccctagatgctgcgctggagcctgcagatgtgctgtagctgtgactacaactgcatgtgcatctcgtggaggccaactctgactgtgacttggtgttgagatgtgacatgagtgtgtgctctgactgtgtgctggccctgaactgtgccaggtggaattactgtgctgtggaatgtgctggtgaccaagaccaagggattcatgacaactgcagcacagaaaccagtactagcgtcgtctaaagacgacacggagaagacagagagcagcgagataaggcagaggagaaagataagaaggaagcaacgacacgaaaccatccgggagaaacgcaacagaagccggaacaccagcccgaaatgaaaccacgccgaacagcacacaacacgatacagatggcacacgaacaaggcaagaaaagacgaaagggaacaacagacagagacgaaaagcggaacgtgacgccgcgaaaaagacatgcaggagacataggagaacatgccgcaccactaacagacaagacgaacaaagaacgagaaaaaacgggggcaagaaacacagggacacacagaaagccgcagcgcaacagacgaaaaggcaccagcaggacacaggagacaaaaagaacaacacaacagagaaacacacgcaacaacgcaagaaggaaagaaagcagaaacaacagacgggaaacggacgcaaaaataagaaaaacaaaaaacgagcgaacggagacgacacgaggaacaaaggagcagcgaggaggacaacagaggacagaggaggaaagaaggcagagacagaagaaaacagaaggccgagagaggaaaaccaaagagaacaaggccagaaagaggagaaacgaagacagagaca

SEQ ID NO: 676176 - DNA, 282 bp, Homo sapiens
cgaacaggacacgcgcgagttgccgcggctgctccaactcactgctcaccctcttctgagagcaggaaaagaaccctactgacatgcatagtttaacttcctcatcagaactatgcccttacttgtgtgcttttgcgctttcaaataactaacacgaactgccagaaaattaacatctgaacttagctgcacattctaaactgacctttccccgtactaacggttggttcccccgagtggcatgattcctgagcgttcctactataaagcatggaacatgca

SEQ ID NO: 676177 - DNA, 347 bp, Homo sapiens
  misc_feature (345)..(345): n is a, c, g, or t
cagcttataactgttgaaagccagacaaaaaaagaattctaaaatcaataagagaaaagtgtcaaatcacatataagggaactcccatcagactaatagattcctcagcagaaaccttacaggccaggagagaatgtgataatacattaaaagtgctaaaggaaaaagaaaactgtcacgcaagaacactatactcggcaaagttgtccttcaaaaattaaagagtaataaagtctttcccagccaagcaaaaactgagggcattcatcaccactataccagccctacgagaaatgcttaacatgttctacattctgaaagcaaaaggctgatatttgcatcatnga

SEQ ID NO: 676178 - DNA, 335 bp, Homo sapiens
atgagagaaatcaggtggcttctctctcatcttactgttctctgctgagatgggtccctacctagaacattccctctgttcagcactaatgttcactcggatgtagtggaagtgcaagaaactcaattggtgtctgtgtacaggctctctctcctcactgctcacaggaaggggttctggatcgggggatttcattgtgtagctgctgagatgtgaaggcaagcctcagcatctgcccccgctgggtggacatggctgcttcctcgaggagaagacacagagtccaaggggcaggtcttgaggttggcttccactctgccttagaagttaatttt

SEQ ID NO: 676179 - DNA, 820 bp, Homo sapiens
tcacgatcgatattcatcagactgtagatctaactatcttcccacaaagctttcctcgagctatccggaatgccccgtacgtgactcggactaaccccgatgtatacaccatatgaatacactcgtatcatctgtggctcactcatgactctaacagcgagtaaatattattatctttcatgatttgaagaagccttcggcttcgaagcgcatagtcctaatgagtgagagggaaccctccataatgctggtagtgactatctgtgatgccctcccagtcctacacaccacattcgagaaagcccggtatatcatacatctagactaactgccaggaatcgaaccccccaagagcttgttggcaggccactcccatggactcaagtgacgtttgagcagcaagaaaaaaacatgcacatgaggagtgccagcagggcgactaacttgaccccagtatggaaacaaaaacaaaccagatgggggccgagacctgctgcgcttagatcactgcagcttctaggaccggaacttggactgatcaaagagcggaggacacccccccataaaaagctgggggcgcacgacgtcgctccgacacccacctgggggccggccccgggcccggggtcttcaacgcaggccggcgccgcaaaagaccccgccgggcaggcccagacccgctcgacagcgatccccaaacagcggggacgcccgcgacaacagacctgccacagcgcaacggccgcccaaccacggagacaacaacgcaacacacagcaagacaccaacacacacacacaacgcccacacaccacaacat

SEQ ID NO: 676180 - DNA, 166 bp, Homo sapiens
gaaaagaagaagtcgcgatcccgatataaaccattaaccttccctctacacttatcatcttcagcaagttctaatgctactgactatcctagaaatcgcggtcgccttaatccagagccgtacgttttcacactctctagctaggcagtctaagatgcaattcagg

SEQ ID NO: 676181 - DNA, 559 bp, Homo sapiens
  misc_feature (204)..(204): n is a, c, g, or t
  misc_feature (206)..(206): n is a, c, g, or t
  misc_feature (225)..(225): n is a, c, g, or t
  misc_feature (235)..(235): n is a, c, g, or t
  misc_feature (241)..(241): n is a, c, g, or t
  misc_feature (247)..(247): n is a, c, g, or t
  misc_feature (251)..(251): n is a, c, g, or t
  misc_feature (265)..(266): n is a, c, g, or t
  misc_feature (269)..(269): n is a, c, g, or t
  misc_feature (277)..(277): n is a, c, g, or t
  misc_feature (286)..(286): n is a, c, g, or t
  misc_feature (292)..(292): n is a, c, g, or t
  misc_feature (294)..(294): n is a, c, g, or t
  misc_feature (297)..(297): n is a, c, g, or t
  misc_feature (299)..(299): n is a, c, g, or t
  misc_feature (304)..(304): n is a, c, g, or t
  misc_feature (306)..(306): n is a, c, g, or t
  misc_feature (310)..(310): n is a, c, g, or t
  misc_feature (315)..(315): n is a, c, g, or t
caggtcaccagcgaaaagatttattctggctctcaccaccggtgctgaaagactttataataatatatttcaatttcatcaacttcggcagattgccaaagaactaaacattcagggtgctgattttgaaaatttaattggatcactaaatgaccagggttacctcttgaaaaaaggcccaaaagtttaccagcttcaaactangnaaaaggacttcaccaagtnagggcctccngggttnatgcanaatnaaagccatcccagnnaanaaaagcgngcacgccanacagcngnccncncaccncncacncaccncacacacacacacacacacacagtcaaatactgttctctgaaaaatgatgtcccaaaagtattataataggaaaaaagcattaaatataataaactaatttaagaagtgataaagtctccagatgcagtggctcacactgtaatcacagtgactcaggaggctgaggtgagaggattccttgaggccagggttcgagaccaaccttgggcaacatagcaagaccccatttcttaaaaaaaaaaa

SEQ ID NO: 676182 - DNA, 923 bp, Homo sapiens
  misc_feature (63)..(63): n is a, c, g, or t
  misc_feature (67)..(67): n is a, c, g, or t
  misc_feature (96)..(98): n is a, c, g, or t
  misc_feature (100)..(100): n is a, c, g, or t
  misc_feature (105)..(105): n is a, c, g, or t
  misc_feature (108)..(108): n is a, c, g, or t
  misc_feature (110)..(110): n is a, c, g, or t
cccagatcatccccgcgatttcctgtttattgcattaaggcgccgggttctcgcgctcctggnccgnttattccgcgggggtcggcggggtcggcnnngngccgngcngnctgcgctttgtccgctgggcacactgcttctgggaggggcgggcagacatggtggcggcgccgcccctcctcggcctagcatgccgcgggcgctcgcggtacccggttgccgggtccctggagcggcagccccggggtgggatggggtcgcgccgaggcagcggaggttctgcgggcgactggaggttgtgcagtgttgcgtggacgaccagaggaacgtgcaggcgcggtgggcctcgggcctctgggggcgggggaacccttggtctcggaagtctgatgggcccctgcgggctctccggagagggggaacggggcggcgagggtggcggggtcctgtggcgccctgtgcttgcgggctgagaggcgctcgggtcgcggggggatcggcggaccagaacaggttaattggcaagaacctggacaagtcccgctgctgtgggcccctgagcgagagctttggcggggggacttggcggtcctgacggggggagaaggctgccgttctgaaggctcggaattctgcccaagattcgcgcgagaactgcgtgtgcctgcttcagggaagacgtgagaattttgcaggtcattttgcagggcaaagtcatcatggttgtaggtgtacggggagtctccagtgtgttgatcaggtgctagtcaggtgtgtgaaatgaacaggatgtcggctgttggtgttccattaagttggtagacaaatctgttactgatgatgtgagattgcaagagtcaacacactttagggtgaggaaaggactcgggggaacgaacgactataatggggtaatataaaca

SEQ ID NO: 676183 - DNA, 1109 bp, Homo sapiens
agggaatgttcttgtctttggcaaaattgtcgacggtgtgtacccgcaacacgcctttctgctcgaaccacgtttcagatgtccccagcctgtgtggcttcatatgggatggcgtctccctggcccgttccagggtgccaacgatgattcgtcaccagttcgaacccaaggctttgatacgactggtggtccatagccaagtgactgcggaagttcctgggggtgcccccaggtcaaggggcaagtcgttcggggccccgaggggccccataaacggggaacaagggccttgctgatttccggaaagcagggttggcccgggggcattagactttcctaccattgtggtcttgctgagcatcaacgtttgatcttcccccgacccctgaggcacgtacatccattcgagcttggcaggcagcacgctgctaacaacccaggccatagtcttaacctttgtgcttccccacggagcagttccactttaggaaagattgaggagcttctcagctggagagaacaggggcccccattcatgctcccctaccagttccaggatcggaggagatcgagggcattcctgctatcgctggtcaggagatgccatgcggcatcagtgaactaagcaggccattcgggaggcaagatagaaggagatacaaggaagagctttctgcattctgagaagcttaagacatactttgaagacaaccctagggacctccagatgctgcggcatgacctacctttgcacgccgcagtgagtgaagcccaacctgggccatgttccttactacctggttcctcctgctgtccgtggcctggtacgccctcacaagaagcggaagaagctgtcttcgtcttgtaggaaggccaagagagcaaactcgcagaacccactgcgcagcttcaagcacaataggaatacgaaattcatgacccacagctaagaccctcctgaggttgttgggcctctattggagcgtgagcacattgtggagcacaggcttacacccttcgtggacaggggaagggtctgtgtgcttactgcacagcctgaacagacagttctggggccggcagtgcaggatactcgtgcgtggaccttc

SEQ ID NO: 676184 - DNA, 254 bp, Homo sapiens
atgtgatacagaacacggttatggaatcatagtctatcatgactgtaactcaaggcagtcaagctgcggcgagatagaattggtggtggttttggactccatgattaagggtgttcacatttcacacactaatcccctatcagttgcacgtcttcgcaaacctgcatataacccgcaaaggcctcgtgatgtcctttggtcccaattagtaacacactcccgtccgtggccgtttccggagcacgcagcacggg

SEQ ID NO: 676185 - DNA, 635 bp, Homo sapiens
ggcacgtctggagctctggctcgtgcagtagcgtcacgcggaggggagggagaactcgggaacagttaccacctatttgcaatccaaggagaatataagacagagaagaaagtgtgaatgaattctcattgtgattagcaatagatgtggacacctctagtgatctgtgcctctcctacaactctcttccacttgacctctaaatgtggaaagtgtcccaggaatggtctttagaccttcttcctttatctacatttccctctccaagatgaatctgtgatggctctggaaaagatctcggaaaagagggaatatccttctgtgtgtgtgggcagagaagatgacttttaaaaattctgaaagaaatggacagcgtgtgtgtccatgatagagaagtggtcattttctaccacagggggagaatatcagtgctatggaatatgcgtgttaccactcaggaggaccttttacatttgggagatatagaggatttgatggacagacggtgtatagttgtgcccgtggaataaaatacaaaattacttgtggcaacaggagaaggtctgttaccagtctataaacctaaagatccatcagaaaacccaagtgggtgttcaaagggaataagcaaggac

SEQ ID NO: 676186 - DNA, 109 bp, Homo sapiens
cctcataggaatgtcacaaggctaaatgctttttcatacatatattttgccatcaaaggggacatgcttctgtgatatttgtctagtcatacatttgatgttttcttag

SEQ ID NO: 676187 - DNA, 219 bp, Homo sapiens
ggagcgagctgcagtgagccgagattgcgccactgcagtccgcagtccggctgggcgacagagcgagactccgtctcaaaaaaaaaaaaaaaaaaaaaaaaaaaaaaaagccccttttccccaatttttttcctttttttaaacttagggggggcccctctaaagcccccccgggggctttgaaggttgggagggggcggggtttaaacagggcggggc

SEQ ID NO: 676188 - DNA, 147 bp, Homo sapiens
ggctgtacggaggctgagatgggaggatcacttgagccagggaggtcaaggctgctatgatcatggcacctacactccggcctgggtgacagaacaagaccctgtatctataaataagtacgtacgtaaataacaagaaaaaaatgt

SEQ ID NO: 676189 - DNA, 1182 bp, Homo sapiens
  misc_feature (619)..(619): n is a, c, g, or t
agcgggtcagacacgctgtgacggctgcctgaagctactgagtctcggtgcccctgcactggtggttgtggtcagtggcggcgccgcctggatcgggcttctttctacctgccgacggctgcctgttggcggcttccatggctggccgggcgcggaggtcgagctcgcgtgtgtttcggccaggtcgttcatgggatcttttgcccgagcgcagcagaatggatcgctcttgcgaccacctctagctaatctggatcgcggcctaatcccaagtgtgccctgggcgttgactgcggatgtagagtcggatgccccggggagaaatggcagcttttccgaagaagttcagactctggacattactacacctatggagaagggtccagttactgtgccgttgtgcggcaagacggagaccgttggcgaaaaaaaagaggaaacacatccgaagtgtacatgtttttccatgacgaggaacctccaatctgcaagttcgcttttagctcacagaataggtttttccactacatatgtagtcaagtgcttcgtccaatcaaaaaggggaagagatactcgaatcatgcttgtggtttggtggaaacacgatgtagaactaganaacgttgataggaatactgggaaatagtaagatgtatattagacctataaatattggaacgaaagagctctcgatagggtactcaaccgtaactaaaggagaaatatgatctatcactaactataacttgggagaaagacgaagacatggcttttaaccgcgaggaccatttggacatagggtgaaataagctagaggccacggacaagacatttgttgctggaaattgcacgttggagaaacctacaaaggcatgtgagccacaatttgcttcccgagttgaaagtcaccctttgatgtgtggcaggaatgaaagaccgcggataggaagagcgtgtacccaattaccccaaacgtaacctaatccgggcggtgagataagacgcccacattacagaaggagaatgtatgagccaaaattataggccaagcccaggggggccttggaagggtaacaaggactgaacgttaaaaacgtcccccgattttaaaaaacacggatatgaaagaacattactttgaagagggcacctaaagggaaatcggattggcgttccgccaat

SEQ ID NO: 676190 - DNA, 378 bp, Homo sapiens
agcctcggaatgtgtggtgttatggttgttgtaaatctggtaatgcgagcactggtgttgtgcagaggtaatctttaaactctatgaatgcctttgttgagattcagaccaaaagaattttgctttcgctcctcccttggtgacttgaatcaagggccaagtgatatgagaaaatcccaacacgaacttgcagtagaagttggcaagacctagaaagttgcagagctttgtcagagcggttggagatggccaatcctaaatgacttggatcttggctagatccagatgcacccctgttcgtcaataatgtatgccagatactgaacctgggtcatgccaaaagtgcatttctccagattggcataacaccacacaatt

SEQ ID NO: 676191 - DNA, 962 bp, Homo sapiens
ttcagttgaatgtaactgcttttgtattggagagagtgactatgaacttgaaaccccaaaaaaaaaaaaaaaaaaaaaaaaaaaaaatagtttgggggccgccgcggcccctcgaaaaagcttccaaaaacccatcgcgttgggggcggcggcgggccccagatcggctacggggaccggtgccatagcgtgtaccaaaggagaaaccccgggtccggacaacgtggctgggactctctcaccccaatataaaaagaggcccggggcggcaaatccgaggcgttttgtgaaccaaatccagagtgaagtcggaggctcatcaggggatctccatcaaagagggacgtccaggggagccggaataatacaaaattataagccccccgcccgggggaccaacctcaccccacccagcggaacgaacaacgtacacgcactcgcgacacacagctggaagcaccaccaaacaggcgacggcgtaaaaccagtacaacccgacaccacggcacgctcaagccacgatggtccaccacccctcacgcagcaaacccaagaaccacaacaagctagcaacacacgcggcgcacaacgaacaaccgaccacaccgagcacgaccgaacaaatcaacaccgccggaaaccacacccaaggatgcgccggcacacaacaccaatccgaaacccaaccccgcgcccaacagcacgcgactccagtggacgcggcggcaacgacaaactaggcgacccaaccgtggcacgcacggcaccccccaccgcacacaaccccaagcgagcaaaccggaaaagcggcaccaaccccatgccaccccgacaaacggcacgcaccgggaccacgcgggacaggaaaaggagacagcaatccagcccgaccgcaccagcacgatacaacacccgcacacgcgacggacagacagggaacaagccgccacgcacggcacgcc

SEQ ID NO: 676192 - DNA, 436 bp, Homo sapiens
  misc_feature (96)..(96): n is a, c, g, or t
tgtggatgatgcaaagaatgcgtgattgcatttcacataaaaatagattaaaataactcttcaagtattgcacagcatcttaataaaaggatacanattatacagtatataaaacaggtgacagtgccctctggaggatgctactgaaatttggcaccagctacctattcaagaatgctgcaggtaaaattgacattctttcatgtatcagaatcagtgtgcttcgaaaaatacaagtgcaatgaaagaactgttcacactggttcttcaaacttgtcctcaaaaggcagcctttgtagtactaccagcttaatgcaaggatgtagatggggtagtattggtttttataattacaggagagataggttgcaataatcgaatttatgaaaagtgttatcaattggttactaagaatgtcgacgcggccgcgaattta

SEQ ID NO: 676193 - DNA, 944 bp, Homo sapiens
cggcaaatagtaggtctggagagcgaactcctgaaggctccattccattgtgagcagactctccctctggaatggggccactgttcatgaatggactgcattgcatgaggatggacactgagataggacattcagaacatgagaaatatgccaggcatccccctcacacgggctggatggggtatccagctggctttgccactgtatgccaacaggatgaagaggtcaaaagtaccctgagcatgctgcccatgatgctgccaggcatggctgactgtagccccagatgtttggtgtcgggaggactcctcagataccaccatggcaaaccacctgcacttccacatgctcacggagtctctatcacagcacaacgacacagtggtacggacagtgactagaaaagactgcggaaggacaagccgagatagccaatgatgtgaatcaccagaacactatacagactgaggacaacgccctggatccaggatccaatacgcctgcatcaggatatgaagcctgacaatgaactactagtagtcactgtggcatttataacacacattatctacaaatccccagagaagttatactacttgaaagtatcatttagccaaatccattgataccatcttacccatgataattgggcataggttctgaaacaaccaaggaacgaagagcagaaacacatcggaacataggtcaagtctatgaagaacactagaacgagttgcagacaaggcaatgacgatcacacaggcgagtaaaacgccacaaaaactaccagccagaagacgcttgaaccacaagagtgatgaaaaaggacgctcacacggctagaactgaagcacagatgcacagtaaacgaaattccaataatatggcgcgacagacacagaaagcattaggcacacaagacagcgacaggtgagattagaaga

SEQ ID NO: 676194 - DNA, 323 bp, Homo sapiens
  misc_feature (249)..(249): n is a, c, g, or t
  misc_feature (286)..(286): n is a, c, g, or t
ttgcccttgagattctgaccggtgggaacgaacttcaggctttcgcgtcaatcatcttggaccagttaccggtatgaccctcacgacgtccctcgacacgaagttcccggttctgagatccgggagcggttgacaccacggtaagcctgtcggtgatctcgccggggatcttcggctgatgcttccacccggccggtggaagtttgatggcagcgtagcgaggatcgaccttgccctgcagccacgtgnaagactgggaagattactctggtcctgccaggtgtancggaactgggcgggatcggtcccggcgatgtcgtagt

SEQ ID NO: 676195 - DNA, 1154 bp, Homo sapiens
tggagtagccaacgtgccatttatccatgtgaatccactatcactgatataaacatcttctagctctctattactaatgtctcacctactagaatctccttaattataacattcacagccacagtaactaaatcatagttttattatctctcttcgaaaactcagttatccccatcttggcctatcatcactcggattgacggcagacgcagtcgcgagaatcgccctgagacagcaaggcagcatatctgttccttagtatctatcagctcccgtagtttaggacttgccccttgtgcctcccttagcttcgatcagcacctaaaatttcaacacatcggcagagcaacgccctagggcatccacgtaccacacatttcttacatagcgtccacaccgtctatcgtgtcgcctataagaaaccctactcaaaatcttcctttgtagaccaatagcggaatcgtgtacactatttgacctacgcttttacctatcgaactatgcttttctattagcgtactagatagtagccgtacctttttaccggggagctttctcaaccttttagtgggaacattcccctttagaaaagccccctagtggctcgaataggcacccccacgagtccggccttggggaggttccacacttaccgtcatcgtttggtcgcggtcacgatgagctccttttgaacaaaccttaccgtgccaggaccttattgcgtaattaaacttaaccggtcccatttcatcacccttcattttcgtcgaaaaccacgcgcatgtaagcctaaaacaaccacacaattaagggccctttacccacccgtatccctttttgctaagcttaggttcctccttaattgacggttcattttaatttttactctaacacaaatgatcttcccattctttgggcttaaccgaacaacacatcgaggaacccttacacaaattccggcttccaattttggacaattaaccttccttttccaagactccacagaccccaacattttaggacccactttcggtttcagatataaccccaggccccaattttcttccaattcccaaaaatagtcccccccctttacaagtcgtttctcacaccggggatcggtcaagggtccatttttcctccacttcaaattc

SEQ ID NO: 676196 - DNA, 251 bp, Homo sapiens
cacgaggggacaccaggcctgcctcgtacggtactttgcctccagcctctccggcaacttcatttaccgtgctctgcccgaccagatgaggattttacccccaatgtgtgcatcgctgacacgtgcggactcggaggtaaatttgacccccatcttctgcctaaaactgcaaattgtagaaacacactcagagctattgcagggtgtgcccgatctgacctcgcctcactgaggaaaatacttgaccctag

SEQ ID NO: 676197 - DNA, 222 bp, Homo sapiens
gccgatcttatgatgaggaacgtcactatgtttcgtgtttgttgtgtttttgtgaatggagtctcgctatctctcccaggctgagtgcagtggtgcgatcttggtcactgcaacttccaccttccaggttcaagtggttctccttcctcaggagtattatgtttaaacttcttttgttttatcacaatatatatatatcttttttgagatggagtcttgctc

SEQ ID NO: 676198 - DNA, 354 bp, Homo sapiens
cgcccattgtcctttatggtagggttgcttatacttatagatgcatcccctttgtatacatttccaacccattaaatccgagatactgtgtggctgctgctggaagggcgatatgtccagtctatagtaagcttgtcagtgacatctaaagttcccttgaaagtgcatttcaacttgatcttttctccacgcataacctcgaacatgggcatctgcacgaatctccaagaaaaagccgatatgtccaccctggaagaccagatcgctcaccagagggtagagagcgcagccgcggcttacagctgctcctctctactgcatcccggcatctcttcagatgcatgcacaccgtgt

SEQ ID NO: 676199 - DNA, 576 bp, Homo sapiens
tgggattccccaagcattattcaaaaacgggacagcagctcttttcactgggtaacctcttgtgggcaagagacaggaacttatttacagtagtcctgtgggttccgggcccatataatgaattatgtatgaaggcttgtgctgctggtggccttgaatctctcagatctgggtcttttagccttacggccaagtagcttttattctgggatgacagactgtacttttggtactttaactttctgggagtcatttcctttttcacagtcttcatttttctttggcaaattaagcttctttcacctttccggggcgatttctggagtgtagtctggtgaagctggggttaacttctccaaaatagtgtcgggaaggaggtttcttttcttctgttcgatgaacagctcctcggcgtcgcttcctcttctccttcaggagcgttttatccctggcgcagggtctcccggactcgccggtcctcttctctcggttccgccggggcgctggcgaaagtcagctcctcgggggcctcatcgtcaaactcatcgtccccttcctcgttttcctccaggggct

SEQ ID NO: 676200 - DNA, 191 bp, Homo sapiens
  misc_feature (64)..(64): n is a, c, g, or t
  misc_feature (117)..(117): n is a, c, g, or t
actacgcgcatattaaccaggctgtctcatactcctgaactgatgtgatctacccgccttccanagtactgggattacaggcattagccacataataatttaattattatttaaatnatttttaattttaaaaatttaaaaattattttataatttaaaaattccttggcttatttatactccatggacag

SEQ ID NO: 676201 - DNA, 281 bp, Homo sapiens
tgaacattcgtgtccagcagagggaagacggataacaaagcatattcacaagtagagatgagttgtgtcaggttatcctattgtcgtgctataacacattaccacagatctagtggtctaaaacatcagaaattcattctgtcccagttattgacgtcagaagcccaaacaagtcttgcagggctgaaatgacggtgtgagcagggctggttccctctggaggctccaggggagaatctgtctccttgactttctcaggtctcggtggacacgaatgttca

SEQ ID NO: 676202 - DNA, 139 bp, Homo sapiens
ttgctacaaatatagaaccccaggaattactgtgtgcaaccagtcagagtttcaatcagtgaccacagaatgataactatttacccagcttgtcaaggtagccagtagttcctgggagcttctcacctgatctggaact

SEQ ID NO: 676203 - DNA, 450 bp, Homo sapiens
cgtgggccctagttttagaagtatcactagcatcacgcatagccgtctgctgattgaaatcttcctggatagcgttcccccacgagtttcgtaaggcgttgagatgctctgtgtactttcacacatattctgtcaatcatctgctgggtggtgctggtgacaataccctgctgcaggtggtaggcctgctcttgaaggtatttactagtctcgtgatttcgtagcaggtagtgtactatcttttgcagagcgtcatctgttgataccgggtttgtcttacgggcttgagaagcatcatacataggacttgggataaatcttaatgtgtagttctttgccaaagcaagaggtatatgctgaaagccttgtgccgtgatgtagttcttgtcccatattacagtcctgagcttagtgttgatcggcagtgctatcgaaagttctaaaactagg

SEQ ID NO: 676204 - DNA, 483 bp, Homo sapiens
ctgccctgtctggaggagctgagcccagcgccactgctgcccacctgaggtccgaggtgctctgtcagtggagcaggagtgcagggtgtcccagaggtggagaggaggagaagcccggggaggaccatcccaggaatgtaccccctcccctcacccacatccttttcctctgcttcctgcctggagcggaaatcagctcagatttggccgaggaggtgagcggaagcctcgggcagcaggggcctgggggcgggctggggagaagcagccgcctctgcccagagtaaggagcaggcttcgggtgcgaaggccttgggcatccctggactgcccagtcggggcctcctgtgggtcccgaccacaccagggctgccactgcccctggtacccctaaggactgcagcccaaccccttcagcccccagcaaccccagcaagggtgtcatttcacagatggggagggggaggctgagacggggaggcc

SEQ ID NO: 676205 - DNA, 352 bp, Homo sapiens
ccccagttacacagcctgctcatggctcgtgatcatattaccataggataggagcatacagtataaatcgaaagtgacagctagataattcgatacccatagccatataaagtgacagtactgtgcttgctaagttggactctaggatttccggcgcgtaggtggtcagcatttcatctcgataagcacgtgctgtgtacaacctgtaagcacttccctgggcctgttctcccagctctgccacctcgttgctttgcctgatcctgcgaaataggcgtcaccaccatgctgttcaatccctgtcttgtgctgttctactgaagctgtcttacttgtggcgctcctctcccat

SEQ ID NO: 676206 - DNA, 1093 bp, Homo sapiens
ggctgccatcagccgcccgggagatatccgccgggggagaatagggttgcaccatcccaggaagctgctgttagctcgccgtgtcctcgtgcacgccgcaccgttcgcccctgctgctgtcctgcccttcccctagctgttacttccgtgtccctcgctgagtggtgtgttcgtgctgtgctcccagtgagtgctgtgaacctgctggaccatgagcgtgggcttcatcttggggccggccagctggcctatgctctggcgcggtggcttcacaggccgcaggcatcctgtcaggctcacaagataatagcccagaatccccagaaatgaacctagcccacggatgtccgcgctcaggacagatgggtgtgaacctgacacgcagcaacaaggagacggtcgaagcacagacgacgtcctgctttctgtgctgtgaagccacatatcatccccttcatcctggactgagattggggccgacgtgcaagccaagacacatcgctggtctccatgtgcggcctggattgtcaaccagtcagactctgctggacgaagaacgcgtgatggcactatccagagccagaaccccaaaacgtgattacgcaatgcagtgaccaaacaacaccctgtgcgtacgtgacacgcgaaaggcggcatacagcgtacagccaccggagacacacccaaatagcccccatggcctgcgacacggcaatgcagggcaacgcatacacctgcgaatctaaaccatcaatgaaagccaaacagatgagagcaaccgtcgcaagcagagagcgaggcaaaacaaggacacaacaaaaccgaaaataaccagtacacaaggagaggtcaacaacgccgcaccaacaacactgagcacccttgcccccatattgcaccatttacacattggagcctcatgggtcacctgaccacttgggaccatcacactgagtacaggactggacacacaatctgcgcgatatcagaccaccactggtagtcccacagtggctcaccaccacaactactccgaggcagaccaccaagcagtcatctcacgcccaaggtaacaagacgtagcccagaaaag

SEQ ID NO: 676207 - DNA, 383 bp, Homo sapiens
atataatggacattctgaaagcctaggctcatggaggattttgcgactgtacattaaggcatgtatatttgacacaacacggggatacgaatactaacagctgctgctcttggtacactctgatattgtcatatagattttatgctattgctgtttttgaaccactaattgcataacccaatgatgtgacgatattgacatttttgagacactgctataaagtgtttgacctatcagggatgtggcagatgtaagtgatcactgggatgttttcacttccttgacctggaaggatcagttcatgttggtgctgagctgaataggattcattactatgggcaccatggcattcccatgcagttactgttctcaggctgccatgt

SEQ ID NO: 676208 - DNA, 1219 bp, Homo sapiens
  misc_feature (273)..(273): n is a, c, g, or t
  misc_feature (291)..(291): n is a, c, g, or t
  misc_feature (300)..(300): n is a, c, g, or t
  misc_feature (607)..(607): n is a, c, g, or t
  misc_feature (931)..(931): n is a, c, g, or t
gactacgcgtatgctggtacgacctgctggacctatggactggatgcttgaaagagtccgtgtcccgtaattgcttaaggatgtatgtctgctctgctattattcatgagacggcgtgtctccacaaggtacctcttgggaaaaacgacccttaacctgcgtggtttccaggcctaagaggccttcgatcaatgctttctacgaagataatggagacatttgcagggattgagtgtcgactcttctttaccatatgagataggctactactgnccaactatcatatagatncgtcagcgnttcgtcgagtactgatccatatcgctcacccgaatagtagaagaagaaaacgagacctatgaagattgggtattaaggacgtttgtatttctcatagtacatatgacaaagagtaaagccaaaggacaagtgaaaaaaagtactcggcatacagggttaggttcgcatagtggaatataatccccaagcaatttttggcaatggagtatatggataagatacttctaattcgttaagattgacacgttctatgaatctaaggtaaggtgttcgattgcgggtgcggtatctgatagagtgattggtnatgctcgtaggacacgtagactggaatggttgtggcaccttacttataataaatgacctagcgatagtggaagatttgggcaccgaagtggcagtattaatatggttaggtgattcccaaacataaaaatgacatggaaagtaaaacgaaaatgagagcgattgagactaagagtaacatttgaggaccacattgaatttttttcctttcaatattcttaatcagtgtcgtaacttaggaataggataacttttgaactaggaaagttggaggtcgggcttcgtataaattataaatttaacctgagcttggggttatagacantaaagtcaaatttttacttaacccaaagggggagtacaattctttacccttggtcatcctaagcgtcgatgacagcctactattgtggacctccccgtttaaaggcgtcgttactctccacggatcaagttaataagatcaacgcaataactttaggactttgatccaagggccttctattaattgcgtgagactttccccaagctaactctccatgcttgtgcttacccgaaagcacactttaacgttcactttgccggagaataacaaatttccataggagaagaa

SEQ ID NO: 676209 - DNA, 771 bp, Homo sapiens
atccctcttgtgctgagatgatagcaagtggcctgagatttaagcaagctcctggagtctgatgcttctcgcagtactctgatcgcaactaaacattgtctatgttttattagaaactagtgaaacaaagcaggttgtcccacatgtataaaatacagggcgagctatttagttttctttacagagaagtgatcctgtttaaggtcttgtaaggccctctggtttggacaaaaaccctcagtagagacgaagcgggaaggactagattagctgaaagctatgatgatataaataaaaacagctctctatcccaatacgcacctttgtatttccaagaactctgtctatgttattaaggaaaatgtcagattgtgatgtattaagccagtacttcaattgacgggttgacttgggatgacatattacatgctgtagtataaacatttataattctttttccttgtcttgagtattctctgtctctgagataaccttttactgggctttatctagatagctgttatttgattccgagtggcaaaagatgttattcattacggtatggctataagctgtatgatacgagaactctttttggcataaatatttgtgtccccagtacctcactgttcggatttgactgcctgaatatgtttgcggacatggtcctgtttgggggtcggtgaccgtggcctctagttgtaatgttaattaatcttggttctaactgtgtgtgcatgttgtgcgacctggagcttagctggggagacc

SEQ ID NO: 676210 - DNA, 553 bp, Homo sapiens
aaggctgatctagaggacccccaagcagtaatacagactcaataagatcactgcacttggatcttgaaatagcctattagtttccttatctgatatgtcgaccagacttaaactagtgggatctaggcatatatcttttataaaaacctggtgctcattaaggaaaggaaaatattctgaaataatcgaaataacctttagggcattggaactccattttaaattaaaaacatttgtgcctactattatacttatgctaaattatacccaggtaatagtaagtaaaataattttgaagttactattgtactaagaaactatagagattcttggcagtgtaagacaaagtccttaaatcacatatatataacaattgagacttagtaccttatgacttaaccattttacactgagatattaattggacatatgagtgtacatggcaatcacgtgatccaagtatttgagacgtgaatatctaaagtaagagaccaatttaaaacataactaatgagcatcatctcataatttggtaatactcatgtaaaaagct

SEQ ID NO: 676211 - DNA, 93 bp, Homo sapiens
ctagaagattcagcaaagtacttttgtgctcttgggggaccacccgggcttttacgttgggggatacgtttgacctacaccgataaactcact

SEQ ID NO: 676212 - DNA, 127 bp, Homo sapiens
atagaagccatgcagtagacaagatccaaaatacgtggcatggtggtggtgtcaccgattatagagatgggacagatactaattattactcagaaaaaggatttcctaagagtggctgtaaactgga

SEQ ID NO: 676213 - DNA, 898 bp, Homo sapiens
  misc_feature (897)..(898): n is a, c, g, or t
gccccactggctgctctgaaaagccatctttgcattgttcctcatccgcctccttgctcgccgcagccgcctccgccgcgcgctcctccgccgcgcggactccggagtttatcgccagagtccctgaactctcgcttctttttaatcccctgcatcggatcaccggcgtgccccaccatgtcagacgcagccgtagacaccagctccgaaatcaccaccaaggacttatacggagaagacggaagttgtggaacgaggcagaacaatggaagagagccgcccctgctaacgggaatgctactgaggaaagtgggggagcaggatggctgacaatgaggtagacgaagaagaggagaaggtggggaggaagaggacgcgagcaacgaacaaggttgatggctgaggacagaggatggatgagtgaagatgagtgaagctgaagtcagctacgtgcaaatcgggcagctgaagatgatgaggatgacgatgtccggttccgaggaagcagaagaccgacgaggatgactagacagcaaaaacggacgcgtaatctaagaaaaaaaggccgcgggacctatacccttcaattcccgtctcaaaaattaaaggtggtgctttctataggagagtgcgcctccaccgtggtggtgtccccgcagatgaaggggctctcacaaccaccaactgtaattgccacgggtggaatagaccaagttccggcccgctttttctaagtgtgacaggattgtgtgactcatactattttggcactgtggcccccttatagttgtgtacagactcgggtgacatcaagtggggcgttaccacgagagactataaagaaacctccctgttgttagtgtcgcaccttttttctttataacacaatactgcctnn

SEQ ID NO: 676214 - DNA, 206 bp, Homo sapiens
tgtctagagatcctgggtgatgattggatatctgtaagatattggattgtgaagtgtcctggtcatctgagagtatctgtgacatcttagtgtttgtttgttttttcctcctcttttttgggggggagtgtgtgtggggatggaaaaaagcgtggtttttaattcattaaacagtggttaagcccttaatggggaggacggacgga

SEQ ID NO: 676215 - DNA, 125 bp, Homo sapiens
gactctacggatgcttagaatcgtggtgctgctgcccttccagttactggggacagctgaattccagcacaccatggctaatggagctggggccttggttgatgagctcgatagacatggtggac

SEQ ID NO: 676216 - DNA, 173 bp, Homo sapiens
agctcccccagcaccgaagactgcgatgacttctgcactgacccaggggctggagcgaatcccagaccagctcggctacctgggtactgagtgaagggtcaggtccttggcgtcaactggggacctggggaatgattgaccaggcagccaagtcccattctttgaggctggtc

SEQ ID NO: 676217 - DNA, 542 bp, Homo sapiens
  misc_feature (54)..(54): n is a, c, g, or t
  misc_feature (78)..(78): n is a, c, g, or t
  misc_feature (128)..(128): n is a, c, g, or t
  misc_feature (176)..(176): n is a, c, g, or t
  misc_feature (187)..(187): n is a, c, g, or t
ccccttattcaaggcccattgcaaggttcagaactggctttaagacccctgttnagtcccatagtgatatagaccccntaaaaggcccaaccaagccaccattgtccatggatgccaaaattttaggncagccataatccaagacccaattgacaaatgtgtacctctgtggcacncaataatttancacaattacaattactgataacgttcactaagttaaatcagaattacaggagtttcccatcattttggaacacataccaataacatttatacaaatatagcccaaagaaaaccaaacatcatttcatatttgacaatgctccctgtctaatttttataccaaataagccaaattatgtcatttttggactttaggggacctaatatcttaaaggattaattaggtcaggaaaagacaatttataaattgattttggaaagtttgtaaaatatcaaaggtttaaaagacttgataccatgaaataggatcataggtcattgtaaaataagtcattcatttaaccaaagtgataagg

SEQ ID NO: 676218 - DNA, 340 bp, Homo sapiens
ggtcaactttcctcaaatcaaaaacaggcagggacaggtagtgggctcccaacgtttgcccccgcctggtttttttaagttattttggacctttttcagcagcaaaacccaactgggttttcagctttatccccgtttcttgcaagggaaaagcccttatacaattgggcgccttttggtttttcccccttgagaattcaaatcctcttttggattgtttttccaataatttgtaaacaaatttatttttccccgcctttttttttttttttaattttcagggcaagttttttatactgcccttatttgtccaaataaagattttcccctatgccggtta

SEQ ID NO: 676219 - DNA, 364 bp, Homo sapiens
  misc_feature (35)..(35): n is a, c, g, or t
  misc_feature (333)..(333): n is a, c, g, or t
  misc_feature (343)..(343): n is a, c, g, or t
acaccacacactcggacctacctgagagtagcggngtgggaaaacggagaggttgaggaaaagtaactaatgggtactaagcttaatacccgggtgacaacataacctgtacaacaaatccccatgacacgagtttacctgtataacaaacctgcacgtgtactgctgaacttaaactaaaagttaacaaaaggccaggtgcagtgtttcacgcacgtaatcccagcactttggggaggctgacatgggtgggatcgcctgggggtcgggagttccgaggaccagcccggaccaacttaaattgccaaaaggtttagcttaggatgttgggtnggcaggttantccccagcttcctcttggggg

SEQ ID NO: 676220 - DNA, 390 bp, Homo sapiens
cacacccatgcttataggaagattgtgtgggacccgcattgaaacgctggccttgatacatggaggaatatcattgccagcaactgcactcaggagcccgaattcaggagtgaaattgccacttctagtcagccccttatttcctatggaaacgacgccttccgcccctgcgccatgctgtcctcacataaagctgaatcagggtcgccgacactgttcacgttggtccatcttcttcctttgctgctgcagtgagcatccttccacgccatcaggaaccacttgatttccaacagcttcagtccactaaccttctgaggacttttttaaatgtagtaccacaaagtgacaattatggcaggcctgccttgaaagaattgtcatttttac

SEQ ID NO: 676221 - DNA, 835 bp, Homo sapiens
ctttggccgggcgctgcttcttgtcccttctcttgggtagtccctgaatctttccacggtgtccttcgtgtccccttctctgtctctgcacatattggggcttctttggctgccggtatcctctcgctcttgctctctcgtcctgtcccttctggctgcatccctggcccccctccctggtgtgattcctctggtcctgggcccctccattgtccccctcggtgtcctgctcgtctggtagtccggatctattttccgtctgtgtgtgggtcctcggtgccgtgctgaggtcgcgtctgatctatctcccctgttccctgaaattcccccggaggtgtgtgaggtctcgtgtagccccggggccgcatgactgcctctccgagcggtagtctgtcaccgtctgtccgtctctccatcagttcctagaactcaagcacagctcccgccgatcctggggcggcgcctgcctctccacccgcagcctgcggaggcggggacttgggtgtcggcttattctgagggtgatcttttgttttccgagtttgggattcggctgcttgggaataataagaaaatcgcgtttgtacccttcttccgcctccacacgatgacgaagctgtttgtaatcggatttgtactctattcataatgcttatgctattatagacggtaataataagaaccaggtaagaaactgcttgcttcgtagttatcggttggaatgtgcagtttaaaggcgccagatcgcttctcgagatccccagggtttactttgtcatactttactggagaaaaccggtcaacgtttgtccagcgcatctgtgagcccccataa

SEQ ID NO: 676222 - DNA, 701 bp, Homo sapiens
atggcacatgcagcgcaggttggtctacaagaggctattcccctatcatagaagagcttatcacctttcatgatcacgctctcataatcattttccttatctgctcctagtcctgtatgcccttttcctaacatcacaaaaaattaattaataatacatctcagacgctcaggaaatagaaaccgttctgaatatcttgccggcatcatcctagtcctcattcgccctaccatccttaggcatccttttactataacagaggagcgtcaaggatccctccctttaccattcaattcattgtgccaccaatgtacttgaacctacgagtaccaccgattacgggggaccttaatcttcaattcctacatatttcccccaattatatccttagaaccagggcgacctgggatcctttgatgtgtgacaattcgaggtagtactcccgaattagaagccccccattcgtataacttattacttcacaagaggtctggcactacaattgagcttgtccccaaattagggtaaaaaaccagatgcaatccggagttctaaaccaaaacattttaacgcgttaaaggccggggttatactaggggcagtgtctgaatctgtgagcaaacaagttcatgccatctgtctagaattattccctaaaattttgaatagggccgtttacctatagaccttacctttagagc

SEQ ID NO: 676223 - DNA, 899 bp, Homo sapiens
aggtttgtctggaggccactgagtatgagacacctgcaggccctgtcttccttccccagtgccccgaggaggagcacagctctcttccagtgctacatcaggtgccagtggtgacgtcttttcagttgactgataaaatggtcttcctcttcctctggctccatacagggatgcaggtgctactctcttcttgcaaggcagcagcagaacctagctgggatgataaggatgatagatagttagccgttcagatcgtgcctcaaactcagagccatgcccatcgtgcgcttgggtggtaaacacacattcgactgttcgtgagatccgatggcgctaggaggtatggagcacgcctgttgagtgtgatcgctactttcctaaggccgcctgcgcgaaagttgtgcccgcctgcatgggcagggcgctcgtctggactccgtacgtggccgctcgacggtgtcgagacgcatggtcacttcgatgtgttgctcggctctgccgtgtagcgcagccctgccctcaatggaccgatgcctgcccgacttcacgcggccctgcctttcgtgttgcctggactggtgagatacagaatggtttgcttgaagacaacgacgtgacatcatatgccatactggaggtccgtccaagacttgagcacaggtacttataccatagctgcttacacattcggagcctgacttggaatggctccgagtaaaatagatgccagtgggaagggtgagcgtttccagtctcatgggaagctcccaatgcatgctggcttgctggtcaacaagacttgggccacaggccgggagagtgcacgtaccaagctgtgtgatctggaggacagccacgggcctgagatgggtttcatctgaaacctgaccgtggcttgt

SEQ ID NO: 676224 - DNA, 110 bp, Homo sapiens
ccaatctcctctttccggacgttgtctgcaggctctcagaatggtccagcgtttgactataccgacgtaggccttcctacaattacatgcctctaacataactaggctgt

SEQ ID NO: 676225 - DNA, 173 bp, Homo sapiens
taagttggcaaaacagcctcacatttattataccaacaatcaatgtatgtggggagatcaaacatattcttctcataggggaaaaatagcaaatacaactgggagaaaagtgactttgtgaacgccacctcttcctcttccctgacttctccccaaccacttagtagcaacgc

SEQ ID NO: 676226 - DNA, 1328 bp, Homo sapiens
ggctacttccgggaggtgcttgtgtgccttgggtgcgggagctacaggggcccagggatagggttataatggtaagtgactatctatcaagcatgttccgtgggttccaggcgccgagttcttagaacgccaacattaccaattgtgtttcagccagagggctcagtgactcataccaagatagaatatcgcttatagaggctattaataccagggtggccttacatacagtaaggctgtcgagtagggggatacagacttgtgtccagtcaatttgtgcaccaacagcagagaaaagttagcctggacagaattgatttggtattcctagcgacagtgcactcgacttgattcaaggatgagactgtatgaatacttggtcttgtaggtgtactgaccctggaatactgacaagctggtagcaggccaggattccactaatttgttacacgcaatggtgcgaccggcatcaatgcatgggctacgagtaaaatctggcgcacatattatcaaacggcttaatgggcgtattgcacggatttccctggtggtagcaattgcttggtgttaagagaagaaactttgtcccgtattaatttatcctacgaggggtcctaaccaagcaacaggaaatgcgtgcagcacattggagggggccatccttgtgggagatgggatggtgctaatgaatgtgctaaatcttgggtaattcagcagttgaccgtagtcagaaggggcccttccagcggttattagtaaacggtggttgaagtgcgcgttgacagtgttttcacataacttggtgggggtttctgcccacccgtccgcacactgggcaagtcggggaaaggttttcacagcagagaacctgggagtcttgaaacccatgtgatccgcctttgtgaacgtggaataaggggtgcaaaggcacgcacaacggttggaatcttgggagcaatttcggccacgacaggactgacgatgggagaccccttgtacacgttttgaccagtttgtcccttggttgttgaggatggttacgtaatcaaactttggactttgtcgaagaaggcgtttttcggacaaaattcggaacagttgtgcgaggtttatgtgtgaacagggtttgaaaaagaatcgtttagagagtttcagggtgaatttgctctatcgtgatgaagacaagaagaattgggatagcataagatttgtaatgggatacaaggtgaaggagagggggaattaaaggaattgggtgggagtgagtgaaccggaagatcacgggagatgtacaatataactgtggtggatcggggtacaaaggaaac

SEQ ID NO: 676227 - DNA, 885 bp, Homo sapiens
cttctctgctgaccctctctcgtagccgcctgccggcgccgcatctgccaaaatgtctacagggtccaactgctgccactggccgtaatcgaagactcagcagacacacaatcacgtagatgcggtgggtggaccataatgcgagtcccgtggacccaggttctggcaccagagaccagaagctctctgagtcagacgaccgttgcatgacgccacttgcaggcagcgcccttctcaatttgaacgcgagcgcagccaagtctgacgcgggcaccctatggctggcaccgcaattgcaagaatgtggcgccatcgggcattacttgttcatgagtcctctacatacatcattaatcatccggtgggtcgtctccttcgattgaagaaccagcgagaacctcacaactgctgtcacagacacacctccttcaaaagactctggactttacaccctggctcatcatgatcaagcttacctacgtgtcactccctaacaacatctctagtgtgttaactgtcaccgctcgacgttacataggacacgtgccctttgttatcactatgcacctccaaatcagacggcggcccgtccaattttgacagggcaccaaccggcatccacgcctgcgccgcttgaccggcacccacgtacagaatgccaacctgaggtacgcgtcccactagggccaggcccaaagacccgggccaggcaacggacgaccactcgaactggaaagagccagagtcgccacaaaaacaagccagccacggacaacggcccggcacaagacacaaaacccggacaacaacgcgacgcggacacgcacagacggagcagcccccaaagccgacaaaacccgcaccaaccgaccagactcgctcacg

SEQ ID NO: 676228 - DNA, 771 bp, Homo sapiens
gcttagggctgtggactacctctcccgtgaggtagtgcgcaactccaccctgttcgcggggtcttcgaacgcgccgtggagccatgtggacgtggtcagcacaggggccggcaccacggggttatcgaagcagctgtcaagatgcttggggtccctggtgttgaggagaaaatgcactggctgccactggtactcctccggctgctcaggtccccaatgctccggggccatggaggtgcttcctggccggaatgtgactacttgggagtctcggggagcctgcatgtggctgagggtagccaccggggggcgcccttggaacatcgccggcacttgttctccgagacagtggaggcagccacgcggaggggcgcccaggggagggacgcttcgataccaaattgcctcgacggattgccacttgtgggacgccttcctggtcccgaagaaacactccccaggacaggacagctggaaacggggtccccagcagggccggacatgggcaatgtgcagcactggaccgcaagacgctggtgcgttcaattgctacagcaacgagtacagtccaacaaggatgcacggacctggtgggaaaggtgccccgtggccaacaatattgcaaagacagtcaggcagggctgacggtcacgaaaggtgcagaatgtcacatggaaaagccacagactgggctgggcacacggcactctatggtggaacggcagacagccgaaaccacaagtgatgtaccgggtcgtacatgctgctgat

SEQ ID NO: 676229 - DNA, 324 bp, Homo sapiens
agcatcaatagaaaattgctgtaggtaaatctcacatttatccgcaacaaaatatagatttaatttttagcttaaactttgtttctaccttatgttagtggacctcagttatccatctgtaaatttctttctattcggctaaactaatctaacagaataatttggctggccaattagaactgccttttccagttggtctcttcaacgcttccctttaacctcttcacctgctcattgtgattcctcctttctagtctaatatcttcccagcgtcatactcgtttttaacccttcaacatttccttcctggctctgcaacaaaac

SEQ ID NO: 676230 - DNA, 357 bp, Homo sapiens
  misc_feature (19)..(19): n is a, c, g, or t
  misc_feature (34)..(34): n is a, c, g, or t
  misc_feature (48)..(48): n is a, c, g, or t
  misc_feature (62)..(62): n is a, c, g, or t
  misc_feature (215)..(215): n is a, c, g, or t
  misc_feature (234)..(234): n is a, c, g, or t
  misc_feature (256)..(256): n is a, c, g, or t
  misc_feature (299)..(299): n is a, c, g, or t
  misc_feature (313)..(313): n is a, c, g, or t
gaaaataagcaacctgatngtaataggagaaagnggtaacctgttttnactttgaattcttnccggcgcgcggtggctcacgcctgtaatcccagcactttgggaggctgaggcgggtggatcacgaggtcaggagttcaaaaccagcctggccaagatggtcaaatcccgtctctactaaaaatacaaaaattagccgggcgtggtggcgggcnctgtaatcccagctacttnggaggctggaggcagagaattncttgaacccagggaggcggaggttgcagtgagccaagatgcgngccatggcacttcngcctggggtgacagagtcgagattcctcttcaaattaaaaaaca

SEQ ID NO: 676231 - DNA, 248 bp, Homo sapiens
  misc_feature (44)..(44): n is a, c, g, or t
caggagcttcccttcccctagtccagattggcaggtggattccnaagtatacacatggcgaaactggatcctggcacgaggagacccaaacgctggtttaaagtacttttcctggagggggccttccagcatgtgggcaaaaccttcaatcagggcaaaattttcaaatgaacattttttgccatcccctaactgcctgcacctgcccttcagggaaatgggggtcattaaaggaaacttaaccttta

SEQ ID NO: 676232 - DNA, 930 bp, Homo sapiens
gcgactctcagctcgtcggggacggtaggcggcgcacccgggtggtctgctcctgtcggccttcgcctactctagatcgcctactccacatatgcgatgaggtgcagtctccatcgcagcgatagtgccgagagctggtagtcctagtatcggcaaacgcctggcgcgccagctctacgtggtctggaaacacggacatccaagcccgcatggctgcagaatgcacaagtgtagaagtgagccattggggagtgaggaggatgtactgctgtgcagtacctatcttgcaatgtgaagtaggggcgctgtggaatacgaccggtgtgccaacgagtggcgtggagggttctggtaaggaacattgcgaaaacccgcatgagctcagttggcatgcacatggtatcggcaagcgtggcacaccgcatatacgactggcattcttacacacacgcattggagaccatgactccattcacccatggtgccaatgtggacatgagttgctaaggacaatagagctagtggcaccgaaggggtcaacttactacctatttgtggcaaggggaagatacatatagacactttgttagttgtgggatcacgaagtaaacctgcaagctggccttggactcaggctgcaccgagtcgttccgagggacttctatggtgtgtatgcacatcacgactattggttgagtggcgaacctggttactgagagtgtcatcctaacccatgtattcactggactcagtactcgtcagtttgacttaatcgtgcgaaagacaagtccaaagcctgtgatgttctccaattttatccacatgataccccaaggtaatccacaaggtgtacgtatggaaggcctaacaagtccaatgctgcaagcaacgaaaaacagcctggaaggcactctgattggggccttcatg

SEQ ID NO: 676233 - DNA, 193 bp, Homo sapiens
cgcggcgcagctgcgagcaggccataccacaggcaatgctcgcctgtgttggctcctggctggacagggaaaagtgcaagcaatttgtggatgcagcacacgccccagctgctgaccctgtgtgcccaggtggctgggatgcccacaccacctgccaggccctcggggtgtgtgggaccatgtccagccctct

SEQ ID NO: 676234 - DNA, 340 bp, Homo sapiens
agctacccatcatgtcgatcggtgccttggccagcgggcccaccagggcgatctcggcggttttcttcagtggcagggtgtcgttctggttcttcagcagcaccaggctgcggcgggcaatgtcccgggcgtcgctgcggtgtaggcggctttcggcgttggtgtcggccgggtcgtcctcggccttgccgatgcgcacgtaagggtccttgaacaggcccatgtcgtacttggcggccagcacttcacgcacggcgttgtcgatgtccttctgttcgatctcgccggacttgagcagccccggcagctccttgccgtacagcgaatcgttcatgctcat

SEQ ID NO: 676235 - DNA, 423 bp, Homo sapiens
aacgcaccgagttgtatgccatgagccggattttccagcagcaggtggtcgatgcactgaagttcacctcgttcagccagccccaaggcgtaccgggttatccatgggcgaaaattccggtgtttgacccgccgcaaaaagatgacctgtaccccaaccgtgccctgaatttcgacgggctctacgagcaaccccacgacaactatcacggctggatcggcggtgacatggccgacaacgcctacaccgcattcgacccggtgttcagctcctaccacgccaatatcgaccggatgctggaggtctggatccgggccaatccggcggcgcagtacaccacccaatgcctgctccagccgttcgccgggagtgaggccagcaccgtgaccttcaccagcgccgatgcctggcgctatagtcgac

SEQ ID NO: 676236 - DNA, 392 bp, Homo sapiens
agcactgtaagttagtcgatctccgaggcaggtcctccgtgactcaggaagtagatcttataccccttctcatcgtaggctaagaggtgggtcacgtcccaatccccggaggtgatggactggatgttgtcgatagctgctgttgggctgggacgaggacaccgtgatgtgatagaatttccctcgtcctccctgggggatggctctgatgaagaaaaactttcggccatccggggagaacacaggttcttcattctgtctgtggcgccaggcctcactttcatcctcgtgtttcttcgtgcagacccccgtggtggcgtcgcagagggtgaggatggacacgttctgcgcccggttcagccaggtcacggcgaccacggtgcgttggccca

SEQ ID NO: 676237 - DNA, 165 bp, Homo sapiens
aaatattatatatatatatatatatatatatatatatatatgcttaacttccccagtgttttgccttgaaccccttagggaaaattttgtttgtttttatgttttgtaattttttaaattaagtaaagactgggtccaaataattgcatcccacctgggccgtga

SEQ ID NO: 676238 - DNA, 288 bp, Homo sapiens
tactagtaagactttcttcatgaacactaaatatgacatgatattacacatttgtgatcttatatttatacaaaataatgagtgtatgtgtgtatacacgtagaaagatactgaaagggccgggcgcggtggctcacacctgtcacaccagcactttccgaggccagggtgggcggaacacaaggtcaggagatcgagaccatcccggctactacggtgcaaccccatctctactaaccataccaccccttcgccgcgcgtggcggtgggcgcctgtcatcccagctc

SEQ ID NO: 676239 - DNA, 499 bp, Homo sapiens
ttaaaaaaccttgaaccgcgcgaattccttaaagcttttggaggctttcttaaaaaatcccggaaacttaaaattccccaatgggggggtaccctcaaacttggcaaaccccaaggggtttctccccaaggttagaacttgtttttaaaagcgggtttttttcacaaggcgggaccttttaccccggggttgccctgggggttggtccctgacccaaatttttgggggacctcagagaaaacgggttattcccaaccacttttggccggggtccaaaaatttttgcccccggggtctttaaaccccgggggggcccaaaaaggggggaaagggcccaaatggcggccccaaaacctttttttttttttttttttttttttttttttttttttttttttttttttttttttttttttttttttaatgattccaattattttaatgccatgtaagatgctattacagaaactgacagtgctccagttccagcaacacgaat

SEQ ID NO: 676240 - DNA, 130 bp, Homo sapiens
attgctatacgaggctagggctttctatagatgaaggacatgaaagaaaatgccacttccaaagctccacactccatcagattgacaagttagctgggatcagataataatggccattcaacgcctccgt

SEQ ID NO: 676241 - DNA, 1548 bp, Homo sapiens
cccagcactttgtggtggctgagtgcagtgtggattacttgagtgccagtgagattgagaccatgtgtgtgccaacatggcaaaaaccctgtctcgacgaacaatacaggaaatagcttggtatggtggcgcatgcctgtaatcccagctactcatggagtgctcaggcaggagaatcgcttgaacctaagaacgtggacgtgtttgacgctgtggccaacgactggtactacttgcagctccacgcctggtgtacaacaggacgacctccctgccttcaaacacacacaaacaaacaaacactacaacttgtcactttacaacacacctacacagttacacagattcggatccaagtgtcatcctcaaagtcaaaaagcttgcgccggagcagcacttatcaccaaaagctcaagcactacatactctcaactttgtgcacgacgtcaacatcatcgcgttcatcgctgagatatattaaccaatattagacctaccgtaccacacacatgcaccacctgacatttcacaccatacatcccattcattgcgcactgccttgtgcccacacataccaaccaagggtaatctcacccacaacatgcaaacaccttcgagcaattgttcatacactacacagttcacaccagacggccaacaatgtgcaaatgaatagtgaaacactaacactttaaaccccccatattcatttcatacagctcccacgttggaattgtcgtcccaccacgcatgatacgacggacagcaagtctaacctgggatcctattacacactaccctttcaagcatcctcatcattgaactagagcgagaactcagaacctgtaggacaacagagagtgcaagattcggtatacctctgtcaacgaggtcacatagagacacccgtgcatcaactggtccaagcttggtccttacacattggcaagaggaaaagtagaacaagtatagcaacgtaaactccccccaccagcgctccgctcacacttacaagaacagcatggtcagctattgggccacaaccgtcagaacaggcaagcacaaagagttatcacattagtcacagtgacattcagcatctgctacaccacgatcaacgcctttcagaccatacaaacacaggagaagaaaggtgaccagcaaagaaacgacaggagcccgcggaacaacaccgcggagaactcacgcaaaagctcaagtggacacagagagtcgacaggagaagagagctaaacaaagagacagggggacgggagcggcgggcaacagcaaagacaagacaggccagcaagccagagacagggaagccacgccaacaagacgaacaggaaacaaacgaaacaactacgaggagcaagcgcagcacgagaaacaagagagagagcagcgcgaccacacaccagcagcagagagaacacccagggcgacaccagcaagacgagaacacacagagagcagaagacagaacgagagagacgaagcgaacaaacgccaagcagcaccagacaagagagacagcagacaaat

SEQ ID NO: 676242 - DNA, 997 bp, Homo sapiens
aggaagttgtcctcttctctttatcgccgtctcgagggtgtctaatcctaaaactatcagcgccaggacattttagtattagaactacgccgcagtgacacccggggctctggcgcgattgtatcttctgaacagaactacgtgatgtcttgtagtgagaaaggatcctattctcgctaaggttaagaagcatgatggtttcctgtgctcctcttcgctttcccactccttctgccccgagcttctctttaatcagtttagaaagaacatttttgggcctgtgagacttctgataggtcatgaataggaagcagttctggtgtagctagtaaggggaaatcacatttgtgtacggggtaggaaagttgacgactataagtgaagatgtagattgtagtattttaaaattaggttccgtcttaactggattgggtatttgaggcagcatctcatatgtgttggacgtgacttaaacaatgtgtaaagcggctgacttggtaaatttattcttcagctctctggatcgtaattagaatactgttgtgggttgctcaacaagagcttatgtttaaaaaggagtaacttaatagaaaaagggagaccttgatttaggttgaaagggccaatattattcttaaaaagggtgggggcgtggcaaataggtatttaaatggcggcgggagggggagacatgggcggttaaggggcgcgaaaggaagatttgaaaaaagcaaggccccccgggagttttgggaggcggaacgagcggcgataaaacaacaaggtgtgggtggcggaccctagaagaggtcttctgtgagacatgggggagaacaaacgagtgtgggtggtacttcaaaagaaactaccattgaagggctgcatatgaaaccacagcctctgctggagtagtaagatacatcaggagaaaatatatcagtgagagaatcactcttgctttttctgggtaggtcggttgttttgtgtcacttgacag

SEQ ID NO: 676243 - DNA, 117 bp, Homo sapiens
ctttgcccctaccactgtgctaagattgcttttgttaatgtcttcagccagacagtcagtcctttcttgaagggggacccttcagtccacacatcttcacatctaccacattagcca

SEQ ID NO: 676244 - DNA, 384 bp, Homo sapiens
  misc_feature (384)..(384): n is a, c, g, or t
gctgaatatagcctaggtctcttagacgattacctgaagggtagcagacagttgacacataatgggctctacagagactaggcttatgataactcattctcatgtcaggacgtggatgtatctactagagcctatgacaccagcgaggacgatgtcttctactgggcagattggaaggtgtagataactgagcataaggagtgaccattgtgtgacacgagcttcatggttgaaatgtctatgccagatgaacttctgaccatggcagatctcgcgctggatcttactgactggctatgactcgtgactactatgctggctttacagactgggctgcgcgggacacttgacatataggttatcgatttccagccagatggcccn

SEQ ID NO: 676245 - DNA, 327 bp, Homo sapiens
tctggctctgtgtccaggctggggtgcatggtatgatcatggctcacggctgcttagacctaccggggctttggtgatcctcccacctcagcctcctgagtagctggtgggactataggtgctcatcaccatgcctggtcaatcttttggtgtttttttggttttttttttttttgggtttgggaaacaaattcgggctctgtcacccaggttgggaaatggtatggggggtgatctggggctcacgggcaaccttcaaccttccgggggctcaacgcagattctctgggcctcatatggtcagtttccgggttaccggagctcaga

SEQ ID NO: 676246 - DNA, 595 bp, Homo sapiens
aggcgatccccttagagtcgaccggctcgacgtgcacagctaggcgcgggcccgtcgtccaacatggcacgtgctcctgctcaatgcatctcatcaaacaagggcaattcgtcaagagtttctatgggagatcattaagcatccaccgaacccggcccatcccttcttaaagacagttacccatatggtaaactgctgattgtcgtaggggacgatgtatcataaacgtatcataaagcgtcaatgttttcaccacttcttccacttaagctctcaccacaaagttggagtgtttgttctttaatcgtagcagaattcatgttgctctgataggggctcttatcaaagcgatagttcttagtgcctcaatctagatcgtgcttagagcatgttaccgagtaagtgggtatgagttcatttccatgcaaaaaattttgagatccatgcatagtttcttcataatatgcatcttccatgaacattttgagcaccctcatacgttatctctattggataaatcctgatgactgctgattctcaggctctgtgtatattacgtcttaggctaccttccccaaacttgcatgtgtttgca

SEQ ID NO: 676247 - DNA, 127 bp, Homo sapiens
gcatgggacatcatcctcttcatcatcctcttacatcctgctgctgtacctggccatctatcatctacgccttcccgaactatgctgccatgcagctggtgaagcccttcagctgaggactctcctg

SEQ ID NO: 676248 - DNA, 266 bp, Homo sapiens
gtacaagttgtgcatcggtagaccagctgataaaaatagactcgcattactccgacacgttcctctggtgggtggggacaacgctctctacaccgacgggtggcacatttctgagattcctagagtcatcaaacttatagagacagaaagtagaacggtggttgctgagggctgggcagagaggggaatagggagttattgtttaatgggtatagggtttcagttctgcaaggtgcagagttcaggagatggatggtggtgatgac

SEQ ID NO: 676249 - DNA, 999 bp, Homo sapiens
gacgatgtgtttgttccgaggggcccccgccgacgattggtcccgcttactatgaagtataccgcggtccgtcgtgtgttgtgtctacacgaacgcgcggtgcccctcctccttgttgggtggagcacgcttttccgtttggacctgcatcgtggacacaacgactcagtaggtggtgggcgaaggaaaagacacaagcagcttttggggggcgagagcgcaccgctcattgtggtgctatgtgcacgtatttggctgtctgtctctctttgggagaggcgccccgcgctcgttatatatagagagagatggtgctctcctctgcccccccctccgctgggatgagacaccacctcactactagttcctcctctctaggtggcagagagctggtctttcaccgcgccgctggcccgtgctaggatagtgaagagagtagttcccccgccaccacccacgctcgtctgcgggggtgttcattgaccactcttcgtttcacaaaaagaattcttccgccgcgtccgccccctctctttctctcctcctggaggtgtgtatgaaacaatattgttgtcttgtctttattatttctgcggggaggacacccctctctctaattataaatcaacaagataggtggttgcccgccacccccgctttgtttctcccccgtctcttattcatgatccgcccccactagtcgtttttttagctgttgcgaagcaccgcgggggggaatttctttgatgaaacaacacaacactgttttgtcccccccccgcgttgacagaaacaagtgggtacctaccacacacaggcccgccccggtttgtttttattaatatcatcgttcgattactaaaaaaatgctggagaggggcaacacattttatgtgtccccaggccaccaacgtggctttttttttaaaaaaagaacccccgggggaattttaagatttttggaagtgtggggggaaaaaaaaaccaaggcgcccaaca

SEQ ID NO: 676250 - DNA, 210 bp, Homo sapiens
taagtgggaataatgaaggaaacctgttaaaaataattgaaaatgtgtggtggttttaaaccaaacttaatctcaaaatttgtggttcaaaaatagacgtgaatttcaaattttatgtgatttacatctccaatattttgtgaaacacatttgtggtgtgtcatcttaaaagtttcgacagattattataacacgaggtgtgtgtctcag

SEQ ID NO: 676251 - DNA, 252 bp, Homo sapiens
  misc_feature (37)..(37): n is a, c, g, or t
  misc_feature (70)..(70): n is a, c, g, or t
  misc_feature (180)..(180): n is a, c, g, or t
  misc_feature (193)..(193): n is a, c, g, or t
  misc_feature (195)..(195): n is a, c, g, or t
  misc_feature (220)..(220): n is a, c, g, or t
  misc_feature (229)..(229): n is a, c, g, or t
tcttcctcccaagtagctggaactacatacaggtgtncaccaccatgcctatttttttttaattgttttntagagatggggtcttactatgttacctaggctggtcttgaactcctagcaagtgatcttcctacctcccaaagtgctgggattacaggcatgggagcccctgcacccagnctcaatttttatntnctgttctttgatttccaaggaaatntgtttcagnatgatagtcttttttaccccacc

SEQ ID NO: 676252 - DNA, 378 bp, Homo sapiens
tattccacccaacggggtcactctgactcacagttcacgcctggctggcggaggcctcaggaaccttaccatcacagccgcaggggaagcaaacacatccttcttcacatggtggcgggagagagaagaatcagtgcccatagaagcaaggaagacccttataaaaccagcagatctcatgagaactgactcactatcactagaacagcatgcaggaactgctgatacagttaagtccacctggtccctcccatgacgtgagaattatgggaactacaattcaagatgagatttgggtggggacacagccaaaccatctcagctgtatagtagtaataataaatgaataatataacatgaactctaatttaattcttg

SEQ ID NO: 676253 - DNA, 427 bp, Homo sapiens
taaaaatggattttcgctcttattgcccaggcaggggtgcaatctcaactcactgcagcctcagcctcccaagtagctgggactacaggcttgcaccaccacacccagctaattatttgtttttttagtagaggtggggttcctccatgtgggtctcgaactccccacctcaggtgtatccagccgccttggcctcccaaagtgctgggattacaggcttgagcctccgcgcccaatggaagatatacagatttatatggccaaatatttcagttgctatctgtgatttttaattcttctcgctgtccccagcacaggctttctcagcctcagcgctactgactttatgagctagataatccttggtgggggaaaggagggcctgtcttgtgcttggtaaattgtgtgcagcagctctggcctctac

SEQ ID NO: 676254 - DNA, 171 bp, Homo sapiens
ctcacacgaattacggtacgttgggctttaacgatgcttgtggtccaatcccacatttcatcctcgtcagtgcaggacaagtagaggtgcatcttctctagtatcaatgtgaagccccacggtgttgggggctttaacttcttgcggattcccaacggtgaccggcgactt

SEQ ID NO: 676255 - DNA, 928 bp, Homo sapiens
  misc_feature (24)..(24): n is a, c, g, or t
  misc_feature (73)..(73): n is a, c, g, or t
  misc_feature (113)..(113): n is a, c, g, or t
  misc_feature (119)..(119): n is a, c, g, or t
  misc_feature (136)..(136): n is a, c, g, or t
  misc_feature (140)..(140): n is a, c, g, or t
  misc_feature (177)..(177): n is a, c, g, or t
  misc_feature (199)..(199): n is a, c, g, or t
  misc_feature (235)..(235): n is a, c, g, or t
  misc_feature (237)..(239): n is a, c, g, or t
  misc_feature (244)..(245): n is a, c, g, or t
  misc_feature (247)..(247): n is a, c, g, or t
  misc_feature (251)..(253): n is a, c, g, or t
  misc_feature (261)..(261): n is a, c, g, or t
  misc_feature (270)..(270): n is a, c, g, or t
  misc_feature (273)..(273): n is a, c, g, or t
  misc_feature (291)..(291): n is a, c, g, or t
  misc_feature (294)..(294): n is a, c, g, or t
  misc_feature (319)..(319): n is a, c, g, or t
  misc_feature (338)..(339): n is a, c, g, or t
  misc_feature (342)..(342): n is a, c, g, or t
  misc_feature (362)..(362): n is a, c, g, or t
  misc_feature (378)..(378): n is a, c, g, or t
  misc_feature (387)..(387): n is a, c, g, or t
  misc_feature (409)..(409): n is a, c, g, or t
  misc_feature (423)..(423): n is a, c, g, or t
  misc_feature (425)..(425): n is a, c, g, or t
  misc_feature (429)..(433): n is a, c, g, or t
  misc_feature (463)..(463): n is a, c, g, or t
  misc_feature (499)..(499): n is a, c, g, or t
  misc_feature (512)..(512): n is a, c, g, or t
  misc_feature (518)..(518): n is a, c, g, or t
  misc_feature (520)..(520): n is a, c, g, or t
  misc_feature (523)..(523): n is a, c, g, or t
  misc_feature (706)..(706): n is a, c, g, or t
  misc_feature (710)..(710): n is a, c, g, or t
  misc_feature (843)..(843): n is a, c, g, or t
  misc_feature (881)..(881): n is a, c, g, or t
tcttcatgaagacttaactgtccnagatgcttattttctggaaaatcttccactctgggtctgtgatgtaagnttgtcagcattcccagtttagaacgcaatgtttctagagncatatnggctgtttttttgatgntaanatgagaataagataaggcatcactttcctgtatccangataatttttaaaccaatcaantgaaaaaaacaaacatacaaaaaaggaaatgtcatntnnngtaannantttnnnttcccctnatgtggaanaantaagaggactactcagcnctntttgaagattgcctcttctacagcntctgagaattgtgttattnnacntgccaagtgaaggacccccncccccacatcccccancccaccccnaagcatggtcccttgtcaccangcaaccaggaaacngncacnnnnnaccccaccagagaccaggagggtttggttngctcacaggaccccccccaccccagaagattagcancccatactagacncatacncnacncaactaggctcatacccaattgatggttattagacaattccatttctttctggttattataaacagaaaatctttcctcttctcattaccagtaaaggctcttggtatctttctgttggaatgatttctatgaacttgtcttattttaatggtgggttttttttctggtaagatttagacctnaatngcatcatgccaacttgtgactttgagactattcatcaagaatgaggatatagtagccatgacatagcttgagctatagcctttaattccttactttggctatgggtggagggtgagtttgaagaggttctgantttcttgtaacctgggaaagccatgaccttggcccgantcttcagattgctttggtaaaaaatattggtggtggatctgaaaaaa

SEQ ID NO: 676256 - DNA, 812 bp, Homo sapiens
gggcctgcaaaggttcagacggtttctcctttgcacccaggaggaactttggctgcgagaatggggggatgtatccctcatgcagttggcatccaggcagccctctgcagcagcacaccctgcaggcggagttttcagaggatgcaattttggatcccgaattttgatgtaccttaaacttccacatcactgcaccctgaaacagagcatgctttccagggtgcagtgatgtggaagtttaaggtacatcaaaattcgggatcaatgcttgcatcctcagagcatgctttccagaaagtcacactctcagatctgtgtcaagttcaatgtgagccctggcaaggctggcatattaacacctgccttctggcttctgaaagtgagatttgtatatgggctgcactcacgcatatacgagttggtttatctttgtgtacatgactataacccagtgatgctgaggtcatgtgctggaatgctgtatttggaccacacatttcaaagttgccctatggaaatgaatcctacttagtgacaagtcatcaaatgtttgtcacatgtgatgaagacaaatatgtatacctggcatagagaaaaatatatacctggtacattggagaaaaataattacactttcaaagagaattccctttgcaattttatgtttggatcaccactgtaagcacactttatttgcatttgatctgtatttgtatatgctgatgcaatgataaaaatcactgtaatacttcattgtgttgtactggatgcaaagctagaaaatattgcaataaatgagaccgatgaaagac

SEQ ID NO: 676257 - DNA, 230 bp, Homo sapiens
gatttgccacatatgccactgaggaggaggtggatgcagccacgaatgcaagggccacacaaggttggattggaggagttgtggaagcacaagagagctgtcttaaggagaggatcttaaaggaccagatgcccactttacctatggaaagagaaatttggttggtggcattacgcgagagcacattgagagatatctcaccttagagtaatatattttgacacagatat

SEQ ID NO: 676258 - DNA, 801 bp, Homo sapiens
gggcctggaggctgctgagtgccgccgcagccgctgctacccacgcagagccgggctggcttcgcgggggcggcgggcggccgagccccgtggctgcagctcgtaaggggagcccgcggctgctgggagctgcgggcgctggcctgggtggggagccctggggctgtaccacacggcagcggtggcacctgcgcgcccaggacctccacgcagagcgctcagaccgcgcagctctccctgtccagccgccgtgcagctgaccctgtaccagtacaagacgtgtcccttctgcgagcaaggtccgagccttcctcgacttccattgccctgccctaccaggtggttggagcgtgaaccctgtgcgcaggggcatgaggaatcaaagttctcctcctacagaaaggtgcccatccatgggtggcccacgtgaagggagaaagctcgcaacgaagctaaaattgactcctcttgtcatcagtcaggcgccctcaaggacctacctggttgtcgcgggcagcccctggaagagatcatcacctactacccagaccatgaaggcttgtgaacgaggcagggcaagggagtgtgacccgagttcgagcaaataagtaactgggctcaatgctcaaacggatgaagtgagggccccagcaaagtgtaatggtggcgacaagaggccacggacgggaggagattgaagtggcggcacgtgggcgacgattggctaggtgcacctgatctcccgccaagtgttgtaccgcacgcacaccgaagctctggggtccgttgagtacatgttcc

SEQ ID NO: 676259 - DNA, 581 bp, Homo sapiens
  misc_feature (581)..(581): n is a, c, g, or t
cgtaaccggacatcccagcaactaatgcatgtgagttcactccgtgggctgatattctgggaggctgagcagatccgcgcgggatgatagtgcacctcgggagagtagcgatgccgtgctgagacatagggtggtgatacatgcgtagagttgtattgcgagagagattgttgagtgtcaggacggtgtaatggtgacgccgtggactgagactttcagccgatgtgtagaatgagttatcgtgggagggcgaggggtgcgagcgtggatcgtgtggactaacttgtctagcctaataaatagtattaagggatggatcaaactcatgtgtgatggcaaggagcgtgtactgtagacatggattgcgaaataggcgtgcagagtcgtgcatctatggaagctagtgacggttcgatgcaaggatgaagcgtctgattcgtagggagttcagtagctgggcgaaggtagagcaaggtttgtataggaaattgagagactggatagatatcaatgagagtgtggagcaagagaaggcttgttgtgactattttaaagagtattgctggtggagatgattgacn

SEQ ID NO: 676260 - DNA, 432 bp, Homo sapiens
gatgagataagcactggtggtgtcgtggcgcaggggtggtctcttctaaaaatacaaaaattagccaagcatggtggtaggcgcctgtaatcccagctactcgggaggctgaagcaggagaatcgcttgaacccaggagacagaggttgcactgtgccgagaatgcaccactgcactccagcttgggcgacaggagtgaaactccatcaaaaaaaaaaaaaacagaagttttttattaagagcctgtgtctctgaagagcactgattatacccaggttgtgtttggattctgatctccttgtctattgctgagggcagcattgcagccaacatttgtgttcctgtggtgaagggtgatcttttggtctcacattgtggagaggcccccgaccggttctcattagattgatttcaccgtgctttttccatccg

SEQ ID NO: 676261 - DNA, 150 bp, Homo sapiens
ctctcgctcttcaatactcacacacagcatgcgcaagaaaggaaaatagcaacagcaaaaccaggagaagactcattttaacctacgacagtgtttcaagggttccatgtaaactgtgattttagtggcttcttcctcagccccagaaat

SEQ ID NO: 676262 - DNA, 740 bp, Homo sapiens
  misc_feature (225)..(225): n is a, c, g, or t
gggctcgagtcgcgcacaagtgtatctcggtagcgggcgatcggtgcgagagagcgaacgtcccacgcgcgtataattacagaagcatatgctgtcaggaggataagagatgccgttcagagaaaataacataatgtaaacggatcctgtagaaatgcaagacccttagtgaataaagccaagagagaccatgtggcagatagaattcgctcgagcaggtccacnattgcggcaactgtaagttcaggtgagcaagctgcactcattgaagaatcgagacatgcaccaggaccatagcaagccgcgggacccagaacaccagtggacgagccagggaccagcttcagacatcacaatctctgattatgacgatgggcgcgctcccaaaaccaggattacaatagccattaatatgccgctgcctgtcctgatgggcacgctgataaaccaaggtcaccattttgcattctcgttagcacgcgattagtggaaaaagaggactgcgtgtctaaatcctctgggtatcaagtgtatagaatggagagctaggagattcgtgcagacatagtcgctgtggtgttaccaaagtcatgccgctggtgaccgccatgtgctaccataggtaggctcatggagacaataggggtcatgagggattacctacatgttgtgcttgcctaaggaacctctggagataagcaagcaatgatcctcacgtgaaacacgaagggataacaaaa

SEQ ID NO: 676263 - DNA, 346 bp, Homo sapiens
agtcctgtttgctgaaaaaagctctggggctgtttgaggctttggaatgctctttggagggttaactctgcctgtccccagggtttgctccccctgccaggcaagggaacaggtcctcccaagggcctttgccttcatttttcctgtccccttccggggagctgggactttttagtgcatcagtggcctggttgccaggggttggggtccaggcatttgtggactcaaggagtccagggggcggtgttgcgctgcctcttgagcagcctcgggcctgtttcctttgctacatgtgatgattttgaaatccaggcagcagggtggaataaaccctgttggtttgtca

SEQ ID NO: 676264 - DNA, 1313 bp, Homo sapiens
agcggggtgttcctggagtgttctagtgtcggagttggtgtgcagtgcaggtgccatgggccctgctatgagtgcacactgatgtgggacgctggtggcttggtgccattgtgcctgagctgctctgtggcctgcctgacctgctctgaattgccatacggctgggggatcctctgagaccattcttcaggataatccatgagcagcactcagtgatgctggtggtgcttggggggacgcatgcttggaaggacgttactaccacgtggagctcaagataacacagtggcacaaggggcatgtgacacagcggtgaaccctggagcaggggcttctagaacatgtttgatgctgcaagtgttgacgaccgaatgacttgtcattgctgactccattgttatagtggcctgacgagcataccgttggttataccagatcatgttggaatttcgcaagatatgagcagaaactttgaggtgaattagttacttggttgggcaacaccagtaattactccccagtggcagagcgattacggattgctatcccattggcgtacgcataactatgacgagacaggggtacacattgaatgtcagacgggtgatgcaaacacgatagccagcacggtattagtggagagacacgctaacaccaggatatcactacagtgtgactagcaactagccgcaaaggttagtacgacgagaagtggaagctcgtagcgagttcagcagataggcagaagagagagcgaacacacgcgacgttgggagtcctctcctggttggtcttagacaatcggacaagtgagtggcaaaacggcaagcgaattatagctcccattaggaccccacatggtaacaagactatcgcaagtaggtagtaccatatatagttggtcacacacatggcacaatacaaacattattattggacagtcgagggtaacatagtgaacactcacgacataacttatcgtacaacacatgggacagcataagagtagcagaatatcaagcagcattcgcatcaaattggcgcacgctagccaagcaaaagaggagcagaacaatctcatagtaacgtacaagcacagaaactaccagcagggtagtgataggccacacgaaattagaaatagctccatatggggtgcacgagacaagtaatgaaatagagcacggtatacaaaagaagaagtagacaggaatacgacggtagagatagcaatagcaagtaagaagagtagtgaataaacacaaaaggaaccagatagttaaaacaagtagcagaacaatagagctaaaaag

SEQ ID NO: 676265 - DNA, 248 bp, Homo sapiens
gccttcccctgtgtgaagaattccatcacgaagaatcaatggctgttaccacctagcagggaatatgccaccaaaacaagaatggggctccggcgtgggagaactggccaagaactcaaagaggcagcatgggaaccatcgatggaaaaaatatttacaatggatcagatgggaagctggtttgttgctggaggggctgctgtgggtctgggagcatggtgctactatggctggggggccagctggag

SEQ ID NO: 676266 - DNA, 559 bp, Homo sapiens
ttatgggaagatttattaatatcctgggaaaatatttattttcaaattctcatttgctgggtatggaattattgtgataaatccttgcctacaacaagtctaaatcttgtttgagagccatgggttaatggtgtcctcaatacactaatgatcggctaatgatacataatttgtaacgttgggggatacaaaccaatccagtatgtatagggttgagggcgaaatcctgggggtgatctagaggctacaaattaataagctgtataggggcacacaacaaatgatgcatctccatgcgagcgagggcttttacaggcacagtcattgtctgggaaaatggtttgatatatggctgaactagaacgttccatgtttgtttatgcagggatttggcttttaatattgtggatcatgaacatcttgggtggaatcagatcctggcacatagtatgacatcggtctgaagatttgggacgaggttttcaattgaaaaggcggcttagtttgaattattgcggcggtttgggggcacgagggggaattatccgttgaatttatt

SEQ ID NO: 676267 - DNA, 252 bp, Homo sapiens
atagaggataccgacgtagcccacctgtagttctagctactctggaggccgaggtgggaggatatgtttgagcccaggagttcaaggctgcagtgagccataataacacacctgtgaatagcgactgatagccactgcactccagcctgggcaacacagcgagacttccatctcaaaaaaaaaaaaggccagggactaataattagggaagggatatcaggggactcccttgcaattcagacattacttatt

SEQ ID NO: 676268 - DNA, 173 bp, Homo sapiens
ctcagtaaatctcaaatgtagccatgctgggtagctcacacctgtagctccagctactcaggaggctgaggcgagaaggtcacttgagcccaggagtttcaggctgcagtaagctatgtatcgcaccactcactgtgactccacgtctgggctgacagcagtgagtacccatc

SEQ ID NO: 676269 - DNA, 898 bp, Homo sapiens
atagaagactgtatttttactatgatatccattttccacgaatggtgattacaatatgcaaagagtcataaatatgccatttacaataaggaggaggcaaggcaaatggatgtacagagatatatgtacaacgagattttgtatgtctagtttatttataaggtaagttttagtagaataattctgggattgagaggatctaaaagatatgttctgtataaatattattggccaaaagttgtttatatgcagaagtctgactatgatgaataaatcttaggatgcttggtttaattaaacaaacaaaaatcaccaatatccaaggacatgaggatatcagggttgcaacaaatacggtagttagagagactaactctgccacttgtatgggtgaagctacatttcactctgtggtttttcatggatagtaccaggacttcaccggaaatattctttcagccataccatggtaaacatttcgtactaaatctttctgtaacacttaaagaattcccgtcattcattaccttaacagtggtcaaacaggggaagtcttaattgggtatcaatgagctatggttgcgcttgtcaactatttcaggttccacgtccaaccccaaatggtaccaactcaaatgtacagtagaacggaggcatccagaataagaacaataatcaggacaacagacattgtgtgggcgccctgttggcccgtagcaaaaatgtttaagaaacaacgggtgggggggcgggaacccaattgtaaaggtgagacatggtctggcggcttccctaaggacaccgcggtgcacatggcgggggttccaaccacaaaaaacagccgggggagaccggagttttgcgaacaccacagggggtcgggcacacagagcacaag

SEQ ID NO: 676270 - DNA, 2393 bp, Homo sapiens
gggcttactctcgggcagatccccacccccaccactcccacacagctcttcctcacggactgctaaaggtctcccctcccacctgcattgctctacaatctgtggcctcagcccttgccaactctgcctcttcccccgctgactggggtatcagtttatggtgccctgcaggaagaccctcttgttcctgtgggtgggaaggttctggaatctcagttgccctctctggagttggggagacataggcttttggaggacaagctttgcagagtggttcatggagtgaggtggtgggagatttctgaggtgcggtgcggtgaatggagcaaatcagaaccaccccttggacgttgatctcaagcttggctccagaactggcttttgaacggcctctgcagagatgtgggcagctggtcaggatggccattcgggctcagcacagcaacgcagcccagactcagactggggaagcaaacaggggctggacaggccaggagagcctgtcggacagtgatcctgagatgtgggagttgctgcagagggagaaggacaggcagtgtcgtggcctggagctcattgcctcagagatactatgggggagcagaggtggtggatgaaattgagctgctgtgccagcgccgggccttggaagcctttgacctggatcctgcacagtggggagtcaatgtccagccctactccgggtccccagccaacctggccgtctacacagcccttctgcaacctcacgaccggatcatggggctggacctgcccgatgggggccatctcacccacggctacatgtctgacgtcaagcggatatcagccacgtccatcttcttcgagtctatgccctataagctcaacggctttagctgtttgtgtgtctgtccagcccaaaactggcctcattgactacaaccagctggcactgactgctcgacttttccggccacggctcatcatagctggcaccagcgcctatgctcgcctcattgactacgcccgcatgagagaggtgtgtgatgaagtcaaagcacacctgctggcagacatggcccacatcagtggcctggtggctgccaaggtgattccctcgcctttcaagcacgcggacatcgtcaccaccactactcacaagactcttcgaggggccaggtcagggctcatcttctaccggaaaggggtgaaggctgtggaccccaagactggccgggagatcccttacacatttgaggaccgaatcaactttgccgtgttcccatccctgcaggggggcccccacaatcatgccattgctgcagtagctgtggccctaaagcaggcctgcacccccatgttccgggagtactccctgcaggttctgaagaatgctcgggccatggcagatgccctgctagagcgaggctactcactggtatcaggtggtactgacaaccacctggtgctggtggacctgcggcccaagggcctggatggagctcgggctgagcgggtgctagagcttgtatccatcactgccaacaagaacacctgtcctggagaccgaagtgccatcacaccgggcggcctgcggcttggggccccagccttaacttctcgacagttccgtgaggatgacttccggagagttgtggactttatagatgaaggggtcaacattggcttagaggtgaagagcaagactgccaagctccaggatttcaaatccttcctgcttaaggactcagaaacaagtcagcgtctggccaacctcaggcaacgggtggagcagtttgccagggccttccccatgcctggttttgatgagcattgaaggcacctgggaaatgaggcccacagactcaaagttactctccttccccctacctgggccagtgaaatagaaagcctttctattttttggtgcgggagggaagacctctcacttagggcaagagccaggtatagtctcccttcccagaatttgtaactgagaagatcttttctttttcctttttttggtaacaagacttagaaggagggcccaggcactttctgtttgaacccctgtcatgatcacagtgtcagagacgcgtcctctttcttggggaagttgaggagtgcccttcagagccagtagcaggcaggggtgggtaggcaccctccttcctgtttttatctaataaaatgctaacctgccctgagtttccattactgtgggtggggttcccctgggccaaacagtgatttgtctccctcaatgtgtacaccgctccgctcccaccaccgctaccacaaggacccccggggctgcagcctcctctttctgtctctgatcagagccgacaccagacgtgattagcaggcgcagcaaattcaatttgttaaatgaaattgtattttgccca

SEQ ID NO: 676271 - DNA, 2005 bp, Homo sapiens
gaagcaggctggtactgcctcagcgagctcttctcgcgcatgcgttctccgaacggtcttcttccgacagcttgctgccctagaccagagttggtggctggacctcctgcgacttccgagttgcgatgctgtacttctctttgttttgggcggctcggcctctgcagagatgtgggcagctggtcaggatggccattcgggctcagcacagcaacgcagcccagactcagactggggaagcaaacaggggctggacaggccaggagagcctgtcggacagtgatcctgagatgtgggagttgctgcagagggagaaggacaggcagtgtcgtggcctggagctcattgcctcagagaacttctgcagccgagctgcgctggaggccctggggtcctgtctgaacaacaagtactcggagggttatcctggcaagagatactatgggggagcagaggtggtggatgaaattgagctgctgtgccagcgccgggccttggaagcctttgacctggatcctgcacagtggggagtcaatgtccagccctactccgggtccccagccaacctggccgtctacacagcccttctgcaacctcacgaccggatcatggggctggacctgcccgatgggggccatctcacccacggctacatgtctgacgtcaagcggatatcagccacgtccatcttcttcgagtctatgccctataagctcaaccccaaaactggcctcattgactacaaccagctggcactgactgctcgacttttccggccacggctcatcatagctggcaccagcgcctatgctcgcctcattgactacgcccgcatgagagaggtgtgtgatgaagtcaaagcacacctgctggcagacatggcccacatcagtggcctggtggctgccaaggtgattccctcgcctttcaagcacgcggacatcgtcaccaccactactcacaagactcttcgaggggccaggtcagggctcatcttctaccggaaaggggtgaaggctgtggaccccaagactggccgggagatcccttacacatttgaggaccgaatcaactttgccgtgttcccatccctgcaggggggcccccacaatcatgccattgctgcagtagctgtggccctaaagcaggcctgcacccccatgttccgggagtactccctgcaggttctgaagaatgctcgggccatggcagatgccctgctagagcgaggctactcactggtatcaggtggtactgacaaccacctggtgctggtggacctgcggcccaagggcctggatggagctcgggctgagcgggtgctagagcttgtatccatcactgccaacaagaacacctgtcctggagaccgaagtgccatcacaccgggcggcctgcggcttggggccccagccttaacttctcgacagttccgtgaggatgacttccggagagttgtggactttatagatgaaggggtcaacattggcttagaggtgaagagcaagactgccaagctccaggatttcaaatccttcctgcttaaggactcagaaacaagtcagcgtctggccaacctcaggcaacgggtggagcagtttgccagggccttccccatgcctggttttgatgagcattgaaggcacctgggaaatgaggcccacagactcaaagttactctccttccccctacctgggccagtgaaatagaaagcctttctattttttggtgcgggagggaagacctctcacttagggcaagagccaggtatagtctcccttcccagaatttgtaactgagaagatcttttctttttcctttttttggtaacaagacttagaaggagggcccaggcactttctgtttgaacccctgtcatgatcacagtgtcagagacgcgtcctctttcttggggaagttgaggagtgcccttcagagccagtagcaggcaggggtgggtaggcaccctccttcctgtttttatctaataaaatgctaacctgc

SEQ ID NO: 676272 - DNA, 1003 bp, Homo sapiens
  misc_feature (926)..(926): n is a, c, g, or t
taagctagataccgggccggggttaaatcggccgaggcagagttggtggctggacctcctgcgacttccgagttgcgatgctgtacttctctttgttttgggcggctcggcctctgcagagatgtgggcagctggtcaggatggccattcgggctcagcacagcaacgcagcccagactcagactggggaagcaaacaggggctggacaggccaggagagcctgtcggacagtgatcctgagatgtgggagttgctgcagagggagaaggacaggcagtgtcgtggcctggagctcattgcctcagagaacttctgcagccgagctgcgctggaggccctggggtcctgtctgaacaacaagtactcggagggttatcctggcaagagatactatgggggagcagaggtggtggatgaaattgagctgctgtgccagcgccgggccttggaagcctttgacctggatcctgcacagtggggagtcaatgtccagccctactccgggtccccagccaacctggccgtctacacagcccttctgcaacctcacgaccggatcatggggctggacctgcccgatgggggccatctcacccacggctacatgtctgacgtcaagcggatatcagccacgtccatcttcttcgagtctatgccctataagctcaaccccaaaactggcctcattgactacaaccagctggcactgactgctcgacttttccggccacggctcatcatagctggcaccagcgcctatgctcgcctcattgactacgcccgcatgagagaggtgtgtgatgaagtcaaagcacacctgctggcagacatggcccacatcagtggcctggtggctgcaaggtgatcctcgcctttaagcacgcggacttgtccccatattccagatcttcggggcaggcggccnctctacggagggggaggtgggcccgatgcgggacctccttggcaacttccttcctcgggggcccttgtgtgaggccg

SEQ ID NO: 676273 - DNA, 915 bp, Homo sapiens
  misc_feature (915)..(915): n is a, c, g, or t
tggcgccgacggatgttgtccggtcgcaggtccagaagtccgggagtcctcgggtctgagaccgtgggaagtcgctggatctcagcttgatctctttggaagacagtaagagtaatgtcagatgcatgcgaggtggaaattagtagtgatattaccatgtgaatgcctggataggagggaatcgtgctctatgattgtgcctttccatgtgcctcaggtagagttcatcgagaggggcagattttgtattaaaagaaatggaagcggcgtaagcacttgagggagtcgacatgtgttaagtgaaatctttaaagggtcgacacaaagtgggatagaatggggcgagaagggtcattgggagtgtggaggggtccttacaattgggtggagcggattgtaggagataggctgtgtttgggtcgacagcaacgctgtctaaggttggcataaatgttttgggggagggatgcgatggataagggattggaatgggtttgggagaaaggcacaaaattcccgtgggggggaattcccttgaggaactatttcaattgcggtagtcaggaggggatattttggctcaaagtggttgggttgcccgcacccccggtaggatcgaaaacggaattttattggccgtggttgcgcaaaagctctttggatatgggaccgtgcccatcacaatctcctgtggacaggggctacacataagaggaagtttttcgagagcatcgtggacaatgggttgaggtggttcgagaccatatcaacgaactggttcaatatattaaggcccggaaatgttgatttgcaccacaaagtggtcggttcaacgtggttagggcgagtgggtaaaatcgcgaaaagaaccaagtgggtttggtgctgcggacaagagagagcggggcactaatn

SEQ ID NO: 676274 - DNA, 857 bp, Homo sapiens
gggcttactctcgggcagatccccacccccaccactcccacacagctcttcctcacggactgctaaaggtctcccctcccacctgcattgctctacaatctgtggcctcagcccttgccaactctgcctcttcccccgctgactgggcggcctctgcagagatgtgggcagctggtcaggatggccattcgggctcagcacagcaacgcagcccagactcagactggggaagcaaacaggggctggacaggccaggagagcctgtcggacagtgatcctgagatgtgggagttgctgcagagggagaaggacaggcagtgtcgtggcctggagctcattgcctcagagaacttctgcagccgagctgcgctggaggccctggggtcctgtctgaacaacaagtactcggagggttatcctggcaagagatactatgggggagcagaggtggtggatgaaattgagctgctgtgccagcgccgggccttggaagcctttgacctggatcctgcacagtggggagtcaatgtccagccctactccgggtccccagccaacctggccgtctacacagcccttctgcaacctcacgaccggatcatggggctggacctgcccgatgggggccatctcacccacggctacatgtctgacgtcaagcggatatcagccacgtccatcttcttcgagtctatgccctataagctcaaccccaaaactggcctcattgactacaaccagctggcactgaaactgactgtcgacttttccggcacggtcatcatagctggcacagcgctatgcgcccatgaaacccgctgaagagggtgtaaacaaagaccctggtgcatggccta

SEQ ID NO: 676275 - DNA, 1025 bp, Homo sapiens
cgctaccgctccgacgctggcgttagtcggcgaggacagcttgctgccctagaccagagttggtggctggacctcctgcgacttccgagttgcgatgctgtacttctctttgttttgggcggctcggcctctgcagagatgtgggcagctggtcaggatggccattcgggctcagcacagcaacgcagcccagactcagactggggaagcaaacaggggctggacaggccaggagagcctgtcggacagtgatcctgagatgtgggagttgctgcagagggagaaggacaggcagtgtcgtggcctggagctcattgcctcagagaacttctgcagccgagctgcgctggaggccctggggtcctgtctgaacaacaagtactcggagggttatcctggcaagagatactatgggggagcagaggtggtggatgaaattgagctgctgtgccagcgccgggccttggaagcctttgacctggatcctgcacagtggggagtcaatgtccagccctactccgggtccccagccaacctggccgtctacacagcccttctgcaacctcacgaccggatcatggggctggacctgcccgatgggggccatctcacccacggctacatgtctgacgtcaagcggatatcagccacgtccatcttcttcgagtctatgccctataagctcaaccccaaaactggcctcattgactacaaccagctggcactgactgctcgacttttccggccacggctcatcatagctggcaccagcgcctatgctcgcctcattgactacgcccgcatgagagaggtgtgtgctgcagctccaaggcataccgtgcttggctgaccttggccgacattcacgtggcctggttgcctggccagggtggattccctccgcctttccagccgcgcggacacctccgtcccccaccgcttgtcccgagagcctctcgagggccccggcaacgtggccggcctctcaccggcacgggcgtaagcatgcggccccagcatggccg

SEQ ID NO: 676276 - DNA, 459 bp, Homo sapiens
  misc_feature (351)..(351): n is a, c, g, or t
  misc_feature (356)..(356): n is a, c, g, or t
  misc_feature (372)..(374): n is a, c, g, or t
  misc_feature (382)..(383): n is a, c, g, or t
  misc_feature (398)..(398): n is a, c, g, or t
  misc_feature (408)..(408): n is a, c, g, or t
  misc_feature (412)..(412): n is a, c, g, or t
  misc_feature (439)..(439): n is a, c, g, or t
ccccacaccacctgagtcaccagagttggtggctggacctcctgcgacttccgagttgcgatgctgtacttctctttgttttgggcggctcggcctctgcagagatgtgggcagctggtcaggatggccattcgggctcagcacagcaacgcagcccagactcagactggggaagcaaacaggggctggacaggccaggagagcctgtcggacagtgatcctgagatgtgggagttgctgcagagggagaaggacaggcagtgtcgtggcctggagctcattgcctcagaggtgggacctggggagatgggcaggggttgggccaccatgggtacaggaagtaacaaagtnatctnaactgatatttctccnnnaccccctnncacactcaggacctntctttgggcnttancttcctttcttagttggtggagcgatntgtctggtaattccgataat

SEQ ID NO: 676277 - DNA, 122 bp, Homo sapiens
ggctgggtttgggggccaagtggcttgttcattccagcatctacatcataaaggtgggcccagatttcctgattcgaccacagtgctgttctacccacacaaaatccattcctgttttgttg

SEQ ID NO: 676278 - DNA, 1954 bp, Homo sapiens
  misc_feature (3)..(3): n is a, c, g, or t
  misc_feature (22)..(22): n is a, c, g, or t
gangctagtacgagctgggtgnaatcggacgaggcagagttggtggctggacctcctgcgacttccgagttgcgatgctgtacttctctttgttttgggcggctcggcctctgcagagatgtgggcagctggtcaggatggccattcgggctcagcacagcaacgcagcccagactcagactggggaagcaaacaggggctggacaggccaggagagcctgtcggacagtgatcctgagatgtgggagttgctgcagagggagaaggacaggcagtgtcgtggcctggagctcattgcctcagagaacttctgcagccgagctgcgctggaggccctggggtcctgtctgaacaacaagtactcggagggttatcctggcaagagatactatgggggagcagaggtggtggatgaaattgagctgctgtgccagcgccgggccttggaagcctttgacctggatcctgcacagtggggagtcaatgtccagccctactccgggtccccagccaacctggccgtctacacagcccttctgcaacctcacgaccggatcatggggctggacctgcccgatgggggccatctcacccacggctacatgtctgacgtcaagcggatatcagccacgtccatcttcttcgagtctatgccctataagctcaaccccaaaactggcctcattgactacaaccagctggcactgactgctcgacttttccggccacggctcatcatagctggcaccagcgcctatgctcgcctcattgactacgcccgcatgagagaggtgtgtgatgaagtcaaagcacacctgctggcagacatggcccacatcagtggcctggtggctgccaaggtgattccctcgcctttcaagcacgcggacatcgtcaccaccactactcacaagactcttcgaggggccaggtcagggctcatcttctaccggaaaggggtgaaggctgtggaccccaagactggccgggagatcccttacacatttgaggaccgaatcaactttgccgtgttcccatccctgcaggggggcccccacaatcatgccattgctgcagtagctgtggccctaaagcaggcctgcacccccatgttccgggagtactccctgcaggttctgaagaatgctcgggccatggcagatgccctgctagagcgaggctactcactggtatcaggtggtactgacaaccacctggtgctggtggacctgcggcccaagggcctggatggagctcgggctgagcgggtgctagagcttgtatccatcactgccaacaagaacacctgtcctggagaccgaagtgccatcacaccgggcggcctgcggcttggggccccagccttaacttctcgacagttccgtgaggatgacttccggagagttgtggactttatagatgaaggggtcaacattggcttagaggtgaagagcaagactgccaagctccaggatttcaaatccttcctgcttaaggactcagaaacaagtcagcgtctggccaacctcaggcaacgggtggagcagtttgccagggccttccccatgcctggttttgatgagcattgaaggcacctgggaaatgaggcccacagactcaaagttactctccttccccctacctgggccagtgaaatagaaagcctttctattttttggtgcgggagggaagacctctcacttagggcaagagccaggtatagtctcccttcccagaatttgtaactgagaagatcttttctttttcctttttttggtaacaagacttagaaggagggcccaggcactttctgtttgaacccctgtcatgatcacagtgtcagagacgcgtcctctttcttggggaagttgaggagtgcccttcagagccagtagcaggcaggggtgggtaggcaccctccttcctgtttttatctaataaaatgctaacctgc

SEQ ID NO: 676279 - DNA, 169 bp, Homo sapiens
  misc_feature (35)..(35): n is a, c, g, or t
gaacagcgccctacaccctatcaggctgaactggntagttatccctcgtagttagtagctacaatgaccaatgcagtgctgcgcccagaggcgtagagggacagcacggcctgaatggccacgtgcatggccggggtgttagaaggtctcaacacataaatctagagtc

SEQ ID NO: 676280 - DNA, 430 bp, Homo sapiens
cattcatcagaccgaagtaatcaagctccagatggtgctgcaaactaaacaatgcaaggacacgctgttcttccaaggaccttagatcacccccaggaggagccctaatgctgttcctcatctgatgtccctttcagcaggaaatagccagaaacagtcatcacccaaaaccccctaacagcaattagggtgatatttccacagctccagaaaagtttccatgtgtgtccatgtcattttttccaattcaacgagagacaaacaaccctggtgttcctccactcatcagagccatatcactgatacaggaaatataaagaaaaaatggtaataattccacgtggataaagtggagatcttcaactgggcattgtagatttaaatgtgtatgtgaaatacagattattccacagtgtgctatggaaaaaaa

SEQ ID NO: 676281 - DNA, 2163 bp, Homo sapiens
  misc_feature (3)..(3): n is a, c, g, or t
  misc_feature (22)..(22): n is a, c, g, or t
gangctagtacgagctgggtgnaatcggacgaggcagagttggtggctggacctcctgcgacttccgagttgcgatgctgtacttctctttgttttgggcggctcggcctctgcagagatgtgggcagctggtcaggatggccattcgggctcagcacagcaacgcagcccagactcagactggggaagcaaacaggggctggacaggccaggagagcctgtcggacagtgatcctgagatgtgggagttgctgcagagggagaaggacaggcagtgtcgtggcctggagctcattgcctcagagaacttctgcagccgagctgcgctggaggccctggggtcctgtctgaacaacaagtactcggagggttatcctggcaagagatactatgggggagcagaggtggtggatgaaattgagctgctgtgccagcgccgggccttggaagcctttgacctggatcctgcacagtggggagtcaatgtccagccctactccgggtccccagccaacctggccgtctacacagcccttctgcaacctcacgaccggatcatggggctggacctgcccgatgggggccatctcacccacggctacatgtctgacgtcaagcggatatcagccacgtccatcttcttcgagtctatgccctataagctcaaccccaaaactggcctcattgactacaaccagctggcactgactgctcgacttttccggccacggctcatcatagctggcaccagcgcctatgctcgcctcattgactacgcccgcatgagagaggtgtgtgatgaagtcaaagcacacctgctggcagacatggcccacatcagtggcctggtggctgccaaggtgattccctcgcctttcaagcacgcggacatcgtcaccaccactactcacaagactcttcgaggggccaggtcagggctcatcttctaccggaaaggggtgaaggctgtggaccccaagactggccgggagatcccttacacatttgaggaccgaatcaactttgccgtgttcccatccctgcaggggggcccccacaatcatgccattgctgcagtagctgtggccctaaagcaggcctgcacccccatgttccgggagtactccctgcaggttctgaagaatgctcgggccatggcagatgccctgctagagcgaggctactcactggtatcaggtggtactgacaaccacctggtgctggtggacctgcggcccaagggcctggatggagctcgggctgagcgggtgctagagcttgtatccatcactgccaacaagaacacctgtcctggagaccgaagtgccatcacaccgggcggcctgcggcttggggccccagccttaacttctcgacagttccgtgaggatgacttccggagagttgtggactttatagatgaaggggtcaacattggcttagaggtgaagagcaagactgccaagctccaggatttcaaatccttcctgcttaaggactcagaaacaagtcagcgtctggccaacctcaggcaacgggtggagcagtttgccagggccttccccatgcctggttttgatgagcattgaaggcacctgggaaatgaggcccacagactcaaagttactctccttccccctacctgggccagtgaaatagaaagcctttctattttttggtgcgggagggaagacctctcacttagggcaagagccaggtatagtctcccttcccagaatttgtaactgagaagatcttttctttttcctttttttggtaacaagacttagaaggagggcccaggcactttctgtttgaacccctgtcatgatcacagtgtcagagacgcgtcctctttcttggggaagttgaggagtgcccttcagagccagtagcaggcaggggtgggtaggcaccctccttcctgtttttatctaataaaatgctaacctgccctgagtttccattactgtgggtggggttcccctgggccaaacagtgatttgtctccctcaatgtgtacaccgctccgctcccaccaccgctaccacaaggacccccggggctgcagcctcctctttctgtctctgatcagagccgacaccagacgtgattagcaggcgcagcaaattcaatttgttaaatgaaattgtattttgccca

SEQ ID NO: 676282 - DNA, 2231 bp, Homo sapiens
  misc_feature (3)..(3): n is a, c, g, or t
  misc_feature (22)..(22): n is a, c, g, or t
gangctagtacgagctgggtgnaatcggacgaggcagagttggtggctggacctcctgcgacttccgagttgcgatgctgtacttctctttgttttgggcggctcggcctctgcagagatgtgggcagctggtcaggatggccattcgggctcagcacagcaacgcagcccagactcagactggggaagcaaacaggggctggacaggccaggagagcctgtcggacagtgatcctgagatgtgggagttgctgcagagggagaaggacaggcagtgtcgtggcctggagctcattgcctcagagaacttctgcagccgagctgcgctggaggccctggggtcctgtctgaacaacaagtactcggagggttatcctggcaagagatactatgggggagcagaggtggtggatgaaattgagctgctgtgccagcgccgggccttggaagcctttgacctggatcctgcacagtggggagtcaatgtccagccctactccgggtccccagccaacctggccgtctacacagcccttctgcaacctcacgaccggatcatggggctggacctgcccgatgggggccatctcacccacggctacatgtctgacgtcaagcggatatcagccacgtccatcttcttcgagtctatgccctataagctcaaccccaaaactggcctcattgactacaaccagctggcactgactgctcgacttttccggccacggctcatcatagctggcaccagcgcctatgctcgcctcattgactacgcccgcatgagagaggtgtgtgatgaagtcaaagcacacctgctggcagacatggcccacatcagtggcctggtggctgccaaggtgattccctcgcctttcaagcacgcggacatcgtcaccaccactactcacaagactcttcgaggggccaggtcagggctcatcttctaccggaaaggggtgaaggctgtggaccccaagactggccgggagatcccttacacatttgaggaccgaatcaactttgccgtgttcccatccctgcaggggggcccccacaatcatgccattgctgcagtagctgtggccctaaagcaggcctgcacccccatgttccgggagtactccctgcaggttctgaagaatgctcgggccatggcagatgccctgctagagcgaggctactcactggtatcaggtggtactgacaaccacctggtgctggtggacctgcggcccaagggcctggatggagctcgggctgagcgggtgctagagcttgtatccatcactgccaacaagaacacctgtcctggagaccgaagtgccatcacaccgggcggcctgcggcttggggccccagccttaacttctcgacagttccgtgaggatgacttccggagagttgtggactttatagatgaaggggtcaacattggcttagaggtgaagagcaagactgccaagctccaggatttcaaatccttcctgcttaaggactcagaaacaagtcagcgtctggccaacctcaggcaacgggtggagcagtttgccagggccttccccatgcctggttttgatgagcattgaaggcacctgggaaatgaggcccacagactcaaagttactctccttccccctacctgggccagtgaaatagaaagcctttctattttttggtgcgggagggaagacctctcacttagggcaagagccaggtatagtctcccttcccagaatttgtaactgagaagatcttttctttttcctttttttggtaacaagacttagaaggagggcccaggcactttctgtttgaacccctgtcatgatcacagtgtcagagacgcgtcctctttcttggggaagttgaggagtgcccttcagagccagtagcaggcaggggtgggtaggcaccctccttcctgtttttatctaataaaatgctaacctgccctgagtttccattactgtgggtggggttcccctgggccaaacagtgatttgtctccctcaatgtgtacaccgctccgctcccaccaccgctaccacaaggacccccggggctgcagcctcctctttctgtctctgatcagagccgacaccagacgtgattagcaggcgcagcaaattcaatttgttaaatgaaattgtattttgcccaaaaaaagcaaagagaaagaaaaaagaaagaagagaaaaaaaaaaagaggaagaaagaaagaaaaaaag

SEQ ID NO: 676283 - DNA, 139 bp, Homo sapiens
tcagagttatgcattcttctggctattaatctaggttcaagcaactcctttatccacagaaaaggaggttgaggtatgaagatccctggagcctagagagttctagtctagacctgggcaacatacgtgagatagaaca

SEQ ID NO: 676284 - DNA, 109 bp, Homo sapiens
aaatcaaaaattagggaaatcttggagggagtcctcaaggttttatttgctttgctgtgcttttggaggagggacgaccctcgaggacacaggctcatgtgtgggtctt

SEQ ID NO: 676285 - DNA, 2359 bp, Homo sapiens
  misc_feature (3)..(3): n is a, c, g, or t
  misc_feature (22)..(22): n is a, c, g, or t
gangctagtacgagctgggtgnaatcggacgaggcagagttggtggctggacctcctgcgacttccgagttgcgatgctgtacttctctttgttttgggcggctcggcctctgcagagatgtgggcagctggtcaggatggccattcgggctcagcacagcaacgcagcccagactcagactggggaagcaaacaggggctggacaggccaggagagcctgtcggacagtgatcctgagatgtgggagttgctgcagagggagaaggacaggcagtgtcgtggcctggagctcattgcctcagagaacttctgcagccgagctgcgctggaggccctggggtcctgtctgaacaacaagtactcggagggttatcctggcaagagatactatgggggagcagaggtggtggatgaaattgagctgctgtgccagcgccgggccttggaagcctttgacctggatcctgcacagtggggagtcaatgtccagccctactccgggtccccagccaacctggccgtctacacagcccttctgcaacctcacgaccggatcatggggctggacctgcccgatgggggccatctcacccacggctacatgtctgacgtcaagcggatatcagccacgtccatcttcttcgagtctatgccctataagctcaaccccaaaactggcctcattgactacaaccagctggcactgactgctcgacttttccggccacggctcatcatagctggcaccagcgcctatgctcgcctcattgactacgcccgcatgagagaggtgtgtgatgaagtcaaagcacacctgctggcagacatggcccacatcagtggcctggtggctgccaaggtgattccctcgcctttcaagcacgcggacatcgtcaccaccactactcacaagactcttcgaggggccaggtcagggctcatcttctaccggaaaggggtgaaggctgtggaccccaagactggccgggagatcccttacacatttgaggaccgaatcaactttgccgtgttcccatccctgcaggggggcccccacaatcatgccattgctgcagtagctgtggccctaaagcaggcctgcacccccatgttccgggagtactccctgcaggttctgaagaatgctcgggccatggcagatgccctgctagagcgaggctactcactggtatcaggtggtactgacaaccacctggtgctggtggacctgcggcccaagggcctggatggagctcgggctgagcgggtgctagagcttgtatccatcactgccaacaagaacacctgtcctggagaccgaagtgccatcacaccgggcggcctgcggcttggggccccagccttaacttctcgacagttccgtgaggatgacttccggagagttgtggactttatagatgaaggggtcaacattggcttagaggtgaagagcaagactgccaagctccaggatttcaaatccttcctgcttaaggactcagaaacaagtcagcgtctggccaacctcaggcaacgggtggagcagtttgccagggccttccccatgcctggttttgatgagcattgaaggcacctgggaaatgaggcccacagactcaaagttactctccttccccctacctgggccagtgaaatagaaagcctttctattttttggtgcgggagggaagacctctcacttagggcaagagccaggtatagtctcccttcccagaatttgtaactgagaagatcttttctttttcctttttttggtaacaagacttagaaggagggcccaggcactttctgtttgaacccctgtcatgatcacagtgtcagagacgcgtcctctttcttggggaagttgaggagtgcccttcagagccagtagcaggcaggggtgggtaggcaccctccttcctgtttttatctaataaaatgctaacctgcaaaaaaaaaaaaaaaaaaaaaaaaaaaaaaaaaaaaaaaaaaaaaaaagaaacaacaaaaaaaaaaaaaaaaaacaggaaaacgccacacaaaacgcacaacaaggggagcggagaacgacaacaccaccagaggacaaagaagaagaaaagaagagagcagaacaaagaggaccaacagaggaaagaaaaaagaccacaagacgcagacagaaaaaacgaaacaggagaagaaaaccgaccaggaaagaagaaacagggccaccaaagccggcgacaccaacaaggccacaaccaagaaacaacacagcagaagacaacaaacacccgggcaaccgagaaaccagacctgacacaggcaaaaaaaacccggagggcgcaaaacacagcgggaacagcagaacag

SEQ ID NO: 676286 - DNA, 381 bp, Homo sapiens
tgcatcctcacatggtgcagagagcaagcaggctttctgatgtctttctgagacgtagtctcgctctgttgcccagggtggagtacagtggcgtgatcctggctcactgcaacctccgcctactgggttcaagcgattcttctccttcagcctcccgagtagctgggactacaggcacatgccactgtgcctggctaatttttttgtattttttttcagtgaagacggggtttcaccgtgttagccaggattgtctcaatctcctgacctcatgatccactcgccttggcctcccaaagtgctgggattacaggcatgagccaccgggctcagcctgatgtctcttcttataaaggcgtcgacgcggccgcgaatttagta

SEQ ID NO: 676287 - DNA, 1486 bp, Homo sapiens
  misc_feature (835)..(835): n is a, c, g, or t
gtgaccttaaaacaaaaaaaaaaaaacttgggtgtttccacccccgttctggcctgcagtggtgaagggccctgagcagaaccaactgtggtggagggtgactgctgagctgcgcctgaggtttctcctccctgtctggcctgggatgtagaactgtgcccggtgtgctgtgaacccaacggtgtgcatgcctgtctgtgtgtggcagtttgttgtgtgcctgctggctgctgttttcccacgtgagcttccagagtgggctctggtgtgtgcacctggatgtagatgctgtgtcagccctgagtgtgtgtgcatcgctagatgagatgcctctgaattgcaggggtttacttgctgccgatcaaattataccgtgtgatccctgtctgaggctggcccctgatagaatggcccaactcttgtggatcctgcacaatgagagctattgttgccaaacttctcctcatagttgcgcagaaagctccaaagagcatggtcatcctaggagggccctacagcaggcccgaggcccacttcacaaccatggagcacgccatctttcagagagcgcaccgtggcctagcacaaaggagagtacctcatatatggtgtgtgtatgaaaagtgctaggccctggtgggggaccctataaagacgggcctaaaattcgtccatttggcctggtggcttgatgaaagaaccttgggcgactccaacaggagcgctccatccaggccgaggtacattgagagtatcaatagcgaagcgatttatggcgctttgggtggagaaacagaacgtcggtccccttatgtgtgttttgggcgccattctngggtttaccccatattggggacgatgccccttagtgaagtgtacaccctttggtatttgaagtagtggctcccaagaaacgccacccgctgaggaatctggtgtgtccaacctgagtgtgttgaatcccccacattagtcttagcctacaagagcactttgtcgaattgcgtaacaaaatcgtagtcaacaggatgggcagtaggtgggcgaactttcacaaggacactatgtctgagtatcacttcctggtgttagaaaagaagcccccctcaagacaacctgtgtgaacacacagcttgtgggtctcccatgggcgcaatcccgcaaaagcagagaactgcccagaaaaactgagagaatgactctagcgatattatcaaaaagatgaggggaggcagacctatttaggatagggaggcacccctgagacggttagcacaacaaacatttggttagtgccacagaagatgatacagggggggggccaagtattgaaaacactttgaattagtgcatggaccactatatggaagacaagatgagatgcgaagctaaacatatgatgattttaagagacatctaaaggagagtaggaacaacaggtatggttgcatcatctataagtattgacgagattactcacaagtaa

SEQ ID NO: 676288 - DNA, 1765 bp, Homo sapiens
  misc_feature (430)..(430): n is a, c, g, or t
  misc_feature (1006)..(1006): n is a, c, g, or t
  misc_feature (1364)..(1364): n is a, c, g, or t
  misc_feature (1371)..(1372): n is a, c, g, or t
  misc_feature (1380)..(1380): n is a, c, g, or t
  misc_feature (1389)..(1389): n is a, c, g, or t
  misc_feature (1393)..(1394): n is a, c, g, or t
  misc_feature (1404)..(1404): n is a, c, g, or t
  misc_feature (1410)..(1410): n is a, c, g, or t
  misc_feature (1413)..(1414): n is a, c, g, or t
  misc_feature (1425)..(1426): n is a, c, g, or t
  misc_feature (1446)..(1446): n is a, c, g, or t
  misc_feature (1468)..(1469): n is a, c, g, or t
  misc_feature (1484)..(1484): n is a, c, g, or t
  misc_feature (1486)..(1486): n is a, c, g, or t
  misc_feature (1567)..(1567): n is a, c, g, or t
  misc_feature (1644)..(1644): n is a, c, g, or t
  misc_feature (1681)..(1681): n is a, c, g, or t
  misc_feature (1721)..(1721): n is a, c, g, or t
  misc_feature (1723)..(1723): n is a, c, g, or t
  misc_feature (1726)..(1726): n is a, c, g, or t
  misc_feature (1736)..(1736): n is a, c, g, or t
  misc_feature (1740)..(1740): n is a, c, g, or t
  misc_feature (1747)..(1747): n is a, c, g, or t
  misc_feature (1750)..(1750): n is a, c, g, or t
cgcgtgtcgtgctcctctatctgatacaccgtcgtgcacagtcggctcggaggtccgccggtgtgccaaacagccgcggtgttgtgcgtcgtcgctcgcctcagtcttctatcgcgccgctctgtaagtaagccgacggccctgtggtgcgcgaaatttccttcgtcgccgaggcagcgcacaactgcctgcacccagtcgtgtcgtagttgtcacccccgggtatacaccgctgggggagggtcggcccaggggcgcctccttggtggccccctttgagttgttgggggacacccccccgcggtggggctgttcccccgcgaggtggttgttctcgcccaagtggtgcacatcatcaccgggcccccgggggttttctctcggcccactttgtggcaccgggggccccccgggcgccgcgaggcgcccnctccggcaggctgttctcccgtgtgtatggcgccaaatgtccccgagaggggaattataacgggagagtgttgggatgtccccccggtgtgccacccacgagagtttggggccccgcccctctggggttccaaaaggggccatcattgtagaaaggaattccgacaaggttccccctcgtggagggggaaggaagttctttaattccggtctgtcgttgttgtcgccgccgtggcgcgttatttttaaaagggagaattccacgagagggatcccccatgtggggatatgttctgttgtccccccttgggggggggccccccttcttttctcttccaacaagagggaataggtcagaggttttatttggaacaaggaatgttgtataggcccccccagatgtgctccaagataaatgccccgaagaaaccaccccccgtgtgcccctccgggccccaccaaagctgcgcggcaaccacacaaagagggttgttcctgcacaggacgcaccaatattttggtgttggccgtaattatcctcggcgagggagcatactcaccacatggggcgcacaancgttctcgggttcttttggggtggtgtaaacaggtgggccttccacacaacaaggagaggttgggcagcaacacaccgccccagatacccacgttgggggggccacaaagtcaaaatccacctggggcacacaaaagcgttctttccccaacattctgggtctcacaccggtggcccccacagagaggccgtaaacttgttgtgggggaacaccacacagagattctcgggcacatagcgccacacacacacggtgggtctcccctttgccacaaaggtggtacccacagggcgcccacgtgtccgggcttctctgtgtctttggtgatccgccccctcaagttccctggcacaaccncaggggnncacctcgngcacttgtntgtnncgccacaccncggtgnccnnataagagaagnngtgctcacatgagtgtgctngtgatattcgagatgagactgnntaacacacctcacgncncgcggggctgcacactgccacaccctgggcacaacttccccacaaggccaccctttgaatgccactttttaaagaacctancacgctatacctgagacccccgaaccttctggaaaggaagaactgtaattcaccccaatttccctaataacagaganttcacctgaaccaccctcgtcaagacccccccccgantttccctgcaccggactccggctcccactgtggctaccanantanggtttttaanccanaaaaatnaantgaattaagccttta

SEQ ID NO: 676289 - DNA, 130 bp, Homo sapiens
cctatagtggttattacagtcagcaccactgtgaattttgtgaatttgaaaaaaaaaaagtgtaatttatggattcaggattcaaaaagaatcatttggtatcgaatttaccccagaacaaagggaaaca

SEQ ID NO: 676290 - DNA, 279 bp, Homo sapiens
actctgtaggatccccccgtctgcgctctgcagccccgtctgggcatggtccaggcctccacacacagccaccgcgctgccattggctctggcgctggcatgcggcagtcactggagactggcgttgccccgcctttggttggcttcagggtgacagttcaagcaggcagctcctcctgtgggccagtgagcttgctccaagagacagcccatttccagctgacgcccagagtgaaccacaggatctcccggaaagtacgatactcacaagggtgctga

SEQ ID NO: 676291 - DNA, 693 bp, Homo sapiens
taaggtttgagggggaatgctggaaatggtaaggggtatggaaacttgtcatataagtaatgctagggtgaggggtaggaagttttttcataggaggtgtatgagtgggtcgtagcggaactcgggggtatgctggtcgaattcataagaacagggcaggttagaagtagggtctgggtgacaaaatatgtggtgtagagttcaggggagagtgcgtcatatgtggtccctaggaagatggtaggggtgaggggtgttattataataaggtgggggtatccggctatgaagaatagggcgaaggggcctgcggcaaatcgatgttgaacgcctgagactagttcggacctccccttcggcaaggctcgaagggggttcggtagggactctgcaaggttggggagataaatcatattatggccaagggtcatgagtggcaggagtaaccagaggggtcctgtgtgtggcgacaagggcgggacgaggttaaagggagccacattattagcaacgtggacacgtacgaatgagggcaaggggagactccatatgagaatggtggggcaaatgctcgaaaaggcccgaaaaggcggaaagaggattgaatgccccgctgatcaaaaggtgagtaccggcagcaaaaggggcaaaacatggggcccagatgggtgacccgggtcggaacaggaagag

SEQ ID NO: 676292 - DNA, 337 bp, Homo sapiens
attattaagatagcaggatcttgggttctagctacaagctcacttcttggttaatccacatactgaatcctaaagatgacttacaggtaaagattcattattagcaagagattaagaacataacttcattgagaggtcaatgttaaggagaacagttcattaaccagtttctgtttacaaagaaaaggacaggcccaaatagccatttcaaggcagagcaggtgaaaggcctggaacactcctgtgcgctcactgtcggctgctgaacagggagcccaaggccagcaggatggagggtgtgaccgagggcttggaggaggtggtgttggggataaca

SEQ ID NO: 676293 - DNA, 220 bp, Homo sapiens
attttggacctggacttatggacgtgtcttaaatgagccaccatatagtgagctacaccacatacaggacgaaacacggaggggtcatcatgaccacagccaggggagatggcccagggagatgatcaaggaaaaggaggcgcacagctaacgaaagccccaaggagctgagaccggaaaagagaccccacgagagactcccacggccatggggaggcct

SEQ ID NO: 676294 - DNA, 1057 bp, Homo sapiens
  misc_feature (1057)..(1057): n is a, c, g, or t
cacgcgtcggttcctccttgctctcgcccctactctttctggtgttagatcgagcaaccctctaaaagcagtttagagtggtaaaaaaaaaaaaaaaaacaccaaaggctcggagccacaaaagggatgaaatttcttctggacttcctcctgttctcccgtaaatgatcgttctgatccctagagtacttcgtgaagtttttattcctaagaggagaaaataagtcaccggcgaaatcgtgctgattacaggagcctgggcctggaaattgggagactgactgcctatgaattggctaaacttaacaagcaagctggtactctgggatataacattacgcatggacgtggaggaaacagctgccaaatgcacgggactgtgtgccaaggttcaatacctctgtggtacacctgcagcacccgagaggatatttacccgctctgccaagaacgtgcaaggcacacattgggagactgtaacagtaattaaaggaaaattaaatggatcgggaggtagcatatatacacgtacaagaataggtcatggtacaccaaagaatccttcagatggagacagactttgtagagttaattgaactctgcagcattcacatgggtctgacagcacaggagagtgatctaggccaacatgacaccactcttgccatccgcgtacaacgtgatactcctgcaacagcactcacccaaggatacgtggaatacaagaacaacaaggaaccatactaccgcggacaatggacgaacaaaataaccatgccatatagtcaggcgcttccgcatgtacaatgttccggtcacctctctaccgggccctacgtctcagacagatagtggtagactactaacatgaacaccaaccgctgcttacaactggcaaacaaacaattcggccaatgaaacatagtcccacatcaccatttgaccactgacacggaggacggatcgtacacgcacgacgttcactcacacacgcacacacgacgaacaagaaagataaaccagagaccgacacactgacacgctacctatttggaan

SEQ ID NO: 676295 - DNA, 896 bp, Homo sapiens
ggcctcacgagcaatagtatggttgcaggaagcgacgtgaaatggactgtggagcgaatgagaaccacatagcagggtgctgcgagatgaccctggagagtgtcgagttggtcgtctcaagcatgaaagagtaccagttccacgtggcgagtcacatgatggaatgggctgagaatgtcatgcaaatacttgcatgatcgggcaagtcagatgcttgaggttgcaaattttgtaggagaatgaaggaactggacttgggaccctactattaaagttcctatgctctggggggcagcatgcagattccgagcatggaactgtacttggtgagcttgagtatgtcgatgatccatcttatcccagatgatgaatctcgtcgggtggttgtatcttgtgaggtggatcgaaaaccgtccgtggatattatgtgccgaaggtcatggtggcacttgttcacaagacatcgaatttctcacaggactacgtgattgaggcttgagaacggatcatcgaacatctgttacattatccttggacattttccttgggccaaaatgcatatcaatgaaccaaattaaggactatgtcggacgttaacctataatctaagaccttcatcgaaagacttaatgttgtcatcgggcgtgaccactcaaaaaaggcccctcattgccgtaaaaacttggcacttgaagtgcagtcaagcgaacgtcgaagacggacgagttgaccccttgggacctggaaggggacaggcctgggagcattcgtacccaggaacgcgtgcatcgcagcccacctccggtggggaagtctcccacgaggcccccagacccagacttaaactggatgcgccttaagaaaccccgagggtggaataatggaaccgcacgggg

SEQ ID NO: 676296 - DNA, 398 bp, Homo sapiens
gcccgggctgcaggaattcggctctaggggactcacaagctttatgttctccaatcgcagggtgacaggtcggcggctctacattcagctaccatgggcaaccttaatcgcaacttgatcgccttaaatccggacggcttatatcacactcttgtcctcaaaagcatcacccgcttcgagcataacgaatgctgccattacaccatgaaatcactactgccctgtcaagaacacctgaatcagcactacatagaccctaaagaccgaccattctatcctgtgctggagaatttcatgaactcatggacagatgaatgcatagtcaggctaggactgaacatggagcgtcacttgatattcagctagaccactccatgcgatactcatggcagtcctat

SEQ ID NO: 676297 - DNA, 238 bp, Homo sapiens
tacttttccacaggagtttcacctatgttaggccaggcttgtctccaactcttgaactcaagtgattcaacaggctcctcttcccaaagtgctgggattacaggtttagccgtcgtgactgtaaatctcctgttgttctatatatgatagtttatatgcaaatagggacaatctgacttcctgttgtctaatatggatgctctttatttttttctcttccttaattgtctggctgtac

SEQ ID NO: 676298 - DNA, 169 bp, Homo sapiens
taccaacaacttgaaatcctggaggcccaggcggacaagtattccaccaaagaagataactatgaatgaggagatcaaagcggttgggaggatcacttgtccgccgtgggcctccagggatttcaagttgttggtaacaattttcagctcctcctctaggtccccacat

SEQ ID NO: 676299 - DNA, 919 bp, Homo sapiens
agtgtttcgtgtgcacgtcggcaccatttgggcccgcccgtgtaacccggggcccacccacctgggtgattccctggccccattctcccaaggggttttaccccgttgaaagacatctccgagggcgtccaatgcgcttcggagttctgtcttccgcccttttttcctcagggccccctggttcgtgtgagggtgctcctcgcctcgggttcatcgggatcacccggcacgttctaacacggttttccaccgagcaaaccacgacgcttcccctggtcaccaatggcgaccccccccccaaggggggtccacactcgaatggacaacttcctcgggacaacaaacaaagatggggccccccgatgtgttggtggtcagaaaccccgggtggggggaccaccggcgattgttccacccctcgcgaggataataaggtatatcgcctgccacccaccgttgtggcagaaaaggtgtccacagcaaaacagacaacaaaaacaggtttttctcttcgcggtaaatactatggaatcctcctgaacccagtaacgatgaagattttcacaccggcctcgctctcctgaaacccgggaagggctctgaattcccagagggaattgaacgcacaagcttggaggattggggaatccaacaatgcagtggaaaatatagtggaaaaacgacaagtggacaaacccccagttgaccctaaggcggggaggacgtcaccccaatacatatcagggaggacccagaagctgggagacccatccaacagtgctgcctgcccacaaacccccccgcggggggaaatgtcctgccacccgcctcacccacgcccgcaagtgaagagacgctcccggtagtggcacccacggacattctcaacaaaaatctatcatggggaaccaaacaaaac

SEQ ID NO: 676300 - DNA, 262 bp, Homo sapiens
  misc_feature (2)..(2): n is a, c, g, or t
antgatgtggagcatgctcatgtcttgtttttagcagcattcacccgtgtctgttcactgaccaaagtccacaatttgtccaggtttgacagtttggggcagaaactctggttcctctttaaagtggtaatgcttcataccaaactttcccaaaagtagcctggtgtggtatatgtcgaggttgatccgggtggtgattgcagaccacccagcattaccgcgggcgccggggttcttccgggtgcttgcctacgcgggcggt

SEQ ID NO: 676301 - DNA, 135 bp, Homo sapiens
atccaccggagcccttcaaaaaagtctgttgcagaatcgggcaaactggaacaatagtctgtcttctcacagagtggcaaatagccgagaggtcactccaattcttgcacaaacacaaagttccgttgaagccgt

SEQ ID NO: 676302 - DNA, 267 bp, Homo sapiens
cgtatgcagctatgtggagtccaggcctaacaactagtagtaaggtggtagtagcagtggtgcacagcagaaactgctcattgttagagacggaacggcaggttatctacgtggaatcttggtgtaccaaaatggaaaacaggacattgtgtcctttattacctaagaacatggtttattggaaagaacaagagcatggaaggcagccagacagaaattcaaatcctgttctctgccacttgctgggcaaccttgggcgtacgggga

SEQ ID NO: 676303 - DNA, 140 bp, Homo sapiens
agctggacctggggaagctttgagtgaagctcttcctggggacattgagcccacattgaccccagtgaagagcttcactcaaagcttcatggtgcatttcgacagattttacttcctgttcccagagagcctggaattct

SEQ ID NO: 676304 - DNA, 1346 bp, Homo sapiens
  misc_feature (379)..(379): n is a, c, g, or t
  misc_feature (468)..(468): n is a, c, g, or t
  misc_feature (478)..(478): n is a, c, g, or t
  misc_feature (552)..(552): n is a, c, g, or t
  misc_feature (554)..(554): n is a, c, g, or t
  misc_feature (635)..(635): n is a, c, g, or t
  misc_feature (674)..(674): n is a, c, g, or t
  misc_feature (930)..(930): n is a, c, g, or t
ggttcgccgccagaacacagtgtgtcgctgaagactagcccctatagtagccaataatttgggaaaggaaatatgactcgatatcaagcgattgttcgtaccattgagacacttgctagattactgagtgcatacgtccacacatcgtaactgtgccactgctggcatctaatataagttgcgcgttgagtcacactcgaatgcgaaattatgcataccagtgtgaacatacaatttatgatggacagagacgcgactgacatggatgcaactgggaatagaggtgtcgtccgtatctacatggctagtgacactgcgtgcttgctttggaaatataccacttgagacaagactgtagtcagtagaaacctgatgcgtntcatgcacgcaactgtgaatcatcgtccctgtctgctgagctcttactttgttgacaccgacaccgaaggacccaaggttaccatatgntgtccacgtnaatcaggttgggagtgttctcctcagcgcatatccacacagttgagacacgtggtgtaactccagaagacaaancntaatgcaacttaacctaagggagtaagcgaatgcgttcagcgccatggcacccatggtgatctggttgcacgttgcaaatntcggtactgtctcgacagtagccgattgcctatcgtggntagcacaatcttcgcagaagtcgtgagcgtattactgcgcacaaggacatactgtgcgaccaagaaaccccggcagtaaggcgagttgccccgtctcgtgagtccattgtactaacaaccctatgtggatgtgcgacaagacttaaacgttagaatttgtccgcgatgtaatatccctagaagaagtggggattgcccaactgcagtaccaaaccgcttgagcagtgcgccagtaaaggagcgattaatggagcgntataacttgggtatcacgggggcagtcttcgagacagctgtgccatttttcccgaacaagtgtgtggcgtaacaaacaccccggagcggcaaggttgaggtcacttttagtaggccccagttcctcctagcgtctgtgtcacatagagttggagacaaccatgtcgtagagcaagtccctacacgtttgtcattacaaacgattggcaccttggggttaccaccaggggcatttgagtacctaggcttcaaccccagttggcctgggaattgtgggtacatagcccacgatgagaacacccagcaacgtagcatttgatgcgctcgagtgacgtgctgattccgaaagccaaggccagacttcgggtccgaaccttgaaccaacaggccccgttgatccggccttggcgttcgttc

SEQ ID NO: 676305 - DNA, 355 bp, Homo sapiens
  misc_feature (39)..(39): n is a, c, g, or t
  misc_feature (58)..(58): n is a, c, g, or t
ggaaatgcatatgcattgtaggtgtacgtagttcatgtnagtcatgtaagtttcaagnactggccactatatcaggtcattgtgcactttatataccttcagcaatctatgagcaatccagtttctctgtatctttgccagtaataagtcttgaagtaaggtagagtgattatcatatatgatacttcatttcacaaattgtgtaagtattctagatcctttgcctttacatagaaagttagaataattatgtctatatccactgtgccgtaaaggattagccttgctcaaagagaggtctggcctttgccctcagcacctgaggagtaatctcttagcccttggaatgttctgc

SEQ ID NO: 676306 - DNA, 635 bp, Homo sapiens
ggtgatgaggtgtctgtacccagcttggcggaggcatggttacttgccatggtcaagaggtacctgacctccttccccattgatgagcgcgtgcagagccacatgctccacttggaacacgatctggttcatgtgaccaggaagaaccacgccaggcaggcgggagttcgaggtcttggacatcaaagctgagttcactggacctactgtgcccccaatctagattgggagcaccaacccaggtcagaggactctctgggcacccgctgtgcatggagccagagtgcagagccccagatcctttagtaaatgcttcccctggtcctgcaacaggcccggtcacctcgaagcgggcccggggctgaggtcagcctcagtgcctgcttatcagcctcttgctcagaatcctctttcctccctcatttggccctggggctctaggggaccaggtggggcggtgtggggagctgtagcggtgctagcgaagcagtagccactcagtggactaaccaagcagctagccgagggatgggccctggtaggttacccgtgcggagagtgctctcccctctgcatcacacgtcaggtctttggtggggggacccaaagaccattctgggaagggtccagaagag

SEQ ID NO: 676307 - DNA, 385 bp, Homo sapiens
caatcaagtgcttgtcacagctgaaaggtttctggtggcttagagtttcctagcagtaaatttatgatatggtccagttctttgtacagaaaggcacccttatgttagaataaatttccagaacttagtggggagaatcaggttttaaccttgtgtgtctgtttctttgtgagtgcctttctataatattcatgttggtgtgcgtcggcgttataaaagagcgcttctgtggctccttccccgcccgggggggttgggtcttttaaattttggccttgtttccaaatccccccctccctgttgaaaaaaagacacatcaagaccaataaaataaaaagctcacaaaccaaaaaaaaaatgaagtagaatgaaaaatcaataagga

SEQ ID NO: 676308 - DNA, 104 bp, Homo sapiens
tctgttaccagacagaagtgtccctctttaccttagctccacaaacaggagaacacggttggaaaagatgagaagagcaaaaaaaatctcctctggagaatgat

SEQ ID NO: 676309 - DNA, 428 bp, Homo sapiens
  misc_feature (21)..(21): n is a, c, g, or t
  misc_feature (40)..(40): n is a, c, g, or t
  misc_feature (422)..(424): n is a, c, g, or t
  misc_feature (426)..(427): n is a, c, g, or t
acgaagattgccctaaatagnagaaaaccccccagttccncctattaaagaaccccgcagtgggttaaaatccccaactgtgccctactccctacacttgtaccttttaaaaaatgtggtttaagaaaaaatggatatcaactgggcacggtggctcatgccctgtaatccccagcactttgggaaggccccagacaggaggattacttgaacccccaggagtttgagatcggagtggacaacatagtgaaacactgtgtctgcaaaaaaattaaaaagttatttgggcatggtgcatatgcccgtagttccagctacttgggaggctaaagtgggaggatcacttgagcctgatgaggtttaggttgcagtgagctgtcattgcaccactgtactccagtgggtgactgagcctgaccctnnntnnt

SEQ ID NO: 676310 - DNA, 806 bp, Homo sapiens
  misc_feature (766)..(766): n is a, c, g, or t
  misc_feature (794)..(794): n is a, c, g, or t
  misc_feature (803)..(803): n is a, c, g, or t
aagctacctagttacatagatataaccagggcactgcccccaactatatctggtcaaccatcaaaagtgccttcccaagtctcacctgtttttcacctcttctaggacctttgacaactgtcttgttacaaatgtttggtccttgcttctttaacctcttagtaaagtttgtgtattctagattaccacagttccagagacaatgctggcacaaggcttccagcccatcctgtccactgacacggagaatgaaatcgtcctgcctctgggctccttagatcaggtatccagagatttttactcctccagtgccaggcagggcctacgtccataaactcagcaggaagtagttacggaaaacagatatccgcccttctgcagcccccttaagattaaggaggagtatctaatctctgaagggggaatgaggtaggaggtgggactcaactctggaagtggggctcaggcactcagaccaaactgagcactagctaaaataggtccagggcagatgctagtttccataggacacaccgacctgtgtcaagtcagttcaccatggctctggcagcacccagaagttaccaccctcaccctggaaatgtctgcataaactgccccttcatttgcatataattaaaagtggatacaaataccactgcagaactgcctctgagctgctactgtgggccgcacagcctgtagggcagccctgctttgcaaggagcaacgcctctgctgctgctgtgcacaagccggccgcttnaataaaagtggttacaccactgggttgnccttgagtnctt

SEQ ID NO: 676311 - DNA, 387 bp, Homo sapiens
  misc_feature (86)..(86): n is a, c, g, or t
  misc_feature (93)..(93): n is a, c, g, or t
  misc_feature (100)..(100): n is a, c, g, or t
  misc_feature (102)..(103): n is a, c, g, or t
  misc_feature (106)..(106): n is a, c, g, or t
  misc_feature (108)..(109): n is a, c, g, or t
  misc_feature (128)..(128): n is a, c, g, or t
  misc_feature (137)..(138): n is a, c, g, or t
  misc_feature (143)..(143): n is a, c, g, or t
  misc_feature (166)..(166): n is a, c, g, or t
  misc_feature (227)..(227): n is a, c, g, or t
tgccctctcgtgccacggtggaagaagagcccgaagatagaacctgatagcgaccgcagaatacacatacagacgacacagagcangacgaanatgaagnannggntnngggaacagatgacgaagangatacagcnnaggantctacagctgacaaagatgaatngtaaattatactctcaccatttggatcctgtgtggagagggaatgtgaaatttacatcatntctttttggggcgacttgttttgggctgccccctaatccccttctcccctgcactgtaccatgtgggattatgggtcacaggacacagtgggtacaacagtaaaattttataaacattcctcatgaatgtaatttgtactatttaactgaaccaaagctt

SEQ ID NO: 676312 - DNA, 219 bp, Homo sapiens
agaggatctgatggtgggctgtcagtcatccatcttctgtctgtcccacgggaatgagtgccatggcaggggctccagcctgtacagctgtccgtcctgtccctctggactgtcgtgctgatagtgcctgaactcacagtacccaagaacaagaacctacgaacttcagtgacgtacaaaggcagaggttcagagaggacccagatcgggcacagcgcc

SEQ ID NO: 676313 - DNA, 110 bp, Homo sapiens
tgcacgcattatcagactgcactgtagccacatgtttgccttgagagctcagggccgaaacaaagaactccagttggggttggccagagagatgacgtcaaaacatatag

SEQ ID NO: 676314 - DNA, 749 bp, Homo sapiens
  misc_feature (1)..(1): n is a, c, g, or t
naacctgctgacgtctttatcactgggagaacagaactggatgggaggcgcaatcccccatgagaaccctgacagtgccctcgttttcggtcaaggactttctgggaataatactgggggttttgtttctttggattgtgaacggtctccaagtgttctcccaagatgctaatacaccagcctctcctgtttagcaacatgtaaaaggctgggtaggactgtcgggagactgcctgccttgtcaccattgttctccccacttccagtgactgctcttattttgctgtaccataagcccacacaccgcttgactccaggagttgcataagccccctgtgataatcggtgctgtactgcataccctgccaggctgtgacttggtatcctactatattttctaaggagtgaataatattgtccgagttgaactcacttatcttgaagagacatttccttctgtgggcattgactgtatcccacctgtgtttccccaggaaatggtaacctgtttctgagaacacctgaaatctcatggctatacattcccaacccatctgaacgctatttccttttggtgtgggtttggttttgttcattttgaaatacactttgtgaaccctgagatccgtaaactactagatctctggaagtgttattgtgaaagaaacttgcttgcagctttaaccaaatgagcaacttcccctatagacttgttcttgcaggctttaaaaaaataaaacgaaatagaa

SEQ ID NO: 676315 - DNA, 1132 bp, Homo sapiens
gctttgtgtttgttttgttgtgtgttttttgtggtttggttttgttgttgagttgtgttgtggtgttttgtgctctggtttgatggattattgtgtagtggggcgtcgtttgtatgtgattgatgatatgcatgatgtcctgacaagaaaaaatcattcaaatgtggcttaaggggccctgtgcagacggggtttccgcctatattccttttatgccgctggggaatttccgggcgcatatggtgagatttgtcctctggggcgcaatattcgtggtgttcgtcctcctcttttttgcctgtcgtccccccttccccgaagtggggtctgctcacccgggtttttcatgttgctcccctctctttgctcctccgcgaaatgtgttttccgccccctttattatgtttttggcgcgccaccccccgttgtggcccaaagacatattttggtcgcgcgaccaccgagatggaggtgtgctgcggctcttttttttttggtttttgtgtgtttgttgttgggtgttttttgttgttttgtttgtggcgtgatacctccggcgattttttaaaactgggggcaccgtgtgataggggcgcaccaccccctcgcggtggtgtggggccgggccgtctcctcccctagggtttcacacgatgggcgctgggaggactttttgtttgcgccgccgtttgtttgttttttttagtatatatgctcttctccccacctagtttgaggagggcgttgtgttttcttacggggaggtcctcctcgcgcttctctcgttttaagcgccccccccccctttcttcttcttataggaggaggagtaggcgcccccttcttttccacggcgccccaagggggaggggagtaaaactgtgctgttgtttcgaaatatatatgtgaatggcaaactttttttatatttttgccctaatatactttttatattttttttattttttgaaggaagaggcgtcttgtgcccccccctctcccctcttttgtcccccactagagaagagatatagagagattttgggtcccccgcggggggggggggggcccccccggggtcccctccccctaattggaaggcccccggtgaaaaaaaaggcccccccctcta

SEQ ID NO: 676316 - DNA, 488 bp, Homo sapiens
  misc_feature (7)..(7): n is a, c, g, or t
  misc_feature (25)..(25): n is a, c, g, or t
  misc_feature (57)..(57): n is a, c, g, or t
  misc_feature (83)..(83): n is a, c, g, or t
  misc_feature (255)..(255): n is a, c, g, or t
gtggtcnactgtgctccagtgccanttttctaagtcgaggtccaaagtttctcacanttccgtctctggattgctaagggacntacagctctgtcactaaatatggccattcctgtaatctgaaaggtcttgactaagtgcttgcaatgctccagaagtggcacattcttcctgggtctgagacctacctggcctagcatccagcaaggacagaacagtgaaagtcccagactgttactcacttccggcggccantagcgccagcctcagtgtctgcattatttttggccccttgtgccaccctctcagagtgccagagagccagggctgccacctggagctgttatgaacaagttttctctggaaatggggataggcctttgctagaagcaggagtggcctggctggtgtgctaggcagacagtgggccgacattgcccttccctgtggtttttggtgtgggatgaatctgtccctgtgtccaagtt

SEQ ID NO: 676317 - DNA, 405 bp, Homo sapiens
aatgataaaaccatcggtgttatagtaggctaacccaaatagcttacccaccaacaacccgttcaccactgccgtcaccgtgcctacgaccaaaggcacaaacatgcggatcatgccctgaatcaagatcacccaattcatgccaagaatactaccgacaaccagactggcgatcacaaagtacagcagattggcatctttcatcagcaggtgaacggtagccattacgtttgtctggaagaaattaaagtaaaccaataccgatgacaccatcaggcacagaatcgccgggccaccaatatcgcgcaacacgggaatacttttccctaactgcgccagcgcaaaacccagcgtcataatcaccgccagaccaccaatcatattctttggcaagagggtcgacgc

SEQ ID NO: 676318 - DNA, 247 bp, Homo sapiens
  misc_feature (100)..(100): n is a, c, g, or t
caggatggcctagtttaaagacaaagagtagacaatttatgggaacaatcacaaggtaaaaacagctttaaacaaagcagaggtagaataaatccagttngttatctcaggagagataggcagagaattaaatgccagtatgaggcattagaactcagcctgataagcaactagggtgtgtcactgaggtgatataaatggcattttatgaggattaatctggcagaataatacaggatctactctg

SEQ ID NO: 676319 - DNA, 1201 bp, Homo sapiens
  misc_feature (126)..(126): n is a, c, g, or t
  misc_feature (155)..(155): n is a, c, g, or t
  misc_feature (168)..(168): n is a, c, g, or t
  misc_feature (177)..(177): n is a, c, g, or t
  misc_feature (180)..(180): n is a, c, g, or t
tcccggcgctcacttctcaagaagaatgtctccatcaatacagttacctatagagtgggctcctcctgtaccagaatcaagcattggccaggcagtacatgcagatgctacccaaggaaaagcagncagtagcaggctcagagggggcacagtancggaagaagcagntggcaaagnagntccctgcacatgaccaggacccttcaaagtgccatgagttgtctcccagagaggtgaaggagatggagcagtttgtgaagaaatataagagcgaagctctgggagtaggagatgtcaaacttccctgtgagatgggttgcccagggcccaaacacaatgtagacatatctgtgaggggatataagcagccccacgcagcagatggggggacactggaaggagagaatacatgtctgagtgacgcacaaagagcatctcatatattcctgagtatatgcgtgacgaagatgagtatgagaagaatggtgacccagaccatctatgccgaaagggctggctatgcataacactgtggcacccagactatgtattacgtctgcagcacctgccatgaactcctggttgacatgattcatttttggaagaatgagaagctatactgtggcagacattactgtgacaggcgagaaaccccgatgtgctggctgtgacgagctgatattcagcaatgagtataccaggcagaaaaccagaatggcactgaacacttctgctgctttgactgtgatagcatctagctggggagataaacgtgatggtcaatgacaagccgggtgcaagaccttggctatgtgaagaatcaccgctgttgtgtgtcaggatgcaacatgccatcgaccagaaagtgcagagaggaactataacaacttcagctggcttgcatcaccaagagcatatcagggcacaggtgaaaaatgccacatagggcagaaatactggcgtaaaagggatgaaccaggacaggaagggaaaacaaggatcaaagaggaggcccaagatcgggaacaaacacccaggcgcagcccacaggaaaggcagcaacaaaagcgcaaccacgccaccaaaagacagcacgcgcactgaggacaagagaaaggagacagacagacaccgacaagacacgcccaagagaacgcacgacagccaaccgccaacagaccagagagagcacagtacaacc

SEQ ID NO: 676320 - DNA, 863 bp, Homo sapiens
tgtttcccatcttccttttctggtttactatgattggatcctatggtaatgtttctgccttacttaccttttgtgggtgctttccgggtcttctcacctttgcgcactcccccgtgtccttgtatccctttgtaggtgatccctgcacatcgagtggagttgtctacgttcagctccctttcgacatcggagtagcgaatcctggtcttgctgtcctttgttccgttggctacctggcaagctcgcctcaggccctattgcgctcacgtagatgcttctttgttttggctgccatggcataagagggccttagcggacttccctgttggcctctgtacccatctttcttcctgatgtgcacgccctggatcctttggcctatcccagttcccaggcctgcagtttcgcggtctgtccttgtccaaagcgcaggtgctagacagtctacgacccacgggtttctcaaactctgtacttgactatttggggcctacgataattcttgtgttgtgtggcctgtctggtgtatggtagcgtgctcagcagcattccttggcctctgcccactagacatcagaagcactcccccagttgtgacaaccaaagatatctccagaccttggcaaatgttatctcgtagggggaaaattgccctcaagttgagataccagctggtctcagctagacctgcactgtccagtacagtagccactaaatacatagtggctcaaaacttaaatttaagttaacttaagattacaagctcagtttctcagtcacattagtcattcaagtgttcagacagccacatgaggggacagtgcagctacaggatatgccatcatggcagaaagttctgttgg

SEQ ID NO: 676321 - DNA, 432 bp, Homo sapiens
  misc_feature (137)..(137): n is a, c, g, or t
  misc_feature (252)..(253): n is a, c, g, or t
tctcacattttttcactcttttcaccattgctcttttgggttttgtcttggtaatccaatacattctccaaagaaactttagccaatgtgccaccatcctctcttcctgtttcctgccttttttgttgtagttgctntgcttccttctgcctgtccttttcctcaagttatttccggacttcagcttctttatatcttagtttaaggctctcagagagtctttcagcttcttcaatggcttttttgatgttnncagttccaagtattgaatggacgtaatcctcttagtgcttattttctctggtttaacttctgtcttcttattgaggtcttttagtgaagaactcaggtagagttctttaggaactaaagccacagcaggcatggtgaattatctttacttttccacgttcacgatagatgctattttcc

SEQ ID NO: 676322 - DNA, 1024 bp, Homo sapiens
ggcgcccaacaactttctatgtaggcatctacatcctcatcgctgtaggcgctggtccatgagtgttcgtatgggtgtcctgggcttgtcgtacgtggtgcctagtccgaggaatccgcgagttgcctgcgtggggactgttcttcaccgtgcctggtccatcctgctcttgcctggtgcaggtgggcgtcggccatctggggcttatgtcaaacgaaggcatcgcatggatcgacctcgaaggaatgttgtaatgcaagttcatagtaagtaccaggacccttacaagcaggcctgtgtctggcatgactgacgccaaacgaacgcgcaaggcatgtggtgacatgatcgttcccatcgcaggacagccttgcactgcttgctgagcgtcctagctaggacatggactaggctttggacctacgctacagaggcttcagagcatacgaatttgtgtcccatcgagggcagcgaacagtcatctagcaagcgctctttccaaggacggaccctgaccagcaagaatgactcgagtgacccgtctttcctccagggaaagcttgataccgtcatgtcggacaagttggcatgcctatcgctggctcagcctggtgatgttcactgaactcttcggagaactcgaatacctagacgtcactgggtggcttcgtggctgggtgagacactctcggagagactaggtttcaccgtgataacgtggaaagggtcgccagacaggcgtactagggcacaagcagggtggacgcttcctagccaaggtgccaccactgaaggttgacaccgggagcacatgtcccagagaggggggcgaccaaatcagaacggatccttggatggtaattattataccgattggacccaggttagattaacctcttgcatacatcacggtaggccctttgtaacaatgacgcggagatagagggacaatgcaacgtgaaacttttcctgggaaaccccttataaggggctttgaccgtcaccattgtaggcgtaggatagg

SEQ ID NO: 676323 - DNA, 509 bp, Homo sapiens
ccctgtttcatgcacaaggacattgatgcgcagggactacaggacttgtccaaggatgcacccgagcccacgtcccacctaggttccccagtctctcccagacaatccctcagaaaacagtcctgggcccaggaaccagagctgctgagcaggcccagctacgtaatttgtggagcccagtgcaaattgaaaatttgagaccctttgttaagaaattatgaagaggccaggcacaatggctcacatctgtaatcccagcactttgggaggccgaggcaggcagatcacttgagtcctggcgttcaagaccagcctggccaatgtgtcgaaaccctgtctctactaaaaatacaaaaattagccgggcatggtggctggtgcctgtaatcccagctacttgggaggctgaggcagggagaattgcttgaacccaggtggcagaagttgcagtgagttgagattgtgccactgcactccagcttgggcgacagaaggagactctgtcaaaa

SEQ ID NO: 676324 - DNA, 823 bp, Homo sapiens
gggaaggttcttacatgatggaatgtctcacaaatgatgtttatgatgctgctttgaagctcagttactgaagaattgatagatcatgtggcttggtgatggcctgagagcttgtatgctgagggaaatatctatagaccttcagaattgagagaaatgtgggtgaccgaagaacaagctagaaatatgattgtgggtggctgagatgtaaattgttgggaggttttgataaggtacccaagtttttgggaaattaacaatgaaggacggttgtcaggaacgtgtctgtgggccaatgtgggattaagttacgtattcgaggttggcggaaaaaccaatgtggacgaggtaattgaagaggaaaacttttgcataaggattcaggaatcccagtggagggggccatccaaagggctttttggggttggaaaccgatttggtccttggtggtggccgcattaaaccggataattgtgctgggtaagcggggaagaatttcggagaaaataattcgctggggggttctatggcaggttgggaattgcactttttcggggcagaagaaatgttaccaagtcgggggactgaaaaattcatgagggaattgcgcccgtgaaatggatatggggtaggttctggctagaaatctaatttataagttgcaaattcgagtcctgagaatttgagttgaaagtctgggacgcctagtaattgggcctcgggtaaacttttggggggaggaaaaacgcgttaacggaaggattgagaccaattctggtttattctaattgatgggggtctcggtaaaaacttccagtgggga

SEQ ID NO: 676325 - DNA, 266 bp, Homo sapiens
gttccggacatgaagacaaggaacgcttggatgtgagcactaagtttgagatgctacatgcgagacactgttctaaatgtttattagcttatttaatcctcacaataatcattaaaagaattacaggtgggcacagtggctcacgcctgtaatcccagcactttgggaggccaaggtcgggcggatcactggaggtcagcattttcttctttgtaaacatgtagtatgaagtcttagcctgtttggtggaccgtgagtctgttcag

SEQ ID NO: 676326 - DNA, 809 bp, Homo sapiens
cactgaacccatctccagccgcagccgcatctgcagtccgggccgaggagctagccgcagtcagccgcaccagtgtgccgagtgagcgttagccgagtttgaggcagtgcctagcggtgaatcggggcctcagcgatgagttcctcgcctgtaaatgtagaaaaagctgaaggtgtcggacctgaatgaggagctcaatgacgcgacgcctttctgacaagggtcctcaatgccgagctcatggagcgactccatggctgcgctggacgacgaggcaggccgggggccgcccgccgttggagcccggggtatcggtggacatagactggcgcggggtgactgccgctggggcgctcgtgcacgcgaggcgctcggcgcgggcaggccgtggctggtggcgctgaactaggacggcgggaacatgaacgcggccggagggcgggttttccgctcctgtgcggcgaccatagttggggctacggcgtagggggactctgggccccgtggggtgcggcggctccgagtcccgatttggggctgatagcacgatggcccgccttaggaataccgatccatcggtcgcacgatacagggtcgtcccatgaagggccatcatgaacctctcggggctgaatcaggaagggcgcgttccataaaatgtaacgggcgtggtgttccagttacgtctagatgcggcggcgaaggaaaataccaaggtgtgccaagatgagggggggtccgccctaagaccctggggaaagagctggtggcccacctcggtataggggtgacgggtgtcccccggcagc

SEQ ID NO: 676327 - DNA, 467 bp, Homo sapiens
caagggggtcaatatccaagacatcactacccagaccagagtgtcatggagttttcgccctatgttttcttttagtagttatgtactttcaggtttatgcatttaagtctttaatccactttcagttgattcttgtatcagggtgagataaaggccctgaactagactcttgattacactgcaagggaggtgatcagtagaaccagcaaaacagaccagttgctattttactactgattgacacagggatctgttgtttgtaaaagagagaagagactaatgcattttccaaccatcaacagctctgttctttctctgtattgttaaattgctgcctgctgcctgggtctcttcagcctcatccattatgcaacacgttggtagtgatgggaccaggatgtaccattgcacaaaatgacaaacctgagcaaagtcatagaaacagaactaacatctcaaagaacatg

SEQ ID NO: 676328 - DNA, 418 bp, Homo sapiens
  misc_feature (14)..(14): n is a, c, g, or t
  misc_feature (25)..(25): n is a, c, g, or t
ccctaataataaantgtaaatattnccctgaaatccttactgtgtgcccagaatactttaggcaccttcacatgcaaactctccctaatatccttcatatcaacccctattagtgatattattgccctcccactttcagattaaagtagagcttaaggctgggcgcagtggttcatgcctgtaatcccagcactttgggaggccaaggcaggtgtatcacctgaggtcaggagttccagaccagcctggccaagatggtgaaaccccatctctactaaaaatacaaaaatttgccagacatagtggtgggtgccagtaatcccagctactcgggaggctgaggcaggagaattgcttgaacctaggaaatggaggttacggtgacctgagatcatgccactgcactccagcctgacag

SEQ ID NO: 676329 - DNA, 631 bp, Homo sapiens
ctgatgttctctgtggtggatgaaaatctcagctggtatctagaagataacatcaaaaccttctgctctgaaccagagaaagtcgataaagacaatgaagacttccaggaaagcaacaggatgtactctataaatggatatacatttggaagcctcccagggctctcgatgtgtgcagaagacagagtgaagtggtacctttttgggatggggaatgaagttgacgtgcattcagcgctctttcatggttcaagccctgaccagcaagaactatcatactgaaataatcaacctgttccctgccactctaattgatgtttctatggtggcccagaatcctggagtctggatgctcagttgccagaacctgaaccatctgaaagctggtttgcaggcctttttccaggttcgtgactgcaacaagccctcaccggacgacgatatccaagacagacatgtgagacattattacatcgctgccgaggagaccatttgggactatgctccgtctgggacagacaccttcactggagagaacttaaccagtctgggaagtgattcaagggtattttttgagcaaggtgctacaagaattggtggctcttataaaaaaattggtttatcgtgagtg

SEQ ID NO: 676330 - DNA, 843 bp, Homo sapiens
cggacgcgtgggtgcctgtctagatctccaggataacgggcctgctgttgactccaccaggtctgggcttagcgtctaatatctcgtaacctagggcgtgagctgcaacaaacgtgtcagaaagattattcaactttcccatacttgtctgaaaatgagctgatccgcatctcttgtcaaacacactagacatttctgcgtctagagaatagacacataagtgctccagctcccgtttgtagaaagagatactatgaagtgggaaaagtgctcgtgacaagtccgttttgctgtcaataacagaaaggtgtaagacttgttacacgttcccccaatctcgacattttgcatttgtgactgactattggttgacgaacgtacgatccttagactgtcgagtttattcacaaaggtgccttggtaacgaactagaatatgacgctgttgtcttgacgggcaggtgcaccacgttagtgtttggcggtcctgcgtttgaagtgccctttctgccaaagatgtttgtgactggagcgctgtttcgtgcagaccaagacactaggattaccgctgttgttctgcacgccggtttgccgtgcatggccaagaggaaaacgtcacgtggattaaacatcatgtgtatatcttggctgttgtttgataacatttaaactttttgggatagaggcctcgtctcttgtcaccctaggtgtagaacagtgggatgactcatgcgtcactgccggcttgaattcctaggttcaggcaatcctccacgtcggcctctgagtagtgggactggcgtgcatgccacctttcctggtaattattttgggtaaaaatggg

SEQ ID NO: 676331 - DNA, 364 bp, Homo sapiens
cgtgcatcccccttggtcctgtctctttctgagtatctgaccagatcttcttcaagcttttctggttataccccgaggccccgcacgagcctggcaaattctaaaaggcaagggtcagcggcgagacggagctgtccttccgccagggccacgctgcagacctcgaacgtgtagacagacacggagacacccaaggcctcggccatgactcgccgcacgttgctgccatacagcgcggcggtcctcttctcctcctcagaagggctgtacacaggaaggaactcgatttccacttgtctgtcaaactgacacagtgtgagccacaggacttccagcgctccaggtccttgccacgaagggagct

SEQ ID NO: 676332 - DNA, 396 bp, Homo sapiens
gcacgagaaaattaaccagcctatttcatgacatttactactccagccccacctacttttatcgggtatatcccaaggatcaaaaacagaactggcgcgaactggcaggcatccgcgtcgaatatgccctgcctgctggcaagttggacccagaagaggcaagaaacactacgcgcgaacgcatcaccgacaccttcagcatcggcaatgtcaatttccccaccctctggacccgcgccaccccacccgacgtgcgcatcaccctgggtggcaacaatgcgggcttcgtctccctgcaagccgcgctggcctacctggaagcgcatccgcagcaaaccgtgtgggtcatgaactgggatgcgccgagccggccgaaaaccatgcagatcaatgaaa

SEQ ID NO: 676333 - DNA, 325 bp, Homo sapiens
gcacgaggaactcattagtgtttttgagtttattttatatgtacctgacaattcaatgtaaaaaacaaacatggctggcgcagtggcccatgcctgtaatcgcagcactttgggagttcgaggctcccaaagttcaagatcagcttgggcaatacggtgaaactccatctctacaaaaaatacaaaaattacccagtcgtggtagcatgcgtctgtggtcgaagctagttgaggggctgagatgggaggattgcttgagcccaggaggttgaggctgcagtgagctgtgattatgcctctgagtaacaaagtgagaccctgtctc

SEQ ID NO: 676334 - DNA, 874 bp, Homo sapiens
caatattactcaaatattgcgggaagtgacatggtcatactaaaacaaacaccataatattatataataaatacttagataagtttcgatgaggaatggcttaggagaggacattatcctccttccgtgatgtggatattccctcgataatcgcctcctcttactcccatgctgaagggagtaagtactcgtcatgcatgcattatgttatctggagagaaaaagcactaggtattgtagagacaccagtattagctaatgtattttggagtgttttccattttacagtttatattccagcactcaaaactcagggtcaagttttaacaaaagaggtatgtagtcacagtaaatactaagatggcatttctatctcagagggccaaagtgaatcacaccagtttctgaaggtcctaaaaatagctcagatgtcctaatgaacatgcacctacatttaataggagtacaataaaactgttgtcagcttttgttttacagagaacgctagatattaagaattttgacatggatcatttctacttgctggtgcatttaaccaataatctgatgaatatagaaacaacatgatccaaacatatggatatgatgcgatgctctgtacacatacatggcacgttggcaggaaatctctgaaacaatacattagattaagtcagtttcgaaggagaaggttgggctgatgcttgagtgtttgttcataactggcccgacggttggcaacatggtctcattctctgcacaaggtgtaaaaatactgaatctaagaggctatattgcccggattctggattccaaatcaggctgactcgtaacgcagagtttagaatgtttgcttgaacgaaaccttgcagca

SEQ ID NO: 676335 - DNA, 202 bp, Homo sapiens
attacaggcacctgcatcatgcctggctaactttatgtatttttgtatagacggggtttcaccatgttgcccaggctggtcttgaactcctgacctcagatgatccacccgcttggcctcccaaagtgctggggttacaggtgtaagccaccgcacctggcatctggataatttttcagttttttgtagtgaggttccatcg

SEQ ID NO: 676336 - DNA, 239 bp, Homo sapiens
ccacaaacaggggtgaaacccccggcccttggacgttacaaaaaccaccaataacacggcgcgggcgggggacagcccgcggaatcccacacgccgcttgggggggcgtagcgcccgcgagaaatcctgtcttaaatcggggagggcaacgacagtccagcaaccggcaatgcacaatcccctttaccccccccgggcccccaaaggggaaaaccctttcccaaaaaacccaaaaaaaa

SEQ ID NO: 676337 - DNA, 136 bp, Homo sapiens
gtcggtggggagtcactcctgctccgggggggctcctggaacttgggcccaccagatgtggagccgctgtcacttttcctcctcttaggggacgctgatcgggatggggacctcgagtagctctgtcacgggtccg

SEQ ID NO: 676338 - DNA, 886 bp, Homo sapiens
  misc_feature (386)..(386): n is a, c, g, or t
  misc_feature (622)..(622): n is a, c, g, or t
  misc_feature (629)..(629): n is a, c, g, or t
gctgcggcgggcgttgttctatgtttgagccgtccgtgcttcaccggtatacctcgctaccatgtcagggccgcggcaagactggcggaaggcccgcgccaaggacaagtagcgctcgtcgcgcgccggttcctccagttcccagtgggccgtgtacaccggctgctgcggaagggccactacgccgagcgcgtcggcgccggcgcgccagtgtaccctggcggcagtgctggagtacctcaccggtgaatcctggagctggcgggcaatgcggaaccgggacaacaagaagacgcagaatccatcccccgccaaactgagagtctaggccatccgaaacaacgaggagctcaacaagctgctgggcggcgtgacgatcgcccagngaggcgtctgcccaacatccaggccgtgctgctgcccaagaagaccagcgccaccgtggtggcctgaatggcgccctcgggctggcaagaaggccacccaggcctcccagtgagtactaacgagtggccctgcgccgctggcctggcctgccaggcctccccatgccaccacaaatggcccttttaagggccaccacctgcccgtcatggaaagagctgagccgcttcagactgcngggcaangcggtgcgcggctcacttaccattggaggtaatcaagaattgggcattacatggaggtaaaaacgacaatgcatggctgttacatctgacgccgaagcataagacatgtaagcgcccaagcaaaaaaacctgaaatagcgtcatcacacacaataggtcttcgacagcacagttagctctgagactgttcacggagacctcattatgaacctgacagagatcccaaccaacctggtgcctaccttgattcaattcaa

SEQ ID NO: 676339 - DNA, 221 bp, Homo sapiens
  misc_feature (24)..(24): n is a, c, g, or t
tcaggatccggctaggagctatgngatgggtaaggagacagatcctctcaggtatcagtctaagtagtccaaaggaattgggctttgttggcctacaatgcaaaggataagtttacatgagaagagcggccttgtcattttggagttaggtggtgcccttcacttcatgtctcttagtcggagagagaaaaaaggcggaaccaaaacccagaacaaaacca

SEQ ID NO: 676340 - DNA, 218 bp, Homo sapiens
ttcctacacgtgttaggtctcagcggaaaggtgatttctgcgaggaaaccttccaccatgccagtctaaatggggtcttccctgtgatactctcatagcaccggtgcggcttttattctccacgtcacacacggacttggagttattggtcagatgtctgtgtgtcccggcgggaaggtcaatcccaggaaggtagagagccggggggtacggagctc

SEQ ID NO: 676341 - DNA, 144 bp, Homo sapiens
gttctgcacttcagcctaggtaacagagcaggaccccatctcagtcaatcaatcaatctcagtggttgaactacccttgatatggttcagctctgtatccccaaccaaatcttgagccacccagcaattcttctttttagaatt

SEQ ID NO: 676342 - DNA, 544 bp, Homo sapiens
gagataaggcagagaaggttgaaaagatcagtcgagcttaatatatcgtgttgtatcatggtttgcttccaagatgaagaatatactgatgttatggtcccaatttttgctatatatcctgttctggggacagttaggtattaaaacaatttaatatagatccggtggtatggatgagaaaacaatagcttgacttgtcgctggtactagttgatcactgtcagtatgtcgtagatggagccattctttacgtcccaggtgaatgttcattaaagaatgctactggccgcggttaaacagtgagaacgacaggaatatggatattgcttcactaggaggtgtgtagtaacagcgagtaggattaaactccttcgtcattgccatattggttattcaggtgatagcctatatcctcgctgtggttggactgagtctctgtatagcggcgtgtataccaatgcatggccctcttctgatttcaggttagagtatcttagctctagcacaattacttggactagtttatatgaaatttgtggggttc

SEQ ID NO: 676343 - DNA, 454 bp, Homo sapiens
tgacttggtaaagttaatatctatttatgcacccgactagccctaacccaaggaatgatatatattaatggcctcgtgacggcttttacgcggtgcacctgagaaaaactttgcttgaagttagtggacgagtgccgcattacaggagaatcaagcgcgggacacattgtacggtgacggaaattagattacaattaatagggggccgactgacgcaagattagagaatttggcctgtggtgacgtaaacaatacgagacacttgttcacgattacagcggaaacaaaacaaattgcatttaggcggagggacatataagggcagaacagcatgaatgtatagtgaaaaagacgcaagaagtacctttgttagtggttgagaaattattcgggaatgattgattattaccggaagttacgaatacggaagaaggcaccaatataaccttgaaac

SEQ ID NO: 676344 - DNA, 181 bp, Homo sapiens
gaccccagaggataaaactccataaagtgagcccaattaaacacatgaaaatggttgatccagctgagcacgcttgctcagatctataatcctagcactttgagaggccaaggggggtggatcgcttgagatcaggagtccgagaccagcttgagcaacatggtgaaaccccatctctacc

SEQ ID NO: 676345 - DNA, 160 bp, Homo sapiens
cgcatcagcgaacaccaccggcccgtcatcggcgtgcacagtgggatcgcccggatgcccacacccgtcctcagctgtcaatccatctacctacacatctgtccatctacccatctacttccgccgattttacaccaacccctgttcggttgagcggaga

SEQ ID NO: 676346 - DNA, 140 bp, Homo sapiens
  misc_feature (32)..(32): n is a, c, g, or t
  misc_feature (63)..(63): n is a, c, g, or t
  misc_feature (65)..(65): n is a, c, g, or t
gtgattagcatagtgatgcctccctcagcagntcgggcaacacagacggtgtccctacgtagnanaaagccacctgcagtaaatggcaggacccagccaggacctgcaccacctgcaatttcactgcccactgctcctcc

SEQ ID NO: 676347 - DNA, 194 bp, Homo sapiens
  misc_feature (81)..(81): n is a, c, g, or t
atgggcattcgccgcggattcaccgttagtctatttaggcgacaactggtacaaaattaatgactatcttgccgccaaagntttattgcaggttaaaggcagttctcctactgcggttcctttcgaaaacgtgggcacagggggggatacccgatggcatatttccgaccctggcggtcaacgtttaggtgggc

SEQ ID NO: 676348 - DNA, 256 bp, Homo sapiens
catgtgggtgatacccgtcatctactaaaaatatgaaaattagccaggcatggtggcgcacgccgtctaatcccagctactcagaaggctgaggcaagagaatttcttgaatccaggaggcggaggttgcagcgagccgagatcgcaccactgcactccagcctgggtgacagaacaagactccatctcaaaataagtaagtaagtaaataaataagattatcaaggaaagtgaaaagacaacccacaaaattgga

SEQ ID NO: 676349 - DNA, 204 bp, Homo sapiens
cagagaatactgttcctaattaaaacaaggagacaagtagggcacaatggctcatgcctgtaatcctagcattttaggaggacaaagcgggtggattgcttgacgccaaggtattcgagaccagcctggcaacagggtaaaactccatctctactaaaaattaaaaaaatagccggtgtggtgatgtgcgcctatagtcccagc

SEQ ID NO: 676350 - DNA, 194 bp, Homo sapiens
  misc_feature (46)..(46): n is a, c, g, or t
  misc_feature (60)..(60): n is a, c, g, or t
  misc_feature (66)..(66): n is a, c, g, or t
  misc_feature (101)..(101): n is a, c, g, or t
  misc_feature (114)..(114): n is a, c, g, or t
gacactctaggggcagaaaacgtgatctaaggagtgaagaggcttnctgagatcgcacanacaggntaagacttgcgccagagtacctatccccaacttcngaagttagttttnaataagctgatgatctgatttacttatgtttacatatgtagctgctaactgaaacaaatttatttcttttaaacggaagg

SEQ ID NO: 676351 - DNA, 210 bp, Homo sapiens
ctagaggagtctccgctgatcgcttaggaaaaccgcaagaaccagggcactgtaaattggtctgttgatgacattgtcagaggcataaatagcagcaatgtggaggatcagctccaagctactcaagctgccaggaaactactttccacgagaaaaacagccccccattagacagttacagcaaatgcaggcgtcgccagaatagaaggt

SEQ ID NO: 676352 - DNA, 800 bp, Homo sapiens
ctggtcgatcctttgtgcctaaatatatgcctatattggccacgcctctcgactaataaactaatctatgacagcccctactacagcaaaggatcccagaaatggccagccctatcttccccatctgtgaccctacagatactcgagacatgggcctcatcattaaaggcagagccgggtctccatcccaaccaaatctcacctcctgcctgtattatctcaaggtactggaccatccagacggagaggggcaatgtcctcgggctgttcctcaacctgatgtgaacggatcacccttcttccatgcttccctgacctagaactatcggttcctgtaagcgggccctggccacacaaacatggacttgccgttaatgctatagaatgggaaccaccctggatgtatcctgccacgatctagccatgattccgccatcatcctcaaaaaggcccgagtcgctcctcgctgcacttaccgccccgccctttgtgcccgcttgcctcacccgacggtcaattaatgattcgcagacacccgcccacgctccccatgcaccacccattcacccccctcgacatctacctccatccccgcactctacacccctcaccacctacaatatcgcaatccccataaatacacccgtaacacacacccacttttatatctcaacccctaccacactttcccgtttacctaacacttccaacgtaatccctcattcatctccacaatatcaaattttttcaacacaccttaccgaaatacttattccccatcccagtccaccgcactcccg

SEQ ID NO: 676353 - DNA, 167 bp, Homo sapiens
  misc_feature (31)..(31): n is a, c, g, or t
  misc_feature (57)..(57): n is a, c, g, or t
gaataaaagtttgcaaaccaccatgaagctncaagtcttctcttacttttcaacttncaactctgtagtgtctcacttttaaggacagcttgatttccaggagaaaatagattagcaatcaagttatctccgacttctcaaggcttatgacttctaaaaagtgaatc

SEQ ID NO: 676354 - DNA, 296 bp, Homo sapiens
agcacaattatcctaacctttgtttaggggtcacacagtacgaacgtcctgagaaggtctccagtgagaaggacaacagatgccacagcactggatttgcatggactctgcaacatgctgaccctgagctaccagttcttgctgggcagttcttcttacccccttccaggttcccagctctgcagcccccgtctcatacctaagaggctttgatcctcctctcaaatctgttggctcagccctgtcacaatttctaggactaattctcactttagaatagcgaccccagatctgag

SEQ ID NO: 676355 - DNA, 988 bp, Homo sapiens
  misc_feature (987)..(987): n is a, c, g, or t
gggctgctgagaagcaggtcccaggcggcggcggcgggcggctggcagtgtgctggtgggcggtggcagtggcggtggtggtagcggcggtggacgtggtgccggaggggaagacgaataaagaaaacgaacgcctcttgccgagcggatcgaaggcataacaacagaatttggggatagcctgcagtttggacgattcttcatgattgattaaggatgtcctcagcagcgaagcatggtttactggcatggagatttgtcagaggttacaggggctacgtgttcccgtatgacaaagacgtcttcgaaagaactagtctaacttcaagatgggtaacagaccacaagattcagagggaagaagaagtgactgaagagcttctgaccgataatagatacttgcgttctggttctgatggatgctgaaggagcctggagctacgccatgcagctgaaacatggacagccaaactgaaccccgaaaacggtttcatcttgttatctcgcctacgcaaagccgtgaagcatgcagaggaatggaacgcttgtgtgagagcaactcgcgtggatggcaagaccagattagaggctcaggcttacacagcttacctctcaggactgctacgttttgaaacatcaagaatggaaagctgcattgaggttcaaacaagtgcaaagtatctatgagaaggtagccagtgttttcacagaggagcaggtgtgctgtataaacaagtgtggaagaaattcagccaaatcgtaggttcttatatgggacagtcagcataatgatcatgcaatgaatgaggtctggggcgaggttctggtgaaaatgaagattaatggagtcacaagcttctattatggtttttggagcgaaaatgatgtttattgaggcacggaattgggttaataaataccgttatgcgggaagcggggccaagagaattacagggtacatcaattgtctctcttattttctgttana

SEQ ID NO: 676356 - DNA, 187 bp, Homo sapiens
tactatagtaggcagtacatgcaaagcctccagagccatcgttcagaatcgatcactaaacattttttttcttagagacggaaacctgctctggtgcccaggctggagagcctgggcgcgatcttgactcactgaaccctctggctgacggaactgagcaagtctactgcctcacacttgcgagtag

SEQ ID NO: 676357 - DNA, 902 bp, Homo sapiens
  misc_feature (1)..(1): n is a, c, g, or t
nagttcccccttggtgtgaaccacgtccgtttggcccttttgtcttgagggtgccccaggtgtcccaaacccgtgtttttatctcctggccctgtcgttggggttttatatgttctagggcctgggttgcggattttggcctctggggttactgttgagttggcttgagtctccacggatgtccttgtgtccccggtccccgcccccttgggaaactcccaggggtttggcttccccggtaaaacaccaatgctctgatttgcttgggaggccccccccccgtttcggtcccctgggtccctcccctttgcgcaatccccctggggcaccggtcccttcttcttgggaatccccccgtggacccccccggaaaggggaaagaatgagggaatttcaccatcccctgttttagattccccgttaccctttatgccctccaaagtttgggttttttaaagccaaaaaatagaaaaaaaatttgggtttttggggaaaaagggaaaattttttttttctccttggttttgataaaatgggaatttgggaatttttaatgctattagcccctgggcttgccccctttggggcacgctatttaaggggaggggatttctcccccggctgggggtgagatattccccccccccccgggactccccttccctctctggctcctctcccctctttctatgaggaaataagatgctcgtaactcttttggaacctccacattttttgattttttatttgggtaggttttggggtcccggccctctttttttaccccctctggaggaaataagatgagggagaaaggagaaggggaggaaacttctcccctccccccttcacccttagcttcttgaaaatgggcccctcccgaataaatctgcccggttttt

SEQ ID NO: 676358 - DNA, 248 bp, Homo sapiens
ctcataggctgggaggggaggggctctctgatgtataccccacttgcactgtttagggtggctggtctgtctgtcagcagagatgcaccaggatctctagaaggtggagtcccaggctaatggcaggcaatagctaggagggagagatagcaaggcagactcggcagtatgtgcactggggaccaggacttgcggaaagagggcgggcaccttgctcctccattgttgtgaatttccgatgttccgca

SEQ ID NO: 676359 - DNA, 188 bp, Homo sapiens
acgacggaccatatacacatcgatggtacaggtatccagatcagggacgatgagccagtctagccacggaatgagagtgcccgtataggtgcctgtgtattcactcatcaaaggtttcaactgcattgtggcgcacggggccagtacgggtcgcctctacggtcgcttcacgtaaaatttcctgcaat

SEQ ID NO: 676360 - DNA, 292 bp, Homo sapiens
aggtcactctaaggatcccgatcacgtgcattgtggaagtggatgaggagaaaaagggagggtgagtgaacagaagcgtgtcttggctgtgcagagctgggtttcagtccaaggggctatcccttcaacccctcatggtgccagaactgaccaatggagcccacagtagagtgagaagtgaaaaccccattctgtattcccagagcgcagctagtttcatttacagatgggaagcaaacccttgggatactttgaatgcttaaaaatccaacaataaaggaaagaatgaaac

SEQ ID NO: 676361 - DNA, 433 bp, Homo sapiens
  misc_feature (42)..(42): n is a, c, g, or t
ggtgggcctgctggtcggcatggtaactcgagcgcaccatcnggcccgcaggcggcatgcgagaagcccatggcctgcgcctcgcgctcgaacatcgtgaagacatcgggatgcgcatagcgcagcaccggcaggtggtggccggagggcgccaggtactgtccgatggtgagcatgctgacgtcgtgggcgcgcaggtcgcgcatgacggcaaggatttcctcgtcggtctcgccgatgccgaccatcaggcctgacttggtcgggacggccgggttgcgcgccttgaaggccttgagcagggccagcgaatgcgtgtagtcggcgccggggcgcgcctgcctgtagagccgcagcacggtttccaggttgtggttgaagacgtccggcggcgtggcggtgaggatgtccacggcgatgtccaggcggccgc

SEQ ID NO: 676362 - DNA, 167 bp, Homo sapiens
cgacacgctacaggattgacatgattgatagctctttctcgattcctgtgggatggtcggtgcctgggcagaaccctaggttggtggagcgatttgtctggttaattccgataacgaacgagactctggcatgctaactagttacgtgtcccctacgtgtccggcca

SEQ ID NO: 676363 - DNA, 225 bp, Homo sapiens
  misc_feature (52)..(52): n is a, c, g, or t
cgattatcgacttttggcacaagaacagagagcgaacgagcagagaaagganagtgaagaggaagagaccagtatagatgttgctgggcagccaaatgaagttaccaaagcagcagaatctccggaccagagagacacacatggagggccccaggaggaggaaagtccagtctgaatccatggggctgcatggtaaattgagcagttcatgacccaggatatctg

SEQ ID NO: 676364 - DNA, 135 bp, Homo sapiens
tctctacagcaaaatgaccggctcgcagcgcatcggcatgttcggcgcgcagaaagacgacctgccggccatcttgcgcaatgctgctcgccgccgcgttttgaaacccggccacgtcttacgccactggcgctg

SEQ ID NO: 676365 - DNA, 233 bp, Homo sapiens
ccctcagacctttgccggtcccattattggtcctggtggtacagccagtgccaacttcgctgccaactttggtgccattggtttcttctgggttgagtgagatgttggatattgctatcaatcgcagtagtctttcccctgtgtagctgagcctagattcttctaaacactttgagagcacatcttgataaagtgctcagataaattatttctgtcttgttatgctttttccc

SEQ ID NO: 676366 - DNA, 888 bp, Homo sapiens
cgcacgtcgttcccgcctccgtcgcggccgccctcgctctctcgcgctacctcccgccgtccgggtgcctccgtcggtaactctcgttagtaccacggtctggtcttcagctacccgcacttcgttatccgagttattgcgactcgcggacgggtacccgggcgaggaggctggatacggatcgttgcctgagcaatggtgcatccggaagaaactggtgattgttggtgatggagcctgtggaacgacatgcttgcttcatagtcttcagacaaggaccagttcccagaggtgtatgtgcccacagcgttgacgaactatgtggcagatatcgaggtggatggaacgcacggtagagttggctttgtgggacacagctgggcaggaagataatgatcgctgaggccctctcctacccagataccgatgttatactgatgtgtatatccatgcgacaaggcctgattgagttagaacaaatcccagaaaagtggccccagaagtccagcatttctgtcccaaggtgcccatcatcctggttgggactacgaaggatctacggaatgctgagcacacaaggggggagataccccagatgaagcaggcgcaggtgacagctgcaggaaggacgcgcatcatgcccacacggatggcaaccgaagcatacaggagcagacccgcacagaccacgaagcggtgcgacagtggtgccaagctccacgcagcgccagacgaaccggcaacaacaccagacggcagccagaacactgacgcacccccgccataagccgcacatacagagagcaccaccaccgaaacagccaccccacacaacacaccccccgccaaccaaagcaacaaacaagctaccacacgagcaaaacaaaa

SEQ ID NO: 676367 - DNA, 214 bp, Homo sapiens
agggaggggaagccccaaattgcaaacccagggggccctttttcattttttttaaaaccctgaaatccccagcccaaaggggatgcccccctgccccccccaagcctgggattgggcaaaacccgggttttggttctttgtaaaacggatgttttttggcccaagggcgggtgggaaacagcccttgtttttttaataaaaaaagggtttgcca

SEQ ID NO: 676368 - DNA, 491 bp, Homo sapiens
  misc_feature (171)..(171): n is a, c, g, or t
  misc_feature (365)..(365): n is a, c, g, or t
  misc_feature (381)..(381): n is a, c, g, or t
  misc_feature (383)..(383): n is a, c, g, or t
gaccgtcggggcagggagaattccgctcggtggagcagctccaggagacgctgctgcgggccttccgggctctggtgctgtagaacggggccttggaggctttcgggttccgcagcgtgctgctcaaactgccggacctgggggccctgaacaacatgcatttcgagaagntgctgtccttctgggtggacggccagtgacccggccggccggccttttggcggtgcccccttggacagaaacgaactgggcgcttctctctcctttaggaggcggaaaggaaaagccaagcgggatcttgttttttttgggataaaatatttcgaggtgggccgctggccccctgagccttcttggaaaaaccngcctccctcccccatnancggacttcccctcctcccctattttaacccctctgtttccccccccaccctcccctggccctttggtttggtttggtcctgtttcaaatcccataggtcccagctgga

SEQ ID NO: 676369 - DNA, 1135 bp, Homo sapiens
ctcgccagcaccgccgccctctgccgccgcacccatgcacaccgcgaccccatctcctgtgccaggaacttgctactaccaagcaccatgcccataccaaatatccagcactgaccccggatgcagcaagcaaggagcatgtcatgacactcgatcaccagcatcgatggcacctggcaacgggcatcctggctgcagaatgagtccacatggagagacattgccaagacggcatgacagatccactatggacaccgagaaacaccgcaggaagaaccaggcagcattctacacgccagcatgctgacatgaccagccatgaccagcaccgccgatgcacaccccatgcacttgggcggatgatacatacctcattccatgaagaccacctcctaccacgcaacggcgagactgatgcgcgcgtcccctatcccaccaaaagcttactcaaacatccaaacgggcacggatgattgataggcgcaaatcaaacggtatacagcacaaaggacgcaagataggatcccactacatgtgacaataggcaaaacgcaaaactagcgaccgcacacacccctaccccaaccaccccaacgacgcgcatctgcgcacactcgcagccccactggatacaactgaaaagacccgccgcgcgcagaggcaacaccaaacagtcacccccccagcgaaaacacagagcacacaccctgtcagcataacggcacccctagaccaaaccattgcgcaggaacaccaaaccaagacatggggaacaccaaaccaaaccgacattgacgttgccactacaaacacagacacattatgagccgcgcactaatcagcccagtcacgacccgcatatcaacaacccaccatatacatgcaccaaaatacacattgcaaacaaaataatagcacacaaataacgctactccctagacacacccaaacatacaacttaccccacgatcaccactcaacaccaacacaatctaaaccctctcacaattatgcttacacactcaattatacataaacaaacccataacaaaaattacctaccccaatgactacaacagaacaccaaccaacacaatataaaaacaccaaagccccccacaaaaccactataaac

SEQ ID NO: 676370 - DNA, 148 bp, Homo sapiens
actagtccacggttggctttaaacgcattgcctacaggaaagcagaaatacacttttgaaattgaatatccttgtaaagctgcgcatggtggtctcatgcctgtaatcccaaaactttgggacgctgagacaggtggatggcttgtag

SEQ ID NO: 676371 - DNA, 172 bp, Homo sapiens
tagaggatctccctggtatcccacccaactaggaggacgtctgtttcatgagagatgctgtcctgtgcttggatagtcagtcaatcatttgtgtatgagacaatgtacattccatgttttgaaataatgatctcagacttctaagttaaaattttaaaatttttgtttgttt

SEQ ID NO: 676372 - DNA, 121 bp, Homo sapiens
ctcccaagtatgagaaatagtagagttacaccaggtgttgtctataggggagaggaattagatggctgaaataggaagtagtataaatgctatacactttgttcattctatccaattccta

SEQ ID NO: 676373 - DNA, 336 bp, Homo sapiens
  misc_feature (223)..(223): n is a, c, g, or t
  misc_feature (239)..(239): n is a, c, g, or t
  misc_feature (274)..(274): n is a, c, g, or t
  misc_feature (286)..(286): n is a, c, g, or t
tcatcatttgtctctgtgtggtttgcatatgcatgaagaagaatgcaggtgggagaggaaggcgtgacacccaagaagcaggcagagacagtccccaagactctagcaagactgttgtggatgatgaggagatgggggtttgcttttggaagattaagtcctgtaaaacttgtctaggccactccccaggaacttcagttggcgagtctttacctgtcacctngacttggatttaggantcatctggggagatggcccctttgagtggctgggnctgtgaaggacngcaggccaattctttgcacccctggacagaaacacatctcacctttctgg

SEQ ID NO: 676374 - DNA, 217 bp, Homo sapiens
  misc_feature (14)..(14): n is a, c, g, or t
ttcatgtcgagccnctttcatcccctgcagtagtccaagctacaccaaacattaacacatatttgtggtaaacatttctgtataaagttacctgccacacacataaacacaaagaacattccatgtcattagtcggaacaaaaatttaaaaactgggtcatttgtgaaaaacctcatgtcgtataaaagttaaagggatgaaaggcctggacatgaa

SEQ ID NO: 676375 - DNA, 837 bp, Homo sapiens
gaacgatagacccatatgtgcatagagacagcaacatacgcagcatcctaagatctagtgtgtatataagacatttatcaagctatctaactcagtttccaaacatgtatccatgattttataaaccgtcttgatttcctagtcaacatactatagaaaacaccgtggcgtacgtcaaaacacaacttctcagtgtcatccatggctgtcgtgagagacaacatagcgaatatctggtatgttgcaagcgtttcaagcatagtccgtgaacgttaaagagagtttggtggcattaacgttgggtatcgtagaatgggataataaagtgttgcgctcgcgtagattcaacgtgttggtgggtcaaagaggcttaaaaagcgttgtggaagcgcgtaagcttttgcgtgctatgaattggggtcggggtaaagtagactttgaaaagagtacacacgactgtgtatatctctacaataggcttcaaagaagagagagagataatacaacagagagacaacaaccacacacaaaccaagcacacatacagacacacagacacacagacaaagacacacacagcaaacagacacacaccacacagacacaacacgaagacacaaaagcacgacaacacacatacactatcacatacacacacagagagagagacacagagaggggagaagagaagcgcgagcgcggagcgcgcagcggagagcagacgaagagagaagaggcgaacaactgcggcacgagagagggcgcgcagcacggcacgccgcgggccgcgcggggcgcgcggcgccagcgcccctcggggacagaagagaagggagc

SEQ ID NO: 676376 - DNA, 537 bp, Homo sapiens
cacgaggtgccaaccaccttacgggaggcgggtaaagctgttccatgggggggcaaaggcgtcgcctgcgcccgtgaaacggttctacttgtgtactgaaggagggtgctatggggcttgcagcagcaaaggcgctcgagccggagccacgaccgaaaggcctgcatctgctcggcgacctgtacggttgcaaaggggaggatcggtacttcttcagcgccgatctgctgcgggagcactgcttgaggttggtggcggaagccggcctgaccccggtcggcgattatttccaccagttcggcaccgacggcggcgtgaccggcatggtggtgctcgccgaatcccatctctccgtccatacttggcccgaaaagcgctacgtcacggtggacgtgttcgtgtgcaactacaccagcgacaaccgccacaaggcgcacaagctgttcgacgcgctggtggacacgttccgtccggacgagccccgcgtgcgctcggtggagcgcgaataaggccgctagccgcgtcgatacgccatga

SEQ ID NO: 676377 - DNA, 85 bp, Homo sapiens
  misc_feature (1)..(1): n is a, c, g, or t
  misc_feature (35)..(35): n is a, c, g, or t
nattcggcacaggggaggtcttcctcaccgctttngcgccccgaagccgaccctgcgctacttcaccaccgagcgcttcctgccc

SEQ ID NO: 676378 - DNA, 1107 bp, Homo sapiens
gctgcttcatcctgtgggggcctgtggccctgtccctgtgtgggtggggctcttccatttccctgacttagaaaccacactccacttctaacagtggttttgagatggcttagtcagcactgggtagctgtttttgactccattcttgtgctttctttttctttccagaaggattttttgttgcatgaaatgtggtctattttgtttgccatgttatgtcctccttgtgaatgtgcagctcatgaagtgccttgtgaaatgtcatgtggtgacagtgacccccagggatgtggaacccctaggctactgcactttagtggttctgttctccatgtggagatgctgacctcgtccccctgatcctgacctgcccttcctggtccactgctctccgtgttttggcttccacatggcctggacttctctggcttctctgcccacacactccctgtccccatgttgtccctgcccttgcccagcacatggtgacttcatcttcttgtcctctcagctcagtggactcgctcaacttttgtatacgtctccacttggtggccagcagcttgctgcactgacttgtcccaaaaccttccatcctaaataacctttctgatacttgaaatattcggtcagcttcaatacagtacgtttctaattatatccctgaaacggatacagatacctaattaagatgctgggcatgtaatcccgtggcagcatcctgtgtccatgacagcaatctgggacttccctcctacgctgccctgtctcccgcttgtccatcagtgaattgtggtcctgacgtcctctgtgagaacacggcatatctggcataggtcagaaggcggccaggccctagagaacgcggtagcacatctccgtacccggggacgacatgaattgtaagagccaagaggagcggtttagtatatcactccatattgtgcggcaccccttgtctgggagtaatacccgcgacccatatatctaggtgagcttcgtttgaacacctggctaccaacgaaaagacaaactggagcggccacaagagttatttaagtgaaagtaaccgtgttaatttctaccacttacataaagcgggccttg

SEQ ID NO: 676379 - DNA, 720 bp, Homo sapiens
gaccacgcaggggaagagacagcaggagccgtccagcacggaggaaggcgacatggccaaggagtggggctacgcctgtcacaaggtcctgaccactggcatgaattttcccaaatgccaagggggaaaaccagttcgcccatttgagctgcatactaaagacatcaggcatgaccccttctctgccagaccatggtctgtgtcttcatgatgggggctctgcaaaaaccaatccctgccctaacttgggaagcaccgtgccgagttgtatttgaatgactacctttatggatacgctcacagtgctggacgaggggcggttcctcctccctggacctctaccgacttcgccagatttcatcctttccacctgggggctcttccggaatgactccatcggcctcttggacgcaacacccgtgtcgctggagtcccagtattggcacgcgggacgcttactattttgagtcaactgggcacccacgaacgtctaccccctttagaatagaacgcccctgcaaagcaagcagccgcctgggattcgcctggagactggcattctttcttggaacaatagggccacttgcagacctggggcgagttccacgacctttcccttgaatcgcatcggacccacatcattaagcccacagggccaaggacggcgccttacaacacgtttgccccaatccggctgttcacggcattgccgagaaaaca

SEQ ID NO: 676380 - DNA, 309 bp, Homo sapiens
cgttgcccctcccttgcctaccactgccagccggtccacccagctagctccatacccccaccaaagcaagtacccaaacacacaatccaaggtgtggatgatctctggtgatcacctcactaagtccaccaccagtgacacctgaacactactcccagggtctgaggtcaggcccacttaacctgccactaccagcagagctaggacccatactcatgcatcacctgcaggtctggggaccagcccacacaactcattgcagccaccacaataccagcggtggacaactccctggaacctaagtgtctg

SEQ ID NO: 676381 - DNA, 1180 bp, Homo sapiens
cgatccgcctgcccgtccacaccgcgccgccagctcaccatggatgatgatatcggcgcgctcgtcgtcgacaacggctccggcatgtgcaaggccgggcgttcgcggcgacgagcgatgccgccccggggccgtcgttccccatccagtcgtggggcgccccaggcaccaggggcgtgatggtgggcatgggtcagaaggattcctatgtgggcgacgaggcccagagcaagagaggcttcctcacccttgaagataccccattcgagcacggcattcgtcgaccaactgggtacgaccatggacgaaaatctggcaccacgaccttgctacaagtgtggctgcgtgatggctcccgtaggagcacccgcgtgctagcgtgaccgaggacaccccgtgaagacccgaaggacaacacgccgagcaacgatgacgccagaatcatgctgtgagcaccttcaagacacccagaccatgtagcgtcgctatccagtgctgtgctacatcccatatacagcctctgtgccgtacgcactggtcatcgatgatggacatcccggtagacaggggtcaccgcaaactgtgcccatctacgaggggtatgccctcccccgatgccatccatgcgttctggacctggctgcacgggacctgactgaatacctcaatgaagatcctcaccgagcgcgggtacagcttcacgaccagtgccgagcggggacgcatagtgagtgaattacaggagaaactgtgctacgtcggcctgtgactgcgagacaaagatggcacggatgtctccaggtctcctggcaaataactagaactgcctgcacgccacgtcatcacattggccacccacccggtccccacgagacgacggaacacacaccgaaccttccaccctggcatggaacccgggaaacaccaggaaaaacaccccacaacacccaaacagaaagcgagaggacaacccgagcaaacacagtcgccacaccaacgggcaacgagcccacacaaagacagggccacgcaccaacacacaacgacaacacccgaacaaacaacggaacacacaatgtcgcaccaacccacagcggcggaacgcccccacccaagccgcgaccatagcaaagacgcgccccacagaaacaacaccacagacacgtacatcagtgcaccc

SEQ ID NO: 676382 - DNA, 303 bp, Homo sapiens
caggacagatctcaaagtacaattcacttaccttgtctaaaacagtattcaaaggatggttatcggagagcctaggtaactgacccctagactgtccctaaacaagcacgagacagttaatgacagctagctagcagagagagctgccatgaattgaacaaaacttatataggatgcgcgtccttaatccaaaaacgcaagatccgaaatgctgcaaaacacagaacttactgagcactgacatgttggatttgggatgctcaactggtatccattctgcaaatattcttttttttttttttt

SEQ ID NO: 676383 - DNA, 246 bp, Homo sapiens
  misc_feature (172)..(172): n is a, c, g, or t
taaatatgggggtctcaggtaaccaggctggcctcaaactgtagttgaggctgaccttgaactcctgatcttcctgctgcccctccagggacttaaagcacagagaagcaagttcctactcctgcggagaggtcaaagcttttgatccttttgagacagggtctggccaaantgggcctggcattcctgaatcctctggcccaagccttccccagttgccattaccaacaacaacccaaagaacct

SEQ ID NO: 676384 - DNA, 81 bp, Homo sapiens
gcggccgcctactactactactgctcgaattcaagcttctaacgatgtacggggacatggcagttggatcagctcctttac

SEQ ID NO: 676385 - DNA, 115 bp, Homo sapiens
tgcacatctgtagttccagctacctgggaggatcacctgagcctgggaagttgaggctgcagtgagctgtgatcataccaccgttctccagccagatcgacggagcgagacttgt

SEQ ID NO: 676386 - DNA, 2575 bp, Homo sapiens
  misc_feature (5)..(5): n is a, c, g, or t
  misc_feature (52)..(52): n is a, c, g, or t
gaagnagtagaaggccaccataccatttacatcggagtccatgtgccgaagngttacaggagaaggagacgtcacaagagaaagacagggcacaaagaaaagaaggaaaaggagagaatctctgagaactactctgacaaatcagatattgaaaatgctgatgaatccagcagcagcatcctaaaacctctcatctctcctgctgcagaacgcatccgattcatcttgggagaggaggatgacagcccagctccccctcagctcttcacggaactggatgagctgctggccgtggatgggcaggagatggagtggaaggaaacagccaggtggatcaagtttgaagaaaaagtggaacagggtggggaaagatggagcaagccccatgtggccacattgtcccttcatagtttatttgagctgaggacatgtatggagaaaggatccatcatgcttgatcgggaggcttcttctctcccacagttggtggagatgattgttgaccatcagattgagacaggcctattgaaacctgaacttaaggataaggtgacctatactttgctccggaagcaccggcatcaaaccaagaaatccaaccttcggtccctggctgacattgggaagacagtctccagtgcaagtaggatgtttaccaaccctgataatggtagcccagccatgacccataggaatctgacttcctccagtctgaatgacatttctgataaaccggagaaggaccagctgaagaataagttcatgaaaaaattgccacgtgatgcagaagcttccaacgtgcttgttggggaggttgactttttggatactcctttcattgcctttgttaggctacagcaggctgtcatgctgggtgccctgactgaagttcctgtgcccacaaggttcttgttcattctcttaggtcctaaggggaaagccaagtcctaccacgagattggcagagccattgccaccctgatgtctgatgaggtgttccatgacattgcttataaagcaaaagacaggcacgacctgattgctggtattgatgagttcctagatgaagtcatcgtccttccacctggggaatgggatccagcaattaggatagagcctcctaagagtcttccatcctctgacaaaagaaagaatatgtactcaggtggagagaatgttcagatgaatggggatacgccccatgatggaggtcacggaggaggaggacatggggattgtgaagaattgcagcgaactggacggttctgtggtggactaattaaagacataaagagagaaagcgccattttttgccagtgatttttatgatgctttaaatattcaagctctttcggcaattctcttcatttatctggcaactgtaactaatgctatcacttttggaggactgcttggggatgccactgacaacatgcagggcgtgttggagagtttcctgggcactgctgtctctggagccatcttttgcctttttgctggtcaaccactcactattctgagcagcaccggacctgtcctagtttttgagaggcttctatttaatttcagcaaggacaataattttgactatttggagtttcgcctttggattggcctgtggtccgccttcctatgtctcattttggtagccactgatgccagcttcttggttcaatacttcacacgtttcacggaggagggcttttcctctctgattagcttcatctttatctatgatgctttcaagaagatgatcaagcttgcagattactaccccatcaactccaacttcaaagtgggctacaacactctcttttcctgtacctgtgtgccacctgacccaggtgagggcattacgctttgtgtttatgctcgctttgtatttggaggaaggtgtaggctccatgcttgcaaattttcaacatgctgtcatggtcctcaggaattagtcttgtttttttctctgaaaaactctgctactgaatttgatgtctcattgcctgaggtattttagctgtatgattcaaccaggaaggagaccaggagctctggaatgtgaacataaccaactcaatattttgaaattaactcaaactgtgggatttgcaaggaattcatgtgtacattattcttgattttataagtggggaaacctggatacatgtattaacagatataaatatgtgacaaacctatcctttgctgcttctttattggtgtaggaatgtcttcctttaagtaaacctttaatacatgattttaaacttatagaagaaaaagatactaatccacttcagataatttaaagaattaaattatgaaaaaaagaaattcagattggaattgcctagtggtagaattttatagcttatctctactagacaaataagaaaagaaaggaagagagaagaagaaatgaaagaaggaatgtgatgttctaggagtagatttacattgtagaatccagaaggacataacagcaaaagtaactcctggaaaggagtgtgattctctatatcttagccctttaaaatctatcataccaaacatgagttgacatcagaactttttcaca

SEQ ID NO: 676387 - DNA, 1355 bp, Homo sapiens
  misc_feature (1036)..(1036): n is a, c, g, or t
ggttgaagtttacattccagactgtagcctccaagactagcacgttccatcccactgccctgagtgtccactctgaggctcatgggactcagatctgggggactgggggcttcagaacaggagtcactatctgtccctggcctcaaacggaagggctcaacatctaaagaactctttgtcttaaaaatgtataagagacagggtctacactactatctcaccaggctgactgtgcagtggtgtgatcacagctcactgcatccttaatctacccaggctcaatatcatcacttccgtgacctcaagagctccaccagggtacgctgggcgacctacaagaggcaacgtagcacacattattgtcacgagcaataaaatttatctacacgtttaataagggtagaacagacttggagatctccacatattgtatgaccagggacatggatctataacaaatcctgggactccaaagatagaagatccgacaccatgggcctacaaaaacccagcacccaaggaagcagacagaaccaaagtgcaccaaggggcgatgacagcagccgaaagagagtgacccgtgggaccgctaaagaggaacggcacaccagaacaaccgcaataccacaccatacacacaacaacaaacaaggaggcccaggagaaaaccaaaccacgacgacacacgagagagtgcactccccgataaacagagaaaaccctacagtgggaaaaaaacccggggagaaacgaaggcgacagagagcacaagaggacaagacgaagcaagtatacacaaaaacccacacagtgagagaccacaacaagcgacacagcgacatacccagcacagacacacgtgagaacaagggcgagacacagacgaggaaatcaaacaagaggcacgaaccacgagaggacagaaagggcgcactagcaacaggcaggaaagtaatacaccaccagggacaaaagagaacgaacgagggagacaaaggacacaacacgataagtgaatggagcagtcgaccagtgnaagctcgaacacagagacacacagaaggagcaacccgagcagcgagcaacacaatgaacgaagaggaaacgacaacgcaggacgaagccacacaagtagcacaacaaaccgagagacagcgagcaacacaacgaaggaggtaagaacgcaagaacaaccaagaacagacgtaggagccccgcgagcagagatagcacataacacacagcatggacacaaacgagagaccgcgcaactataggaacaaccatcacgccggagaacgccacaaaccagaaagagaagaggaagcacacgagaacaaagacgatgaaaacaa

SEQ ID NO: 676388 - DNA, 180 bp, Homo sapiens
tctattcatccggcacatgcttacgagagagaaatcatagcactgggtgccgatgaatagcgagctattcatcggcaccggggttggtgtacacatagtgcgtaagtagaactagaggttaaggaaggtgatggtggctattatggtgccgatgaatagcgaggtgccgataaatagcga

SEQ ID NO: 676389 - DNA, 2699 bp, Homo sapiens
  misc_feature (159)..(159): n is a, c, g, or t
gaggaggggaagtgagtggttagacctcagctcatctgagggctaaaggttctttgtgacacatcacacagaattggagtgctgtccttctggagagtggtggagaaccaagatacagttcagaaccaaaggaatagagaagggctttgatttcttttnggctttagatggggatttgggaggcttagcaggaaagatgtccactgaaaatgtggaagggaagcccagtaaccttggggagagaggaagagcccggagctccactttcctcagggttgtccagccaatgtttaaccacagtattttcacttctgcagtctctcctgctgcagaacgcatccgattcatcttgggagaggaggatgacagcccagctccccctcagctcttcacggaactggatgagctgctggccgtggatgggcaggagatggagtggaaggaaacagccaggtggatcaagtttgaagaaaaagtggaacagggtggggaaagatggagcaagccccatgtggccacattgtcccttcatagtttatttgagctgaggacatgtatggagaaaggatccatcatgcttgatcgggaggcttcttctctcccacagttggtggagatgattgttgaccatcagattgagacaggcctattgaaacctgaacttaaggataaggtgacctatactttgctccggaagcaccggcatcaaaccaagaaatccaaccttcggtccctggctgacattgggaagacagtctccagtgcaagtaggatgtttaccaaccctgataatggtagcccagccatgacccataggaatctgacttcctccagtctgaatgacatttctgataaaccggagaaggaccagctgaagaataagttcatgaaaaaattgccacgtgatgcagaagcttccaacgtgcttgttggggaggttgactttttggatactcctttcattgcctttgttaggctacagcaggctgtcatgctgggtgccctgactgaagttcctgtgcccacaaggttcttgttcattctcttaggtcctaaggggaaagccaagtcctaccacgagattggcagagccattgccaccctgatgtctgatgaggtgttccatgacattgcttataaagcaaaagacaggcacgacctgattgctggtattgatgagttcctagatgaagtcatcgtccttccacctggggaatgggatccagcaattaggatagagcctcctaagagtcttccatcctctgacaaaagaaagaatatgtactcaggtggagagaatgttcagatgaatggggatacgccccatgatggaggtcacggaggaggaggacatggggattgtgaagaattgcagcgaactggacggttctgtggtggactaattaaagacataaagagagaaagcgccattttttgccagtgatttttatgatgctttaaatattcaagctctttcggcaattctcttcatttatctggcaactgtaactaatgctatcacttttggaggactgcttggggatgccactgacaacatgcagggcgtgttggagagtttcctgggcactgctgtctctggagccatcttttgcctttttgctggtcaaccactcactattctgagcagcaccggacctgtcctagtttttgagaggcttctatttaatttcagcaaggacaataattttgactatttggagtttcgcctttggattggcctgtggtccgccttcctatgtctcattttggtagccactgatgccagcttcttggttcaatacttcacacgtttcacggaggagggcttttcctctctgattagcttcatctttatctatgatgctttcaagaagatgatcaagcttgcagattactaccccatcaactccaacttcaaagtgggctacaacactctcttttcctgtacctgtgtgccacctgacccaggtgagggcattacgctttgtgtttatgctcgctttgtatttggaggaaggtgtaggctccatgcttgcaaattttcaacatgctgtcatggtcctcaggaattagtcttgtttttttctctgaaaaactctgctactgaatttgatgtctcattgcctgaggtattttagctgtatgattcaaccaggaaggagaccaggagctctggaatgtgaacataaccaactcaatattttgaaattaactcaaactgtgggatttgcaaggaattcatgtgtacattattcttgattttataagtggggaaacctggatacatgtattaacagatataaatatgtgacaaacctatcctttgctgcttctttattggtgtaggaatgtcttcctttaagtaaacctttaatacatgattttaaacttatagaagaaaaagatactaatccacttcagataatttaaagaattaaattatgaaaaaaagaaattcagattggaattgcctagtggtagaattttatagcttatctctactagacaaataagaaaagaaaggaagagagaagaagaaatgaaagaaggaatgtgatgttctaggagtagatttacattgtagaatccagaaggacataacagcaaaagtaactcctggaaaggagtgtgattctctatatcttagccctttaaaatctatcataccaaacatgagttgacatcagaactttttcaca

SEQ ID NO: 676390 - DNA, 1832 bp, Homo sapiens
agtcgacggagactctccaacagcaggcgtgtggagagtttcctgggcactgctgtctctggagccatcttttgactttttggatactcctttcattgcctttgttaggctacagcaggctgtcatgctgggtgccctgactgaagttcctgtgcccacaaggttcttgttcattctcttaggtcctaaggggaaagccaagtcctaccacgagattggcagagccattgccaccctgatgtctgatgaggtgttccatgacattgcttataaagcaaaagacaggcacgacctgattgctggtattgatgagttcctagatgaagtcatcgtccttccacctggggaatgggatccagcaattaggatagagcctcctaagagtcttccatcctctgacaaaagaaagaatatgtactcaggtggagagaatgttcagatgaatggggatacgccccatgatggaggtcacggaggaggaggacatggggattgtgaagaattgcagcgaactggacggttctgtggtggactaattaaagacataaagagagaaagcgccattttttgccagtgatttttatgatgctttaaatattcaagctctttcggcaattctcttcatttatctggcaactgtaactaatgctatcacttttggaggactgcttggggatgccactgacaacatgcagggcgtgttggagagtttcctgggcactgctgtctctggagccatcttttgcctttttgctggtcaaccactcactattctgagcagcaccggacctgtcctagtttttgagaggcttctatttaatttcagcaaggacaataattttgactatttggagtttcgcctttggattggcctgtggtccgccttcctatgtctcattttggtagccactgatgccagcttcttggttcaatacttcacacgtttcacggaggagggcttttcctctctgattagcttcatctttatctatgatgctttcaagaagatgatcaagcttgcagattactaccccatcaactccaacttcaaagtgggctacaacactctcttttcctgtacctgtgtgccacctgacccaggtgagggcattacgctttgtgtttatgctcgctttgtatttggaggaaggtgtaggctccatgcttgcaaattttcaacatgctgtcatggtcctcaggaattagtcttgtttttttctctgaaaaactctgctactgaatttgatgtctcattgcctgaggtattttagctgtatgattcaaccaggaaggagaccaggagctctggaatgtgaacataaccaactcaatattttgaaattaactcaaactgtgggatttgcaaggaattcatgtgtacattattcttgattttataagtggggaaacctggatacatgtattaacagatataaatatgtgacaaacctatcctttgctgcttctttattggtgtaggaatgtcttcctttaagtaaacctttaatacatgattttaaacttatagaagaaaaagatactaatccacttcagataatttaaagaattaaattatgaaaaaaagaaattcagattggaattgcctagtggtagaattttatagcttatctctactagacaaataagaaaagaaaggaagagagaagaagaaatgaaagaaggaatgtgatgttctaggagtagatttacattgtagaatccagaaggacataacagcaaaagtaactcctggaaaggagtgtgattctctatatcttagccctttaaaatctatcataccaaacatgagttgacatcagaactttttcaca

SEQ ID NO: 676391 - DNA, 419 bp, Homo sapiens
gagagagagagagagagagattgagagagagagagagagagagagagagttagtgagttatagatagattctcccgttgcccccgttttttatcatatgttcttcttcatcttacagtatttatgctattttttttcttccatttctgcttttatttattgtatccttctttaatctcttgtttgcttttcttcacttttattctctctttgtatctcttttttattctttgttctttttcttttctttttcttctttttttttctttttttttctttatatgtttattttcctatctttttttttttttttttttcctctctttcttttctttttctcttctctttttttttcttcttctctttcttttctctgtcttttttttcttttttctcttttttttttcttttcttttctcc

SEQ ID NO: 676392 - DNA, 1528 bp, Homo sapiens
agttcgacggagacttcatcaaacctgattgagtagatggggctcacaggttgatggagagagaacgtctgtgagtaatccctatcttccatacccaaaagaaagaatatgtactcaggtggagagaatgttcagatgaatggggatacgccccatgatggaggtcacggaggaggaggacatggggattgtgaagaattgcagcgaactggacggttctgtggtggactaattaaagacataaagagagaaagcgccattttttgccagtgatttttatgatgctttaaatattcaagctctttcggcaattctcttcatttatctggcaactgtaactaatgctatcacttttggaggactgcttggggatgccactgacaacatgcagggcgtgttggagagtttcctgggcactgctgtctctggagccatcttttgcctttttgctggtcaaccactcactattctgagcagcaccggacctgtcctagtttttgagaggcttctatttaatttcagcaaggacaataattttgactatttggagtttcgcctttggattggcctgtggtccgccttcctatgtctcattttggtagccactgatgccagcttcttggttcaatacttcacacgtttcacggaggagggcttttcctctctgattagcttcatctttatctatgatgctttcaagaagatgatcaagcttgcagattactaccccatcaactccaacttcaaagtgggctacaacactctcttttcctgtacctgtgtgccacctgacccaggtgagggcattacgctttgtgtttatgctcgctttgtatttggaggaaggtgtaggctccatgcttgcaaattttcaacatgctgtcatggtcctcaggaattagtcttgtttttttctctgaaaaactctgctactgaatttgatgtctcattgcctgaggtattttagctgtatgattcaaccaggaaggagaccaggagctctggaatgtgaacataaccaactcaatattttgaaattaactcaaactgtgggatttgcaaggaattcatgtgtacattattcttgattttataagtggggaaacctggatacatgtattaacagatataaatatgtgacaaacctatcctttgctgcttctttattggtgtaggaatgtcttcctttaagtaaacctttaatacatgattttaaacttatagaagaaaaagatactaatccacttcagataatttaaagaattaaattatgaaaaaaagaaattcagattggaattgcctagtggtagaattttatagcttatctctactagacaaataagaaaagaaaggaagagagaagaagaaatgaaagaaggaatgtgatgttctaggagtagatttacattgtagaatccagaaggacataacagcaaaagtaactcctggaaaggagtgtgattctctatatcttagccctttaaaatctatcataccaaacatgagttgacatcagaactttttcaca

SEQ ID NO: 676393 - DNA, 1137 bp, Homo sapiens
gtctactgcgtcgtacgtcctatatctgcttgattagcataactgacgcgtggggcgtttttcgttcctcctgctcacactcgtctagctgtgcgcttcactccaccacaaggatttatcccactgtttatgggagcccctgtgtggtcacacaccgccctgtggtagagtctctcctcctgtgtgctccccgaagagaccgtatcaacgtggtttaggtgtgcttcctcacttggcccccgcggtgtacccacaccatgagaaatggggcctctcaaaggggactgatggaccctgttcaaaacagagggcacacctaaggaagatgtttccccatccgatcagggggacacacattggggacatctgcgtggtaccccaggctgtaaggacctggcttttcccatgaagaagcctgacacaccacaacaagggcaagaaaggtctgagagggaaggagaatcacaggtgacaccgtgtcacagattttgtttggtttaactcccagatttctcctgagaataatctctgtgctctttgagacctggagatctaattctgtttagaccatttttgtccccgaaatacagaaggcttgaaatagctatgaaggccacgagcttctattctttatgggatgaaaaatttccaaagaggataaatcctctctgtggtaagaccctttggaaaaatcctaccccagaattggcttaatttaaatttccacgaacccacggaaatgagtatttctaataggcttttgtagaaccttccacgaaataatgtggggaaaaagggctaattgctaagtgaggctttatctaatatcctcctaagagttttaactaatggcttttttgagggaattacacacgggaagctcctggagattgtacacactggaaatctttatccctagggggaaatcaaggagctgggcaccccctaattctttatggaagtgtttaaaactattttaattttattaccacagtattactagagtagtggtttctacttctaagatttcacaaagtgcactttaaaatcaaacaagttcccgcctgcaaaaatattgttattttggtggagaaaaaaaatagtatattttacataaaaaattaaagatattaacta

SEQ ID NO: 676394 - DNA, 350 bp, Homo sapiens
  misc_feature (46)..(46): n is a, c, g, or t
  misc_feature (68)..(68): n is a, c, g, or t
  misc_feature (119)..(119): n is a, c, g, or t
  misc_feature (135)..(135): n is a, c, g, or t
  misc_feature (141)..(141): n is a, c, g, or t
  misc_feature (314)..(314): n is a, c, g, or t
cctatgtgtccccccatcccccaatcaatccctttcccccctttgnctggcctccccaacacaatganctcctttcccctatcctttttagaaagattagaaatgccttttcctagagntcccagtaatggaatncatacngtgtcctcagtcctgtttgtggtgcctgtaacaaaatacctgagactgggtaatttataaattataggaatttatttctcacagttctggatgctgaaaagtttatgatccaaggcactagcaggtttggtgtctgagggcccagtttctaatttgaagatggtgctttaaanactgtcctcacatggtagaaggggtcagatgggtca

SEQ ID NO: 676395 - DNA, 396 bp, Homo sapiens
ccggaagattggactctaggtgtattataatctttctccattctctcatttttatccaagacaaatcatggtagaaccaatttgtttgcaaaaataagttttagtcttatatttggcctgattagttatataaaatgcaacaagaataattatttgtcatataagctctctttcaaattggcattcttagaactttttccataaggagtctcagatcagaccttctaaagccttgaacccatccatggatttatttgtgcctgcaaatacctgtatgaattggatgaattcctctcctatggaggtccaaagttaacttggggctcctgggcttgttagaaagtggcattctttacttaccacaggttaggactcctgtacagggactgggtagag

SEQ ID NO: 676396 - DNA, 186 bp, Homo sapiens
gggggaggggaacctgtccagtttgtacgatttctttgtatgtatttttgatgtgttttttgatctgccccccctgtcctgtgaggacaactgaggccaaggagtgaaaaacctattactattaaaaaaaggggggcaaagtgtttacctggtgctttcaacaggacttaacatcaccaggactta

SEQ ID NO: 676397 - DNA, 270 bp, Homo sapiens
ggaaaagccccctttttaaattttaagggttgatttaaaaccgggggtttccccaaaagcttttgggggacccctgtataaatttaccgtaaaatttttcccggggggttgggggaaaaaaggggttccccacccctccccgggggtttgaacttccccccaatttttggggcccaaaaggttggttttgggccccggggggccccaaattgggggtttttttttttggtccccctttttttaaaaagggaaattaacccccaaattgga

SEQ ID NO: 676398 - DNA, 416 bp, Homo sapiens
  misc_feature (130)..(130): n is a, c, g, or t
  misc_feature (150)..(150): n is a, c, g, or t
  misc_feature (156)..(156): n is a, c, g, or t
  misc_feature (159)..(160): n is a, c, g, or t
  misc_feature (165)..(165): n is a, c, g, or t
  misc_feature (171)..(172): n is a, c, g, or t
  misc_feature (181)..(181): n is a, c, g, or t
  misc_feature (183)..(183): n is a, c, g, or t
  misc_feature (185)..(185): n is a, c, g, or t
  misc_feature (187)..(187): n is a, c, g, or t
  misc_feature (191)..(192): n is a, c, g, or t
  misc_feature (194)..(194): n is a, c, g, or t
  misc_feature (201)..(203): n is a, c, g, or t
  misc_feature (205)..(205): n is a, c, g, or t
  misc_feature (225)..(225): n is a, c, g, or t
  misc_feature (227)..(227): n is a, c, g, or t
  misc_feature (239)..(241): n is a, c, g, or t
  misc_feature (243)..(245): n is a, c, g, or t
  misc_feature (247)..(247): n is a, c, g, or t
  misc_feature (249)..(250): n is a, c, g, or t
  misc_feature (259)..(259): n is a, c, g, or t
  misc_feature (266)..(266): n is a, c, g, or t
  misc_feature (270)..(270): n is a, c, g, or t
  misc_feature (276)..(276): n is a, c, g, or t
ttttttaatgggagcaggcttactcagactctgaggcctggagtgtgctcacctctctaatccggaagatgggaagagcattaatgctggaggccacaaggttgggctcgccctggagttggaggcttantccagctgaaagaaaccttngggaanggnnatcanaagatnnggccttaananantnccanngngaccagnnncnggcttttttcccccaagaanangatcaaaacaannnannntntnnacaagagcngtatttnaagnatttanacagttctttgttagcgggtttctagggggttatctagtcaccagtgctgcagccctgcagtcacctatacattattaaaatgtatttaactgttaagcgcgctcccaccaatagtgaaatacacctttatgaaaactgc

SEQ ID NO: 676399 - DNA, 799 bp, Homo sapiens
tatgagcccatggaatcaccagtcccagcaagagcacaagaggaatgagagagaccctcactgctggtgagtgcctgccacacatcagtcccttctcaccacactgaatctcccctcctccgcagttgccatgtataccccttgaagaggggaggggcctaaaggagccgacctttgtcatgtaccatcacataacagtacccctgtgctcaacaccaaaaactagatagagcaggatataatatgatccattatagtgagacgggacggtcctgcacattgattaccccggcgaggcgggccagaatcatgacgtgttgcacaaattgtgttagtcccaaggggctcgcaattgggatgacactcataaaacattgtaagaagacgagtgccttgatttccaaagacaggagaacacgagggcaacagatacagcgaatgcgagagaaaggtgctcaaggaaaaatagacgacaccagctgcgaagagggtggcacttgacttgagatcacagactgcaatgctgatgtgtcgatcacgtcagtggaaccaccatgaacaagaacctcgacatgtcggctttacaagtggtgttactaaacccttcagagggacgccacaggagagagagacaaactccagtgtactcgtaggcacaacccgatggaggcatttgtaatcgccatagactttcggccggcaacttagcaagggctaaaaatgacaataacaaattagcgctacagaattaaggctgtgtaacttagcttcaggaagaagacctaccgtgggtcatact

SEQ ID NO: 676400 - DNA, 122 bp, Homo sapiens
cacttgctcgggggacctcggttctgtgacttacggacgctacggtgattacggactgacgtcgggaccgaacgacacgacgacggaccgtacacgtttaccttactggcgtggttgggttg

SEQ ID NO: 676401 - DNA, 761 bp, Homo sapiens
cgctggcagcgtcggcgtcacgcggagcagagctgtatgctgaagcgggacccggagcccgagcagccgccggcatggcaatcaaatatctggaagtcatcaagcccttctgtgtcatcctgccggaaattcagaagccagagaggaagattcagttgaaggagaaagtgctggtggaccgcatactcaccctctattatctatcgtataggtgtgctggccagagttcccctgtgttgggcatcatggtctctcagagttcagtcatgacccctctctatcggcatgagaggtgattctagcctctaacagaaggcacatcgatggagctagggactctctcctatctggtcacggtctggcacttactaatgtcaatctcgttggctggcgccaagataattgaagttggtggacgaccccgaaaagaccgagctctcttcaacggagcccaaaagttatttggcctgatcattactatcggccagtctatcgtgtatgtgatgaccgggatgtatggggacccttctgaaatgggtgctggaatttgcctgctaatcaccattcagctctttgttgctggcttaattgtcctacttttggattgaactcctgcaaaaaggatatggccttggtcctggtatttctctcttcattgcaactaacgatctgtgaaaccatcgtatggaaggcattcagcccactactgtcaacaactggccgacgaatggccttgcacgggggccatcatcgcacctttc

SEQ ID NO: 676402 - DNA, 259 bp, Homo sapiens
tctagagatcccctgtgagctccttggtggtcagccccctctttctccaatataaagtccaaactccttaacataaaatagaagaccttggcaggggcggtggtcacgccttcaatcccagcactttggggcccgaggtgggtggatcacctgaggtcaggagtttgaaaccagcctggccaacatggtgaaaccccgtttctactaaaaatacaaacgttagccaggcgtggtggcgtgtgcctgtaatcccagctac

SEQ ID NO: 676403 - DNA, 431 bp, Homo sapiens
tactcatatctactaactatctcttcctatgtgggcagcccctggaggcgcctcccctttgactggtggctccaggccatggtctagacagcgctgtccattagaactttgtgcacgcgatgtttacagtccattctgcactgaccagtgtggtcagccatcaatcatgtgtggccactgggcatttggaatgtggaatctggaataccggtgcagctgaagaactgcactgttaattatatttatttcaattcagtgtcatgcagtgagtggccaccagactagacagggtcaggccctctccccttacttccatgggccttccctctatcctctactgcctgggtaggactgcctttacccaagcttgtcctgtgacctctctctgaagacagtggcttccaaagaggctggcctggggcactcatctc

SEQ ID NO: 676404 - DNA, 300 bp, Homo sapiens
  misc_feature (117)..(117): n is a, c, g, or t
ttggctctcctcagcccctaaataataaggtcaggagttggagagtgtacaacagcaggaacatgcattcgatatgagtcacgtgcatgtgtagtctcttgccgtcctactttcctntttcccgagagtctactgtaggcccaggctcttgatgcaattgcaaaaaaattaacccggacagctcaactgagaaacttgattccactgggcttctgctacagtggtcactgatcgcaaccttgggatgtacctcgttctagggcgtggtaccccatacgccctagagcgaggcgtttggaa

SEQ ID NO: 676405 - DNA, 172 bp, Homo sapiens
tggaaaaaaagtcttgctctatcacccaggctggagggcaatgacacaatctaagttaattgaaacctccgctttcgggaatcaagtgattctcctgtctaagcctcccgatgagctggaattacaggcgtgtgccaccacacctggctgatttttttttaattttaaaaaa

SEQ ID NO: 676406 - DNA, 192 bp, Homo sapiens
tactttaacaaacctttccttatgagcatgcctgtgtagggtagacagtgagggtactaatgactagtaggtagatagtagatatacgggctgtcaatagtcagtacagtgtattaatctgacgcaggcttatagcggcaggcagaatgtctacatgtaacttatactaacataagttcttctatagggtga

SEQ ID NO: 676407 - DNA, 841 bp, Homo sapiens
tgggcttgactccaggatttaaaaactgggaacggtgaaggtgacggcagtcggtgggagcgagctatcccccaaagttccacaaggtggccgaggactttgattggcccttggtggggttttttataattagtcatctccaaattagtgagagtgcgttgtgtttacgggaagctcccatggccactcctaaaagccaccccacttctctctagagggagaagtggcccagtccttctcccaagtccacacgaggggggagggtgatagcatgtgctattcggtgtaaatatagtgtcaatggccaaacatttgtgttttaattctgtcgccttaatacctgttttttattgtgggttactctattttgggaagtggagtgaaggccttgcgtgtgggccccccttccccctttttttgggtcccccaactggagcagtgctattgaggcgctttgggctcctcccgggggagtgtggggtggaggcagccgagggctttcaccgtgtacacgtgactttgagcagccgttggaattaacagggtgcacacccttttaaaaataacaaagataacaaaagaagaagaaaagaacaaaaagaagaagaaaaaaacgtccgcggggccattattgtatgctgggggggcggcgggaaaaaagagtgcggtctactaaaagacggcaccagcaggtagcaaaaaaatgtgttgcctgccgccccaccatttgtttgttgcaccagggtggaaaaaaacgcgacgggaccccccagcaaggagggggccgaataaaatacacagacgccggtcccgctatcgtcgtacgtgaaagaacaagaag

SEQ ID NO: 676408 - DNA, 696 bp, Homo sapiens
gtgtgcctgcctgctcctcacttggagtgagcagcttccttctggtgactggacatgctttgctccgctcccagctggcccattgccccttccccagtgaccaccatcaccaacagctctggccgccaaccccatctatccaccatgtgaccatcacacagaccagacgtacaacaagcacaacacacgccagatgaaaagtgggatccacaatgtggagcatagaggatcggacgaagcacgcaaaaaccacacaatggaccatcaagatatcgccgaaacaacacgcacacaagagccacacacacagcgaataaagcaccaataggctcagatgagagaaaaagacaaaacacgcaacagaaaataacacgacaagactgcaaacgccagagagcgctacacacacacacaaaaaagagagacagacggaacaagacagaacagagagaggaaaaacagcgaaaaagcaggagcacagcaaaacaggagaaaaagacaagacaaggacacacacgacacgagaaaaaaccacgaaaagacaagaaggaacagagacgcaaaacacaaaacactgaagcacagagacaacaagagagagaaaccacaggcaccaacaacatacacaccaaaggaaaaagagacaacaaaaaaacagacgaggacacaagaagaccaggaaaggcacagacgcca

SEQ ID NO: 676409 - DNA, 524 bp, Homo sapiens
ccgggagttctttcattgaaagccgttatttattttaccacaatgcaaaactgatagaccagcaatggagctactgaaatcgacacaaagcgctattgcttgattcgcatattaaattttgctgttgtgtgtgtgactttaaacaggtgagggggatttaagagacagctaaacagtatatttgtactttataaacaatcattttcaactgtatatagactcatgagttatatagtatatgccctgccaaggcatagttcaactccatgatactaaaacatagtgaacgagacactctcccgtatggagagaagcaagcttaattatttggatccatctagaaaagcatcagcttacaggaatccttgactcggattgtatgatcacctttattagatagatcatgaactgtccctgtgaaaatgatgagaaactatttctgtaggacttaagagaatattttaaaggagtgactagcactattgaactgtgcctgtcaacttatgctgcaggactgggataat

SEQ ID NO: 676410 - DNA, 537 bp, Homo sapiens
gtaaagggaaacgtgcacagtgagctaaatcctcatcttccacacaaggaagtcaacagacactatcaaaagccaagaacctccagttacataagaaatacaggcactaatacctaaaaatagataaaaggaaaaagaggtggctaccagggcataagaaaagggtatggacttctatttttttcattatatgtttttttaaattgtttcttaaagtacacaaatgtataactttgataaatcttaaaagtttaaattaacaaaaaaaaaaaacaagaaaaaatcaaaacaaaaagaaggtatatcaaatgtatccattccttggactagaagaagaaaaaaaaagtagtggaggtcctcgctgattaaattaaatcaccttcttggatatgaaagacctttttcagtggagctaagtcttaggagtcaggtgtccatggattgctctcagcaaaaggacaatgtttcaagcccagaaagtaatcctggacagcctggcaatatggatgagagaggctgcaaaaagtcacctgcccc

SEQ ID NO: 676411 - DNA, 1173 bp, Homo sapiens
ccccataggaggaaaagctcttcacaaagagcttggaaactcaactattggaacaatgtactgttgacacaacgtgtcgctaaagagcagagccttccctcagtgatgggttcacgttccggaaggtgtcttagaggacattacccgcgcgtacttgctttgtaagtgatctgaagcgaggactaacaaatccaagcagcaaaattcacatatcgatgggaataatgagcgtccctccccagccccaaatgttgactatccattagactggacgagacagattcctaccctatccttggatcaatcacgcagattcagttgtcggaacatcctccttccgaacaagatcatgaacgagcaatcagcttgccactttaactatcggatccccgttataccgctgtccgatagacaccagcgacagcaactaaacagagacattcgcgtcagctcaccaggctggccactctctactgctcgcccagcgcattcctcccacacgactgccttgcccgcaacctacagcgtatccgcgacgaacaacacccaacacatatcccacaagcaccttgggcacctacacgacactttcccgaacttcactacctaccagccctggccaaaacgcctcaacccgccgctgacacctgcgactcggagcagggcggcactcccacgcaacccatcacccaggcacactcacttgtcaagcccaggcctgaaccacacgcgactcctcacacacccaaacgccccccgcataccctgcaccggacgcacccacaccaaccccaaccctcagggccaacggccgcgatcggacggcgcgggaaaaagcccaccgacacacttgagtacagggacacccgcacgtgagaaatggaaaccctgcgcacagcagtcacccgtgcctcatacaaaaatacttcagcaacgctacgccaacgtcaccccccgcgaggccagcagtgtcacaaggacatctggggcacgacacgccatcggaccaactgcgcagcaaatcacctacgacgtccacctgcgcgggccacaccaccgcctcgcgcagtcctcacccgcgaagcaggatgcggaacaacaacaacagcccgcgcaacacaaggcgcagacgagctgataacgtgaggaagacctgatccggcacacaccgag

SEQ ID NO: 676412 - DNA, 185 bp, Homo sapiens
cgaatcatgaactagcgcactatcctctcagcttgacatgtctcaggcgtatcgtgcgctatactatgcttcgtactatcatatttcgcccctcgtcacagagtcgtgcggtccgcgctcgagttcgtcactcgtggtcctagctactaccgccgggcctggaacacaagggtgggcctgggcac

SEQ ID NO: 676413 - DNA, 828 bp, Homo sapiens
  misc_feature (345)..(345): n is a, c, g, or t
  misc_feature (664)..(664): n is a, c, g, or t
agcgggctgcccgcggcctggcttcgggcttcagggagctctggtgcatgtctccgtctgtcgatgctcggccgctcgctccgtggatgccacggccacggtcccagctctgcgtggcctgcaatagtcctactatcctccgtggagaagccttggcgcagcacctgccgccgcggatgtctctagcgagtgagtcggctctagggcatttgagccataggtcctagtagaagtacctcgagaagcgtagaagaaagtaacaacgatcacgtaccaccatgcacctctggcactataggaatccaaggtcaagcaatggcttatagcttggattcgcacatgaantgcctcttattcaagcttacttgcgacgcagcgcatgtcgttggactatagtgtatgaggtagatctcgtaaccctgtagggacaagatgcgcgtcctaatcataagtcaacacgatttgaggggaatgtgagcaatgtgatatgtgccataggtaatatcaacctagatcaaatcaagtatagctgctgacatacctctgggtttcataatcatggcgtattaggtcatatgtggtctccgcctcgagtcatgcacttgcaaggcgttggtgtggtaggccgagaaattgttagtcttcgtcgactcttggagatatntgacgcaatgaatgcagataacggggtaaagacctgtagtgatataaagaatttttgcaaggaatgaggaagcgctaagttgctcgctacctgggattaaagcaaatgattcgacccctccttgatcaaattaagatattgggatttgtactgactcaacccaa

SEQ ID NO: 676414 - DNA, 690 bp, Homo sapiens
agcggacgggggtcgagctggggcgcagctcgcatggggtgagtctatcccgtctgtgccgccccggtcccggtgtgacaggctggtctggagcacgttcttctctcacctgtggtctcttctcttacgacacaggctcaggaccagtgtggtacaaggaacgacaggccgaccagagcgcggggggcacctggtctgtcgctgctggcggccttggcgcaccttggcctgtggacgagaaggtctatcacacgactcagcctatcctgccggtcagataactagtgggtgccatgtctttcttacagcagtgacaggacttccatccgcaccatctatacttcattgcataatgagctgaagaaggtggtgactggccgtggtgccctaagtgggactgttcctcacgtgtgaagaactcctttcccacctgtcagagcagctctgcttctttgtcaaggctcggatggagatagcagacttctatgagaagatgtacaccctcagcacacagaagttcatcaatgctgaagagctcgttggccttttggatgccatcatgaaaaaatacagctccagatttcaccacccaatcctcagtcctttggaaagcagtttccagctggaagttgacgtcctgtgtcatctcctgaaagcccaggcccaggtctcagagtggaagttcctccc

SEQ ID NO: 676415 - DNA, 886 bp, Homo sapiens
agtggagagtctagcttttctatggcgctggagcgaagagcatcctatggtgtgtcaaacaggcagatggctgtgtcttgagatgaaggttacagacgaagatcccagtaaggcatctatatacaaaagatattgacatacatgaagttcgtatggctggtcactaactacaagctggaatgtacttggtgaagacagaattgtcttatggcgtatctctagcaaggaataaaaaacatgcaactgtgagcactgaagatcatggagcaaaagtttgatgaaaatgatgctgatatacatgtgtggctaactttgagcagtgcatgaagtcagcaactctcggtatgctaacgaatggacaacgatcttggcgtcgccttcatcactcagtccggacagtactagctgggacggccactgtgtcccgcatgtgctctgccacaatatgtgcagctttgacatatcactgtcccggtcagactggaaacagcccatattttccacactacgctgaagagtatacttacatccagaacgtccccttagaggatcgcagtcagaggaccaccagcgggcctgaacgagaacgaacagattgtgaacgttgtgctgatgaatggtttgccaggagcttgacaaaactatccgggttactaagccatgcgtgcatgaacatccagggcaatataacattcttgggtcagataccattatggctaaagattgatcggcggcagggttgccccaagccacatggcgcatacggaaaactggacacagctgcgacgagccccaggggctcggcaacttatgagatgctgccgaggaacgcactcacctcgctcacccgtgccgcgcgcccccggcaacctgtccgtgcctccac

SEQ ID NO: 676416 - DNA, 1235 bp, Homo sapiens
aggaaagaaggccaggggacaagaaggtgtgctccggcctccagatgtcgtgaaggaagcaggagggctaagaaagtggtgaatcccacttgattgtgtagaacaatggccatagagaaatttaggcaattggacaaggacatccagcaccaagaagagacctcatccgcttagagaaatggtcccgactgataatccaaggattgcaagccgtggtagcaagagccatgcccttcctattaacggcgggactagataacgttagtcctactctagcgactataaacctatgttctatccctcacggcaccgtgggactctgctcgaagaccatgcttactccaagtcctgcgttcaaacgctggcccccaccacagctaacagaaccgagggagaccaagaggccaccgcagacagaaacgctacgcagcactggtgtgagcaccccgggctcagcagaaagcaaagggcctggttgggcgaacagtggcgacgttcacctaagcgaaatagcaggacgcaactcttaggtcccttcggaaggcatgcgaaggttaaagcacccggtcaacaccacctatgggcttgggaagcacacaaaggaaaagccatcgacgcattgggttgtgttggatctagcgactacagaacggtggtgcttcccctatctgaagccttgggtttaggtctttgcctttgcactaggcgcccttggttgatctgttacacccattggggggcgtacccctttttgaactggggcgattttcatcccaagaggggcggcacacacgggtcccaaaggaaactgggggggcccagtaactgaagttccccaccctagggaacaatgaaacctttgtgcaacatcaactttgtggcgggcgctatcccacccacccctggttggcaaaactttcccggcaaaagcaacgccaccaggggggccggctttttatggggatttaaacagaccttggggttcggagaaacgccttaaatccaatgcggaagccaaaagatgcaacaaaagaggaagacgaagtaaccgcactggaagaaactcccggccccggcaaccgaagggggaggtgcggggacacatggagccctatggggcgccccgtaaacggcgctcgcgaggggagccccggtaagccggcaccacagcgcgcccgacacacaagggggcacaaggggaacacagaaccttggccacatcaaaaccgggggca

SEQ ID NO: 676417 - DNA, 464 bp, Homo sapiens
tgttctagaggatcccatcataggttcgcaggcatctgccgctactcagagtgaatgtgggaccatggtttttgacaacttcagtcagcgtgcttggtcgggctggacgccagtgttccgatgccttcaaatctcttgacaaagatggcactggacaagtccaggtgaacatccaggagtggctgcagctgactatgtattcctgaactgtgagccccagacccgccccctcaccggcttgctatatggagtctcctggagcctcggtctctcccagggccgctcctgtctgcagtcacatgtttgtggggccggggacccacaaggtttagttcgtctcagtacttgttagcgagctgctcaagtgtccatggccgaattggccctgcatggagtccccctggctctaggacactctaacatgctctgtccacgggtctccccattcccaccatggcctgaac

SEQ ID NO: 676418 - DNA, 230 bp, Homo sapiens
ttcatcgccggctgcttgttgcgctccgcttgctccgcctttgtcgggcccccgacctctgtctccgtcagcccccttctggccgtcgcttgcggctcctctcgcgtcggctgccgcctgcccgcttggccctggcgtcgttctcgcccgtcgtgacttggtcctcaccgccctagccctggccgtccgcctaaccgctaacattcccgcaggcccacccgactggtagt

SEQ ID NO: 676419 - DNA, 909 bp, Homo sapiens
ggcacccgccatctccctggctcgaatgccccctccactcgcgacccgggtggatcactccctgtgctggggcactcaactgctggcttcaatgtgagaccctgggccatgatgacgctgtggcatgacgatgactggacgcgtcaactgatcctgcgtttgaccatgcgtacatctgagaacggttcgcttcctggaacagcaaacatcaaggcgctggctgctgagctgaaccagctggctgggccaaggagcccaccaagctggtagacgtctaccaggctgagctggcgagagctgcgtgctgcggctcgatcaactcaccgtcaacagtgcccgggtggaggttgcgatgggacaatctggtcacatggacccttggaccacttgtgagtgcatgcagctccaggatgaaaccaacctgaggctggaagccgagaacaacctggctgcctatagacacggaagcagatgaagccaccctggcccgtctggatctggagaggcagattgagtcgctggaggaggagatccggtactagaggaagatccacgaggaggaggtccgggaactccaggagcagctggcccgacagcaggtccaatgtggagcttgaccgtggccaagccaagcacctcaccgcagccctgacaggagatacggcacgcagactgaggccatggacgtcagccacatgcatgcagccgaagagtggcaccgatccagtttgcagcactgcagacgctgcggcccgaacgcggagctgtcccccaggacaaccacgaaagccaggccaaccggggaccagaggccgacatgacccgcgcctggaggacctgccgggcagacgaatccagaaaggccaatggccagcagggacagcaactcaggaagagcagcatccaggg

SEQ ID NO: 676420 - DNA, 896 bp, Homo sapiens
ctctacaaaaatttttaaaaattagccaggtatgaagggctgggcatggtggctcacgcctgtggtcccagcactttgggaggcccaggctgtggatcggttgaggtcaggagttcgagaccagcctggcaatatggtgaaacgccgtctctactaaaaatacaaaaattagccgggcatggtggcacgtgcctgtaatcccagctacttgggaggctgagacaggagaatcacttgaacccaggaggtggaggttgcagtgagctgagatcatgccactgactccaccctgagcaacagagcgagactgtctcaaaaaaaaaaatttagccaggtatggtggcttgcgcccgtggtcccagttactgtgggaggctgaggcagaaggatgtgcttggcccaggggttggaggctgcagtgaggtgatcatagctcatgactcaagcctggcaaaagagcgagacctcgtctcaaaaaaacaaaaacacaaaaaaaattcgagggggtcacaaccagttttggtgaaaagcctttaatattttcccccggggagaaaccggtgcctctggccaagaaggcgccaagggttactgggctgtcctcggagaaaatattcacacatagttgcggggaaaagagagaacgaacaaaaaaaagatgtgtgggggctcggccagcgaagattgttataacaactctgtggggggcgcacccgatgataagaacggtcccaaggtccaggagacacggtcgacgaggggcttccccagaaaagccgagcgcggggtcgaacacacgggcgttggccttgcggctcagcccccacaccccgggcgcccgcggaagctcacacgacaaggacactgagaggtgcacacgacagaaggcagcaaga

SEQ ID NO: 676421 - DNA, 151 bp, Homo sapiens
  misc_feature (121)..(121): n is a, c, g, or t
ttctagattatttggccagaacaagaggaagggagaaatagctgcttcaattgccacacacatgaggccatacaaaaaaaagagctagccaaatgcagtgttgctaggatgcatgtattcntctatgctaagacggaatggaaacttgtct

SEQ ID NO: 676422 - DNA, 303 bp, Homo sapiens
gggacgtgtagagtcttgtaagtcattgtgagcactacttttcttttcttttcttttgagatggagtcttgcttgtcacccaggctggaacgtagtggcacaatctcggctcactgcaacctctgccacccgggttcaagtgattctcctgcctcagcctcctgagtatctgggataacaggcatgtaccaccacacccagctaattttgtatttttagcagaaggggtttcaccatgttggtcaggctagtctcgaactcctgaccttgacgtcgctttcacctagacgtcgctttccctag

SEQ ID NO: 676423 - DNA, 681 bp, Homo sapiens
  misc_feature (4)..(4): n is a, c, g, or t
  misc_feature (7)..(7): n is a, c, g, or t
  misc_feature (16)..(25): n is a, c, g, or t
  misc_feature (31)..(31): n is a, c, g, or t
  misc_feature (55)..(55): n is a, c, g, or t
  misc_feature (58)..(58): n is a, c, g, or t
  misc_feature (60)..(60): n is a, c, g, or t
  misc_feature (67)..(67): n is a, c, g, or t
  misc_feature (75)..(75): n is a, c, g, or t
  misc_feature (103)..(103): n is a, c, g, or t
  misc_feature (110)..(110): n is a, c, g, or t
  misc_feature (133)..(133): n is a, c, g, or t
  misc_feature (141)..(141): n is a, c, g, or t
  misc_feature (149)..(149): n is a, c, g, or t
  misc_feature (157)..(158): n is a, c, g, or t
  misc_feature (163)..(163): n is a, c, g, or t
  misc_feature (173)..(174): n is a, c, g, or t
  misc_feature (178)..(178): n is a, c, g, or t
  misc_feature (184)..(184): n is a, c, g, or t
  misc_feature (193)..(193): n is a, c, g, or t
  misc_feature (209)..(209): n is a, c, g, or t
  misc_feature (215)..(215): n is a, c, g, or t
  misc_feature (219)..(219): n is a, c, g, or t
  misc_feature (231)..(231): n is a, c, g, or t
  misc_feature (236)..(236): n is a, c, g, or t
  misc_feature (247)..(247): n is a, c, g, or t
  misc_feature (258)..(258): n is a, c, g, or t
  misc_feature (261)..(261): n is a, c, g, or t
  misc_feature (269)..(269): n is a, c, g, or t
  misc_feature (273)..(273): n is a, c, g, or t
  misc_feature (280)..(280): n is a, c, g, or t
  misc_feature (293)..(293): n is a, c, g, or t
  misc_feature (303)..(303): n is a, c, g, or t
  misc_feature (314)..(314): n is a, c, g, or t
  misc_feature (327)..(327): n is a, c, g, or t
  misc_feature (342)..(342): n is a, c, g, or t
  misc_feature (361)..(361): n is a, c, g, or t
  misc_feature (373)..(373): n is a, c, g, or t
  misc_feature (377)..(377): n is a, c, g, or t
  misc_feature (398)..(398): n is a, c, g, or t
  misc_feature (403)..(403): n is a, c, g, or t
  misc_feature (409)..(409): n is a, c, g, or t
  misc_feature (413)..(413): n is a, c, g, or t
  misc_feature (415)..(415): n is a, c, g, or t
  misc_feature (427)..(427): n is a, c, g, or t
  misc_feature (429)..(429): n is a, c, g, or t
  misc_feature (439)..(439): n is a, c, g, or t
  misc_feature (456)..(456): n is a, c, g, or t
  misc_feature (466)..(466): n is a, c, g, or t
  misc_feature (489)..(489): n is a, c, g, or t
  misc_feature (502)..(502): n is a, c, g, or t
  misc_feature (504)..(504): n is a, c, g, or t
  misc_feature (508)..(508): n is a, c, g, or t
  misc_feature (559)..(559): n is a, c, g, or t
  misc_feature (574)..(574): n is a, c, g, or t
  misc_feature (579)..(579): n is a, c, g, or t
  misc_feature (587)..(587): n is a, c, g, or t
  misc_feature (596)..(596): n is a, c, g, or t
  misc_feature (602)..(602): n is a, c, g, or t
  misc_feature (605)..(605): n is a, c, g, or t
  misc_feature (609)..(609): n is a, c, g, or t
  misc_feature (613)..(613): n is a, c, g, or t
  misc_feature (651)..(651): n is a, c, g, or t
tganggnccagggggnnnnnnnnnnacccgnttgttcaagaacatggggggggcntcncnccttttncgcggggnttgggcggggggggataggcagcattcnaccattnccccagcaacagaggggaaggcnccccaacncagaagcncaaattgnnggggncagggggggnngggnaagggngaaggaaancccaaggcaattcaanagaagngggnaaaacgaccccnaacancactaagggcnggggggggccngcntgcccagngccngccaagngtcccgccccccntgcccccccnacccccccccncccaaaagatccnactgaatccccaggnaggcagcagggaatatccnatcattaggggncaanaacaggaaaagccacagaggngaggnagaggnttgngngagagttcaggngngcaaatatcncaggcccggggggggcncaagggggcngccagcaggggcagcagcattcncccagggcccccncncccncagagttgcccgagaggtccacagctcagctccactctgctgtttggcccncaggggttccagggnggggnggtggggnggaggcaanccagtncangaanagtntggattccgtgaagggtcaagtgtagtgttggtctcanaagtcaaattcgtccaggtcccctgtgccc

SEQ ID NO: 676424 - DNA, 314 bp, Homo sapiens
tatctgacagaagggccatagaaataacatcaccacttcaatagcaagcacatcttatatcctaaatgtcagaagatctcctgaacgggatgcttgcatagtgaactaaaccagtctggtcagatgatggtactctgggcataaagcgaggaatctgatattgggcatactggtaaaaacaaataataagtaaccatggaacattaattggatactaggtctagagactctaaaacctcaccaacgtgggtgagtgtattcttatattaagcaatctcttagtcctctcacaaactcagcacaaatccaaattg

SEQ ID NO: 676425 - DNA, 472 bp, Homo sapiens
ggtctcatatattgatggcatgcctcagtaaatgggaagtatatattacatttatcaatttaagtcaaaattaccaactttcctctttccttctaaccaggcacttcgtttaagtgaaagataattggccagagtaatagatatattgttttatgaggtaagaattagaatttataaaaggaactgatgtcttgatgatagtcataaatttttgaatcaaaattgatgctttgttttattttttctgtaatacatcacataacttacatattatttatcacttcaaagaaaaattataaaatcctaagcttactactaatgcagctttattcaacttcaggtatttatatttgttcaccatttgtaaccaccatttgtaatggcaaaaaaaagaattcaccaacatttgctttgcctggctgccaggttccgggtcaaagtaccttattttattattttattcataataata

SEQ ID NO: 676426 - DNA, 211 bp, Homo sapiens
tattgacgatgatgaggatgactgaagagctagaagcctagagggtcgagatgacacgtttttagatggtgcattcaagtcagagctggacgggtcatacaggacccagatgctcctcttactggacagagcagttagaatcccaggctctttcacggatttaggctgagaaacttcagcagcagtattggacttctctgctggatacctt

SEQ ID NO: 676427 - DNA, 444 bp, Homo sapiens
tttgacgcagaaatggttccctattgtggaaaggaattccgggtcagagccgtcatagatacgatgatcgatgagaagaccggtaaaataacgaaactcagaaatcgttgcgtatctttggagggggcgatttgccgatcgaagtattccaactgcagaataaactgcccgcgcacgattcttccctggtggcgtgaaatctggctcgagcgagtctccgaagatgggcgggccggtagccacagctaaagacgccaatggccagggttttgatgcccatcgcaggagcatcgacgttcagcggttgccggtgcgccgacgtcgtcgcagatagccaaaaaagccccgaacggtgcgccccggatctgggtcagccagctctacttgaccgcggcgtttgcttatggggaacggtggtatcgatgatgccttccgccaaaagct

SEQ ID NO: 676428 - DNA, 120 bp, Homo sapiens
gagcgctggaagtgtgacggagacaacgatgtgctggacaacagtgatgaggcccagccctctgctatagaacactgccctcggacgatcaagtggaaaacaacggtgatctcaacgtat

SEQ ID NO: 676429 - DNA, 117 bp, Homo sapiens
tggactcaggcagactggagtgggacgctggtagagatggaggaggaggcaattgggatggcgctaggcatatcaagtatggtggttgtgggtgaccagttgcacttgagccgtctg

SEQ ID NO: 676430 - DNA, 584 bp, Homo sapiens
  misc_feature (189)..(189): n is a, c, g, or t
  misc_feature (385)..(385): n is a, c, g, or t
acagcgctctccagggcgaaaggtggggaggggtttctcaaggtggcccgccctttcccacacaaattttttccgggcgagtataccccgagaggggtgggttttggcattcagtaaggggatgggtccctcccccagttttggaacccttggggtgcccaggccggggcccctcaaccgggggggttntgagttttttggggccagtttccctgtttttcaggaccacccctgttggggcccaggcccaggtttttaaaggcggtgttttaacctccccggggccggaaaaaataggtttccccctttcccccttccctgggggggggggggggggttttgggggaaaatttacccccgggggaagggggaatcccgtccccgntggtggttctttttttttggggaaagtttgttccccctggccccccccccattttccaaggggtcccaaagcctggggccggggttttttgtccccccccccccctttggcccggggggtggtgggccctgttttttttttcctggggggcggtccggccccccccccccccccctaaagcttttttttcccctgtgga

SEQ ID NO: 676431 - DNA, 247 bp, Homo sapiens
  misc_feature (140)..(140): n is a, c, g, or t
  misc_feature (163)..(163): n is a, c, g, or t
  misc_feature (173)..(173): n is a, c, g, or t
  misc_feature (229)..(230): n is a, c, g, or t
gctaagtggatgctccggtggaaactaagttcctgaggctcccagtggttggtccgggctccctgagaacattagaaccagtgaaggtatgggctgagtctgtgtgcccatttcatacaggtcttgccttctgttccagnttacctgtttgctggtggaacanaataagcccncaaacgttagggacttagagatagcacagtgtggtttatcgtggatttagcggagnncagttccacattaggcg

SEQ ID NO: 676432 - DNA, 297 bp, Homo sapiens
cgtccttttagtttaaagctgtgcctcgtagtgttctggcgagccgtcttgttgatttatctgttgcgccttagtgctaagcatagtgatgcatctaatcccagtttgcctcttagctattgtgtgttcagatatgttaaagccactttcgtagtctattttgtgtcaactggagttttttacaactcaggtgagttttagctttattggggccttctccgcatataacactttttacgccgttttctattgcttgaggataatcgcgtgaccccggcgtctgtcacgaaattgacc

SEQ ID NO: 676433 - DNA, 303 bp, Homo sapiens
acagcagaacctgtccgggccaaggtggaagcactgtgcggcagccatgaagaaatatcaaggctatcaggtgagctagcacctttcaaactggcaccatggccttctcccagggggatgggaccaactagggttgggcaggatcatccagtgtcacacgctctcacggtagaaactgcagggatttgaccatgccattctcatatttgcgtgcacctcatctaccgtgcaacacagcgcttgggcgagatgtagcggttaggagcggaagtgagcactccctctccatagctccgtgaggag

SEQ ID NO: 676434 - DNA, 610 bp, Homo sapiens
  misc_feature (11)..(11): n is a, c, g, or t
  misc_feature (572)..(572): n is a, c, g, or t
  misc_feature (574)..(574): n is a, c, g, or t
  misc_feature (579)..(579): n is a, c, g, or t
gcctgcccgtngccgagcctgccgtctacttcaaggagcagtttctggacggagacgggtggacttcccgctggatcgaatccaaacacaagtcagattttggcaaattcgttctcagttccggcaagttctacggtgacgaggagaaagataaaggtttgcagacaagccaggatgcacgcttttatgctctgtcgcgccagttttcgagcctttcagcaacaaaggccagacgctggtggtgcagttcacggtgaaaccatgagcagaacatcgactgtgggggcggctatgtgaagctgtttcctaatagtttggaccagacagacatgcacggagactcagaatacaacatcatgtttggtcccgacatctgtggccctggcacccaagaaggttcatgtcatcttcaactacaagggcaagaacgtgctgatcaacaaggacatccgtatgcaaggatgatgagtttacacacctgtacacactgattgtgcggcagaaaacactatgaggtgaagattgacaaagcaggtggagtccggctccttggaagagatgggattctgcancnaaganataaggatcgatgcttcaaaacggaagatgg

SEQ ID NO: 676435 - DNA, 159 bp, Homo sapiens
cgattggacctctttgctatttttaaactaaccattttctgctgggcgcagtggctcacgcctgtaattccagcactttgggaggccgaggcaggcggatcacctgaggtcaggcgttcaagaccagcctgagcaatgtagtgaaaccccacctctact

SEQ ID NO: 676436 - DNA, 633 bp, Homo sapiens
  misc_feature (11)..(11): n is a, c, g, or t
  misc_feature (595)..(595): n is a, c, g, or t
  misc_feature (597)..(597): n is a, c, g, or t
  misc_feature (602)..(602): n is a, c, g, or t
gcctgcccgtngccgagcctgccgtctacttcaaggagcagtttctggacggagacgggtggacttcccgctggatcgaatccaaacacaagtcagattttggcaaattcgttctcagttccggcaagttctacggtgacgaggagaaagataaaggtttgcagacaagccaggatgcaacagcttattatagtcgtctgtacgggtcggcagttatcggagccttgtcagtcgtagcataggaggccagtacgctgtgtggtgctagttcgatcggtgaaaccatgagcagaacatcgactgtgggggcggctatgtgaagctgtttcctaatagtttggaccagacagacatgcacggagactcagaatacaacatcatgtttggtcccgacatctgtggccctggcacccaagaaggttcatgtcatcttcaactacaagggcaagaacgtgctgatcaacaaggacatccgtatgcaaggatgatgagtttacacacctgtacacactgattgtgcggcagaaaacactatgaggtgaagattgacaaagcaggtggagtccggctccttggaagagatgggattctgcancnaaganataaggatcgatgcttcaaaacggaagatgg

SEQ ID NO: 676437 - DNA, 124 bp, Homo sapiens
aagtatatagccggtccgagaactttccctctctatcctttcagactttaactggatctttgtatcttccccgccccgagaacatttaacttaataagaataatttttaataaggatcccctag

SEQ ID NO: 676438 - DNA, 555 bp, Homo sapiens
  misc_feature (154)..(154): n is a, c, g, or t
  misc_feature (165)..(165): n is a, c, g, or t
  misc_feature (239)..(239): n is a, c, g, or t
  misc_feature (494)..(494): n is a, c, g, or t
cctgtggagacgggtctcaccatgtgcaggctggcttgaactcctgacattaagtgatctgcctgcttggctctagaatttatttatttttatgatatagtgtaaagtcaggatctaacttttttccccaataaatagttttttaacactgttnattgaaaattngtcctttccctgctaattgaaaatgctgcttttactatattctgcattcttatgtatccctgatctgtttttgnaagctttggagtcttctcgcttgtttcattgcttcttgtgatattctaatttagtctctttgatcacagtcattgtcctgaaacacagatcatatcatacccctcttgcacaaacaccttccaagtattttattgcctacaagaaaagagaccaaacttgttagccaggtctaaccctaagctatcttactagctgcatttccccatagactctctgctttttggagcatactgtattttcatgtatttgtaccntttgttcctactgttctcttagctagaaatagcctcctgagaccccgtctccacaggtatg

SEQ ID NO: 676439 - DNA, 268 bp, Homo sapiens
gagttgtggagttgtgggctttgattgtgacggtacctacgcaaatctacacacatgctaacttttatagaattgtgcactacaggaaaaaaacaactgtactgtatttaaaaagcaagattttgacatacagctctgtataaatttacagtatacacgatgatctactgtatgccactaatatgtcattatcattggggaacaggttaagctttaaaaacaagaaaaggcggggaggatcttgtccacataaattccggtaccgagc

SEQ ID NO: 676440 - DNA, 464 bp, Homo sapiens
agtatcctggcgcagctgtggactccccagaaatcactgtctcagcctcttatatattgtggtgggggaaagacaaggtgccgtaaagtgattctgatcacactccttcaaggtcaaagtaaataatctcttgaaactggctggatatgcaaaccctaaggaaattatgagaataaccctgtccacggttacaatccagtcccccagccctgggcgaaaagcccctcactcctctttaccaccagagagatgagaccagaaggccctgattaaacactcaccccttcaggagaacccagagttatagaagggatgtcagtggcgctgagcagtagctttaagtcccagaaaagccttttcttactatgcaaacccactcgtgcctggatgcccactttacatttgtggtggctgcctccaccctggcagaacccattctgagcacagatcccattctgagcagg

SEQ ID NO: 676441 - DNA, 156 bp, Homo sapiens
gctcgtgagtagtggtgctgcttttccttagttgctacatttctatagttaagttggttttactggaatgattcatgtttagggggaaaatgaaaatctgccttaaaattagtttcaacgtcctcctgcaaataagataaatgaagtggcagatgt

SEQ ID NO: 676442 - DNA, 450 bp, Homo sapiens
gctatattccgccatcttacacccctgataaggctacaaagtagcgcagtacccacgtaagacgtaaggtcaaggtgtagcccatgaggtggcaagaaaaggtctcggttatctaccacagacaacctgcatgcctgttatgatgcttctgggtctcggtgtggctacgtcagtactgtgagagtccagtgcgttagttgaacagggccctgaagcgcgtacacaccgcccgtcaccctcctcaagtatacttcaaaggacatttaactaaaacccctacgcatttatatagaggagacaagcctgtcctgtaatcgataaaccccgatcaacctcaccacctcttgctcagcctatataccgccatcttcagcaaaccctgatgaaggctacaaagtaagcgcaagtacccacgtaaagacgttaggtcaaggtgtagcccatgaggtg

SEQ ID NO: 676443 - DNA, 350 bp, Homo sapiens
  misc_feature (284)..(284): n is a, c, g, or t
  misc_feature (306)..(306): n is a, c, g, or t
  misc_feature (329)..(329): n is a, c, g, or t
  misc_feature (340)..(340): n is a, c, g, or t
aacatctctacaaaaaaatgttttataaaataatttacctagtcatggtagctgggactacaggtgcatgccacaacacccagctagttttttgtatttttagtagagatggggttttgtcatgttgcccaggctggcttgaattcctgggactcaagcaatttgcctcccttgtgggattacaggtgtgagccactgcgcctgggcccaattcaaaaagtttttcaaaaatgtatatacccacttcaccaccactccaatttaaggataaaggaagaaaacanttccatcaccctgtttttcctncatcaatttggatttttaggcanttttattttanttgtggctct

SEQ ID NO: 676444 - DNA, 945 bp, Homo sapiens
cacaaattattttacaatatagatgtgagttttttaatgaggaccccggccagcatctggttttattgtactctgtgtagtatatataatgccttctgctttaattcgctccaatattggtccatagatcgcctttgaaaagggccccattaggcctttggctccaatttcaccatcaagcaacattattggctgccataggcggtgggtaaccccacggtttatagccatgggctgaaaagccacttgatgtccccatatatcacaaccatcattcggtttatgtttttaaatggtccagaaaggatgtatttattccgaagcttaggtctaatcaataataatgtgcttgtatgtttacggaacagtaagaaatcattatcttgccaaaatgattccaaaatgggaattaaagaagggtattcttgtttaatgaactttcgtctcccccatagagaatgaatataatttatataaggcccacaaataaattgctatttataatcctagagtatgatataattattgccgcgactatataccgatgtagatgaggagggattatctgcccaatcttaaatggtaaaagagactgtatgtaaataaccaatagtcgacgtcgtgtgcatacattgatggatgtatatcaattgagtcaaagacacaaatgtagagccacaatctgatgattctctgtatataatcgaccgtctgtaacgagtgacgcattgcattgttatatctagttatacgccttacatagtccacagtcttcaaccgtatattcccctatgtgtccttttagtattagtctgatcaagaatcctgaagttttcacttttccataataattcagtattcctgtgaaaaaaatttcccgatcggatgcaatatatagtcaagagataagtagttcccgcaaccgctgctacatagtatgggcat

SEQ ID NO: 676445 - DNA, 1158 bp, Homo sapiens
tggaaaaagtctatgggggccagggggtgggtttgaacccagcttgggggggttcgatcccctccctttcttggtctaggatttaatgtcatacgggttctctccgatgtgtgtggccagggtggggggcatccatatagtcacctccaggttctatggcagggctcctctctccccttgagcgcactttctcgctctcgaagccgaaggcttctcaatatctatgaacaatttatttaacttatttaccgggctggtcagaagcaaatgtgaatttgacccctacagaattgatacggagtgttacagtggtggttgattctgccatctcggggatagctccgagataaacgtcgggcgacatttcccggaatagcgcccgaagacacgtctgctcggtggccgacacggaccgagttcagcattcttcccgccgcgattgaacctacgcgactcgcctcgacaatgtggcacttcggggccgtatacgggctatggccaccaacgtgcggtgctaccccccgggaacaactcttaggggcgaacacaccccgctgcaaagaaaacgccccccgcgttagcccgccacatatgcaggagcaccagcgcccgaacatcacatcacaggagacactcttcgagactgtgagtacagcgacccactctgagaccctccagacatcaccagaccactaatacccaatgtatccacacacagagagggattaagaccacaagaagtgccgctatacagaagaggtgctcacaccaccatcgagagacccccccgggagcacatctcaacaggacggccgcctccacataaaccacacttgtgtgatccccgtgaattccaccgccaatttcagtactccccgttcgatagttcatcttcatcccccagattggttgcgagcgacgcaacagaacaaacgatatcagcagaggcatgaggccaactggggtgacagtagagtgcatcaaatgtggtaggtgagaggaccaagtgtgtgactcatgcagcgatggtatatttcctcagggacaatgatagtaactcggtgctacgaaccgacatcaaaagagatagtgggttagtaagcagacgcccaccgcggtatgtgatcatgattgagatagagtctagggaccaacccc

SEQ ID NO: 676446 - DNA, 141 bp, Homo sapiens
tgctgtcatgatattgatcacacattttacagagatgtgcaaaacagcagaccggatataagaacccagaaattaaaattgatgaaacagggagcacgccaggatacgaaggtgaaggagaaggtgacaagaacatctcca

SEQ ID NO: 676447 - DNA, 206 bp, Homo sapiens
acaccatggcagaaggctggggctcatttgcaggggggagacaaaagggtcatcatctctgaccccctctgatgactgcccccatgtatcgtacatgggtgtgaaccatgagacgtatgacaacagcctcaagatcatcagcaattgcctcctgcaccaccaactgcttagaaccaagcaccagcacgacatcccatggggttttt

SEQ ID NO: 676448 - DNA, 440 bp, Homo sapiens
  misc_feature (102)..(102): n is a, c, g, or t
  misc_feature (108)..(109): n is a, c, g, or t
  misc_feature (128)..(128): n is a, c, g, or t
  misc_feature (145)..(145): n is a, c, g, or t
  misc_feature (149)..(149): n is a, c, g, or t
  misc_feature (156)..(156): n is a, c, g, or t
  misc_feature (167)..(167): n is a, c, g, or t
  misc_feature (208)..(208): n is a, c, g, or t
catctttgattcatcccatcccttggtgtaaagtttttggctgatattggcagaattactcttggccagcaggatatctggggtgtctggcatacgtggatngaggtnngtcagcatcccaagcttcngtgtataaatgcttgcncatngtcaggncattattcttngctaggacaatttccggagtgtcggtaatgcatgtgaattngagctggtctgcaggctggcgatacttcctgtcactcaggatttctccagctctcttcactttctcgacctctacagagccaatgggaacccatcctatgcctctcagccactcaagatcagatttgtaaatagcatcactctgcaggtcataggccttccgagcctgaatgacgtcattctgatcaggcaggcaggtccattcatgcaggggatgcttgtagtctatgtcg

SEQ ID NO: 676449 - DNA, 968 bp, Homo sapiens
  misc_feature (65)..(65): n is a, c, g, or t
  misc_feature (67)..(67): n is a, c, g, or t
  misc_feature (76)..(76): n is a, c, g, or t
  misc_feature (78)..(78): n is a, c, g, or t
  misc_feature (305)..(305): n is a, c, g, or t
  misc_feature (311)..(311): n is a, c, g, or t
  misc_feature (321)..(321): n is a, c, g, or t
  misc_feature (325)..(325): n is a, c, g, or t
  misc_feature (340)..(340): n is a, c, g, or t
  misc_feature (350)..(350): n is a, c, g, or t
  misc_feature (370)..(371): n is a, c, g, or t
  misc_feature (401)..(401): n is a, c, g, or t
  misc_feature (456)..(456): n is a, c, g, or t
gcacaatagggctttctgttacagaatagtgtgcatcatgtttacttaaccagaaaacgtgcatnancttgcaagntnatgctgcaaacccaacgcatacaataaaacaaaaaggaaactgagctttaaatacaaccaaaatttgtacaattccagctgtttcacatattcatttggactgacaattccagctgtttcacatattcatttggactgacaattatatatcaacaggttatttttaaaaagccaattgtagattacaagtaaatttactcagcaactatttttatctgaaatcatanacagtnataaagtagnttantgaacaattaatacngggcacaagncaacagtcaatcgtgcattnnacatatttgcaaactttcatgacccaaaanttgcaagtataatttgtcaaatacacattttgctgcaacaatgtgccctgctttnaaaacttgacatataacagaggcactaacatatcattaaattataaatagattgggaaaatgacttaaccccaatggtactatgtcatggccctagtatttataatacaatacagcttttcacaaaatatttttccaatatctgccaatttcttctttattgctcaccttaaatttgactctattacaactggtatcagaactttcacacaaatcatactcagacatttttatataaaactatacaagatatgtaaacttgtatctaatacattccaggtgtatggctgtattgatctatgcaaaagtacaaggcatatggataattcctgtgtgagataaatatacaatgaatatataacaaatacaaatacatttttaacaataaatatgaatagatagaaggttattagggtaggaaaattcatagaacaagaataaacaaattaaatttaaagcataaataaattgtcagaaatttagaagagaaatttagataagaaaaaagagtaa

SEQ ID NO: 676450 - DNA, 933 bp, Homo sapiens
  misc_feature (65)..(65): n is a, c, g, or t
  misc_feature (67)..(67): n is a, c, g, or t
  misc_feature (76)..(76): n is a, c, g, or t
  misc_feature (78)..(78): n is a, c, g, or t
  misc_feature (270)..(270): n is a, c, g, or t
  misc_feature (276)..(276): n is a, c, g, or t
  misc_feature (286)..(286): n is a, c, g, or t
  misc_feature (290)..(290): n is a, c, g, or t
  misc_feature (305)..(305): n is a, c, g, or t
  misc_feature (315)..(315): n is a, c, g, or t
  misc_feature (335)..(336): n is a, c, g, or t
  misc_feature (366)..(366): n is a, c, g, or t
  misc_feature (421)..(421): n is a, c, g, or t
gcacaatagggctttctgttacagaatagtgtgcatcatgtttacttaaccagaaaacgtgcatnancttgcaagntnatgctgcaaacccaacgcatacaataaaacaaaaaggaaactgagctttaaatacaaccaaaatttgtacaattccagctgtttcacatattcatttggactgacaattatatatcaacaggttatttttaaaaagccaattgtagattacaagtaaatttactcagcaactatttttatctgaaatcatanacagtnataaagtagnttantgaacaattaatacngggcacaagncaacagtcaatcgtgcattnnacatatttgcaaactttcatgacccaaaanttgcaagtataatttgtcaaatacacattttgctgcaacaatgtgccctgctttnaaaacttgacatataacagaggcactaacatatcattaaattataaatagattgggaaaatgacttaaccccaatggtactatgtcatggccctagtatttataatacaatacagcttttcacaaaatatttttccaatatctgccaatttcttctttattgctcaccttaaatttgactctattacaactggtatcagaactttcacacaaatcatactcagacatttttatataaaactatacaagatatgtaaacttgtatctaatacattccaggtgtatggctgtattgatctatgcaaaagtacaaggcatatggataattcctgtgtgagataaatatacaatgaatatataacaaatacaaatacatttttaacaataaatatgaatagatagaaggttattagggtaggaaaattcatagaacaagaataaacaaattaaatttaaagcataaataaattgtcagaaatttagaagagaaatttagataagaaaaaagagtaa

SEQ ID NO: 676451 - DNA, 563 bp, Homo sapiens
cgcagtggcttattcctgttatcccagcactttgggaggccaaggcaggtgaatcacgatgtcagtagatcgagaccatcctggctaacacagtgaaaccccgtctctactaaaaatacaattagccaggcgtggtggcggacacctgtagtcccagctactcaagaggctgaggcaggtgcacaccaccacgcccagctaacttttttgcattttagtaggaactatgcattcagccattgcagcaccaacagcatacaattcggattgagtgatctgcattgaccgaggcttgtatagcccaaggagcagcttcacaacagcgagtcatgctagaacaaccaccaggactgatgccaaatgcacaggatatgtctacagaggaacctgctcaaacaatcatgcaccttctcaagccaattaactttaccagaatggggcaaacaggcttcgtgcccatggtatcacaattttacgactttcaaccacatgctcactattatgacgcttttcctcagttaggtctttaactcctggagcttaatgcttgctaacgcaatccc

SEQ ID NO: 676452 - DNA, 102 bp, Homo sapiens
ccacaagaacaaaactccctgtcctttcatatactaagaaagaggataggctactgaaaacagtcattgcaagacacatgaagacgacatactgtggcatgc

SEQ ID NO: 676453 - DNA, 221 bp, Homo sapiens
aggtcgacaaagcctagcattcttgcagaaccctatactaacatgtaatggggagagggtgggcagatgagtagagaacagattcaggcctcaagcttccaagcatttttataaatggaaatcttaaatatgaacagctgctatagtgtctcttttaaattcagacttttttatgatatgagatgctgttgagttttaactaatctgacagagagataaag

SEQ ID NO: 676454 - DNA, 892 bp, Homo sapiens
aatccacggcagaactcatggaaatcagtgatgatacaaactacacacatcagacaggtggctccaagcaaacccctacctgaagtgactgatgagtataaaaatgatgtagtagaacaccagatctgtttatattaaaggcttctcaaatgatgcaagtcttgatgacatacaagagaatggttagaagataaaggtcaaggtactgaagatattcagatgagaagaacgattgcagtaaagcattgtaagggatcgaatgtaatagttgtgtttgatagcatattgaatctgctaaggaaattggttagagacgccctggtcgagaagtacagaatgaaacagacgcgtgccggtagagtacgttttcatacggcaacgattactgtgtgccgataggaagagatatggaggagaaggaaaacataataaagtggaagctaaattaggagcgtaaacagtgagcaatgaggcataaacaaaagttagaagaagatgctgaaatgaaatctctagaaggaaaagattggatgctcgttgaaatttgccgggtgattcagatgatcgagacctgtagagaagatttacacagtatcttttctcacactcatggtgaaaataaaatggatagacttcgtcagaggagcaaaagaagcggataagttctatttaaaagaaaaaggcaaggagcattggggtacagccaaagatggaattaatggaacctacagtttacgaacaccgaagtgagcttgggaagtaacagaaggagggggggaaagacagcctgttgaaatattggagaccccagaatcttaaattcgtaggggagggtgattaagaaaggcaggaaaaatgccccggtttgtaagaaaatatttgggaaaaaatg

SEQ ID NO: 676455 - DNA, 112 bp, Homo sapiens
ctgaccagttctggtccccactgtcctccaccatcttactctggattaagaacaagatagtctctttttttttgagatagagtcttgctctgtcggccaggctgagtgcagt

SEQ ID NO: 676456 - DNA, 150 bp, Homo sapiens
tgcacttgcaatctgagacgcacgtgtgaccgtatccagatctgcacagatgcatgtgctatgtgcctaagtatcgctctggaccaggctcagacgtttcactatgtacacgagcttagctctcatcaaggcatgagtgcatcattctct

SEQ ID NO: 676457 - DNA, 1082 bp, Homo sapiens
tgaaaatttgcaagataccggattgacaaaaattcagccaagaaaccaccgaatactgtaacggattcagtcctatggtttacatgatctccccctgcttgacgaggttctggtggctgatgatctggataactcgagagacagtatctgaagttgcccttttggcagctagtgataagccaaacatgaaatagatacgcgttgaacaggacataattgtggcgtctcatgacacatatcagactccaaatatttattcgaggagatgcattcagtatgtagggatcagggatggtccactatctccatgtagaccgacaacaggaaagaataatgcgttctttgaatcacaggatctggaatgatatatgcgtgaatcatgtcaccacgctgatagcttccccgggtgactacccaggctcgtagtgcaaagtcagagtctatggttcaagaccatcttggaactatctttcactcccatgctcgatagagctgttccactactcattgcaagatagtagagaatttctccagatagaaacgtatgcttagccaagctacatgctgacactctatcttgcagtagttctaggtagtagagcgattcgtagccggatttggagtcgcccaaataggaactggcgacctctccctggggcagctatgcataggcttttagccatatagaaatgtggaaagggtctgtggcccgaggtacatgaatccaaacaagcattactgccatattgtaaagatgttttaacagatgtgcctgcagaggaatgttctgaagtcatgaacggtaatagttaggactttattgctagaactcttgttcgtgtgccgcattatagaacctcgttaaccaatgtgaagggcaggcctccgggcaactcatcatgcacgtaaccctgaaggtaacctgcgacgttcaagttggatacgcttgcaatgttaaaatttgaagggtgtctccctcacaacgtgtggggaccattaaaaattccgccataaagcaaatgagctgcttacgacaccgggcatacaaggcgttaaagcaggacacacaaaatattccatac

SEQ ID NO: 676458 - DNA, 370 bp, Homo sapiens
gccccctcctccggatggcacaggctttgctaggttccggacccaggcttttgggggaagggtctcccttggccctcccgggaatggagtccatgctaaaaaaagctcagtgttgggctgggtttgccagtaaaaccctgcgttccagtccccccagtcttgccagaaaaaaccagccccttttccccgtgggtcctgggttcaaaatgtgggattgggtctggcccagccttttcccctgttacccataatttttgcctctttccataaaccgggggttccgtttggctttggaaataaaggtgggggttttttttttttttttttttggcttgttttttaaataaaccaaagtccaaaaccaactcca

SEQ ID NO: 676459 - DNA, 675 bp, Homo sapiens
agcggggtcttcccgccccgcccagaccgccgaggctgccgccggagtcgccaccgccgcgccctcgctcaaatgtttgaaatagaaaataaaaggaaataattagatgcagccctgtcgagcaatgtgcgttcagtcgcacgacaaaccggagacataaacgatcgagtgagcgcaagaaagaccctgtttttaaccaacgctaagaacaccaggggaacagaacgcttaataaagaactacacatagtggcagtccacaggacagttaaccaggcgtgcacacaggagcaagtgctgatatcaaacactgcacataacacagcagcagctgaagctacaacagccgcgatgctccacaccaacactgcaacccagctaaaaccgcacaataatataacaaaacacaccggcgacactacaacgatgcacccaaccaaagagaagccaaacaagaaatgagagaacctcacatgccagaacagaaccaccaacgaaaaaaaaaaaagagggtaaccatgtggagaagccaaacacgcacaaacaacagggacacccacacccagcgcaccccacaaattgcccccccttacaaccaaaacgcaacaaaacgccaactggagacacatacagaacaagaaagacatacaagtggggcaaacagaaactcacagta

SEQ ID NO: 676460 - DNA, 387 bp, Homo sapiens
  misc_feature (18)..(18): n is a, c, g, or t
  misc_feature (53)..(53): n is a, c, g, or t
  misc_feature (182)..(182): n is a, c, g, or t
  misc_feature (268)..(268): n is a, c, g, or t
  misc_feature (271)..(271): n is a, c, g, or t
  misc_feature (290)..(290): n is a, c, g, or t
  misc_feature (381)..(381): n is a, c, g, or t
  misc_feature (385)..(385): n is a, c, g, or t
cgggggtggggtcccaanattcctaagtttttgcctagtccctccccggtgantcctgatgaatgcctaaagtttgagcatcactgaaataataattacctgtaatcatcacccaatggatgcctaaaacccatgaggtgaatggttgataggcaaccctataatggcaggatcaggttganaccccataaacctactgatccatcttagcaccactagaaatgtgacaacctgaggttctgtgctttctggtactttctgttttttntgntcacgcttgtaatcccaanactttggggggcccaggctgcaggattgcttgagcctgggagttcaagattagcctgggcaacaaagcaagacccccctctcaaaaaaaanatanaa

SEQ ID NO: 676461 - DNA, 155 bp, Homo sapiens
ttcggtcactgaagacagcgtacgttcctgaggtggggaacggcaatccatgctgtgattggctttccttctgaggtccccacttcttgctcatggctggtgatgtcgttggagagcgttaatgggacttcgctgagctgaagggccccgcacta

SEQ ID NO: 676462 - DNA, 441 bp, Homo sapiens
tcacttggaaaaatatttttttacgggaacaatcccccattctcggggactctttaaaaaaaaaaagggcccaattggggggaaattaaaacaaacaggggagaacgaagggttagccacgtgctcccccaaactccaccaacccccgaggccccagaggccgtgggcggggccagcggcaaacgagggtgaccccgagggagttcttgtggaccccacctctctcttttggccttaaaaataaagaacgggcacgggcttttattttcccccatttccctcccctcccaatcccggggaacttggaagagggctccttggttccccgcccgcgggaaaatgggggggcggggaagggcggggaaccgtgaaaatccggggtggggctctctcaaaaataacaccacttggggggtggggggagcgggcaggaaaaaatca

SEQ ID NO: 676463 - DNA, 664 bp, Homo sapiens
ggtcctcagctccacggcccaagcccagtgccccagagcttggcaggaggctcccggcggacccaggaggaggacctccagtgctaagtcccagcccagcgtgccaactgcatcccagaaaccggcccactaccccagccccatctctgccctgtgcttatcccagataagaagaccccaaatcccccctggggaaaaccccaggccttgaccattgttattcaaatggcccctcccgaaaagttttaatgatttcccatttgtatttgtgttgatgatggacccacttgacccatcaccatttccagtattcatagatgactgtcaccatatttaaaatagttccccacttgagcacggtacaccacactggtcataattcctgtctgtgtaattcgatgtatatttttcccaacactgtagctattgtttgctttgatttttgcttggcctcctttatgaatgtgcactgtccttgaaggctgaatggacacgtccctttcacgttcagcacgatcaacacacggaagtggagctcttcatgactgtctccagccataggatgatttactataaatttcatcccactacttgtgatctctctcacctacatccattatgtatgttaatttcagccattataaagaattgattttaatgacca

SEQ ID NO: 676464 - DNA, 197 bp, Homo sapiens
ggggttcaagatcagcctggcagcatggtgagaccctgtctctaccaaacatttgccaggcatagtggcttatatctgtagtccctgctacttgggaggctgagatggaaggaccacttgagccccaaggtcaaggatgcagtgagccatggttacactactgtaccccaggctgggcgaaagaaaggggatcctct

SEQ ID NO: 676465 - DNA, 1314 bp, Homo sapiens
ggaaaactagggactctcttctagagccatatagttccctgacagaagagtctctggggttagcgcttcaagcctaagaagggcaatctcagtagactcttctgtcagcgaaatgtagggactctcttgctagagccatataggtccttgtgattatggacatgagagcgaggaacggatggacgtataggatcctcgatattgtgtgaaaagttcaaggtgacagtttgttgaagagcaactaagtatgggagaagtaagatcgtcaagtgtgggcaattgtgtcaataggagtataagttagggacggaggaagggggaatctattgcatacgttgcgagaaagcaaacaagaaggggaaaagaagtagagggacataaagatcagattagggaacgagagggaagaaggaaagcaggtaaggggttagaagggctaagcagtaaggggatcccattgtaaggaaggttaactataaaatagagtagtattcgcgtcgtaacttagtatacgcctgagtaggtgtgcaccaaactaagaaacaacaataaattttagaatcgattgattaaccacaaacgaaatctcagagtagctgaaacaccggggtggaaagcatgagcgagcagaattgtttgagaatatatggctatatatggaaatgcagataagatgaacagaggagttcatatttacgagtatataggacacacagtaataaggtttcacgtgtgtaattgataggaaagattctgtaaagtaaaaagttatgaaggtaggatagatagggcaaaagggatgaacaaaggtatgtggaacgcctatatgaaaattgtgtgtacggcatgggtgcgcattaagttggctagaagatggcacacagggtgaatttgagaagagcagcaagacgtggggagttgagagagaggccaaaaaggaaaagggtaatctcacgcatggtaaaggaaatgagaaaagagaaaacagagcgaaaacacacgacgcggcgcgagcgcaacgagagagaccacaagagaagagggcaacaagacccgaaccatagtgcgacggacacgacacccccattgagcagctaacgaaacaaggagggaaagaaataccacagacagagggggacaaccgcgaagggagcagaaccacaacgaggtaggaggacacgacacgcgaagaggtagagaacgaaaagacaacgacggaggacgaagaaaggacaggcaagcgacgaaacgaggacacaccgacaacgaccagcaaagtcacaacaacacgagacgacacacccaaaacacgcg

SEQ ID NO: 676466 - DNA, 217 bp, Homo sapiens
  misc_feature (17)..(17): n is a, c, g, or t
  misc_feature (212)..(212): n is a, c, g, or t
cataagatagtgacttntggtttctttctcaaaaccattttggttttaaggccgggtctattggtcacatggtaactcttttacattggacttcagtaagatcaagatccttcttgggggccagtgggaaaccaggtctggggcactaaacattcaagaaaggtagggggccatatattattttggctctagatactcctgtagacatatanaaggc

SEQ ID NO: 676467 - DNA, 104 bp, Homo sapiens
gctcccgtatttattcctcacccgaattcgtttgtaaatgtagagtttggatgtgtacctgaggcgggggggagttttcagtatttttttttgtgggagcggtg

SEQ ID NO: 676468 - DNA, 790 bp, Homo sapiens
  misc_feature (427)..(427): n is a, c, g, or t
  misc_feature (465)..(465): n is a, c, g, or t
  misc_feature (487)..(487): n is a, c, g, or t
  misc_feature (497)..(497): n is a, c, g, or t
  misc_feature (515)..(515): n is a, c, g, or t
  misc_feature (524)..(524): n is a, c, g, or t
  misc_feature (539)..(539): n is a, c, g, or t
  misc_feature (555)..(555): n is a, c, g, or t
  misc_feature (577)..(577): n is a, c, g, or t
  misc_feature (589)..(589): n is a, c, g, or t
cccccacaaggtaaatgcctttgttcccagacaatgccttaatgcccccagacgcaacatttcctggacccagtctgcttggtccccagcaccattgtttgacccccctcgaagacatgaagggcttgggtctgttttgagtaatggggagttgcacagtgtatccaccaacggggcagacactcttaattgggtgggaaatggattccttcggctggtttctggttccgagtgctctccccacccacccgagaccagtgggtaaaaaggtccagtcccttgcagggatatatatccgggagagctaggtcccctggggctctggatgctgggtaaccccagaggtaatcgtgggtaccccttctgaagctgtcagggctgtgactagcaccccttatcacccctcactgccttgtgggaatagtanagggtttttttcctccagaccccctggcctttcagttnttaactatttccctccaggccngaaagttttntttgaggaaggagagganagggtggcnatgatgcctttgatntggaattggacatttntctgtcagagcacagaggaggntcatatcacctnttccctctcctaacttggccccggctgcttggaggaccgaccccctggctgagaatatgacggcacagaggaaccgagtttgctcccagtgggaaagggtccccaccccgtcccgagaagatgtctgtgtggctttccctccctgcctccccccgctccccccctggcctttgtaaataaatggcgtggtctttgttgtga

SEQ ID NO: 676469 - DNA, 134 bp, Homo sapiens
gctcggtgatctagtacggcgcagttgctggattcggtaaggagggacagaaaggataacatgggaagcagatgctgtaactactactagagtacctacagggatatagcgctgtctttccatacttacaacta

SEQ ID NO: 676470 - DNA, 110 bp, Homo sapiens
gaggtcctgttctagcaaacaggtggcagccgcttatcacactcacacagtgacttctggaggagtcctggtttggcacaggttgattcttgctccccgagtttgctaaa

SEQ ID NO: 676471 - DNA, 157 bp, Homo sapiens
ccccccggggtaaaaatgccccccgtgttatggggcccaggggggcaaaattggcccccccggagggactcccccctggtagggggttcccctgggccggggtgtcccaaacgcccctttttcctttttttttttttaaaaaaaatttttttgggga

SEQ ID NO: 676472 - DNA, 373 bp, Homo sapiens
ttcataccattatatactttacaaaactcatagaactgtgcaagaccaaaagcgaatcttaacgtaaacagtggacttaagttaatgataatgtatcatgtatccattcactaactataataaatgcatcacactaatgcaagatgtaaataataggggaaactgcctgtaggggaaggggaaggaaatatatgagagctctctgtactttctcttcagtttttctataaacttaaaactgttctaaaagtaaaatatattaatttaaaaaagaaagactaaagagatggtacatcaacacctaacaaaagtacctggcacagagtagacacgccagtaatgtgtatggaataaatggataaactgaaatgag

SEQ ID NO: 676473 - DNA, 600 bp, Homo sapiens
  misc_feature (1)..(1): n is a, c, g, or t
  misc_feature (255)..(255): n is a, c, g, or t
nccacccccaaagactaaaccctgcctaaaggttggtcttcctctaccatgcccaaagttgtaaagccacaacgggtctgaggactctttaagcattcccagtttaaaccagcagcacaaagacctccacagtgcctcccagttatgagctgctttgatgtgactttcatagacacaaagtctcgaaggcacaagccaattatgtcaatatttgtatgtaagaacctatttatgtaataggtaatgaatctgaanctatctagtgcccttaaggagatccagtttaattcaaggtgatcatttacctgtacaagagtgtaaacttttttgtgcttttatttttcaattgtgagaaccactgattggtatgttcaacaaatttgtgtatacaaagaaatggataaatcactgcttttttttactatagagtgaggggttgttaacaaagaatatatattggtcattcttacaactactatttaaagtcagcaccttttcactgaatttgatagattttatgtttggccatatcttcatgctcacatttgatttctgaagacctcctacatacacttcaataaaagttaaatggacatactc

SEQ ID NO: 676474 - DNA, 302 bp, Homo sapiens
cctatctcaaaaaaaaaggaaaaggatttaaaaaggaaataatttagggtttgtcctgaaggggatctgggactaggacacaagtggttataaggaacattactagaataattaaaatttgaacatgacctacagataagagaataggactgctggtccgatgtaaaattttgcgatcttggaatttaaagcaatgatcttgggttttaggacatacgtgaagggtatttaggagtgagaggacacaatcatttgcaatttactctcaaaggatggagaaaaaactgtgtatataaaatgtg

SEQ ID NO: 676475 - DNA, 153 bp, Homo sapiens
  misc_feature (107)..(107): n is a, c, g, or t
gcacttgcacatggttagacaagattagaacaagaggaacagatatggagttaaatttttttgttgggattcagtaagagttggttacaaaagcacaaggcgcagcncacccaactggtcaaggcacatactaagggctacactaggtgtcca

SEQ ID NO: 676476 - DNA, 123 bp, Homo sapiens
ttactcgtcgtctgagcagctgggacaccctcaacgcaaatgtccccagattccaatgtcccctgggaagtaggatcattcctgctgagaaaccacggtcccacaatatccagcttgcacaga

SEQ ID NO: 676477 - DNA, 150 bp, Homo sapiens
taagatgaaaatgggagcacggtccctctgacacctcccacctgcacatgtacactgaccacatctgtagacatcttgagttgtagctgcagactgggaccagtggctcccattctcattttagccattttgtcgcctgcgaacctatta

SEQ ID NO: 676478 - DNA, 286 bp, Homo sapiens
acaggagtttgagaaacctatataccaaaggacagaagtattcattcctgcatgcatcccagacctccttctgcttctcagagctctattctgacaccctccaaccatggaggaaacgcaacagaaaatcaatctagagctgctccgcatctccctgctgctcatcgagtcgtggctggagcccgtgcggttcctcaggagtatgttcggcaacaacctggtgtatgacacctcggacagcgctgactatcacctcctacaggacctagaggaaggcatccaaacg

SEQ ID NO: 676479 - DNA, 115 bp, Homo sapiens
cacgagggcggcagggcgcatgcgcaggcgcagtgtgcgtccgcgtctgatgggagggatgtgggggaagcgaccgccccctgtttgtttgggctgtgggcggtgcgcaccggag

SEQ ID NO: 676480 - DNA, 95 bp, Homo sapiens
aacctgaagattttgcaacttatttctgtcaacaacttcatgattatccccgtacgtttggccaagggaccaaggtggagatcaaacgaactgtg

SEQ ID NO: 676481 - DNA, 134 bp, Homo sapiens
ctagaggatccccagtgtcgttaagaggtcatttaaaacggagacaaaatacaatttctcactttgcatttagtctaaagaaacaaatgctttatagcaaaatgaaagagaacatgaaatggcttctttctcag

SEQ ID NO: 676482 - DNA, 200 bp, Homo sapiens
cagaatgcattgaattattcattaggtgccgtgtacattgcctagaatgacaaaactacattgaagaccttcagtaatggtcctatcagacaagaattgttaattccagtgtaccctggtcaagtgattttgaagactcagtcacatctcatgcaaccagtccacaataagcctgtttaacaacggacctacgcgtataa

SEQ ID NO: 676483 - DNA, 101 bp, Homo sapiens
aatcacatcaagccacaaaccgtgatcgagaccctgtgcgaagtgaccaagggcgacgcctttgtgacctccgacgttggccagtcaccagatgttcgcgg

SEQ ID NO: 676484 - DNA, 160 bp, Homo sapiens
ccattaaaccacaaaaaagagtctatttccagtggaggaaatcgattatcacaaaacaatggcatcccagagtggtcgtggatggggaaagaccaggcgaagaatgatcaggacttttgcagaagcccaggggactcccagagccagagggtttcgatga

SEQ ID NO: 676485 - DNA, 266 bp, Homo sapiens
  misc_feature (8)..(8): n is a, c, g, or t
  misc_feature (209)..(209): n is a, c, g, or t
  misc_feature (214)..(214): n is a, c, g, or t
cataagtnaggctgtgaatctcagctccacagctggctgtgtgtcagtttgctatacctctctgagccatggttttcctcatctgtaaaaagagggaaaaaatctatctcacaggaattatgtgagaaacccattaaaaatgtctaccacataattgtcatttaacttttccaagccttagcggattatctgtaaaatgatgtctatcncaggnttgcaagaagcctagcacaaaccctggtacccagcaggcacctaataaattt

SEQ ID NO: 676486 - DNA, 397 bp, Homo sapiens
ggactggccggggctgtcgcttccgagggcagcggccgggggcgatcaagtgcccggggaacgaccctgggcccccggcccgcgccccggccccggtggcgcgcagggctattgcgcggaagccgttgagaccggactcgctgatcatctaccggcagaaatgcgaattcgtgcgaggatcgggcgccgacggccccagggcaagcctggtgaagaagctcttccagggccgggtaaggacaaggcgccggtgccccggacgggagacgagggcaaggccgggaacccggagacggtcccgaccactcctggccgcgcggtggaccccggaaagcccggagagcccaaggcccaggcggcggtccgcgaggcctccagtgtccggcccggcccctgg

SEQ ID NO: 676487 - DNA, 213 bp, Homo sapiens
tgatctagatgatccccttgtgcaccatccattcacgttcgacgggcagccatcaatgaaactgacactccagcacagctcgagatagaggacgaggacaccatcgacgtgtcccagcagcccgcgggaggtgtgccggacagcattcctggcagggccacagtctctatagccgcccgtccccagcccgggccgtccatcctcgcattgctg

SEQ ID NO: 676488 - DNA, 425 bp, Homo sapiens
gggctctctctgcggaatgaccatggcggctgcgaccctgtacacgtatcctggaaactggagggccttcaaggctctcatcgctgctcagtacagcggggctcaggtccgcgggctctccgaaccaccccacttgcattttggccaaaccaaccgcacccctgaatttgttcgcaaatttcctgccggcaaggtcccaccatctgagggtgatgacagattctgagcggtcgatagcaacgccattgcctactatgtgagcaatgaagagctagggggaagtactgcagaggcaggagcccacgtggcgctagaggcgagctttgctgattccgatatagcgcccccagccagcacctgggtgctccccaccttgggcatgaggcaccacagcagacaggccactgagaatgcggagggagcgg

SEQ ID NO: 676489 - DNA, 423 bp, Homo sapiens
gggggcccagaagcgggaaaaacgctgggtgctgacgtcccccagctgggcaaccctaggaactctcgggaacttggctgtgttgtcctgcctcaaagacatagccatctattgtaggcctagcccctgcctttgaaaacatggaaaggttggaagaacatcaacacagcatggaatatccagggaggtctaatttcaaaacttcataacgaacaaggaaccacctggacttatgtgagggcgatgattaaactggcctgaatttgaatgaaaggatcatgcatgctcaacctgtgactaacaccaaggaggtcaagtggcacaaggtctcgtatgagcgacagcccttccctgataactatgtggaccggcgattcactgaagagctccggacatccatgctaggtacctattgggctgggt

SEQ ID NO: 676490 - DNA, 682 bp, Homo sapiens
  misc_feature (44)..(44): n is a, c, g, or t
  misc_feature (109)..(109): n is a, c, g, or t
  misc_feature (125)..(125): n is a, c, g, or t
  misc_feature (160)..(160): n is a, c, g, or t
  misc_feature (174)..(174): n is a, c, g, or t
  misc_feature (177)..(177): n is a, c, g, or t
  misc_feature (180)..(180): n is a, c, g, or t
  misc_feature (194)..(194): n is a, c, g, or t
  misc_feature (209)..(209): n is a, c, g, or t
  misc_feature (239)..(240): n is a, c, g, or t
  misc_feature (259)..(259): n is a, c, g, or t
  misc_feature (262)..(262): n is a, c, g, or t
  misc_feature (289)..(289): n is a, c, g, or t
  misc_feature (302)..(302): n is a, c, g, or t
  misc_feature (333)..(333): n is a, c, g, or t
  misc_feature (347)..(347): n is a, c, g, or t
  misc_feature (370)..(370): n is a, c, g, or t
  misc_feature (379)..(380): n is a, c, g, or t
  misc_feature (389)..(389): n is a, c, g, or t
  misc_feature (416)..(416): n is a, c, g, or t
  misc_feature (481)..(481): n is a, c, g, or t
  misc_feature (483)..(483): n is a, c, g, or t
  misc_feature (485)..(485): n is a, c, g, or t
  misc_feature (534)..(534): n is a, c, g, or t
  misc_feature (543)..(543): n is a, c, g, or t
  misc_feature (588)..(588): n is a, c, g, or t
  misc_feature (592)..(592): n is a, c, g, or t
  misc_feature (597)..(597): n is a, c, g, or t
  misc_feature (619)..(619): n is a, c, g, or t
  misc_feature (669)..(669): n is a, c, g, or t
cctcccctgggggggcttgggggggggcggggccattctcctgngggggaggggggggggctttggggatggcaagggacttcctgtaacaacgcatctcatatttggnatgactattaaaaaanccacaatgtgcaatcaaagtcctcggccacatggngaactttggggggngcncgngccaaccgactgcngtcaccttcaccgtnccagtttttaaatcctgagtcaagctaaannaaaaaaaaccaaaacaggnganaaaaaacaaataaagccatgccaatcncacctggttttcngcgcaagtgaggttttgtcaagaaagggggngacgcaactgggtnatagtccgcctagaaccatttgngggggacgnngggggggcnggactcgtcatactcctgcgtgcgganccacatctgctggaaggtggacagcgaggccaggatggagccgccgatccacacggagtacttgngntnaggaggagcaatgatcttgatcttcattgtgctgggtgccagggcagtnatctccttntgcatcctgtcggcaatgccagggtacatggtggtgccgccaganagcnctgtnttggcgtacaggtctttgcggntgtccacgtcacacttcatgatggagttgaaggtagtttcgtggatgcanaggactccatgcc

SEQ ID NO: 676491 - DNA, 215 bp, Homo sapiens
aaaagttctactgtgggtaaaatgctatcatgctatcaaacagcatcacatgctacagagaagtcttgtgaaaggatgtcagtgtggcaaacttcattgtcttttaagaaattgccacagctatcgtaatcttcaaccaccaccaccctgatgagtcagtagccatcgtttacgttggcgtaagaccctccaccagcaaaaagattgttagcatt

SEQ ID NO: 676492 - DNA, 1162 bp, Homo sapiens
agtggaacatttgctgccatatagctccaatcctgctaatccgaagccaaagagagtgtatcgttcagcatatgactagaacattccatgacttggcaaggaaatgcagttaaacgggactctggaatatggatcaatgggtttgattatactggaagtttcatcacagtaaccccatcagcattcctgagatcaatgatagtatccgagctcactgtgaggagaagtgcacctctatgtgggtgttccgtgggtatcttcgcagatgcactttctgagtcaggaaagaactggatatcgttcctgccccagaagtttcatccaagaaatcgctccatcatttccgagctcatatccaagagagacagagcaccttgggattgctataacaagttgacttttgaagcacacaggaccaagccatatgtccgttctagtgttcgagcccacaaagggtcaacacatttctcagtggtctctatggcaatggcaccccagtcacaagtaaaggaggagactactttgtactttaactcccatggactccaggcctctgcatggcaggacaggataagaagtgcaggtatcagaagaacatcctgacggaatggtcaccgtggacattgctgcccatatctgtctggggaagacaagagatcccctcaactggatgctctgaaggacaacgttcccagattggacatatccatctgcctgggtgtgcacactacgaacacatagaattccactctggtggaatgaagccaaagagaattgccacaggggactcacccatgtgcactggagcaaccaatcgtacgtgcatgatgcaacgacagaacaagaatacacggacacatcacaagaacgcaccgcgagaaggcgacacgaggacacaaacagacaagggaaacaaataacacacaatcaaccagagaacgacagcaaccgaaaaaggcagcacaggaaaacaaacaagacagaagaacagaaaagacagaaggaaaggagacgacgcaacaaacgacgaagcaccagcgaacaaaacagaagcacgacaaggaaaaggcaacagcaaagaggacacagacaacaagacaaggaaaccaagaagagagcacaacaagatagaaacaataaaggacacgaatcaaaaaggcaa

SEQ ID NO: 676493 - DNA, 648 bp, Homo sapiens
  misc_feature (318)..(318): n is a, c, g, or t
  misc_feature (353)..(353): n is a, c, g, or t
cggccgcgtcgaccgacgatgcgggaatcactgatcctattcacgcggccactttatacccgttatgaaccatccgattatcacgcgtcagacgcattcttcgtcggcctgttcccggaagacgatgccgtcaaaatagctgctacctggtccgcatctaagagaggttcggcgctaatagtctcatttgcgccaacatgatggaacaccgcccgcaccctcgacggatcaatccccctcgcctgcgccacgccaaccggtagatggatagctggagcgggtctgctgagcgtggtggtgaggtcttccaatcaatgncgagctcatctccggggtgatccggatcagcgacnacggcgtcaagacgaccacgcacgaccgtctgaccgatcgtcataacaaaggatttctctactggcagtacagtggcgcccggccagcgactctcttcaaaggcttggcaaaggctccgcagcgcacggttctcggcaccactaggctcagctgcgacagcctcctgtgtagtgttctcctcgtcaagctccgcaacctcctcggcatcgaacagcgggatcggttctgcaggcgcgagccgttgggtcacccactcatggaattgtgtaccaattccagctcctctgtcagctg

SEQ ID NO: 676494 - DNA, 197 bp, Homo sapiens
cccccttttttttttgggcccccccgcccccccggggggggggggggccccggggtttttttttgggccccccccggccctttttttcccccccccaaaaagggggggggggggggggggggtttttttttttttccccgggggggggggcccccctctttccccttttgtttttttccccccccccccccccccca

SEQ ID NO: 676495 - DNA, 316 bp, Homo sapiens
ttttttgagacaaggtcttgactctgtcacctaggctggagtacagtggtgcaatcacagctcactccagccttggcctctggggctcaagtaatcctcctgcctgagactcccaagtagctgggagtataggtatacactaccacacccagctatttaaaaaaatttttttgtagagatggggtctcgtcatgttgcccaggctggtctcaatctcctgggctcaagaaatcctcctgcctcagcctctcaaagcattgcaattacattgcatggtgaggaccacggccagccccagtcactgtcttttgatgag

SEQ ID NO: 676496 - DNA, 255 bp, Homo sapiens
agctgcacccaggctggagacaatggcgcgatctccgctcactgcaactgctgcctcctgggtttaagtgattctcctgcctcagtcttgccaagtggttgggattacaggcatgcatcaccatgcctggctaattttttttttttttttttttggagggggagtttttgtagccaaggttggggggaagggggggaatctaagctaactgtttcttttgcctcgggggacggggggattctcctgcctaagctt

SEQ ID NO: 676497 - DNA, 360 bp, Homo sapiens
gacttatccaccacatagcccagtaagtcttcagttttggctgggcatgatggtgagcgcctgcagtcccagctacttgggaggctaagcccagttcaaggctgcagtgaactatgatggtgccactgcattccagcctgggtgacagaatgaaatcctggcacaaaaaaaaaaaaaagtaccaggcttggtggcgggagcctgttgtcccagctgttccgtaggcttgaggcacgagattcactttgaaccttgggaggtggaggttgcttgtgagcttgacaccattgccacttgcacttccagcctgggtgacagtgagactctgtctcaataattaaaaacttaattattaatttg

SEQ ID NO: 676498 - DNA, 860 bp, Homo sapiens
  misc_feature (860)..(860): n is a, c, g, or t
ggcgagcgaggagcgcgggacctgcattaatgaatcggcattcgagcgcggccggggcccggagcggcggagcagccgggtcctgaccccggcccggctcccgctccgggctctgacccgacgggcggacgagcgcggcgcggatccgggccgaggcggatgtcatcgagcggacagcactggaaggactctggaatgagcatgacacataaccaggacacagaactcagactgatgccagaaagcacaagaggacatagcaaagctgcaacggtcacaatgtgcaccccaatacggagagaccgacgcacgagcatgcagaggaccaagaggagtagggacacgtacaatgagaaacaagaccacgggcacacttggacaaagttatccaatggacccaatgcacaacaattatcccagtagaacacagtaagaccatggatcacagggccagacattgcacacatgataccaaagcggctaggagcctcgacggcaagaattcatctaagaagcattcccaggaaccgcattatgacacagaagagggtgcccatatggacccaaacaggcaagcgaacgaatccaaaaacaacagtcaatccagagccatgccgttaacgcgaacacgtcatggcacaccaaaaaggccaagatggggacaacgatgaatttgcacaacgcgagcatcgaagggagcaggcggcatgaggcaaaccacagatgcacggtagcagaaggcctgcaaacagccacgccatcgagcaccgtgaggattgacacaacgcgccgtcagcaagagaaccagagaggagggtatcggaccgacaattgctacttgtagcggcccacacacggtn

SEQ ID NO: 676499 - DNA, 1091 bp, Homo sapiens
ggggaccaactttgggaggcgccccgagcagccacgatgtgggactccccatttaagcgcccgcaacggttgattcgcttgacccggtgccaagaaattgttttccacaacgcgcacgttttcaaaaaagtttaaccaatttttcccagggagtccgaaccacctctgccttccacagggaagttgaggatttctccacggttctcggtgttaaaaagggtgattaccacaggagcctttgtgcctagagtggaccaccccccctctggtgcaaaggcagcctgctggttgttgaccccctcgcctcagaaaatttgggagatttcttggcccctccacgccttggtgttctccttacccccggccacggttgctgggcccacttccgccctgccaatgcctccaatgtctggcccccccactgctcggttgtttttttggggaccccccactctgtgtgccctctctcgaaaattgccactaaattgtttgagaagtgccctctacacacccctcgtggcctcccacgagaatggggaactaatgttttggagagaaaaaggggttttttataaagagaggtaaactctataaaagttataaatgagagagtccactttatctcgtgggacccctcgagatcccacatttgagcttatatcgcccctctattatagagaaaaggagaaattttggccacccttaacccctcaccacgagggaaagaaaatcaccttttgagaagacccccccgaagaagaaagaggggcccagggaagaagaaggtttccaggggaaaccccacccctatggccatattcgcttcttggatattcccagccccccaggaatttactgggaaataaccattttttttgttttaggcccccccccatacttgttaatactttgttatggccaccctagccaacttatgccagtcacccaccccgggtgaaaatgggacattccccactctagctctttaggcccagctttatttgtaataagatatcttgttttccaaggatatagatattgagattttccatgtatttgtttaaataaccttgtttcttgtttaaagccca

SEQ ID NO: 676500 - DNA, 139 bp, Homo sapiens
taccattacgctgacctcttccgtcattcaatcactctttcggaatattctcttcctttctatcagtttccccagaagcagtagaaggttactgtttttctccctttgtctagtcttctatctgttctatagttgctat

SEQ ID NO: 676501 - DNA, 285 bp, Homo sapiens
gaacctgaactcaacatgtacaaatggatctaatagacctttacagaactttctacccaaaaacaacaaaatacacattctttgcatgagcacatggcacatactctaaaattaaacacataattagacataaaagaatactcagcaagtgcaaaatagccaacatcctaccaaacacactgtctgactatatcacaataaaaatagaggtcaaaactaagaaaagagctcaaaaccatacaattaccgtggcttggccttgccatagtgcaagggtaccgagct

SEQ ID NO: 676502 - DNA, 917 bp, Homo sapiens
  misc_feature (306)..(306): n is a, c, g, or t
tggggctaaaggttggggctttaagggcagcgggggtaaaaggaaacaaaaacagtaattctgaaaagcccaggaaacaggcagccaggaccagccgtggcccattccaggccagttgacctgaaatgctgattctgtccaggaggggctggctggtattgttgtacagactgggtgaggcagtctagggaggactggaggcctctggagaagaagaatgggaaagactggtcagcgctcaaaagtccattggatgctagtggggcccaggtatgtcctttgcagaccagatagttcgctagaccntcgtcttggggtctgcatacgcctccagaagtttgaggggcacgtcaagttgatccgatagacccaaggcccccgcaagaagggccacacgccggcgctctcctccaatggttccacgcaatgagactcatcccccgaaattggcagaccccttgcaacgccacgggcgcgggcgacccctttctgagcttgggctctctacgcaagcaagccgcttagagacgtgcccatccacggactggactcatcaccacggcttaggtcgagataacaacggaaagtgaggaaatagcctggtagtatccccgagaagcaccccgggttgcggcacaaatcccgggagtaccattaagttcccaaaaaatcctccatcggggcacggtcacaaaatcggctcaccgacagcgcgagctcgacaacggaaacaagtccaaggcccctatgacggccaacggcctggtgcgatacaaggaaacaacgtattagccccccagaaaaagcccagagtgcccagacgccccccagaccttggccccaccgaaaggcagggaccaccccaggaccacaggaccgagatgggcatgtgctacccgacaaaacacgggggaagc

SEQ ID NO: 676503 - DNA, 412 bp, Homo sapiens
  misc_feature (80)..(80): n is a, c, g, or t
  misc_feature (85)..(85): n is a, c, g, or t
cactttctctggtaactccttgagtagcttaataatcaaccttctgaattctttatctggcaattccagaggtttcctcntggtntggttccattgctagagagctagtgtgatcttttaggggtgtcaaagaaccttgttttttcatattaccagaatcacttttcttgttccttctcatttgggaggattatttcaggtgaaaaatctggaactcaagggctgctgttcaggttcttttgttccaccaggtgatcccttgctgtggtgttctctcccttctcctgggatgggggcttcctgagagttgggctgcaatgattgttactgccacccagcagagctactgggctcttacctagtgctgaagtcaccatcttctaaaagaggtgctgcagcttgtgttttcttg

SEQ ID NO: 676504 - DNA, 433 bp, Homo sapiens
ctggctttgggagcactccacccctatgggcatttggagggtcctcccagggtcgggctgccaaactccacggttagctccgggccaacgtggtaggcaaagtatggcgccaggtccaggctacaggctttttttgggaacagaacagtgcccccaatgggcgaggcatgggctgccgccctttccccggctggaccaaccttgttttactggccatggcttaaaacttctgaaaggagggaaaggaggggaaccaaaaccctcatgcccctttggcttttaaaggacaaagggttttgggttttgcccccagccccttggaaaccagtaattcaaaccttcctcatttcatttcaggggtttccttgctgttatcccccaaagccctggggtgaatgtgaatccaaaatctattttttttaataaattggga

SEQ ID NO: 676505 - DNA, 111 bp, Homo sapiens
acgctgctctcactacttctcctcatggtctatcaccaatcttggcaacacgaccatgtggtgcccaagcccttccgcccgatacttggcctgcttcttgacttgagagaa

SEQ ID NO: 676506 - DNA, 526 bp, Homo sapiens
ctacatgttatagcacatgcattagctgtttttcctgatgctctccctcccgtgaaccccttcctcaacaggccagtgtgtgtcgtccctctctgtgtccatgtgttctcgttctcattgttcagttcccacttatgagtgagaacatgtggtgtctggttttcttttcctgtgttagtttgctgatgataatggcttccagctccattcatgtccctgcaagtacattatctcattcctttttatggctgcataatattcctgtaatatgcttatgccctgaatggtattgcctcaattttcttctagggtttccttaatccagtctatcattatggacatttgggttgattccatgtctttgctattgtgaatagtactgcaatgaacatacttgtgcatgtgtccttacaatagaatgattcgtattcctttgggtatatatctagtaatgggatcgctgggtcacatagtatttctgcttctagatctttgcggaattatcacatcgtctttcacaacgggc

SEQ ID NO: 676507 - DNA, 661 bp, Homo sapiens
  misc_feature (516)..(516): n is a, c, g, or t
  misc_feature (518)..(518): n is a, c, g, or t
tatcacaacagaagtaaaatgttgcttggtaaaaaaaaaaaaaaaaaaaaaagggggggggggccaataaccttcgcggggcggggccaagttaccccacccttttgtagggggcgggcccgggggggggtagataagcataaggccggggcgggcgggtgttcacaagacgcgggcgcgggaaagaaagagcaccggtagggctatgcgttgtgctgagggggacccgaacccttctggtggggggggggacgataacattggagtgagagccaccctaacccgaagaatataaatatcaacacgcggcgaaagcgttataacaatcacaacaggtggaagtgagatggtggtgggagatcaaccccgggagccttggtgctcattgggcttgcgtgcggacacaagataagcggtctcacgcgtgaccatgagtggactaatcgagtgcatccagcgataatctccttctctcactgcggcctgtggctgtctaaatcaattcataaatcaccngnaggaacaataaagcaaaaacaacgagataagcaaacgaaacgaaagagaaagcatatgtacagaagccagatagatgaagatcagcagcaagagaagagacataggagagcacacgagaagacagcaagaacaaacaacacga

SEQ ID NO: 676508 - DNA, 439 bp, Homo sapiens
  misc_feature (14)..(14): n is a, c, g, or t
  misc_feature (25)..(25): n is a, c, g, or t
  misc_feature (28)..(28): n is a, c, g, or t
  misc_feature (44)..(44): n is a, c, g, or t
  misc_feature (180)..(180): n is a, c, g, or t
  misc_feature (255)..(255): n is a, c, g, or t
  misc_feature (311)..(311): n is a, c, g, or t
  misc_feature (320)..(320): n is a, c, g, or t
  misc_feature (327)..(327): n is a, c, g, or t
  misc_feature (332)..(332): n is a, c, g, or t
  misc_feature (354)..(354): n is a, c, g, or t
  misc_feature (396)..(396): n is a, c, g, or t
  misc_feature (416)..(416): n is a, c, g, or t
ataacgtgccgtgntagctgtgagnccngcagcagcatggctcnaacaagagaagagatcacagaaacgtgaggatcaagaagccggactacaaggtcgcctacgtgcagctggcccatggacagaccttcacgttcccagatctgtttcccgagaaagacgagagccctgaaggcagcnctgccgacagacctctacagcatgctcgaggaggagaggcagcagaggcagagcagcgacccgcggcggggcggngtccccaagctggttcgggctgtgaccggggtggccaagcagggacgccgccccanggtgggcangcttgtnggcangagcaagccgacccagcggccnaggcggcattccccaagcttggtttccgggcccgttgacggnggcggccaagcaagggacgngccccaaggttgggcaagctttt

SEQ ID NO: 676509 - DNA, 167 bp, Homo sapiens
atacagattatgatctaagcctcgtgaagtgaacatctacctaccgtccttgcttacaacacctcaaatcccctgcccaactgtagccagattctctgcaagacttacagtacataaaacctagcgatacactgagcacatgataaagtcacaagctcttcgcccag

SEQ ID NO: 676510 - DNA, 662 bp, Homo sapiens
  misc_feature (556)..(556): n is a, c, g, or t
agataccatctcatgccagttagaatggagatcattaaaaagtcaggaaacaacagatgctggggaggatgtggagaaataggaactcttttacactgttgctgggagtgcaaattagttcaaccattgtggaagacagtgtggtgattcctcaacaatctagaactagaaataccatttgacccagcgatcccattactgggtatatacccgaaggattatctatcatgctactataaagacacatgcatgtgtatgtttattgcagcactgttcacaatagcaaagacttggaaccaacccaaatgcccatcaatgatagactggataaagaaaacgtggcacatatccaccatggaatactatgcagccataaaaaaggttgagttcatgtcctttgcagggacatagatgaagctggaaaccatcattctcagcaaactaacacaagaacagaaaaccaaacactgcatgttctcactcataagtgggagttgaacagtgagaacatatggacacatggaaagggatatcacacaccaggggcccgtcaggngtgggagccttagggagatagcctttggagaatccctaacttggatgatggggttaaagggttaaggtgcatataccaccattcccatgtatttacctatgtacaa

SEQ ID NO: 676511 - DNA, 267 bp, Homo sapiens
  misc_feature (88)..(88): n is a, c, g, or t
  misc_feature (93)..(93): n is a, c, g, or t
  misc_feature (111)..(111): n is a, c, g, or t
  misc_feature (113)..(113): n is a, c, g, or t
  misc_feature (116)..(116): n is a, c, g, or t
  misc_feature (119)..(119): n is a, c, g, or t
  misc_feature (132)..(132): n is a, c, g, or t
  misc_feature (141)..(141): n is a, c, g, or t
  misc_feature (147)..(147): n is a, c, g, or t
  misc_feature (169)..(169): n is a, c, g, or t
  misc_feature (181)..(181): n is a, c, g, or t
  misc_feature (183)..(184): n is a, c, g, or t
agaggagacccccgggctcgcagagaaatcggcacgaggtttctagagacgcccctaagtcacctgcttcattagacggtttccaggntttcncccaggtgacgctgttancnccncanctggcggtgacanccggcccancgtgcnccaccacacaccgcagagctgnccaggcacagcncnngccccagcgctcatggtgttgaaactgtctgtcatgcaccacggtgtctgtgtccacacagtaataaacggtttactgtccgc

SEQ ID NO: 676512 - DNA, 172 bp, Homo sapiens
tgcgtatagcttgtgtgagcgtgagtgtgcatgtgtgaacctctgcgtgaccatgtgcaaggggccgctcatgcaagagtgttgtggtgatcagcgcatatgcgtgcgtgtgcactaccgggaggggtggctggccgtcgtacaacaggagctgggtgtgaggaccatgctg

SEQ ID NO: 676513 - DNA, 1247 bp, Homo sapiens
gagcactgcctggctccacgtgcctcctggtctcagtactgtgcagctgtcctggggttgcttagcagtcctggagtcctcctacctcggtgctgtgcaagcccacggatcccatctgtgtgccaactctagtaccggtgccgcatcagccaacgccaccctggaccggatcactgggcaagtggtataatatcgcatcgtgcctttcagaaacgatggatgtacatgtcaacggtcgggtttcaggagatccataggcaaaccttctttctagttcagtcggcccagagcgatgacaagaggacatcgagtcgtttctcaagagagtatcctagacgccgatcaggacgcagtgcatcgtagtaaacgagcctacctagcgcttgacattcgtcgccatggcgcggaaagaaattggggagccagtgctgctcgagggaattaacggattgcgcgcaagggtccaaacatgtacgccaattctccggctgcgacctttgccttgaattcccatactagcgtgacgacctctaaagactcttaaccattcatcgtttgccttctttttggaaccagttctgtagaccccggagtttggaaggagacgcacatcctaggggggggcgacctgtgataccttaggcttccttaattcggcgtggaacccaaagggccgctaagcaagcaacagaagcgcgataagtgcatgacatacttggtgagcatgtaaagttaacctgactcgaaagcccttcatacggaaactggcttatggcccggccaattttccccccaaaggttcaaagacttgcttccggtggttaccaacccggcaattgggcgaacacaacacgggcactacacggttgttgaggacccaacctggggaacgaaaaggcaaggccaacgaaggaaacgtggaggaagcgaaaaacccagcgaagcgacgcggcgggaaattccctaaggcccaggggacacacaaagccctttgtggaattccagggaaccaggaaacaaacctttgcggcggggccccaattcccttggcccccccttcccaaatacccgccgaacaatttgtttgtttacccctcccaagggcgttttatattccccccgttccaacttttggccattttcagaagttcaaaaagcggctttccattgagatgatttattgagaaaggacaagacaacgacgacacgacacagtatacaaagcatacaatagacaagcacacaga

SEQ ID NO: 676514 - DNA, 261 bp, Homo sapiens
ggtgcaatcacggatacactgcagtgtcaaactcttggtctacaaacaatcctcctgcctcaggcctccagagtagaagcaattctcatgccttagcctcccgagtagctgggacttcaggcatgcaccagcacacccagctaattttttgtatttttagtagaagtgaggtttcaccatgttggccgggctggtctcaaacacctgacctcaagtgatcttcccaccccagcatcccaaagtgctgggattacaggcgtg

SEQ ID NO: 676515 - DNA, 1396 bp, Homo sapiens
  misc_feature (498)..(498): n is a, c, g, or t
ggcgcctcgggccaggcgttcacgtggcttccagatgaacctgaacatctccgtttccgcagctcgagctggactgacgcatgcaaactcacttgatacgtggacgatgagactgccaagacttgctggtcaacatttctgagttgatgagacgcggtagtagcgcaccagccatcaacaacgcttagcctgctgtacgcctctcgcgagttcgaacgaaagtggcacaccgcggtatcatgctagtggtccgtaacaatcaggtgggtgagtgagacgcacaaaaagcgaacggctcttacccccgaatgcaaagcgaggggtcgctactatgcaccgcagttgggccgttgctcgcagccctgcataactgcacgctaatggggagccattgcgcagttgtaccagacccaaatgggagaacagctggtaggaaagaaaaatcaatgaacaacctcagaccctgtcgtgatctgcagttgcttggagtgctagagnatctcgagacggttcctcacaccattgggttgacttgtcagagagacgcgacgattgaaggcactattccgtcggacgtgaaccatgagtactgtacatcgatgccttcgtgcctgtgcatggatgcctccgaaagagcagccgtagtcaagtagatttcccgtgcgaacaacttcttatcgaatcgtctcgtaacacgacagtaattgacctggttctcgggccaggcctactagctttggttacacgagagatcgacctccttataaatacttagagactggacacggggtgagattgcaaacacccccttaagggagcctcaacacgactactccccaaaggagtttccataagcggctccctatatgtctacaattcccaaccaggattggttcgccgtgggtccattgcgaacccacaaaagcggcggatccgggggccgggctaagttattggcctttcattggacagacaggaaaatgccaatgtccaggtttaggaccccagaaagtaccccatcaaaagcttataggcacggaccacgccaaggtggctatagccagggcaatattctaattttggcccattacgcagagcggtgtcaccgtggagggccccccagatgtgaaaaggcaaatcctggtgacgacaggggccaagggtgctcttatacagtagggagcgcgaaaaacaaacactggcccctgatagtgtggtacaactacccacgcagaaatttttgcttccagaagtagagggaaaagcaataatcgtgcacaagaggacaccacttttgtataccccaattcgggttccctgtgagcgcgcagagcccgtttaccattataccgtttacacacttaacaaggagtccattaggaataaagtatgccca

SEQ ID NO: 676516 - DNA, 114 bp, Homo sapiens
cggagcattacatcctggaagccctgttgtgactatgaacattattcagatattacttattggggatacccaaataaagaatatgaagttgtgactgaagatagaatattcttg

SEQ ID NO: 676517 - DNA, 438 bp, Homo sapiens
acttggcgaggcagtctcgaggggcggcggccgcgctgctctctgtaacgggtcccgcagctgggcaggcgggcgcgctgtttgcgcggagccatgaagcccacagcctcagcgtcctctacaaaggcgaggccaaggtggtgctgctcaaagccgcatacgatgtgtcttccttcagctttttccagagatccagcgttcaggaattcatgaccttcacgagtcaactgattgtggagcgctcatcgaaaggcactagagcttctgtcaaagaacaagactatctgtgccacgtctacgtccggaatgatagtcttgcaggtgtggtcattgctgacaatgaatacccatcccgggtggcctttaccttgctggagaaggtactagatgaattctccaagcaagtcgacaggatagactggccagtaggatcccctg

SEQ ID NO: 676518 - DNA, 458 bp, Homo sapiens
  misc_feature (37)..(37): n is a, c, g, or t
  misc_feature (59)..(59): n is a, c, g, or t
  misc_feature (89)..(89): n is a, c, g, or t
  misc_feature (128)..(128): n is a, c, g, or t
  misc_feature (138)..(138): n is a, c, g, or t
  misc_feature (186)..(186): n is a, c, g, or t
  misc_feature (231)..(231): n is a, c, g, or t
  misc_feature (241)..(241): n is a, c, g, or t
  misc_feature (263)..(263): n is a, c, g, or t
  misc_feature (303)..(303): n is a, c, g, or t
  misc_feature (429)..(429): n is a, c, g, or t
atttctttttaaaatgatggttcaaatttgaaaaaanggcttttgtgaggcccaggttnaaggtgacccaggaatcttgtatgatgaanaccttcccataccctgagactctggtactatattgtaancctggcctanagtagttaattacttgagattctttaattttggtctctgagctgggcntggtggttcatgcctgtaatcccagcactttgggaggccaaggtntgcggatcanaaggtcaggagttcgagacccncctggccaagatggtgaaaccccatctctactaaaaatanaaaaattagctgggcgtggtggcgggctcctgtagtcccagctactcgggaggctgaggcagaagaatcacgtgaacccaggaggcagaagtggcagtgagccaagatcgcaccactgcactccancctgggcgacagagcaagactctgcctca

SEQ ID NO: 676519 - DNA, 306 bp, Homo sapiens
gtccagggtgtccagttattcttttcagcagtgcaagtcagacggtggatcaccgagacaagattgtaccgtggtgaaggaaagtggccccacgtcggggtgtgttagtgtgtgaagagaacgggagagtcaggttctatgtcatacaccatccgtaccccgttgtcttaggctgccctgtcccccttcaacccttccagccagggttccatttggtttgcagtggcccaacacaagtctggtgtcctcatctccctactaaccctctgcccgcttctacttgtttaaactaatctaaaaaaataa

SEQ ID NO: 676520 - DNA, 420 bp, Homo sapiens
tctcctcttaggcatatatgctcgatccacgtggacacagaggtgggcatcaagtcaatatccacatgtacagcgcagtattagatggctctgtggaaatctaatgggtattcctggctaggtattagacaagttgtcagctcctggtgatgtggttgaaaatatgctcagtgcctccagtgagaccgtgagattctagcttcaatgagaaggactatgcctgtggtagggtcagcagttacctggtaggcagcattcggtgccacaggtagtatcatggtcgtgtaagcagcatgttccattggctaatccttatagatatcccgtagacggatagagaatgaagctcaagtttcagaatgaccctgtaagttacgcacggtgcagcatgtctctaaggtatcagtctcaccgagtgcg

SEQ ID NO: 676521 - DNA, 235 bp, Homo sapiens
gctagtatgtcctagctgatttagtcaggtgccaggtgcacctggacgctccctacgcttaccgtcaggcctacttacccaaacacttcccgctgccggtcaggcccacagatgtggtcttctccacagtccaggacgctctgcgccttgtcctctatccggctcttgctcggatcaggtacggctgggctgaggccgtggctgtccactggggcttgggggccagctggcgggg

SEQ ID NO: 676522 - DNA, 110 bp, Homo sapiens
gtacgactctagaggtcccctcagtcgcgtgttcacctatggccatcacccaaaacaagaaatagaacacttctgagccaggcgcgtggctcacgcatgtaatcccagca

SEQ ID NO: 676523 - DNA, 896 bp, Homo sapiens
  misc_feature (1)..(1): n is a, c, g, or t
  misc_feature (263)..(263): n is a, c, g, or t
ntcgtggagccgcttttcgcctggtatcctccgacgagtgtcccccgcggatttgttccgccaaaaaggcttgccccccgtgtcgtgacgtgagggtggcccccatccaatgggcacgcgtccatcttttagtgaaccgtgggagcccccacacaggatggtgtttgccgcccaaaccaaccgcgtggtgcgggcatacccgcgcgtgtagtagacaattctatctcaggcagtgtgggcgcgaaagtaacgacattctctcntagtagcagtgtgaatgtggtgtccgctcctctgttagccccagcgtgtatgtgcaccacctgcccttcacctgcccgactcactggcatggtaaaaacatcattacaaccactacttgggggattcatcatgtcctccctccctattctagctctcctcggtataactccgcgcgggcggtgcatcccccccactcttcattgttgctttccacccactgcggcagagatgtttatcgaatacaagagagataacgaacattgttcttacaatactagaaattctatgggagaaaacacgttccggggccccactctcatttgaagtcggatccgctacacccaaataatgcatttggtctcttctgcctttgttgagccggggggccatttatcttgggcagaataatcgcggggtcggtccatccaccttttgaaagaaaagggtgcccggtcgtgttatgcccccggaaagcacctttggatacaagggcagtgcgaaaagaatcaaattgcaagacgacactgcgtcgcccactagtcggcgaaaaaaacgagactgtgattgtaggaggaaaacaaaagttacattcccatccaaaaaataaatcaaaaaaacaaaaaacatgacga

SEQ ID NO: 676524 - DNA, 711 bp, Homo sapiens
tataattacaatgcgtagatccctatatcgtcttttctggcacattgcagctgcaaagatgtctacaagacgcacttccccctaatcatagtagagcttatcacctttcagatcacgccctcagaatcacttttcctatctgcttccctagtcctgtatgccctttgtcctaacactcactactaatacttagctaagttctcacatctcagacgctcaggagaatagaaaccgtcgtgaatcatagtcctgcccgccatcatcctagtcctcatcgccctcccatccctacgcatcctttacataacagacgaggtcaacgatccctcccttgaccatcggaactcaattggccaccaatggtactgaacctacgagtacaccgacttgatcgtcggactaatcttctaactcctacatacttcccccattattcctagaaccaggcgacctgcgactccttgacgttgacgatcgagtagtactcccgattgaagcccccattcgtagtagagtaactctacatcagcagagacgtctatgcactcagtgagctgtccctcacattaggcttatctacagatgcattcccggacgtctgaaccaaaccactttccccgctacacgtccgggggtatactacggtcaatgctctgaatctgtggagcaacacagtctatgcccatcgtcctagattaattcccctatctg

SEQ ID NO: 676525 - DNA, 1402 bp, Homo sapiens
gtgattctctggctactaagctgtctgtccgcatcgtcaggcctcctactagtgcgctggattatacagtgtgacgtgacttcctccggtgccgtatttgaacgcagatctagttgtagcagctcgctttgagaatcttgccgaaatgctctctggcatctccaggaggatcactccctcttggcctcatgtccaagtgcctccatggagctgtgtatggcccatggccttacttatctagtggtgtgatgcactcaccatcgtatagtcaaggcatgcatacagtacagtctggacttcgagtcacgattgctccaccagaagaggataaccgtgtgtgtccccgtgcctgggatttggcttgcagtgcgtttgtgagcgccttggtgcaagggcttctcagagcactctgggacgttcctctttgcacatgcatcgtcgtggctcgtgttgcatccctcattcaataagatccgtgagaggggtacgcatcactgcacactaatgacgcgagacgggtcgaatcggtagacaagtgcgttgaaatgctcttgtgacccgagggtttcctattgcccactcggatggtgatcgattctcaagactatgtcggggaatgctcaatgggggcccatgtcgaacattgtccatcaccgggagtccgatggcaaggtgggagttgccttgcctcgagagattgagagggaagaaagcgcatttgctaccccaagcccattgacccgaaaacgctcgggcgtggacacacatcctgccatatcttcttagcgtagaacagaatagcaaccaacacacttgcaatacctggggcttgcaacagtgatgttgctggcaggtgaccgcatggatcaggatcgccaacgccctaatccgttgggttgcaatgcgcttggcacggggcccgtggactgaccatgagttgttatagacccctccttgtctcgaacgcgccccgcacgaggtgggccacttgcaagggtcttgcagtagtccggaggcccgagttgtcaatggtgccatgtcccctacgcggtggaccaagtgagggcaatggcaacttgaccaagttggtcccattttcctcatatgttggcaactacatgcgacctgcggaagttgctggcccgtaatgtgggctccggagcgccccgttaaccatcaaagtgagggtataaatggtgaccacagcgggacacctacgtggttcggaattggccccgacccgcatctgtcgacacggcgagccatacccgtggtacagacacacagcttcggtgtcatgcactgtcccacgcggttgtgttcccctatacacgtcatggcaacccgtgtgatataacacaatcgggtatttgccgcaagctggttcaacccaggtggtact

SEQ ID NO: 676526 - DNA, 801 bp, Homo sapiens
  misc_feature (345)..(345): n is a, c, g, or t
  misc_feature (370)..(370): n is a, c, g, or t
  misc_feature (375)..(375): n is a, c, g, or t
  misc_feature (384)..(384): n is a, c, g, or t
  misc_feature (388)..(388): n is a, c, g, or t
  misc_feature (392)..(392): n is a, c, g, or t
  misc_feature (402)..(402): n is a, c, g, or t
  misc_feature (410)..(410): n is a, c, g, or t
  misc_feature (418)..(418): n is a, c, g, or t
  misc_feature (430)..(430): n is a, c, g, or t
  misc_feature (446)..(447): n is a, c, g, or t
  misc_feature (450)..(450): n is a, c, g, or t
  misc_feature (463)..(463): n is a, c, g, or t
  misc_feature (465)..(465): n is a, c, g, or t
  misc_feature (469)..(469): n is a, c, g, or t
  misc_feature (474)..(474): n is a, c, g, or t
  misc_feature (476)..(476): n is a, c, g, or t
  misc_feature (508)..(510): n is a, c, g, or t
  misc_feature (522)..(522): n is a, c, g, or t
  misc_feature (532)..(532): n is a, c, g, or t
  misc_feature (565)..(565): n is a, c, g, or t
  misc_feature (597)..(597): n is a, c, g, or t
  misc_feature (796)..(796): n is a, c, g, or t
ctcaacaccctgcttctcccggggacgcttttgagtgggccctgcccggggagctgcagagcagcagcacctttctctgagaagaggtccttggttgggtcaaggacagggctgagcgtggaagggggagcagtcaggggctctgtgttaggatgcggctttctctgcctctgggcagcctgctttggcctttccttgtatgtgggtgtttattacaagtggctttgtgtcagacacgctcggctccccacctggacacacactcaccagtggcctttcagtgtagcgggaggaagccggtgtccctggatgtgaagctcacactgatgggctggggcaggggcntgggccggcgaaggggccggggggngaggnacaaatcgnagtnttcnaggcatgccnagcagcanaaaagaantcaaccaaagtntagttatatatttcannggnatacaaagttacntnagtngcctnanaaatcccttcctgttccctcctggtcctgtgnnnctccccagggtntgttccttcnttctctctcctggtgtgggttaaagggacattnacaaaccaggtcaccatcctcagaggctgagncctgtacccaccccagcacagccacctccgccagaccccgtggctcctggagagccagctttgctattcccattgtgacagcgatggcaggcctgacccacggggcagttagagcagcctcgtggagctcgcccctcccctcagcctgcccacctctccctgcatcctgaggccagtggccccgggccttcacagaatncctaa

SEQ ID NO: 676527 - DNA, 213 bp, Homo sapiens
ctccatggcacattacatcaaactgtcaaaagtcataagcaatgataaaattctaaaaacagaaggagaatagtgtctagtcacttataatggaaccctaatgacttcttatggaaaagcttacaaggcaggattaaatgaaatgatatactcaaagtgctaaaaaaaaaataatgccattcaaggatactatactcagcaaagttatacttc

SEQ ID NO: 676528 - DNA, 616 bp, Homo sapiens
  misc_feature (25)..(25): n is a, c, g, or t
  misc_feature (455)..(455): n is a, c, g, or t
  misc_feature (493)..(493): n is a, c, g, or t
  misc_feature (496)..(496): n is a, c, g, or t
  misc_feature (505)..(505): n is a, c, g, or t
  misc_feature (553)..(553): n is a, c, g, or t
ggtttatcgtcgcttggggactaanggcgtcggtgtggcgcgcaatcgggttctaggcgtgcaggcagctcgaggacccgcggcgcccggccccggtctcggcctgggcagatagcagaggcagacaggccgtgccgggggggcatgttgctgctaacaaggtggccccagggtgcatgcttacaggctgcgactagtgcaccatgagagggcagggcccgcagcaaggtgctgaacactatgtcttgcaagatggcttgttcgtggcgatcgtggatatacttccgttcgagtggtgtttaactgcatctggggtggaagactttatagatgatcacgttgcgagtcgaggattagactcgtgcgacactttggcgaattggcgaggtagtgctccttagcggttaggacaaaatgcgtgcgcacgccggttgaaagtcgttgccaatcgcggntggtgctaaagctgtcacctgttgggttaaccccttanacnatgtcggcntaagtggggaacgaaagtctagaatcccgggtcccatcctagtactgnacaggacaaacctatgatccccgtccccgtttattgagggggccgcgggccgggcaattggaa

SEQ ID NO: 676529 - DNA, 249 bp, Homo sapiens
tctagaggatccacccatttctcaggtgattattctgtggatttatttatttatttatttgagagacagagtcttggttctgctgcccaagctggagtgcagggtgcgatctcagctcagctcaatggcagcctcgtgcctccaaagttcaagcgattctccagcctcagcctcccaagtagctgggaccacagaggcacaccaccaggcccagctaattttggtattttaagtagaaatgggctttgg

SEQ ID NO: 676530 - DNA, 167 bp, Homo sapiens
actggcatgtaggttatccactattttgctcaggatatctggaatacctagtctgaagcaatcctcttgccttgtctttccaaaatcgttcgattacaggcatgatacaccatgcctggccactaatttctttttttttatttatttatatatatatttattattta

SEQ ID NO: 676531 - DNA, 1350 bp, Homo sapiens
agcggacgtgggaactgtagtgggtgcagctacggccgtcgggtcgtcgtgtgtgctgttgttcgtgcgaggcgagcgcgctgacgcgtctgcgagaagcatcacgtggggcgaccacgggccccgtcacgtggtgcgtacttcgtcgttggcgtgcccgcccgtgtcatacgtcccatgcctcatacttcttgaggatttacgtggattgcgacatgtctaatcttgatgggtgcatctgatgcgcgaggagtcagcaggaaagtagagtaccgcgtgactgtcatctagatagacagcacattccagaaagtgctttgcgattacaacgtcaactcgaggaagtgacgcctcgcagagtgtgcctccgatggattgcctgcgtgtacaaacagtgtctcggctaacgattcttacgaatcgacgagtcaaatgctcgcgaggaagcatgtcagaacgctgtctgggtgtagctgagcgtgcgatagcaagaactatgatttaatccgtctcatcaggaagttgccactttgaaagacatcttccgttcgcgagggtaccaatagaggaaatggcagggcaattggcataggattgatcgtaggagcaaccgaggggcggggccctcggttgggatttggaaataagagtggccgcaggttgggaccttgtgagtgatatccggaaatagtgttcgcattaccctgtggtactaaacagccttggggcggactcggagcccttttttcacattccctcgacttttggatgaaaattgggctggtggaccacatttgagaatgaccggacatgtggctttagataatgcaacacccccgtctcgcgcttctcccgcgcacgggtaacatttcgcaccgttttcccccttccttgttcacttctagatagagcgagaggaggttgcgtgtccctactctataagaaggggaattcccccgaaggtccctagggggtggggttcattgacacaatggcccctcgacaagaccgttggtacttctggtagagagattgatccgcctacttgttccatgtccacaccttttgcgaagtcgcttgtgtgatggcattggtggtcctttgtggaaaaattttttcccaccccctcctcatatctgccagcgaagcctatttccaaatgttatgcattaggttgcaaggcgcaaactaagtcgggaagtcattcgcgtcgttagcgcataatggctgattcgaaaaaggccccataaggaattgtcccgcatttgcgttcctttgggaaccaatttgggtaccccctatatggttagcgtatgtaacagctttagggacaaaacgcaattatttaca

SEQ ID NO: 676532 - DNA, 112 bp, Homo sapiens
ataagcactggctgttggctctcttttcggcgttgttgatactcttgagagcctctgccaggacattcatgcgccccattgtggcttagattgcaggatggtgcaccacgaa

SEQ ID NO: 676533 - DNA, 651 bp, Homo sapiens
agcggggggggggcggggcctcgggcctgcagcctcgtcaggctcagtcccctcccgataaacctcctagtatagggagctttcccggggggtgaccctggcttctgggcgaaaacccccagtttaaggaggccttccccctggcttcacgattgtggagtcgaaaggaacccttggtaaggcggagaatgagctcgtgacgatggacccgaggaaaaaacctgccagaccaggattctatgtagaacttcagcgtctttcaggctttggagggaaggcgattatgaacgggatttcaatgaaatgaaccctgtcccttcggcttttgttttatcctcttctcgggttctcgtcacgttgatggtcctatctttatttttaaaaattaacatggctgcatattccccagcatcctaaactctagtgcaacctagtggcaagtggcgaaaaaattacctgccaaccgggattcctactaggtcccccggagttctcgcaagatttgcgacccagattggcaaaaatacagtgtgtgcacgcggactcaagtggaccattgtcaccaagaagtcacgagattttgggggacttgtagcagaaaacagcgtgttttataaacagccctgctccacagctgggttaccagtgact

SEQ ID NO: 676534 - DNA, 1517 bp, Homo sapiens
  misc_feature (1225)..(1225): n is a, c, g, or t
  misc_feature (1413)..(1413): n is a, c, g, or t
gggaaagagagagagacactaatctcgaggtatgtaacaaggattgagcgagatctgtgcctctactcattctacatcactgtcggaacatgctgctgtccgatgccttggagccgtcgggaaggcgtatcgcaagggcatggttggagtcaccaacatggggagcacgggcgggacgagctgcaccagatgatgcctaggaagactgagtccaggcaatggggagggagtagccggtccgcggccacgtgacttaattagcatagggacaggactgcgggcaacggtggaaagaacaggcacactcaggcactagagagtctatttgtgtcgacaatgtgtcgctctcgagagacgctctaggaaaaatgggcgcgagaatcatctacgtgtcgactgcgggctctggtgtcgacgctagtacacacttcgtgtacctcccacataggggacgcactcgcaagggcgagacgcaccccgaacaagactgactttgcaaccgtgcaactggtccttttcccagtggtctggggtcccaaatacacgagcccacattagctgtgctatgtttgaacacccggcacgcgaacgcacacgcggattcgaagttcatgttcggacacagggcggggaaggagagtgtgacagagaccagatgtgcgcaaagaacctctagtatgtgcgagtgtcctgttgggagtctccacaagagggcactcttgtgttgccactctgtggagagcagcatagagagtcttggccaccagggtggacccccccgtcataatgtgactcttctataaggaggacagtaaaagcacggaatgtaactccaaagtccttactcgaaaaatcttttgtgctgctcccccccaataataaactatgtcggcgcacgcaattgtttgccccccatcgccaaggtgtagacggcgaaaatatatatgggcggtgcgcgtgtgtgcacgggtgtaccaacccaggatccgccctgtgaacaccaactatataaaccaacccgcgcgggggacaacatgtgagacattctcgctatgtcgttgtaacaaaacggctgttgggggaaccaccccctttataaaatataaccacacaaaaaatgtcggctctttctgtactatcaatcccacaaaggtgtaggctctccgaaaatagagcgcgccctttacacacaaatgatatctccgacatggggcgatcgggctcngttatgagggcggagccaacccctttggtagtttccttgcggcaaagacatacacgtgctgttacaaacaggcaggaaaagcagcaagcgggtggcgcctcaaaagggaggcgccttgcctggctccgccctttagacacacgcgacaacaatttcgttccccacattacaactcacacacgtgtgtnggtggctggtgtattacagcaccacaggttcggcgtgcatcacatagtgagtggtcacaccccgtggggttttatgcccccaataaaatgtggttgctggtgcg

SEQ ID NO: 676535 - DNA, 410 bp, Homo sapiens
tgaggggagaaacataaaaggaggacgttggccaaggagttcgagaccagcctggaaacatagtgagaacccatctctacaaaaagcacatgaattagctggacatggtgacataaacctatatccccagcattcgggaggctaaggcaggaggattgcttgagcccatgaagtcaaggctgcagtgagccgtgatggcaccactacactccaccctgggtgacagaatgagactctgtctccaaaaaaaaaaaaaaggaaaaagaaaaaagaaacaagaatttcctccagtaaggctcttaaatcagtattcggctggttaaagaacatggaagggcaaagggttacgggaggtgaaagaatccctgcaacgggtctgaatactacaattttaagcaaaacagtagata

SEQ ID NO: 676536 - DNA, 149 bp, Homo sapiens
cagtccacgtgtaggtcagtcacagcaggcccaggcccaggacacagtgttgagcattttacgggcaggtaagaggcttctaggaaactggtgcctctagaggcaacccggtgcccgaggtggagcaggttttcagtggctagaagtca

SEQ ID NO: 676537 - DNA, 317 bp, Homo sapiens
agcggagttgggcatcccagcactgagttctgcccgagagaagccgacccctcccgcaatgccagccccgccgtgcgcctcctgtcatgctagcacgcgcacgaacctacagacacaatgaaaatacgatacaccaacacgcacatacagatcgagatgccactgactcacctgagcaacgagccatccaagcacgcaccaacctgctagccacgcacaccacgagacagacagccagcccagcaacacgacacacaacacgctcacgaacccaaccacacaacaagataacgagcacaacacacaacaaaccacaa

SEQ ID NO: 676538 - DNA, 399 bp, Homo sapiens
  misc_feature (19)..(19): n is a, c, g, or t
  misc_feature (45)..(45): n is a, c, g, or t
  misc_feature (83)..(83): n is a, c, g, or t
  misc_feature (244)..(244): n is a, c, g, or t
  misc_feature (252)..(252): n is a, c, g, or t
  misc_feature (309)..(309): n is a, c, g, or t
ggagagccaaggggagggncagacagatggagagacatggcgggnaggaggagagagagccaaggggagaaacggaaggaganaggtgttgatagggtctggctctgtgtccccacccaaacctcatcttgtagctcccataattcccacgtgttgtgggagggagctggtggaggatggttgaatcctggaggtgcgtctttcctgggctgttctcatgatagtacgtgggtttcacaagatntgatggtntaaaaactggagtttccggacacaagctctccctttgcctgccaccatccatgcaanatgtgacttgctcctctttgctttctgccatgattgtgaggcctccccagctacatggaactgtaactccattaaacctctttcttttgt

SEQ ID NO: 676539 - DNA, 741 bp, Homo sapiens
  misc_feature (165)..(165): n is a, c, g, or t
  misc_feature (168)..(169): n is a, c, g, or t
  misc_feature (174)..(175): n is a, c, g, or t
  misc_feature (237)..(237): n is a, c, g, or t
  misc_feature (250)..(250): n is a, c, g, or t
  misc_feature (284)..(284): n is a, c, g, or t
  misc_feature (327)..(327): n is a, c, g, or t
  misc_feature (342)..(342): n is a, c, g, or t
  misc_feature (349)..(349): n is a, c, g, or t
  misc_feature (362)..(362): n is a, c, g, or t
  misc_feature (369)..(369): n is a, c, g, or t
  misc_feature (374)..(375): n is a, c, g, or t
  misc_feature (395)..(395): n is a, c, g, or t
  misc_feature (408)..(408): n is a, c, g, or t
  misc_feature (415)..(416): n is a, c, g, or t
  misc_feature (433)..(434): n is a, c, g, or t
  misc_feature (436)..(436): n is a, c, g, or t
  misc_feature (442)..(442): n is a, c, g, or t
  misc_feature (444)..(444): n is a, c, g, or t
  misc_feature (457)..(457): n is a, c, g, or t
  misc_feature (463)..(463): n is a, c, g, or t
  misc_feature (491)..(491): n is a, c, g, or t
  misc_feature (496)..(496): n is a, c, g, or t
  misc_feature (506)..(506): n is a, c, g, or t
  misc_feature (508)..(508): n is a, c, g, or t
  misc_feature (529)..(529): n is a, c, g, or t
  misc_feature (536)..(536): n is a, c, g, or t
  misc_feature (552)..(556): n is a, c, g, or t
  misc_feature (558)..(558): n is a, c, g, or t
  misc_feature (564)..(564): n is a, c, g, or t
  misc_feature (591)..(591): n is a, c, g, or t
  misc_feature (599)..(599): n is a, c, g, or t
  misc_feature (605)..(605): n is a, c, g, or t
gctaaaccatggcactggctgtttctgggaagtagggcctattaaagcatgggccaaggagacggtattgtctccttcaaaagaaaatacatctctcctggggcggggtggggggtctttctaggcccccaaatagctttttgtctttctcagcctctgatgtgngtnnagatnngggtcttactatgctgtccaggctggtctcaaactcctgggctcaggagatcctcccatctncgcctctcaaagngctgggattgctggcgtgagcaactgtgcccagnctctctcttctttttttctgaaccctatctctgatctctctgnctctggctcatcatntctatgnatctctgtcactntctgctnttatnnccgtgagtccctttctgggnctctgtctctgtntgtgatnntcctttattacttaacnntncctcangntggttccaaacantcttangagaaatctgagtagcaccaagcccctngcagntgactgctgngngatgttgggtgagctgctgtnttttggncttgactctcttttgnnnnnanatgcanaactagtacaagcggcaggggtccagnactgggangatttngggggttctcaattcacacacacaactgtgggtcacaattcatagaaggcaccccgcaccgagcttattctcttaatccctttgggaggcccggtggtgtgttcacccgggttgaatttagaccccttgtcctttt

SEQ ID NO: 676540 - DNA, 688 bp, Homo sapiens
gctgtagagacagtcttcttggattcagatcctgactccacttagctatgtaacctggtcagattacttcacctctctgagcctgtttcctcatctataaattgggggatagtaatgccaactcattgtggctgttatgaggattcactgagataatgcgtgcagtgctcttatcaccatctctggtcgcgtaagcgtcaacggaaatatgcagttgctgtgtattcggggctaatagctctgaggcaaaatgggcgacattatttcctttgaatgacattcaagcagtttgtagcatagctgagggcttactattggggatgagctagtctcctgcgtcatagacctctgcacctttcatcacgtcagtactccttgatcaagcagtccccatagccttttgggctaccagggaccgagtttagtgcaaacacaattttcccaccacgtggactggagggggactagcagcgggtagatagtgccgtggatgataactcgtgtagatcatctagaatacagtgaggctagtaacccagttctgcactaaaggctcgtaatcgcaaagcctcagattcccttcgccccttgcccgggcaaaagtggccgtatgcactccctgtgacaagtctcttgcaggtgcttcactcttgccagagatgaggaaacttcaaggcggatctgctga

SEQ ID NO: 676541 - DNA, 468 bp, Homo sapiens
  misc_feature (67)..(67): n is a, c, g, or t
aagacattcggcaatgtttggagatattttggtcgtcacaactgcaaggaaggatggtatgctgccnacctattggctagaggccaggatgctgctaaacatcccatacaccttacaggacagccttctccaatcccaaagaatcatctggtccaaagtgtaaatagtgtcagagttgagaaattctgctctagaagcttggtcaaattcaagttcaattattttggcaaggtctgcttgtcactgtttttgtgattagatttggtagtgggcttaagtgtcatcaatgtgatttatccattgtaaagtgattgccttttgcataatgtcatgcattcattcatgatcattgcctagattcgttgttgttaggagctgcaaaatgatcactttcttattgtgtctctctttcagccattactggaatccttttatttccattactgaaatttccattacaggaatcct

SEQ ID NO: 676542 - DNA, 334 bp, Homo sapiens
ctcccgggttcacgccattctcctgcctcagcctcctgagtaactgagactgcagatgcgtgccaccacacccagttgatttttaaatatttggtaaagatgtggtcttgctgtgtggccctggttgatctcaaactcctgcactcaagcaatcttcctgcctcaagcgtcccaagtgctgaaattacaggcatcagttaccgagcctggagggtcgtaactaaagcgaaaaagtgcaggacagagatgtaggagctcaggctccctctgatggtgacagaaccaggcgacgtttttaagctgggtcctgtgtggttgaatggtcgcaatccgg

SEQ ID NO: 676543 - DNA, 684 bp, Homo sapiens
  misc_feature (165)..(165): n is a, c, g, or t
  misc_feature (168)..(169): n is a, c, g, or t
  misc_feature (174)..(175): n is a, c, g, or t
  misc_feature (237)..(237): n is a, c, g, or t
  misc_feature (250)..(250): n is a, c, g, or t
  misc_feature (284)..(284): n is a, c, g, or t
  misc_feature (327)..(327): n is a, c, g, or t
  misc_feature (342)..(342): n is a, c, g, or t
  misc_feature (349)..(349): n is a, c, g, or t
  misc_feature (362)..(362): n is a, c, g, or t
  misc_feature (369)..(369): n is a, c, g, or t
  misc_feature (374)..(375): n is a, c, g, or t
  misc_feature (395)..(395): n is a, c, g, or t
  misc_feature (408)..(408): n is a, c, g, or t
  misc_feature (415)..(416): n is a, c, g, or t
  misc_feature (433)..(434): n is a, c, g, or t
  misc_feature (436)..(436): n is a, c, g, or t
  misc_feature (442)..(442): n is a, c, g, or t
  misc_feature (444)..(444): n is a, c, g, or t
  misc_feature (457)..(457): n is a, c, g, or t
  misc_feature (463)..(463): n is a, c, g, or t
  misc_feature (491)..(491): n is a, c, g, or t
  misc_feature (496)..(496): n is a, c, g, or t
  misc_feature (506)..(506): n is a, c, g, or t
  misc_feature (508)..(508): n is a, c, g, or t
  misc_feature (529)..(529): n is a, c, g, or t
  misc_feature (536)..(536): n is a, c, g, or t
  misc_feature (552)..(556): n is a, c, g, or t
  misc_feature (558)..(558): n is a, c, g, or t
  misc_feature (564)..(564): n is a, c, g, or t
  misc_feature (591)..(591): n is a, c, g, or t
  misc_feature (599)..(599): n is a, c, g, or t
  misc_feature (605)..(605): n is a, c, g, or t
  misc_feature (684)..(684): n is a, c, g, or t
gctaaaccatggcactggctgtttctgggaagtagggcctattaaagcatgggccaaggagacggtattgtctccttcaaaagaaaatacatctctcctggggcggggtggggggtctttctaggcccccaaatagctttttgtctttctcagcctctgatgtgngtnnagatnngggtcttactatgctgtccaggctggtctcaaactcctgggctcaggagatcctcccatctncgcctctcaaagngctgggattgctggcgtgagcaactgtgcccagnctctctcttctttttttctgaaccctatctctgatctctctgnctctggctcatcatntctatgnatctctgtcactntctgctnttatnnccgtgagtccctttctgggnctctgtctctgtntgtgatnntcctttattacttaacnntncctcangntggttccaaacantcttangagaaatctgagtagcaccaagcccctngcagntgactgctgngngatgttgggtgagctgctgtnttttggncttgactctcttttgnnnnnanatgcanaactagtacaagcggcaggggtccagnactgggangatttngggggttctcaattccaccacctggggtagatatcacgacacccttgggtgagattagaccactgggcgctgggccccn

SEQ ID NO: 676544 - DNA, 338 bp, Homo sapiens
aggactgtcattagagttataacagctcaaaaagttttataatactgaagattagtatgacaccaattagttcagtaaccagggcacagttgctatctcctattgatttggtatgggtagagtgaaatgaacctagaacattgaaaatactaaataaatcctctaaacaattgtttctatccatattgagatattttgcctgcagaaaatggatttttactgaaagcagtgccaactagggattgtatacctggttagggaatccaagttccaattctattacctctttaactttttacttgctttctgagttatggatcagctctgtatatagcatt

SEQ ID NO: 676545 - DNA, 193 bp, Homo sapiens
gagaatggccagcaggaaggcggggaccggggcaagtggcagcaccaggcaggcccaacgtggttcttccaacgtcttttccatgtttgaccaggcccagatacaggagttcaagagtttctccccaccttccactttccttagagctggggcttctccaaccttaaggccccatccacaggcttcagctgat

SEQ ID NO: 676546 - DNA, 167 bp, Homo sapiens
gaacccccgggggggaccctggggccctccccggtatcctttttttcctttggggggggccccccccccccccccccctcccccccttttggggggggggggggtagggggagggctgttttttaaaaaaatgggaaaaaggggaataaaaaatttgttggatccga

SEQ ID NO: 676547 - DNA, 136 bp, Homo sapiens
tctcacccgaaggtatggaaatctcatcttgaggccggcctcccgcttagatgctttcagcggttatccatcccgaacgtagctaatcagcggtgctcctggcggaacaactgacacaccagaggttcgtccaacc

SEQ ID NO: 676548 - DNA, 840 bp, Homo sapiens
gattacagttcactccagcctcaatctcctaggctcgggcaatcctcccatctcagcttcccaaatagctacgactacaggtgcatgcctccatgccctgctaattttgtgtaagtagagatggggtttacatatgttccctaggctaatcttgaactcctgagctcaagcaatccacccgcctcggctcccaaagggctgggattacaggcgtgagcctatcatgcctggcctaatgtattttttaaccagtggaatctaaccaagactttccaaacaaaatataaatcagctcagtaaggatggatattttgtacatttaaaactattatttaagcgccgggagtggtggctcacacctgtaatcccagcatttgggaaagccgaggccagggggatcatctgaggtcaggaacgttcgagatcagcctggccaaacatggtgaaccccatacctctactaaaacatacaaacattagctgggtgtgcaggatgcgtgtctgtaatccccagctacttgagaggctgaggcaagagaattcaccttgaaactgagaaggcgggggtcggcagtgagccgaggatggcagacattggaactccagctggggtgacagagcaggactccgtcttcaaaaaacaaaacaatcaatacacactatctgtcttagctgatgtcttacagcattgagaatccaaggctaatggatggtccaagtccacctacaatcaggcctattataaaaatccactatggggtgctatgaccggacttcatcatacggtcatattcctggacacacgggggcctagaagggcctggcccaagtgggtctcca

SEQ ID NO: 676549 - DNA, 200 bp, Homo sapiens
agggcttcttcaaggtaccgcgcacccaggtgggctttttgttggaaatggagagaggctggcctcatcccattggacctgtggctccccctggttctcctcctggctaagtccttcctgcgggtgggatcgccctccaggtgggcgccttcctggagaccgtagatgccagggctggaactttcatttgccgggacact

SEQ ID NO: 676550 - DNA, 274 bp, Homo sapiens
acctggggcccccccggggggaaaagggtttttttttccccccccgtttccccccggggggcgggcccgttttgaaagggggaccccaaaccggggtttttttttaaaaattaatttacccccttaaaaggggggtttttttttttgggggggggcccccccccccagtttttaccccccccccctttggggggcccgttttccccccgggggggttttttccccctacaaacgggggggggggtttaaaagggaaaaattttttttttcccca

SEQ ID NO: 676551 - DNA, 275 bp, Homo sapiens
ctttcgttagctcaggtttatcactgctgtttcccgctgaggggtgtggctggctaagcgttttgagctgctttgctgcggtgctttatgcttgttccttttgatcgtcgtgtatttagagccgctgctcgcactggaacgggaggcggagcatagtcgactgggagcgaccgatcgggccgccgccgccgccatgaaccccgaatatgactacctgtttaagctgcttttgattggcgacccaggcgtgggcaagtcatgcctgctcctgcggt

SEQ ID NO: 676552 - DNA, 821 bp, Homo sapiens
gcctcccttactgtcttaccccttctcgctctcacatgtggtcactctcttgctccttttcaccttccagacataggacaacacgatgtgagagcttcaccagatgcaggcccctcactttcccagtgttcatataccataaactcaaagtgtaagcccgttataaatcacccagatctgtgagtattctgttgtagcaacaacaatgcagactaagactgggacactcagggagctcttctctctacttgatggaagcactcccatgcgctggtgccttggtattatgtagaacggatgatgctgttacaacttctctttgtaatgtctcgaagagcttttagtggtgttgaaggaggttatacaggaggaagcccgatcacagggttcaggtccattctgtggtcttctttgctccttagattcctcgccctaagtctgactgttacattagcatcatcagtgtgtgtcctctgtgaccacatagtagtcagtatgcatcctgagatcatcagtgctaggaaatacatgagttcacatggctggtccccagtaatactgaagaagaaagtctaggagtgagacccaactattctgggtttaacaagtccccaggtgagtctgatgcacaaagaaacgtgagctgctgtattagatggtgtcgagttcatgccaccgaatcactgacacacacatctgctcactgcttgctcttcgcacaggcccctggatcctcctggaatccctgatccctgttgctcccttgcggagttttctagtccctcttatttgaagcatgtctttcagagcctcgacagcca

SEQ ID NO: 676553 - DNA, 331 bp, Homo sapiens
aatcaccgaagaagacagatgagacacagaacatcactacagagcatcaacataaggtaggagcaacaatcgtggaacacaccctatgtccacaagctgggcaatgttgacaagttttcccactttgtactcatcacccttccctagtacaactcaaattacatcatcttactgaacactactgactttactgaatctcatacctagggttcgatgttaccttatcatacaaatcacagtagaaaaacagtaatgaagtataatcaatacagccaagatgctggcttctcacctgtgcatatagttaacacaacaggtaggcatgaagcta

SEQ ID NO: 676554 - DNA, 868 bp, Homo sapiens
  misc_feature (1)..(1): n is a, c, g, or t
  misc_feature (238)..(238): n is a, c, g, or t
ngatttgttttgcgctgcgtggttgtgccgtgcgtggggcgtggtgctgatgggtgttggtggcgccgtgcgtgtgtgattccagtgtgtgtggtgattgtgcggagaggttgtgcggtgtgctgctctttgtggttggtccgcttgtgtgtttgtgttgtgccgtgcggccggaaggtggtgtggtgtggcccgccattcttcgcggtacgccgttccgggggacccgttgcccccncccggcggtttcccctccccccggttttgtttttcaccccccatagggggttttttccccttctgtgatggcccgggccccagaatttttttggcgggacccgcccccccaaacttttcggtgttggcgggcacaccttataccaaggtttccctgtgccgggtccccgagcaaattctccccgggagtttcgccccattatctgcgctgggggcgctccctcttcagtggcctagtaatataattgcctggttcgaactttgttccctcgctatggggaattattgtattaggtcgcgtccacctcggtatacgcccctattattccagaatgagaataatattctctcgttccaaacaaaagcttctctgtcaaacccctgacctcacccactcccctttttcaaccaaaaattggcctccacgatcgcaccaaaatgtttgttgccccaccgaagcagtacacccaccggtgggccaacagcatcacgtatttattccatactcacgcccataaaataagggcggctattatagtacatgtccaacacaatataactcttactctcccagttaatgtttcccccccaataatatttatcccccgcacgcattccccaaacaataaca

SEQ ID NO: 676555 - DNA, 596 bp, Homo sapiens
  misc_feature (77)..(77): n is a, c, g, or t
  misc_feature (186)..(186): n is a, c, g, or t
ccccagcagccccttcagccccgcatgtttcggctggccaatgcctattccacgctccagttggtccccacccctancaggcccaccattgatggagtcagattttggggacatcaggacagaacgtgagtgacattttccgatacagcagcatggaggatcacttggagatcctggagtggaccntgcgggtccgtcacatcagccccacagcccctgacactttaggttgttaccccttttacaaaactgacccgttcatcttcccagagtgcccgcatgtttacttttgtggcaacacccccagctttggctccaaaatcatccgaggtcctgaggaccagacagtgctgttggtgactgtccctgacttcagtgccccgcagaccgcctgccttgttaacctgggcaagctggccttgcaagcccttaagtttttggggtttggggcaaaggacgatgacctgggaggcctggggctgggcccctgactcaaaaaagtggtgtttgaccaaagaaggcccaagatggaggcttgttcatatccctgcaagtgtcggcacttgtaaataaagcctgagcacttgctgatgcga

SEQ ID NO: 676556 - DNA, 132 bp, Homo sapiens
tgtaccagtatcacgcgcccgctacacgagccccaccaccacgaagctcacacacagaacagcacccgctacacggccccaccaccacgaagctcagacacacaatagcacccgctacacggccccacaaag

SEQ ID NO: 676557 - DNA, 165 bp, Homo sapiens
gtatcggtctaactcttctgtgattggctgactggacagagtcttcctctagtgctaaagattctagaggctacatttcttccagaatctgcagctgtggacctacaccaagccgagtacagagaccggctccacagtcttgccagaccacaatggcccgtgcat

SEQ ID NO: 676558 - DNA, 110 bp, Homo sapiens
aaggggccaccgacgctgtttttaaactattttggaagttataaaagggtagaccatctgactgatgatgttcacataaggggacagacagactatcatttgcagacatg

SEQ ID NO: 676559 - DNA, 276 bp, Homo sapiens
ggtagatagtgaatcatatagtgacaaagagtgtttcactgattataaggaatataccgggtaatcctgtcagttagatgactaagttttcccccaaattctaatcagagtatgtaaattgtaagttaacttatgcacgcttaactatcttaccaagctttgagtgcaagagattgaagagttcaaatctgaccaagatgttgatgttggataagagaattgtctgctccccacctctaagttgccagccctcctagagctacctgtggagcaacc

SEQ ID NO: 676560 - DNA, 218 bp, Homo sapiens
ttctttaggttcctgccatcgtgggaactccttcgctcgtagggaggcgagcataggatatattttaccacataggctggcctataaatctgggctgttgtataatgttatcgtattgttgtgctcgaactgttcatgtgcttcgtaatggccagttcgactgccgcaatccgcggcggcgctatcgaagggctaccgcgatgaaagacacaacgaga

SEQ ID NO: 676561 - DNA, 376 bp, Homo sapiens
ccaggatacctagagctgctctagacccactgatatgctgtctacctaccactgttacgcttacgctcgattccagacaaaacttttcataagcttcttctatctctgggtccatctcatcatcaatatcatccaagtatggatcaccagccccggtatcctctgttccattttcttcatacatctggcaacaacagtcctctctttcaagtaattcttggtcatttctcttggacctcttgcatcagctgccgtgaaaggaacacatcagcatgtctcacatgttggtccattccatacagtagttaggatcattttctggtgtagcttctctatatgttgaagttgcatggactctgccccagttactttgacg

SEQ ID NO: 676562 - DNA, 283 bp, Homo sapiens
cgtcgaccaaaacactcaatttgtaaatgactacccccaggaaggtgaaattttttggtgttgtgaaatctgtgaagtagctagagtattattcattttttaatacaaagacaaggaaaatgcttgcgcattttgacttgatttgggaagcagtactttaggaaccttcattctaactggcttagtgactcaacataaacaaacaagcaaacaaataaagccaccctcctcaaaagaactatcataaaagtgtatactcagaactaataaattttgtcgacgc

SEQ ID NO: 676563 - DNA, 339 bp, Homo sapiens
ggagattaattctattggcttttagtcacttggaactgattaattttgactttctgtccctaagcacttgggatttggccatctccattttgagccccaaacggttaacccgaatgtcccctagaactttggggtgtgtcccccttaaatcagtttaaattttccagacaaaagcaaatggcatttatggatttaagtcattagattttccactgccattaattaatccctcttgattgattaaatcatcaaggatttaaattttaaaaaggagggaggatttctgggttaaaacttttatttggcccccataattaaagtaaaatgttttttatgaga

SEQ ID NO: 676564 - DNA, 849 bp, Homo sapiens
gcacaggtccctgggggttagtatgtaggacttgtctgtgggggcacacacattcaagccattcagtccactattcctcctcaccccaagagtacgctggcgtcaggtgcagtggctcacacctgtaatcccagacacttgggagaccagggcaggagggatctctttgagcccaggagctgaagaccagcctgggcaatatagtgagaccccatctctacaaaagtaaaataaaaaattagccaggtgcggtgatgcatgcctgtagctcccagcatacttgggaggctgaggcaggagggatcacctgaggcctggaggtcgaggctgcagcgagccgagcaatcgcgccactacactccagcctggcatgacacgagtgagaccctttctcagaaacaaaagtaccctgggactcctgccaaaacccgcgggccatatcggcctatcctgctagctgagaggaacagtctacggaaccacccttttctacttgcgtctctcttccaggatctgcacaactgcaagcggagcagggggtggagtcccagctagcctgcagatctggccttccgactgtacactctctaaattcagaagcgagactgcccacgggtgactgcaaggcgcacactggagtgctgtctacctgagaccacgcatggtgggcattctcccacagaccgcgctatcagaggcttcctcacacatcagcgaagggaaacctgtgcacggccatctagatgccgacgcacggcaaccagtcaccctataagctggcggaaataacggccacgatcaacaacggacttgccacagatcccacgccggcaggctagcagcccagcg

SEQ ID NO: 676565 - DNA, 1426 bp, Homo sapiens
cccggcttcgctgtgctttccccgaggcgtctcgaagccgggggccaggaccggtcacagcgccccggtcttcgcgtgtgctttccccgaggcgtctcgagtcgccgtagctgctgcgctctttacccttgtttcttggtgtcgatttctgaggtggtgttgtgtctggtggtctgtatttacgccgcatgtggccttagggtgcccttcctgtcgccttctttcagcaaacgagtcattcatgtaaataatcagttcaagatcaaagttgaagtgctgtcactaatgagaacatacaaaagagacataatacacaagagaataaaataaaaaatcaaacaaaaaaacaccagaggggcggcgccgaggatttagacgcaagtaggcaccacctcggagggtgcgccccaccaagttgtctgcctacgagaaggctacaatcaatgggcccctaagtgataggagccctaaaaagggggtggtcgctacaacccctgggggagcgacagggcgatcaatgataacgtcaccagaggcagacgcagggacgcgccacaggaatgcttgatagagagaaacccaccgtaggccacacagggagggataccccttcgagcgcggtacatcaatgagggagagcagctcgatcgtgagagagccggggggagggaacccccccatgaacaacggctgggatgagcggggggcggacaggacaacacacatttacggccgggtagaccgggacgagttaggacacccacggtcaagagcggcagagaagcgcttatatttcagcctaacgacccctctggagagacaccggagagtacactcgatatcaactcaaccttttccacagaccaacaggattgcccaataaatagacacgacgcgcgtccgcataaagagccacccatcatgccttggggaacacacttaggggcgcgtctgagcaccccgtcagttcagacgcaatagcccatactcgtcgaagggccaccagagcgtgagacgccttcgataggcgcacttctctgcgaaacagaggacttattatccccaagaaaggacctcgtgagcagcggcacactgtatgaatttattccacatcagaaaccagtgtctcaacgtaaaaccactcggtcccctgcggtgaaacgcatcaccccatcgagccattggcggagaaatatttccacaacagggctatagaagagcacagcaaatcaccattggaacggagccttcatcgggaagttctcagcacgtttaccacaaacttgagcatccacaattatgcggctcggtagtccaagctatccacaacggacatatctagcgtggacacccaacgggtacagccgtggaaccaaatatgtcgatttatctccatacgcacgcttgagcgtgctagaggtaacga

SEQ ID NO: 676566 - DNA, 533 bp, Homo sapiens
gaggagtcccggggcagagagtgagacctgtgtcagaaaaaaggaagaatgctcaatcttctcccggagcacagcctttctcaagtaagctaaaaacaaacatcctctacatggtttggagtcaaatatgggcttatccttgacacctcactttctttcccatcccatagtcaatgggtctagaaataaaaataaaagtttccccagaattaaaaaaaaaaaaaatcccaaagtggggggggctggagggtatatgtaataagggagtcaaggtttcctcagtctacagcatcagcaccggggacgggcggatccccctcagggtcacaagggggcggccaccactcactcaggcaccttggtctcctcgggggagaaggaggagcggctcaccctcataagcccagagaaagcccggcctggcatctcgagcgcccacgggctaaggcccagtcaatcacggggcaaagggggagggaataacgcagcacggaataagctcatgggatctcaaggtggggcccagggcacga

SEQ ID NO: 676567 - DNA, 320 bp, Homo sapiens
  misc_feature (315)..(315): n is a, c, g, or t
taatctgttcagccattccatgtctttggatgggaaagtctagttaattaacattcaatgttattatggataagtaaggacttactcctaccatttggtaattggctttcgggtggtttgggggtcttcgcttcttttcttcattcctgtcttccttttagggaagataattttctcggggggtacgatttacttatttaagttttaaggggatgaataatagagagtgataaggtaatttaatttaatttagttattttaaattatttttaatccttttataaagacggggtctcactatgtggcccaagcggntcggg

SEQ ID NO: 676568 - DNA, 235 bp, Homo sapiens
ggaaacccatctgtaaattaaatggatgttggatggaaaatgacattgctaaatttgagaatttctttttacccactaaagtagattgctttgtataataaaacacagggtttggaaggttttgttacagggagcatggtctgttgaaaatttttaaaaaggatttttttaaattaacttctggacatgaaatgtctaataaaactataaaaggtttaaagatttttcccttgga

SEQ ID NO: 676569 - DNA, 254 bp, Homo sapiens
  misc_feature (44)..(44): n is a, c, g, or t
  misc_feature (243)..(244): n is a, c, g, or t
gcggccgcctactactactactactactgctcgaattcaagctnctaacgatgtacggggacatggttcactgcagtcttgaccttttgggctcaagtgatcctcccacctcagcctcctgagtagctgggaccataggctcacaacaccacacctggcaaatttgattttttttttttttccagagacggggtctcgcaacattgcccagacttcctttgtgttagttaataaagctttctnnactacaaaaa

SEQ ID NO: 676570 - DNA, 137 bp, Homo sapiens
  misc_feature (88)..(88): n is a, c, g, or t
  misc_feature (131)..(131): n is a, c, g, or t
ttccacctctacttgtgaaagttctgcttcttactttagcgcctggggaagcgtcatgggggagacagctgtgtgtggagcacctggnggtgctggtgtggtgttcggtgctttgcagaggttgttgcatntagcca

SEQ ID NO: 676571 - DNA, 84 bp, Homo sapiens
cttttatatcactgtgtttgaatcgagggggaggggtggtaaccggaaataaagacctccgatcttcccccccaaaaaaaaaaa

SEQ ID NO: 676572 - DNA, 233 bp, Homo sapiens
gctttgagagacgagatgggaaacttgctgtacagaaagcctagtggaaactttagtgctagatacaaaattcacacagtgtaaattgcactggactctgggtgagactgggaagtgtcctcagaccattcagcaccatgcgtgacgagctcttcatatgtttgatacaaccatatgcttgtcctacatgcccatgccaccatgcatctctgtctcgttctctctgtaggtgt

SEQ ID NO: 676573 - DNA, 548 bp, Homo sapiens
  misc_feature (222)..(222): n is a, c, g, or t
  misc_feature (251)..(251): n is a, c, g, or t
  misc_feature (271)..(271): n is a, c, g, or t
  misc_feature (279)..(279): n is a, c, g, or t
  misc_feature (281)..(281): n is a, c, g, or t
  misc_feature (288)..(288): n is a, c, g, or t
  misc_feature (291)..(291): n is a, c, g, or t
  misc_feature (297)..(297): n is a, c, g, or t
  misc_feature (321)..(321): n is a, c, g, or t
  misc_feature (329)..(329): n is a, c, g, or t
  misc_feature (336)..(337): n is a, c, g, or t
  misc_feature (346)..(346): n is a, c, g, or t
  misc_feature (349)..(349): n is a, c, g, or t
  misc_feature (354)..(356): n is a, c, g, or t
  misc_feature (361)..(361): n is a, c, g, or t
  misc_feature (363)..(363): n is a, c, g, or t
  misc_feature (365)..(366): n is a, c, g, or t
  misc_feature (370)..(370): n is a, c, g, or t
  misc_feature (372)..(373): n is a, c, g, or t
  misc_feature (379)..(380): n is a, c, g, or t
  misc_feature (382)..(382): n is a, c, g, or t
  misc_feature (386)..(386): n is a, c, g, or t
  misc_feature (395)..(396): n is a, c, g, or t
  misc_feature (399)..(399): n is a, c, g, or t
  misc_feature (402)..(402): n is a, c, g, or t
  misc_feature (406)..(406): n is a, c, g, or t
  misc_feature (410)..(410): n is a, c, g, or t
  misc_feature (415)..(415): n is a, c, g, or t
  misc_feature (418)..(418): n is a, c, g, or t
  misc_feature (423)..(423): n is a, c, g, or t
  misc_feature (436)..(436): n is a, c, g, or t
  misc_feature (443)..(443): n is a, c, g, or t
  misc_feature (446)..(446): n is a, c, g, or t
  misc_feature (452)..(452): n is a, c, g, or t
  misc_feature (454)..(454): n is a, c, g, or t
  misc_feature (457)..(458): n is a, c, g, or t
  misc_feature (460)..(463): n is a, c, g, or t
  misc_feature (471)..(471): n is a, c, g, or t
  misc_feature (485)..(485): n is a, c, g, or t
  misc_feature (524)..(524): n is a, c, g, or t
ttcgcctggacaagctcatgtttgcaggagcaccatgtcttgctcgtctcgcgcctcctcctccagggctggaggcagcagctcagccagggtgtctgctggtggaagcagcttcagcagtggaagcagatgtggtctggggggcagctcggcccagggcttccgaggaggagccagcagctgcagcctgagtggggggtctagcggtgcttttgggggcanctttggagggggctttggtagctgctcantagggggtagtatattttgngagcttcngngctgctnttnacattnatttttttttttttgctagctttngcgttttncatgctnnatttggcanggnttgcnnnattcngngnnaatncnngattcnncnatgnagctactgnntgnttntacngctnttgtngtngtatnggaggtggtgttngcgatgnggngctttncnctnnannnnaaaagcanagcatgcagaagcncaatgagcgctttggcaattagctagacaatgtcagagngctttatgatgctaacactgatct

SEQ ID NO: 676574 - DNA, 119 bp, Homo sapiens
attcccatttaactcctacacataactacatagaatctcttgtaatcccctgtgggaaataaaaaaactgctatattagaactagcagagccccagacgaacagtacacttaagagaga

SEQ ID NO: 676575 - DNA, 280 bp, Homo sapiens
gtgcgtggcgacggcgcagagagactcttctctacaaaaaatttaaaaattagtcaggtgaggtggtgggcctgggtgacaaaaattacaaaaaaaaaaaaaaaattttaattcaccaaaaaaaccaaaattattccataaaaaagtgtccaagggccttggtctttcctcaaaaaccttaaaaccacccaaaaaccttgaacaaatgatataaaaagggagaaaaaaaaggacaaccagcaccaaactccacaccaataaatgggcaatgcgccgtcgc

SEQ ID NO: 676576 - DNA, 377 bp, Homo sapiens
ttctttcatgcacatctagtaaggaacgctggtgtaacccaagtctaagcctagagagccgtccggagctggcctctgcatgcatgcactgaatactaaaagtgacatgctttacttcataaaggaatgttgtagctttaggttctgtgggggagggaaaaggattaaactagggacaagcttgattctgtaggaaacacaaaacatacgtatttacctccgaacgcagcacagcccctacatctctggatgcagaaactatgtctgccggaagctggtgataacccctatctggaacggcccttttaaagtctgtaactctctaggagcttgtacactcctggtagttggactgtccaccatttggagttagttag

SEQ ID NO: 676577 - DNA, 347 bp, Homo sapiens
  misc_feature (61)..(61): n is a, c, g, or t
  misc_feature (154)..(154): n is a, c, g, or t
cagaggtggtgtctcccatcagtcagggatcgtgagcggatgagctgtgtcggatgtcgtngcgcggtgccatccttaatgtgactcagctggtacagaagcgcacagccgatcattgtgactcatacttaatctgttggctggggctcattgngcctgagtcaaccagcgtctccgcacagaactcagacacaccgctgctcccccctgcagtgccctgacccttgctgccctgcctgtcacgtggccctgcctatccgccccttagtgctttttgttttctaacctcatggggtggtggaggcagccttcagtgagcatggaggggcagggccatccccctggct

SEQ ID NO: 676578 - DNA, 156 bp, Homo sapiens
tcatgtgatgctctttgatacctggaagcaacgttagactgtcggaggaaatggattgttcatggtcttactcataactgggtggtttgagtggtgactgaatgtctgtgcttttccgtgtgtgtgctgccacgcacagggcttgtaaattgcaga

SEQ ID NO: 676579 - DNA, 414 bp, Homo sapiens
  misc_feature (17)..(17): n is a, c, g, or t
  misc_feature (27)..(27): n is a, c, g, or t
  misc_feature (45)..(45): n is a, c, g, or t
  misc_feature (87)..(87): n is a, c, g, or t
  misc_feature (214)..(216): n is a, c, g, or t
tgagtatgattttattncccccatgcngccagacactctggcagnttcaggatagcacgccgaagcatctttagaaatgttaattcnggaggccgggtgcggtgctcacgcctgtaatcccgcactttgggaggccgaggtgggcggatcacaggtcagagttcgagaccagcctgaccgacatggtgaaatacaaaaattactaatatacaannntaatatataaattataaatatataagaatactaaaaatataaaaaattagccaggcatggtggtgggggcctgtagtcccagctactcaagaggctgaggcaggagaatggtgtgaacccgggaggcggagcttgcagtgagccgagactgcaccactgcactccagcctggatgacagagtgacactcattccgtct

SEQ ID NO: 676580 - DNA, 465 bp, Homo sapiens
aggtgtgtcagcccactgagtctctgggaacaagcccaagcaaggtgcccgtgcttggtttaccttcctctcaggctttagtcctgtccccagaaatcaggaaggccccacttcagcaagctctcctttccaaccttgcagcagcagcagtagcagccagaagcagaagcatcagagctttatcctttggaagcgtggcacgattccgctgtcctctggcctcgcggctatctgcccccgtcggctctccttgaggccctcctcggccagcatggtgacagacatatttcatgtatagattcctgtagttggacagcgctgctggcagtggctcatctttgctgtctcctcgcgtcgtgtacgaacaagacccatcatcagctttgcagtaaaagccagtcctgggataccagctgaactcccagtccgcatagaggagagtgctaagttcactgaacacatcct

SEQ ID NO: 676581 - DNA, 453 bp, Homo sapiens
actcaaggccttgggaaagagggtggaggtggctggggtagggggcgttctgacgtgctcgtggtcttccatagatcatgagcgctctcccaccagaaaaccccacaaggctcacatcatgggtgacccctgggatctggccagagggtccctgagtctccagagaagaccaagaatgggaaaggttaccatggcaacagaaactgagcccaaagccctagaagatgaatacagcgtaaaggccaggcgtggtggctcacacctgtaatcccagcactttagggggctgaagcgggcagatcacctgaggtcaggagttcgaggccagccttgccaacacggtgaaaccctgtctgtactaaaaatacaaaaattagccaggcgtggtggtacgtgcctgtaatcccagctactcaggaggctgaggcaggagaatcacttgaacccaggagg

SEQ ID NO: 676582 - DNA, 395 bp, Homo sapiens
  misc_feature (34)..(34): n is a, c, g, or t
  misc_feature (43)..(43): n is a, c, g, or t
aaggaagctcgaagccctttaaccagaataaaanccgttagtngacattcttccttatgattataaccgtgttgaactctctgagataaacggagatgcagggtcaaactacataaatgccagctatattgatggtttcaaagaacccaggaaatacattgctgcacaaggtcccagggatgaaactgttgatgatttctggaggatgatttgggaacagaaagccacagttattgtcatggtcactcgatgtgaagaaggaaacaggaacaagtgtgcagaatactggccgtcaatggaagagggcactcgggcttttggagatgttgttgtaaagatcaaccagcacaaaagatgtccagattacatcattcagaaattgaacattgtaaata

SEQ ID NO: 676583 - DNA, 408 bp, Homo sapiens
  misc_feature (5)..(5): n is a, c, g, or t
gaagnaagacgacagaagggggtgctcaggtgtacaaaacattcacacagttttaaacaatgaacactgatggctcctgtattgcagtaggagttcagtggcatataaccatttctagaatgtgtccattgtgctaatcaatgtccacctgtagcatgaaaccctggctctgaattatgcagataacctcatagaaattgtaataaggcgcctacagctatgtttttttttccattttggatatgaagaaactgaggccttgtgggcacatactaggcttatctaagggcactcagaaaactagccacagaagcagtataaggactccaggccctctgattcccaggccctgccctctagaggaagggaagaagttgtgtgtgcctggttaatggtcattgacccctt

SEQ ID NO: 676584 - DNA, 105 bp, Homo sapiens
actcaatgctcgaagtcacgccgcatatacgccggacggaacatcatcctcgaggtgacatcaacaaggacagccggtgcgagaccacgcctgcggctatcggat

SEQ ID NO: 676585 - DNA, 713 bp, Homo sapiens
  misc_feature (22)..(22): n is a, c, g, or t
  misc_feature (65)..(65): n is a, c, g, or t
  misc_feature (76)..(76): n is a, c, g, or t
  misc_feature (95)..(95): n is a, c, g, or t
  misc_feature (99)..(99): n is a, c, g, or t
  misc_feature (103)..(103): n is a, c, g, or t
  misc_feature (112)..(112): n is a, c, g, or t
  misc_feature (117)..(118): n is a, c, g, or t
  misc_feature (121)..(122): n is a, c, g, or t
  misc_feature (125)..(125): n is a, c, g, or t
  misc_feature (128)..(128): n is a, c, g, or t
  misc_feature (130)..(130): n is a, c, g, or t
  misc_feature (134)..(134): n is a, c, g, or t
  misc_feature (136)..(136): n is a, c, g, or t
  misc_feature (153)..(153): n is a, c, g, or t
  misc_feature (167)..(168): n is a, c, g, or t
  misc_feature (173)..(173): n is a, c, g, or t
  misc_feature (177)..(177): n is a, c, g, or t
  misc_feature (182)..(182): n is a, c, g, or t
  misc_feature (204)..(204): n is a, c, g, or t
  misc_feature (212)..(212): n is a, c, g, or t
  misc_feature (292)..(292): n is a, c, g, or t
  misc_feature (480)..(480): n is a, c, g, or t
  misc_feature (517)..(517): n is a, c, g, or t
  misc_feature (530)..(530): n is a, c, g, or t
  misc_feature (565)..(565): n is a, c, g, or t
  misc_feature (572)..(572): n is a, c, g, or t
gaggacctcaccgacctccacntcaccatcgagggccctgagggaccccatatgctggaggtctnttccgcatganactcctctggggaggactncccngccnccccacccnagggnnacnnccngancnagancntccacccgaacgtgggngccaatggcgaganntgcgncaangtgcncaagagggactggacggctganctgggcanccgacacgtactgctgaccatcaagtgcccgcctgatcccaccctaaccccgagtctgcactcaacgaggaggcgggccncctgctcttggagaactacgaggagtatgcagctcgggcccgtctgctcacagagatccacgggggcgccggcgggcccaacggcagggccgaaaaccggtcgggccctggccagtggcactgaagcttcctccaccgaccctggggccccagggggcccgggaggggctgagggtcccatggccaanaagcatgctggcgagcccgataaaaagctggcggccnaaaaaaaaacggncaaaaagcgggcgctgcggcggctgtagtgggctntcttccnccttccacccgtgaccccaacctttcctgtcccccccccccaactctgtttttaagttatttaaattatggctggggtcggggagggtacagggggccctgggacctggatttgtttttttaaataaagttggaaaaccca

SEQ ID NO: 676586 - DNA, 155 bp, Homo sapiens
gtgccactcagtgactgtcacagggctcagtgctgtcagagagggactatgagagcctcgtcatgatgcgcatgcgcatgtgggctgagcggcaacagctgatcgcacggctgcagcaggcagaccatgaggggccgactacgtagccccagctc

SEQ ID NO: 676587 - DNA, 363 bp, Homo sapiens
tttcaaccagcaaagccttgggcccccccggggccttcaatgggaactgtgaaacaaaactctccgtggtccctaaagggttgggcctggaggggagccaagaacagcccccggggcccgacccgttggtagggcctttccccccaaaggaacccccgcctccaccggtccctgggcctcctgtttcccccccggcaccccggccggccactcccagtttgcccccccccccccagccccaacctttcctgtcccccccccccaactctgtttttaagttatttaaattatggctggggtcggggagggtacagggggccctgggacctggatttgtttttttaaataaagttggaaaaccca

SEQ ID NO: 676588 - DNA, 449 bp, Homo sapiens
agtagaactcgagcgttgtacccattcgcgaaatcacgtcctggggaagcccgagagtgatgagatgaatgtgaaggtgctggactttgagcacttactgccctatgctgcagagcgtggccaatgaacagggaccaggctacctattaggatcatgtcgaaggacttcgggtgttttgacaaggaaggaaatggcaccgatcatgggtgcagaaatccggcatgttcttttcacactgggtgaaaagattacagatgatgaagtagagatgctggtggcagggcatgaggacagcgatggttgtatcaactataagagcgttagtgaggcatatcctgtcgtggtgacggtgccctctggggcggacctcgtccgcatggtgctgaatggctgaggaccttcccagtctccctcgtagtccgtgcctttcccttgttgaaatcgtgat

SEQ ID NO: 676589 - DNA, 236 bp, Homo sapiens
aagggtcatggaaaagggtgcaatagaagagtaatcatcaggataaaagttgttggtggctgttgagctctcatgaagttgggctcagagaggttgagcgacttgctcgaggtcacacagcaagtatatgctggaggaaccgggatttgaagccgattctgcgtgaggccactttgatgtgttctgactgatgaacaaagctgccagtgtgggcagctggaggggtaccgagctcg

SEQ ID NO: 676590 - DNA, 900 bp, Homo sapiens
gggcgctcgcaccgccccgctctccagccaaggctccgtggctgaggcatttgcttggctgcagcctccttccgacctgcctggcgggacccagggaccaagccgagccgagccgcggggcccgctccggcccggccatgagcgcggccgcatgatgcgtccctgcctcggccgctgcagatcgccgccgccgccgccgcaggccgcggaggagccgcaagcgccgggcgaaccccgcccgggcctcggatccgatcaacataggacagtatgcaccttaagatcctgaagaaacgggcacaaaatgttcaagtgatgtcttagaacataccttgttgagggtgcgtcacgggcaaatcattgcagccatcaggacacaggctccgggacgtcgagcatcatcctctcctggctggaaacacttgaccaactattgaactcttcatcgtcctccttcctccgcaggctgacgttggttgacccgggttctgggtccatccgtgcacggcttgccggcattgatctgttgctgtcattgacgtggcttctggtcgcccttatgccgaacttccgtgggtgacctctccgtacattgctgcttggacatttcccaaaagaactttcctggatacctccttgatgagtccaaacaggaggttcaattctttataacctggcttagcgccgttgctttgccccctaggtacataccccacttgagaacaccatgctacacccgacccctgggggcaaagaccccaaaaagggcaacgctacgaaacgcattccattggcacaggcttgccagctgaacgcccggggacaagtcatataaaaaagtgccccaaggtgctggcggctattacaacccaaccgcggcccaccaatgcagtattggca

SEQ ID NO: 676591 - DNA, 932 bp, Homo sapiens
taatggacgcttcctaactttctataaaatcgcccaccaagcctctcttgttgttattacacaacactcctcatgtggtacctctctccttcgaaaaaatagttataccctggcgcggctctctaaacacccctgcttataaaggttcctcgtgtctaataaaacgcactcctctcctctctttctgttgttgtaaccaaccaccctctcacttgcttctgctcacctcccgcggggtgtttttccctccccacgcacagatatctgtcgtttttatataagggcggagacaaaataataatggtggttgccccccctcattaaagaggtttcctttcacaccccccccgtcttgttttttctacacaaaaagagggtgggcctttctttatcgcaacgaaatatttttctctccctccgcgctcatatgcttgccccacaaacaaatttgtgtattaagaacataatgttgcgccccacacgggaattgtgttctccccctaaaattgatttcttgcgccccccaccaagtctggtgtgggaaaatttgttgcttcttctgctcctctcctccctttaatggttgttcccctccgtacaacaccctcttcgcgggctatatctaatatttgggcccgcatacaatctctctctctgtgaacaagcatcagcgcctccacagaagttttggcgctaacacaccttcgtgttttctcgaagacgctgttttttgccccacacccgctgttctatcaaacccctctctgctggcgcccgctttttccccacaaggatgtgctcactatggttatcacaactctgtgcctgtatacaaccaccgagcccaaaaaatgttctcctgtaaaaaaaactcgggcccccaatccccatatatttgcgcacccctccttcctgcggccccataacccggc

SEQ ID NO: 676592 - DNA, 106 bp, Homo sapiens
tgaggtacctagaggttcccacacaatcacctgacaaattacctgcgtctatatcaccacgtattagaagtatatgttttagcatgtccagttacggtacaactaa

SEQ ID NO: 676593 - DNA, 246 bp, Homo sapiens
  misc_feature (7)..(7): n is a, c, g, or t
  misc_feature (35)..(35): n is a, c, g, or t
  misc_feature (45)..(45): n is a, c, g, or t
  misc_feature (83)..(83): n is a, c, g, or t
  misc_feature (93)..(93): n is a, c, g, or t
  misc_feature (96)..(96): n is a, c, g, or t
  misc_feature (113)..(113): n is a, c, g, or t
  misc_feature (134)..(134): n is a, c, g, or t
  misc_feature (142)..(142): n is a, c, g, or t
  misc_feature (154)..(154): n is a, c, g, or t
  misc_feature (189)..(189): n is a, c, g, or t
  misc_feature (202)..(202): n is a, c, g, or t
  misc_feature (207)..(207): n is a, c, g, or t
  misc_feature (209)..(209): n is a, c, g, or t
  misc_feature (211)..(211): n is a, c, g, or t
  misc_feature (225)..(225): n is a, c, g, or t
tttaagnctgatatatggaatgtttggtgaacctncctatcaacnctgagactggaaacccaaagtacagcccaaatacattntgttcaatcnccntcaagagccatttttcnttttgggtgggaggtgggcanatgggttnagggtgggaagnaaatactattatgcagggtgttttgggaggggggngggtaacataaanagcantntncaggcaagttttgntattaaaattgtgtatactgt

SEQ ID NO: 676594 - DNA, 354 bp, Homo sapiens
atctcgctccatggtcggctacaatcagccacatcgcctcgtagtaacagccattctcatccaaccacccctgacgcttcaccggcgctgtccttctcataatcgcccacgggctacacatcctcattactattcatgctagcaaactccccctcacgacctgcactcaccagtcgcatcatactcctctctcacggccttcaaactctactcccactactagctttttgatgccttctagcacgcctcgctcaccctcgccttacccccccatattaacctacggggacaactctctgtgctagtaaccacgtggctcctgatcacctatcactctcctacttagcggactca

SEQ ID NO: 676595 - DNA, 858 bp, Homo sapiens
gggacagaggcccaactccagtgacgccccagctggcccagacccctcctctttccctcagaggctgcagtgaggtcagggaaaggcagtcctggtagaggcctgtcctggtgactccagtgttggcccctgagtggtgtgccctcctcatgccggcttcaagactgagggacagggcagccagttcatgcctcgggatccacctgtggctccatgtcccagacgcaccctgtgctggagagctgtgcctcctgtgcatctgcctggctgctcctgcacccctggggtcccaggaatgggcggcccagccccagtggacaggaaagctaaggcctcagcgatgccggactccccagcggaggtgaagacggcagaagcgggaaacagcagaaagaagaggagaaagagagaaggaagagaagaggaagaaggaaagaagagaagaaaggaggagaagaaggagagaagaatgagcagaaaggaaaggagggaaggagagaagaaggaaaagagaaagaggagaaggggggaggagggagggaggaggagaagaaggaggagagaagaagggaaggggaagaggagaggggaggggacagaaagagggagagacaggagcgaggagaggaacgacgaagagaaaggagagcaaggaaaagagaggagaaaagagaaacggaagaagagaaagagaagaagagaggagaggagggaagaagggagagggcaaaagagagaagagaaggagacagggaggaagagggaggaggagaggaggaggaaggaagaggagaggagagaagagagagagggggagagagagaagagagggagagagagaagaggggaggagatagc

SEQ ID NO: 676596 - DNA, 586 bp, Homo sapiens
  misc_feature (495)..(495): n is a, c, g, or t
attaggagtatttttttattttgttttctccctaccattctgtttaattactgctttcttagaattttcttttacccttcaaaagagactactttaatgtaattattctatttgttgaatgttctacattagttgaacaaatattctattgttgataaacaattgtttatcaattcaaggaagaaaagagacctttttcatactgagattaaatatacttgttttttacatcgaactttcctttttttttttttttgtgacagagtttctcttttgtcgcccaggctggagtgcagtggcacaatctcatctcactgcaacctctgcctcccgggttcaattgattctcctgcttcagcctccggagtagctgggattacaggcatgcgccaccacgcccacctaattttgtattttcagtagagacagggtttctccatgttggtcaggctggtctcgaactcccgacctcagtgatctgcacgcctcagcctnccaaagtgctgggatttacagcgtgagccaccggacccagcccacgcatttttacataaaaagagatccttagtccacccaaagctgatgt

SEQ ID NO: 676597 - DNA, 1089 bp, Homo sapiens
aacgccatctctgctgttttacaaaaatagccacacgtggtggtgcacacctgtagtcccagctactcgggaggctgaggcaggagaattgcttgaatccgagaggcggaggttgcagtgagccaagatcgcaccacgcactccagcactgggcaatagagggagactgtctcaaaaaaaaaagaaaacaagaatagagtgagtcatgatggatttagcatggcccatggcctgtggaaaatataatggttcaacctgggcattaagggtttaaaacttccacccaggcgcagtggttcaggccagtaatacccagcacttagggaggccaaggcgggcggatcacgaagtcagcagatcgagaccatccagtggccaacatggtgaaaccacgactactactaaaacaaaaacaaaaaaatatacccggagactctgccaggacgagacagaccggaaatccaaccaaagcacacatgagacagcgatagaccagggcaccagacacaaagggcagaaacacccaccgtagggacacacgccacgcgactacgacgcaagaagaattgggccccaaagcgcacacacacacgacatggaggcaacacagacgatgtagacaccacacatacacataccaacaaacacaccaacataaccataaaacgaaacatacaacacccctaagcggacaagcagccaccgggagtcggagaacacgaagacacagagctacaaacagaacgaaacagaaaagagcaacgagcagagaggaacaacccaacacacaaccacgatgcacacagtgagacccaacagcggcgagtgccccacagacagacgaagaacccgagagtcacataaacaaaggcaagaagagcggaaagacacacctccacctcatcaaaaacactcagctcgctcggtcgcggacaatagacggggccgtaccacaacaacaaacaaccaagcatggaaaccgaaatgagaagaacaaccataaagcggcagtcatgactaaccaagacgagcgcaacaacaagcggatccaggaacacacctaaagaaaaagccccgcccacaaagcgg

SEQ ID NO: 676598 - DNA, 405 bp, Homo sapiens
  misc_feature (39)..(39): n is a, c, g, or t
ccgtgcccccaagtgggatttcccccccccggtatgcanggtcaattccctacatttgaaaatcaattaaatcccattaatgcaattcaccccacatcagtaggctaaagaagagaaatcacatgatccccttcaatagaggccaaaaaagcatttaataccccattcatgatttaaaaaaaaaaaaaaaaaaaaagccttccagcaaactaggaatagaggggaacttcctcaacttcagaaagaacatctacaaaaaacctgccactaatatcatacctaatggtgaaaaacttgaagcattcctactaagatcagggataaggcaaggatgtctcctcactactccttttcagcattgtactggaagtcctagctaatgtgacaaaaaaagaaaacagaaaa

SEQ ID NO: 676599 - DNA, 222 bp, Homo sapiens
gggagaattggatggagagggctcttctggaacagtgggtatccttccttaggggcaaagatgaaatggagctagctgaactagacagagctcggggaatggacaaactggttcggggggggggataagatgtataatcagagagattccaccacaacaggcaaggccactttggatcatggaagaaagacccaaccttaattcccagccttactcttctcc

SEQ ID NO: 676600 - DNA, 1208 bp, Homo sapiens
tggaaccacacaatttattaacaacgcactgacatgggggccctcgttacactaaccagcccccaccccagcaactgggtgcacatttctcctttaagcgcaggaacttggcgccctcaagggataatatttcaggagaacataaactaaacaaagaggcccggagcaccgcggcggcctcaccacccgtgcaactcccacgacacctatggcgagagggccgacgcggtgcgcgcggcactcacagacggcctcacgagagcctccggagaccactacgcccgtggcccaacacataggcgcaatcaccggcctcataccacaccacctcacacagaaacaactcacccgggcgcgcgctcgcaccggccgggcgcccgtgctaactcccgagcccacatcccgcgcgaactttgcacgctaagaggaccagcccatcccaccacagtgctccgcggcccacggccgcgcgccccctcgccccctccccgcaccctccagcgtgtgacctccacccgtgacctcggccttcccccaaccgcggcccgggcgactccatagcgccgcagaccccacccaagcacgccacaaacccttcactaccccacttccccctgcggctgaccaccgccaagagatcacaccccacaggcccctggagaaacaccacgcgacaccactcgcacaccgaccacacacacggagcccaacacccatcatccaccctagccctctccctgcattcgcgctcccctccatgccagctttcaccccccctcttgtcttcgcgccccaattaactaaatcaacacgtgcgcccgctaaccgtcgtcctccctcccatttctgcatccactgtggctctcctcaccgcatgtactaagcatttggctctctccgcgcttctcccgaccgcgaccacagcaccagcggaaaacgacaccccgcggaccacacgcgcgccccaccgcctcgtgaaccacacggcactgccgcaccatcttcggatatcccacccttcctatccccctgcggtactcttcccctcccgcgctccctctctcctgtatcgggggctctctacacgcctctacgcgccatctcttctacgcgccctgcccccgcagcctctccccttccccagccatcgcccggcagcaccctctacccatacgttgttcctctctgctgggcctctaatatagcct

SEQ ID NO: 676601 - DNA, 120 bp, Homo sapiens
tacgaggatgagcatattttctgggctgcgctcttcgttgcccagtttccgctcattggtcgcgtctcctccccccacccaccattcccgctgcattctcggccgggctctaggcgccat

SEQ ID NO: 676602 - DNA, 898 bp, Homo sapiens
ggctgagctgggcggagcagtgaaaatccggcgcgcgcagtctccagcccaatttctacgcgcaccggaagacggaggtcctctttccttgctaacgcagccatggctcgtgggtcccaagaagcatctgaagcgggtggcagctccaaagcatggatgctgaataaatggaccggtgtgttgctcctcgtccatccaccgtccccacaaagttgagagagtgtctccccctcaatcattttcctgaggaaacagacttaagtatgccctgaacaggagatgaagtaaagaagatttgcatgcaggggtttcattaaactcgatggcaaggtccgaagtgatataacctaccctggtgatcaagtgcggtgtcactcagcattgacaagacgggagagaacttcccgtctgatctatgacaccaagggtcgctttgtgtacatcgtatttacaacctggaggaggccaatgtacccagtgtgtgcacggtgcgaacgatcttgtggtgggcacaaaaggaatccctcatctggtgactcatggatgccctgcaaccatgcggttaacccgatcccctcatcaggtggaatgataccattccagattgttaggagactggcagatactgatttcatcaagttcgaccactggtaacccggtgtatggtactggggtgtacccttaggacgaatggggtgatcaccaaacagagaaggtcccggttttttggcgtggtacgtgaacttcatggcacctttggccccgccttccacactttgtttggcggggcacaccggtttctcccgggaaggtcgtcctttggagggaaatatggccacagtggaatgctccaatcttgctcaatgtgggtgcagcaaaaaatcgcgcggatggcggt

SEQ ID NO: 676603 - DNA, 869 bp, Homo sapiens
gcggattcgatgcgtgcgtgggtcagtgtaccgaggtacattgccgggcggtatcggagagggggaaccaatgtcacatgtggctgttggtccgtggcaaagaattgccactgcagtgttccggagacctgcgatgtggggggcaagctcgtcaacctgggactctcagcagggcacactacggggacgtccttgacacaacggcagcatatcggcagagacggaacatgaagccgtcttaacctacaacaggtgtccagggcacgtgtcggcctccgttgacctactgggacgaacgcttctatccaagcaggcgacggacacaggacaacgactctacgacgcgtggtactggacacctaacctggcaacctggatgcggggctgactaccactacgactactactcaacgtccccacgggcacccacggatgcctggctgaaccaatgggagccggtcgggccacacactcacgcgaaacccctggacgctgccgccccacggcggacactggaactgctagggagcccttacctccggcgactacctacgggtggacacagagtcgaaaaaccttcacacaagcacgggcatcgacaccactaccaaagcccaaaaccatggacacgccacactgaacacaactggcgccacacacggaaaaggggcacacacacggaactgaaccgccataccacaagacaccccaataggaacccatggacgaagcacccaaagagcaccgacaaacccctcgaccaagaccactccgcagccccacggagaggggctggacaggaccaacagggagacaaaccccagcgcaactggccaacgaaaccaggacacgagcattgaccggcaaga

SEQ ID NO: 676604 - DNA, 157 bp, Homo sapiens
cacgatcttgccattctgcttgcccggcctctgcgttctgcattacgcctgatttttggaagtgatgtggttttgagtgttggcagcccagtgtcacaaaggaccatatcttagaaatgaccccagatgtcaagaatatgaacacgtggctgctgtt

SEQ ID NO: 676605 - DNA, 124 bp, Homo sapiens
ctgagatcgcacactgcaagccagcctgggcgacagagtgagactgcgacacacacacacacacacacacacacacacacacacacacccccaaagtatttcgaccacgtgcgcgcaaatatgg

SEQ ID NO: 676606 - DNA, 184 bp, Homo sapiens
aggtacagatgctcgaacttcgtaactcatggctcatatctgatttcctgaggagaatcgtgtttgtaacgagttacaggatagtttctttcctggattttaaactttagttaacattgtgaaattatggaggagttatatagaaaaaaaaagtgaacataaagtctgatgggagaagactgcg

SEQ ID NO: 676607 - DNA, 1723 bp, Homo sapiens
  misc_feature (385)..(385): n is a, c, g, or t
gcctcgaccagttcttctcttcccgtcctgagtgtggcggtcgggtctcgaccttgtcgacagctcctatatgcctctctgttcctcctatccgccttttcgcattcgacgcccatatgcagcgccatccctacgcgctcgataggtggtggtcaacgggagcgcccatgtctgccttttcctgtgtctcgggtcctgcagtccgtggccgtgccccggcgagtgtagatgatgggaggtaccgaccagttgaaatcggttgcatgaggcgaccgaggcgcgtggatcaggagacttggagtctcgtaggtcatgggtagtaacatggtcagagtgacattgggcagaggaaatgattccttcattattgagactcgaaagaccnctgtgtagcttatcgagaatggatgatgagtgtgccatctgactacaacagacaattaggagaggattaaaatgatcacaagagaggacttttataataattaccccaggagattcaaaacaggcgcgaaaggtccaactaggggggacgaagtgatatgagagctagggaatattggtaaagtaactattgtaatttactctcaaacgattttcacctataataggacataaaatggtggtacaaagacatagggtatcaaagaaatggctaggcgtagtgtaattaacagtggaggggtaagagcgttcggcctaaatacattgggagtatcttaacaaaggtggagactgaaaggggggaagacattagtgttactaactaccacgggggcttgggcaaccacacatccttcagcaacagaggggtttccccatagtcccgacgtaggaaaggccaaagaaaacggccccttgggaccattcataacgccgctttaaaatggggggactttcggtattggaacacacagacaggctacagccgttccacagagaaaaaatttcccccctataaaggatgggtaaattggttgggcccaagacgttatctgggaattgtaaaacaagaagggaagttccaaacgcaaagagcttttgttgggaacaggggccgactttgtgaatcaccgtaataggaaaaaagaaacccacacaaaattggtgcgaacagacatggtgtgtgtatttaagagaaccacaatttattggggaaattggaggggcgttcaaagagacacgacgttatgaacttgagaagaattgtataacagtgagtgatacaagtggccctacgtgtgttcgaccgtaagttattagaccggaaaactgtggacgtgtaacttaacattatgagaaattaacaaccagcgggtggattttattgaacaaccccatattagtaaatgaaagaactatcacagctattatacaaaggggtgaaacaaccattaggggaccagacgaaattgtggtgcgagaagaggccgcacatagcagtagaataccacagataaaagtagtatcgtggagcaaacatcggcacccaaggagagttatagcacacgaagtaaacagagagacacaaatgaggaggcgacccacaatgtcagctttaactactacgccgggagtagaaaccaaatgcgagcaagagggagacaaacagtagtgtgtaagcaacaacggtgacagcagacagcacgtcagcaaacaacagacgtgcatcgccatacaaaaacacaagcaaaaagcagaggagagagaaaggacacaaaaa

SEQ ID NO: 676608 - DNA, 123 bp, Homo sapiens
cacggtgtatcggcgacactttccagaggaaggtcacggtggtgataacggccacatctaagaaagctccaagaagacactctggcctataccacaactattcatgtgagaaatagcgacgtg

SEQ ID NO: 676609 - DNA, 315 bp, Homo sapiens
  misc_feature (1)..(1): n is a, c, g, or t
ntagcacaacctagggtcagttttgcaggtggtaagccatttaccaagatagttgtaggtaaagaagggcagatttattagagaaattgtgaaaatatgttgcagtgggcagctcagcagagaaggggctacctgcaaagaggcaagggctggaggaaagttttatagggtcctgctgaagggtgctacgtgtggaatgaggtcattgtgcccgcaggttgtttgtgattagctgtctctaacaattgttcatacaataattgttcattattgttctcaacttggggctctccccaacctggggacccttcctta

SEQ ID NO: 676610 - DNA, 626 bp, Homo sapiens
  misc_feature (539)..(539): n is a, c, g, or t
cactgctggtggaatgtaaggtggcacaaccactgtggagaacagtctggcgattcagaaattcaaacagtactactaccctaggatccagtgttccacctccgggtgtacacccgaagaagtgaaagctggaacgccaaaagattgcacgtccctgtccacgcagcactgtccacagcagcaaaaggtggaaacaacccacgtgtccttagatgagtagataaacaaaccaaggtgcgtctttcggtacaatggaatattactcagccttgtaaaggcaagtgacacatgctacaacatggaggaactttgaggacattattctaagtggtagaagccaatcacaaaaggacaaatgctgtatgactccatgaatcttgaggtgtgcctggcacagtcagattcataaagacaaagtagattagaggctgccaggaactggggggaaggaatgacttagtttctaatagggacagagtttctgcttagaatgcttaacaagttctggatatggtgcggatggttgcacattttatgtnatatatgttttatgacaattaagaaatgacctgtaagcctgccatctggataactccagtaaacacatcttaatttatgtgaaaaag

SEQ ID NO: 676611 - DNA, 960 bp, Homo sapiens
ccacctcggggcggcgttccggcgggcgggagccaggcgctgacgggcgcgggggggcggcgagcgctcctgcggtgcgatcaggctccggcgtctgcgcttccccatggggctggctgcgggcctgggcgctctgagatgtcactgctgttccaagggcacacgcagagggcttggacttcctggcgagttgcctttgtgagaagctggcactatttctttcaattccatctcttagttttccataggaacatcaagaaatcatgcacaactttggtcatgccgagttgactgccacttcctcgatgaaggttttactgccaaggacattctggaccagaaaatcacctgcagtctcttcttctgatgataacggatgccttctatgtggcagaccctgggagacccttctaccacgacccccctctgaggtggttaaaagctctccctcgtgtcacccccttttatgcagtcacatgtacctgatacgcacacgcctcgtgaagacccttgctgctaccgggaccaggctttgactgtgctagccagactgaacatacagttggtgccaggagtctggggggtgccttcccagcaggcaggcattcatcttactgcccacatcccttgctacgcaagtgtattcctcaaaattaagtatttgctggttacttcaatgcagttccacgcatgcgtgacccttttggacagtgaccgttgcgttgatgacagttggccagagccacatcccacggcacagctgggtgttgcggattgccacctgatgcttccaggccagccgcgtctcacgtgaatcgttggcccgtcagacccgcggctcttgggacgggcgacgcagcaatacgtgttgcgggcggacagtagcagcgcgtcgctccgcctgtgcgctctgcgggttagcagggcaaggcccatccgcagggctcgcatgtcgcccgc

SEQ ID NO: 676612 - DNA, 668 bp, Homo sapiens
ctggagactaactgtgagctactaacacgggtggaacgatagcttttgcaatactcggtttgcatgtgctgaaatgtcatctgtcttctgagtcaacactcccgaactggtaaacaacctgctcagggcatctggtgaacgaagctgtagacagctcgttctgcctgtgagcgatttgtcacctcattctgtaggactggtcaccagcagaaatgctgtctcaaaggatcccggggagaaagcgagggccgactctcacttcaatccacgcctatgaagatggcagttcataacctttattctgcttcagctggctctttaccatgcggttgaaagatcccaagacgacaaagaggggcggagacccgggtacaaagatcacagtctcgggtatctcatgactcccttagccctctcacctccgacggagtaccccaggagcccgatctcagactccagtcccttcagggaccagcagtcggacgggtccgccgagaccttggtcggtcccatcaggctctcaacagttgctgcctctacagtacagacagagcatggtccaaatgcgagggggccctattctggatgaggaacgaacgtgtgcaagcagctccccggagcatatatctgggtcccttattcggtcatcggcggtgtctgccagcagg

SEQ ID NO: 676613 - DNA, 134 bp, Homo sapiens
  misc_feature (121)..(121): n is a, c, g, or t
catctagctcgtcccgtcagcctctaacagtccaagtctgctcatgccatactcactgtggaccccccaagccaagctcccaagctttcagcagcttctacacacccagctcctgcacctncagtggcctcttt

SEQ ID NO: 676614 - DNA, 953 bp, Homo sapiens
gtgtctgtggtcggaggctgactcacgagttattgcatcgagcttttagtgtcttctgtattcaacaccgataaatagagctctctgctacagcaaaaatcatatgctaagattacctttccacggtatgtccaactgaatacgtgttgtagtcatccattaagcaattccatgccgacctctgaggtaacgtgactcccttgtgaagtgaggcgagcagtctacaagagactgggatgaatagactgatgcatacgtgaattgcccgttggagaggaggttccgtccagaagaaattaagtcatttaatcacgaattcgactaccaacagactcatgtctgatggtatctgggtgtgaactgtgaaagttgcatatacgttttggttggtgcaggaagagatgtacctttgaagtccagatcccatgtggatgattaggacgctatctgttatgtgtcagaggaagaaactataggatgttctgaaaagagcagtgcatgtggtgcaatttatatacacgcccatgcgttcaaacattattgcgaggcgactttgctctttaaagtggtggggataactttaaagttcctttgaaatcagtttgttgaccatgagtaaaatttccgaaaatgtgaatatgtaggctaaactggttcacgacaaattatgctgcgtcagcaaatcttgaaatgacttgtgcctttgaaaattaagtcctgatctaactagccattaaactaggctcatcgtgggcacatcactaaggtttatttaccctgtatattaaccgtgcttgacaactacgttttttggtaccccccggatgttatgggcacagctcgacaattattacgaagacaacacaatagtcggcaacttgccagcggggaagcgagggcacaaccaccgagatatggaacaaaaggataaaaaagcgctccacacgataagc

SEQ ID NO: 676615 - DNA, 157 bp, Homo sapiens
acaaagtcggttcctttgttttcatggaaatgtcagacaactatgaaaagctaaggaagcatgtcgcactgaaggtctggctctggtaaattaggcagagatgttctcagcagcaaaccaggtaaaactctgaccatcgtgaacgcattacttttaa

SEQ ID NO: 676616 - DNA, 809 bp, Homo sapiens
  misc_feature (327)..(327): n is a, c, g, or t
gctttagaagcctggcgtggcaatccctgacgcaccggcgtgatgcccagggaagacagggcgagctggaagtccaacctacttccttaagatcatccaactatggatgatgatccgaaatgtttcattcgtgggagcagacaatgtgggctccaagcagatgcggagatccgatgtccctgtcgcggggaaggctgtggtgctgatgggcaagaacaccatgatgcgcaaggccatcgcgagggcacctggaaaaccaacccagcgtctgggagaaacgtgctgccgtcagtatccgggggaatgtgggctttgtgttcaccgaanggaggaccctcagctgatatcagggacatgttgctggccaataatggtgctcagctgctgcccgtgctggtgccattgcacccatgtgaagtcactgtgctcagaccagaacagctggtctcgggcccgagaagactgcctttttccaggtctttaggtatcaggcactaaaatctccagggcaccatggaaatcctgagtgatgtgcagctgatcaagactggagacaaagtgggagccagcgaaggcacgctgatgaacatgctcaacatctcccccttctcctttgggctggtcatgcagcaggtgttcgacaatggagcatctacaacctgaagtgcttgatatcacagaggaaactctgcattctcgttcctggagggtgtccgaatgtttgcagtgtcttgtctgcagattggtacccaatgttgcatcagtaccccattctatcatcaacggtacaacgagtcctggctgttgga

SEQ ID NO: 676617 - DNA, 120 bp, Homo sapiens
aagaggtgatcattctctgaggggctgagatgtgctaccgcgattgctactaccgcattagcttggctctctgtctcacagggtatctctaagactaggggcttggtatgtatgtggtca

SEQ ID NO: 676618 - DNA, 189 bp, Homo sapiens
tgcaatgcgaggcatagttgtttgttctgaatcatctattgtgacaggttggtttatgagtgcgaataccgaggctcaagggagcggacgcggcctggaagcggcaaagtggctgatcgtcgccgttctgttggttgtgactattgtcggtctctattactaccgtgatttaagcctgccattgggtgt

SEQ ID NO: 676619 - DNA, 217 bp, Homo sapiens
ccgggttatatagagaaaacttctctgcgtactttcataaacaacaggtccctgtgtgactgtgtcaatatagtgttcttgttttgagatggagtctccctctgtcgcccagactacagtgaagtgacacaacctctactcacttcaacctccgcctcccaaggttcaatgcgcattctacccgcctcagcccttcccgaggtagccacagactaca

SEQ ID NO: 676620 - DNA, 367 bp, Homo sapiens
agaccatggtgagggcgaactcagccaggttggggtgatcttgtgaggttgggtgacctgatcatggggggatgtatctgtgctctgggcagcatctcccttgggatcctcagcagggagacagggaccaggcagcacagtgctgccagcaggaggatgcccacgagacagaagacggcattgtcctttcctgctctcctcaagctctactcaagctctgtctcttctggcaggcacaggagagtggcctgaaggctggcaggaggttgccgcccctccaacctgtaattcctggcagcagcagcagctaggccttcctcggaggcccgaccccctcctccttcttgggtcagcctgggtctccata

SEQ ID NO: 676621 - DNA, 887 bp, Homo sapiens
  misc_feature (174)..(174): n is a, c, g, or t
  misc_feature (182)..(182): n is a, c, g, or t
  misc_feature (189)..(189): n is a, c, g, or t
  misc_feature (219)..(219): n is a, c, g, or t
  misc_feature (279)..(279): n is a, c, g, or t
  misc_feature (286)..(286): n is a, c, g, or t
  misc_feature (290)..(291): n is a, c, g, or t
  misc_feature (307)..(307): n is a, c, g, or t
  misc_feature (365)..(365): n is a, c, g, or t
  misc_feature (371)..(371): n is a, c, g, or t
  misc_feature (387)..(387): n is a, c, g, or t
  misc_feature (396)..(396): n is a, c, g, or t
  misc_feature (606)..(606): n is a, c, g, or t
  misc_feature (619)..(619): n is a, c, g, or t
  misc_feature (621)..(622): n is a, c, g, or t
  misc_feature (645)..(645): n is a, c, g, or t
  misc_feature (658)..(658): n is a, c, g, or t
  misc_feature (675)..(675): n is a, c, g, or t
gggtggtcgggctgcaggagaagatggggtctccacaggagtaaaagttcctcgtaattttcgcttgtgggaagaattgaagaaggacaaaaaggagtaggcgaggtacagttagctggggccttgaagatgatgaagatatgacacttacaaggtgacaggcatgattatggngccaccanggacaanttatgaaaacagaatatatagcctgaaagntagaatgtggacctaaataccaagaagctcctccgtcagtaagattggtacaaaaattantatgacngganntaaataattccagtgngatggtggatgccggagcattaccagtgttagcaaaattgcaaaattcatatagcatnaaagtngtacttcaagagctangacgtctantgatgtccaaagaaaatatgaagcttccacagccaccagaaggacaaacatacaaaattaaatttaggtggatctcaaacttgtgtctaaaatcaacaaaccttctactcatgttaagtgtccttgattaacatattcacaagtgcaacaattacacattaaagtacacagaattccagctggtaaaacattgaactgactttgtaagantatattaatattntnnaccccattatgtttcaggtaccngggggcaaaatgncgccaattttttctctngaaggcactgtctttaaaccataacttgggtctcgaaataaatccagttacagatgaaacgtgtgagactgtcctgcgggacctgttttcaacagtaatttgaaaggaggtgttcccttacttgaagacggggatgtcaacagcgccacattcccgctatggcgcggggcccaacaaagggtggcaaaaaaaggggcacgtgttgcaaatta

SEQ ID NO: 676622 - DNA, 139 bp, Homo sapiens
cccaggacttacagaaaaggtgtaacctggctctaaggactttaagccacataatggtagtagacctcccgttttatttgacatggtgaataagctaccactccttattgtaccatatcggcaggacagagctcttaac

SEQ ID NO: 676623 - DNA, 167 bp, Homo sapiens
ctgcctgaggcactgcactgtgatcaccacagataataaagttgccatagggcagcttgagctgcttacacaaagggtacctcatgacatctgcagtaatctctgggatggacaccagttcattcgtgggttttcatgaccctgtgtattcccgtgaccgtcatccg

SEQ ID NO: 676624 - DNA, 426 bp, Homo sapiens
tcagccaatggttgagctgtattcccaacatctagaataatctctggctcagagaaagcaagcagtgtttatccaattaatgagtactcgtttaaagttgaacgtgaacattggaaccctcttgcgagtgcaggtagaaatacgaaatggtacagccactttggaaaacaggctggcagttcctcaaaagttaaacatagttatctatgacctagcaatcccattccaaggtatataccatagaaaaatgaaaatatatgtctacacgaaaacttatacacgaatattcatagcagcatcattcgaaatagccaaaagttttagaccacctaaaactttttagcttcaagtactctgcaagcctccttggaacgaaatcatattacgaaaagtccctagaaagtaaatttagtctaaatagggaaa

SEQ ID NO: 676625 - DNA, 1052 bp, Homo sapiens
ttgagacaagctctacgcaggaacctctcaacgcttcggaggccttttgcccaatggagatctgcatggtaccagtggtgtatcctgggcctgtggagccaggacaggctgcgtggtctaggtgttacattgtgaaacgtgtcgtaaagccatatcgattgtatcaaacgctcaagactagcatccgcttctgctcctatgaacatgcttaagacacttttaccagagaagcttctccccaggcagaggagatcgctgacagaagaaacctcgggccaccacgtgaggtgagcagcaggaaatgccaacaagccctggcagaatctggagagtgtcctcagccacctggaggacttctttgcacggacactagtaccgacgagtgctgattctccttggggtgctatgccctaagccccaaggagttctatgaactcgacttggtctctgctggccccctacagcgtggaccagagcctgatgcgcaggccgcttgtttgcgccgtctcttccgagccatacttcatggctgatgcctttagtcgagcttcacggctcctcctagctcatgggcaccgtcgtcatggttcacagggacaccgcaactgtggagaagattggtttcgacccaagctcaactatcgagtgcccagccggggccataaactgactgtgaccctgtcatgtggcagacttccatccgaaccacggttgggaagactacatttggttccaggcaccagtgacatttaaaggcttcgcgagtgaatgagtgcttcttaatcctaaaaacaagggctgaattatctttctccctgtggggctgaatcacccatctggtttggagctagagatgtcgttcccggtgaaaagaacgcaaggcaactctccttctgggttgtttggcttccctttgaatttctgaagaaggtgaagggatttgccttgactgtgtgacggttaccctgcggaacacacatcccttgaatccaaggtgtttccccaggggtgggaaggctctatagggttggcacacaagtggcctaaaaccc

SEQ ID NO: 676626 - DNA, 1045 bp, Homo sapiens
ttcgttgcttcggtttcagtttcctaataaaagagaaataaagtgcttactagctctcattgtagacaagaacgtttgggtgcggatgttcccatggattgggggattgtttatccagacagtatcgactgtcacaagagatgagtttattaaaatacaactatgtccaaagtaataagttcctaaggtttgggaatcacagaactagttgatgacacatatgaatttgaaagatcatttggtgtggccttaggggcggcgatgaatgaagaaactggaacaactttattggtgtatggacaagtcttattattacttatagaaataactgtaatgcattgaatttgtgtagaaacatgggtcgtacgtgtgattatatggggactatctatcctgggaagattagtaccctttgggggtatgagtgacatgaaggatttatagaactttggacattatttggaattccctcttatactgggcgcgggggtggttgtgactatcatggatattatcacggatgtggctataacatatttatggttcaaagaaatatctcatagtatggttggtcaacatgttaataagtaccccttgtatctgtcaagaacttttttggacacaatagatatttgaaatctggggcgcctcgtaaatatactttaaagtcggtggttaaactggttgaattaaaataacctttttaggtttggaaccaaagctgctccccaaaagagacgcgatactacggctagggcccgacggcggttttaccaacgacgtgcacagaggcacaaaccgccaccatggggatccgggcgacggacaccccaccctgcggggcggcgcacataatggcaccagctacactacgagaaattgacggcctagggaacactaacatcaagcgagcatggctcaccacggccatgatgcggcgacagtgcactgggacgaactaccctcttgacgcgtctgaacccccccgaagcccagggacaacacacatagagtcgcacgactacgcagcgctgcgcagccaaac

SEQ ID NO: 676627 - DNA, 393 bp, Homo sapiens
  misc_feature (393)..(393): n is a, c, g, or t
aactaatacaggaacagaaaaccaaacacctcgtgttctcacttataagtgggagctgaaaaatgagaacacgtggacacagggaggggaacagcacacactggggcctttctggggggtgatggcagggggagggagagcatcaggataaatagctaatgaatgtggggcttaatacctaggtgatgggttgataggtgcagcaaaccaccatggcacaggtttacctaagtaacaaacctgcatgtcctgcgcctgtgtcccagaacttaaaataaaattaaattaatataaaggcagctgaatattgtacacaggtttttcatatggcctgatttgagtgcatatggttaatagggtgtcaggttgtttgccaatttatatcttggctgn

SEQ ID NO: 676628 - DNA, 494 bp, Homo sapiens
atccctgcagaggagtttagtataacgtccaacaagattgaaagttattcgatagatcgctggtttgattctacaccctagcctggatcattctcatgatcggtagcaacaccctgtgattggaatactggatataacttcaaacccctcgcatatttaagaagcttagttttggcaggaatgtatctcactgactcattcctggaacatgttaggtgggtctggatagccttgagagcctgtgttttaatgataacaaactggttacagtccctcagcttgccctgcaaaaaagttctaaatttgaaattcttagacctcaacaaaaaccccattcacaaaatccaagaaggggacttcaataaatatgcttcggttaaaagaactgggaatcaacaatatgggcgagctcgtttctgtcgaccgctatgcactggataacttgcctgaactcacaaagctggaagccaacaataaccctgaacgcctctgca

SEQ ID NO: 676629 - DNA, 253 bp, Homo sapiens
ccattgctcagcgctccatgtctctactggaaatgcaaagattagccaggcgtgatggctgacgcctgtagtcccggctgctcgggaggctgaggggggagggttgcttgaacccggggggcggaggttgcagtgagctgagaatgtgccactgcactccagcctgggagacagagtgggattccgtctcaagaaaaaaagaaagatatttgcacaaaatatctaggggtaggacctgggagacagaggacta

SEQ ID NO: 676630 - DNA, 295 bp, Homo sapiens
ttccagatgaccaagtaaataatactattcaaaatggaggatgagattgacctatctaatcaggactcaattggaaaaaaaagaatataaaatgtcttcaaagaaactaaaaaccggtgaaagaacaaatgataggatgataaaaagtcagaagccacagacaactgaagaatcggatgtatccatagatattctaacctcaagcgaaccgtttccctcagatgacgaaagaaagtacatggctctcattcagacgaaagcttatattttagtaaaaccacttaaatctagaaaa

SEQ ID NO: 676631 - DNA, 826 bp, Homo sapiens
  misc_feature (270)..(270): n is a, c, g, or t
  misc_feature (615)..(615): n is a, c, g, or t
  misc_feature (673)..(673): n is a, c, g, or t
cgggcctgctgttgtccgtggtctcctcggtgctgccgtctttccccgccgccgcttctgtgttctcccccgtgcccctgtcgcctggctcttcgtcctttcgtgtcgcgtccggctgctgtgcgccgctctggggtcttcgcggtcgcgcggtgcggcgtgttgcgtgggttgtgcctgtcggcgttctcttcggtgtttgtcttcgcgtctgccgctctctccggtgccctggctgcttctcttgtggcgcggtcttcgtcctgggtngcgtcgtggcttgccgtgcggctcgtccctgcccgccttcccgcgccgcccgctggtctgggccgtgcgggtgttctgtcgctgtctcgcccgcgccggggcctgtctgcggctcgccgcgtgtgcccgtgccggtgtgtcttgtgtctgtggtctcttgctccgttcttcgctgcgtcgtgttgccgcgcgtggggtgcccctcttggtgtgggcctccccttccttctgccctgcgcgctggcgcgctgtgggggccctctggtgctccgcgttcttgcgtcgtgtctcgtcttcgtggctgggtgctgtgcggcgtgtgcggcgcggctgtgttcctctgtncctttgggccgcctctcggctctcgtggtcctgctggtctcgtgcccggtgtccgggngaccacccgctgctctccgtcggtcctgctcctggtggggctggggctggctcggtgtgtgctcgcgtctctcccgtgtgggccgctgtccgcgtctgcccgtgggctgtttcctgctggtggtgtgtctgcggcttgtggtctctgccccgc

SEQ ID NO: 676632 - DNA, 207 bp, Homo sapiens
ttattatattactgctgttagagaaatgaatgagcctacagatgataggatgtacatgtggtgtatgtatctggcggctagtccgagtaacgtcgggccatatcctggataggccgacgaaagtgttgtcgggaagaaagttagatttacgccgcatgaatatgatagttgaaatgcatcttggcgtcactttggcactagggtgta

SEQ ID NO: 676633 - DNA, 290 bp, Homo sapiens
  misc_feature (47)..(47): n is a, c, g, or t
ccaaagaacctttgggaggggaagcggggtgaatttttttaagattngggaggatttcccccccccgtcttttttaaaaccccagttgtgatgtggaggaaaagccccctccaaaatggacacaacccccaggttgcctttttaacttgggcattccgggccaatgcccccggcctttgggtttttaaagggccccccccccaatgggggggccaaattttcgggtttgccccgggatattaaaaaaaattttttgtttgaaaaatgaaaataaaaccccccttggggca

SEQ ID NO: 676634 - DNA, 227 bp, Homo sapiens
  misc_feature (67)..(69): n is a, c, g, or t
cagtaattgaggtctcttccaaatctatcagacccaaagacatatccatgattatagccaccttgtnnnatcatagcctccataccctccaccataggcaccacggcttcatcctttcatacccagcttctctgccaatgctattataccctctgccagcccccggcttatcatagggactggccgctgcatagccatgagctttcgaggaggatcatagtgggtcg

SEQ ID NO: 676635 - DNA, 159 bp, Homo sapiens
gagaaatactgcagccgtgatgcactagaagcgtcagctgcgcggctgtggcactcgcgacgtcatcttttcaaaagcaacaccatctgtattagccttgtgctttctcgctttggacgtggcacctttgaactctgttgcattactggaaattctctt

SEQ ID NO: 676636 - DNA, 702 bp, Homo sapiens
  misc_feature (375)..(375): n is a, c, g, or t
  misc_feature (413)..(413): n is a, c, g, or t
  misc_feature (429)..(429): n is a, c, g, or t
  misc_feature (483)..(483): n is a, c, g, or t
  misc_feature (643)..(643): n is a, c, g, or t
tgacacaggttctcaaagctagcagagatacgcagacattgtggcatctgggtagaagaatactgtattgtgtgtgcagtgcacagtgtgtggtgtgtgcacactcattccttctgctcttgggcacaggcagtgggtgtagaggtaaccagtagctttgagaagctacatgtagctcaccagtggttttctctaaggaatcacaaaggtaaactacccaaccacatgccacgtaatatttcagccattcagaggaaactggtttctctttatttgcttatatgttaatatggcttttaaattggtaacttttatatagtatggtaacagtatgttaatacacacatacatatgcacacatgccttgggtccttncataatactcttatatttgtaatcaatgttttgagcantcccaagtttaggganatactcttgtaatgtaatgcttttgaaatctgagcaatcctttgctatacattnttaagcattgtgctttaaattgtatgctgtcgttgaacatgatactctgtgtgcgatgagagctatacagtgatatgtggttctctacgtatcaacttgcatgatggtcagaacaaatggaatcagagaagtcctccaggttgacaggttacctaagctngttgctttcttggcctgtatccggtgaggcctagaaagttgaactctttgattttcttt

SEQ ID NO: 676637 - DNA, 134 bp, Homo sapiens
acaagactgacctcaaccatgaaaacctcaagggtggagacgacctggaccccaactacgtgctcagcagccgcgtccgcacatggccgcagcatcaagggctacacgttgcccccacactgctcccagtggcg

SEQ ID NO: 676638 - DNA, 133 bp, Homo sapiens
tgggtgctctagaggatccggtcatgtatacatgaaggacatccactattcgggaaacaacagagtacaaaacagcaggcttgaagtgataaagcagtttaaaagagaaatgaagatagaacgtggttcacat

SEQ ID NO: 676639 - DNA, 300 bp, Homo sapiens
gctgggactagaggcacaccaccatgctcgcgtaatttttgtatttttagtagagactgggtttcaccgttggccaggcgggtctcaaactcctcgtctcaggtgatctgcttgcctcggcctcccaaagtgctgggattacaggcgtgagccactgcgcccagcctgagtttcattttttaagtcacatagcagtagtccttatttcagtgctagaccctttgaaatgcgatgaaagctatatggacccttcgctttgttaatataacatatgcacacatacccaggagccgggggatg

SEQ ID NO: 676640 - DNA, 178 bp, Homo sapiens
tgaacgagaatctatgggcaatagactctaccagacacttggtctcacgggtccagggtccgtgatcttgcagcgcagaccttctccagaaccatcgatccagatatacatggcctggactggctcaccctgaggcagggacatgtacacctgcttgatgcctttatttaagtgggaa

SEQ ID NO: 676641 - DNA, 937 bp, Homo sapiens
caaccttacaacaaccagcacccccttaaaaaaaaccaaaagctgagtcagttcaaccccagcttgttagccacacagaactgttccactgcatggaggaagctcaactgaagatcgaggagtcacaaagaactgactgaattcatcagggctaaaatctacaaaaatatactcgccggctcgtggagggccatggactgcacgttccaatggaaataaatacctcctccggatgcccaccgccgtctaccccaaacaagacatcctttgctctacctcatacacccatcctatgactaccataatcaattcccatcaaccacccagaaccccctgcccatcgacataaccaaagcacacccatcccaaaatcaactcctacaccacatattaatttacgctgatccccgatcacgagcaaccttcacactaattccacccctacccctccacccactcacaccccatccacaatccatatccatcacctccacctccctcccatccccaatccacacccataactaacatcctcccatctacacacaacaatccacactcccctatctatcaaccctctacctattatttgtttacccccattgcacatcccgcccctatatcacacgcttccgaccacctcaaccaccctcccccgaatacgactactcgtcctacatatcatacatacatacaatacgctccaccctgaccaaaaccgccaaaccaatttatccatggcacgctatctaaccacccaactcatagtaacatacaccaactacatacccaccccaccactatccatacaatgacgcgcccacccaacccgcctcgccaggctcaactttcacccctaacttctcaattatgtcaacgcaaaccctctatatatcacgcccaactcatcaccacattaccatcactaatcccccgg

SEQ ID NO: 676642 - DNA, 220 bp, Homo sapiens
tccccccgccggtctcactgtctacgcagcttaaagacagcgagccccagagcagtcccctacttcaaagatcactctgcgtcacgtggactttattacgcacaaaaaaagatcaagcaaacccggacttgttaacgagtgtgctggttatctcctttaaaggacgagcgagtgtttctgtccacatttccagaatacggtccgtaagacataaccgcgg

SEQ ID NO: 676643 - DNA, 3118 bp, Homo sapiens
gaattccggcagctgactagtcttgtgattggggtcctgggctgataaaatcattccaaatgacgagcacattgataaagacgtccgatgaggaccgggagtccaaattcggctttgtttttgccgtatctggacctgtggtgacagctgaacgaatggccggttctgctatgtacgaactggtgcgtgtcggttattatgaactggtcggagagatcatccggttggagggtgacatggcaacaatccaagtatacgaagacacctcaggtgtgacagtaggcgatcccgtgctgcgcacaggcaagccgctgtccgtggaactgggacccggaatcatgggcagcatcttcgacggtatccagcgaccgctgaaggatatcaatgaactgtcaaatagtatctacatcccgaaaggtgtcaatgtgcctgccctgagtcgcactgcacagtgggacttcagtcccgtcagtgtcaaggttggaagccacattactggtggtgacctgtacggtttggtccacgaaaatactctggtgaaacacaagttgctgctgccgccccgtgccaagggaactgtcacgtacattgcagaacctggaaactacacagttgatgatgttgtcctggagacagaatttgacggcgagcgatcaaagttcaccatgctgcaagtgtggcctgtacgtcagcccaggcctgttacagaaaagttgccagctaactaccccctccttactggccagcgtgtgctcgactccctattcccgtgtgtccagggtggaacaacagctattcctggggccttcggatgtggcaagactgtaatatcacagtctttgtcaaaatactcaaactccgatgtaattatctatgtaggttgtggtgagcgaggtaatgaaatgtcagaagtactcagggatttcccgcagttgtcgttggagattgatggtgtgactgaatcaatcatgaagagaacagccctggtcgcaaacacatcaaacatgcctgtggctgctcgagaagcatctatctacacaggtattacactgtcagaatacttcagggacatgggttacaatgtatccatgatggctgactcaacttcacgatgggccgaagctcttcgagaaatctcaggtcgattggctgaaatgcctgccgacagcggttatcccgcctacctaggtgcacgacttgccagtttctacgagcgtgccggccgtgtgaagtgcttgggtaacccagacagggagggctccgtgagtatagtgggcgccgtgtcgccgcccggtggagacttctcagatcccgtgacgacggccacactaggtatcgtccaggtgttctggggtctcgacaagaaacttgcccagcgaaagcacttcccatccatcaactggctcatctcgtacagtaaatacatgcgtgctctggatgacttctacgacaagaatttcccagagtttgtcccactgcgtacaaaggtgaaggagattttgcaggaggaagaagacctgtctgaaattgtgcagttggtcggtaaagcttcattggcagaaactgacaagatcacacttgaggttgccaaactattaaaggatgatttcctgcaacagaacagctattcaccatatgaccgtttctgcccattctacaagacagtaggaatgctgaaaaatatgattgctttctacgatatgtctcggcatgcagttgaatctactgctcagagcgagaacaagatcacttggaatgttattagagattctatgggcaatattctgtatcagctttcctccatgaaattcaaggatccagtcaaggatggagaagcgaagatcaaggcagactttgagcagcttcatgaagacattcagcaagccttcaggaacctggaggattaaagtggtagctgccagtggttctctcggtgcagttgtcacatttggcaagctctgtagggttgccgagtggcatcggtgctagacacctgagcattcctttgccacataaagactaaagcaggtggaatttcagttgtaaaaagctggttccattggtgctaagattatgttgtgcccttttctgcttctcacattccaacagaggaatttacttccagttttcttccattttcctcctcattttaagtgtcggtacagaggcaataatctgataactctgtaccgtcacttacaagcagggagaatttgtaattattacaaatcccattatctctgtgcaccacagccttgtaaattcatttgtcccaggactccctcttgtgtgtacgtgagattgccgtctgtatgtatgtacacaccgtactgcagtatttgaagtcagtcagaaggtgaattacaccacttactcattgtgtcacgtagcaagtgtgcaaactgccatccattgtcctatttattcacataactagttttctttgcatttccagtgttgcaaattgtgtttagaaaattatgccatcgagactggtcgaacctcacattgtaactcagtatttacacacacgtttacttgctacagaaatgtagaaaaaataattgttgtatattgaaagtacaagtgacaaagttgcatttaaaatggtgaatgtattttatatttcttttgtagacacaagagttaatgcattttgcttaatggagatgtatgtaaacctaaaatagcagtttgtgcacaaattatgtatatgtgaaatggagatggtttctaatttgctgattgattgccagtattaatttaaacaactgtagttgtgggatgtagtgggaagattttttttttcctataaaattggtggatgtatgtgtcggagattttgattgtatgtgtaaaatagtgatcccagtaactgtaaagctttagaatacagttactgactgtatagttgtacaggtgttgttacttttaagaatttattgacacaaaggtgaaagtctattattgtattgtaatgtttaaagcatttaaggtttaaaaatcctacttctgtgtataaatgttaccattcctcatataacataactgtgtagaaatacagtcaacttcatgttcattagcatttcactgttgtcacataaattatgcccggaat

SEQ ID NO: 676644 - DNA, 281 bp, Homo sapiens
  misc_feature (236)..(236): n is a, c, g, or t
ccagttaacagaacagcagaaaaaattaggatctagttgacagagatggaaagctcaccttataatctggaaatacacattcttttaaaacacacatagaatagtggatgaaaatctgcacaaactaaaactagcctcaacacatttcaaagaatcaaaatcgcattagaccacattttattaacactttttttttttttcaaagaaccagcgtctaactctgtcatctaggcggnagtacaggggtgcaatcatagcttactactgcagcctcgaactcc

SEQ ID NO: 676645 - DNA, 1706 bp, Homo sapiens
gaatgacagacggatagacactgcatgattgtcgtggtcccacatgagagctgacagtaagccggagccagacacagaccatggagacgatcacgaggatgcagctcagacctgccgtgcctgaccgacatggagcgatggatttgactggtagctcagacttcgattgtatataggattgcaaactgttctataagagaatccatcacaatcaccagatacatatcatacacatcccttcaatgattacccacgagggtttgcatagcaaaaaaaagacagcagggacgcaaaaagaagaatacaacaaggacatgaagaagccgagaaaaaatccaacgagaacaatagcaaagcaaaggaagcaaccatcaccaagaagagtcacaaaccataggaatagagaacagacagataaagtgaccaaaggactaattagcaccaaggacattagggaccaaagaaaaagaagtccatagcgaacatgacatgaaccagaggcgtaaaaggcatccacaaaaagaacccacatgatatgacacaagacatacagagaacaaagacagaccaaacagtgatacagccaacaaaagcgacaataaacaaccaatgacggagatgtgagatcaaccagaattcgttcacggacataatataccataaaccaggataaaatcacggcacaaacaacaagtggtaacaccacatgcaactagtaaacttcatcacaacactcgcaatatcatgagacaaaacgaacaattaaaatacccacggaatcaccccatataattagacattgagatcaggcatgtaccaggaacaggctaaacacaatcaggagagtaaaaaccacccgtccaatacagcaaaccacgcccacatagggagacaaaaccacgaagtcactaacaactaacgaacgaacacagcacaccagttgcggaaggataaggagacaaagcaaacccacatcgggaagagaactacgacaaagaccatgagaaacgaagaagaaagtaaagccaagacataatatagacgacatacaacagaccacaagacacaaaaaacatgtaccacaaagttaaagggaaactggggacaaaccagagccacagcggaacagaactacaacaaacacgcgaaaatacccctaaaccccaccccatacaacaaacaccggacaataacaccaatggaccacgagggctaacaaaaagtagacaaacgacagaggtgcaaacgacgataagagcaaaaagcaaaaaaggcagaaaacaacaaacacggaacacatgacgcaacgacacgcaaaacccagcaagagaaacaacgaggaacacaacaaaaaacccagagaacaaagcagacaccacagaaagagaacccagagtagtcgaacaacacagagaaataaaaagaaaggacgcaaccgaacccagaagagaaaccaagtagcacgagacagctgaggagcacgcaaacgaagcagagacaaacagaaaagaggactagcagagaaggcaggcgaacacagagaagcgaccagtgaatagcacaacggaagacgagagcgagagagaggacagacagaagacgacaagaatgaaaagcagaaaaacacataacacatagagtaaaacagtatgaagagcgcacagagacgcacagaagccgagagaatgaagacacgcgacacagaa

SEQ ID NO: 676646 - DNA, 445 bp, Homo sapiens
ggtcgacctttagacaagccccaggtgatgtgactcttctgcttactctctactcactgatgtaattgtgacatatatcttgccccagcttgtagttgctatgatgattctcacaccttgaaccaggcaataaaagagttactctctctcctagctaggcttaggaaaacaagcacaatccttagtctcctctttttgccaaggtcctagagaattaccactctctcacatattgtataaagctctcgggtggcacagacagtgtcatcaaggaacaaaatcacagatgatattgtgttacttttttttttttggagacagagtctcgctctgtcacccaggctggactgcagtggcactctcggctaactgcagtctcagtctcctgagtagctgggactacaggcatgtaccaggaagccaaactattttttgtatttttagt

SEQ ID NO: 676647 - DNA, 723 bp, Homo sapiens
attctttttttaaatcattttgtgacagtttagcaaggcttgtgataagcaagttatggtatggtaatatttctagtgtccacgtttcttcacatgtctggtgtatgggaactactaactccatcaggaccttgcctatagtaggtactcaacatttactgaattaaatcaataaacatttttaatgaattacggtacaagtcagacctctgtatctgtgggctctgcatctgcaaattcagccaaccatggatcagaaatattagaaaaatggaagaacagtccagcaatacaagtaatatgaatatgctttaagtatactgaaggatttgcgtaggttatatgcagatactgtaccattttatataaggaacttgagcatctgtggattttggtatttgcatggttcctggaaccaatcccccagggatactgagggactatagttgatcataccacctgattttagagattttctgagtctcagaagttaattaagtaaactacaatagtctgttcttaacctcggaggatacattccaagaacctcagtgaatatctgaaaccacagatagtattgaatccaatatatacacggtaatatttttttcctatacatatggatctattaagtttaatttctaatcagacccagtttttacggtaataataattagtgcaagactgggcatagtggttcacacctatattttacaccttaac

SEQ ID NO: 676648 - DNA, 102 bp, Homo sapiens
gcccaaacccactccaccttactaccagacaccttaggccaaaccatttacccaaataaaggataggcgatagaattgaaacctggcgcatagatatagtac

SEQ ID NO: 676649 - DNA, 422 bp, Homo sapiens
  misc_feature (136)..(136): n is a, c, g, or t
tcccttattctcggggtacgcctaggacccacctcggccaaaatccctttcctattattattcaccgggggaaatctgactttctttccacaacactttctcgggcctatccggaatgccccgacgttactcgggntcccccaggcataccccccctggaaccccttatcatttggagggtccttcatttctctaaccgccggaatatttattattttcctggtttgggaagccctcgcttcgaagcggaaagtccttatggtagaagaaccccccctaaacctggggggggtatatgggggccccccccccctccccccctttgaaggacccgggttcattaaattttgcccaaaaagggagggatcggacccccccaagctggtttccagccccccccctggcccccctggctttttcca

SEQ ID NO: 676650 - DNA, 202 bp, Homo sapiens
cttcagtgaggccttgctgaagaggatcaggacctggctccaatttctgctgacaggcatctatcctttctctggtgacaaaataacatgtgattgatatctgatgtggctccagggacatttgagtgcaattgagagttcgacagtggatcctataaaagggacatgactacagcacatgtgctgactgagtgtaccagtt

SEQ ID NO: 676651 - DNA, 127 bp, Homo sapiens
  misc_feature (123)..(123): n is a, c, g, or t
atgagtcgactggttcgcatgtttgccaggttggcgtgcacgtagtgtagtccggctcaaggcaacctccacctcctgggttcaagcaatactcctgcctcaccctcttatactagccaggtnacta

SEQ ID NO: 676652 - DNA, 1348 bp, Homo sapiens
  misc_feature (345)..(345): n is a, c, g, or t
  misc_feature (411)..(411): n is a, c, g, or t
ggtcccgcaacaggaaggttaccgtgctctacgtgctcacgctcttctcagtctcctaaccgccgtgactggcagtgaaggtgaaatggtccacagggcaaaggcggctcgggagattcagccgttgaacgcaaggctgtcgacgagtagatggccattggtggtagttaacagagtaaatcaaacaattatcaacggcaagaaaggacaatggacactgacacgttgttgcaaagggaggtagcgtatttcggtgtctggatcgtacgtaacgatcggaattggaacagttagccaaactgactttccctttccgctcagctacagcaaggaagcgaatgaatngctgaaccttttgattgaatgatccaatagtcacgagtggaacattgacttgcggagtcctttcgnccactgtaacacacttttgattcactcttcaacgtggacttgggtacttcagtatccataaattacttaatgggctcatatcggtctaatcgcggggacagcatcccttggtacgttcctccatggttgtaggtgtacccgagactattgccaattggagaggaagtactcgatctgttctctccagtttttattgaatgcgccctattatatgagatctttgccccaaagggatttctgcgttcgtcgactaaacaatgggccattcatcggggaatcttggaacctcccccttaagaacattgatggggaacggttttgctacaaaacggaaagaaactggaatttggtataccgccaaccttgacaaggccactttggaaaagatacatgccgaaattatattcacccctttttgaaggacttagcagattggtgcctaggaaaggacaggttggccgaaattgtgtccatttttaaaaacataatttctcaccatttcttggaattcccaaattggtccccttcacctgggtggggggaaaccttttggaattaagggaaacagttccagattgggttggcacaacagaattcagaaagagattggaaaatttggctaccaagtgccttgtggcgaagggacagaggcaagtccaattgttttggggggaacggaacacttcctacctaaggttggcattggaccttggacccacgaagggttgtattataaaacctgtgaaagtccgaggagaccactttccgttttcaacatgggcgataccccctgttagcaattgtagggaaaggaaagcactctgaaaatagattggggcggtggagaaaagacaattcgagtataccacaagccgtgtgtgcccgagacgcgcacgaatttgccgtttgccctataggcgcaagataatatccccgt

SEQ ID NO: 676653 - DNA, 328 bp, Homo sapiens
  misc_feature (78)..(78): n is a, c, g, or t
  misc_feature (150)..(150): n is a, c, g, or t
  misc_feature (158)..(158): n is a, c, g, or t
ctttagcattttaaatatgccatgccatgggccggccgtgggtgctcacgcctgtaatcccagcattttgggaggctnaggccagtggatcacctgaggtcaggagttcgagaccagcctggccaacatggtgaaaccccatctctactnaaaatacnaaaatcagctgggcatggtggtgtgcgcccgtaaggccagctacttcggaggctgagtcaggagaatcacttgaacccgggaggtggaggttgcagggaggcagaggttgcagtgagtcgagattgcgctactgcactccagtctgggcaacagagtgagactccatctt

SEQ ID NO: 676654 - DNA, 356 bp, Homo sapiens
aaaggggggggggggggggggggggcccccagttgccccccaagggcccgggggggaaaggaaattttcccccaaaccccccccccccccttttaaaaaggggggggggggggggtcccaaccgggtgggttccatgggccccttaggtttggggggaaaaagggggggaaaaaaaccccgggcggggtacccccccccaggggaggggggaggtttgggggcccccctggggtttttttttgggggggggggggtttagggaatggggttttaaaaccggggctttttaggggggccccccggccccaaaattgggcccgggatttggggcccccccaaaaaggggaaaggggga

SEQ ID NO: 676655 - DNA, 403 bp, Homo sapiens
taggactgtctagaataaaaatgacagatgggctgggtgcagttggctcacgcctgtaatcccagtcactttgggaggccgaggcgggtggatcacgaggtcaggagattgagactatcctggctaagatggtgaaatcccgtctctactaaaaatacgaaaaatcagccgggcgtggtggcaggcgcctgtagtcccagccacttgggaggctgaggccggagaattgcttgaatctgtggggcggagtttgcagtgagccgagatctgcgccactgcactccagtttgggcgacagagttgagactctgtatccaaacaacaaggaaaaccaagttttccgggcttggcccggttgctcatgcctgtagtcccagcactttgggagtccttgtgggcgtca

SEQ ID NO: 676656 - DNA, 87 bp, Homo sapiens
acgacagccactttgggctttggagccccccaggccccagtagataatctcagtgataccttgaagaagctgaagataacagctgtt

SEQ ID NO: 676657 - DNA, 184 bp, Homo sapiens
  misc_feature (135)..(135): n is a, c, g, or t
cgttgctcgatcactgtactggtaccagacagacatacagaccaatggaagcagaacagggacctcagaaacaacaccacacacctaaaccatttaactcttcaacaaactctgacaaaaacaagcaatgggaanaaggatctcctcacttaataaactggtagtggtaaacacaggctagcca

SEQ ID NO: 676658 - DNA, 254 bp, Homo sapiens
cccccctagaggatcccccacgctcagcagctgaccgacctcgccaggtgctggggcgattggtgttcagcgcgcgcggtggccgcatgagctctatctctctgacgtggcagcccgggcgcatcgcattagcgcaagcccgtcacatctagcgtgcttcctgacacagaccggcgggcgctgcagcaaatccgcactcagcaacgcccctgtcaatccgcacctcatcaccgcgcgaggctcaaagcggtctg

SEQ ID NO: 676659 - DNA, 171 bp, Homo sapiens
gttaaaacatgccacgagtaaagccaaaaactggagaaacaacttcaaaaagataaagaaaaggttgaagatttaaaagtatacctcccaagagtaacatatcattattgaaacaacaccagaaacatgcctcgagaggaaaagagaaggagaaaaatattaaagggagtt

SEQ ID NO: 676660 - DNA, 612 bp, Homo sapiens
acctgcagcgcaagctgtggtgccaccaagcaggaggaggaggctctgctctcagagatggatgtgacaggtcaggcttttgagtgacatgcaggaacagaatcgtggcggctgcgtacagcagattgcgggaaataggatgatgcccaactttaagctaatgtcagagcggatcaaggccaaccagattcacaagctgctgcgggaggcagaaggatgagttgggcgagcatggtccttggcctcaagtcccaggtgtgatgcccatgctgcttgactgtgcagaacgctggaggagaaggagcgagccttgtctgggcagtcctctgggggttgtggagaaggatgctgatcgctgtcgcagctcaaggccctggtagctcaacaaagctggaatggctgtagcaaggccgcccagctggccgatggacctgaagtgtgcagctgtgatgcacgtgccatgactcgggctgcagggaggatccaggccctgccctggcagagagccgggctgctcgtgagaaagagagcttcaagtctcaatgagggctccaggaggacgtctcacggctgcggcgcaggctggaaaaagcagcaggaaggtggagggcc

SEQ ID NO: 676661 - DNA, 219 bp, Homo sapiens
cggaatcctgaatttgacgcgtctcctttcagactgctcccacccctaattatctccataaagagctatattaattgggcaggtgtatgcgtacagtcatctcagcttctaagaacccctagattcttctttcaattctcctttctccctatcatacaattgagatgtttgtcctttgcaccttccccaagatagcaaaggtgatacaaatgtggaagg

SEQ ID NO: 676662 - DNA, 223 bp, Homo sapiens
ggggggggggtttttttcccccccaaaaaaaaaattttttttttggggcgccccccggtttttttcaaaaagggggggcccccccttttttccccaaaaaaaaggtttttcccccccccggggggccccccccttttgtttttttttcccaaaaggggttttccccccccccgggggggttttttttttttttgccccccttttttttgggggcccccccaca

SEQ ID NO: 676663 - DNA, 701 bp, Homo sapiens
caacccaggggaattatttttttttcccttaaaccctgtttaaatggaatttattcacccatcctttggggggggccaaaaccttttttttaggaagggatttggggacttaaattccagttttttttggggggttaacacccatatttttttatttttgaatccaatttcgggttttgtaaagccccgcccaaactttaacacattttaaacaatcgggggggcggtttttttttttggaagttcttccaaaattataaatttgtctttgttaaacactaatttgcccgccaattttttaaaaaagaaattttactccctttttttaggggattccacttaatttttataaaacaaactttagtttttaccctaatagtgtatattttgacagaaattttaataaaaaatttccccaacattagttggggaacaaacccaaatgggcttttaaaagagaaacaatttgtttttggggggaaaaaagttttatacctttttccccggaattttctgggccaaaaaggtaaaaaaactgtgggcaatttttttgttttttaaccaaacaaagcaacagattgggttatcacttgggtggaaaaagaaagttgtaaaaggtttcccatattgaaattagggctaagataattgtttatttctgggaaacgggaaatttatttcttttttggttatagggaact

SEQ ID NO: 676664 - DNA, 445 bp, Homo sapiens
gagagagagagagagagagagagagtgatttctcccttccctttccttccttcttctctccctctccactctctttctctcttttctctttctccccctcctcttctctctctctcttctaccttttttctcttcatcttctcctctctttctcttctcctctcccttgctcctcttccttttcttatcttcctcctctccttctctccttcttcatccctcttccctttccctctattccccttccctcttttctctttttctctctccctctttcttttccctctccctcttttatccccttccctcttcttctctctctccctcctatcttctctttaccccttcccattccccctctccacgtctcctccttcccctccctcctctttctcctccttcctcttctctctcccttcctctctcttccttgcttttttttccc

SEQ ID NO: 676665 - DNA, 774 bp, Homo sapiens
gcagctttcgttgaagtttagaagataagaaacatggcatcacattaccggaacatttaaatatgatgacatgtttcggtaatgtgatgcctcaggtctgcctttttttctggagaataaatgcagtaatcctctcccaaaaaaaaaaaaaaaaaaaaaaaaaaacaaaaaacaacaacaaaaaaaaaagagggggcgcgcgcgcgccccaaagattctccccccggggggcgaccccacattcgcggcgcgcgcccccgcgtttctctgggacacagagggggcgccccataaagggagggccacattatataaacagcccagagcgccacgcgagcgccgcagcgcctatcacaccacccccgcacgaaccggggaaacacacgagcgaccacaccccgcgagaacacccactggcgcaaagagacaccccctaaccctgcgcgcggcgcgcagacacacacgcgggcacacaaccaacacccaaccacccccacacacctcacaacccacctgagcgggacaactcataccaagactctaccaacaaggcgtaaaacacggcgggaccacacacaccgcccaataacccccacccgcaccggaacaaccagggaaaaagcggcaaacacaatctcaccgcaccattatatatacccccggggccactcgcacgaaaaaaccgaagaccacacctcaccacgaaccacaacaccagccctcgacccccccccccacacccaccgcccaccaccgcccgccgcggcactcccc

SEQ ID NO: 676666 - DNA, 153 bp, Homo sapiens
tcactaacattgacacacatctgttgcaaatcagttgaggtacccatcatgactagactcatttggcgggaaacaccaaatttacatgccaattggcacacagaagtgtgggtatgggggaacagcgggtggaacgctctggtgggagaggat

SEQ ID NO: 676667 - DNA, 216 bp, Homo sapiens
ggaccaggctttccatacacgggccaggactgtggctctttgctaaaccaactctgggactcagctcccaccgacaaagaaaatgggtctcattctgggctccaggattgtctccccactccagcatcccaaactggtactcactgacccaggcccccaatcctgggcttttacagagcctccatgagtcaagccccctccccacagagagagcgt

SEQ ID NO: 676668 - DNA, 712 bp, Homo sapiens
aagtagctaggtacgaggcgggttaatcggccgaggagtcccaggcatttctcgtgtgtgtgtgtgtgtgtgtgtgtgtgtgttgtgtgtgtgtgtgtgtgtgtgtgtgtgtgtgtgtgtttgtgagagtgagtctctctaagctcatgtccaccccctctctctctgtctctctctctctgtctgtctcaccctctctcagagagtgagtgtgtgtcggtggcatctctctctcttctctctctctctctctcgttgtgggtgtgtgttatactacgagagccaatcccttctcctcgcgcgtgtgtcgtcgtgctccgctgtgaacgtgtgagagacgatataggagacgtgtcgtctcacacgcgccggcgtggatcgtcgcgcggggcgtggcgcgctgtgtcccccttccccgaggtctggcttatagggctccccgtgtgagaggtgtgtctctggtcgcctcgaagaggaggcgtgagccgcgcgctcaacacagatatcttggaacaacactacttctttggtataatatgtatgattctgagacgccgccgtcgcgtgctatcgtagagagagagacgaaaaacaagaggggaatcttgtatacgtgacaccccacgagaggccgtgtgtgaaagagaacagacgtgctcgggcgaggtaacacaatagcacaagaagtgctcctggacagtgcaagaggttg

SEQ ID NO: 676669 - DNA, 694 bp, Homo sapiens
  misc_feature (359)..(359): n is a, c, g, or t
  misc_feature (530)..(530): n is a, c, g, or t
gacggacgcatagtatcggaacattaacaaacgaatcaaaattatgtgtggagtatgtggctatacaagcaatgatgaccgagtcggagcatgaaacttactccaaaagggaatcgagtactatcatggcgtgacagcacaagcatgacttgggttgtcggggtgccgtcaaccacccttatgtaaccccaagtgaaagaaggaggcgtcagccgtttgcacttcttggggagttacaagcccacacttcaaaagctactaggcattaagtggggtagttgacacggaatatacgtcgttttgggtgaacgttttgttgaatggggaaatggatcaaataaataaaggttcatgatgtntttagaattaggaaaagcggcgttctcgtttcacggtgaacgccgctttgtctattctctggtcgataaaagtccgtaaatggccgagaaatctttttgcccccatccatattgcttcgccaagccgtatagttcttttgcgacgttagcaagcggcaaagaaacgtcgtnttcgtaggccgattgtgcaatgagctgcaagtcttttagcatatgttcaagaggaaattctgtcgcaaagtggttgcggagaatatgttcctttttcccgtttaaaaacggagcggttgttggaccgttcagcaaggtgttgactcaccgttctttgtctaggc

SEQ ID NO: 676670 - DNA, 87 bp, Homo sapiens
ttaggtatatacatctctttacaatactgaaagctaccactacagttccagtgtacatattccttgcatctttttagtcgttgtctt

SEQ ID NO: 676671 - DNA, 129 bp, Homo sapiens
caaagggctggtgattgtaaaaattttttttgtaaagtaaaagttgggggtggggggggtgctggctgcaaaaatttttggctttttttacccctattgcccccggcaataaattgtttttatatgcca

SEQ ID NO: 676672 - DNA, 548 bp, Homo sapiens
gaaggggtgatgcggtaggtacctggcaggcccccgcgttccacacccgtcacaccagtgctgagactgtcgggggttcccatcggggagtcatggtgatatgctgactctctgaattcctaggccattggggaactgtggtgactgaatatgctcagagcaccctcctggcttctttctcttctggctggacgaacgtctctacagagcatttacacactcaggctttgctgtacgaccaagtggccgaggcgctgaaggcctaggaataccatggactttgcatgccttggatagtctagctggatgtgaaattcaggccttcacatatttccttcagaactctgaggatggaagatcacagttgtctggcagaaatccctaaaacaggttaaatcacgttttaggaaatacgtactactaaaaggaccacttcatttatgctgtacgtcagaatcataatctggcagaaatgcaagtaagttaaggtaaagctaggcatgtatgtaatttggtttctctgtgtcactgaggtaaaggtctcatgt

SEQ ID NO: 676673 - DNA, 109 bp, Homo sapiens
tagggtgatgatgtggacccacatgcacaagagagcacagcaaatgctcagagcagcagcaccactcccagtcagcacagtctcagcagcagcagcagcagcagcaaca

SEQ ID NO: 676674 - DNA, 331 bp, Homo sapiens
gtgagccagatgcgcactgactcagctggcacacagtgatgactctgtaccaaaaaaaaaaaaggccacttggcacccgggagagtgtggtgagagtgggccaaattatgtccaaaagattaggagaggtaccttagtaaacctagaataggattgtttggaataggccagtaagactaccaggtaaggcagctctccaaatcagtttatatttgggaaaaccacagagggatgagcatattctgaaggcactaaaggtattgaaggggacagggccattggtcgggggtagggccctacattatttaaaattgccaaagagcagggagac

SEQ ID NO: 676675 - DNA, 340 bp, Homo sapiens
cgtaatcagaccccgtagagagtatttcactactcagcagctatcgatgcagttgacatccatggaattccgttttcggaaacctgtgcttacaatgcaacacaatgtacaacatgttactgatgactatgtccagctctgatttcgcgagtggatcctgtagcttcagacattggtactgagaagatcaatgatttcagagctctccactctcacttacgtatggaaggtgctgctccaagacagctccatccttgtgtcacagcgatgactttgcattgtgcacccattagaacatactacacagaggtcagagattgttaatggactactgctgtgt

SEQ ID NO: 676676 - DNA, 116 bp, Homo sapiens
  misc_feature (105)..(105): n is a, c, g, or t
gtcatctttggaaagtgagataaccaaggaaataatcgaaggagttagggagatgattacgtgataatgactttgggcgcttaacctttgatcccgggtatgctnaagaagctgac

SEQ ID NO: 676677 - DNA, 108 bp, Homo sapiens
  misc_feature (5)..(5): n is a, c, g, or t
catgnaactaggtctgtcccaatgtatgggatggcggatagtaagtttgtaattactgtggcggcactggcccccaacaggcatcaccccgctaaatcccctagaagt

SEQ ID NO: 676678 - DNA, 535 bp, Homo sapiens
cgacaataaccagccgcggtcggtacacggccatgacctgcatcagcagggtgaccagggtggccgacttgcctgcgccggtcgggccgaacaacagcagatgaccgttcatagcccggtccaggcgtgacaacggatcaaagctcaacggcgaaccgccacgattgaacagggtgatacccggatgtcctgttcctgtgcttcggccccagaccggaacgaggttcgctaggtgttgaacaaacatcaggcgggtgtaccagttgcgcgtgtcgcgggccgggttgtaagccatcggtaaccaacgcaggtagctgttgcaggcggcgatctcatcgccttcgcgtaccggttgcaagcccgcacccagcagcgcattggctaggctgaccgagcgctggtgcagttgctgttcatcgtcaccgcgcacgtaaaacgccagcgtgccgcggtacagcttgtgctgacggccgatgatcgcgcgggcttcttcgacatcctgacgggtctgggtcgagccaataatgctgtgggc

SEQ ID NO: 676679 - DNA, 145 bp, Homo sapiens
ggcccttaaccctgcagacgcatatgctggattatatcttgttccacttggggcagcatcatcggcactgatataatccgcatagctctgcagggttaagggctccgggagggccaagggctcccggagggtaaagggctcccgg

SEQ ID NO: 676680 - DNA, 775 bp, Homo sapiens
atgtcgcctggctggaagtccatcccagagatccaggactgtatgaggaaaaaaggcttgcggtgaggacttcaagcagctggagtccttcgtacatccaggacgcgtgctggtacatcagcgtcgttcgtatatggccaagggcttatgatggtgtggccagagagggtgtttgataatacacagtaaagattctagccagaacacaatcatacaaggtgtggcgagaggatattccagtgaactatatgaaggagctggaactggtcagcaaggccggcttccgggcccttctctcgtgcccccgtggtacctgaaccgtatatcctatggccctgactgtgaaggatttctacgtagtggaacccctggcgatttgaaggtacccctgagcagaaggctctggtgattggtggagaggcttgtatgtggggagaatatgtggagcaagacaaactggtccccaggtcgtggcccagagcaggggctgttgcgaaaggctgtggagcaacaaagtgacgatctgacctgaccttgtgctatgaacgttgtgtccacacttccgactgtggagtttgctgaggcgagggtgtccaggaccaaagccctcaattgtaggctttctgtgagcaaggagtttgacacaagacctgagtccaggacccgaggagggtgctgctggaggtgaatgggaatgcgagcccgggttcacggggatcctgggcaggggaaggagcccttggcttgggccctggttgtgcccttgtgctgcgaa

SEQ ID NO: 676681 - DNA, 1651 bp, Homo sapiens
  misc_feature (39)..(39): n is a, c, g, or t
  misc_feature (57)..(57): n is a, c, g, or t
tgaggaggtgaagagcactacgaagacgcagcgcatcgnctcccacagccacgtganagggctggggctggacgagagcggcttggccaagcaggcggctcagggcttgtgggccaggagaacgcgcgagaggcatgtggcgtcatagtagaattaatcaaaagcaagaaaatggctggaagagctgtcttgttggcaggacctcctggaactggcaagacagctctggctctggctattgctcaggagctgggtagtaaggtccccttctgcccaatggtggggagtgaagtttactcaactgagatcaagaagacagaggtgctgatggagaacttccgcagggccattgggctgcgaataaaggagaccaaggaagtttatgaaggtgaagtcacagagctaactccgtgtgagacagagaatcccatgggaggatatggcaaaaccattagccatgtgatcataggactcaaaacagccaaaggaaccaaacagttgaaactggaccccagcatttttgaaagtttgcagaaagagcgagtagaagctggagatgtgatttacattgaagccaacagtggggccgtgaagaggcagggcaggtgtgatacctatgccacagaattcgaccttgaagctgaagagtatgtccccttgccaaaaggggatgtgcacaaaaagaaagaaatcatccaagatgtgaccttgcatgacttggatgtggctaatgcgcggccccaggggggacaagatatcctgtccatgatgggccagctaatgaagccaaagaagacagaaatcacagacaaacttcgaggggagattaataaggtggtgaacaagtacatcgaccagggcattgctgagctggtcccgggtgtgctgtttgttgatgaggtccacatgctggacattgagtgcttcacctacctgcaccgcgccctggagtcttctatcgctcccatcgtcatctttgcatccaaccgaggcaactgtgtcatcagaggcactgaggacatcacatcccctcacggcatccctcttgaccttctggaccgagtgatgataatccggaccatgctgtatactccacaggaaatgaaacagatcattaaaatccgtgcccagacggaaggaatcaacatcagtgaggaggcactgaaccacctgggggagattggcaccaagaccacactgaggtactcagtgcagctgctgaccccggccaacttgcttgctaaaatcaacgggaaggacagcattgagaaagagcatgtcgaagagatcagtgaacttttctatgatgccaagtcctccgccaaaatcctggctgaccagcaggataagtacatgaagtgagatggctgaggttttcagcagtaagagactccccaggtgtgcctggcctgggtccagcctgtgggcgcttgcccctgggcttggggctgccgtccccactcaggcgtggtctgcagcgctgtcagttcagtgtggaaagcatttctttttaagttatcgtaactgttcctgtggttgctttgaaagaacccttccttacctggtgtgttttctataaatcttcataggttattttgattctctctctctctctctctaagttttttaaaaataaacttttcagaacagt

SEQ ID NO: 676682 - DNA, 229 bp, Homo sapiens
  misc_feature (148)..(149): n is a, c, g, or t
cccggagtgacccaggtagataacaagtccggtttcctgcagaagaggcctcatcctaaagctgccgcacgtagacacacagcactggctaacggtgcccagttattgctacttgggagcgctggaccctcgacctggttatatctanncccgtgtccccatgaactcccttgtacccagttgaccaacctggcctgtagcttctcacaggcgtaccatcccatcccct

SEQ ID NO: 676683 - DNA, 418 bp, Homo sapiens
  misc_feature (13)..(13): n is a, c, g, or t
  misc_feature (17)..(17): n is a, c, g, or t
  misc_feature (20)..(20): n is a, c, g, or t
agccacccaagtntggnganttataggcgttcaccaccacgcccggctgacttttgtgtttttggtggagacggggtttcgccgtgttggacatgctggtctcggagtcctgacctcaggtgatctgcccgcttcagcctcccagggtgctgggattgcaggcgtgacacccatacctggcccgcctgggatcgggggttcgggaccagcctggccggcaatggtggggccctgtctctactgggaatacagggattggccggctatggtgacgcacttctgtggtcctaagctactttgggaggcttgaaggcacgggaatcgcttgaggccccgggaagttggaagaattgccattaagcttgagatttgtgcccctgcaacttccagtctggaacgggggagtgagactctgtct

SEQ ID NO: 676684 - DNA, 1574 bp, Homo sapiens
agcctgggaaacacagtagggctccacctctacaaaaaacacaaaaattagccaggcatgtggcgtcatagtagaattaatcaaaagcaagaaaatggctggaagagctgtcttgttggcaggacctcctggaactggcaagacagctctggctctggctattgctcaggagctgggtagtaaggtccccttctgcccaatggtggggagtgaagtttactcaactgagatcaagaagacagaggtgctgatggagaacttccgcagggccattgggctgcgaataaaggagaccaaggaagtttatgaaggtgaagtcacagagctaactccgtgtgagacagagaatcccatgggaggatatggcaaaaccattagccatgtgatcataggactcaaaacagccaaaggaaccaaacagttgaaactggaccccagcatttttgaaagtttgcagaaagagcgagtagaagctggagatgtgatttacattgaagccaacagtggggccgtgaagaggcagggcaggtgtgatacctatgccacagaattcgaccttgaagctgaagagtatgtccccttgccaaaaggggatgtgcacaaaaagaaagaaatcatccaagatgtgaccttgcatgacttggatgtggctaatgcgcggccccaggggggacaagatatcctgtccatgatgggccagctaatgaagccaaagaagacagaaatcacagacaaacttcgaggggagattaataaggtggtgaacaagtacatcgaccagggcattgctgagctggtcccgggtgtgctgtttgttgatgaggtccacatgctggacattgagtgcttcacctacctgcaccgcgccctggagtcttctatcgctcccatcgtcatctttgcatccaaccgaggcaactgtgtcatcagaggcactgaggacatcacatcccctcacggcatccctcttgaccttctggaccgagtgatgataatccggaccatgctgtatactccacaggaaatgaaacagatcattaaaatccgtgcccagacggaaggaatcaacatcagtgaggaggcactgaaccacctgggggagattggcaccaagaccacactgaggtactcagtgcagctgctgaccccggccaacttgcttgctaaaatcaacgggaaggacagcattgagaaagagcatgtcgaagagatcagtgaacttttctatgatgccaagtcctccgccaaaatcctggctgaccagcaggataagtacatgaagtgagatggctgaggttttcagcagtaagagactccccaggtgtgcctggcctgggtccagcctgtgggcgcttgcccctgggcttggggctgccgtccccactcaggcgtggtctgcagcgctgtcagttcagtgtggaaagcatttctttttaagttatcgtaactgttcctgtggttgctttgaaagaacccttccttacctggtgtgttttctataaatcttcataggttattttgattctctctctctctctctctaagttttttaaaaataaacttttcagaacagt

SEQ ID NO: 676685 - DNA, 926 bp, Homo sapiens
  misc_feature (622)..(622): n is a, c, g, or t
aagaagaaaattaaaatttcctatcactgcattttgataaaatataaaatgtatcaattaaacacaattaggatatacaatgactacattatcatcaactaaaagatactaccatttatttaactaattacctatcattaaacatctagaagctgttatccaggttctcagttttataaataatgatggccaaatgaccattatggtcaactcttataatttttgacccagaaatgtcaactccgcctttttatgaagtatttgatacgcactgccaaattatctccagaaagacagtaccaggttagaaccacaccatgctgtaaattgataaagccatgttggagacaacttgacaatatagatagaacaattgatcacctagagtgaccttatttaaagaaatatttaaaatagtaaaaatttggaaacaatctaaatattcgttaatccaggaattcatatatttgtcacacagcaataaattcatacatttgtcacacagcaagaaaaatatatgagctagatctatacataacaacatagatctctgaaaaacagaatgtcataacattgagtgaaaaaatcttggtaaaagcatacatacagaatggaatcattnatgtaaaattttttcaaaacaaaataaaaatatactgttgtggatctttacatacataggggaagtacaaaatcacgtacagaaagaatactcgtacttcgacatgacggttaatctctgcaaaaggagactagggaagagatgtaggagttatacctggatccatcatactaactttattcacaaacaattttggagcatagtaagataacacggtatacatttctcacaatctaggacacagttctcaatgtatcacgagagattctgggggacatccaagcctcgtgagtaccgtgacggg

SEQ ID NO: 676686 - DNA, 1034 bp, Homo sapiens
  misc_feature (141)..(141): n is a, c, g, or t
  misc_feature (801)..(801): n is a, c, g, or t
ggcatcgcctacccttataaatatcaagcataaaccttgccctcatacagtctatcatcgttgcacaatctcgtagattgtactgactatccttgacatgtcgcatgtctacctggtgaatcttcgaagggacctaccccntttgcacatattctcagataaggcctcctagcttgcacagactaaccacaataatggatcccactcaatatctacaatgccatatcaattatttagaatcccaagatcgcatgtaccctctatgaggtagcccgtcgtcaagtccctccttaaagtgacgctccgtggcttagacatgtagtatttcaatttcacaacttcctattaacgcatccatctatactagagcgctactagcccatcaatactaggcatgtaccattgatggtgcgggtgtatcttgagaaagggcataacaacgttcaggaataagagtcacctgttcagaatacaatggcctatcgaatgaggaggagtaatccgtattaattacctcagaagatctaacttcggcgaggagatatgactcgaggcctgttataacagtgccaagcgtagaccgataggcctcgcaatttgaggtaggggcgactgatccgcaaggggtggatcaggcccgctgggatcgcctaaagtcccagtccataaggcaggttccggaattgcgcgcatcaggagtagcaattgacctgaagctcacatcagttctaatatagacatcggagacaggtattcaagcagcttatatcgaaaaacgggcgtccagttgtacctcctacnagactcagagaattcgagtttgttagccatgtgagggattacgctccaatttgtgaccccggcttccggggtacagtcatgtgccacttcacaatgcgtacggggcagattcttgaaccacacttgtttaacgcgcgagagagataaagagggcatacgctgccctggtaggtcaaaaacaaatgttggcaaataacatgggcgacacgaacatcaggttagcacgtacttgc

SEQ ID NO: 676687 - DNA, 1775 bp, Homo sapiens
  misc_feature (39)..(39): n is a, c, g, or t
  misc_feature (57)..(57): n is a, c, g, or t
tgaggaggtgaagagcactacgaagacgcagcgcatcgnctcccacagccacgtganagggctggggctggacgagagcggcttggccaagcaggcggctcagggcttgtgggccaggagaacgcgcgagaggcatgtggcgtcatagtagaattaatcaaaagcaagaaaatggctggaagagctgtcttgttggcaggacctcctggaactggcaagacagctctggctctggctattgctcaggagctgggtagtaaggtccccttctgcccaatggtggggagtgaagtttactcaactgagatcaagaagacagaggtgctgatggagaacttccgcagggccattgggctgcgaataaaggagaccaaggaagtttatgaaggtgaagtcacagagctaactccgtgtgagacagagaatcccatgggaggatatggcaaaaccattagccatgtgatcataggactcaaaacagccaaaggaaccaaacagttgaaactggaccccagcatttttgaaagtttgcagaaagagcgagtagaagctggagatgtgatttacattgaagccaacagtggggccgtgaagaggcagggcaggtgtgatacctatgccacagaattcgaccttgaagctgaagagtatgtccccttgccaaaaggggatgtgcacaaaaagaaagaaatcatccaagatgtgaccttgcatgacttggatgtggctaatgcgcggccccaggggggacaagatatcctgtccatgatgggccagctaatgaagccaaagaagacagaaatcacagacaaacttcgaggggagattaataaggtggtgaacaagtacatcgaccagggcattgctgagctggtcccgggtgtgctgtttgttgatgaggtccacatgctggacattgagtgcttcacctacctgcaccgcgccctggagtcttctatcgctcccatcgtcatctttgcatccaaccgaggcaactgtgtcatcagaggcactgaggacatcacatcccctcacggcatccctcttgaccttctggaccgagtgatgataatccggaccatgctgtatactccacaggaaatgaaacagatcattaaaatccgtgcccagacggaaggaatcaacatcagtgaggaggcactgaaccacctgggggagattggcaccaagaccacactgaggtactcagtgcagctgctgaccccggccaacttgcttgctaaaatcaacgggaaggacagcattgagaaagagcatgtcgaagagatcagtgaacttttctatgatgccaagtcctccgccaaaatcctggctgaccagcaggataagtacatgaagtgagatggctgaggttttcagcagtaagagactccccaggtgtgcctggcctgggtccagcctgtgggcgcttgcccctgggcttggggctgccgtccccactcaggcgtggtctgcagcgctgtcagttcagtgtggaaagcatttctttttaagttatcgtaactgttcctgtggttgctttgaaagaacccttccttacctggtgtgttttctataaatcttcataggttattttgattctctctctctctctctctaagttttttaaaaataaacttttcagaacagtaaaaaaaaaacaaaatatgcttgcggccgaatttaagctcacttggcaattggcctaaaggaaggggtttcaattaatggccggcggttacaacggcgggcttgctggcggtccccttggtggg

SEQ ID NO: 676688 - DNA, 1794 bp, Homo sapiens
  misc_feature (39)..(39): n is a, c, g, or t
  misc_feature (57)..(57): n is a, c, g, or t
  misc_feature (1776)..(1776): n is a, c, g, or t
tgaggaggtgaagagcactacgaagacgcagcgcatcgnctcccacagccacgtganagggctggggctggacgagagcggcttggccaagcaggcggctcagggcttgtgggccaggagaacgcgcgagaggcatgtggcgtcatagtagaattaatcaaaagcaagaaaatggctggaagagctgtcttgttggcaggacctcctggaactggcaagacagctctggctctggctattgctcaggagctgggtagtaaggtccccttctgcccaatggtggggagtgaagtttactcaactgagatcaagaagacagaggtgctgatggagaacttccgcagggccattgggctgcgaataaaggagaccaaggaagtttatgaaggtgaagtcacagagctaactccgtgtgagacagagaatcccatgggaggatatggcaaaaccattagccatgtgatcataggactcaaaacagccaaaggaaccaaacagttgaaactggaccccagcatttttgaaagtttgcagaaagagcgagtagaagctggagatgtgatttacattgaagccaacagtggggccgtgaagaggcagggcaggtgtgatacctatgccacagaattcgaccttgaagctgaagagtatgtccccttgccaaaaggggatgtgcacaaaaagaaagaaatcatccaagatgtgaccttgcatgacttggatgtggctaatgcgcggccccaggggggacaagatatcctgtccatgatgggccagctaatgaagccaaagaagacagaaatcacagacaaacttcgaggggagattaataaggtggtgaacaagtacatcgaccagggcattgctgagctggtcccgggtgtgctgtttgttgatgaggtccacatgctggacattgagtgcttcacctacctgcaccgcgccctggagtcttctatcgctcccatcgtcatctttgcatccaaccgaggcaactgtgtcatcagaggcactgaggacatcacatcccctcacggcatccctcttgaccttctggaccgagtgatgataatccggaccatgctgtatactccacaggaaatgaaacagatcattaaaatccgtgcccagacggaaggaatcaacatcagtgaggaggcactgaaccacctgggggagattggcaccaagaccacactgaggtactcagtgcagctgctgaccccggccaacttgcttgctaaaatcaacgggaaggacagcattgagaaagagcatgtcgaagagatcagtgaacttttctatgatgccaagtcctccgccaaaatcctggctgaccagcaggataagtacatgaagtgagatggctgaggttttcagcagtaagagactccccaggtgtgcctggcctgggtccagcctgtgggcgcttgcccctgggcttggggctgccgtccccactcaggcgtggtctgcagcgctgtcagttcagtgtggaaagcatttctttttaagttatcgtaactgttcctgtggttgctttgaaagaacccttccttacctggtgtgttttctataaatcttcataggttattttgattctctctctctctctctctaagttttttaaaaataaacttttcagaacagttttagatgtacagagtcattgtgaacatacaatagggagttcccatgtatcttgtacccagtttcccttcttgttaacgtgttacatcagatagcacatttgtcccgtgaatgaccaataaagangcattattaaaaaaaaaa

SEQ ID NO: 676689 - DNA, 207 bp, Homo sapiens
tgtaacggtctttacctacttatggctgatcgtatgtcatgtggcagaaaccaacgtgacatgtaaacgcaattatcctccagtttaaaaaatgacaatatttcttaaaacagagactacatttttttacaagacaaaattatttcatttcaagagattagaggatttcatcacaggaaagaaacaaacaagcatgtttctatgaag

SEQ ID NO: 676690 - DNA, 1593 bp, Homo sapiens
  misc_feature (39)..(39): n is a, c, g, or t
  misc_feature (57)..(57): n is a, c, g, or t
tgaggaggtgaagagcactacgaagacgcagcgcatcgnctcccacagccacgtganagggctggggctggacgagagcggcttggccaagcaggcggctcagggcttgtgggccaggagaacgcgcgagaggcatgtggcgtcatagtagaattaatcaaaagcaagaaaatggctggaagagctgtcttgttggcaggacctcctggaactggcaagacagctctggctctggctattgctcaggagctgggtagtaaggtccccttctgcccaatggtggggagtgaagtttactcaactgagatcaagaagacagaggtgctgatggagaacttccgcagggccattgggctgcgaataaaggagaccaaggaagtttatgaaggtgaagtcacagagctaactccgtgtgagacagagaatcccatgggaggatatggcaaaaccattagccatgtgatcataggactcaaaacagccaaaggaaccaaacagttgaaactggaccccagcatttttgaaagtttgcagaaagagcgagtagaagctggagatgtgatttacattgaagccaacagtggggccgtgaagaggcagggcaggtgtgatacctatgccacagaattcgaccttgaagctgaagagtatgtccccttgccaaaaggggatgtgcacaaaaagaaagaaatcatccaagatgtgaccttgcatgacttggatgtggctaatgcgcggccccaggggggacaagatatcctgtccatgatgggccagctaatgaagccaaagaagacagaaatcacagacaaacttcgaggggagattaataaggtggtgaacaagtacatcgaccagggcattgctgagctggtcccgggtgtgctgtttgttgatgaggtccacatgctggacattgagtgcttcacctacctgcaccgcgccctggagtcttctatcgctcccatcgtcatctttgcatccaaccgaggcaactgtgtcatcagaggcactgaggacatcacatcccctcacggcatccctcttgaccttctggaccgagtgatgataatccggaccatgctgtatactccacaggaaatgaaacagatcattaaaatccgtgcccagacggaaggaatcaacatcagtgaggaggcactgaaccacctgggggagattggcaccaagaccacactgaggtactcagtgcagctgctgaccccggccaacttgcttgctaaaatcaacgggaaggacagcattgagaaagagcatgtcgaagagatcagtgaacttttctatgatgccaagtcctccgccaaaatcctggctgaccagcaggataagtacatgaagtgagatggctgaggttttcagcagtaagagactccccaggtgtgcctggcctgggtccagcctgtgggcgcttgcccctgggcttggggctgccgtccccactcaggcgtggtctgcagcgctgtcagttcagtgtggaaagcatttctttttaagttatcgtaactgttcctgtggttgctttgaaagaacccttccttacctggtgtgttttctataaatcttcataggtta

SEQ ID NO: 676691 - DNA, 169 bp, Homo sapiens
gggtcgctctccccccctctttcttcgggttgtgtgcgtctccgctttcgtgatgtgaggaactctggggtgggcgacgggtccaactcgcgttgtcatctcccaggttggtacaccccccccccgtttccccagccacactccacggccagggtggaggcagatgtct

SEQ ID NO: 676692 - DNA, 1570 bp, Homo sapiens
  misc_feature (39)..(39): n is a, c, g, or t
  misc_feature (57)..(57): n is a, c, g, or t
tgaggaggtgaagagcactacgaagacgcagcgcatcgnctcccacagccacgtganagggctggggctggacgagagcggcttggccaagcaggcggctcagggcttgtgggccaggagaacgcgcgagaggcatgtggcgtcatagtagaattaatcaaaagcaagaaaatggctggaagagctgtcttgttggcaggacctcctggaactggcaagacagctctggctctggctattgctcaggagctgggtagtaaggtccccttctgcccaatggtggggagtgaagtttactcaactgagatcaagaagacagaggtgctgatggagaacttccgcagggccattgggctgcgaataaaggagaccaaggaagtttatgaaggtgaagtcacagagctaactccgtgtgagacagagaatcccatgggaggatatggcaaaaccattagccatgtgatcataggactcaaaacagccaaaggaaccaaacagttgaaactggaccccagcatttttgaaagtttgcagaaagagcgagtagaagctggagatgtgatttacattgaagccaacagtggggccgtgaagaggcagggcaggtgtgatacctatgccacagaattcgaccttgaagctgaagagtatgtccccttgccaaaaggggatgtgcacaaaaagaaagaaatcatccaagatgtgaccttgcatgacttggatgtggctaatgcgcggccccaggggggacaagatatcctgtccatgatgggccagctaatgaagccaaagaagacagaaatcacagacaaacttcgaggggagattaataaggtggtgaacaagtacatcgaccagggcattgctgagctggtcccgggtgtgctgtttgttgatgaggtccacatgctggacattgagtgcttcacctacctgcaccgcgccctggagtcttctatcgctcccatcgtcatctttgcatccaaccgaggcaactgtgtcatcagaggcactgaggacatcacatcccctcacggcatccctcttgaccttctggaccgagtgatgataatccggaccatgctgtatactccacaggaaatgaaacagatcattaaaatccgtgcccagacggaaggaatcaacatcagtgaggaggcactgaaccacctgggggagattggcaccaagaccacactgaggtactcagtgcagctgctgaccccggccaacttgcttgctaaaatcctggctgaccagcaggataagtacatgaagtgagatggctgaggttttcagcagtaagagactccccaggtgtgcctggcctgggtccagcctgtgggcgcttgcccctgggcttggggctgccgtccccactcaggcgtggtctgcagcgctgtcagttcagtgtggaaagcatttctttttaagttatcgtaactgttcctgtggttgctttgaaagaacccttccttacctggtgtgttttctataaatcttcataggttattttgattctctctctctctctctctaagttttttaaaaataaacttttcagaacagt

SEQ ID NO: 676693 - DNA, 1366 bp, Homo sapiens
  misc_feature (39)..(39): n is a, c, g, or t
  misc_feature (57)..(57): n is a, c, g, or t
tgaggaggtgaagagcactacgaagacgcagcgcatcgnctcccacagccacgtganagggctggggctggacgagagcggcttggccaagcaggcggctcagggcttgtgggccaggagaacgcgcgagaggcatgtggcgtcatagtagaattaatcaaaagcaagaaaatggctggaagagctgtcttgttggcaggacctcctggaactggcaagacagctctggctctggctattgctcaggagctgggtagtaaggtccccttctgcccaatggtggggagtgaagtttactcaactgagatcaagaagacagaggtgctgatggagaacttccgcagggccattgggctgcgaataaaggagaccaaggaagtttatgaaggtgaagtcacagagctaactccgtgtgagacagagaatcccatgggaggatatggcaaaaccattagccatgtgatcataggactcaaaacagccaaaggaaccaaacagttgaaactggaccccagcatttttgaaagtttgcagaaagagcgagtagaagctggagatgtgatttacattgaagccaacagtggggccgtgaagaggcagggcaggtgtgatacctatgccacagaattcgaccttgaagctgaagagtatgtccccttgccaaaaggggatgtgcacaaaaagaaagaaatcatccaagatgtgaccttgcatgacttggatgtggctaatgcgcggccccaggggggacaagatatcctgtccatgatgggccagctaatgaagccaaagaagacagaaatcacagacaaacttcgaggggagattaataaggtggtgaacaagtacatcgaccagggcattgctgagctggtcccgggtgtgctgtttgttgatgaggtccacatgctggacattgagtgcttcacctacctgcaccgcgccctggagtcttctatcgctcccatcgtcatctttgcatccaaccgaggcaactgtgtcatcagaggcactgaggacatcacatcccctcacggcatccctcttgaccttctggaccgagtgatgataatccggaccatgctgtatactccacaggaaatgaaacagcaggtgtgcctggcctgggtccagcctgtgggcgcttgcccctgggcttggggctgccgtccccactcaggcgtggtctgcagcgctgtcagttcagtgtggaaagcatttctttttaagttatcgtaactgttcctgtggttgctttgaaagaacccttccttacctggtgtgttttctataaatcttcataggttattttgattctctctctctctctctctaagttttttaaaaataaacttttcagaacagt

SEQ ID NO: 676694 - DNA, 234 bp, Homo sapiens
ccgatgtgcgcgtctcctcagtgaacaagtttacatttaaggcgagagttataggtcagccctggcaacatagtgagaccctatatctacaaaaattttaaaaagattagctgggcgtggtggctcatgactatagtcccaaatactcaggaggctgaggcaggaggatcacctgagcccagaagttcgaaggttgctatgaatgtgccggtgcactctagcctgggcagtaga

SEQ ID NO: 676695 - DNA, 1494 bp, Homo sapiens
  misc_feature (39)..(39): n is a, c, g, or t
  misc_feature (57)..(57): n is a, c, g, or t
tgaggaggtgaagagcactacgaagacgcagcgcatcgnctcccacagccacgtganagggctggggctggacgagagcggcttggccaagcaggcggctcagggcttgtgggccaggagaacgcgcgagaggcatgtggcgtcatagtagaattaatcaaaagcaagaaaatggctggaagagctgtcttgttggcaggacctcctggaactggcaagacagctctggctctggctattgctcaggagctgggtagtaaggtccccttctgcccaatggtggggagtgaagtttactcaactgagatcaagaagacagaggtgctgatggagaacttccgcagggccattgggctgcgaataaaggagaccaaggaagtttatgaaggtgaagtcacagagctaactccgtgtgagacagagaatcccatgggaggatatggcaaaaccattagccatgtgatcataggactcaaaacagccaaaggaaccaaacagttgaaactggaccccagcatttttgaaagtttgcagaaagagcgagtagaagctggagatgtgatttacattgaagccaacagtggggccgtgaagaggcagggcaggtgtgatacctatgccacagaattcgaccttgaagctgaagagtatgtccccttgccaaaaggggatgtgcacaaaaagaaagaaatcatccaagatgtgaccttgcatgacttggatgtggctaatgcgcggccccaggggggacaagatatcctgtccatgatgggccagctaatgaagccaaagaagacagaaatcacagacaaacttcgaggggagattaataaggtggtgaacaagtacatcgaccagggcattgctgagctggtcccgggtgtgctgtttgttgatgaggtccacatgctggacattgagtgcttcacctacctgcaccgcgccctggagtcttctatcgctcccatcgtcatctttgcatccaaccgaggcaactgtgtcatcagaggcactgaggacatcacatcccctcacggcatccctcttgaccttctggaccgagtgatgataatccggaccatgctgtatactccacaggaaatgaaacaggtcccatgactcaatgaacatgcttgtccagctcatctggaaaacctgttgccttcaaataccatctcatcgtgtcaacaccatatgatgacagtgcacccccacaagagtgggggggactgcacacaaaggcattctggaacttaaattgcagaccatggacaactcccgtggggcttggaccgggaccccaccttggaattgattaccccggcaagaccacgacgtgcggcacgcaagcacacgagcgcgcgaaaaccccgcgggaaaacaccacacaaagcgacacacccctctatgtgtcgttgtgcccccaaagaaaacaggctaagaatacacctcaacacacccgtgggcaacaagacaacatctataccacagccc

SEQ ID NO: 676696 - DNA, 874 bp, Homo sapiens
ctaccatgtgacttaacctgattgccctcagtttggggttgcttattgggaaagcgagagacaaagagttacttgtcacgggaaatatgaaaagcatggccaggatgcatagaggagattcatagcagggagacaaggaataggctcagatgaccccatgaaggcatcatccaagtctaagaacaagcctaccactgatataacggaagtcagcgggagctgggaagagatggaaggatagggcataagcacgacaacagcacacaacaggaggccagatgaacccatgcgcgaaccagaagacacagagtgagacaacaagcacagggaacaagcacaagaaatcaacagagccacaccaaggcacgccagtccacacaaccaacacaagataacacacaccaccaagccaccaccacagcacccacaccaagagcccagacaaccgccacagaataaaaccaagaacacacaaaccaatacccaaagacacaacagaaacaacaagcaacaagccaagcgacgcaccaagccgagcacacgacaaaagcaccggccctgacagcacaacccaggcgacaccaccccaacagcgacagcacacccaccaccaacgcccccccagcccgccgcacgatgcgccccactgccccacccacgtcagcccaagccccgcatcaccgacaggcccccgcacgcgccccacgcgcaccgcaagcgacgcacccagacagccagcgccacgacgccgcccccgacaccgacgcaccccccacccacccggagaaccacaccgcaagaccacacgaggacagccacacacacaggacggaacgaccacccccgcccccgcgacagaacgcaccagcgccaa

SEQ ID NO: 676697 - DNA, 1402 bp, Homo sapiens
  misc_feature (39)..(39): n is a, c, g, or t
  misc_feature (57)..(57): n is a, c, g, or t
tgaggaggtgaagagcactacgaagacgcagcgcatcgnctcccacagccacgtganagggctggggctggacgagagcggcttggccaagcaggcggctcagggcttgtgggccaggagaacgcgcgagaggcatgtggcgtcatagtagaattaatcaaaagcaagaaaatggctggaagagctgtcttgttggcaggacctcctggaactggcaagacagctctggctctggctattgctcaggagctgggtagtaaggtccccttctgcccaatggtggggagtgaagtttactcaactgagatcaagaagacagaggtgctgatggagaacttccgcagggccattgggctgcgaataaaggagaccaaggaagtttatgaaggtgaagtcacagagctaactccgtgtgagacagagaatcccatgggaggatatggcaaaaccattagccatgtgatcataggactcaaaacagccaaaggaaccaaacagttgaaactggaccccagcatttttgaaagtttgcagaaagagcgagtagaagctggagatgtgatttacattgaagccaacagtggggccgtgaagaggcagggcaggtgtgatacctatgccacagaattcgaccttgaagctgaagagtatgtccccttgccaaaaggggatgtgcacaaaaagaaagaaatcatccaagatgtgaccttgcatgacttggatgtggctaatgcgcggccccaggggggacaagatatcctgtccatgatgggccagctaatgaagccaaagaagacagaaatcacagacaaacttcgaggggagattaataaggtggtgaacaagtacatcgaccagggcattgctgagctggtcccgggtgtgctgtttgttgatgaggtccacatgctggacattgagtgcttcacctacctgcaccgcgccctggagtcttctatcgctcccatcgtcatctttgcatccaaccgaggcaactgtgtcatcagaggcactgaggacatcacatcccctcacggcatccctcttgaccttctggaccgagtgatgataatccggaccatgctgtatactccacaggaaatgaaacaggtaccctctagggtcctctacgtacaacatacaacagcttcgcaatagccagcgttggaggctccaagaacgagggtcctgtggctatgtggggagtaagcagcagagccaggactgccactcagagctagttcacccttgctgccgccattcgaacccagagctcctggcccaaacagtctggaatgttctgtactgtgcttctaggacagtgacttgccaggccaactctgggctggggctgtcttggctctgtcaggagggcctcttctcaggctttctctcaggaggc

SEQ ID NO: 676698 - DNA, 1073 bp, Homo sapiens
agcgggctgctccagggcgggtggggtgggctgagccggagcccgggccgccgccgccgccgccggggagaggccgaacgcgcagcctggcgctggtgtccctgtagatgatgctgcggcctgcctgggcggtctggtccccgtccgggtcgaagccagtgggcgcgctggcgatgtgagccatgagtcgctgacgtggactgctgtcgcctgtgaggccccgtgcccggcgtgtcgaccggggccccctggtgggcgcaggtgccttggacagcgcgagcatgctgcacagggtgttcgcacttcgttgctctgccctgcgtcgtggttgctggatgctgtatgatgagtgagctgccgtgcaggcaagtccatgctcgacccccgtacaaggcccgtcattgccgcgacacttgggtcccttggaacccgaaccaacgaacggaagggcggcatcgaagaccgaccggggccacagtaacggaagctacggccgatagggatgctggacgaggagacagcgggaagaagcacaaacgtaagaccgggggaccaccattgaaagacaccgagaggagataccacaagaagggggccaaagggaaaacagggaacgaagaaggggaaacgacaaagacggagcagagacaaaagaacgagacagaccaccaaggagaaacttagacaaggaagccaaggaagaaagcacacaaaccaggaacacagggacaagaaaaaccacggaggagaaagggcacagaaaagggagggaccacaaacggcgccagcgcggccagacaagcgacagcccgcagagcacgaagaaaaacggacgacagagtgggagcggcaaagaacaaacaagggaggaggccggaagagaagagaggaggacaacacgctgcggggacaggagagagaaggagggcggaggggcaggaaacaccagaaccggaacgaacgcgggcgagaaagagaagaacacgagagagaggaacacggcgaggacaagcgaacgggacaaagcagaccgcgacgagacggggaggggcaaggagccgagacgagagcag

SEQ ID NO: 676699 - DNA, 433 bp, Homo sapiens
cacagtcagacttagtagtgaaccttgggacccaaggaatgacatagaggcgagttctttgagttgtctatgtgcttatatattactgacctgtagctgaagaggctgttcacccagaatagtcaatagttacaggctctgatatggttcggctctgcgctctcacccgagactcatattgaattgaacttccataattcctagatgatgagggacagacccataggatgataatttgaattatctgagcggattaccccatactgttcttgcgtgagtgaataacgctttatgagacctgatgcttctatacgcggttcccagattcgtttaattctcattatctcttgctgccaacgagtatgcccctttaggattgaactctgatagacaggcctttgtcagctaactacactgtgaagcctttctcgtc

SEQ ID NO: 676700 - DNA, 177 bp, Homo sapiens
actgggtgtatgcctcttcagtccatctgccctccagagtaggggtttctttcctgatagttagcaggtttagaggctgcagcttgagctacaatcaggagggacattggaaggattagcagcttttaacaaatgtttaaatatttagctttgttatattgtgtagatcctgctaac

SEQ ID NO: 676701 - DNA, 216 bp, Homo sapiens
agaagaaggaggttcctgctgttccagaaaacccttaagaaaagcgaggaatttcgcagagctgaggatcaagcgcctaagaaagaggtttgcccaaaagatgcttcgaaaggcaagaaggaggcttatctatgaaaagcaagcactatcacaggattataggcagatgtccagacctgaattcgaatggcgaggatggcaagaaagctggcactt

SEQ ID NO: 676702 - DNA, 416 bp, Homo sapiens
  misc_feature (317)..(317): n is a, c, g, or t
  misc_feature (324)..(324): n is a, c, g, or t
  misc_feature (352)..(352): n is a, c, g, or t
  misc_feature (377)..(377): n is a, c, g, or t
  misc_feature (407)..(407): n is a, c, g, or t
gcacaaagactaaaggtagataaatccatgaagatgaggaaaaaccagcacaaaaatactgaaaactgctgggtgtggtggctcacgcctgtaatcccagccctttggaaggctgaggcagacggatcgtgaggtcaggagtttgagaccagcctggccaacatggtgaaaccccgtctctactaaaaatacaaaagttagccaggtgtggtgcatttataatggttggtgccagctactcaggaggctgaggcaggagaatcactttgaacttcaaggaggcggaggtttgcagttgagccaagatttgttgttcntttgcantccagcctgggaccaacagagttgaaantcccgtcttcagggggaaaaattgnttgaaatttcccgaaaaccaggcttgcctntttttcctt

SEQ ID NO: 676703 - DNA, 529 bp, Homo sapiens
  misc_feature (398)..(398): n is a, c, g, or t
  misc_feature (427)..(428): n is a, c, g, or t
  misc_feature (447)..(447): n is a, c, g, or t
  misc_feature (467)..(467): n is a, c, g, or t
  misc_feature (486)..(486): n is a, c, g, or t
  misc_feature (513)..(513): n is a, c, g, or t
tttcggcacaggggacaatggaatgagagctctccaaggtcacaggctattaactcggtcctttcatgggtaaaactaacccctttgaagggaatgcagtcccaatcaaagtcagtaataaaagccacctcagagatatggctcatgagcatgcagttcgaatgatttcttcaccacctgccatgtgcttggtactgtcctgggtgcaggcgacaacaagactcatgaaatggtgtccctgctctaattctgggacagaattagagcagattcacttcaatacaatgtgggatatttggggacagagacatgtcatcaggggcagcagcaaaagccatctggccatctgggatgaggtggatggatggtgaccataatgatgggctagtgtttattgngggcttactctgtggcaggttttgctcanngcacttcacatggcaccanctgattcattctcacaacancccgtgaagctggtactanctttatttcctttttaaagttggggtnggggtgcgactgaggt

SEQ ID NO: 676704 - DNA, 1024 bp, Homo sapiens
gaacactactaccaccatgaaatctacttactgatccttacctttgttgcagctgctgatatgctagccccctattgatgatgatagacaagatcagttaggagggctacatctagtagaggagaattctagtacccactacacaggtagtaccttcgaattactaggctaccactatctagcgagtaggctacccatcatacagcagacacagataggagtaggatgtaccagcagcgtacagctagctaccaaagtacccgacgataccgaggtagacgacctgcggacgacgcacacacaatcagacagtacactaggaacggcggaactgacacacgtatcagtcatatgcaggcccaagaactcatccagcacacaccgcaaaagtacacacagacccggccactcgtggcaccaagtagacactccgtgcactgaatccaaagctactaccattacgacactaggcacgtacaatacagatttccacgacgattagtaccagcacatactactactagacacccaactaggcaccgcatacacaaagactagactagtgcaacctgagatacccctcatatcttcccgagcatgggggccaaacaaccatccttgagagtatcttgggatgacccgaacataaccacagaaccgaagacatagcaagataggccttgggattggctcccatggatgacatcggaacgacccaaggggccttgcagcatggatgcacacggcccatccccctaacccccctgagaacaaacggcaatgtttaaccccaaaaacacaaacacaaattgaattcacccctaggaactgcataacagggagccacattccccactcagcaacaaagggaggcaacggggccaaacacaggggaaaacattaacccactatgtgacgccaaaagcacgctactgacgatcataaccctagtgggcattagtaggaacacacatagattgagagaaacaagtcaccgcaaaaaactgcaggcaaacgacaaagc

SEQ ID NO: 676705 - DNA, 233 bp, Homo sapiens
tccagtacccgagcatgcatgcatgcgtgcgggtcgacgtgtatccaccactgcgctgcatgcatccctgaacaagtaccgacagacacgtgaggagccgagatgacctccaaatatcgttaagctggagcctggtcgacgtgtattcaccaatgcggtgcatgcctccctgtacaagttccgtcgacacgtgagcaccgtgctgacctccaaatatcgataagctggagcct

SEQ ID NO: 676706 - DNA, 460 bp, Homo sapiens
ggagaccggtttatttgttctctattggcccagattcctttcacctggtaaacatcctacctcttcagcaaaggaagtcctctagcagagccctcatggacgctatctgtccccgtggcagcacctgcagtgtggaaggcagtggtgaacggacccatgcactatgtctagaagacacaaggatgagccagcccacctgatcttgttacttacaaacttccaagatatactcgggtttatttttggtctgaaaatggaaaggctcaaataatgaagtaatcttttcatattggagttttacatggccatgaaaatatttcttattctgaagactgaaatagaggaagcttgagagtcttgtctttcaaagcagctctctgtatctgcttgaattaaaagatttgtgggactgaaaatcatttaatcacataggcaacccccactttaaaaagcagccttt

SEQ ID NO: 676707 - DNA, 933 bp, Homo sapiens
ggcgggaagccgggaactgcgccggaaagtcccccggtctggggcccggtgacccagagtaagcctccaagaaggaggaggaggagagaaaggcggctcttcccgtgccccttaccagaggcttcggtgggcccacctttgttggaccctcctgggaccgggccctcagtggaactggcgtccccacgcggggggggcgtcccccgcaccgtgggggggccgggggccccggtgcgtgaccctggatgtcgccgacgcacgcccccgttgggttcccccatagggctgatggaaattccccctggtgtggacggccttcttttcctttagaaacccagagttgccttcgggggttttccaaccgcccctatgtggcctcaggccttggaggcgtttgctgcggagattttgtcacaatggtcatattacccccaccagtggacatacaggcgggcgggaggtgggggttgaccccgccggggtacctgggcacaaggccacccgtggtctggcatgtgggcaatttgccggtttaccacggacaaagcaactcctttgagtgaacatttttcggaacggggtgctcgccttccaaggggaggttccaaaaatacagcggtggaacaactgccagcttgtacatgattacacgcaaaaccaaggccagaccacggccccttggggccatcgtggggacccagaggagtggcgggaacaaacagcgggacttcaacccagaattcatcctgacggccaggcttaacaaacaacaggtgtgcacatcgaggggatgttcgtccagagtggcactaacgggggtgaaaggtctttggacatcagcctagctggtgagatgacccgctaggtgggccaagttctggggcgactgaccaggcgggacactttgccatagagccaattggaactaaagtg

SEQ ID NO: 676708 - DNA, 220 bp, Homo sapiens
cctgtaaacccttgggggcagggcaggggcgggaaaataattggggtgggttaaatcccccctgggggttggccccccccccgggccaaaaaccccccctttgggggcgggggggggggattggggggttccccccccaggggggttttttgggtcccccccccttgtttttttttaaccccccttttttttttaaaatgaaaagttttttgggggggta

SEQ ID NO: 676709 - DNA, 595 bp, Homo sapiens
  misc_feature (81)..(81): n is a, c, g, or t
gccctccccgtcaccaagaagaacgatgacattacctcccttgctagcacgggtgaacgagtccaatgcatgcaggtatgnccaccactgggcttgaagaagttcgagaccctctcttactttcccacctctcaccacagagcaattgctggccgaagtcaactaccttctagtcaagggatggattccttgcttagaatttgaagtcaaagacggatttgtgtaccgtgagcacaacaaatcgccaggatactatgatggtcgctactggactatgtggaagttgcctatgttcgggtgcactgacccagctcaggtggtgaatgaggttgaggaggtcaagaaggcttaccctgatgcttttgttaggatcattgggttcgacaacaaacgtcaagtgcaatgcattagtttcattgcctacaagccttcaggctactaaacttaatttgagaaaatttgtgcattatataattaggctttgttttctgctttcatgttcaaaacttttttccccttgaattttcggatgttttaagtgtatcatgggaatgtcgagcatatttactctatgaataattatattttgtaaaaa

SEQ ID NO: 676710 - DNA, 145 bp, Homo sapiens
tgggctgtccatgtgctgtggttggtctgacacatgggcacttcggtgcatcaacttcacagcaagggcaacatgggcaggggcaggcagtaacagcaaggggtttggcaccagtgcaccaccagcttgcagcacagcagggtca

SEQ ID NO: 676711 - DNA, 892 bp, Homo sapiens
atggctggtggcagatgcctgtcggtggcctagcccgtggtctggacctggggactccccagaatgggccctgagggcgagtgctccggagcgtcggcggaaggcgcacgggatgctgaagctttactacggctctcggaaggggaggcggtgtggagcgccgggggcctgacccctggacccgatgatctgaactggggcgcacttcgacccggaagttcacctagacaagctgcgtagagagtgccctctggcccagtctgatggacagtgagactggacatggtgcggccggaatccgggctctagacagcgaatgcagaccctggtctatgagaactacaacaagttcatctcagccacagacaccatccggcagatgaagcacgatttccggacacctggaggctgagatgtgaccgggctggccaacaaatgcagtgatcaccgacttcggctggctctgcatcagcgccacgctgcaggaccgcacgagcgcatcaccaagctggcaggggtccactgcgctgctgcggaagctgccagtcctctttgagctgccctcgagcctcacaagtgcgtgcacctgtgcgcctatgggcaggcggtgcgcataccagggagccgagcgcagggcacgtggtgcaagtatgaccagacagcttgccatcgttccggagccaatccagggaggagtgccagggtcatacaagcgcccgcgtggccagaagctgggggagcagctaaaggacgggcggacacaggcgcccggacgacgaaaagttcgcgagagcagccgccggccctggggagcatggagcagctgccagactactggcacccagggtcgttgggaagagctagaactggggggtgcgcacccggaccagtt

SEQ ID NO: 676712 - DNA, 226 bp, Homo sapiens
  misc_feature (64)..(65): n is a, c, g, or t
  misc_feature (94)..(94): n is a, c, g, or t
  misc_feature (96)..(96): n is a, c, g, or t
  misc_feature (144)..(144): n is a, c, g, or t
ctctagaggatccttattctcacccaccccggggcctgcgtaagcaccggggctgaatcggcannacaggctctctcatccccgacggggtatnangctctgtggattccaaatggcacatcaggctgcattcctccatgagcnggctcttgagcagtgacaggacataatcaatgtgttaagaagtcagagtcagtgtggaaaatgaggggtgggtggagagcgg

SEQ ID NO: 676713 - DNA, 265 bp, Homo sapiens
agagacaaaggcactatttgcagaaacagtctgacgggcagtccaaactcttgggacggaagtaacttcctggtaaactgtcatgatggctggtcgaggagaaggtcaacaggcggagcgagaggagacagagaatgctacagataatacatcacagtactgagaactgtgtggtcacacagccatgagtatgtcggggcctcctctgtgctcactaaagacacaattctaatatcatcatcatcaacattcttgaagcgccaag

SEQ ID NO: 676714 - DNA, 946 bp, Homo sapiens
  misc_feature (188)..(188): n is a, c, g, or t
  misc_feature (675)..(675): n is a, c, g, or t
  misc_feature (756)..(756): n is a, c, g, or t
gactcatccggtagccatcggacaacagtattttgatttatatatgcatagtatgtacactacttgcagagatacatactttcaatataaagatatgacgtgcacgatagctgacgtcagtttgtaaacttctagaatagagaatcatccggaggaatatcgccctcagtagacatagtaattgctanaattaagttcagcatgcctgatacagacagtgcaaacaaggcttcgcttcacttcgctacaagacgctacacatgattgtggaatcctacctctatttgaatctgcacatcgatatattcttatactacaacatgcacagttgaagtgtgcggcagcacaagaacgtgcctcaacggtctagattctacgctaaagtgcgtgggagactgcagtgaggacgataactccttctgggtctcgcacgcatgcagatctttcccgaccctccgcccaagtgttgtcataacggcctgtaattgccaacactgtctttgacaagcacgtctcccagatcgatcaggcctagggttgagcttcacagaggtgttgcacaatgccacaagaatatgagccaacaatgggccagattatattctctatgaagtatcattctcaaagtaaacaacagaacgggggtcggtattggccaacttcactctgttgtgngtgcaccaagagcagcagagttcgtaccaagacatcgtcgcagtgcgaatccaacatctatttgactgcactgtgcgacgnctagacaacacataaacgacaataatcaccccagacaaagagagagctgtcgtgaaagtcacaaacagagggcgcttcgttgaatagcaccaaaaccagtaggacgtccttaagggcactggaaacaacacttttgtttaaggacgatctgtctttaacacagactacccgcagttcatctgcgatcttc

SEQ ID NO: 676715 - DNA, 287 bp, Homo sapiens
tgtcagctgagcctcctgccctcccccaggaacatgcacgctcactttgcttccttgtgtggtggcctttttttaccgatccccttttttattgttacataccggagccgccacctcctacttcccttcacccagctgggcttcctttgttggagtcaactgttgatgcttccagtccatatttgtttcctctcttcctgcgcccacctttgccattcttatgtattgaatgtactttgtataattttagtgtaattgttattgagaatatataattttacaatcat

SEQ ID NO: 676716 - DNA, 81 bp, Homo sapiens
ggccccgcagcagctccaagaaggaaccaagagaccgagggcgggcgggtcggtctcggctgcttcaccgggttattttat

SEQ ID NO: 676717 - DNA, 140 bp, Homo sapiens
ttttgggcgtcgtgctccagtcatagcccgtgggctctgggttgctgcggacgtcacagctcaaggatggcactcagatacggccagtagtgtaccagtttgtcatcagtagccaggatgatgagacacattcatggagg

SEQ ID NO: 676718 - DNA, 129 bp, Homo sapiens
ctcgcgaacgtgttatccatgcactgggacagactccaggcttctcgtcagtgcctcgcaggatggtaaacttatcatctgggacagctacaccaccaacaaggtccacgccattccctctgcgctcct

SEQ ID NO: 676719 - DNA, 251 bp, Homo sapiens
  misc_feature (5)..(5): n is a, c, g, or t
  misc_feature (24)..(24): n is a, c, g, or t
catgntcatgccgcaaacgcagtncagatatgtaatgacttaagtgcctatcagcagatgagtggattaaaataatgtaatttatatacactctgaaacactatttggccttaaaagacgaaggaaatcttgtcatttgtgacaacacagatgaacttggagggcgttatgttaagtgaaataagccggcacagaaagggaaatagtgaattatctcacttatacatgaaatctaaaaaagttgaacttac

SEQ ID NO: 676720 - DNA, 716 bp, Homo sapiens
cactttcctcatcctttaaagtgaaatctgactttgcaaaagacattggagccaagttgggtaaacatcttggcagggacatgcttgtgttggtcagaaatgagatgaggccggccgcggtggctcacgcctgtaatcccagcactctgggaggctgaggcgggcagatcacctgaggtcaggaattcgagaccagcctggcaacatggcaaaaccccatctccactaaaaatacaaaaacttagccgggtgtggtggcgtgcacctgtaatcccagctactcaggaggctgaggcaggagaatcgctggcaatcccaggaggtggaggtggcagtgagccaggatcgcactactgcacttcagcctgagcaacagagcaagactctgtctcaaaaaaaaaatcaaaaaaaaaaaaaaaaaaaaaaaaaaactgttggggggcggcgcacagggcccccagagaaaaaaggttttcaaagcaccacttcgggtggggggcgggggcgccccaggagggttaactgaggacactggggacacagggtggcccaaggggaagaccccggccactaacgtagggggtgggtttctccccaaaaaaaaaaccggcgggccggaacccgctgtcttgaagacaaccccaggagggggccgggggccaacggggtcctaccaggggggccagcggagcagaataaatacacggcgcagaggc

SEQ ID NO: 676721 - DNA, 524 bp, Homo sapiens
ttgcattgatctacgacatgttctcacaccccatgagacatgagctcagccaggtcaattgcaatgtaagtccaaggcacatgtgcgaacagaatgatcttggtggtcgaataccaagtgtcacgcatgtgcatctcagtgaagtatataaacaaggtggcacgggctcaaaaagcccgtctcatgaatggtataataagggcagtgttctggaccacttgaaaatgcgcgtggtctaccagttagaaatccgttatatacattctcccagtccacagtctcccaaatgaagcagcacatctacacagtccgagtgaagcccaaccggctggagttgtttaaggtacggtttccaacctgataaactgtttaacagtgcttgatctatccaaatcaatataatacttggcgcatagggcaatggaccttttaaaaggctctgagattcttcattaacacaaaggcaacacatgttgaagaacaccaggaacagttatatcctaataaaaaaatgcctacttaca

SEQ ID NO: 676722 - DNA, 126 bp, Homo sapiens
ttgcagacgcttgcgcacactgcacacacatacacacacatgcacacacacatatacacgagagactacacactactactatacacacccagtggcacagacacacagcaaaaccatctcagcatc

SEQ ID NO: 676723 - DNA, 279 bp, Homo sapiens
aaatggggagaaagtcccccaaatgggggcccccggccccccctcccaatttattccctaacctgcaaacctttccaacttttcacgtcgggcctttgagaattctttccccctttcctggtttccccccctcagacccgccccgttcccccagtcccttttgtagtccccttaatttaaaaggagcccctgctcccccggaggggacccggaattttgccctgtttcccccccgcctgtgctttaaacccctttcccttattaatggtttttaatcca

SEQ ID NO: 676724 - DNA, 412 bp, Homo sapiens
aagtctattctcatagacagcttgacgttgcatggctgagtcatttgtcagagtgctctggctttaaatatacctccaagtcttaagacacatgaacttttgaggtgcaggaatcagcaattttaaaaggcacaagtcttccatccaaggtcctgggcgccctgtagatgctgttcgaacggcgatatgtgctaatgttatatgctaaaccccacaccagcgtcctccccaacagcagcgtggcggaggcattccgcatgaacggggagccctggcgtccggtggtggtttgtttcaagtcataattgcaaacgcgctctacagctcctgcgtcaagtgttggtgtttggaacgtcccgtattggcgcgtacagagcagttaaggtgcatgagcgcggcccaggaaacggtg

SEQ ID NO: 676725 - DNA, 458 bp, Homo sapiens
ccccagactcacgggaaacttaaaagccggttcacgggctgggctggcccttcctaagcctgagggcctggcacccttttccaaagcagaaaaagaaaaaaatccaaaagtgcagaagagaagaaccagcccttcaggaaggaagaacgactgggcctttccgcccaccttccgcagctcaaccctgtccggcacgctttgcatatgatgtggctgtcatcttatgtctggcctgtgctgtcacccaccgggatgtccacccacaagggcagggcctggtctaggctgttcctaacagccacgtgggtcagggaagcgttcgttggctttgggcccaagaggtggggtgtgtctgtttgcgtgtgtgtgcatatatgtgtgtctgtgggtgcatgtttgcatgcatgtgcatgtatgtgtgtgcatgtacgtgtctgtgtgcatgtgcctgcatgcat

SEQ ID NO: 676726 - DNA, 472 bp, Homo sapiens
  misc_feature (1)..(1): n is a, c, g, or t
ntctgggaaactgcaactttaaatgaaaggctgtatagtaggtcctcccagtaaccattttcttcaccatccatttcattatgatgttgatgaaaaaaggaattggttttgttttatgttgttttgtttaaagtcacagtttccaagaacctgtccatggtactgaggacttaactgtagtaatatttaaaactgcatagtgtaacttttgaattttccaggcttttattacatctttgtcttgttaatgatgcagcaaattcaggaaaacttattacagcaggttaattcactttgttcaacatttgatctcagagttttagtccaccaagttgaggcatttctctcaaatggattgatttgagacttccaggaagaaatagtgtctggttagtagttcctaaaatggcttctgatgaatttccgctgaaggagcagtggagtacatgccagtacgaaggcaagtagaaag

SEQ ID NO: 676727 - DNA, 427 bp, Homo sapiens
  misc_feature (29)..(29): n is a, c, g, or t
tcaacacgctacttcctaacatgctgatngcactttttccaatatagaaaaaaaagacttttataaaaattgaaatacattaagtcctcacataatgttgtcaataggttcttggtactgaggacttaactgtagtaatatttaaaactgcatagtgtaacttttgaattttccaggcttttattacatctttgtcttgttaatgatgcagcaaattcaggaaaacttattacagcaggttaattcactttgttcaacatttgatctcagagttttagtccaccaagttgaggcatttctctcaaatggattgatttgagacttccaggaagaaatagtgtctggttagtagttcctaaaatggcttctgatgaatttccgctgaaggagcagtggagtacatgccagtacgaaggcaagtagaaag

SEQ ID NO: 676728 - DNA, 124 bp, Homo sapiens
ctacagcagcagacctagaacacttgcgaacaattgagaaggttatctagcactactacatgaagtgaatgttcctagacagaatgtttgactaactacagtgtcattagatccacaatgtagt

SEQ ID NO: 676729 - DNA, 859 bp, Homo sapiens
gcggacgcgtgggtcgacccacgcgtcgactgtttagccaagatcaacaagcaacctatttaggtgtgccccaaaccttttcctccgaccccactaacaacccccctcctaatactaactacctgacgtcctaccccgtcacatactcatggcaacagccaatcgccacttatgccttaggtagaacccactaatcacgcgacattagaaaactctgacgcgtgctgctatgatactaaagtactgctccgtgacaagatcttcccgttgaataaatgaacgatgtcacgagccactatgaatctaactcatgagttgtctatatgcattcttgctgaaaaccagcgactgtgataccccgacgctgtggtgctaagtgcattcacctcgatagagcgcaaaccacgccatgacaccgcctcgaagctgctaaggcaccattcacctttgcctaatatctaacgaccccctagtacagtgcgtcccgttctccccttactgcatctggcgactaaagttctaccatctacgacgaagctagcccttcagagctccactcataaccattctgtactacttcacgtctccacatggcgcccaagggaactgatcaagatctccttgaggccagactatacttacagtactgaacgtaagcctttaccacaagagtatgcctctattattaagctctacaacgaaataatccgtcgtattaaccggatcctcacaggctatatgcacactccgcggtaacaggcgcccaatgatcggcaaaagcccccacaatgcggcctgggggtccaacctaagattacgtatggcccggcaaggttacttcctttaaaagtcgtagggc

SEQ ID NO: 676730 - DNA, 514 bp, Homo sapiens
aggatcccctcgtcttttgataggctattgggagagtgcctttccctgatgccggctgtcaccaagtattattttagagagacagttaacaaccacctgaccatcacctgatggttgcctgacattcctggtgtgtgttgaggtggaaccatctgtcctgcctattcctgactagctacctactgtaacaaaaaagacaatgtattacttattaagaattctcaactgggcatggtgtcacgcctgtaatcccagcactttgggaggctgagacgaacagatcacattaggtccggaattcaagaccagcctggccaacatggtgaaaccccatctctaccaaaactacaaacgtagccaggcgtggcggtgtgtgcctgtaatctcagttactagggaggctgaagtaggagaattgcttgaacccaggaggtggaggttgcagtgagccgagatcttgccactgcactccagccagggtggcagaatgagactccctctcaaagaaaaagaa

SEQ ID NO: 676731 - DNA, 335 bp, Homo sapiens
catttgtaaccctctgagataccccatcatcatgagcaggcacgtctgtgtgcagatggccgccatctcctgggtgacaggctgtctgactgctctgctggtaactagttgtgccctgcagatccccctctgtgggaatgtcatcgaccatttcacatgtgaaatccttgcagtgctaaaactagcttgtgtgagttccctgctcgtggacatggttatgctggtggtcagtattctcctgctgcccatcccaatgcttttgatttgcatctcgtatggcttcatcctttctacaattctgaggatcggctcaacagagggaagaaacaaagctt

SEQ ID NO: 676732 - DNA, 244 bp, Homo sapiens
agctctctctctctctctcgtgggctctcagagaccagcctgggcgacagagcgagaccccgtctcaaaaaaaaaagggtgccctcttagattatggggaagttcattgggggggaccccatacagtttttttcacaggcctgccatggtgacccatgcctgtttccccagcttttggggaggccagggcatgagggttgcttgcgctcgggaattaaagaccagttggccgcctgggcaacat

SEQ ID NO: 676733 - DNA, 213 bp, Homo sapiens
tctagagtatccctacactttgattggttcagccctaaatccaatatccaataccagcctctctcttgagagtttaacggtatgacaggagtggctcacgtagcaaattaacaaatgaagtactctgacttaacatatctgtttctttcggatacttcatcagggttgcgactggagacaaaccggtaccgatgctcgaatcctgctaatcgt

SEQ ID NO: 676734 - DNA, 380 bp, Homo sapiens
ggacacggcgaggcattcattgtgaggtctactggatgagggccatagttgagacttggagacattgatgcatactgtgccatgtgccataatttatacatataatgtctcgttgactgtataccttgtggttgaagaaatgtaatcgtgaaaggaagagcagatggtatttattgggaggcctgttgcttgtaaagtataagctattgtcacttgtaaaccattgaaggccattacttactatatactgactcatttgtatgacttgatttcactggtagactctgttccactttcaaccttgcatgtcagattctgccatgagtatttatcggattctctgatgcctgagactgtacatacagtgaccatgtgttggt

SEQ ID NO: 676735 - DNA, 632 bp, Homo sapiens
tcatttccaacctacaatgactattgaagggcaggccgctcgtgtgggcccatcaagttattcccattctcataaattcctagatgcggcacattcccccagttgagtagccaagacgattgccctcaaaggacatggtgctgtatagaaccggtaaatgactttctcgtactagagcgcacagagagttacgcatgcacactaaggaagtcgttcagatgtcatctcaatggtcactgttcgtaagtccatcttggacctataatagttatgtgcccatatcagatagtttggtataacgattaggtaaatgtcatatcctatcggactgggcgttttgcaccttgaggtgggctgtaccatatcctacgagtgacagatgattgttcctcaagtacttgcatctgtgcagtgcatattccttagtgtcagtacctcaaggtctgtctgtcacgttcatgggttgatcgttaaggcacttaattccatgtgtttcagctcatagtacagtcctcatttcctatgacaacatagttatgatactgtagtagcgatctgtaggttcatgcgaatagcatgtcctatgacgccctatttcagtaggttcagagtttcagttcttcttggtaaac

SEQ ID NO: 676736 - DNA, 381 bp, Homo sapiens
aaagttcaattaaaatggtttacttaggtcagctttcccattttacagataacaaaactgaggcccaaaaacaaggctaacatacccaaattttcacttgtgtatcagatatttaaagctgggaaaggccttaaactatcaaaggttgaagtgttacatcacaaaattattggcagtgctggacccaaaactcagatctgaaaaatacccttcactgtgagccatgcagaaccattatgaccagactttgatattaagtgaatttgtcctatgtgtatgatactacctaatattgctgtactctaagttcttttaataagtttttaaattatctttcatttatagattctgtcaccactttaaaaaaaaagttggcggccg

SEQ ID NO: 676737 - DNA, 193 bp, Homo sapiens
cggggtacttagccaggcatggtgttacgcatctgtggccccagctattttggaggctgaggttgaaggatcacttgggcccattaggcagaggttgcggtgagctaagatcgtaccattgcactccagcctgggtgacggagtaagactccatcttaaatacaaaaaaagaaaatataaaacaaaaacatgt

SEQ ID NO: 676738 - DNA, 882 bp, Homo sapiens
  misc_feature (869)..(869): n is a, c, g, or t
agctttatcaactgaagagtccatttaacagcataattgtgggaagactggaatagggctgaataaatgtgttgaatctctaattttatactttcttttcctgaggaacttgatttttctggtccctggatcgccttgtcaaaatggggtctgttccttttactaccactctttgagtccatatatgaaatcattaaagtgggatgatcagttttttataaaaatatatattttggtccaagaaaaaaaaagggcatacatatgtgattattggtaaatcaaaggtaacgggaatgtatatacttggctaagggttccagcaacagtgcttattatactatccaaatttttatgggtacacaaaacctctttaagcaatgggtgatgcgccatgggacttttcccagtgtcttctgctgtaattatcctgtgcagaacctaggaagaacatctcttttcaggactgctctatggtttccttaacaagaaaaaaattcgtgtgggtttcaagcagtcattatttacaattggcggtgattaacttggaaggcttcctttccggtttatcccctgtaagccattcactttacagtcagggaaccggtccggacaaaatatgaattcaatccctccctggcgtgtctgcaaggggtaacatccattaacaccctttaagttaaatataagtggtgcaccttcactgcggctttagacttaacacagacatcgcacggggtagctgatacccgccgtgagcaatggtccatagggggtaaattatgtgcggaccgggcgcacactatgcgatcggcagggaaatggacggttgtcgggttctgatgccgaacgcaggggacattgtccgggcnttccacaaatgtt

SEQ ID NO: 676739 - DNA, 200 bp, Homo sapiens
ctcggtcctcatatctctctttttttgtctgaggagaatctggttcaacgcttcactttacatactgcttgtgatagggaagcaatggaggagatgctccaccagttgttggctgcaatttagcaagggccacttggcacaaatttaatggctccatacaccctccagaggcgcctttttgtcccagattctattccaag

SEQ ID NO: 676740 - DNA, 119 bp, Homo sapiens
gcctccaggattctgttcggcagcctgcctgattcttaggggagagcagagacccatgttctgaacatagaaggagggtggtgggaagagtacgaggaggaggagcaaggaagaagaca

SEQ ID NO: 676741 - DNA, 298 bp, Homo sapiens
atccccgctcagccaatggtagatgcttcagtgaggcttctggatgagaatggctgctactactagggctatgtggctgattgaagagtatgctatgagcgatttcagcgtctgtttgtctgtaggccgcatagagcttgttattaacttatgcctcatagggtatagtacaaggtaaggggtaggctattgtgtgttgtcatgggggttgagaatgcagtgtgaggcgtattataccatatccgcctagttttaagagtactgcggcgtgttctattgaccccgcgtactgggggct

SEQ ID NO: 676742 - DNA, 254 bp, Homo sapiens
ggattccctttctttccttttattttaaaaaagaacaggacccctcttttaagatgctgtcttacattaatgagcctctaatggaaagaaggtatgagttgccctgaggattagaatagtggtgcgttagtggccttatctataaataccctccccttaattgaaagctaagaagggaatgttaatataatatatatttatatttgatgtaatatgggcatctgcagattttaataaacaagggctattgctga

SEQ ID NO: 676743 - DNA, 150 bp, Homo sapiens
gctcttgcttctttctacgtgaatgaccgtcatatggtaaattaacctaatcatgaccagatgacctttgggcaattactaaccaccaaaaaaaaaggttatcctcttcttctgagtagagactctccctaaggtttttatttcgatggg

SEQ ID NO: 676744 - DNA, 548 bp, Homo sapiens
  misc_feature (56)..(57): n is a, c, g, or t
  misc_feature (170)..(170): n is a, c, g, or t
  misc_feature (483)..(483): n is a, c, g, or t
  misc_feature (542)..(542): n is a, c, g, or t
aaggggggctgtggttcttatggctgctcccagtccagctgctgcaagccctgctnntgctcctcaggctgtgggtcatcctgctgccagtccagctgctgtaagccttactgctgccagtccagctgctgtaagccctactgctgccagtccagctgctgtaagccctntagctgcttctcaggctgtggatcatcctgctgccaatccagctgctacaagccctgctgctgccagtccagctgctgtgtccccgtgtgctgccagtgtaagatctgaggctctgactgcagactgcaggtggcctgactggtgaagggcccggctgcccagcttccttgccctgggttctctggtgctccactgtctccactgtgtcctcactggcttcatccactccacaccagtgctcccgaaactgactgaggaccccttctggctcattgcctactacttctcctgaacttcctctccctgctcctnactcatttaagatcaaagcggccactgaggcccagagcagatagacccttagacctganagtggt

SEQ ID NO: 676745 - DNA, 294 bp, Homo sapiens
agaatcgagctcggaccccccgactaggccgacagcatatagaattccttattgacgtacttacttgcctgattggacatttgcctggagctcatgtctgagaccgtctggtccgccccaggacctgcacattctcccagtgtctggagtaggcccagaaacagcaggagagtcttcatcatgcctccaattctggagtcttggcaggcctcggtcagcgggaccctgtgtccgtgccgctgccttcctggggacgaccgccgcagtcggggtaggtcggggggggatcctcta

SEQ ID NO: 676746 - DNA, 219 bp, Homo sapiens
  misc_feature (84)..(84): n is a, c, g, or t
gtatctaggatccacggaaggtgagcacatggcatgaaggctgtacatgacacggaaggtgtacatggcatgaaggtgggcatnggcacaaaaggttgggcattggcacaaaaggctgtacatgagcacggagggctgaacatgggcatagaaagttggatacatgggcacggaaggctcatacacggccaaagaaggctagtcacatggccactcaat

SEQ ID NO: 676747 - DNA, 407 bp, Homo sapiens
ggcccggggaatttgggggggtttatggggggcaaatgggcccccggggattcggaggttttttaaggggaaacgccccttttggggcacccgaggggcaggcctattgggcccccaggaccaaagggggtggcccccaaaaggggggggccggggcccgccccagccccgggccttcccgggccgcccccggggcttggccctgggggggggtttttttccgttttccccgattttaaagggggggtttggaccaattcctttatttccgcccgggggggaggccttaaagccccctttggccccgtttttccgccccttaaccccggccccgggggggggggggggggttttttgggccccggggttttttttaacccgcccggggaccccccggggccccggga

SEQ ID NO: 676748 - DNA, 935 bp, Homo sapiens
gttgtccggtatgtgctgggtgaagcgggatcgcgcaggtctgcatgaggatctcggcagcctgagcgggaggtgcgagcaaagaatggtcgagttggattctgaggaccggagtgagcctgtctcactggctccgtaccatggatgactcattgaactagtggagtggtgctggtagctttggacttttgagtaaagcatgtgttcgtatcattcccatctcactacagtcaatgcattgatgcctgctcatgcgtgtgtggccaagatagctttcaaggaccggggttggaaggtctcacgcctacattcactagtgtccagtttaggcaccatgttttgctctaatctccacacacctctaagttaatactggcttccatgacaatactatgagatcatcgattccctcattggaggatatcacgtatgtgttgaagcccactttgcacaaacgcagcacaattgggcatactgtggacaatgcgaagcccatcattgtcccgggcatatcgatggtaccagttatctgccgggtatagggggactgaataacataaaggccagtgattatgccgacgcggtcttcaggctctatctaatgttgctcgtctccggaactactttcgtgaggacgagcaattatagaaccatcaaatgtctccaggggatattcatgtgcttgttggggcaaggcgtctgggagagctgatgagcaaccgcttggcaatccgtcgacatgtccaggccatgtgttttcgccatgagatggttcgggcgatggcactttggagttagagagactttagatcccaaccaggggtgggccgagttctcgcttgagcgaatggctggccagtctgggggcgcgacaaaaatcaaacttttccacgttcccggtcgtgcagtctcaaagtccactgtcgggaaaactg

SEQ ID NO: 676749 - DNA, 99 bp, Homo sapiens
aacccccccccccccccccccccccccttttttggggggggggtttcccgggcccccccttttctttccctttcaattaacccccccccttggtgggga

SEQ ID NO: 676750 - DNA, 284 bp, Homo sapiens
gggggaaccccttgggggggggtgggccccctttggggttttttctctttttggggggggggggggagaaggggaaaaatttgaatcccgttaaattttttttaaacggttttttagggggccggtttttggaaaaacccggccccctttttttttttggttttgggaaaaaatttttttgttggggggaaattttgggggggggggggggggggggggggttttttttttttttttttttcttttggggggggggaaaaaaatgggcccccttttttttgtta

SEQ ID NO: 676751 - DNA, 1302 bp, Homo sapiens
tccagcggcccctcggctaccctcgtgtccagggccgcgagcggcctgccctgcaccatctggctgtccctgactgcctggcctgtggccgcggtgctgcatgcccgctggtgctctgctgtatgtgctgcctgacctgcgtccctgagacactgttcgcctctatttgggcgctcctgtgcttagtgatgtgctgcctgccatgccatgcacgtggtgcccatgctgtgatgcccactggaatggcgtaggcacctgtgatgtgaatgccttgtgttgctttgccctgtgctgctatccacgcaagtcgaagccacttactcattcagctcggaaggcgccaaagtcacaccataactcatgactgacaggtgcgtggctcgtccctgattggggcaaaaacccgtgaggtgtgatcccttggctcatgacactgaattcgctttgtgactgcgacggcgtggcgaaaccgtgtgtacctgaatgcaactgccaccgacattgacaagcctgtgctttggtgaaactgcccctttatgctacagcgccccatgagaacactgcgccaatgtggttctgggccatgacaactttccaaacagggaaccggactttgaaccttttcctgaccaaccgtggaacttccttccaaggaacgcccttcgcggggctggcctgtgtgcctaaaccgtcgcctcgtgtgacgttggtgatccaacgccaagagacggttcccaactgcacacccatggaccccccttcaagtgtgccccttcaatttccaattggtgaccgacgtgcacacggcgttcgactttccacaccccttttcgacgcactccctatatgcccctgggcccccaattccccggtggagacacccatggacttcctattccctgctggaacggctttggcacgcggttccctttgccaccagggacaacttctccaaacctttccggcccgataacaaattcggataggggccatttccataaccggggtggcccctatcctaaccatggtgaaaccttgtcggcaggacatcaacggcatatattggccatttgcgacaaccaaccactttgtcgcattgtgcccggcgcttcccccttggtgaacccacgctgttgccttagaaacaacaacgtggcccaaagcaagggcaacttccccctgaacgggacagacttccctgtggagggcaacacgttcacagcacttccgtccgtcgttcctccccagagtggcttttgagataggtaaaccttcctgaccaacgcaaactgacaccctcct

SEQ ID NO: 676752 - DNA, 142 bp, Homo sapiens
tcatagatggagtgacatgtctgttatttcacttaaagcgctaatcagagggagtgtggtcctcagagtgagagaaagagatagagggagaggagggaggaggaagaagaggaaggaggagcaagaagagaaggtgcacgca

SEQ ID NO: 676753 - DNA, 684 bp, Homo sapiens
ggagacaacaaggaccacgggaggaggtgtgggagagaagcgccggagcagcgatcgcccaggaccaagtccgtgtccaggcgttacggtctcttggcctccatctttgggtgcgccttccgggctgtctagggcgagcgaaggctgatggtgtcctagcgagccagggagagtccaggccgcgatagggagggaatctccctcgactgaaaaggattctgacaacgaaaatgaagtcaggccctcatgaacatgagagtgtggattgcctgcgtgggttattacggtgtagacctagtcgcggggagcttggtaagttcgcaaggaaccctttgatggaggcttctcttagtctaaagagtagaggatgtcgtgctggaagtcattcgagtcaagggttgaaagaaagtcactttgattaccaggattgagaagggagattgctgctcattgtttgttgacccggtatgttttgcttagttagatgttgggttccaagtgtaaagtgtcaggggacccttcgtgggaataatttaaagggggcacaaggaaggataaagctggttggtgtctgggaaactttgggtttgaaactgggtctacagaagtgacggcgattttgaccctggttcaaaccggtatctttgaaaggattggtccaggaacaacgtttggtggatgacc

SEQ ID NO: 676754 - DNA, 533 bp, Homo sapiens
  misc_feature (191)..(191): n is a, c, g, or t
  misc_feature (202)..(202): n is a, c, g, or t
  misc_feature (234)..(234): n is a, c, g, or t
  misc_feature (266)..(266): n is a, c, g, or t
  misc_feature (481)..(481): n is a, c, g, or t
  misc_feature (515)..(515): n is a, c, g, or t
tattcctaaatgtatactcccccgaaaattcccttctaactttttcattccattatttaacatttaacacctattctgtgcctggcatggtgctagattcctgccctatagcagttacatcttgggaggaagacaggggaccatggctgccgttactgtttgatcagtgtcagcctttgctagtgcaactnacaggcacccnactcagggtggttgcagagagctgagatgaanagttcagtgcaggtttccaggaaataaatctnaaactgcactttgaaagaagagggaagccaggtgcgggggctcatgcctgtaatcccagcactttgggaggccgaggcgggcggatcacctgaggtcgggagttcgagaccagcctgaccaacatggagaaatcctgtctctactaaaaatgcttagccaggcatggtggtgcatgcctgtaatctcagctactcgggaggctgaggcaggagtnacttcccgggaggtggagattgcagtgagctganattgggccattgcacttc

SEQ ID NO: 676755 - DNA, 1039 bp, Homo sapiens
  misc_feature (672)..(672): n is a, c, g, or t
  misc_feature (680)..(680): n is a, c, g, or t
  misc_feature (682)..(682): n is a, c, g, or t
  misc_feature (686)..(687): n is a, c, g, or t
  misc_feature (690)..(690): n is a, c, g, or t
  misc_feature (698)..(698): n is a, c, g, or t
  misc_feature (711)..(711): n is a, c, g, or t
  misc_feature (715)..(715): n is a, c, g, or t
  misc_feature (722)..(722): n is a, c, g, or t
  misc_feature (735)..(736): n is a, c, g, or t
  misc_feature (739)..(739): n is a, c, g, or t
  misc_feature (744)..(744): n is a, c, g, or t
  misc_feature (756)..(756): n is a, c, g, or t
  misc_feature (759)..(759): n is a, c, g, or t
  misc_feature (761)..(761): n is a, c, g, or t
  misc_feature (765)..(765): n is a, c, g, or t
  misc_feature (768)..(768): n is a, c, g, or t
  misc_feature (771)..(771): n is a, c, g, or t
  misc_feature (773)..(773): n is a, c, g, or t
  misc_feature (781)..(781): n is a, c, g, or t
  misc_feature (811)..(811): n is a, c, g, or t
  misc_feature (814)..(814): n is a, c, g, or t
  misc_feature (819)..(819): n is a, c, g, or t
  misc_feature (858)..(858): n is a, c, g, or t
  misc_feature (954)..(954): n is a, c, g, or t
  misc_feature (1009)..(1009): n is a, c, g, or t
tttgtaatgcctttctgcaagacccttcaccggtgaccgcatgaaaattgttccacacctggaggttagccttgaatccgaatctcggggattcctgcagttgcatcacggcatgaacggttcggtgcagtcaagtaccccgactgtcccagtgtaagcatgcacaatcgcagttctgtactcgccaccgtaacagtcatcgcgtgtgaggaaccaggatcatactcagcggcatgcattctttcatagcacgatacactgcgcactgtgggcaaacatcttcaccctcgcttggaccaagttgtagaaggcggttaccagtcatccatgtcgaacgcaggtagctcatccagtagtcacgttccgccttgaagacctgggcactcctgaggtcttgggattgcgtctggtgaggtctatttcacccaccgtttgacagggtcagtcaattcacggggacagtgctagaggctgcgtcatcatgaagaccctaccgcctttgagtgagaatccctgctgcccacagtggagcttgccatccagagaacacgggacgatttctggaccagttgggcacactcgctggagattctgacagactgttgatgatcggagaagaagatccgcgactcaggacaggaacacgaggcggatggaggcgtcttgccaacncggccccngncttnngtnaccagccnatcagcacacggntccnactgagnatctcagaagatnnggnccgcntctcctccatcntcngncaangtncanangcgagggnacagcccagcgccatcctgaggatcggtgnggntgagnggggcttccaggtggcccttcccggcacacattccattngttgagccacagtcctgccccccaccccaccctccctacccctccccagtctctggggtcaggaagaaaccttattttagttgtgttttgtttttntatagagccccaggcaggctagtaaacaagttttttacaatcgaagagggccaancaagtcagtgctagttgctcagttttttct

SEQ ID NO: 676756 - DNA, 607 bp, Homo sapiens
ggcgcagaagtgtttctctcctcatcgtcggcggccccataacccctgtctgctctgccccaggagcaccctccgtccttctgtcgtgtgaagcgaccccccccttcctgattgagagaaccccccctgcaatgtttggctagaatcatttggtcggcggcggtaggctggcctccagccgtccttagttgttcgtcctgcgtggaagaaaggtgattctccttccaggggtgggcccacccaccagctggtctcctatgaggcgcccgctctccatcactatcttcacccgctcacaacaattgtgcgcgcacaccctctccgccataccccctctcttctgggctgcataccgcgctcctacacacacttttctcttccccgacacccgtcttataatcttcgcttctctcaccgccccccacacactcacactgtgtgctaataaaatcctctgctctctatacattgcaatacgcccctatctattatctcctgagaggctttcttagcgcacccctcactagtttctccccataatattactccgggccccccacatatatgcgcgtcttttctcccgcccatcaaattaaaacaaaaataa

SEQ ID NO: 676757 - DNA, 207 bp, Homo sapiens
agacaatattaagataaatatcatcacaatcataatctcagtaatcaggacacaaacacgcggaaggcgcaggtcctctgcctaggaaaaccagagaccttggttcacttgtatatctgcgtgaccttccctccactatgtcccatgaccctgccaaatccccctctgtgagaatcacccaagaattatcaataaaaaaataaatta

SEQ ID NO: 676758 - DNA, 339 bp, Homo sapiens
  misc_feature (115)..(115): n is a, c, g, or t
tcccccccagccctgcctgcctgtggttttggccagggagcaaaccattaggggccctggcacatgcccaaattgatcctttgggtgacagttttgtatggaaaacagatgctgncagaattgtagacttccatgccacacaaaaaggctaaatatttactccaatgggtttccagttcagtttgaagtcaatcaaatttttggattttcggggtccccctgattggttttgctaggaattctgtaaattggacatttgcaaaatgggggttttttttccttttggacaatttgaaactgatgcttcccctttcctttaataaactattcaaaatcaga

SEQ ID NO: 676759 - DNA, 283 bp, Homo sapiens
  misc_feature (25)..(25): n is a, c, g, or t
  misc_feature (27)..(27): n is a, c, g, or t
  misc_feature (29)..(29): n is a, c, g, or t
  misc_feature (57)..(57): n is a, c, g, or t
  misc_feature (67)..(67): n is a, c, g, or t
  misc_feature (159)..(159): n is a, c, g, or t
  misc_feature (161)..(163): n is a, c, g, or t
  misc_feature (166)..(167): n is a, c, g, or t
  misc_feature (170)..(171): n is a, c, g, or t
  misc_feature (173)..(173): n is a, c, g, or t
  misc_feature (194)..(194): n is a, c, g, or t
  misc_feature (208)..(208): n is a, c, g, or t
  misc_feature (237)..(237): n is a, c, g, or t
cctgggtctagccagcctgggctgnangngtcaccgtggcttctctggcctccaggntccccctgcnccctcctggctctcctggtgaacaaggtccctctggagcctctggtcctgctggtccccgaggtcccctggctctgctggtgctcctggcanannnggnntcnncngtctcctggctctttttggcnccctggtccgggcncccgccactggtgatgctatcctgttgtnccccccgtctacctgggactcctgtcccctgtctcgagccgttccg

SEQ ID NO: 676760 - DNA, 404 bp, Homo sapiens
cttttttttgtttaaaaaaagaaaaaaaacttttaaaaaatggggttataaaaggtcccccaagggggggtttaaaatttttgggggggttaagtgggccttttcacaacagggtttttcctttgggattttttattttgatttttgcccaacccccctgcggtttaaaaggccccttttaaaaaaatttttttcccaaaaatggcttgggccccgccccccaatggggggaatccccggcccctttgggtttttttttggaattgcccttttttattggaattttgttcccgtttttttttaaattttttttttttttcccgggaaaggaaaaattttgctccttttttaccttttaaagtggccaagttttttttttccaataaaattaaatttgtccccca

SEQ ID NO: 676761 - DNA, 312 bp, Homo sapiens
tccataactgtgccatcaacagatgaatgcatacagcaagtgtggtatgcacacaagggagtactattcagccatataaaggaacgagatacagtcattgcaacaacacagaatgaacgggagatcatggtgttaagtgaaataagtcaggcacagaaagtcacacagggcatattctcactaatctgtgggatctagaaataaaaatgatagaactcacggagatagagagtacagggatggttaccagaggctgggaaaggtagtgtcgggggaggaaataagggtggttaatgggcacacattatggag

SEQ ID NO: 676762 - DNA, 187 bp, Homo sapiens
accgctgatcgcttaaggaaatagggctcacaattaaggagtaagtaggtgttttatttaagactaggtaatactcttcatttatttatttatttattttgagaccagtctctgtagcccaggctggagtacagtggtgcaatcatggctcactgcagccttgacctcccaggcttaagcggatcag

SEQ ID NO: 676763 - DNA, 361 bp, Homo sapiens
cagagtccaaacagtgcccagagtccaaacagtgcccagagtccaaacagggcccacagtccaaacgggccttactttatcaaaggtttaagaaggacatatgggtcttatatgacaaactgtttccttcattttaacaaatttccaataatcctgtcaaccatatttctaaattttcccccgaattctaagcagagtctgtaaatcgcaagttaacttatgcacgcttaactatcttaacaagctttgagtgcaatagatcgaaaagttcaaatctgaccaagatgttgatgttggataaaacaattctttgctccccacctttaagttgccagccctgctacagctacctgtggagcaa

SEQ ID NO: 676764 - DNA, 151 bp, Homo sapiens
  misc_feature (11)..(11): n is a, c, g, or t
  misc_feature (92)..(92): n is a, c, g, or t
  misc_feature (97)..(97): n is a, c, g, or t
ggggtgcaggnatttggacgagatttaaacccaaaacaaaaaaaatctacagtttgtcacataatcagtgacaaaaaacactaataacagtngtttntctaaatcacgcactaatacatttttttttaatctcgaagggcaagttatgtga

SEQ ID NO: 676765 - DNA, 219 bp, Homo sapiens
ccgggggaaccccctttttttttaaaaaaaccaaaaattttttgggggccaggggccggggccgtttgttcccccttttccggggggggggggcggggaatggggtcccccccggggggggggggttccttttaccccggtttttgggccccccccccccctggggggccgggggggaccccctttcccaaaaatttaaattttgaaatttaaaaagga

SEQ ID NO: 676766 - DNA, 201 bp, Homo sapiens
taatgtgtggtgttatgaatcgacataatcggaaagatatacccaaaggcatctaacgggcatgatttcatcctcgtcgcgattgactatttcaccaaatgggtaaaagctcagtcatacgcggttctgaaagcaacacatgttgcaaagttcattccgaataacattatgtgctggtacggaatcccgcactccatcaca

SEQ ID NO: 676767 - DNA, 128 bp, Homo sapiens
gtatgttatccccaacactgttattttcggtttttgtttgttgtttttaataatagccagtatgaagtggtatctcattgtgattttgatgttcatttacaaataattagtggtgtgggcgataacat

SEQ ID NO: 676768 - DNA, 659 bp, Homo sapiens
acacgccacgagcccgcgggatcctcgtgagagtatgtgaacccttcccctccgctctcagccggagtgccagctgctgtccagcctgtgtgcgctggtcttctgaacacctgatttcaaatcatgtgtccccgtgtggcccagctgtcacttagtgtgaatgtggtgtgcatttttgtggttgcttgctaaatcactggagatgcagccttgtgcgctgcctggtcccaacttgatccaatggagccttgagaaggagatgatgattcatgtaccatgtggtgcctggcctgtggctcccatcctccgtgaatctgcaaaatggctacttcttcagaaataatggtggagatgggatggcaatgagtgccatgagatcaatggccctcgagtattaacttgagcatttgggcacaaaatagacactttttggattttcccgtcttattccaacaccaatggatgagattatcaaaatgatgtgttaaattaattttgtaccggccgggctgcggtggcttactgcctgtaaatcccaacactttgggaggcctgaggcggtcgaatcacaaggtcatgagttcgaaaccagcctggccaatatggtgaaacccccgtctctactaaaaatacagaaattagccgggagtggtggccga

SEQ ID NO: 676769 - DNA, 109 bp, Homo sapiens
ccgagctcggcacccaggtgggcgcatgcgtcgactccactgacctggcagtcggtatcgagcgggtacgtgacgccaactaagccaccatgaagcgctggcacgagcg

SEQ ID NO: 676770 - DNA, 283 bp, Homo sapiens
gtagccctcttactggccaacatcaacacccagctgtcgggcatagccaatgctttccggacagtgcgccagctcaacgacctagccagctactttaaaggcatccaggcgcatgtcatctaccagatgccctccaccgccatttcttggtctacttatgagcttttcaagcactttctcacccggccccagctggaaaattaggctccatactaaaggaagggatcataaaattttttctaaaagtcattctttgactgtgtccagccccttggtctctctc

SEQ ID NO: 676771 - DNA, 669 bp, Homo sapiens
  misc_feature (351)..(351): n is a, c, g, or t
gggccatgtccgctgccggaacgagcatatctcactggtcccagtgaggagttgaagctgtactgttatcgatgagatatatctgcatgggaatccaccacatgtactgcgtgccgagagctcgcttgactcgggaactcacaaatcctgtaaacatctgccatgtgacgtagctctacatactgatataagtgcaaacatacagacagacgtttcactgtgtacattgatcgacctacgtatcgcttaggtaatctatggttcacgtgctctattcagactaggttcagcagatggccaccggtctgatgtactggacctagatcagcttctaccatcttgctcgactgntgctcgatgaacagaatcatgaaaggtatatgagtgagtacactgagggtgagttcgactctgaggaattcaggtttaccgtacgctggatatactctcagtatactcgctcactgatactgattgattgcctgcgtcatgtaggaactgagatggttcgctagcgtgtagtgagacacgtttcatgacttcatgaatctggagactgatgtgcgcgatgtactgagcctctaccgtgttctagactcaataggccttgaccgcagtttggatcctcactttcgagaggacccgggtccatggcttttcccgctttgt

SEQ ID NO: 676772 - DNA, 292 bp, Homo sapiens
  misc_feature (44)..(44): n is a, c, g, or t
tgggaaagcacacccttcctttattctcttaggatcctatgcanttccttcatagtcattatttgtataaatttgttttcctgttcctttgtcccaccccatctctgacccaatttaagccctagttgggaggagattatgacttgttttataaatctgtgtgtggaaatacctaccgcatttctgcttatataataatttataatagattaatatatgggaaatgaattttatgtgggaaatgaattttttttaatcttcaagcattgccttaaattcatggtgactttcc

SEQ ID NO: 676773 - DNA, 478 bp, Homo sapiens
aaattcactcatactacaagttcagatacgcagagaaaatacaaattctttattgtctatagctgattgcttcctgccaggtctctagtcattggttaacagaaataaacaagtgtattacatagtttagtcttagtcctatgcagtaatttctacagttcatttagacagtagcctctcatttggagaaaaacacagtctctcaggtaccctttagtcacttgctttttgttgattgtttttaacccatgtagctgaaagccacactgctaaacactataacttaaccttcatgagctcctttagagataatgcttctgatgtatatgtcaccatggtaacaattgcttaagttgttttcaggaacttgggggtcagcttttgtccaacttaaaccagttaagacacgtcgagaaagcagacacatgcgacgcagcgtagccccccccccccccccccgtcaccgcaccccctcccg

SEQ ID NO: 676774 - DNA, 168 bp, Homo sapiens
tgctgtccaggggcacagagggtacccagatcaccacgactataagcatatacgtgaacgagttgacaagcctttctcaagtagaggtcattcttcagcatagtgcttgctgacattgccagagctgagatgttgttagaagaagctaaaagagcaagcaaaagtgca

SEQ ID NO: 676775 - DNA, 553 bp, Homo sapiens
cagacttgttctgccaaacagcttatttgtagtcagtgcagacaaatcatgcttcatacgcattgttatataaggggaagggggaaggtttatgacaggatttcagagaccagagataattaataattaatgtacagtacactaaaaaaaaccatctgtaccccactattaataagtacaaaaaaccctaaggcttaacgtcatagtactggttattcataggataattatacgttgtatatatagaaaggaagtgatatgagtgatgaacagttcatttgtgctcatagttaactacgtaaacatgatactgagtccagttaaccaccaggccagtgcctgctttgatatttgtaccagatgtgtttggtggtcagcgtttaccatgatccagaatattctaatttttgaaggtcaaaaactttgagtgtttttataaaataacaaaaaactgaaaaatgcagaaaagtataaagatggtaatctctgtaggaaattagtccccattatttagctgtaaaattataattaaaaaaaaaaatctttgtttcta

SEQ ID NO: 676776 - DNA, 1481 bp, Homo sapiens
  misc_feature (544)..(544): n is a, c, g, or t
  misc_feature (684)..(684): n is a, c, g, or t
  misc_feature (842)..(842): n is a, c, g, or t
  misc_feature (1076)..(1076): n is a, c, g, or t
ctggaggacacacacgggagagaagccttacacgtgctttgagtgtgggcgaaactttagcctcaagtccgctcttagctgtacatcagaggatacactctggggagaagccttatgcatgcacggaggtgtggcggcaaggcttttatcgacagataatcacgagtctcattcagacaacctagaggactacatcacaagtgatggaaaagccctatatcgtctgctgcgagacgatgtgggcgaggctttatagctcatgtcaaccgctccagctaccaccgtgaggatagcagcaactacccacacgtgaaataaagatcctataagtgatgctgtccagatcaagatgctggggacgtagagcctttttgttgtggattgaacactccaaaactccttcaactcagcaaccaattgcaggacaagaaccaccagttactagcggtgaagaaatgctcattaatgattgtagatggggagcgagcatgttcgggcccgggcggacatatacgcgcctcggcggataacgaatagctctccnttccaacaacgatggaacgcacttggagattggagacctatccaatctaacaaaagggacaggaagaaaaacccctttaccagccaattgccaagtttccgaacggtggtagggagcacgaaaaagcatttttaacggcnccaaaccaaaggggtcccgaactttccatccaaagaccttttagcgagatacaagagagggatataccagccctccgcgggggcggaagcacaaagggcccagttatagttgtcacattgccgtgtggagcacagtatcgattaggggacaacaaganaggccatattatacagaagcacagaaaaaaaggttccaccgagtggccggttcaagtctaatgttaacaacacaaggaagaaggattaaccacacattcggcgggggcaaacacgagcgccgttttcatacgagcacgggggggccaaacggggcacgttggaacgagcactgggtggaattatttagaagggcagaagacagaaagtggttacgacgtcccatcgtcgaaggngcgcaagcaacacaaagccggggaaaaaaaattgggctttaagaggggaacgaaaacggccccgtttgcgtgtgatagttaaaaaacgggttacaattggtgggagacaccatggaagcactctggttaacactgttgggaacccatttccaagtttcaacccttaggttaccaacaggttgggttccaagggaaggggacccaaccaactttcagggggaaagagaaaagcccctttccaattaggggaccggtgggacagcaagtgtacaccgcgtcgatcagaggccttggggcaacggttggggcgcaccccgtttacacaggacagacagtaaccttctggggagaggttccacaaaatcctacatccccacgttgtggtaacagggcccccaacaccac

SEQ ID NO: 676777 - DNA, 192 bp, Homo sapiens
  misc_feature (187)..(187): n is a, c, g, or t
acagaggttccaagcttacgaggcattgcaatacatcctccatcacagactgtttctgatgcagagaaacttctcatgccagactcatgacttctggaaggggttgacctctttgtctcacagtgaaggagaccatatcaagatgaagtactcgttctctggctgaccactagccatatttactacnatcac

SEQ ID NO: 676778 - DNA, 324 bp, Homo sapiens
tactggggatcatgtttacttactcatttatcaaatattgaatttgtcaggagcctactgtgtgtcccaggatgtattccagacaatttaatctgagttctttcaccttttcttatttgggggaaattactggtcattttttcaaatattttgttttctccattttcttctctttatggacaaattattggtcatttttttcaagtactttgttttcttcattttcttttctttacaggaattctgttgtatggattttgtcacttctagtttccgtatgtctcttaacttttaatattttgtttttttccaatccccggtcga

SEQ ID NO: 676779 - DNA, 228 bp, Homo sapiens
gtctatgtgtgaagttggaggaaagctgccatactgtcttctgcaggtggtcgacaccactattacagtcgcccccagcccccaggagagaacttcctttgtcctggatgtaatggggtacgtatcctcattctaagtgctgggcctcggtgagccgtccctgtgcctgtagggtttgtaccatgggacagtctccacaatttccacaggggggcccgggtaccgatg

SEQ ID NO: 676780 - DNA, 961 bp, Homo sapiens
gtttgcttgattcctctcaagcttggagttctgtatggtgtggttactggcgggttcaccgatgcgtatcgataagtgttataatgttcgggacaatatatccgtggcacacaggcaatgatggtacagtgccgctatcagaatgcataggctgttcacgagttttgccaggtctaaagtgtcatagatatattcttaaataacgaaatgcgccgtcctcgcaacatgcttacgtattgagatcaacacgcagttcccggacagagctgctgtggtacaagaggctggacggtcggataaattcagtcctgaagtttagagaaaacgtaggaagttgaaccatagtcataaataccagcgcacaagcttatggaaaattgaacatatttgatgtgatgatggagagtagataggaattttattacagaagcgacaaggaaaagttgagtatatgaaatagtctggatcacaaagataaagaggtaccgtaaagtgtcgagtgatattaacggaagtatgagtcaagaacaatacagtcttatccgaggacccttcattgatatggtgatgggtatacaggtcggaggagaacacaggttgcagtttgttatgagagtgatgtgtgcccttggaatgcatgctccgataaagactcgtctgtaacgctctgttcgtttcactgtaccatttgaaatgccccttggatacgtgatatgtgcgtcaattatggtattttcacatgaaggtcacttaatttgaagccgcgatacaaagaacatgttgttggtagggcgtttacctaatatgtggtatacgggggtaaaatgcttttcgcggaaattttgcttaggaatagggacaaggagatccagtgatgatacaacgattggagcacagcggtggcttgaaaggccgggcagatgttataagggaaacagccgggtaaaaaaatggacaatcg

SEQ ID NO: 676781 - DNA, 412 bp, Homo sapiens
  misc_feature (326)..(326): n is a, c, g, or t
  misc_feature (342)..(342): n is a, c, g, or t
  misc_feature (370)..(370): n is a, c, g, or t
  misc_feature (397)..(397): n is a, c, g, or t
atctgggaccatctcatcctggatttcattttccatgtccttatcagcattttggtcaaagccattcaagtctctaggaagttccaaactttcccacattttcgtgtcttcttctgagccctccaaactgttccaacatctgcctgttacccagttccgaagtcacttccacatttttaggtatcttttccacagcaccccactcctggttccaatttactgtagtagtccattttcacactgctgataaaggcatacccaagactggggcaatttacaaaataaaggaaggattagtgggacttacagttccacatgggctgggngagggccttcacaatnttgggagggaaggttgaaagggcacatncacaaatgggttggtaggacacaaggnaggagaggtttttgc

SEQ ID NO: 676782 - DNA, 306 bp, Homo sapiens
tggactccgactaacatatgaattctagacaatagacatcactcatcatagttagtgcaatcaggatactgccattgctgtccccagtcatttgattccgctgggctttctcttgcagctgtcagtctctttaaatcctttctaactgtcacccaatgtccttactttcctcttgaaacttcgcacgttgcctatgcgtcggtggtcacgggaccttaatcggtaacggaggcccttctcgaacttagtcccgatctcgctttcacgctctgatcgagtccgctcccggatccagttccacttagt

SEQ ID NO: 676783 - DNA, 350 bp, Homo sapiens
tccgcctttgcatagatacagtcatctggccagcccccgcccctcctcccggcgtcagcccgccagagaccgcgcggggcccgggcttcggccgatcagcccgggaggccccgccgcgcccccttggcccgcgcgcccgtggtcacagtggaagaggcgcccgcgctgcgctgcccggaggagccgtcgcgcgcccgcttcctgttcggctggatccgcccagctccaccgcacaacaagcgtgcgcgcgccgggcgacgccgctcccagcgtcacgtgcgcagcaccagacgcagtgtgcgggtgtggggggcgcgccggcgcccgccggactcgccaggggcggccgc

SEQ ID NO: 676784 - DNA, 259 bp, Homo sapiens
tggacaatggtagtcctgttctttatgggatgaaaacagtccctttacaataagttccctgaaagggaaaacaaattagattaatataactctctttcgtggttaacattatttagtggtacactgtggccaggtggtgtttttgggcgatttaacacattaatctcctgtggtgaatctcagatttaatttcacttgggcgtgaggtgttccatttgtgcgggcaattccctctctgtgtgtggaggtctctgtgtgg

SEQ ID NO: 676785 - DNA, 194 bp, Homo sapiens
attcgcggccgcgtcgactttttttttttgatagagagtctcactcttgcccaggctggaatgcagaggtgcaatcaaagcccactgcagcctacaccccctgggctcatgcactcatgctacttcagagtgcactaatggctgggactacaggtgcaggtcatcaatatttgtatttttggattccgtattat

SEQ ID NO: 676786 - DNA, 886 bp, Homo sapiens
caactcccccgtggttttcgccccctttctttcctccggtggctctctctattttttactctgagttgccccgccggtgttgtttcgccgctagtgtgctatcgtacgctcgcttttcggggggacccttttccctcaggaggccgctttcgagtggtctgttccccgtggttctatctcccctcccctccagtggtgtcgaccgagcgaaatcgctcgcatattcttctccggcgcgagcgaagctgatgggtgctccgctactcattccgtccttccttcttcaccacacgagtggtgtgttctcttagccgccgtgtcgctgccctttatgctctcgccgggatgggctgctctcattccacaccctggagattttaggcccacagaactcctcgctctgctgtccctgttcagggcaacacgggcgccccgccccgcgctccatctctctgtcagtcagtggtcactacgcgcactcgcactccagctgggtttggcaccgccctcttgttcatgcggcgcacacgaaactggtcggctcgggccacctctctttggatgttatacaccccccacattcacacgcctcaatttaacaaggtggggtagcgccccccactcgtgaatgagcgagacagtggggcgagcccacctctcttaatatacagcccaccaagagaggagggtgcactccacactcatcacgagcgagtcggatgcacaatgctggttcgttccattgcacgcgagggttttctccccaggatgttttctcactccctccaaacgacgactctcgtagcagagtgacggtcatttttttcggcgtccaccacgaacagagcagaacaaaaaaaagtagtagccccgccccacatgacaa

SEQ ID NO: 676787 - DNA, 139 bp, Homo sapiens
tcttaaaatcagtaacaaatgtcaacccaacgaaaatgggcaaaagacttaaaaagatgtttctctaaagaagatatacaaatgaccaataagcacatgaaaagattctcaacacatttctaatttttagggaaatgca

SEQ ID NO: 676788 - DNA, 463 bp, Homo sapiens
gatccctacgtctatcatagactgtttccaggtgctataagatgccagctgaagaaacgagtctcttccttcgagtaatctagggttgacctgcaggaccgtgattactctacggagacatgtgaaaataaaagtatagctaaaatccgtaagaggaaggtgacacagaaaatcaaccatcatgacaaaatcaatggaaagaggaagaccgccagaaaacagtaagatgtgccttgtatacaaaatactgttgtatgaaccatgtgccaatcaaagtagacaactgtaaagtccttgagaatattttctacaatatttgtggcaaattcagtgggttcaaaattgagtatgtccttactgctccattagtttaagctgtataattcctttcccttcctacattcttgtaacattatatcggaggaagaggagtcgctagtactggcataggttttcctttctc

SEQ ID NO: 676789 - DNA, 199 bp, Homo sapiens
tgaatcgttgaacgaaacagaacgcttataatagcggctgcaccatcgggatgtcctgatccaacatcgaggtcgtaaaccctgattgttgatatgcgactctagaataggattgcgctgttgatccctagtgtgaacttgttcctgccgaaaaagttattggatcaattgagtatagtagttcgctttgactggtgaa

SEQ ID NO: 676790 - DNA, 867 bp, Homo sapiens
  misc_feature (18)..(18): n is a, c, g, or t
  misc_feature (109)..(109): n is a, c, g, or t
  misc_feature (111)..(111): n is a, c, g, or t
  misc_feature (117)..(117): n is a, c, g, or t
  misc_feature (120)..(120): n is a, c, g, or t
  misc_feature (123)..(123): n is a, c, g, or t
  misc_feature (126)..(126): n is a, c, g, or t
  misc_feature (147)..(147): n is a, c, g, or t
  misc_feature (152)..(152): n is a, c, g, or t
  misc_feature (154)..(154): n is a, c, g, or t
  misc_feature (158)..(158): n is a, c, g, or t
  misc_feature (160)..(160): n is a, c, g, or t
  misc_feature (164)..(164): n is a, c, g, or t
  misc_feature (169)..(169): n is a, c, g, or t
  misc_feature (261)..(261): n is a, c, g, or t
  misc_feature (265)..(265): n is a, c, g, or t
  misc_feature (271)..(271): n is a, c, g, or t
  misc_feature (275)..(275): n is a, c, g, or t
  misc_feature (279)..(279): n is a, c, g, or t
  misc_feature (281)..(281): n is a, c, g, or t
  misc_feature (283)..(283): n is a, c, g, or t
  misc_feature (292)..(292): n is a, c, g, or t
  misc_feature (314)..(314): n is a, c, g, or t
  misc_feature (340)..(340): n is a, c, g, or t
  misc_feature (342)..(342): n is a, c, g, or t
  misc_feature (593)..(593): n is a, c, g, or t
  misc_feature (596)..(596): n is a, c, g, or t
  misc_feature (601)..(601): n is a, c, g, or t
  misc_feature (703)..(703): n is a, c, g, or t
aggtgttcattgctgctnggtggcgggggtcggggtcttctgttcactaacaggaacaaagacagaaaccatgacagggctgcccccgccaggccccggtgggtttttntncacttngcnctnctncccacaccagccacttttgtnacaantncccntncaanaattntttggttaaggagcaaccagttccctcttattcttgagcagggagaaattgaccttgccttgtcgcccaggaagtggggctcggcacccatnactnacaccncccncccntngnaaccatgtnttctgggggtgagtgaccattntgggtctaagactgtttcaaagaagngntcatagactgactggtccagaagacagagggtacaacagtggcatcacagtgacagtgtcatggggagctgggcgggcccagccaaaccctccttcttcctagagcccagccagcaggcaggagttcctggaccctcaggacagtgaacttccagacctcagggcaggtctatgggccactgcaggagatgagaccagccttctgtgttcacctaacgatttatactgtgtatctgtctttgatggaattntgnaactntttatatttttttatgcaaaagcagcttcttaacagatggcattttctgtgactctaggcctcacaaaagagccagagttctggacccatgtttggagcatntgtagccttattctcatctgagtgtgaatctcatgatccatgataaaagagccataatgatattaagccagactgaccacttgcttggacgtgtgtgcgttgacaaaactcagagcaatactgttgggtattgtatcaggcatacctacaaggtggtaacacca

SEQ ID NO: 676791 - DNA, 304 bp, Homo sapiens
atccaagcagtcgcgtaactagttagcatgccgtggctcgttcgttatcggaattaccagcggatctgtttcaccaactaagaacggccctgcaccaccacccacggaatcgagaaagagctatcaatctgtcaatcctgtccgtgtccgggccgggtgaggtttcccgtgttgagtcaaattaagccgcaggctccactcctggtggtgcccttccgtcaattcctttaagtttcagctttgcaaccatactccccccggaacccaaagactttggtttccccgactgcttggattacaagga

SEQ ID NO: 676792 - DNA, 561 bp, Homo sapiens
aagcagttaatacagaccattctccatccagttttgtttccttggtggtgaggagttgtgatccttcagagaagaggcgttctggtttttgggaattttcaacctttttgtgctggtttctccccatcttcgtagatttatctaccttttgtctctgatattgatgaccttatgatggggtctctgagtggacatcctttttgctgatgttgatgctactcctttctgtttgttagttttccttctaacagtcaggcccctctgctgcaggtctgctggagtttgctggaggcccactccagaccccgtttgcctgggtatcaccagcagaggttgcagaacagcaaagattgctgtctgttccttcctctggaagattcatcccagaggagcacctgccagatgccagctggagctctcctgtatgaggtgtctgttggctcctactgggaggtgtctcccaatcaggagacacggagttcagtgatccacttgaggagttagtttgacctttagcagagctcgaacgctctgagatctgctgctcgaacgtgctaggag

SEQ ID NO: 676793 - DNA, 271 bp, Homo sapiens
tatgctgtagacaaacgaaaatggccctgctacctgacaagcttccgcttcgatatagccctaacgttatcctgtacctgcatcaaattcccattctacccgacaatctcgccttcggtaattcattctctttcaagatccctatctgcaaaacacccaagtttcacacctaactcacccaatggccttagttctccatctctgatggtatattcgtgagttgtgccatccgtcatatccatcccagaataaaggcgtcaaccaaacagtt

SEQ ID NO: 676794 - DNA, 137 bp, Homo sapiens
tccacgctgcgaatatttcagagtgaaaaaatgaagtaaacaactgaaacataactttcaattgactactgtaacattaattaaataaagactagtatcatatctaaaaaattaagttggtcggtgcttgccaacag

SEQ ID NO: 676795 - DNA, 699 bp, Homo sapiens
cactcgcgggcgctgcccggttatggcctgtgtgggatgtccgagttcgacgcgccgctgtgcctcagcctggacgcggtacccctccgttgagcgctgtctgtgacccacggaacctgtgcaggccgctctctgcttgtggcgcccagagtgtgcggctgctgtacatcggtgcgcgatcctgggaggcgatggcatgtggctagggcactttctgtccctggggctgatcccagagagacgcctggctctgggaccctcgcctgggtcctctgtcccgcagcctcttctctggcctccctgcgatcctgccttgcgccctctgcccatggactcgtctctcacggtcaggctccgccgccaggtctcgggatgcctccgcttccctcggcgtcccgcatagacaactcctggggaaacatcggtaacaaagtaacaaaagaagaatacaacaccagaaaaaacaccaaacgaaagacagacaaccggaagagaacgatcgaacgtagaccgcaaaattgcacaatcgaacatcaatacacagaagaaaagacagacggagagcatcgcgaccacacccaatagacatagccacacgaatgaccacaaagcagagaaccacacaaaaagaaacaaacgaatagcacttcataccgaaagcagagccaacacccacgaaaaaacaaacaaaccacccag

SEQ ID NO: 676796 - DNA, 102 bp, Homo sapiens
tagcggaccgtctgcttctgcgtaaacataggatagcatctggaaattatcatttagtggcaggtggttttttaattttcttctgtttctgattttgttgtt

SEQ ID NO: 676797 - DNA, 1377 bp, Homo sapiens
  misc_feature (235)..(235): n is a, c, g, or t
  misc_feature (1121)..(1121): n is a, c, g, or t
caggccgccctttttcccggaatagggccggcgcgccacaaaataagggagggacgaccccacaggaagagagaaaaaagagtaggggtgtgtagaacaacaaccacaaggtgtgtgtcgttacaagagaaaaaaggatttttgaggtataatatagaaaatgtgggaaagaacgcaaccacccctggccataataatgattcccgcaacaataatttataacgagaaataatantgtggagggaaaggaaccgcgctttctggtgcaacgcccacgggagaccccccacaagggggcaccccgccaaaaagtggtggcgactatattcggaaatgagggtttctctctcaaaagaagggttttcctctggtttgtttttttggaaaagatggagaagatttctcttgcgctggaaatatttgcgcccagagaaatagggataggaaaagatgtgcgcactgtgttagagagaaaattttcgcaaaagctcggatattacctcgtgaaagaaatagatgtcccacgagggtgtaaaaaaactcggccccgtgacattaacatgtgcacactcggcgccaatagggatatctgttacacccccggggcacacacaaaaatagatgggtgtgccaacagagggggccccacaaaaaattagggcccagcacccacataggatatgggaagactctccacccgttagaaaggttcccaaaaagacattaccccgagtaggggtgtacaactttgcgtgtctcgtctctggtttctctagtggtttggggttttttacatgtataataaacccgcccacccaattctcagatattccgggagaagaactctctttaatggccttcacgcaccccaacacacggtggtctcgccccaaaatctcccgcgagaagagaagatatgagttgtgaaaaattcacttgatgcccgcagcagagaggtggcacagacaacaaatggagactctgagaaaagagaatgggggccacaataaaaaattgagattccacagagcccgcacattgggaaaagagacacatatagagaaaaggcgcttcgccacaaatcttatatgttaatccctctctccacatgagaagtcttntctcggttatagagaaaagtataaaaaatgcctgagaagaagcccacaagtttgagaattgggaaaagctcactggaggcttcacatggtggaaaggcacgtaagtttctgggaaaaggccacactcggggaacgaagacacacaggtggcctaaaagttggaacgaggctgagatggatatgaaccccccgtcccagaaatctgtttaaagattccagacttccaattagtggccaaattaaaagtgctatttgt

SEQ ID NO: 676798 - DNA, 155 bp, Homo sapiens
ttccgaagcttccacatgtggtgcctccccctctcttcactgcagacacctgcacaggctgagctagcctgtgccacacacttaactcacgccaggggctgtgggggccctatccccccattcaacacctccaattcccagacttccagcaaagc

SEQ ID NO: 676799 - DNA, 107 bp, Homo sapiens
tgatcgagctcggtacctcaatattacatgaaatcaatcaaagggaaacttgaagacagagaccagaaatgagtaaaccttttatgacagtgggcaagcggccgcaa

SEQ ID NO: 676800 - DNA, 751 bp, Homo sapiens
  misc_feature (44)..(44): n is a, c, g, or t
tatggcgggggcattcctttgctggagattaagcccgagagctngctccggccttagctggctcgcgctctctctcttttgcctggaggctatccagcgtctccaaagattcaggtttactcacgtcatccagcagagaatggaaagcaaatttcctgaattgctatgtttctgggtttcatccatccgacattgaagttgacttactgaagaatggagagagaattgaaaaagtgcagcattcagacttgtctttcagcaaggactggtctttctatctcttgtactacactgagttcacccccactgaaaaagatgagtatgcctgccgtgtgaaccatgtgactttgtcacagcccaagatagttaagtgggatcgagacatgtaagcagcatcatggaggtttgaagatgccgcatttggattggatgaaccccaaatcctgcttgcttgctttttaatattgatatgcttatacacttacactttatgcacaaattgtagggctataataactgttaacatggacatgatcttctttataattctaccttgggggctgtctccatgtttgatgtatccgagcagggtgctccacaggtagctctagcagggctggccaccttagaggtgggggggccgggaattctcttatttcaccacaaccttcttggccccgttttggacctctttaccctctggccctcacaagctggtaagattgttaggcggaaataaataaataaaaat

SEQ ID NO: 676801 - DNA, 453 bp, Homo sapiens
tgccgggacttgtatcctgcacttcatttactccctctattctccatcatttctttcaaaagtggggcaatttcattaaacctttttaaaggtacagtctttgtctcttgcactagcaggaacacatttgttcattgtggtatccccagcacctagaatcacgcttggcatgttgtagatactcaatacgtgctttttggacttaaaaggcaggggagatggcgaggtctttagccacataagaaagaagtagctaaagaccaagcagtaactaatgtccacagcaaaaatatatatgtctactaaatgcatggctctttcaagaaggaaaagtaaataatagcctaagatagtatatcctttgtttatatcaatattcgatatttgcctaattctgattccctagaaggaaatacagatcttgaaagatttcacacataataatttccttac

SEQ ID NO: 676802 - DNA, 1231 bp, Homo sapiens
  misc_feature (1094)..(1094): n is a, c, g, or t
tttcacatggaaaattattacttatatttaacattggggtctaatatttttttctggacaatgttatcaatggaaaggcaagaaagaaaatccatctcccaatatcttatgtttccaagagacacaatcctaaaattattaaaacccctggtagctgggcctataattatattatattataaagatggtttatataaccaggaaagatctataacccaagtgtcacaataatgtttaaaggacaatcacaaggccatcttcacatgtgtgtgcacatgtttctcttaaaactatcctatgagaaatgagatatcatctggcgtgttatataaacctctctctcacatatattatacagagacacaagtagtggctcgagaactttaacacttacacagagagtagtgtgttatctactccatactgtagagacatattcataacacggtgcgtcccaacaaaaactatacacgtatttgagaggaaaatactctcttatatcatatagaagggtgggtatctcctctcttatatatatcacacacacggtgggggacaaaacaaacacacagagagaaatatatagagatgctccttatatgtggggtgcgcatatatatacacgcagaagaggccggagatgtgtgtctagaggtctacatatgtggggcgcgcggggtgtcatatatattatatatatatatctcacgacgagatggtttatatatatcaacaggtggtagaagaaacttatacccgagagttctccaaaaattagtttttatagagccaaaatactcaagacggcgcaaagcttctcaagcgtgctgtctcgagtattctctatttataacatctccaagtgagacagcgctggacatcatacgcgtggggataattatacaccctttcccgcaaaaaattttcttcacaagaaacacagcagggcttgcaccacacatcacccctactaccgagaaagtggtcttactcatattcaaccctatgtcacgcccttcttttcataaacgcgtggtgtcaccacacaaaaaacttacccttgttcgggggagaacaaactctcgccatatatncccacatatagggacaccgaggcgggtgggtttatctcccccctcctgtatatattcttcacacacaccgtgctgggggcgaaccacaaaacacacacgcaagagaaacaggatcaaaggtgtcccctcttggtggg

SEQ ID NO: 676803 - DNA, 137 bp, Homo sapiens
  misc_feature (18)..(18): n is a, c, g, or t
  misc_feature (38)..(38): n is a, c, g, or t
  misc_feature (97)..(97): n is a, c, g, or t
gtgacactgcttaggtanggagcgcggagtcggagcgnggacgcgccgggctgcagctctgggatgcaatccgactgcctcgcaagctgctcgccgntgcgctggcaggctgtacgctgagctcggaggatcccatt

SEQ ID NO: 676804 - DNA, 956 bp, Homo sapiens
tggattactaattcgtgttttgaaagcagtaagaggttccacgaccccaaatagcaccagttctgaggttcccccaaaataaatttaacagcctccagctctcagtgttatactcaaaattacaaaaagaaaaaagtagaggttgcttttttccgatggcaaattcggacccttgcaggctgagggagagaaagctacttcacacacagaggtggggtgcccccgaggggctgtgggctctaggtggcccgcctgcccggtttgcacgcgctcctgctggtgaggccccagatcttcctgccaaatgtgttctagagcgagcacgatgtgttggggcgacgacggacccatttctggccacacggcgaccgagggacagtatgggcgccctgggtcccataggctcgcctgaacggtgcggtagggcgcgcctgcggcatagcgggggtgcgctgtgggcctcccagctttggccccgtgggacccgtgggacgcacagggacaacgcccatggctatggaatgcagggttgacccaagggacaacgcagatgttgcggggaatctctactgtgaccaatgcaacaatggatcgacagtctgttgcgccacacaccacctacatgtccccgaggggacacagttggtcctggcgactggcatccagcgccgtaactctgccaaatctaacagccaaggcggagatccccccttcgtgtgttgtaccaagtgtcctacgatctgaaattctcaacatactttgaagaacatgcacaagaaattgggggtacaaaaaccagagtcccaaatatgggatttcaccaccagatctctaaagccacaggagtttggaccgtctctcccaaagaagggaactcctgggaggcacgtgcccttgggctctaaatcccctcctcacagcttgaacccgacattaattactttgtacagtacaca

SEQ ID NO: 676805 - DNA, 714 bp, Homo sapiens
  misc_feature (189)..(189): n is a, c, g, or t
  misc_feature (320)..(320): n is a, c, g, or t
  misc_feature (663)..(663): n is a, c, g, or t
  misc_feature (670)..(670): n is a, c, g, or t
agcgggcgaaggagaacgcagcaagcccaggcggcggtggaaaggctggaggacacacctaaacatgtggaatcccaatgccgggcagccagggccaaatccatatccccccaatattgggtgccctggaggttccaatcctgcccacccaccacctattaatccaccctttcccccaggcccctgatnctcctccacccaggagctccccatggcaatcgcagctttcccccccaggtgggaccccctcatcctgtgaccaacagccagggtatccaggatgccaaaccgttgggtccctaccgctcctccatacccancgactgcccctggaatccctcctgtgaatcccttggctcctggcatggctatggaccagcagtgatagtagacaagaagatgcagaagaaaatgaagaaagctcataaaaagatgcacaagcaccaaaagcaccacaagtaccacaagcatggcaagcattcctccatcttcctcctcctcttccagcagtgattctgactgaatacaggccctggacccttccctcaagtctcaccagttctgctctcccatcaagcttcagatgccatgtgtactgggggaatgtagcccttgtgctccccaccccactacctccacctgagcctcaccctgctgttgagnccctgangtggctaggggaatgggaagaggattgccatggcctggccatct

SEQ ID NO: 676806 - DNA, 187 bp, Homo sapiens
tgagcggcggatcacaaggtcaggagttcaagacaacgcctggccaacatggtgaaaccccgtctctactaaagatacaaaaattagccgggcatggtggtgctagcctatagtcccagctacttgggaggctgaggggctgagcgaaactccgtctcagaatgacttatacagagaggggcgagcg

SEQ ID NO: 676807 - DNA, 366 bp, Homo sapiens
tcatcgtgttaacatgttgccgttctgactggacactgggtctcatggatacttatgttagggatggagataatggcatgcggtctattgtgagtgtatccatcactgcacactatctcctgtaacaaatagagcccagaatgcagaatgattacaacaccatggagatgtgttgctcacataacaagccagagtgagagctcattagtggcacgtggcttttctcctgaaaagctgaatgcagtgattcggaaacccgtgttctttacagttagtagattcacccttcccaaggcctagtaaccaatggtattcagcggtggaacgggaaagagagagcctggagagagcccatatccatactcc

SEQ ID NO: 676808 - DNA, 656 bp, Homo sapiens
  misc_feature (605)..(605): n is a, c, g, or t
  misc_feature (612)..(612): n is a, c, g, or t
agcgggcgaaggagaacgcagcaagcccaggcggcggtggaaaggctggaggacacacctaaacatgtggaatcccaatgccgggcagccagggccaaatccatatccccccaatattgggtgccctggaggttccaatcctgcccacccaccacctattaatccaccctttcccccaggcctgtctcctccccaggagtcccatggatccagttcccaggtggccctcatctgtgcaagcaggtatcaggatgcaacgtggtcctacctctgatacacgtgcctgaatcctctgtgatcctggtcggcatggtggaccagcagtgatagtagacaagaagatgcagaagaaaatgaagaaagctcataaaaagatgcacaagcaccaaaagcaccacaagtaccacaagcatggcaagcattcctccatcttcctcctcctcttccagcagtgattctgactgaatacaggccctggacccttccctcaagtctcaccagttctgctctcccatcaagcttcagatgccatgtgtactgggggaatgtagcccttgtgctccccaccccactacctccacctgagcctcaccctgctgttgagnccctgangtggctaggggaatgggaagaggattgccatggcctggccatct

SEQ ID NO: 676809 - DNA, 1226 bp, Homo sapiens
agcggggggtcggccgagggcgcggggccccggggctccgtggctcacccccgcgactcggggcaagcgcgccgatggcgtttctgacggtgacgccgcccacatcgtggcttctccgcggggcgtgaggtaaactagcctatgaactcgcatccggcatgccttccttgccgggcgtccagtaactactcgggatcagtagagtttgagatatatccaactatctgagtaatagctaagcagtgaagtgacgctgacacgtttgctcacttagcgacgaatttaacaacgatcttgatactaagagggatgctcaaatgagcctcgcgttagcaggtggcatccatgcaaacatgctatcttctcactggtgacacgacggactcgggcaccgacaaggttggtttgaccactaggaaggaaccgtctgcaggagagaacttacagatatgagttgaatcttacagtatacaaagatagctgacctagtacaatcaggggttcatctacaactggaacgaaaagggtaaaaaatgctaccttgaaagtccacatttcaaaacgtaggacagttgctccaaagcaaggctcgtaccaacgaagagcgatgcgcatacctaacacagcactatccgtgggcaaacaggtgtggcattccacgcacctggggcacaccggccagtttgccttgtccctccttttcatacgtcttgtcaaggaaccgccatgtggtacgctcgctaatgacacaccgggatagcgaccttccatcgaaggactatacggaccaggtattcaccgcgctggagggcacaagccagttaatttacctatgactcccgccaagggggaataagggagcaaaccacagctctgttaatgcacaaacgtgaccctttcgcgtcaagtgcagctaaccctaatatcgaccgtttccttcttaggcctgggacaaaccacaacagttggcaacatttttacaacaagggccgcttacacgacaagcgggaccacgcagaccaacgcaaacttaacattctgtcagcatcatcaggcaccagagggtcagcacaaggataacacaacaaacttccccaacacagcttatttacggtcaccagggaagattagtgatcattacccgcgggaggatataaacaacgatattttcaccaacaaaagagttttggccctcaaacggacaaagcaccccaattcggacccca

SEQ ID NO: 676810 - DNA, 642 bp, Homo sapiens
agcgggcggtcgttgtgggactccagctcccagcaggcaccgcttctgcggccagactgcgctgtggcgtgctgtgtgcctggcatgtggactcgtaagtgcggtcctgggtaggagacgatgcatgggtggccacgctggctccatctacgcacgtttcggaaaccgtggccccgggatgtgtgaccattggcccgctcaccctgtgtccctggtgctgtcccccggaacgctgtggtgctacgatgtgagcctggggccgggccgcaagcgggaaagatgtgccacatggcggggcctgcgcacgtaggcggcgggtaggttacgctgcgtgaggacacccgggaacgcccttttgccaccgtgccaccgcccgtcggtgacctcgcgttaacgcgtcctaccatgggttgccgaaagggtcatgtggtgcctgttagtagtggaggtcctggtaaactcggccggtggtaacaggccctttcagttccaaaattaacctctgctgaaggtacccctgttcctgccgtaaggcacagtatctttccgctaaagcacacataggggaacgctagacacacatgccggtctgtgaggcaatgcgtgattttcccctgtgttgctgttggtgttcactatgtc

SEQ ID NO: 676811 - DNA, 1374 bp, Homo sapiens
  misc_feature (874)..(874): n is a, c, g, or t
tcatgagtcttgggattgtgttatgttggctgagatgcgtgtatcattcgtagttgtgtgtcgtgatctctcctgctgtctgctcgctcctttgtcgacgccgcggttcgcatgctcggcgaccattccatgcgcagtcgtcttcgcttgtttcggtgagtggctggtcttggtcgatgtcgtgttttttctcttcgtagccgggctttttctcgtcccgattcagtactgtgcctcgccgttatcttgttggagtgtgcgtttggcgctgcttctcgcgtgttcgtgagtggtagtgttgttgatgtgggtaggtgttgtgttgtccttctcctccgctgctgcggtgtgtgcgtgtaatataaccagagagccttcctgttttaggggaaaccccgttccaggattccgccctgggggatgaacccctcaattcacaaccgccgtgtgttttgagaccctccccattaggtaaaggagccacgcccggggggacgcggagtgcccagggccctcccggggacctttcttaggcccttatggccccctcgggggaccccggaattataacccaggtgtgtccacacaaccacggggggaacacacgcttatgtgaacgccacctttaggggcccctatatttaaaggtggtacacacctatataggagacgacacaggttttggtgacgcacaaataatgcacacaggctggggtatacccgcgttccgcggaaattctccccgcgggatatatattgtgtctgagacgcacacacggcgttcgcgggaaccccgggtcttgtcgcgttgtgctctgtccgcggagctcttgatctcgagtgaatactcttattctataaaaggtttcctcgngggaaagccacacaagttatgaaatgtttacaatatagagaccacacaatgtggatatgtgagagagaggagagaaaacaccctatatgggtggcgctgttgaaaaggagcccctcgaatgcccacatgataatgtgtcacaaattgaataatacaattctgagatggcccactgagaattttatattgtataaaaagaggagaacacatgcacttaaacactcacggcaccgagataaaaagccacatgttgaggtggcccacggtcacgttgtgctgaggaaccgaaaaccacacatgagggtcaattttagagagaataccttcaacaatgggctatcgaaagtaatgcaatgtattttacgtaccaaaggttcgctacacctaacagctccacccgagagagattcctgaaattcccacattgcacacctgaaattgcactgggactgctgatggctgcgaactttttagattgttaaataaaataaattataata

SEQ ID NO: 676812 - DNA, 1227 bp, Homo sapiens
gcagcctggacgccgagatagacttgctgagcagcacagactggaccgagctgaatgggtggtcgtgggtcatgcgtcacgtgcgaccagacctgacaggcatatgagccccctgccaccatccatgcctacctgcactgggctccctagaatgccaaatccaagcctcgccgctcccatgctgtctcccatatgggggccccactccatgcctcttacactaccgccatgcaccccggctggcccagccttccccgtagcaatgtagaaggtggcacagccagtgagtgggctagcggccacccatgtgctgtgtgggagcctctcagtgcctctggtgcccctcccgggcccccactttcctctcccaggccgaggtgaatgtctagggggccttggctactagagaggccaagagagagccagtggccactggccacacgagtgaagcttgcatggtggtctctggccctgcaggcacgaggaatgagtgagtctgatgcacggagccccaggtgcccctgacgccagcctccagcggatgagcttggctaggctgacgacgcacgctggtacacgacatgaaccacctgcccacacgagtagacgtaccttggagccatgttgtagcgaggtttgccgcgacacacatgtgacagcggagtgcgcgctggagtttgatgccccctagaaacgcggtctattccactgttggccacgccttgaatagacataccttgcggggcccaagaatctcgcgggccatgctgtctctgcgccgtcggcaacacgcgggcacaacttggcaaaggtagctgcacacggtagcccacccttgagcacactggttgcgcctcgactcccccactccccccagagacgtgcaccctcggcggtcaccatcgcaacagccatcacatccttgtcatctccctgtgtgcggctgcacgccctgccccgccgtgggctccctgttcgcgcagcttacgcgtcgaccccccccctacaaacactaccaccgcagtgctacacatacctcctagccgcccacaactcctcccgcctaccctacgcacaacattcactccatatcatgatcctacatcgcacacctgccccctacgagaagaatctcaaacaaaacacccacaaccacccaccctccaaaccaccaacctctcctgactagactgctcctcccccttcatctaccctcacactctaagc

SEQ ID NO: 676813 - DNA, 1368 bp, Homo sapiens
  misc_feature (805)..(805): n is a, c, g, or t
  misc_feature (1368)..(1368): n is a, c, g, or t
ggaaggagcacgcctgtgctagtcctcctgtctctcgctagcacttctctgatctcgcacacgttcccgactgaggaaactgctgaggatgctctgatgcgtctggtggctgcgtacgtttgggcgcagagaagagcggggcgttgctttggccgtcccgcccctagctcttggtagttgtcagtagatgaaccacgtagttctgcgaggcgcattgcgaccacctagtcatagcggcttgcacaacaagaatgctctagtactaactctttcaaggggacagttcaggattcgtaataggtcccgatcatgatttctctgggggcgcccaggacgttacaaaatcacgagtcagaatgttctcttctacaagcgcatatcttctgtgaaagcaaaggcccatgtatgtgctcccagaggttcttgcagcaacaattgtggtggcgggtaaaggaaagacatcgagccattcggacttaacgcggaatgcgttaacttaattatagtgttgtacattcgatagcaaggataggatttggaatctatatggagctagatgtaccgagcatttgaaccttattccgccgctttcatgccacgtatttcccgacggtctcgattgctaattgtcctgcggacttttcctcgctctagtcccatagcgggttagctcaactcctcgcacatgtgagcaaaaatggcgtggtcctgctgtggatgtggaaatattcgctggacagattgtttctgatgcgggttcgaattcatagtacgcttcccaagggtcgtgggtatcagtgcattngaggaacaccaagcggttagtaaaggcgtgttgctaaccaaacgattatttcctacaacattgtcggcctaagtacccttccattagcacatttgaagcttccgtatagaaattcgaaaagactggaacatttttgaatcatttcgttatctcaacgttttctccacgcggggactttttgaatttcgccccaaggggctctcgacagaccattgctctaaaattttccgaaatcgggagttaatccaccgttggacaacaatttttttgtggggcacattgggcatgattccctaaagtttcttctttcgtttgaaatacggagcggggaagaccttggttcttccgcggcccaagggggttggaaatttggagcgtataggcgcatttacgttaacaggaacggtttctatcccgttgcggtcctccttagagacccacaggcacattaatttgcgcgcgacgccacatgggagcgacggtctaatatcaatcccttgacctttggttggtattgagaccaggaggtgtaaattgcgcaggcataaaagcatgagcccatn

SEQ ID NO: 676814 - DNA, 137 bp, Homo sapiens
  misc_feature (2)..(2): n is a, c, g, or t
  misc_feature (5)..(5): n is a, c, g, or t
gnggnacccacccgtatgtgcgatgctggggctccggggcgaggagccacccaaacgggaggcggtttccgaccctgagtacgtgttcttgctgcgccggaacgaccagccacgcgcaatcgcggccatgatcatcg

SEQ ID NO: 676815 - DNA, 165 bp, Homo sapiens
aaagggagggccccccctttgccccctgctttttcccttccttttgggggctctacccctcaggtttcccggccttaggcatttcaacccagcttgtttcctgcttttaggcttgtggggtgggagcccaaatggaggtcggtgaaataaagtgatgccatttga

SEQ ID NO: 676816 - DNA, 197 bp, Homo sapiens
  misc_feature (15)..(15): n is a, c, g, or t
ggtctgtcaccagtntggagtgcagtggcacaatcacagctcactgtagcctcaacctgccaggctcaagcaatcctcccaacttagcctccccagtagctgcgactacatggtgtgtaccaccacgcctggctttttttttttaaggtagacggagggtcttactatttgcctggcaggtctcaacctcagaaaaa

SEQ ID NO: 676817 - DNA, 350 bp, Homo sapiens
ccgaggcaaaggggtgcacagctgagcagagcagtgaaggggaagggccagacgaggtcagtactgagaacgccgaaggtaggaggccatttcataacatcacttgtagatcaaaccaccgtgaaccaacttcttatgcccatcagcaggactagcgtcttgtcagatcttggatagacaagtgacattgaaggtgggggccccaccgatgctcttgagataccgaagatccatgctaaattccccatcctgcagaagtgaatcccggatcaacgaacatttctggcccccaagtgtcagcccattcacgtaaaaacttgaccggtctttgacaaacaggacaaccacct

SEQ ID NO: 676818 - DNA, 1254 bp, Homo sapiens
tctggtaactttttttttaattttttccaatttttcctatcttttttttgggccatttggtaactcgtataaaaattagttagacaacgtgctcaagtggtggcgggttttttctcacaatttttcaacatttagtgattttttttccgtgttgtgcaagttaacgagggtttgctcatgtgttctctttaaaaaaaaacttacaattaatgtgccccatattccctagttgcttaagggtgctctcttctatttataataggggtctgaaaatttcgtgaattaaccctttttagccttgtgacaaaaaacacaccaaaaaccaacaaagcgtggacaacaaaaaaccccgtggcttatttgtgggtacacaataatttttcttttttcccgtggcttgtggggaaacccgtgttgtctacagtgggcgagcgaaaaacgtgtgtatagccgtgttcattgggggtccttatttagaacaacgtgccttttcacctctccagaagaaaagctgtgaacaccatgtgtggtcaaacagtgtcttctggggaaactccttgttgtgtgtccgcaagaggagcccacagagacactttgagtgttgcttttttaaaaaaacacaaaatacacacggagggggcacacacacctgtgtgccgcacaccaaatattttaaagacaccacaaacaggtggttttctcggcgcgcaacctacaacaacctacatatatactatataaacaaagcacacacctccacactacacgacagagaagaagaacaacaaacgaacacataatcagaacgatacggcagggcacaagaggagaaagtgataaagcgagacagcactggatgatcacggaatcgaactagatttagtaacgacgactcaacataaaaatacatacgagcaaaatcacaaatagtactcaactagaaacaacaacaaaataacatgcgatatccacgccaaactagaaaggtagcagtagtggtgggaggcgacaaacaccatttataaacaattcattatactaaacaagagtcgtctttccatcacgcctccaaaatctacacaaaaaacactcaaccacaatcctacataatacatattcataatatatgtctgctatatttcacctatttaataaatatgatgtccagattctaatacttatacactacatctctctacgctcacatccgtatgatcataatcacaccaaatgcatatcatataccttttagat

SEQ ID NO: 676819 - DNA, 271 bp, Homo sapiens
  misc_feature (96)..(96): n is a, c, g, or t
  misc_feature (136)..(136): n is a, c, g, or t
  misc_feature (191)..(191): n is a, c, g, or t
cgcggcccgagcccaagagagctgtggtctgcagggagaggggctggtggcgaaggttctggaagcggccgggacaggcggcgatgggcactgagncatcggccgcctggtgctccccagtgccttccacacggcnccgcacgggccgagcgcccgggcccggactagcaggtggtggctcacgatgcggngcacacttccacgctatttaattgcagtgtacagagtcgtgtttgtatatagaataaactgtcgtggacagtgtgaaaaa

SEQ ID NO: 676820 - DNA, 360 bp, Homo sapiens
gtctatcatatagttgaacccagaccatgacccctaacaggggccctctcaggcctactaatgacctacggcctagccatgtgattgcacttccactgcataacgctactgatactacgcctactaaccaacacactatccatataccagtgatggcgcgatgtcacacgtgaaagcacataccgaggccactacacaccacctgtccacgcaagatatttctgagccttttaccactccaggctagcccctaacccgcaactagggggacactggcccccaacaggcatcacccagcttccactagaagtcccactactagacacattcgtattactcgcgtcaggagtatctcacctg

SEQ ID NO: 676821 - DNA, 327 bp, Homo sapiens
ggtctcaagcaatcttccctcctcagtcttaccagtagctgggactaccagtgagtgccaccacacccagctactgttttaagtttttgtagagatggggtttcaccacattgcccaggctggtctcgaactcctgggctcaagtgatcctcctatttcagcctcccagagtgctggaattacaggtgtgagccactgtgcctggctgccctcatttctttgccccaccacaatggcatcttttctttttttattatttttttttatttttgaggcagaatctcactctgtcgcccaggctggagtgcagagcgagactccatctca

SEQ ID NO: 676822 - DNA, 116 bp, Homo sapiens
aatcagctcggtacctaacagaatggtatattcctctggaaaaagactaacgtcaccaatggattgtgctgctctcgtttcatgctttgattttttttgtctttgagccgaaccct

SEQ ID NO: 676823 - DNA, 975 bp, Homo sapiens
cttggttataaatttaggtatgtgtttcatacctagggtataaattagtgtccgtgtatcatacctatgattctatattccttcgtctacttttctatccttgagcggcagtaccatcactctctgaattattatagcatttgttgttgtcgagaacagggtcttgctctgttgcccaggctggaatgcagtggcaggaggatggctcattgtagcctcaacctcctgggctcaagcaatcttcccacctcagacctcctgagtggctgggagactacacgagtgcatgccactatgcctggcttatttcttacatattattgtagagacaggggatctccctctgttgctcaggcggtcttgaactcctgggctcaagcaacctttcacccaagcctcccaaagatgcatgggattaccggagctcagcctgccatgctcagcctagtatagctatcttaataagcacttaataggagttctgtattagtatccttccctgcactgtaaggcatatacctggcccacataattaattctatgctgctttctgtttaaaactccacactcactgtatctttagtcagtttgtgttgccatacaggactactcgcgagtaggccaacaatattggcccctgccattcttcccccctgagtacgaaagcatagagtacacatcttaggcaataagcgcactgccaacagatttgaacgtaccggaaccgggcacaagcacacggagtaagacgtcgggataagagacaattcagaacgtgacccacagtaccgctgcctgcagcccgcccacgcagcatgaaacacgagggcatccatttcacgccgaggtcatcgtggatgaaaccatgacaaacaacgcgagcagcatagacaccacgactgctccacttcccgtcaccccgacgtgggcgaactgcgataagacgacagactcgctcatgaccggaaaggtgca

SEQ ID NO: 676824 - DNA, 420 bp, Homo sapiens
tgtatatatcagctaggtctggtggtgtgtgtctagcagtcctagccattgggactgaggcagaaggatagattgagtccaggagtccaggagttagagcccagcttgggcaacacagcaagtcctcgtatcttggaaaaaaaaaaaaaaagggaattgattaaaaggatatcccaggctttttctattcaaaacaaagcgggattattatttttattttcgggcagagcagattttcactgtatgaagatttttcagagagtaagaagagctttacataattgaaaagatggtaacaactcatcattgttgtggccctaacaacagagcatcaaactgtgtgaggcaaaaactgatcgaatctgccaaaggtaatagataagtcagtaattatagttggagactataaccccctctatc

SEQ ID NO: 676825 - DNA, 242 bp, Homo sapiens
tttagccctaccggattttttatttggggtcttttttattgctggattggtctttttttcatttttctttttcaaaaattttgcatctggcttgggtgcctccagggatgtggaacccttgggtctggagggacacctggtctctccattggggaaaaaattcccttaacctggagaatacttttgccccttttgctcaatctgctcctggatcccggctgtgtcattttgccccgatcctt

SEQ ID NO: 676826 - DNA, 109 bp, Homo sapiens
cacgagggttacttcgcctctgtccgaacaattgtgcttcttcctgtccacgtgagctgcgagtttgtgtatcactctaaggactgttgacaatgtctgcattgtttca

SEQ ID NO: 676827 - DNA, 339 bp, Homo sapiens
ttttttcccccccgggccccccccccaaaaggggttttttttggggggggggtttttttcccccccggggccgggttgggggggacccccccccccccctcaaggggggttggggggggtcgccccttcccccgggggaatttagggttttttcaaaaaggcccccttttttttacccgggggaaattgggttttggcgctttgttaaaaaaaaaaaaaaggggggatcgggggccccccccccccggggggggtttttcccccccccctttttttgggttaaaccccattttccggttttgggtttggccccccataaaaaaaatttttgccccccca

SEQ ID NO: 676828 - DNA, 203 bp, Homo sapiens
ttgggccagtccgtaccatcgcggctccacacgagaccggacacgacagacccttatgcgcgcgatgccgacggcacgccggcaaggaacgcatcgtaggccgcaatgaactcggcctcggcttcgaagtgcggcatcgcaccggtcggaaaaacctggatagtccagttcggacgaccttcgacctgcgtcttgttggcgtg

SEQ ID NO: 676829 - DNA, 633 bp, Homo sapiens
  misc_feature (228)..(228): n is a, c, g, or t
agacatacctgatgtaggtgaccggttgatgggtgcagcaaaccaccatggcacatgtatacctatgtaacaaaactgcacgttctgcatatgtatcccagaacttaaagtataaaaaaaaaaattcttttagaaaagtattttttatttttatagagttagggagtacagttgcagtttttgtttgtttgtttgttttttcttgaggagtctcactctgcaccccangctggagtgcagtcgtgtgatctcggttcactgcaacctccgcctcctgggttcaagtgattctcttgcctcagcctcccgagtagctgggattacaggtgcttgccaccatggctggctaatttttgtatttttagtagagacggggttttgccatgttggccaggctggtctcgaactcctgacctcaggtgatctgcccaccttggcgctggggttgcaggtgtgagccaccacacctggtcacaggtgcagttttgttacatggatatattgtgtagtggggaaatctgggcttttagtgtaaccatcaccaaaatactgtacattgtacccaaaaggtaattgctcatccctcaccccctcccacctttccaagcctccagtgtctattattccacactc

SEQ ID NO: 676830 - DNA, 389 bp, Homo sapiens
ggggagggccctgttcacctgccccctgcctagctcaatggcgggccaggatcatggactgagggggccaagaaggatcgtatgttgccaaaggagggagctgaggaactgctagagggcatctccgagggcataggcaggactagagggctttgggcaggagctccgtcagctaggagtggcattgagcaatgggggaactggctcagagtcccccttagaacctccactgccccttgaggaggaggaggcctacgagagcttcacctgtccccctgagccccctggccccttcctgagcagccctttgcggtctctcaaccagctgccaagccagcccttcactggccccttcatggctgtgctctttgccaaactcgagaacatgc

SEQ ID NO: 676831 - DNA, 939 bp, Homo sapiens
gtagacagctaaaagtttggtgttagcgtggttctcgcatgttaatctttgtttggtggtagttggcggcgggttccgtggacggcccagcgtgtgaccgccgtgttttagcctatatggggttccccctcgagccggccagtcctgtgcagatccgcccatgttcgtgcacaacatgatttccttgcggggccgcacatgccccggttttcgcccttcgccgcgtttaaagaaactttgttgccggccccgccttgcaccccgtctggtgttgatccaacacttcgcttccttcaaggggaacaaccttgggcgcccagccgagcattggtcttcccggcttctcgcccccgccggagtgtttggtggtcaaggcccccgcatccgagggggggattctgccgggggcacaaaaacgggggtgccgccctgtgtatgcgcctatgtgccgcttgtcctggctcttatggtccccctgctccctggtgttggatggcataagattttcgcttgtatatccgtctgttgggtgaagcgccataggctctttggagttttccaaatcgactcgtcttgtcttccccctagggttgatctcgcggactttgcgtccgtccttctttccgggaccgtggtgttatgataagacgcctgtgttctcggtttactgtcgccaccatgcatggttcaacgttacccttttgtgttcccccgcacgggtagtgcccccgcctcgcctgttcagaggtgtcctctcttgccaccaccacttcgtcggcttggatgactcaatttgtcctccgacacagatgggttggcatttccttattctcgcggggcgccactaaaaccttcgggggatatgtattaatagttaggttccaaaaatggggttcatttaaggcccaacaccctatatgacccccaaaaaccaaaaca

SEQ ID NO: 676832 - DNA, 109 bp, Homo sapiens
tcaagcttctaacgatgtacggggacatgacttattatgcataaagccaaatttccagtttaagtaattgcctacaataaaaagaaattttgcctgccataaaaaaaaa

SEQ ID NO: 676833 - DNA, 340 bp, Homo sapiens
caacctcataaggtatataacgaagaagtctggtactagctagcagggagattgactgactggatgccaaatctaaacatagagaagttatagaaatctatcataggattgtataaggagaccaattttatttagatagggactatttatttttgaactggatctctaagctctgggctgagcccacactgaatcctgggtcttcaaaaagagaattattttaaggttagaccacatgatgcatatacagtgcacttaaaaaacaaagacatttctaagtgcctgaactatactcttccttaaaaaccccagagaagcctcggttgtgtaacgtctaggt

SEQ ID NO: 676834 - DNA, 450 bp, Homo sapiens
  misc_feature (35)..(35): n is a, c, g, or t
ttcggaggattcctcagggcggtcccctatggggntccaaaaggagtgtcagacgtctctgacctttctctgcatgttttccctccagagcctcctatgagctatgagtttgataaggatagccctgaactgtaatgatacataggaactggatgctgggtgggcttttttgtccttagatagttgaataggacaagcaaaaaacttagcataagaaaaggtttaagtcacctgaaacaagtgtgagttaccaccaccaccgtagggatcagggaccacacctggaaaagataaaaaaaaaaaagagtcattcccccttctgggtagggcaattattcccattcactctttgccttcaggcgataccagggagtgaccccagcgaattgccctcaatttccaagaagctactaggaaacagccgctaaaagactgaaaaacaaacaaagg

SEQ ID NO: 676835 - DNA, 102 bp, Homo sapiens
aagaaattgggtattgctatgttgcctgggctggaatgcagtggctattgccagacaccatcatagggcagtgcagccttctggggtcaagtgatccttcct

SEQ ID NO: 676836 - DNA, 605 bp, Homo sapiens
acgattgggtgcgataaatcaactcatgggccttaacttgatctctctggatctctctccaacatcggacaacagtttattattccatcctcttgaaacactttcttcaccgggcttcagcatgcactctcaactctccttctatctaccgggcctctctttttcagtctccagtgctggctcctcttcacctcccggacatccgaacattagaatgccccaatgctcagttctgagattctttttttttttttcaacaccaattctcaaggtcatttaatccagttccacggtttaaaaaaaccatggatatggcggtgatcccaaaattaatatctcaagccttaagagtggtatatccaattcttcacaagtgggtatctcaactttagggggtccaaaatggaggtccggatatctccaagatcggttcttcgggcattctctccaatctaatttaccagcactttaagccttcaagtggtcagaccaaaattctaggtatcatagtggattctttaatactctacatttaaccaaaaaggaaatcgggtcaggtcagacaggtcagattatataacaaggagctggtttctcttcacctc

SEQ ID NO: 676837 - DNA, 618 bp, Homo sapiens
caaattttcctttaataaaattgctgttttaaaaaaaaaaaaaaaaaaaaaaaaaaaaaaaaaaaaaaaagaaaaaaaaaaaaaaaaaaaacaaaaaagggggcaaaagtaaagaggaaccaaattttatgagaaaaaaagaggagaccacacaaaaagggaaaaaaaaaaacggccaagcaacacagggcgcagcacggacataaaaacaggaaacagaacctgcggacagcacacggcactacctgcggccaccgtccctggtgaacaccgcaggacccctattaccctcctgcccgcgacgcgtgccacatagcggcgcgcgcaccaaaccgcctccgcgctcgccccgtaacaccacctaccatccgccctccaaaccagggctaaccacactctcacacctctccacaccgcccgcctatcaccgcgtgccacaacacccaacctcggcccactgtcctcgacgccgcccatcagacgacacctcatgccccgcactgtgactctattgcctcttgcagccaatcttctcttcctcaccccgcgacaccccatccccaataaccctcccccctaccgccccccacccccccccccacccaccaccgacccgac

SEQ ID NO: 676838 - DNA, 113 bp, Homo sapiens
atttgtgtatgttaatcttgttccagaaactttgtgaattcttttatcagttctaggagctttctggaggagtccttagggttttcaaggtaaacgatcacatcattagcaaa

SEQ ID NO: 676839 - DNA, 164 bp, Homo sapiens
gctggatgtatggtttgtaaatatatactcccagtctgtagtatagcttgtatctccccttaacagtgtcttctgcagagcaaaagttaaaagttttgtaaagcccaatttagcaatttttctttttctttctttctttttcttttcttttttttttttcccag

SEQ ID NO: 676840 - DNA, 260 bp, Homo sapiens
  misc_feature (224)..(224): n is a, c, g, or t
aaggacgaggacatctaccggagccggctcccccactacttccccgtgggtacgtgccccgcgccgccccacggcccgcccctgccccggtccaccctgaggtcctcactctcactgttctctgccttccagcctgaggctcccgttttcttttctgaccgggactggtaagcagggcctcgccccgtgcggcggccccggccctagactaacccgccccctancccccgctcacccccaagcagggcgggaatccacgg

SEQ ID NO: 676841 - DNA, 424 bp, Homo sapiens
gacagcctgagtactatagacaggtcagcaaagtgactgccccgttgccgtggcctaccacactgtgaccaacctatgctggagatgtgaattactgaccccaccacacaccggaccaccaagagagccagtgctgctgtaacgcgactcaccagcacagatttgctcagaaactctgcccaagattgtgcagaagttactttaaaaagacttggatcaggctggtcacggtggctcacgcctgtaatcccagcactttggaaggccaagccaagaatggatcatgccgccaggagttcgagaccagcctgaccaatatgttggaaaccccatctctactaaaaatacaaaaattaacagcagagcgaggactctgtctcgaaaaaaaaaaacacacagcgtgggtcccttggtttattcaaaa

SEQ ID NO: 676842 - DNA, 894 bp, Homo sapiens
  misc_feature (88)..(88): n is a, c, g, or t
tgaggcaggagaatcacttgaaccgaggaggtggaggttgcggtgaggtgacatcgtgccattgcactccagactgggccacaggagntgaaacaccgtctcaaaaaaaaaaaaaagaactttgccaacttctagttcttgggcctcaaaacaccccatctaggcatgtccctattattccttttttcagaggcactggtgccagcctaggtgaatgaaaagttacgacgctatagaagcattagaaagcattcgaagttgtgaactctcaggctcaagccatttatactagagccgtggtgaaatctatagcggcagactgtggtgtttatataagaacccacgtgaaattcttgtggcctcgtgatgtgccccatgagcagtggaagctgcacggtgaagttggccatgtgacctcaatagcctctactgtgcgagacctatcaaattctcatgtgtggcttcaaagttgtttcctatccacaaccaatcaagacacttcacgtgaacatttagccagtggagaacgtatcacaggaccattaagaccgacccaacatcgagtcgaggacttaaaatattatataaagatgttgtagattgatataatttagcacgacccgaagggactcctccaacttccaccgtgtgtgttgaggcccacaaaagcctttgggatcattccagaaaagctcttccctgtgggctccctcccgagagacaaaatcccagttccccaacaccttttggtggcgctatacacaaaaggaggatacttgtggagcagaattagcacccatgcaatattgaagcacaaactgtgcattcccaacaagaccattgagacgaaatagatacaataataggcattaatatataataagacacgaataa

SEQ ID NO: 676843 - DNA, 471 bp, Homo sapiens
  misc_feature (83)..(83): n is a, c, g, or t
  misc_feature (149)..(149): n is a, c, g, or t
  misc_feature (152)..(152): n is a, c, g, or t
  misc_feature (157)..(157): n is a, c, g, or t
  misc_feature (166)..(166): n is a, c, g, or t
  misc_feature (175)..(176): n is a, c, g, or t
  misc_feature (184)..(184): n is a, c, g, or t
  misc_feature (192)..(192): n is a, c, g, or t
  misc_feature (202)..(203): n is a, c, g, or t
  misc_feature (226)..(226): n is a, c, g, or t
  misc_feature (230)..(231): n is a, c, g, or t
  misc_feature (234)..(235): n is a, c, g, or t
  misc_feature (246)..(246): n is a, c, g, or t
  misc_feature (249)..(249): n is a, c, g, or t
  misc_feature (256)..(258): n is a, c, g, or t
  misc_feature (265)..(265): n is a, c, g, or t
  misc_feature (277)..(277): n is a, c, g, or t
  misc_feature (285)..(285): n is a, c, g, or t
  misc_feature (299)..(299): n is a, c, g, or t
  misc_feature (305)..(306): n is a, c, g, or t
  misc_feature (315)..(315): n is a, c, g, or t
  misc_feature (319)..(319): n is a, c, g, or t
  misc_feature (321)..(321): n is a, c, g, or t
  misc_feature (338)..(338): n is a, c, g, or t
  misc_feature (421)..(421): n is a, c, g, or t
  misc_feature (423)..(423): n is a, c, g, or t
  misc_feature (426)..(426): n is a, c, g, or t
  misc_feature (428)..(428): n is a, c, g, or t
  misc_feature (451)..(451): n is a, c, g, or t
  misc_feature (459)..(459): n is a, c, g, or t
  misc_feature (462)..(462): n is a, c, g, or t
aagctttcagtattagtgatgtcatctgtccctataggtcaaccaatccattcttaaaggacttgttatttgtttttattaanacgggttgtcttctccccaggggtcagtcctcaaggggccatcctgtccccccatgcagtgccccnagnttaangcctccctnaattccccnnggcccccncccccccntttgggcctnnccttaggagttttgtgggcattnctgnnaannagccccctggnganatgtccnnnattgggnaaattgaaaccnggaattgnggggccatttattnaaagcnnccttaaagncagnancttccccttaggggggntgggggaaaaggttaaattttgtattcaggggttttttggggcccttttgggttttttaaaaattgtttttggggggggttangnccnanccctgttttttttcagggcccanaaaatttnggnaggcttcca

SEQ ID NO: 676844 - DNA, 953 bp, Homo sapiens
  misc_feature (759)..(759): n is a, c, g, or t
agcgggaggattccttgagcccggggggttgaggctgcagtgagccatgattgtgccattgcactccagcttgggtgtcagagtgagagcctgtctcttaaaaaaaaaaaaaaaaaaaaaaaaggaaaataacggggttgtagatagtaaggtagggaaaactggttaagtacaccgagttttttaacaaaattaacaggcttttatttggagactttaatttcagtattgccattacgaggttatagtaccggttaagcgtttaacgaatccaagggtggtatcttaagagataatattctcgacaggtatatttgcaccgccaaatcgacgcatgtatatctcgagggttttatacgtacaatatttgtcacagattctattattgtcccatttgtttccctcccccattttgtggacgacaggctaacgactttcacactattcattttgggggtcaattcgccccaaggaaaacgaaaatctccatgtgtgtatctccccatttatagccagagttcgagccgtgcgctatataatatatttctgtgggcacaaactttttgccgccaagggcaccattaaggtgcagagcaagacgcccagcgaagtatgtgtgtatgttgccctagggctctgtgcgtcccaaaccatgtgtgggcaaacactctctaatgagagcttcacatcgtagatctgttctattagcgagaaaagctttgtggtcatatcatacattctgccggtggggagaagcanacgctcttgatcggatcatactataccgcggggcgcgcgaaatactccgactattacccgatttctactgtgacaacagtggggcgagatttctacacctatttagcggcagtatataaaccaacagataagacgctgggttacttagcccaggggggggttatccccttccccaagtgtgttgtgtgtgaggc

SEQ ID NO: 676845 - DNA, 291 bp, Homo sapiens
gtttttccctttttttggggggggcccggggatttaaaaactgtaaaaagcttgggccccaccccctttggggggggggggggggggggggggggagccccccccccccaagcccccgggggggtttttcctttttttttttttcgggaattggggggggtccccggtttggggggggggggccccttgggcccccggatttgggtttttttgggggggcccccccccccccccccccccggggatcgggggtttgggttttttttttttgtttcccgaaataaagaatta

SEQ ID NO: 676846 - DNA, 605 bp, Homo sapiens
  misc_feature (600)..(600): n is a, c, g, or t
ggtatatgggatctcaaaagcacagagctcaaaggagacccctgtatgcaccagagcttaggatgtgctttagaaggcattaccaaaccacgggcaaagttactttagtgtcttagtcttactaggtttgaaaagccagagaaaagactcaaggccaccatataagagcaaaacaaaaggacagggagagaatgtgaagatactgaaacattttacataaagttgtataaaacatcctttaaagaaaatgtaaagtttaggatatacatcaaaatcagcagagccactaaataaataaataggcattgtaaaatagcaagagaaaatttaaatggatttctaaaaaatattgacacctatgatttttaaaatatgtttaagaaatcccgtatttcacagggcagcctttcacaacacagatatgttaggacataaaggtccttctgtttttaatttactagtgtttatagggttacaaatgtcttctacccttgtcttttgtctgatggtgcaaaaaattttcataagcatgtatttctgaatgcctgatggattgacatatataatatgctgctagtattaaaatatgtgacggaaaangcaaa

SEQ ID NO: 676847 - DNA, 206 bp, Homo sapiens
  misc_feature (3)..(3): n is a, c, g, or t
tangaacaagtgtcagaattaaaacttcaccaggcttgttttaattagtttctagaacttaaggttttcatttgcttcagaatatgtacaaaatatcacagctacttgaatgatccttttaggatagttctggatccaccttttaggatggtgtggataaataggtgtggcctggtagatttctgtttcctaatactgatggggag

SEQ ID NO: 676848 - DNA, 155 bp, Homo sapiens
  misc_feature (103)..(104): n is a, c, g, or t
  misc_feature (108)..(109): n is a, c, g, or t
aaaaaattgtatgtcgattgaattgtactggatacattttccatttttctaaagagaagtttgatatgagcagttagaagttggaataagcaatttctactanntatnncatatctcctatgtttcacagtttccccattttaaagagaaaagca

SEQ ID NO: 676849 - DNA, 312 bp, Homo sapiens
agctcggatccgagatttctccttacaataaatcttgctgctgctcaaaaaaaaaaaataaattaaaaaaaaaaaggggggccccccatttagggccttttcccccggggaaaagtttgtccttttcctttttaaaaaaaaattgggggggtctaaaaaaaaaaaaaaaccccccctttttaaagaatttcttcgtggggaaaaaaacctttttggtggggtccctctggaaaaaaaaaggggccttttggggaaaaaaggcttattttaaaatgggccccccccctttttttttttttggaaaagaactaa

SEQ ID NO: 676850 - DNA, 1031 bp, Homo sapiens
  misc_feature (1029)..(1029): n is a, c, g, or t
ccaagctgtacctttgagggagaaaacactgtcatgagtgctccagagggctaccgttcctgatgaataagttatgatcaggtgcactcaggaagagtaggtgtgtggcagtggtgtcctatttgaactgacgctgcccagtcagcgcatccagccgacagcaggtagcagtctggcgcagactcatggtggatatcaagagcgcgccgcaaagcctaacctgatagcatatagaaactcccgggtgacagcgcagattagtaggaagattgtctgtcgagaacaagacctgtcaaaagagaagtgattcgctaggaatagaagcatgggaggtagcttggaagcctgaacattcgtgttgagccgtggtggcgagcaaggtgaggcacattgccactatgatggctaggttaggctcttttcagaaaaactcctcagaatgcaagatagaagccattcggagctggtgcttgaaggagatttatgtttgcgtgtattgctcgtggtaatggaatcaggtcagaaacgcgggggattgtccttcaggggagcatcatgaacagagcctgagattacacaagctaaagcagcgtgtagaggagttactcactcgtgattcgctcagatgctggggcttggcatgatggatttgatttgcaggatgtgacacttgggtctgtggtggcgtatgatgggaagtgtatgaaactttgtggagtgggtaaggatgcccatgacaaggagaggtcaggaatgttacagcacctgaagtagtggcgtccaagctatgagtgtccaggacaggttgagctggttagaaagggcgggtgaatgaaatgtggagctgtcgaatcaatagtttaggaagatagtggccgtttattggggggaataggataaataatgaaagaagattagtggtaagagaacaggcacgaaaagaagagaactgaggtgcggaaatagaaaacacgaagttaaagaggaaaaaaagagtacgatcgcttagattacgtctatgtgtgttanac

SEQ ID NO: 676851 - DNA, 441 bp, Homo sapiens
tattccacaggggatgaagagctatatggctagagctgtggtatgtgcactaattgagctatataacattatcgctgttgtcatccccacagcttctctgagtgatcaagtacttgttcctcattttggaatgttttgcagaatattgaatctcatagaggtgaggtaattgatccaaggtcgcatagcccagaagcaacggctataggacttaagtcttggactgtttgagcagtgtatcatactgccagtgattgccagtcatgtgccatgtatctttgtcaaataagatccttattcgtcgagtctggattggagctactgaaaggagttgtcagggtgagtggtttgcttcccctcttctcatatgttgcagagcgttgagggaatgagtattcactctcctgcttcttgtccctctggctacttcagttcaccaca

SEQ ID NO: 676852 - DNA, 562 bp, Homo sapiens
  misc_feature (52)..(52): n is a, c, g, or t
  misc_feature (202)..(202): n is a, c, g, or t
  misc_feature (338)..(339): n is a, c, g, or t
aactttttctaagtttaagagtctagagtttattgggccccctccttgggtnaattcttcccttgcccatcaccttggggccccggggtggggggaggtgtccatatcaaattgcccactctgggcaagcataaaaatttttcggaggggtttaaccggtggcgctttcaaaaacaaggcccagcgggtttggacccggctncggtggggggggtttttaacttttccaaccctccccccctgggcttttcaaaggtggagctggcgcaaatgttggtggccgaagtaaacttgtttatcaaaatggagcagcgggtggagcagggccaggccttttnngcctttttgcctgcccaaaaattaagcccggcccccccccgaacccagccctgttgttttttaattttttgcctgggcagggccccccatgcccccctaatttttcccttttggggagcccttacccttgttgtaaaaacttccgtcccccttgggagagttttttttttttatgggtaaaaaactgctgatgttgaaataaattaggtgttttggcccccca

SEQ ID NO: 676853 - DNA, 222 bp, Homo sapiens
  misc_feature (107)..(107): n is a, c, g, or t
  misc_feature (109)..(109): n is a, c, g, or t
  misc_feature (148)..(148): n is a, c, g, or t
  misc_feature (166)..(166): n is a, c, g, or t
ggagtattttgtatgaatagacatgggttagaaagtttttacgtctatcatttttatttttattaattaattaattaattaattattgagactgagtcttggctttntnacccaggctggagggcagtggtgtgatctcagcccactncaacctctgcctcctggncttaagccatcctcccacgtcagcctctcgagtatcgggactacaggcgcacatca

SEQ ID NO: 676854 - DNA, 507 bp, Homo sapiens
agaggatccttggctcaagtgatctccatcaggacgtggatatgtatggaatcaagtatgtcgagataaaaaagaagaagaggaacagaccatttgggttggagttgatgcccttggactgaatatttatgagaaagatgatagtaaccccaaagattggctttcttggagtgaaatcaggaacatctctttcaatgacaaaaagtttgtcattaaagccatcgacaagaagggacctgactttgggttttatgccccaagtctgagaatcaacaagcggatcctgcagctctgtctgggcaaccatgagttgtatatgcgccgcaggaagcctgagaccatcgaggtgcagcagatgaaggcccaggcccgggaggagaagcatcagaagcagctggagcggcaacaggtggaaacagagaagaaagggagagaaaccgtggcgagagagaaagagccgatgatgcgcgagaaggaggagttgatgctgcggctgacgggatatta

SEQ ID NO: 676855 - DNA, 208 bp, Homo sapiens
ctacacggatccccttggctcggcatcatgctttctctcctaatccccagttgtcgtcactgtgtactgagattgtgcatgtggcttatgaagaaccttgccattgaggacccagcttgaagcaatacacttcgtgagccttatcgctgcccctgggctacatctttccactctcagaccagtgttctcaccatcaaggatgatggca

SEQ ID NO: 676856 - DNA, 136 bp, Homo sapiens
ctactccctaggagaggtggatactatgaagagtaggaaagctgaaagtttagtcgcgtccccttgcaatgcacatggtgtggatggctctcaccatatcctaagagatacatagtaaaacgtggcatcgataaca

SEQ ID NO: 676857 - DNA, 758 bp, Homo sapiens
ccagaatggccacttcattccggaggctggctctcctgcttggtagggaagcgagcccgaaatgaagtgggcatatatggaaggctgcggatcccgggatcgtgaacctggagtgcatgtacgagacgcctgagaaagtgtgtgtggtgatggagaagctgcatggggacatgtggagatgatccatgaccagtgagaacggccggtgcctgaccgcctcacaagtcctcatcaccccagatccgtggtggctttgagacaccttcacttcaagaacatcgtccactgtgacttgaaaccccgaaaagtgttgctggcatgagcagagaccatctccctcaggtgacgctgtgtgactcccggctttggatcgccatcatcgcaccgacgaagccgcataccgccgacgtcacagcggctagggaacgcccggaacataaccatggagaccccgacggatgacagcctcaaacccagggcacaccaaaccgcctaacgactggaaccatggtgggtcaagggccgcagctgaacacactgctaccgtacagccatccagagaaacacataacccgtgaacacgacgagctggagcgaccatcacagagacccacaacccgagaaaagccgccccaccaaggtccccgagacaggcaacaggacaacactccacagactgcacgcccatgaaccaccacacacaaccagctgcagctgcaaatgccacaacgccccgggcgacccaaacacagcacacg

SEQ ID NO: 676858 - DNA, 438 bp, Homo sapiens
gagatgttactacaacttggtgtctacctgtggtaaattaaattgattggacatgatttggaaaggcacacacttgtctatataaggtcccatagttgacagtgcatgtcagagcaaaaaccaagcaataaggttgaaggaattgttcgtagagctccaacacaggattgtgtcgaggcacagatctgcggaagggtaccataacatttctgaagcattgaaggttcccaagaacacagtggcctccatcattcttaaatggaagaagtttggaaccaccaagacgcttcctagagctggccaccaggccaaactgagcaatcaaggggagaggagaagggccttggtcagggaggtgaccaagaacccaatggtcactctgacagagtgttcctctgtggagatgggagaaccttccagaaggacaaccgtcgacgc

SEQ ID NO: 676859 - DNA, 118 bp, Homo sapiens
tttttttcgggggggggggggggggggggggagaggaaaacaactttttcttttttaaaaaagtgttttttccccccccccccaaaaaaaaagaaaaaataaatattttaaatataca

SEQ ID NO: 676860 - DNA, 245 bp, Homo sapiens
ttacggatcttggtgtgtcatgcactacggggcattgagtcagctcccccaagatgagctgcagcccgccagagagagctctgcacgtcaccaagtaatcaggcctcagcctccaggcccccaaatccgcccagactctcccgctctggatcctgcactctaacactcgaatctgctgctcatgggaagaccagaattgatcctgattaaacacaccacggggtttcccgagctcgaaattcgta

SEQ ID NO: 676861 - DNA, 805 bp, Homo sapiens
ccaggtctgctcggtctcctggaggagggaggaaggggattaggaatcctgaggcaacatgtgcgtgagaggagcgctgtgtgtcaacttctctactctggggaagtaacctcgatcaacctgccttccttgctgagctgcatcgggtacctttgaggaaggtctagtgaaatgggtctttccagttacatctggatgtactaccagagagtgctgctgctgttgttttttttagctttgtcttactttgagtctttaaaggggcaattgtcgacactctgcaaacataccgatttgtcgtctgcccactttggagtccttcaatctgggcagtaactatttaccctttttcctgctagcctgtgcccctctctggattgaagtcacctgctaagacaatggactaccgaccagactcccggaaatcatgtggtaggatcccagtcttatttcgcctggagggcccaatgggatcattagaagccagtcctttgcgggtttcagcggcctccaggaaaggcgatccaggtgtaactccttcattgaaaaattcctccgctctcaaggaagctcaggcccaaactgagagaaacatgcacagtttaggcacaaaaacaacaatccccccaaaagagcctcagcctaacagggtggaagaagtctacgaggcttgaaaaatggacttgattgaatatctgggaggttcaccagatgaaatcggaagttgacagcccagttaagatatgaaagaactcctcgctgggtgatgtatgccaaaaagtcattaaaccagtggaggtcctcg

SEQ ID NO: 676862 - DNA, 149 bp, Homo sapiens
cgaggaggtggggctggcggggcggaactacactgtgaacacgacttggtgtggaccctgctcacaagcagctaagcctgccatcctgctgcctggcctccctgtgctgtccacctcctctgttctgtcatctcctcgtgtgctttcca

SEQ ID NO: 676863 - DNA, 315 bp, Homo sapiens
  misc_feature (291)..(291): n is a, c, g, or t
ccaattttttcctggaattttggggccaattccggtttccttttttaaaattttaataagggaacccttttccaaaacccggaatccaaatggggtttaggggaatgaaataaaatgtggtttagggtaatggaagcccttttagaacctggggggattaactttggggaaaaaggggaaaaatcccccctggtctgttaggggccccccattttagtatgggttgttggcaaagaggggtcccccgtttcaatgaaccaagtggatgttgtgtttttacgagaactaaanataaaaacaagggtttatcctgga

SEQ ID NO: 676864 - DNA, 369 bp, Homo sapiens
  misc_feature (19)..(19): n is a, c, g, or t
  misc_feature (26)..(26): n is a, c, g, or t
  misc_feature (68)..(68): n is a, c, g, or t
  misc_feature (87)..(87): n is a, c, g, or t
  misc_feature (96)..(96): n is a, c, g, or t
  misc_feature (181)..(181): n is a, c, g, or t
  misc_feature (202)..(202): n is a, c, g, or t
  misc_feature (218)..(218): n is a, c, g, or t
  misc_feature (229)..(229): n is a, c, g, or t
  misc_feature (305)..(305): n is a, c, g, or t
  misc_feature (319)..(319): n is a, c, g, or t
ctacaaatgccttcctaanaaatcantgtaattaaaatgtcttttagaaataaacttatttggaaacnagtagtaattcattagaangttagatgnagaggctgggcgcggtggctcatgcctgtaatcccagcactttggggggctgaggcaggtggatcacgaggtcaggagatcgagnccatcctggctaacacagtgnaaccctatctctgctnaaaaaaatacnaaaaattagctgggcatggtggtgggcgcctgtagtcccagctactcgggaggctgaggcaggagaatggtgtggnacccgggaggcggngcttgcagtgagccgagattgcgccactgcattccagcctgggccacaga

SEQ ID NO: 676865 - DNA, 288 bp, Homo sapiens
gccggaggatcatctaagcccaggagttccagaccagcctgggcaacatacccagctactcaggaggctgaggtgggaggaccgcccaagcccaggatgttgaggctgcagtgagccaagatcatgccatcgtacatgcctaggggacacagtgagaccagtttccaaaaaaaaaaaaaaaggggaacctttttggggaggcccttggaaaactttaaaaaactgggtttgatttggccctttttcgggggggtccccggcttgaaattcaaaataggggcaatggtt

SEQ ID NO: 676866 - DNA, 279 bp, Homo sapiens
ccgtggaccccccagagcccaggcacaagacaaaagcagcagcccagcagcccccacataggaagggaggggggcatgacccgctcccctggtggcccatccttggggcagctctctggaccctggggttccaggctcaggagagcccagagcagagtgctggttgagtctgggggctgcggcctccaccctcctatgctggcggttccttcttcctctctccgaatctccctctcacgctggtgcagctcgcctgcccttcttttttttccttcctcc

SEQ ID NO: 676867 - DNA, 220 bp, Homo sapiens
  misc_feature (123)..(123): n is a, c, g, or t
  misc_feature (167)..(167): n is a, c, g, or t
  misc_feature (174)..(174): n is a, c, g, or t
tttgtatttttaatagagacggggttttgccatgttggccaggctggttttgaactcctgacttcaggtgatctgcctgcctcggtctcccaaagtgctgggattacaggctttagcactgtnactgtctgcctggctggctggctggctggctttctttctttctnttttctntctctctctctctctctcttcctttctttcttccttccttccttcc

SEQ ID NO: 676868 - DNA, 500 bp, Homo sapiens
tctgtctcttctccattctctgtcttctgatctgtctctgtctctctttctccctctctctttcttcctcttccatctctatgtgcttctgtctgcgtctctcctcttcttctctctccatctccttcttcttctcatcttcttcttgtctctgttttggtattttctccattccctttctttcaacctctttccgtttgttgtgctcaccctccatcttctcctccatgtccatttggttctgtgtccatttatatttgtctgtttccatattttctaattctatccgctgttccttgattttcttgaagacttcctccaattcagacgtctttttgtcattgaggagggccgtctccatctccatctctctctccactctatttttcatctcctcttcacttcgtctccaatcattttctctctctctgtctctatcaaatgttctctctggttcagtcgtcgacgcggccgcgaatttagtagtagtaggcggccgc

SEQ ID NO: 676869 - DNA, 774 bp, Homo sapiens
ctcttttgaagaggggaattggtattcaccatggctggtttacttcctatgtttgaaagaaactatagaaattctctgtttctgaaggattgatagaagtgccttgatttgccacggagaccgtttggctatgggaattaacatgaccagtctagaactgtttcatttacaaatgcccgcaaatttgatgggaaggatgtccgatggatttcttctggtgaatacattcacgtatgtcgtggttcgtgctggaaggagagtgaatggatgatagaggaattgtaattcttatggtagatgaatgagatgagcccaacaattggaaatacaatctcacgttatgggctccggtgatcctctatatatgtgctttccatttgatctacaacatggttttgaacttactacgtgtagaagagattaatcctgagttacatgttggaataaatccttctatcagttttcaggattatacgagcaatttccatggagtagttatgagtaaggtaaagaatgtcagatagaacagtataataaattggtaatgcccaatgaagaaggtgtggttatctattatacagattagacgggggagccttgccttaatggggtaaagacctttgatcgaatatattcagtaatctaaaatagtgttacgttttcttagtaacaggtcgtcggtaagggtaaatgattgaggagatgactgtcggctggggagtagtggtgacttctcattgatgcatggtaagctgatctgtgaagtggatcttg

SEQ ID NO: 676870 - DNA, 329 bp, Homo sapiens
  misc_feature (79)..(79): n is a, c, g, or t
  misc_feature (170)..(170): n is a, c, g, or t
  misc_feature (179)..(179): n is a, c, g, or t
  misc_feature (276)..(276): n is a, c, g, or t
  misc_feature (315)..(315): n is a, c, g, or t
cgacacctttgaggccccaggtgaagcggggcctaactccggcctctgccttgggctcgctctgtcctcaggtcctctnagaggcagatacctaggggagctgctgctgcctgctcattctagcttccgattccattcccagcccctgcgttaaggtccctggagaggtngcgtcagtnggggtgaggaagggcatcttcctgactcctctgcccagtgctggaaggagcatgcctggggttagtgggccagggcagggcagatggggggcctttngggaccagaagggggagatgttgcttcccagagcctatnttgctgtaaagacc

SEQ ID NO: 676871 - DNA, 295 bp, Homo sapiens
atctgagaggctccccttggggtctcatattaaggtacaggctctacgacctcctgagccaactttaatgtaactggcttgcctaggctggggcttgaactcaagtaaagcaagccaaggagttcagatctagatagcagagaagtaagtctcataccaaagtattgcaaccattgttagagtccacccctatgaagctgtaacacaggcatggtgtcatctttgcactgaattctaataaagttatatattggtccagcactcaaaacaatatgttggctacagctaggtgggc

SEQ ID NO: 676872 - DNA, 196 bp, Homo sapiens
tgatgtaggtggctgcaggactgagggtggtggccatgctttgggtcagaccgtgcctgagcatataggagacacatgatgaggaggcagcaaaggatagggtggtggccgtggccctgggttgggctgtgcctgaggacattgtgggtggtgctcctgcacttggctccaggttgctgtccatctgacccatctt

SEQ ID NO: 676873 - DNA, 271 bp, Homo sapiens
caagaggtgtccatgccaagtcctcattcccatggtgatgccttatgggctccatcatgttagccagaatataccctgggagattatacctgggagacacgtagctcaacaagtacggaacatgtcttccctgctggtattggggggacaggatgaatatctgtctgataagctcactgagatatgttaggcttgttccctgtgaataatttatattttgagaaacctagtactttcaaattcatacaataatgagctgtgttatattagg

SEQ ID NO: 676874 - DNA, 612 bp, Homo sapiens
  misc_feature (19)..(19): n is a, c, g, or t
  misc_feature (61)..(61): n is a, c, g, or t
  misc_feature (85)..(85): n is a, c, g, or t
  misc_feature (87)..(87): n is a, c, g, or t
  misc_feature (100)..(101): n is a, c, g, or t
  misc_feature (149)..(149): n is a, c, g, or t
  misc_feature (179)..(179): n is a, c, g, or t
  misc_feature (191)..(191): n is a, c, g, or t
  misc_feature (194)..(194): n is a, c, g, or t
  misc_feature (196)..(196): n is a, c, g, or t
  misc_feature (211)..(211): n is a, c, g, or t
  misc_feature (222)..(222): n is a, c, g, or t
  misc_feature (229)..(229): n is a, c, g, or t
  misc_feature (238)..(238): n is a, c, g, or t
  misc_feature (267)..(267): n is a, c, g, or t
  misc_feature (278)..(278): n is a, c, g, or t
  misc_feature (282)..(282): n is a, c, g, or t
  misc_feature (293)..(293): n is a, c, g, or t
  misc_feature (295)..(295): n is a, c, g, or t
  misc_feature (376)..(377): n is a, c, g, or t
  misc_feature (400)..(400): n is a, c, g, or t
  misc_feature (471)..(471): n is a, c, g, or t
  misc_feature (475)..(475): n is a, c, g, or t
  misc_feature (501)..(501): n is a, c, g, or t
  misc_feature (525)..(525): n is a, c, g, or t
  misc_feature (531)..(531): n is a, c, g, or t
  misc_feature (570)..(570): n is a, c, g, or t
tgtgaaaaaaaagagatgnggtttagggggtaaaaaaagggccaacatagccctgaaatgnaacagcctctgagtgacttgggcngnatgtgactggggnnctgttaaaaggggagggtcctccctcctagccctgaagccccaggaanctgccttgaaagaaaagctctctaatactnaaattggggggnctngncctaacatccaaganttggtagcatntcctttntcccaaaanccagctggaactcaacttttcctaaacgnaaactcaaggncagnacaccagatgncncctgttgtttgttagggtttcaaactccagagggaatgcttttgcctgttttggttttcctctcttagggggcctgtttgnncttgggggtgtgattccactggnggctcatggggcctgggcctactctccccctgaattcacacttttttttataaggtatcaggtgggggatnagtncaagaaggtggcagagggtcccgggnaacagaggttgctcattcctgggngggatntcccccaatgccccagaggggtggggggggcgggacagnataaggacagagaaagggcagaggggtgcttggaagtgctca

SEQ ID NO: 676875 - DNA, 169 bp, Homo sapiens
  misc_feature (20)..(20): n is a, c, g, or t
gcctttcaaagacatgtggnatctgccctagtaggaggaaagctctatattgggagctctatctcagtcttagccatatcgggagcgcctgatacctgctagtcttttattatgttaaaattatcttaactttcactagtcaattatgcattattctaatcatttctta

SEQ ID NO: 676876 - DNA, 503 bp, Homo sapiens
gggcgggcgcatcggccatcaccgcgcggcgcgcagcggacaccgtgcgtaccggcctgggcgcccggcacctggggcggaccggcggaacccgaggcatgtcccatgacaagagttttcgggtgtctggggacaactatcctccaccccaacccttggatatccggggggtgccccaagccaactcattgcccacctctatgctcaagtctccctaacccatgtggccccttttaccccaaccagaccaccttgtccaagtcaaccctccacctttaaacatttctcaaaataacaccgccaatacccaaacaaaagcacctacaactactcatcccccaacgaacttcatagtccacacgccaaaatggcacaccattaccacatcaccatagttacactacccaccacatatccccaataccctcccttcaaccaaacttcatatacaacacacatctcacgacaacacaatatacaacttacatcaaacactacaaaca

SEQ ID NO: 676877 - DNA, 137 bp, Homo sapiens
tagagagacgcagaggagacagtccgcgggcagcaccagctccgaaccgggccaggccgcagcccctccccccgccgcgtggcgccaacaaaaggcggccccggaacaaaggcggcgccaccgtccgcccgcggccg

SEQ ID NO: 676878 - DNA, 1105 bp, Homo sapiens
gaataaaaaaaaaaaaaataaaaaaaaaaataaaaaaaaaaaaaaaataataaaaaaataataaaaaataaagaaaaaaaaaaaaaaaaaaaaaatataaaattatataatataggtgggggggggtgattacaagttatttgtatattggatggtggcatatttgagtgatgccgtcgctctttgttgttatattagaggtggtgtgagtgagagagttgtaggaagagagtgtaaagatttttgtccttttgttggttcttctcttgtgaaggtgcgggcgccgtggtgcgtctctgttgcggcggatgctcgctgccctcctcgaggcttctctgctcctcttgtcctcttctccgtcgcctccgcctcgcgcccgccctcccgctgcgctcccccccccccccctctactctttcctctctcttggcctttcggtgcgtcgcgtctctcccttccctcacgcacctcgacgactctctgtggccgcagtgcggtgcccgctccgccccctctcctcttctcttctcggttctcagtcttatctgtcgcgtagtatcaaggagcgcggcgcgccgccccctcgcccctccctctctttatcgtgtacgtatacgcccctccgtctacttcgcgcccgtcgccgccggcccgcctttcgaagcactactcaccctccatccacctggcctccaccactcacaccccagcacactagcaccgcaggcgagaacgccgcaacgaaccactcatacaccccagcactcgactaaccacgcaaagtcgaactatgtcgctctacgcacagcactgcgagagcagggaatcagagactgccacactcactcgtaaacacctgctccgctcgagtccatgaccatcagctccttactcactgcgcgacgctaatactataaactatgatgtgacacattctggagatcgattgcttgtgctgatagtacgagcgaacggagaacatacacgacactacccaatacaaacgcatcacacccccacgaacaccagaagaatgactagacgagcacaagacgcacaacatgcagaagcagtaatgacgaccacgcaacacaatcctagacaa

SEQ ID NO: 676879 - DNA, 415 bp, Homo sapiens
ctgtgctcactcttgatgaaggtctatcatctcccccacccttaagaagtttctttgtaattctcctcacctttgacgatgtactttatgggatccacctcctgcccccaaaacactgctcttaactccaccgcctatccccaaatctataagaaccagtgataatcacaccaccctttgttgactcctttttcggactcagcccgcctgcacccaggtgaaataaacagccatgttgctcacacaaagcatgtttggtggtctcttcacacagacacgtgagacaggagttcgagaccagcctggccaatctggtgaaactctatgtctctactaaaaatacaaaaatcagctgggcatggtggcgggcacctgtaatcccagccactcgggaagccgaggcacagattgcagt

SEQ ID NO: 676880 - DNA, 560 bp, Homo sapiens
  misc_feature (5)..(5): n is a, c, g, or t
  misc_feature (46)..(46): n is a, c, g, or t
  misc_feature (49)..(49): n is a, c, g, or t
  misc_feature (79)..(79): n is a, c, g, or t
  misc_feature (87)..(87): n is a, c, g, or t
  misc_feature (93)..(93): n is a, c, g, or t
  misc_feature (100)..(100): n is a, c, g, or t
  misc_feature (105)..(105): n is a, c, g, or t
  misc_feature (111)..(111): n is a, c, g, or t
  misc_feature (131)..(131): n is a, c, g, or t
  misc_feature (160)..(160): n is a, c, g, or t
  misc_feature (175)..(175): n is a, c, g, or t
  misc_feature (177)..(177): n is a, c, g, or t
  misc_feature (179)..(179): n is a, c, g, or t
  misc_feature (191)..(191): n is a, c, g, or t
  misc_feature (303)..(303): n is a, c, g, or t
  misc_feature (319)..(319): n is a, c, g, or t
  misc_feature (322)..(322): n is a, c, g, or t
  misc_feature (358)..(358): n is a, c, g, or t
  misc_feature (431)..(431): n is a, c, g, or t
  misc_feature (433)..(433): n is a, c, g, or t
  misc_feature (442)..(442): n is a, c, g, or t
  misc_feature (555)..(555): n is a, c, g, or t
ggcgnctgtggtggacaatgtagtgaagctccttggggaccagtantanaaaaatgccatggagcaatgccacaattanaatcctcncctctntgctgancgcanccgccncctgcctttcttggactcanaaaccggagtagcccaaagcaattgttanatctggatggaaaancnanaccggggtccangattggcctccggacaactgtactcctaccctgcccggcgctggcggaaaaaacggcgaacccatccccctgaggatccacgactttccttcccatctattaaaccaaacanaaaccaaaccctgaanaangaggggctgatctctcaggatggcagtagtttaaangctctgttgcgcactgaccccctggaaaaacgaagtgccccggatccccgagttgatgatgacaacctgggcnantttcctgtnaccaaaaatcgaacgccaaagcgatcctaaaaccacatgacttcctggatgacctcgatgatgaaaaatatgaaaaacatactcccaaacgtcggggaaaggggaaatccaanggtaa

SEQ ID NO: 676881 - DNA, 434 bp, Homo sapiens
cccctttgtattaatataaatcttctcccagtctcttgccagttttacaagccatgaatatctttctcaagggccctggagccatatatccctttgacatttaatcaagaaagacagggccctgttgctgtctctgtgggagggtaggagcctaactttgataaacaatgattagcaaatacagatggcccagtcacattcaccaatctccctgctaaagtccttcagtactttctcactcgctccttccagtgtttaaaaattctcctgttctttatgtcaccagagttgggttcaatttctctcctctatggcaatagtcttcacttatattgcaacggtcttaaataaagtcttccttgccatttttaacaagtatccagtgcaatttttctttatagggactggttgtagatcaactgcttggacagctc

SEQ ID NO: 676882 - DNA, 174 bp, Homo sapiens
aggagaatggcatgaacccgggaagcggagctgcagtgagccgagatcgcaccactgcactgcagtctgggggacagagtgagactccgtctcacacaaaaaaaaaatttaaactctccaaaaaattattacaattaagggcaaactataaaagcgagagtgttttaaattata

SEQ ID NO: 676883 - DNA, 186 bp, Homo sapiens
caatggtgtgcgtaccagtgaattaggccttgccgtggcgcatcttcaatcagcggcaccaccggcactgtgttgtcggcgttgagttcgtcgccgggaatggccaggtgctgctccgaatcctcatcggcttcgcggcggcgcttttgctgttcctgctggcgtcgctgttcctcgcgcagcaac

SEQ ID NO: 676884 - DNA, 238 bp, Homo sapiens
cggtgaataacgatggcctgttagggcgagaagaattattcgagcgctataggcgcttgccagggaggtagcgatgagagtaatagatagggctcagggtttgttataattttttatttttatgggctttgccgagggaggtaggtgagagtttgtggctaatatttttagctgtctgatgaggaatagtgtaaggagtatggggcccattatggtgtgccatacgggtgtatttagt

SEQ ID NO: 676885 - DNA, 821 bp, Homo sapiens
  misc_feature (291)..(291): n is a, c, g, or t
aacaaacataggctaggacagctggtggtaatcggcacaggcaggcttcccatgtgccgcgccattgttcccctccgctccgctacttagcctcccgcagcctctcccattggcggccgcggcgccgcggagtagccccgtcctcccttcgctcgctcccagctccgcccggcaggtggcgcgccgggcccagcgccacgtcaccgcccagcagccctcccgatgtgacggcgcggggcggctaataaagggagggcgcaggcggcgccaggatctcttccgccgccattntaaatccagctccatacaaacgctccgccgccgttagtgccgcgacccgggattgcgcgcaagaaccccctatgccgaaagctccgtcactatggaggatatgaacgagtacagcaatatagaggaatcgcagagggatccaagatcagcgcgagcaagaatcagcaggatgacggtacaagtgttatgtgaggctagagctgggatacaagcaaaaaaagatctgacagagtacttggtctcgatgggcggaagtggtagacgtgacaattaacaacagatccagtcagtgggaagatcaagaggatgggcattggggggctttcaaagatgctgcaagctgtagacaagcgttgggcaaacgtgaaaagaacacaagtgtggatgggcaaatttgatagatcccaaaaggggccaaagttttaaaaggcaaagaaacctccaaaaaggtttgggtgggtgaattaggcccggatacttctgaagaacaattaaagatattgggagcttggcaagatgacaatatgacc

SEQ ID NO: 676886 - DNA, 317 bp, Homo sapiens
gggcggcacgcgcggagcgccgggtgcggccatgcggggaccgggcccgaccccgttcccgaccccgagcccaagaaaaagctgggagcccgtgtttgaccccgagcccgagcccgagcgcgacccccggtgcggcgcggttaccccggcggaggccccgggcgcggggcgcgctctgaggcccgggggatgcgccgccgcctcgaccatgggcgccgccgtctccaggaggagggcgctgaggagcgaggccatgtcctcggtggcggccacagtgcgagcagcccgagcgcttggagaggtcccgtcccacaggt

SEQ ID NO: 676887 - DNA, 139 bp, Homo sapiens
cctagaactggagctgaacttctctgtactccctctgctctgcctcatgctctgtgaggttcttctggagagttctgcaaattgactgagcagagctgctctaatgtcccttgggatgtggcagccctgcccggtgtgg

SEQ ID NO: 676888 - DNA, 149 bp, Homo sapiens
gcacattttggttcctatcccagtgggtaagaggcacttatctctcggaaatttagctctctgaggactctcccctcccaggcatttttcatcactgggaaaggctccctattggggttcagaatccagagaaccaaaccctggatcca

SEQ ID NO: 676889 - DNA, 965 bp, Homo sapiens
  misc_feature (139)..(139): n is a, c, g, or t
  misc_feature (230)..(230): n is a, c, g, or t
  misc_feature (236)..(236): n is a, c, g, or t
  misc_feature (279)..(279): n is a, c, g, or t
  misc_feature (300)..(300): n is a, c, g, or t
  misc_feature (313)..(313): n is a, c, g, or t
  misc_feature (318)..(318): n is a, c, g, or t
  misc_feature (394)..(394): n is a, c, g, or t
  misc_feature (431)..(431): n is a, c, g, or t
aacactgtcagctacagccagtccagcttgatccacctggtggggccttcagactgcaccctgcacggctttgtgcacggaggtgtgaccatgaagctcatggatgaggtcgccgggatcgtggctgcacgccactgcnagaccaacatcgtcacagcttccgtggacgccattaattttcatgacaagatcagaaaaggctgcgtcatcaccatctcgggacgcatgancttcangagcaataagtccatggagatcgaggtgttggtggacgccgancctgttgtggacagctctcanaagcgctaccggngccgncagtgccttcttcacctacgtgtcgctgagccaggaaggcaggtcgctgcctgtgccccagctggtgcccgagacngaggacgaaagaagcgctttgaggaaggcaaagggcnggtacctgcagatgtaagggccgaagcagacaggggaccacgcggtagtcctcaaggcctagactccctctctcctgccgatctggtgcctccgaagtagccatggtcgatcgggcccagtgtccagtcacttaaagttcccccccttgggggcaaaaacccaattcacattgagagctggtgtcgtctgaagtttgcgtatcacaggtggtaactgttcttctctcctgaaaactacagaccaaagtttatttatatcattccaggatcaatgctaccagtgttgtcccaacgccggagggtgttggaccgaaaccctcggaaggcttcgagccgcgtaggtattggagaacccgacactatgagctgtggttgcgggcgaacaaagagggggcgcttaaacccggggccatacgtccctttgtaaaggccataggggtttacagacgcgcgaaacgagcgaagttggcgtgcgaccggttggacccacaagacgtaagggtgcggggagaaatattgcgcatagatggtata

SEQ ID NO: 676890 - DNA, 966 bp, Homo sapiens
  misc_feature (139)..(139): n is a, c, g, or t
  misc_feature (230)..(230): n is a, c, g, or t
  misc_feature (236)..(236): n is a, c, g, or t
  misc_feature (279)..(279): n is a, c, g, or t
  misc_feature (300)..(300): n is a, c, g, or t
  misc_feature (313)..(313): n is a, c, g, or t
  misc_feature (318)..(318): n is a, c, g, or t
  misc_feature (394)..(394): n is a, c, g, or t
  misc_feature (431)..(431): n is a, c, g, or t
aacactgtcagctacagccagtccagcttgatccacctggtggggccttcagactgcaccctgcacggctttgtgcacggaggtgtgaccatgaagctcatggatgaggtcgccgggatcgtggctgcacgccactgcnagaccaacatcgtcacagcttccgtggacgccattaattttcatgacaagatcagaaaaggctgcgtcatcaccatctcgggacgcatgancttcangagcaataagtccatggagatcgaggtgttggtggacgccgancctgttgtggacagctctcanaagcgctaccggngccgncagtgccttcttcacctacgtgtcgctgagccaggaaggcaggtcgctgcctgtgccccagctggtgcccgagacngaggacgaaagaagcgctttgaggaaggcaaagggcnggtacctgcagatgacggcgaagcgaggcgagggcgcacgctggagatcgtcatgccgtatgagctcccgtcctctgtgccagtggtgccttcgagtagccatggctaagacggtgcccagtgtcaacatgtcacttacgaagttccccccttgggcataaattcccaattcacacttgaggagcgtggtgttagtctgaagttttcgtatcacagtgttcacgctgtgcttcctcttcctgtgataacctactagcatcgaaagcgtttgtggatatcctttcccaggtattgacttggctaccacagtgtttgtctccgagctgccgaggtagggcgtggggcctgtacctcctcggggaagtgctttccgatgcccccgctgctggggtatcgggccgggccctgctgcatctgctttaaagttgcttgcttggttgggacaacgctgctcctcggcctcgtttcagttcccctgtcacaggcgggggcgcttcctctgcgtccgcgcaagccttcctcttcctgccacttc

SEQ ID NO: 676891 - DNA, 118 bp, Homo sapiens
ctgtgtacacaccacgtcttctcttcctggccataccggaaccacctgacttcaatgctgcctggatacgcaaaccactcacagaacacaccaagaggttgtggctgctgcatgggct

SEQ ID NO: 676892 - DNA, 752 bp, Homo sapiens
  misc_feature (180)..(180): n is a, c, g, or t
  misc_feature (217)..(217): n is a, c, g, or t
acatcaagcacatggctactcgaggcaccagtggcaagacgagggagtctatggctgaggctccgcgtggccctgtcacttcgccgggatctgcaggtaccgacctttgccttcttcacctacgtgtcgctgagccaggaaggcaggtcgctgcctgtgccccagctggtgcccgagacngaggacgaaagaagcgctttgaggaaggcaaagggcnggtacctgcagatgacggcgaagcgaggcgagggcgcacgctggagatcgtcatgccgtatgagctcccgtcctctgtgccagtggtgccttcgagtagccatggctaagacggtgcccagtgtcaacatgtcacttacgaagttccccccttgggcataaattcccaattcacacttgaggagcgtggtgttagtctgaagttttcgtatcacagtgttcacgctgtgcttcctcttcctgtgataacctactagcatcgaaagcgtttgtggatatcctttcccaggtattgacttggctaccacagtgtttgtctccgagctgccgaggtagggcgtggggcctgtacctcctcggggaagtgctttccgatgcccccgctgctggggtatcgggccgggccctgctgcatctgctttaaagttgcttgcttggttgggacaacgctgctcctcggcctcgtttcagttcccctgtcacaggcgggggcgcttcctctgcgtccgcgcaagccttcctcttcctgccacttc

SEQ ID NO: 676893 - DNA, 982 bp, Homo sapiens
cgagaccgttatctactctagcatcttagcagcgccctactccatcgacagcgctgagctcagaaatgattgaacactcgtggagtaggcctaaaatagagctgctagtctttcattccagttctaaccagaaaaataaaccctcgtcccacagaagctgccatcaagtattgcctcacgtcgatagccaagcgcaatccataatccttctaataggctatcctcttcaacaatatactctccggacaatgaaccataaccaatactaccaatcaatacctcatcattaataatcataatggctatagcaataaaactaagaatagccccctttcacattctgagtcccaaaggttacgccaaggcaacccctctgacatccggcctgacttcttctcacatgacgaaaaattatcccccatctcaatcatataccaaatctctccctcactaatacgtaagccttctcctcacgtacctctcaatcttatccatcatagcaggcatcttgaggtggattaaaccaaaaaccagctacgcaaaatcttagcatattcctcaattacccacatacgatgagtaatagcagtctaccgtaacaacctaacataaccattcttaatttaactataaatattatctaaatacaaacaaatctactactcaaattacatcctaacaccaagactagtatatcctgcaccggaacagctacatgattacacccttattccatcggcctcactcctagaaggcgccccggtaacgtattgccactgggcgtatgacaaaccaagagaaagcttgatgccacagaatggtctcgcctctagtgcttacagcctcacaacccgaaacgatccattaaggaaaatgagtaaaacaccttccagaggacgaacacaacgtaatcaaagggatcgacacgcatgtagaaaaaagagatggtcaaaacataatatttcagcatcgcgacaggatc

SEQ ID NO: 676894 - DNA, 616 bp, Homo sapiens
ctcaacgctttatacttcttctggttttacccatcagttaattcatttaactacgggttttacatttctgtctctagccacttttgttgtaacttcccttccttacctttacaaaaccatcattatctattttgacagtgggatatgaaggggggaaaagaatccacacaagttcctccttttcattttgcctcctaaaaacacagggtcttggcattttaagaatttttatgccaatcactacggaaaagtagcaaaattagtacacaaaagacacactctggaatctacaaggcagtattcttaaggatttctgcctctatctacattttcaagccactattccttaacagcaagcatttattttcatatcagagtgttggtttttttgagactgagtctcgctttgtcacccaggccagagtgcagtagccaatctcagctcactgcaccctctgcctcccaggcttcgagcgattctcctgcctcagcttcccgagtagctgggactacaggcacgcaccaccacgcccagctaatttttgtatttttagtagggatggggtttcaccatgttggccaggatggtctcaaacacctgacctcaggtaatcca

SEQ ID NO: 676895 - DNA, 988 bp, Homo sapiens
gcatcacatcggtggtctccatgctgtcctcccgtatcgagatccgagaaatacgcaacggactactgatcttatcagtgacttggagttcacccccgtgtgaacctacacatatttcctcagtacttacacagcttcataactgctagcgtcttccttcaaagaggaatctgccgatccagtagtgacctcataggtcgagtgagactgcgattgtcatccatggaacacacgtaccatgagtggtcacacgattcccaggtacaatgtgcgattccgactgttgaacacagggcttctggtccagtgatgccatttgagtgtgtgacgcgtccccaatagtgctgtgagacgacatgcgtaatgatgtaccatgaatttgcccagatatttgggtcagactttgtgccataatctgagtagatctcgaagtattagcttcgtcgtgaaactagctctggttaagtctagtattgtgttttttgggatttccccatttttggggcttgttgatacgatcgagattgcacacggtgagtaccgttgtggtatgcctgagccaaagactcaactgagggacacccttctcttgtaaggctcgtttgtgtcacaatgattaggtcatgaaccttacggaaatcgcaaaggtgtggtgagccatcggacacccttgtgttactccctgagacgagattggtctttaccgatgcattgtccaggatatatgcgtggtggtgcgacagcgcacctggggagacacggtttaattgatgcgaccacagcgttggtatgacgacaggctcatgagagtgttaagcgtgtaaggctacacataatcggcgttccgaggagaccccgtttttgtcccagccatgttccacttcaccgtcgtgacagggtgctcccaggtggacttaagtatcctgtctagcaagcaggtgggtcgcctaagtggaacaggttctcgcttgagcaaggcaacgggaaa

SEQ ID NO: 676896 - DNA, 125 bp, Homo sapiens
ccaaacaagagtcctgaaaggcggacatggttaacgaccgtgttcacagaccacagcacattagaaccagggagctatcaggagacttgagatggtagtttcaggataaaccagaggcagcgcta

SEQ ID NO: 676897 - DNA, 129 bp, Homo sapiens
gggaaaaggtctgtggtactctttatacctgtttctgtttttggtggtccctttcttttaattttaaagggccttaatggccgggctgggggggtctggtgagaccccggtctccacaggggtaccgga

SEQ ID NO: 676898 - DNA, 290 bp, Homo sapiens
ggagctcggcccttatacccacgatcaccgaaacaaacactgggttttgcaaagttaaatgaaattgacaaacctgtatccagactaagaaaataaaagaagacacaaataaataaaataagagatgaaaaaggagacattacagctgatagcacagaaaagcaaatgatcattagtggctaatatgagtaacaatatgccaataaatttgaaaatctaaaagaaatgaacggattttagacacatacaacctaccaagattgaaccaggaagaaatccaaaacctgaac

SEQ ID NO: 676899 - DNA, 355 bp, Homo sapiens
gtgctgaggtgatctagaggatctcgcccacggtcatattctcctgctcagcctcccaagtagctgggattacaggcgcccactaccacgcccggctaattttttttttttggtatttggcagtagagacggggtttcaccacgtgggccaggcttgtctcctgacctcaggtgatccgccctccttggcctcccatggtgtggggataacaggcgtgagccattgagcccagcctgtcatgttttaaaataaaaaaacctagggtatgttactctaaagtccccagctcccattagtttttcgggatatgagagcatatcatggtctggtcctttgggggaaatctaccggggg

SEQ ID NO: 676900 - DNA, 1018 bp, Homo sapiens
ggtcgcttcgtgtctgttgaacggctgtgggcgtcttgctgccttgggctagggcggcttaaaactcgttcttgagaggaaccgtctctgtccgacagagactacatgacgttctacgctctgacgcaagtgacgcttgtacgctggacacaaacacaagaggaaaaacacacacgacagagaactgctctgcaggaaccagacaacaacgaacacttaacagcatgcttttgacactaccttgactacacgacaaacgactgaacggcaactagacttatcactgcaacttacacacgcgtgcgcaactgcagagccctttggcgcgtcctcgactgtcacacacacacaggctgcatgtacctgaacgacttctctcaaacgcacttactgaccagagacagcacacaggcgaaaactcagcctttgacacgattctctaactgacagttgctgacacgacctggactactcgcgacacacgagatccgccattgaagaacatacttcaacgggcattttacaacctacttctgactgactgcatgattccacggtcaaccactaaggcttgacggacctttcgcgacgtgttcgctagacgaacttggcgtgaaacaccatgagtgatgcaagcaaacttcgaagcctatgactacgaagacattctgacaacgatggtgactggacgaaactaaaccaagacggagttccatttgctagtttatgacctggtgacattctagccgatttacaacggcttaaacactaagaactgttgcagtttaccactctttatatcctacttttgtgcctgggcggccatgttgaaaagacaacccaactttactcccttttatcccttaaaggaacccaacacttatgcttcttatattatccggtctttttagctaacttgttaaccgttcgcttcgatatgaaactgtgtttgtcagatctccaaatcgtcaaagcgtcgggtttgtatatatacccttcattatacagcttctacacc

SEQ ID NO: 676901 - DNA, 495 bp, Homo sapiens
gtgtgcaactcaacaaagaccatccgcatcaagctcagcccacgtgcttccaagaggcaaactttaccttacacttagccaagaattatttcacctgcgttgtatcacttttcgcaataaccccgtgaagacagtaggatgacttcttatgtgtggctacagaatccatgaaggctcagaagactaatgtaatagaagactgcaatgacagggttacctcccattaacaaaagatacttgactttcctgtacctattcataagaagagggcctcaattcaacagtccccaaagtggggaagcaatcaaggctggacttgagttccaccagattggtcagagacctccactatgcagtatactgaaggaaaggctgcctttgattgacaggtagtttccttttccctagaaaatgaagccatctctaggcagcgtcctgggttacgatacactagtccatgcaccttgtacttatgaatatgtgtatgaaggaatg

SEQ ID NO: 676902 - DNA, 529 bp, Homo sapiens
gactttgtgccccatgagcctgtgtacccagtgagcctatgccccctgagtctgtgccctgtgagcctgtgtgctctgtgaatctgtgccccgtgagcctgtgtgccccatgagcctgtgtgctctgtgagtctgtgccctatgagcctgtgtgccctgtgactctgtgccctgtgagcctgtgtgccccatgactctgtgccccgtgagcctgtgtgccctgtgagtctatgccccatgagcctgtgtgccccatgactctgtgccccataagcctgtgtgccccgtgtcctgtgccccgtgagcctgtgtgctctgtgagtctgtgccctgtgagtctctgtgccccgtgagcctgtgtgccctgtgactgtgccccgtaagcctgtgccccatgagcatctgtgatctgtgagtctgtgccccgtgactctgtgccccataagcctgtttgccccgtgtcctgtgccccgtgagcctgtgtgctctgtgagtctgtgccctgtgagtttctgggccccgtgagcct

SEQ ID NO: 676903 - DNA, 574 bp, Homo sapiens
tggcggggggggtaactctttatttcatggtccggaaaaaagatgggagtgggaacagggtggacactgtgcaggcttcagctttccacttccgggcaggattcagggctatcttgggaccgcagggactgccaggtgcacagcccgtggcttcccgaggcaggcaggcaaggttgacgggactggaagcccttttcaagagccttggagagagctgtgtccgctccacaagcaatgtgacgtgtgccacttctgtgcagtttgtgcaggggagtggattaacacggggaaacactgtggtgcatttcctctcaacagccaacagtgtgataggctctggggagaagcccccggggcgtgagctataagcttcagggcgtgttccagggggagagccaccaaaaagcgtgacacggtatagggtgatgtggtgacaaaaggagttccaactccggtgacaaggttttctcccaggcccaatgtgagaaaaaactctccgtcgcgtggcggttgtggtggagacccgtggtgggaagttactccggaagaacacttcttccaagtggcgggggtt

SEQ ID NO: 676904 - DNA, 396 bp, Homo sapiens
tacggagctcagttctttcatgaaggacaggtgcgcagcgttgactcgggaaatcctattgcatgcgtagtcctttgtatgattataggcgtgatcagtagtagttacgggttgaacattgtttgttggtgtatatattgtaattaaaattgctcgggggaataggttatgtgattaggagtagggttaggatgagtgggaagacgaaagagaggaagtcacagtttacattcatgccttatagggttgaggtgatgatggcaggtggagatttggtgctgtgaaattgtataaggtaatagcttatctagtcaggttaggtctaggaggagtcaggtcaggtatatggctcgtaaagaaggcctagattagggggatttgtgcggtaacaagctt

SEQ ID NO: 676905 - DNA, 162 bp, Homo sapiens
gatgatgacacaggtccagctggtgggtctcttctgccccagtgcccttccccttgggctgtgttggagtgagcacctcctctgtaggcacctctcacactgtatgtctgttactgattatatattgataaaacagatcataaacacctggtactttctaat

SEQ ID NO: 676906 - DNA, 498 bp, Homo sapiens
acatttatgtaaacattttaaatattcaaagtatataaatgtgaagtcctatcaagagtaattagacaagagaaagaaataaagggcattcaaatcggaaaggaggacatcaaattgttcctatttgcagatgacatgatgttatatataggaaaacctgaagactaccagaaaacttttagaacaaacgaaattcagtgaagttgcaagacacaaaactaatacacgaagatgggttgcatttatatatatgaacagcaaacttgctgaaagaagaaattaagaaggcaaacccatttacaatagttaccaaaaaaaaaaaaaacccggatcttaatgggttacccaggggggtgacaagtggaagaccttaccaaaacctctattggacaagaatttggaacgaggatacaacacaatgtggaaaggactttccatactccgtgggttccagaattttggactggtgcggtcacacggggacggtcctatctcaaa

SEQ ID NO: 676907 - DNA, 1027 bp, Homo sapiens
ggctgcacgggcttcgcgggcgccacgtgtgaggccgtgctttgtgctgtgtcattgcgccgtgccctgggtgggtgtgttggcatgtggctgggacttggtgtgctcctcccagtgctcgtgtgtgctgtgtgctgcgtgatgtgtgctgctgcgctctcctgtgcccctgcccctctggcatgtgttgcccgctgaccctgctgtgtcccctgtgctgcctggcctgccttagtctcctctcctgcatggtagctagtccctggctagggaggtctgcctggccatgttggctgctatcagtggacctgtagcttggtggcttggacacgatgcgatgtctcataggagctcgtgttgccatgcagccttgccttgcgcagcatagctagcttgccatgatttccacctcatctggacccatgcattgagaaccttcagtgaaaacatgcagatttagaaagaagcttagacagcggacaaagaacgttacgtccctaaacgttgtacattcactgacagcaagaccacttcgggacattccgtgttggccacacatcaggaccttacttcaacgcacgtgcgccaactaattcaatgacacaactgggatattcgagggactggactcagttcttgaaaccagtttcttttcttgaaacagagaacaatgtcccctgaagacagagcaacaattgcttcgaccaagaactgaggccatacaggcagaccatgatgccgtggcacacggaaggccaatgtcagggtagatgacaaggtgaataccactttcattctagttaacaacgtggattgcacctctatcgactttgatggaggattgcctttccggtgaaccatggtgccacgtcagactgacaccctgtgtgaacagagctgaccacagcctgcagcacaattacccgaaggatgacccagcacaagcccgattctcgcggcggtcactgcaagcagcaaagcgctgtggaagcgattagcagatccctatccttaaatcaatattccc

SEQ ID NO: 676908 - DNA, 1061 bp, Homo sapiens
gctacctcagtaccattctgttgggcgacgatctggccctgagctatcgtaattcgatacattgatcattgaagcatgattgccctatggaacatcctgggtcattgaacgtcatgttgcatgtgtgtacttgttgacccgaataagaaatatcgtgcgtgcgtcctgacacgcgatcgatgcatgtcatgcgaagtctcgaccatggcagttctcgtatgcggtccatttcacatgggcccttctcaatccagacgaggggcaatggtcccggaggacggaggcccttcctgcagtagtcagatagtattagcgacgctcgtgcgccatgtagttcaacccaatctcccttgcaaccaaagacgctggaacacgaaggggccccaagaaagggggcatttacagcgaattagtagagaaggcacacaagggcctgacacacacttgacaaaaccaacaacttgtgaatgcgcccttacattgggcctttcccctggaattgcaaggagaagagccccaaaggaacaaacaggaaacagttggaggaaggcttctgaaggagaagaaagattcacataacattaaaacacccattaaaggcgttccagtggaacggccggtcacttggccaagaaagaggtcgggacgactggacattggagaacagggaggaaaaaacgcaagggttcttttaaacggcgcgttgcaagcacatttcgggcgggagaccaaagcaaaggttacattatccccccaaagagttcccccaaggggaatctcccgaggccttccacgcttgcagggggccggcccccacaaaagagctgacctaggactttcggttggcattagacttagcaggacccttacaagggggctttccttggcctgggccaagtaggacaggaattcccaccaggagacaaagcctggcgcaaccattccatggcgaaacaggggtccacggaccatatggcttccggacttttaaaccgcactttggacaaccattttccccctttggactcttccattcaagttcttgaaggcgggagtccatg

SEQ ID NO: 676909 - DNA, 959 bp, Homo sapiens
  misc_feature (2)..(2): n is a, c, g, or t
  misc_feature (79)..(79): n is a, c, g, or t
  misc_feature (99)..(99): n is a, c, g, or t
  misc_feature (103)..(103): n is a, c, g, or t
  misc_feature (129)..(129): n is a, c, g, or t
  misc_feature (153)..(153): n is a, c, g, or t
  misc_feature (194)..(194): n is a, c, g, or t
  misc_feature (196)..(199): n is a, c, g, or t
  misc_feature (210)..(210): n is a, c, g, or t
  misc_feature (213)..(214): n is a, c, g, or t
  misc_feature (224)..(224): n is a, c, g, or t
  misc_feature (233)..(233): n is a, c, g, or t
  misc_feature (237)..(238): n is a, c, g, or t
  misc_feature (242)..(243): n is a, c, g, or t
  misc_feature (255)..(255): n is a, c, g, or t
  misc_feature (266)..(267): n is a, c, g, or t
  misc_feature (271)..(271): n is a, c, g, or t
  misc_feature (273)..(273): n is a, c, g, or t
  misc_feature (275)..(275): n is a, c, g, or t
  misc_feature (278)..(278): n is a, c, g, or t
  misc_feature (282)..(282): n is a, c, g, or t
  misc_feature (289)..(289): n is a, c, g, or t
  misc_feature (304)..(305): n is a, c, g, or t
  misc_feature (308)..(308): n is a, c, g, or t
  misc_feature (311)..(311): n is a, c, g, or t
  misc_feature (320)..(320): n is a, c, g, or t
  misc_feature (324)..(324): n is a, c, g, or t
  misc_feature (330)..(330): n is a, c, g, or t
  misc_feature (348)..(348): n is a, c, g, or t
  misc_feature (351)..(351): n is a, c, g, or t
  misc_feature (354)..(354): n is a, c, g, or t
  misc_feature (361)..(362): n is a, c, g, or t
  misc_feature (365)..(365): n is a, c, g, or t
  misc_feature (381)..(381): n is a, c, g, or t
  misc_feature (408)..(408): n is a, c, g, or t
  misc_feature (412)..(412): n is a, c, g, or t
  misc_feature (419)..(419): n is a, c, g, or t
  misc_feature (421)..(423): n is a, c, g, or t
  misc_feature (425)..(425): n is a, c, g, or t
  misc_feature (427)..(427): n is a, c, g, or t
  misc_feature (429)..(429): n is a, c, g, or t
  misc_feature (431)..(431): n is a, c, g, or t
  misc_feature (433)..(433): n is a, c, g, or t
  misc_feature (435)..(440): n is a, c, g, or t
  misc_feature (442)..(442): n is a, c, g, or t
  misc_feature (445)..(446): n is a, c, g, or t
  misc_feature (448)..(448): n is a, c, g, or t
  misc_feature (469)..(470): n is a, c, g, or t
  misc_feature (475)..(475): n is a, c, g, or t
  misc_feature (482)..(482): n is a, c, g, or t
  misc_feature (485)..(485): n is a, c, g, or t
  misc_feature (500)..(500): n is a, c, g, or t
  misc_feature (502)..(502): n is a, c, g, or t
  misc_feature (513)..(513): n is a, c, g, or t
  misc_feature (519)..(519): n is a, c, g, or t
  misc_feature (521)..(521): n is a, c, g, or t
  misc_feature (530)..(530): n is a, c, g, or t
  misc_feature (548)..(548): n is a, c, g, or t
  misc_feature (550)..(550): n is a, c, g, or t
  misc_feature (626)..(626): n is a, c, g, or t
  misc_feature (631)..(631): n is a, c, g, or t
  misc_feature (927)..(927): n is a, c, g, or t
anagtttatgaaggtggtttctcctgactccatgcatcttttacacaaagatgcccccttaaatatgccccgttatctnccccacctcagtgctggagnactngcagttagtaagtgggcagaatcttnagtctcaggaaggtttttaaaggnatttttgtggggaggaagttgtgggtgaaggggaaaggttngnnnnaagagtgagtnttnnattgtgcatnttgctgggnaatnnaaannccaaaggttttntgaagaaaagnncctntntnagngacntagaganagggagagcacaganntantgnttgggtgtnaggntgaggnagagagagggtaggttgnagngantggaganncangggagagagtaaatgnatgtcggggaggtgaggggagagaganagcntagaggngnnngngntngntngnnnnnntnggnngntgtgagtagaaagttttgttnngaagngtagaanggngttttagttttaggnantgggtttggtncaggananagagaaganaaacgagggaagggtggnanaggtagtaagggtggacagttaaggtagctaactaagagatggacactcgcgactgcagttttgaagctatatgcnagatnagggtacagaatgcattttatatgccctgttcaatacaatttaaatcgctgtttcttccatgttgtcccttccctatgaactattcccaaagcctcttccaaggcagaggacagggcagtaagaaggaatggaagaaaacactgaggtcactaagtggggttagggcttagattggataaatccctacccatccccgcccccactcgttctatagaaaagaattctctttctctctccccttgctgggctgttgggatgagggccaggtagaggcaaagggaggaaaacactcagnacattctttctcctactttaatctgaagtgta

SEQ ID NO: 676910 - DNA, 441 bp, Homo sapiens
  misc_feature (121)..(121): n is a, c, g, or t
  misc_feature (390)..(390): n is a, c, g, or t
  misc_feature (437)..(437): n is a, c, g, or t
tttttgtacttttagtagagacagggtttctccatgttggtcaggctggtcacgaacccctgacttcaggtgatccacctgcctcggcctcgcaaagtgctgggattacaggcgtgacacncaagcctggcctagtttttttatttttagtagagacacggtcttgctgtgttgctcaggctggtctcgaacgtctggcctcaagcaatctgcctgtcttagcctcctgaagtgctgggattacagggcgtgagtgggcctgtattttctttcttatttattctgtgggtaaaacttttaaaacacagacaacatctgtgttaatccaaaaacaaaacaggattcccataggagttgcttttgaaaggtgacttaggagtcagacaatcnggggttccacaaccaggggccctttacggggggggatttttcccggnaacc

SEQ ID NO: 676911 - DNA, 453 bp, Homo sapiens
gatccatatttcaaagaatgaagaaagatttgaccccttcctgtatgttctcaataatggtaaatgatggccattgtttatgttctttgctcagctctttctggttgtctggaaacagttatttaaaaacaaagttgcatctgtaagccttattatctccaaaatagaatgcacaataattttgaaaacagtttgcattctggagcttgacagaaaactcaggtaaggtaaccactgttagagcaacaagctgatttcgaggtaggtgtctccagagtaatatactaaatttaagagaatcagggaagggctaatggaaaatgatgtagatctgaggtcaacaaataatagcctgtttttgtaaatgcagttttattagaactgttgcggagggaaagttcttccttaggttcagtatcatggacgtgcaaatgaaagtaaccaaaaacatgt

SEQ ID NO: 676912 - DNA, 681 bp, Homo sapiens
  misc_feature (61)..(62): n is a, c, g, or t
  misc_feature (65)..(65): n is a, c, g, or t
  misc_feature (68)..(69): n is a, c, g, or t
  misc_feature (72)..(73): n is a, c, g, or t
  misc_feature (80)..(81): n is a, c, g, or t
  misc_feature (539)..(539): n is a, c, g, or t
  misc_feature (555)..(555): n is a, c, g, or t
  misc_feature (575)..(575): n is a, c, g, or t
  misc_feature (581)..(581): n is a, c, g, or t
  misc_feature (587)..(587): n is a, c, g, or t
  misc_feature (606)..(606): n is a, c, g, or t
  misc_feature (616)..(616): n is a, c, g, or t
aagaaagtgaggactgggccgggcgcggtggctcatgcctgtaatcccagcactttgggannccnagnnggnnggatcannagagaatggcatcatttcctggtggtcaacatgaagggcaatgacatcagcagtggcacagtcctctccgattatgtgggctcggggcctcccaagggcacaggcctccaccgctatgtctggctggtttacgagcaggacaggccgctaaagtgtgacgagcccatcctcagcaaccgatctggagaccaccgtggcaaattcaaggtggcgtccttccgtaaaaagtatgagctcagggccccggtggcttggcacgtgttaccaggccgagtgggatgactatgtgcccaaactgtacgagcagctgtctgggaagtagggggttagcttggggacctgaactgtcctggaggccccaagccatgttccccagttcagtgttgcatgtataatagatttctcctcttcctgcccccttggcatgggtgagacctgccagtcagatggtagttganggtgactttcctgctngctggcctttataatttacntactantttganatgtttgacaaattgactnatttgggggnatttggcctggattggtctcaattttaatctgaaatgaacctcgaaggaaatgtaaaactggggg

SEQ ID NO: 676913 - DNA, 173 bp, Homo sapiens
  misc_feature (12)..(13): n is a, c, g, or t
ctcccaaacagnngtctcatgagcacccatagcccccatctatggacaggctgggacagaggcagatgggtaagatcacacataacaagagggtctatgtcatatcccaagtgaacttgagccctgtatgggctcaagagatagaagacaaaatctgtctcccacgtctgcca

SEQ ID NO: 676914 - DNA, 113 bp, Homo sapiens
cggactccccctaatcgcgcgctccgtaccgacgcgccactggacggagactggggctgttaggacgttacggaaggggttaggagggctgttacggatgcgctcgttacgga

SEQ ID NO: 676915 - DNA, 700 bp, Homo sapiens
  misc_feature (61)..(62): n is a, c, g, or t
  misc_feature (65)..(65): n is a, c, g, or t
  misc_feature (68)..(69): n is a, c, g, or t
  misc_feature (72)..(73): n is a, c, g, or t
  misc_feature (80)..(81): n is a, c, g, or t
  misc_feature (539)..(539): n is a, c, g, or t
  misc_feature (555)..(555): n is a, c, g, or t
  misc_feature (575)..(575): n is a, c, g, or t
  misc_feature (581)..(581): n is a, c, g, or t
  misc_feature (587)..(587): n is a, c, g, or t
  misc_feature (606)..(606): n is a, c, g, or t
  misc_feature (616)..(616): n is a, c, g, or t
aagaaagtgaggactgggccgggcgcggtggctcatgcctgtaatcccagcactttgggannccnagnnggnnggatcannagagaatggcatcatttcctggtggtcaacatgaagggcaatgacatcagcagtggcacagtcctctccgattatgtgggctcggggcctcccaagggcacaggcctccaccgctatgtctggctggtttacgagcaggacaggccgctaaagtgtgacgagcccatcctcagcaaccgatctggagaccaccgtggcaaattcaaggtggcgtccttccgtaaaaagtatgagctcagggccccggtggcttggcacgtgttaccaggccgagtgggatgactatgtgcccaaactgtacgagcagctgtctgggaagtagggggttagcttggggacctgaactgtcctggaggccccaagccatgttccccagttcagtgttgcatgtataatagatttctcctcttcctgcccccttggcatgggtgagacctgccagtcagatggtagttganggtgactttcctgctngctggcctttataatttacntactantttganatgtttgacaaattgactnatttgggggnatttttggaaccgggaaggggtcatcaaatttttaatctggaaattggaaccccaaaaggtaaaaaagaaaaaacttgggggga

SEQ ID NO: 676916 - DNA, 1004 bp, Homo sapiens
  misc_feature (843)..(843): n is a, c, g, or t
  misc_feature (859)..(859): n is a, c, g, or t
  misc_feature (879)..(879): n is a, c, g, or t
  misc_feature (885)..(885): n is a, c, g, or t
  misc_feature (891)..(891): n is a, c, g, or t
  misc_feature (910)..(910): n is a, c, g, or t
  misc_feature (920)..(920): n is a, c, g, or t
ggtgatgacctctccagtgtacctctcttgcccgcgcctggcctaccgctgtcactcccgtctgcacgctttgatatggacctctcacagtagcctcgtggacctacaaccaagtagagtccgggcccgttcaccctgaccataagtggcacgagacatccggagcacccgatgaaatgtcacctacgccggggacgatcttgtacaagctgggcaaagtgctgcatgcccaaccagtgttcaagaatagacccaccatgaatttcgtgcgatgggtctcgattcaggggaagctctacgagcttggtcctgaccacacgcccggagtagtcctcccagtcaggaaaggatccctacacatactagtagaagaatggctactctatattccctggatgtctcgaagcgaggtgcaagggagcggagtgacatcagcagtggcacagtcctctccgattatgtgggctcggggcctcccaagggcacaggcctccaccgctatgtctggctggtttacgagcaggacaggccgctaaagtgtgacgagcccatcctcagcaaccgatctggagaccaccgtggcaaattcaaggtggcgtccttccgtaaaaagtatgagctcagggccccggtggcttggcacgtgttaccaggccgagtgggatgactatgtgcccaaactgtacgagcagctgtctgggaagtagggggttagcttggggacctgaactgtcctggaggccccaagccatgttccccagttcagtgttgcatgtataatagatttctcctcttcctgcccccttggcatgggtgagacctgccagtcagatggtagttganggtgactttcctgctngctggcctttataatttacntactantttganatgtttgacaaattgactnatttgggggnatttttggaaccgggaaggggtcatcaaatttttaatctggaaattggaaccccaaaaggtaaaaaagaaaaaacttgggggga

SEQ ID NO: 676917 - DNA, 738 bp, Homo sapiens
  misc_feature (61)..(62): n is a, c, g, or t
  misc_feature (65)..(65): n is a, c, g, or t
  misc_feature (68)..(69): n is a, c, g, or t
  misc_feature (72)..(73): n is a, c, g, or t
  misc_feature (80)..(81): n is a, c, g, or t
  misc_feature (288)..(288): n is a, c, g, or t
  misc_feature (577)..(577): n is a, c, g, or t
  misc_feature (593)..(593): n is a, c, g, or t
  misc_feature (613)..(613): n is a, c, g, or t
  misc_feature (619)..(619): n is a, c, g, or t
  misc_feature (625)..(625): n is a, c, g, or t
  misc_feature (644)..(644): n is a, c, g, or t
  misc_feature (654)..(654): n is a, c, g, or t
aagaaagtgaggactgggccgggcgcggtggctcatgcctgtaatcccagcactttgggannccnagnnggnnggatcannagagaatggcatcatttcctggtggtcaacatgaagggcaatgacatcagcagtggcacagtcctctccgattatgtgggctcggggcctcccaagggcacaggcctccaccgctatgtctggctggtttacgagcaggacaggccgctaaagtgtgacgagcccatccagatcggttgctgaggatgggctcgtcacatgtacgantcagcaaccgatctggagaccaccgtggcaaattcaaggtggcgtccttccgtaaaaagtatgagctcagggccccggtggcttggcacgtgttaccaggccgagtgggatgactatgtgcccaaactgtacgagcagctgtctgggaagtagggggttagcttggggacctgaactgtcctggaggccccaagccatgttccccagttcagtgttgcatgtataatagatttctcctcttcctgcccccttggcatgggtgagacctgccagtcagatggtagttganggtgactttcctgctngctggcctttataatttacntactantttganatgtttgacaaattgactnatttgggggnatttttggaaccgggaaggggtcatcaaatttttaatctggaaattggaaccccaaaaggtaaaaaagaaaaaacttgggggga

SEQ ID NO: 676918 - DNA, 407 bp, Homo sapiens
aaggtgctatgaaaaggaaagttgaagtagaggaactgtgtggatgatcttccgtactggagatggggctgtagcagctgttgactgtctgctaatggcagacaggctttcctggcagaggtccctgattctgaggaaggggagtccgggtggactgacacagagtcagattcagactctgagcccgagacccagtgcagagggaggggaagaagacccgttgccatgcagaagcgcccctttccttatgacattgatgagattctgggtgtccgcgatctcaggaaggtccttgccttgcttcagaaatctgatgatcctttcatccaacaggtagctttgctcactctgagcaacaatgccaattattcatgcaatcaagagacaatccgcaaattgggaggccc

SEQ ID NO: 676919 - DNA, 450 bp, Homo sapiens
caggagtttctcactgtagccaccatagctggaaatatgctgggtctcacctgaagccagcacatcacagaagctcacccaagacccacagcgtactaactaggtattgctgctggttcctcagggcccaagggcactttagtcagcaggtaaagaatgccaccaggactggatccttctcttcaaggcaggagtttcccctctggcccagggtgtgtctacatatgtcatccagaagctagggcctgatgactccgcccagtgccctatcctccagtggttgagctggtatccaagatgtaagataaaagtactatgtactcttacctctcctcttctcaagcggaaggagggggtcttttttgaagctacaagctgtgcgcccaaaactgacggaggggtggcacatgtactacctcagacgccatggctggagtctcactaggtcat

SEQ ID NO: 676920 - DNA, 138 bp, Homo sapiens
ataacggcaactcgaattgacgggtcgcttgaattgacgggtccgtcagtccctagatcttcagcagatactctaggttcccaatatactcaacggccaactttagaacacgaacagctataaagcatcatccatcct

SEQ ID NO: 676921 - DNA, 206 bp, Homo sapiens
ttgggatgctttcccagaatggcggatgtgcgcggcgatcaggtcgacgtgcttgtgcccagttgcgggttcttttcccagcatgtgcccttgctcggaggtggtcaccgggactttcacggcggcgcgcacgcggtcgagctgcacgatcaggccttcgggggtgatttcttcccggaacaccgcttcgttgcccaccactacgc

SEQ ID NO: 676922 - DNA, 489 bp, Homo sapiens
  misc_feature (210)..(210): n is a, c, g, or t
  misc_feature (217)..(218): n is a, c, g, or t
ggagccaagctggtctggcaagggcgctcaggcctgggagagaagggagcaatggccagtcaccttcaccttctaactaactagcctccggatgaggtggctgccaccaggcccgaatgatccccaggagcccagcttccaaaccccaacatcgaatcaaacatcccatccccaagtgcagtaacacacaaaaaccaaaaaaaaaaaaanccccaanncttctggccccctgggaaaggcctggtgcgattctcagtaggactcacacccaccctacctagaagtactgggctggcctgggtactgcatccgtgtgttttgataagggggtgatgtggccacgcccttatctagatttcactttgtatccactgggcacagatattctagagaacttatctttcactcttgtaaaagccacatatccacatctctttcattttctcagtgtgttatgcagcaatttattaaagtatttattgtctaata

SEQ ID NO: 676923 - DNA, 721 bp, Homo sapiens
tgccgcccgagatgatctcttagaagtccccttaactaatcctgaccttaacctatatactgatggaagttcatttgtggagaatgggatacgaaggttagtgatgtaaccatacttgaaagcaagcctcttcccccagggaccagtgcccagttagcggaactagtggcacttacccgggccttagaactgggaaagggaaaaagaataaatgtgtatacagatagcaagtatgcttatctaatcctacatgcccatgctgcaatatggaaagagagggagttcctaacctctgtaggaacccccattaaataccacaaggaaattatagagttattgcacgcaatgcaaaaacacaaagaggtgggaatcttacactgacaaagccatcagaataggaaggagaggggagaacagcagcataagcagctggcagaggcagcagaacggaaagaaagagacaggaagtcaaagaaagagacagagaggacgagacagaagttagagagaacgagggacagacacagaaagtcaagagagggtcaaaaagagaggaagagacaaagaagaagtcaagagagagatggacgtagtacagaaaaaacaggtacctattcctttaaaagcagggtaaattctctctaccagccaggatatctctattgggtctcacctattgctctcagtggaatttgaatatctattaaccaatatctggcag

SEQ ID NO: 676924 - DNA, 151 bp, Homo sapiens
tgaattacacaagtcagtcatcaactgccatagagaagttgacaacacatagagtcgagcccggaaagaatgtccgtgaaataggaaacaacacttgctgggaactgactgggggtgcagagacctcccttgtcattgtccgggtccacca

SEQ ID NO: 676925 - DNA, 907 bp, Homo sapiens
gcgtgaacccgggaggtggagcttgcagtgagccaagatcgcgctactgcactctagcctgggcgacagagcaaaactccgtctcaaaaaaaaaaaaaaaaaaaaaaagattggtaaaaaaaaggattaaggcttccaagaaatttggaaattatgttaattgtcgaaccctaaaattatttagggttcctagggaagaaacgagaaattctaaaatgttgggaaaaccgtatttggaggggaattaatcaaagaaaatttccgtggccttggcgtagagattcgggagaaatacaaggaggtccaaagaacacctggggaaatttcttggcaaaaaagattttggccttaggcacattagtcatcaggttaatctaaggtcaagacaagggaaagattcttaagagctatgaggcgcaaaaggcttcagggtaatctataagagggaaaaccttatcagaatttaaaaacgcgagattttcacgagagaaaccttacaaggctagaagtgatttgggggtcctattttaaagcctcctttaaggcaaaacaatttatcaaggccacggattttgggtgttccaggagacgaaattaaggcttcattaattggaagggaagatactggtttttcccaagacaaaaccaattgggtggagagattcgcatattattaagccaagcagtacaaggagtcggttaaagaagaagtctaattttaaattaaattctttaaattaatccaaattaaaaatctcgctaaaagaataaatttccaaagagccttatttgacaattaccacaggcaaaatttttgtgtgtggtattatattgggggggaaaataggcaggacataaaggctcctccggaaaactgatgtgaatcaagccctaaagaaaagggagc

SEQ ID NO: 676926 - DNA, 301 bp, Homo sapiens
  misc_feature (219)..(219): n is a, c, g, or t
  misc_feature (257)..(257): n is a, c, g, or t
aagttccgatggcgagtgtggaggtccaggatgggaggcggtgttgctccattttgcattgcgtagtaaaggagtacctgaggctggtgtcgatttataaagggaagaggtttatttggctcatggttctgcaggctgcacagaggcatggtgccagcatctgcttctggggagggcacagccatccagtgggagcctcatgcccactgcacagataanaccaattcaccgagatcttggtattgtagtaaaatgtntaatgtgaggccagccacatggagtacatggggtaccgagctcg

SEQ ID NO: 676927 - DNA, 185 bp, Homo sapiens
tacaaggggagcgagtggtaaggggccacggagctgtcaggcagccaaacgggggggggggcaaacaagggaaaccgatgcggggtatgaccaggggggggacacatgtccacacccgtgaacacaagcggggctctgggagggccggcgcaaggcatttctgaagacccgttggggtaggcaaa

SEQ ID NO: 676928 - DNA, 383 bp, Homo sapiens
  misc_feature (11)..(11): n is a, c, g, or t
tgatgaccggncctgcgagttgaattcccaataaacatctagctgatgcttttgtgtcgattttccagcgaggtttacattgtgttttactaagattgtatcgaatccatcagttctaaggatttcttcgtatacctctctcgttagtttttcgtattcggtatcctggttcaacatgttcggctccttggatttgatgccaatcggagtgaagtgttcagagctttatttttgaagatctttacggcagtacatatggcaaagccagactatgatattccataggaaccttccgacacttttctcggcttgcctgtcagacctaccaccgctaaccttctcaagctgctgtatgtaaacccagtggccggaggtggaagtcc

SEQ ID NO: 676929 - DNA, 716 bp, Homo sapiens
ataattcactctctgcctcactagcacctaactactccgtatgcctcaactcgagtgagacagacctagacgttcctactgatggcttatcagtagcactatggcctcatctcacatatttagatgtaatctttgtgtagagagatacgagactggatgtaccactctactactacctgttaatgacaggccgtgtccgacacatctccctgtttccatgtactgtggtagccagctatcggaaagaagcgctgatttaaagagctcgcttgggaattttattgacacagtaccatttaatggtggaggacaaaatggggcaggggagggagaagtttctgtcgttaaagaacagatttggaaagactggactctgaaattctgttgattaaagatgagtctttgtctacgtgtcaaatagtttgtattgcgttacgcccgtgtcagcgctcctaatttgtttgaagctgaaatatataagctaataacatgtgaaaagaatagaagctaaggtttagataaatattgagcagatctataggaagattgaacctgatatattgccattatgcttgacatggtttcgcaaaaaatggtactccacatacttcagtgagggtaagtattttgcctgttgtcaagaatagcagtgtaataagcattttgtaataataaagcatagctttaatgatatgcctcgggactaaaataatttt

SEQ ID NO: 676930 - DNA, 153 bp, Homo sapiens
ttatgtgttgtcgtgcaggtagaggcttactaaaagtgtgaaaacgtaggctgggattaaaggcggacaagcggtattctctaaggataagctcagtgagatattagaattggtggaagatgataagtgtagagggaaagttaatggaaattc

SEQ ID NO: 676931 - DNA, 121 bp, Homo sapiens
tggattctccgccgttgcgggccccttccggcggggagtctgacttaacattgagcaacaatgaggcttgcaaagtgtggcgggtgtgcccacatggccccgggatttgccccacatggtg

SEQ ID NO: 676932 - DNA, 144 bp, Homo sapiens
gcccgtattctggtacgaccaactcatacaccgtccatatgaaaaaagtttctacgcacatcactcgcgtaacattacttgatttgatatgtctccatacccattacaatcgtccgaagtccttccccggcttgcacatccagg

SEQ ID NO: 676933 - DNA, 140 bp, Homo sapiens
  misc_feature (56)..(56): n is a, c, g, or t
agtcatcttgctttggacaggcttcaggacagaagcctgcaggtccagcctctgtncacaggtttccacaaatagccagcctttggccacctctctgtcctgaggtatacaggtatatcaggaggtgtataccttctctt

SEQ ID NO: 676934 - DNA, 528 bp, Homo sapiens
tctccaaaagctggcaaaaaaaaaaatgggcacaaaaaaaaatcttttcttggccgtggatttgttgcccgccaaccaaaaaaaaaaaaagatgctgctgcccaacccaaagggtttgcccagggttttggtccttaaaaaaaaattggggccccccccccccgggggaaatttttttttttccttaaaaggaaaaattccaatagggcccccttggggctggggaaaaaggcaaaaaaaaagggccccccaattggaattgcttttttttaaaaaaaaccaccctggcctttttttcccaaaaaagaagccccaaaattggtcccccgggttcttttaaaaaattttaaaaaaaaaaaaaaaaaggggggcttgggttttttttttcaaggggggcaaaaaaaccccctcccaaagaaaaaccagttttatatttttttttttaaaaaaggggtggaaaaggtgttggggggtttttgccccccaaaccccgggttcttttgacaaaaaaaaaaaagccttttgtta

SEQ ID NO: 676935 - DNA, 872 bp, Homo sapiens
tggagtttccacatttaacgggaactttttttggcttaaaacctaaactttgttcagttgtgaaaaaaaactccccgtggtgaccgtgtaaactgatctgtgtggatataaatctctagggttttttttttcgggagcttctcctgggataaactttttctctccaaaaaccagggactccttatttttttttaagacagaaggagaattttgataactcaaagattttgggcacgccccttgcctttttttttttttatatacgccccctaaacaactgctcccggagatatacaagaggctctcagtggggtcctccgaagtctcttcttgtgtgagtattacacgaggtggtagtagaaatttacaaaaaagaaagacgccctattccccctctcaatattagggggtcgggggtataacacccctatgtgtggccccaaccccctccactataaaagggggtataaaaaaagcagtgagattatcctgtctgtagactacaacacagccgttctacaaaaatatctcccatctctttataatttctcccatcccgcgtgccccctccatctgagggggagaagtatcttctaaacaagcggctacctgatgaatattctctgtctataagacacacacgctgtgtgaactcccgtgtggggtctcttatatgcgaaacacaactgtcaaacgcctaatatgtatctgacgaacgtgacaccaactgtgtggcttctgtattgttataaaaagggtccccccgaggttgagaaaaagacaagaggggcggccaccctccatgtttgtgcgacacacacataaaagacaactcttttctcaatacgtagtttgtggtgaggactcaacac

SEQ ID NO: 676936 - DNA, 867 bp, Homo sapiens
gactggtgagaagggcttcgagctacaaaggctccaccttccacagggatgatcccttccttcatgtgccaggcgggcgacattcaccaactcatgatggtcacagcgcgggaagtccatctacggaagccgctttcctgacgagaactttacatctgaatgcacgtggggccaggtgtcctgtccagtggcataactgcctggtccataacagggcaacggactcccagtgtctgtcacttcgtgcaccaataaagaccgactgggttggagtggcacgccatgtagtgtctcggatcacgtatcataagagggcactggacggtcgtgaataaaagtagaatctgttcgtgctctaacagtgtggacgtgacatccatggatgattgtcaatctacagacctgtggccacttgagcgttaatctgtgcgacaggccttgctggcatgagtggatagctggcacaaatgtccatgtctcccggaggttgtgcgggatggggctagtatagaccaaggtgctctgaaggagataccgtgtgcccactccatctgtcacgaatgtgacgtgcacgtgaggtgactcagtgaatgtggtgaggctcggacatgtagccatcatgatggcttgcgttactacccgagcctgttgtcgcgacctcatttcctcgggcgatcttgtgttggctttgattgtggcgtccccttggggaacgcctgtcctgtgttgcccgagccgagattcatcgtgtgccttggacctggtgctgggcgatggggtggcggccgggtgagggtctcccctgggcctccggggtgggcctttggcgcggagctataccgtaaagggccggcgggggctgttgtc

SEQ ID NO: 676937 - DNA, 105 bp, Homo sapiens
tgcgccataaccatccacatctggtgcatcaatgtccactttgggccctctgcatgtcgacatactggacactgtcagtttcaccattctacacttgtgaaacag

SEQ ID NO: 676938 - DNA, 196 bp, Homo sapiens
tagtaggaacactcagtatcacgctctgaggaaggtggcattaaagtctcatctctcagtgtatttgatgtattatttttcaaacctttgaatcaccagattttcattcaatttagactgcagcctgcaggcaatagagaacttcccagaaaagaaatctcttgttctatttccagttttttaaggaatctccaca

SEQ ID NO: 676939 - DNA, 175 bp, Homo sapiens
cgaagaggcactggtctctgaggacaggccttagttctgtggaggtgtgagcgaatgtcactatgtccattgtgagtgtctttgcctcttcagagatgtcatcggtgcaaagggtgtcaacgatggcttcctcaggatcactgcctgtaatggtctgaactgtggtcattccagc

SEQ ID NO: 676940 - DNA, 251 bp, Homo sapiens
atggtaaaccagtgcgggcagacactggagtagaggcggttggccagaatgaacttgaatgtcactgtggtaccaaagagtcagttcatagtgtcagtgagagcctggcaaagtgagtcattccaaacaggagccagtcaggattgagttcctgcaccccgaaaggtgagtgggagtcatggtccatcccacttgagtccttgtactgccacatgagaatgtttttgtggcccatgaacatggatcctgtg

SEQ ID NO: 676941 - DNA, 305 bp, Homo sapiens
gcacccgtgatctgaacttaggtaaaataggcctggcacggtggctcacgcctgtaatcccagcattttgggaggccgagccgggtggacagcttgagttcacgagtttgagaccagcctgggcggcatggcgataccccatctgtacaaaaaatataaaaattggctgagtagggtggtgtgtgcctgtagtcccagctgctcgggaggctgaggtaggaggatggcttgagcctgggagagctgagattacaccactgcattccagcctgggtggtagagccaggcctaagttcagagccagg

SEQ ID NO: 676942 - DNA, 161 bp, Homo sapiens
  misc_feature (15)..(15): n is a, c, g, or t
gtcagctccccaagngagctgagccccagagagagctctgtgtacaagtaacaggcccagcctccaggccctacttcgccagctctcccgctctggatctgcactctaacactcgactctgctgctcatgggaagaacagaattgctcctgcatgaacaca

SEQ ID NO: 676943 - DNA, 961 bp, Homo sapiens
cagttttcaaatcatgtttgaatctacattcactttttttgttttcttttttgagacggagtctcgctctgccgcccaggctggagtgcagtggcgcgatctcggctcactgcaagctctgcctcccaggttcacaccattctcctgcctcagcctcccgagtagctgggactacaggtgcccaccaccacgcctggctagttttttgtatttttagtagagacgcagtttcaccgtgttagccaggatggtctcgatctcctgaccttgtgatctgcccgcctcggcctcccaaagtgctgggattacaggcatgagccaccggcccagcctacattcacttctaaagtctatgtaatggtggtcatttttttcccttttagaatacattaaatggttgattggggaggaaaacttattctgaatattaaccggtggtgacaaggggacagtttttaccctaaagtgcaaaagtgaaaccataccaaaataagactaatttttaagagtactcagtaatttcaaaatacacgatttgaatagcagcattagtggttgagtgtctagcaaagggaaccaacttgctgactaaaatgaaggtctggtgtatatgtttaaaatactcccatatagtcacacttttacattaagccttatataggcccctctatttccaggatatattcttaactatcattatttacctgattttaatcatcagattcggaattcctgtgccatgccgtattttgttcacttcacccccttttcactgtgaaacggctcctcacgttggcaggtctgactacatggggtgttctgtaagaccgtcgttttgcctcacaaggtctcaaaaggcggtattcctttacactggcagataaggcatgacagaatgatacctcaagggaacttgccctccaaagaggcactcacgagccaagtgaccgttcctccatgc

SEQ ID NO: 676944 - DNA, 400 bp, Homo sapiens
  misc_feature (400)..(400): n is a, c, g, or t
ggctgtcagcaggaatacaaccacagccctgagttctgaggcggagaggaggacagaagaaacaagaggctgtgagatagtcaaattcagtatcccagatggctcttgagtcttggtgaaaccatacctcaacttctagagggagagtggttgatcatgaaactaattaccatcctttttctctggttcaggctggtactaagattaacccacgaatcacagtccgaggaaattgactgcaatgacaaggatttatttaaagctgtggatgctgttctggagaaatataacagtccaaacccaagtgacaaccacgttgtattgtgccgcataactgaagccactaagacaggtgggtctgacaccgtttatttcttcaaggacgtcggagggggttgtn

SEQ ID NO: 676945 - DNA, 657 bp, Homo sapiens
atcccagctctcagggaggctaagaggcgggaggatagcttgagcccaggagttcgagacctgcctgggcaatatagcgagaccccgttctccagaaaaaggaaaaaaaaaaaaaacaaaagacaaaaaaaaaaaaaaaaaaaaaaaaaaaaaaggggggggcgcgccgcggggccccgcgcgaaaaacgcttttcagaacaccacccgcgcggggggcgcgcgcgcggggccacggaggagaaacggcgacaacgggggcacacacaggggtgttccccagaggagacacccggggacaaagagaaacaagaggggcgggagactcccccaccccacataaacaaagcggccgcgggggaaaccacgggcaccgccttccggaaacaaaaaccccaaggaggcgcgtcctcgagagaggcgcacaaacgggggggaccctcctccccagggggagcggcacaacaagaggagccccagaatctccaaaaaatacgcccccccgcgacgcgggggccccccacaaacccccaccaccaccaatacccaacaaacccaccccccaacccaacatcaacacactacaaacacacaaaaccaccacacaaaataatataaacaatccaaccccaacaacaacaccactaccactacacca

SEQ ID NO: 676946 - DNA, 189 bp, Homo sapiens
ctagtgctggttcacaaggttatgctcacccttcaattaaaatctaaatgactgctagacttgccatcagctctcttcagtgacctctgctgggtccgaatcagaaaccttgggtgccatgaaatttttaccatatttgcgttccaagccaggctttgcagctagattatagatcacttgagtacgatc

SEQ ID NO: 676947 - DNA, 309 bp, Homo sapiens
atcgtttctccgggcctcagtgtcctcgtgtgtcacagagctgtccgactgttcagtaagattgcagtgcaaagagccctgaaaactgctggcccacaacaggaagcgcccagtagaccacggcaatgacgacgcttcatcttcagacagaaaagaaatggtcaggcgggcacagtggctcgtgcttgtaatcccagcactttgggaggctgaggcaggaggatcgcctgagcccaggagtttgaggctgcagtgaactatgatcacacccctgcaatccaccctgcatgatagcgagaccctgtatca

SEQ ID NO: 676948 - DNA, 102 bp, Homo sapiens
aggatctcacgtatatgtacaactcacatgtgcacatgtacctaaaacttaagtataatatcatttaaaattcaaaaaaaacacttgaagacattaaaaaaa

SEQ ID NO: 676949 - DNA, 515 bp, Homo sapiens
aacttacaggacctggaagagagtgagccatcaccggctgtcacatacatccagggaagggggtactggtggcgagggcattatacaaaaagaccaaggtgaacaaggcgacgacatgattaaaatcaagggtgagggctgctcccttttctgccgacaagaagtctccttcaatggtatgggtacgtcttttccgtttctggcggccttcatgaagaaatgaacggtgcagaatgggtgggtcaaggatatggccaacaatagttatgactaaatgatgatccactccttggtataacaccggtttatggagtgcctcctacatgccaggcacggttttcaatatcggggaaatacagcagtgaaaaaacaaacaaacaaagcaatccctcaagagcttaagctctcatagatgatgccaaggaggggtaacttctttggatcaggctttaccttacaaacatcccggctttgcttcacactaaaggtgctgaatcagcacatttagggtggtt

SEQ ID NO: 676950 - DNA, 293 bp, Homo sapiens
ggttttttaacccccccccttttttattccaaaaaagaatgaacaaccccctgatttggagtggtgtatactgcccacatcagtgtttgagtcagtccccagaggagaggggaacccttcctccatcttttttgcaacatctcattttttccttttggtggtgcttcccccctcacacacttggttttggtctatcccacatttgagatttttattttatggtggacctgccggctttttttcaaattgaaaagaggacatcgccccaagagccaaaaattaatggggattga

SEQ ID NO: 676951 - DNA, 946 bp, Homo sapiens
acattcctgctcctgtgcgctcatgcaccgttgcccagggcgaaccggtgcagttcaaggactgcggttctgtggatggagttattaaaggaagtgaatgtgagctccatgaccccacccactcctgccagctgagcaaaggatagtcttacagggtcacatgtcacccttcaccaaggaatattcagtctaaaagcaggaatggccgtggtgtgcatgggcatcctggatgggtcgttcccagttcccttgccccattcctggaggcctgatggcttgtatggagtggcaccattgaactggcgctgatccatcaaagcactaaggacactatagactatctgaataaactaccagtgaaagagcgaatatccctctgatacaactggtggttggagtggggaacttcgggatgacagagtaccaaagtcgtctgtctgctgggacatactcccaggtagcagagttcgtttctcatctcggtaatgtgcctcgagtgagttcggtgcgatcgtggccaagtgtagtctgctgagacgtcttgacagaacctccagctctggtgctgtcaacagaacagtgacttgctctccaatggtatccagtgtagttcgttgaatcaggaggtgctcctgtagcagaaacgtgagctccgggtggctggttctcagtgggtgtcgtcatgtctcttttgtgcggggtctccagggtggtgttccattaaattgtcatgcacttggttagcagatgtttaggtgaaggacattgaaccaacgattaactttggggggctctttctacacgctggtcattttactcgtgaataattaaaaactccgttgtggtcttggtcttctgcaaaaaaacaaaaataaaacggcgcgggtccttagcgggggggaaaagaaacgggtaacatgggcgcgtggcctagggtttcgggcca

SEQ ID NO: 676952 - DNA, 120 bp, Homo sapiens
tcgaagacattcctgcgcatgtgcattgccgctctgtggagggcagctgtgggttctaggtgcccgagtagcattctgtgacccctccccagtgcctctcctggctcttctgatgcagga

SEQ ID NO: 676953 - DNA, 300 bp, Homo sapiens
cgggggcctactggccatttggccagcggcgggcgtttgccacagttgccacagggggccgaccacggaagccctcagacaggaggagacagcctcccggcccggggaggacaagtcgcggccaccttcggctgccgacgcgacgccctgggacggaccgctgcccgccgtcagctgccggccgagcagggcctccgcggctcaggccggctcccccaccctgggctcccgtcccccgcagggccggcacaccgggaggagaacgcctaccagggctagcacccggacgcccgacgacgc

SEQ ID NO: 676954 - DNA, 826 bp, Homo sapiens
gtgtctctatactaaaagtccgtattgagctaattgagcagtttgaaatgaatattgtaggtaagttttaccatgatcctatactgtaaaatggaacaagggatattaaatcgataaaataagactgtcccaaccattttggtcctgggatacgtggcattcagtattgcacgcaccaaaattatcctcaaagacttaggtaatctgctatagctggcattttctccaacgtaaatgcaaagcccagcatatgcatatttagtggatgcttcaaatagatcaggctagggtattgctcgttaattcgcagcaaacatagtagaaaaggacaagcgcgattaacatgtggccgacccaataacatatacgatttgaggttaagtaattttcaaggtcatcaaaaagataaacaggtaaatcatcacatcatgaaattcgagttattacgatggtaatcgtggaaattctaatacttataccaagccccagcagcaaaagtattactcatccaggaccagggtaaggggaaaaccctacttcaagacacggaacctgaaagcaagggtgacactggcaccgagaaaccccaaggcctgaggtgggttcctaataagcattccgtctggaggcaacctgtagccacgggaccggtgttccgacaacaaccttgggtcttgggttcgccctgtgcttggtgttctatgaacttttccctggagatcccctttctcagggaaaaaaaccccgagtaaaatgttgcactatataatgatagaaaagagatttcccccaattgtttgccccattcttcatacaggcgtcttgt

SEQ ID NO: 676955 - DNA, 240 bp, Homo sapiens
cagatcgcctcctgtatgccctgttcttcggcggtgccgggatgcccgggatgcggatgagcgtgaccttctcggcaccccgcagtccggcggtcacgaggtgtatctggaggtcgccgcactggtgacggtgttcatcctcctcggccgctacctggagacccgcgcgaagcggcaatccggggaggctctgcgcgccctgttggagctgggcgcgaaagacgccgtcatcctccgcac

SEQ ID NO: 676956 - DNA, 147 bp, Homo sapiens
agtgatctagagtatccgttatgacgggctgctgtgcctatcagcgctcgcgtttttcggcaggtggaacgcttcctgttgtcctcagccgtaaccgcctgttgtccccgtgtctcagagtccctcacgcgttccctcccgtacata

SEQ ID NO: 676957 - DNA, 532 bp, Homo sapiens
gaaggggggcaagttgctcaccggttggcgttaaatttttccgcgcaaataaggactcactgtgcggagcctttcacagagtactggacttgccttgattctcccaacatgcagctgtttcgtcactcccgccagcagcaggcaaagtttgaccagtgtgtgctggacaaactgggctgggtgagcccggacctggggcagttgtctaaggtcaccaaagtgaaaacagatcgtcctttgccagagaatccttatcactcaagagcaaggccagagcccaaccctgtgattgaaggggatctgaaacccgccaagcacggcacccgcttttttttctggaccgtgtagagatgggttgacggtccacacttggtcacctcggtcatgcgcccagacaacagacgacgaaaacacccgtgccgatctcgtgttctttcctggatcacagacattaacaaaaaagttaatttatgtgacttggcagttattctatacatttcctgtccattaaaaattttaaaggaaaaaaaaa

SEQ ID NO: 676958 - DNA, 422 bp, Homo sapiens
atagcatctctagactgccagagctggcgaactcgccaccctgaagggaaagacacaagcctggctggcttcgcacctgctgattgtacagctctagggtctgtgagcaaacgtaggcagaagccaaggtagtggttacagggggccctgggtgagacccagttgctatgctggcttcaggtctaaccccacacaggttccactggtggtggccacaggggtgcttttgtcactgcaccagctccaggagctcacacacacacgagagattctcttgggagaaagtaagggagatataagagcctctttctggtaatccagagatcttctggatctatccagacaccaggtggtacctcatagtgcagacagtatacagattgggatgcccctaatgcagtatgacttgctgaccagcatct

SEQ ID NO: 676959 - DNA, 1235 bp, Homo sapiens
  misc_feature (210)..(210): n is a, c, g, or t
gaacccacgggttcgcgcccacggaccgacgagcactcgagcagtctctgttgaacacttgctggtgggctcccgtgtgcctgagaccaagtgtctagttctccgagcagtcattgtagtttcctgtcgactgccccgtgtcatccattgtcgtccaggacagatccattgtacagcagctagtgattgacgttgagatggacaagcaantgggcattcgtgcttgtgccactcgatagcgactaacatgtagacctgtggatgtatctcgcgaggcgacgtagtgtagctcactgtgacgcagggaacgatgaacgacggggcccagagccgcacagttcagtcagcttcaggcggagggcctgagccctgcggcgtatccgaccagctggatcagtcgaccgatctgcgaggagcatccgcgccctccggcgacttcctgcagcaaggagtacgggggcctggacgtgctggtcaacaacgcgggacatcgccattcaaggttgcgtgatcccacaccctttcatattacaagctgaagtgacgatgaaacacaagatttctttggtacccgagatgtgtgcacatgaattactccctctaatagaagcccaagggagagtggtgaacgtatctagcatcatgagcagtcatgatgcccttaaaaagcttgcagaccagagctgctagcagaagttccgccaggtgagaccatcactgaggaggagcctggtggggctcattgaacaaagttgttggaggataccaagaaggggctgcaccaaagggtaagtgctggcccagcaagtgtcaatacggtggctgacggaaaaatttggcgttaccgagttctgttccaggatcccagccttaggcacacctgactttaagcataaagacaaggggtaccgaggattccttcctggaatgccttctggcccaggtggtgtgaggactgaccatgcgggacccagcgcatccaagaagcccctgacacaaagcggtgcgagagaacccccgtgtgtatcagtgtggcctttttggcccccagaatgctgagagggttcccagtggagcattttgtttcgacataacaggtctaccgggacgatggtagttgttcccggccatctgagtgccgcaatttggcaccgttcagcagtgtgccaaagggagtatacagggctaccaacactctctttgcagacaaagtgtcttttctatcccacacctgt

SEQ ID NO: 676960 - DNA, 832 bp, Homo sapiens
cgttggtggcgcggtgcctaataagtcccagtatactcgaggaggcctgaggcacggagaagtcgcttgaacccgggacggcagagagttgctatgtgagccaatgatcgatgtccatcggctagctcgaaggccgtgggcatacagtacgtgaagaatcgcaagtttctaaagaaaaaaagcacagacgaactaacatagacaagacagtgcaaatagcgatcaacagtgcgcatggtagaatcagacgccgaataccgtcgaaaaggatgccacagagggcacgggttgacataggcgacaacattggtatcaccacgattggcaaatcagttcgcagtacgatcttataccggcgatgagcaagtttggcatctgaggtgaacgcgaaggaggcaacaagcgtgatcggagacgagtaacgtgggggcggacgaaggctgagaactgccagcgtcaacggatgaggcgcagagaagggatggaagacaatgttagacgaccacggatcccgcaatacagtaacgcagacaaaggcgtcaactcgcagagggacgtatgcgacacctttgggagatccgatatacaacttgtccacaagaacgcaatttaggtgtggggtgggggagcagagagatgggcacacatgaggcgagaaggtatgcgaaagagcagtcggggcgggctgtaccctggtagcgcgaactacggctctggtggggccaaagaagtaacaatcaccattgtgctagcgcgcggagagggatgaccagatttggagcagagcgagcatacaggagagggcatatggtgcgcggcgagaccggacgac

SEQ ID NO: 676961 - DNA, 141 bp, Homo sapiens
tagctactccagcctgggcattaagagctactccaggctggagtagctcttattgcccatgctggagtagctctaattgccatgtgctgaagtagctcttattgccatgtgctgaagtagctcttattgcgctggctgtat

SEQ ID NO: 676962 - DNA, 436 bp, Homo sapiens
cataaaaaaggaaaaaaaagactttaaactggagtggcagggcaaataatccttactttcaattcatggctgctttatattcatttgatgaaatcatttgaatacaaaccagggagagttttctttacccccctggcaatatatcccatactcttcaaggtcataataatatccttaatataaattttaaccacatggcctgtttagaaaaaatgctaattgctatggtccccttatgtttgcttagcttttatttgtttttctgtgaacagttaaaaagctaatttttttcaaaggggattgtaagtcatattttataaagccttttgcttgattatttgctctggactgaatttggactctattgcccttagatcttccaataatgttcccctctgcaaatttttaaggttcaaataaagtttaattgtttgca

SEQ ID NO: 676963 - DNA, 377 bp, Homo sapiens
ggtcgagtttcagttgtgtgggcgtacgagacattcggactcagcccctttggctctgggttggaggtctgggatgtgactcctgtggcttggggcgcggaaacatttggcgcagtaggagggtctgttgtaggtgcggacgggtgaggggagtgctgctggccaggtttgtgggtttagtatgtctcgcaggccctgatcagaggttctttcatcggggtgaggaaggtagtgctaggcctcccctcagggtggggttgttgggtcccttggccccgatatcttatcgttgggggtggaagagagagaagtccccggttttgtgcccctatagtcaccatgtttcacactgtgagaggctgtcctctcctcgtgcc

SEQ ID NO: 676964 - DNA, 340 bp, Homo sapiens
tcttgatatatgcagtggttacgtaaagaggtcggtagaaagtcttgctgactatcacaatattggaaaaggatgtagtagactagactgcacggatgctcgctacaccactgacgatttgaatatgctgctgtaagcacatcttgtgatctatcaagtatctgtcaactgaatatcccttcggtattcgttcctcctgtctaaggttccgacagaagcattacgttagcagcaagaatcagtagcttcacagctcctttgggaggatgatctaggtcagcaccatataccgattcactgttcatttctaattccaagttatcatcatccgttatgtctt

SEQ ID NO: 676965 - DNA, 115 bp, Homo sapiens
aggcagttgtcagtggtctctcctcttccttgtccctcctatcttgctggcaaatggctctgtgggaaacccattctgcttacctgtataaacatgtagaaacaattcatttaat

SEQ ID NO: 676966 - DNA, 876 bp, Homo sapiens
  misc_feature (823)..(823): n is a, c, g, or t
gagaagctggccagtgatctgttgtgagtggatccgccgcacaatcccgtggctggagaaccgggtgcccgagaacaccatgcatgccatgcaacagaatgctggaggacttcctgggactacctggcgcctgcacaatgccgcccaatggtgcagtgagaatgtgccacgctggagatcaacgttcaacactgctgcatgaccaacgctgcgtgctcagacaacctgtgccctgcctctcactgcccttctgatgtgtgcagtgaatgtgctctcgtgcacactcacacaattgcctgtgtgtgcttgccttgtgagcatgtgtgtgatgaatgtggctactgacgtgatgttgtgtttgcttgacattgatgactcctgtgagtgcttggatgctgacttggaacgcacctgtgcacgagaactgttcctggccagaagtgcctcacatacacgatggccttggacttgactggccaaaggatggcacatgcatgctgcacagacaggacctactgatgacctgcacaccactactctgggaagactcaacgtgccattgtctccacagacagccattgacgtgcactctcgaagaagtagaccctgtgcatgccacaccaaaggagccgctgttggatgcacgactttgccagaccatcggcaccatggaggctctaatgcagcttggacctacttacttcgactcaaccccagttgtcaaacgccctgttgcacgaaacgatcgtgtgacccagtggtgacacatctgatggggcccctaacctcacaaaagccgacaggtgaaccgctactagcagcncggacctgacgaaaacctgcttggacgagccaacttgaccagagctgatactt

SEQ ID NO: 676967 - DNA, 137 bp, Homo sapiens
  misc_feature (118)..(118): n is a, c, g, or t
tgatggcggtatccatgtagccagtgatggtggctcgaggcgcaatccagtgcacagtaaaagagttggacagtaatatcagaaaagtcaatgccagttgggagaatcaatgacctgnttttcttgtctttcctcta

SEQ ID NO: 676968 - DNA, 510 bp, Homo sapiens
ttggcgggcgatattgtaggacttttcggccttcataccctggggatctcttttcataagaagggaggtgagagattccccttttccattaaattaattggcccccatgggttgtgacctggagagtacacggattgggggggaataattttaaattcctacatatttccccctttttttttagaaccgggggacctgggattctttgaggttgccaatggagtagtattcccgattaaggccccctttggtataataattacatcacaagaggttttgcattcatgaggggtccccccattgggtttaaaaacagatgcaattccggggggtttaaaccaaaccacttttccccgctaccggccggggggtatattagggtcaatgttttgaaatttggggggcaaaccccagttttatgcccttggtcttagaattatttcccctaaaaatttttgaaatgggggcggtttttaccctatggccccccctttcccccttttagggcca

SEQ ID NO: 676969 - DNA, 816 bp, Homo sapiens
cccccccaaaaatttagtccaaaaacatacctgaattcttggatttccttgcctaagtggctttggtaggggggacagaggatgcttgaaaatagtgggttctggaccctatggtgaaagctctagtgacactggcaattaggcccaggtcccgggaggaagagggggagagaaaagggggcgtagttttccaaaagataagtcaggggacaacaaaagtccagggcgcctatgagccggtgagactccttgcccctgttggtggcaaagcacctgggagatgatagaccttcctagggaaagggtgcttggagtccccaggaatgctgggccctggtgtcaccaaggctccctggggaaggtctctggtactgggggcacacagaccaacatttttgaattggcaagcttaagagcttgtttgagcagaacctgttgcagaccaggctaagagggctcacctaaatgtttggcattgtgtaagacccaggacctttcgagatctgcagagggaacaaccataataacacaaccaggtgcggataacactcatcccatcttatgggtacagacacctgggttttttccccgagagaaaatacagcaacacaaaatgtggggcacgagacctaaaaattttaaacactgtggggcgcggggccaaggagacacggcacgtcccaagcacgccaacagttgtccaaaacaccgcgaccggtgacacacgggtggaccgaaaaggacgcgtacgccaggctggcaccacaacgacgagcagagaactctgagacggcaaccgaatcactattacgccat

SEQ ID NO: 676970 - DNA, 1013 bp, Homo sapiens
gtggcgacgatgacctacacattgcttacgtggacctggaaaaggactttgctgctgaggttgtacatcctggagacctgaagaattctgttgaagtcgcactgacacgaagttgctggatctcaatccaggtgcgaaaagtttaatacctgctgccctgaaaggaactgggcatgcgctgctacccagatctctcaatagcagaagcgaatgtgacataaaggtggctgtcgccagatgcaattccagaaccagaggaggtcatcccatcccggctggatatccgtgtggggaaaggtcatcactgtggagaagcacccagatgcagactgcctgtatgtacagaagattgacgtgggggaatgcttgacaccacggggctgtggtgagcggtgctggtacagtatgtcgcccaattgcattggaactcgacgggacaagagtataggggcaggtgaaaagcttgtcgctatcccttgaatacaccccagaagatgaagaaggaggtcggactcccgatgggactgtgcgttcatgttgctgctactcataggtaacgggatagaacgcaggcgtggttagtgttccttgctgtgatccctcgctgggatggctcttgattcctggtgagcacgtgtttgtgaatggcttatgaactgggtcgaccagacgaggagctcaatgcccaaagacgaaacgtgcttcgaagtagagctgggggctgactttcaaagatgtccgaggaggtgcatccgcagcagcgtatagtcaaaggcaccttctgatcccaggctgggcgcccgttcctgttacatcgcttgacacgggggggggtttgcttgcagcccagaatttcccctgttttcgcgcctgggtctctggtgccctccggctgggccgcccaccacgggtaccctgtccgacaggaggcgcgattggcctcaccgggcgatcgggggggagccccccccggcactctgtggtgggggcccccggggcccggggcccctccg

SEQ ID NO: 676971 - DNA, 869 bp, Homo sapiens
tggtaccggcctgggatgtttgggatcgcgaaccaacggttagcggtggcaggcgctgactgagagcgtctgcttgacagagtctttctctgtcacccaggctggagtacagtggcacgatctcggctccctgcaacgtccgcctcccgagttcaagtgattctcctgcctcagccacccgagtagctgggtctacaggtgtgcgccaccatgcctggctaatttttgtatttttaagagagacggggtttcaccatgctggccaggctggtctcgaactcctgacctcgtgatccgcctgcctcagcccctcaaagtgctagccattagagataatggattctgaacttaatgcatagtatagctaggaagctatcataaacctccagaaagacgtatctgttccctcattcacccagaatgaaccatctcagaacttgccatcctgcaacacttagaagttacctctcctaagcatacttcatagcccaaatagccaagctcttatcctacgccttaccaaactcttcaggaaccacattcatcgctctccaccctggcacagaaccacaaccctcgcaccataaccctgacacacttctcttcccagagcacaccacgcacagctataaccaacggcccttacccacacatcgaccccacatctgactcactaacactcctgcccaacacccatccacccctgcactccccccccaccactatctatagtacttttaccgtctagtaccagtacttacaatccaccgactcccccgctccctcgcattgaattaccttcacttccctatcacctaacgtcaccccctaccccccttcttaccaccaccacgacatctcgacaacat

SEQ ID NO: 676972 - DNA, 123 bp, Homo sapiens
ggagtgtgaacggaacaggtgtgaggagcgaatataagaggtcagcacaaatgtgatgaagctgtagttccagagacctgatttaaaaccacgaccagagacagcagtccaagccctcagtga

SEQ ID NO: 676973 - DNA, 422 bp, Homo sapiens
  misc_feature (125)..(125): n is a, c, g, or t
  misc_feature (143)..(143): n is a, c, g, or t
  misc_feature (345)..(345): n is a, c, g, or t
  misc_feature (373)..(373): n is a, c, g, or t
  misc_feature (376)..(376): n is a, c, g, or t
  misc_feature (381)..(381): n is a, c, g, or t
cccgtacagcatcctaaccagttggccagtgtattcttagtcatcgtgatggcttgactaaaacctaaaagaaggaccctagcatgtatttgccatttttcctacagtgccttggagtaggtatnctaataaagaaaggtgtnttctttaatattaatgcccttaagaaaaatgcctttctctattaaaataactctgagcctagtgcctttggaaccagtgggattggaatggggtttcctatttgcttttgatgggatggtggtaaaaagaagggagcccaaactacaatgattttttgcttaattattcctcggtatacctaccaaaatctttgtaattgtngtcatttggtttccttaggtcattagtngtnggggntgtggggtatgcaacgaccacttgctggttagggatggtgg

SEQ ID NO: 676974 - DNA, 350 bp, Homo sapiens
  misc_feature (350)..(350): n is a, c, g, or t
gcttagctctcacacactcttaaccccgtgacacatataatagcgactctatgtgtgtgtttctatggaagagtccaaggggtgaacccacatgaagaagggttcttcagaggccgcgggcatataacccttggcacaggaaaaaagaaaggttccaagccgagaggctggcccacacggccatataaggaaggggctattgggctctggcaagccaaggaagttgcacattgaaagtgtaaaggaaaggccctgagacctgagagctcgtgttacacgttaacccaccaggaagggccattcgaaatataggtgatgaggttaataaccatgtggctctgttcccctcn

SEQ ID NO: 676975 - DNA, 1275 bp, Homo sapiens
  misc_feature (444)..(444): n is a, c, g, or t
  misc_feature (708)..(708): n is a, c, g, or t
gtgacgcgtggactcggaggcgtacagacgtgtttcaaggatgaagctgagtgagtctccttcccagttccactgaagtggccagaaattcatggaagttggacgatgaacgcaagacttcgtactttaactaatgaagaaggcgtgtatgggccactagcagagcttgtgctgctgaacgcttctgtggatgaagtaactggcaagggttactgtggctccgcatatcagtggatgaggtaatcgcatgaaaacaatggctttccactcactgcaagccatggggttgatcttagagccatggtccgtgtcctggccttgcctactgagatagagggcggcattgcctcgttgtacgagaccacacgggaggaaactgtgcagaacccgaacagagaacatagttcatgttccgttgggattcggtcagtatgataggtatgncaatattcctcgagtcggttcatcaatgtatgcgttgtacttgtgtacaaatagagacggacgatgaatggaatactatccttgtgaatcgtcgcacctgtatacttatctaggctagccttcagcctgccccgttggagcgccccagaaaaggaagactttagacgaaggaaatcccgtcatatacccatttctttcccaactacttcttcttcatatatggaaaggatcgcactggttcccagccgcgaagctaactcgttnacggtttagacgaagatatgcccctcggtattaggggattaggagaaggcatagcggtgacaggtagagaccctttgaggggaacctcacattagcaacccccaatgaaatatcgagccgtttcgttcggttgaaacttctcgaactggttgttcacgtggccaacgcacaaaaactgggtgtgaggcgcgctaattgggcgttcttggatacggaaaagccaaggtcggttaacgcaacttggtaccaacacaatttccccgggcacacgaagtgcctgtcccgcaacaattattgccttaagagacgtgtctctggggggcaaagcatgaacactgcgaaagggaagggtgtaaagggaaggcaacggcggcccaaggggaacctaagagtttgggcgaagagaagggaccgccgaggaacgtttttccacgtctatcttgtccgaaggcgttcgtaaccttgtcgtacaagttcgtgaaactttccaggttcgagacaaaattaacgaattttcggggaagttaaccataactccgacttagcgactcccgaggctcgggagag

SEQ ID NO: 676976 - DNA, 226 bp, Homo sapiens
  misc_feature (14)..(14): n is a, c, g, or t
  misc_feature (75)..(75): n is a, c, g, or t
  misc_feature (133)..(133): n is a, c, g, or t
  misc_feature (155)..(155): n is a, c, g, or t
  misc_feature (164)..(164): n is a, c, g, or t
  misc_feature (176)..(176): n is a, c, g, or t
  misc_feature (194)..(194): n is a, c, g, or t
  misc_feature (205)..(205): n is a, c, g, or t
  misc_feature (209)..(209): n is a, c, g, or t
caaactcctctgtnacctccccttccaggtcatctatcgatgtccttggggttcaccatgttgcgtagaaccatnaatgtagactcctgcttgaggagagcttctgcatcaccatgtgtcgggggctactgcncgagatgctcatgtgctcctgntcgctcagnatctctggccgntctgactcgggaaaaagntcctcttcttncttnttcttcttgggctccag

SEQ ID NO: 676977 - DNA, 900 bp, Homo sapiens
  misc_feature (7)..(7): n is a, c, g, or t
  misc_feature (462)..(462): n is a, c, g, or t
cccaccntctccccccccccccccccccaccctcccacacaccactccccacccctccaccatcacttccccacactttcccccaccccccccccccaccaccccacacaccatccccccctctctcctcctcccccctccacatctcacacctcccccttcctcccctctccctcctactcctcctcctcactatccacctccccctcacacccccccctccctcccactcccccccctcctccccccacaacctccccctctccccccccctctccccctcctcctcccacctcaccccctcccccccctccccctcttcccccatctcccccctccctctcccccccccctccccctccccactccaccctccccccccccactcacttccccccccctccccccccaccaccaacctctccaccccctcacccccccccaacccccctccctccaccncctctcacccctcccctccccatcctccacacccacccacccctcaaaccccacacaccacccacataactcaccaccacctcctccataatttccatctcatccccccttctcaacaccatcattccatcctttcccaccccatcactacctatcatccctccaaccctctccatctcaccaacatcaaaaaatccaaccacccctccccaatacaactctacacactcctacacactttacccaacccacaccacacatcaccacaacaaatttccaaattttacctcccaaactccaacaacaatccattttatcacaccacacactctcacacatccatccatccacaccccccactctcctcctccctctacccttccaatcccaacaccatccctccctctccacacatcaccccacacccaactcccacat

SEQ ID NO: 676978 - DNA, 130 bp, Homo sapiens
cccattgaaatcacgctatgacaaattaagacatctatgccatgctggtgatataatcttacctaacctaatcaagaacacattaatggaaaagtatatggcctggctacagaaagaacagcatagagga

SEQ ID NO: 676979 - DNA, 618 bp, Homo sapiens
tggggactgccccaaagggcaaacaggtttattggggcagcagcggggaaaatcaggcggtgggatcttggccacacgctccagctcgtccttcttcttaagtggcattaggagtttcgaggagcccttggcagcatttgatgagctcaatctgtgccaggcacctcagcaagtggctcttaagtgtctccggaaggcagccttcacgagcgccctgtggtgcacagcagccagagtggccgtggttcacagcgggcgccaggggtggaacacatctctcacagccgtgtgtcgttctctcaccagtctccgcgggcgcgcccaatgtggcgtgtgtgtggagttcctctccgcggggaaccacctgtgtgtgtgatgtgatgtgggcgtttcaccagagaccgtgcagaggggtctcctcgcctgtgtgtgacgcacgggtgtttgtgatctctctcgaaggcctgtgctttgacggatgcgcgcgcacaggtgctatggaccgctttcttggcgcggtgtggttggcggcgccgtggctttcatcatgggatgttacgggagggcgctccacaatgggggcccttggagctttgggggaagcgttgggggggcatt

SEQ ID NO: 676980 - DNA, 267 bp, Homo sapiens
ccttatgatacaggaacctgtatcccttcgacgggtaagtcatagtgttacggagcacctcacactttcctcaggagaaacacacaaccatgtaccctcagctggggacccctaactccaggccctctgccccaaacctgcccagccagacctgaatatgccagtcttctacgagtttgaagctaggaacccaaggtgaactgactgtggtcaaggcagagaagctggaggttctgcaccacaggaagcggtggtggctggagcgtg

SEQ ID NO: 676981 - DNA, 380 bp, Homo sapiens
accggacccttcatctcctcccacctcagctctgcagtctcaaatcatcttttctgaatctgcatctcacatctagagcacaggcatgtgatggctgggctcccaaggccttgggcaagtctgcacctgtggatttgcatgatatatcccccacagctgccctcatgggctgggctgtgttgagtgcctgtggcttttccacactaagggtgccagctattggtgcatctatgaatctaaggtctggagggtggtagccccctatgtgggggctccaagtccatattttccttctgcactgccctagtagaggtttcccaagaactctgcatctgcagcaggctgctgcctggaaacagtgggaggtgggaggagaggaa

SEQ ID NO: 676982 - DNA, 1145 bp, Homo sapiens
  misc_feature (137)..(137): n is a, c, g, or t
  misc_feature (264)..(264): n is a, c, g, or t
  misc_feature (450)..(450): n is a, c, g, or t
  misc_feature (855)..(855): n is a, c, g, or t
gacgtaccgatgggagatatatgtcagcaacgcaatggctctttgtggtatgaaaacatattcactatcttcctgtgattgatgaccccgtatgtaactgaactaatacacaccacgtgcaatgtcaacccggtgtntaatcttctctggtggcagcactactgatgattgttcgctttagtgagaattggatagtttggtctactcatagtaagtatacctagaaagctcactgaatactagtgctaacgagagagacgtctnccactgggtgagtgccgcttgacttcgggacttcggaagtcgttcccaatgttagtacatctacgtctcaattgcaaaactaatacggtacaacataacttgtcgttcctcgcataacaacgccaacaaggaatactaataatgcctcatagagttcaccctttctacacaatgtgctctgtatgntgatcggcatacttggcgctagtgttgttaacatcgggttcctatctaaaagttcggatacacaggctccgtcttcgtagaaagaggggaacagatggtatcgggcgccctctagggcaaatctgggggggagcgaagggcaggttcccatggaggttagctgcgctcgtgaggtgatgctcgctagctctatgcggatattttggcgcctaaaggggttacaaagtaaggtttccgttacccgacgaaaaaggaactcatgtcggagatgatcataaaaaccaatcggtgagtttccccactaatcgtaccagtcctccgaaggtcctcgcatgggggaatttctctgggtgatatgtaaagcaatcgaaacaaattcttcgcattaaaccttcctttccgagncgtttggggggttgggagaattcgcttgataacaccttcggtggaggtcctcgaaagtaatacacactcattcgttgaaaagaggtgggggtacaggagggggcaatttaaggctttttatgggtgtggtccccactatgctgtaccttgcaaagcggccacatttggtaagcccaaaactttttgtgatggtgggttgacccgtctccaaaccttgtgggtggacaccctttttttaatttatttccctctgggccaaacgagggtttccatcaacattcaaagggggg

SEQ ID NO: 676983 - DNA, 151 bp, Homo sapiens
  misc_feature (17)..(17): n is a, c, g, or t
gacaaacaaagaagagnaacaacggagccgccgaactgcataaaacactcttattgagcaggctgacagacgagactagaagaaactgaacataaagagaagggggggggggctagtttcaagtgggacctgaagtgaaaagcacagaggg

SEQ ID NO: 676984 - DNA, 266 bp, Homo sapiens
tcctgagtcttcggagcatattagtagcaatacgagccacctacaaaaattcagtgctgctgattttattttcagtttctattccaagtggggtctctctattcctttaaaaggcaggcatgtgctgagtcagcctcgggggaattttttttttttttttttaatttatagcctagactatggggtctctacaatgggggggaaagtcagggcgtatggggacccccatagagcgaccgcgaggcagtgcaagcggggcacggggc

SEQ ID NO: 676985 - DNA, 925 bp, Homo sapiens
cgtaggtaatccgtgaccggtgtcttcagtgtgaagtccttgtttattcttggggtgactgaaggtttcctcgtccttaagtgcagacctggccatgtatgctatcacagcagtcatgtttcgttcccattcccttgagtaggaggaccaggcgacctcacgcctagcaagtcctacaaggcggttccgtagccctacaaggttgcaccggatcacgtgtttttcttggcccatagctcgcacattggcgctccagccgtaccattccattgtgctaggtagcctctcaccaagctccgcacacttgccctcgtgccttgccacgttccttcgcagtgcgtcagttgtctaagagctcccaagacagctctagtcgtctaacaatagattagaactcccagacaggtggcttctgtgttcttctgactaattggattcctgcttcgtccagactcctaggcagccgtcctgttcaccattgcttggtcacaggctctagccagcaggcagaatggaaagtgggcccttccagagagaatatacgcacgcgcatttgggaaacagctagccgtcatgctccacgctgaaggcctgggtagtggcatgtcagtgcgagcatgagggacgtctggaggtggacactgcctcatcagcttacacggaatgccctagtccgtgccaccaatatggctctctatagcctcctctcctgtcaccatccctgtgtaagtcctagcttcgtgtcacaacgtcttccgcattccccatacatgctgggggtcattaggtctatcaaggctacagcgtctctcatccactgtccatccctcctatcatctgtagaagcagagcacaggcagtagtgtgacattgggcaccagggaaccctccatcaacataacccggagtcagtatatagggtctt

SEQ ID NO: 676986 - DNA, 631 bp, Homo sapiens
atgcacttcagagatcggacatatgacatgtagagtgtccctgcaacagcatggtgaaacctgggccttcaccattcgtgactacagtgtacaagacagacacttcaatatcattgctggatcagaccacttcataactcctgcgtggagtctactgtctaaggatcacactgtgattaacggcacatgtagtggagtaaaggactgcactaacgcgcgtctaccatgcatgtaactgctcaacgttatacgagctctaaggtcgttgcatgacacatgcgcccaaactgccaattgctacgtgtgacacatgcagtagcaagcaggctgactgccagttaccatggctaatcatgttaaacctagtgcgagcctgtcggtgcaagtgtgaccatgtgccattctctgcatatgcctgcagatagtccgtcacacgtgtagtcgaactgctcacattgaactcgtagatctggaatactgagatctcagtgcagagaatgaataagtgtagatgtccgcagagtggagatacagctgggaacttaggtcttagcgatcatagaatgccatgcagactatgccgtgaatgagaatatggtgacagctgagcggtgggatatcagcatgttcg

SEQ ID NO: 676987 - DNA, 276 bp, Homo sapiens
gctccacgcctggcttctgtggacaggagattcttttcgttctcacaaggggctcatttaaaatttggaggctgggtgctgtggctcaggcgtgcaatcccagcactttgggagagtgaggcgggcgggtcatgagggtcaggagatcgcgagcatgcctgctaacagtgagaccctgtgtccactaaaaatacaaaaaattagccgggcgtggtggcgggcgcctgtagtcgcggctactctgaagactgaggcaggagaatggcgtgaacccag

SEQ ID NO: 676988 - DNA, 370 bp, Homo sapiens
acctactactcgccgacactgaatcaccgcgttctggaacatagccctatccatagcggggaaggaggatggctgatgcccgaagcaggatactctatcgcttccaccctaaagagcagacaacggtggctgagaaaaatctgtatgttgattatgggtgccacgttgagaaagtattgactacgcctggggctcacgatataacaaagctaacacctgtactaaaccccagaagagcgatcaaataggcgcaggaaggctgaatcgtgctgctgacatccgacaaccgcttcccttgcatcatgaaagtatggacatgaccctgattgaccaactagctgatgatatgagtcaggcgagaagagggtac

SEQ ID NO: 676989 - DNA, 542 bp, Homo sapiens
cgaaggctgccatttttaataaatcgaagcacatacaatataggcaaaatgctacatgaaaaatatggtttttaaacagggagttggctttacaccaacgacatagacaaacagatgaataatgctacagggcttcatttcctttctctgattattaggagaggctggcgatgctcttaatgtgaagttatgagcctaacgcctgttgacttgcagcaacaggtcttttaccctactcggcaaagctggtattcttatcgtaagccttgcgccacttttatacaaaagctgcgatactattcataacaacttacacttactcttgtgttggcgtgggctaggatttcacaggctgaacaagagctccttgctccttgagttcacatatgttgtcagaaacgtgtgcataaaaatgcacggaggtgaacgatcactcttagacgatgtgcagacctatgtacatatattctcagagctgacaatgatgggcccctgttcaccaatgatactgcgcagcatgtggcgacttttgcactgactgg

SEQ ID NO: 676990 - DNA, 433 bp, Homo sapiens
  misc_feature (41)..(41): n is a, c, g, or t
acgtcatgtacgggattgaagacacacaagacacggtgtcnctgactgtggatggggttgtgtttcactacagggcggcaaccagcaggtacacactgaattttgaggctgctcagaaggcttgtttggacgttggggcagtcatagcaactccagagcagctctttgctgcctatgaagatggatttgagcagtgtgacgcaggctggctggctgatcagactgtcagatatcccatccgggctcccagagtaggctgttatggagataagatgggaaaggcaggagtcaggacttatggattccgttctccccaggaaacttacgatgtgtattgttatgtggatcatctggatggtgatgtgttccacctcactgtccccagtaaattcaccttcgaggaggctgcaaaagagtgtgaaaaccaggatgc

SEQ ID NO: 676991 - DNA, 334 bp, Homo sapiens
  misc_feature (2)..(2): n is a, c, g, or t
  misc_feature (8)..(8): n is a, c, g, or t
  misc_feature (10)..(10): n is a, c, g, or t
  misc_feature (24)..(24): n is a, c, g, or t
  misc_feature (46)..(46): n is a, c, g, or t
  misc_feature (53)..(53): n is a, c, g, or t
  misc_feature (82)..(82): n is a, c, g, or t
  misc_feature (92)..(92): n is a, c, g, or t
  misc_feature (114)..(114): n is a, c, g, or t
  misc_feature (116)..(117): n is a, c, g, or t
  misc_feature (132)..(132): n is a, c, g, or t
  misc_feature (146)..(146): n is a, c, g, or t
  misc_feature (156)..(156): n is a, c, g, or t
  misc_feature (164)..(164): n is a, c, g, or t
  misc_feature (180)..(180): n is a, c, g, or t
  misc_feature (186)..(186): n is a, c, g, or t
  misc_feature (192)..(192): n is a, c, g, or t
  misc_feature (248)..(248): n is a, c, g, or t
  misc_feature (259)..(259): n is a, c, g, or t
  misc_feature (261)..(261): n is a, c, g, or t
  misc_feature (263)..(263): n is a, c, g, or t
  misc_feature (273)..(273): n is a, c, g, or t
  misc_feature (281)..(284): n is a, c, g, or t
  misc_feature (306)..(306): n is a, c, g, or t
  misc_feature (329)..(329): n is a, c, g, or t
cngcaggnancccgaaagctcacncggaagatgttagagacaaacncaaaccntcgagttaaagttgatcctgacgctgacntgaaggcaanccgtgattccgtatgaacgttncnnaagtggtaattgagnaaaacagttccccngattgttaanagttcacngaagatattgacgcgnttttanaaaatnggtaaaggaatgtatataatattgctctcgtgtttaggtaagatttgttgctctcngactgtgtaanangnaatttattcntgttttcnnnntattaaaaaatcttattgtacnaactggtaaactattaaatgccnataaa

SEQ ID NO: 676992 - DNA, 380 bp, Homo sapiens
accttaatacatccttcaatctcagctcagatggcgctccctccaagaggcacctgtactaccagaaagtaaatagtcccgccaccctgtgccaatatcctacctcgtatagcacgtcatgtggtaccatgacacacttccatgtctatacgtgtatttagccacgagatctgttcccaatgttttgtacggaacaaagtcagtgagcaatgcatgtctggagaatgaataaattcaggaatcccattaatgacagtatctatctgtttaacaaatattcatggagcacatactaagtgctagggactgaggataccacattaaagaagaagaaaggacagattcctgtcctcatggggtttatgttctagatacgggga

SEQ ID NO: 676993 - DNA, 331 bp, Homo sapiens
gcacatgtaagtcccacgagcacaagtaacctgactcttgccacccaatattaggagcctcatggcctgggtcggggttagcccagaacacacaaaggctttctgtagactcctacccttctcttcctgacccatttctttttttttggagacagagtctcactctgttgcctaggctggagtggaatgttacgatctcagctcactacaacctccgcctcccgggttcaagcgattctcctggcagtgcttggcatggcctcggcttcttactaggtggatgactgtgggtgtgtttcagctcctctctgggccttaatttccttgtcag

SEQ ID NO: 676994 - DNA, 530 bp, Homo sapiens
  misc_feature (41)..(41): n is a, c, g, or t
acgtcatgtacgggattgaagacacacaagacacggtgtcnctgactgtggatggggttgtgtttcactacagggcggcaaccagcaggtacacactgaattttgaggctgctcagaaggcttgtttggacgttggggcagtcatagcaactccagagcagctctttgctgcctatgaagatggatttgagcagtgtgacgcaggctggctggctgatcagactgtcagatatcccatccgggctcccagagtaggctgttatggagataagatgggaaaggcaggagtcaggacttatggattccgttctccccaggaaacttacgatgtgtattgttatgtggatcatctggatggtaagatgtttgagtttctatatcttcgtatgaactgagaaaactgagggaagaccagaagttcattggaatagagcaagtcttctgtgcttgtttggattccaaacggtggcattttgtttatacgactgtatgattttgggtaaataaccgagatcgccgccaccgcgggg

SEQ ID NO: 676995 - DNA, 404 bp, Homo sapiens
cttgtatccaataaataacagcgcagcctggcattcggcgccactactggtgctccgcatcttggcggtagtggtccccgtccccagctgtcttttcttctatctctttgtcttgtgtctttatttctacgatctctcatctctgcacacggggagaaaaacccacagaccctgtagggctggaccctacagaatttcatgcacggtgctgtcaaataaaaaatgttatttagggccggacgcgttgactcacgcctgtaatcccaacactttggaaggccaaggtgggcaggtcacctggggtcaggagttcaagaccagcctggccagtgtggcgaaaccccatctctactaaaaatacaaaaattagccgggcgtgatggtgcacacctgtaatcccagct

SEQ ID NO: 676996 - DNA, 1424 bp, Homo sapiens
  misc_feature (1424)..(1424): n is a, c, g, or t
gctgtgaccctgtacacgtactcctgatagaaatcgggagggccttcaaggctctcatcgctgctcagtaccagaggggcctcatgtcccgcagtgctctccgtgacgcgacaccaatttccgattgtgggccgaaaacgaaccagcagcacccatgaaattgctccggtgaattgtccatggccggcaataggtcgccctagacatcccgagggtgatgcgatcggattcatgagtgtttgagagcaacgcccactctggcctactactgctgaagctacatcgcaggagcttgcagtgggaaacgctacatccaagcagcgcagactagaccacagagtaggtagcaccagggatgagctattgtctgattccggatatagtgcccccatccagataccgtggtgctgttcccctatccttgggctctctatgcaacaacacgatacccagcaggccactagagaatgcagaaggaggaagtgagggcggaatctctggggcttgctggatgcttacttcgaagactagcgaccttgacctaggtgaggcgaatcgagtgacacttgtccttgacagtcccgagcggtctgcaccctgataagtgaggtcctcataaggcaaggttcatacgagccattcttatccagcgaggacctgttcctcgattacgcaaacccgagtgggtttcctcgaactggcattgaagccaagggccgcacgtaccggggacctggtcttaggggggaactggaaactggctgttgagaacgatgggccactatgacgctaacaaagttcgcagtagaacccaaccctataaaacgggacacagccacgggaaaggagacagcggttccacggggaacaaggaagcagagaaacccaccagggtgcaccggacgagcgcgcaacaaacggcgacgtgggcccttgatacctgaggagcaggcagaacgcgctacaatggagacagggccagatacagagacccaaaggccaggagacccccgtcaggtcaccccggcgccaaacaaagaccacccggggagggcacaagtatacacgcgggacgacccacaggagagcgacacaccattggggacaggaaccacattattctggggcacaccccatagtagaggaaagagagagccacggttgatcaccaacaaagacatccctagggaaacaccctgacgacacgatgagcagacaacacaacgaaaaccatacaggggagcatcaagcaagcaatgccggtacctattattcgacaagaagacaacaactacagagtgatcggacccagcactccacaacccaacaaaacatcaaaatgtagcagagcgacgactaggtacctcttctctccccaccccgctcgatccttgctatctcgctcctctatctccggtcgcgan

SEQ ID NO: 676997 - DNA, 353 bp, Homo sapiens
caatgcggtgagactcagtctcaaaaacaaaaccaaaaacaaaaaactttcccatcaggcacagtgactcacacctataaatcccacctcttggggaggccaaggtgagaggatcacttgagaccaggagtcggaccagcctgagcaaaacactgagacccaatctttaccaaaaaaaatttttttttaatttaaaaattagtcagggctggtggcacatgcctgcagtcctagttacttgggacgctaaggtaggaggatcacttgagcctgagaggttgaagatgcagtcagctatgatcgtgccaagacactccagcctatgagacagagcaaaagcctgtctctttaaa

SEQ ID NO: 676998 - DNA, 988 bp, Homo sapiens
gacgggatttcaccatgttggccaggatggtcttgatctcctgacctcatggtcggcccacctcggcctcccagagtgctggggttacagacgtgagccaccacgcccagccagccaggctggtcttaaactcctgatctcaagtaatccacctgcctcggcctccaaagtgctggaattataggcgtcagccactgcagctggccacagatatctcaaaatactgtttctgttcatcacaaacacatgtattgcatgtaccagaacttttgtgatgcattaatatgtataattaatatgcattaatgtgtacaagtataaaaaatatatgcaggggcagggtgtggtggctcatgctgtaatcccagtgctttgggaggctgcggaaataagattgcttgagtccaggagttcaggaccagcgtgggcaacatggggagcccctgtgtctctacaaaaaatttaaaaattggctaggcatggtggtgcgtgcctgtagtcccagatacttggggggctgaggcacggaggattgcttgaggccaggagttccaggctgcagtgagccatgattgtgccactgcactccagcctgggcaacagagcaagaccttgtctcaacaacaagacacttacgacacagaaacgcaagacaaggaaaacaacaccaaccactcactatctactctcatatcatactcatactgcaacacgacagtatcaccctcatcatccatcgctactggccagcatgctactgtcgcggtcctacgccagtacactcctactcttacctggctctcgcacagaacaaccacctgatccagcaaaggcgtgctactctttaggcacgtctccatccatcgggacccacagagtggacccacgagatcaacatcaaccggcagcaccataggtcaccagcacagagaatgcagcgcatgtcggcaccaccaacagcgcccctcggcccacaccaggcgcacgt

SEQ ID NO: 676999 - DNA, 865 bp, Homo sapiens
cttaccagaggagaaattatataacgaccctgctaatatcctttctaaagtaattttgctccttgcaaatttaaaaaagcaataagagaagagaaacaaccatgtgtagaatatctattcactatctcaaagacgttcaatgtcctcatgacactgcagacgtgcagggattcctgcgcatttggcatgccatttctcccatcagaatctgggatgatggctcagaaccatggtaccacagactaaggaggtaacctgtggttgacccctgtcaaaggggggtgacataaccaataaaatatgcaggctctagggatgcctaattctctggaagaattggtatgaataattcagttcaataccacccctgaatacacttctctgcgtggcagcggcaacaacgtgtataatattgtgtattaaccccgaaattggattatttcttcaatgtgtcccttaaactgcagtggcattaataaatcaagaggcatgtcttacataagttacctctttctgtgttaacctcagtcatttcgcgccgtggccacaaaaactaacactacttttaaccgtgaccacaaaaacacacaacaaaataaactgaacaaaaaatatgttgtgggggcgacacggcccgagaagaaagcacacaaacaaccacacgtgaggagcgcgcggccccaaagacgacagagcaactggcaccaacggggacacaagaaaacccgggcacacgacaggtgggggtaccccaccaaaaaaagccggggaccagacgccgacaacccgagcgcagggccacgggggcacaccgggcagggtgataccacgacgcgcaagaaccagcaggcacaccccaacgcca

SEQ ID NO: 677000 - DNA, 258 bp, Homo sapiens
ttctggccaacgactcgacgacagacgaatcagacggggtgtctctttaggaccaagacttcagctaccgggctggctctgtccagaatggcaggtcttggtaacagggcagctgtttcaggctaagcaggaaaacctacctattcttaagcgggccagtggcaggagactgcctctgacgtcacgcactcttacacagtgcactacgacgctggtgctggtggattccggggacaggactatgacgacgaaacgact

SEQ ID NO: 677001 - DNA, 1010 bp, Homo sapiens
  misc_feature (460)..(460): n is a, c, g, or t
  misc_feature (486)..(486): n is a, c, g, or t
  misc_feature (490)..(490): n is a, c, g, or t
  misc_feature (495)..(495): n is a, c, g, or t
  misc_feature (516)..(516): n is a, c, g, or t
cgacgtcaacgcagccgggcgagttttaccgatctgtgttccgcggcccggccgcggctgagtcttcccagggtcagggtcaggcgctttgctgagtccctttgtggccgccatggacaattccgggaaggaagcggaggcgatggcgctgttggccgaggcggagcgcaaagtgaagaactcgcagtccttcttctctggcctctttggaggctcatccaaaatagaggaagcatgcgaaactctacgccagagcagcaaacatgttcaaaatggccaaaaactggagtgctgctggaaacgcgttctgccaggctgcacagctgcacctgcagctccagagcaagcacgacgcagccacctgctttgtggacgctggcaacgcattcaagaatgccgacccccaagaggccattaactgtttgatgcgagcaatcgagatctacacagacatgggccngattcacgattgcggccaagcaccanatcntccanttgctgagatctatgagacangagttggtggacatcgagaaggccattgcccactacgagcagtctgcagactactacaaaggcgaggagtccaacagctcagccaacaagtgtctgctgaaggtggctggttacgctgcgctgctggagcagtatcagaaggccattgacatctacgaacaggtggggaccaatgccatggacagccccctcctcaagtacagcgccaaagactacttcttcaaggcggcctctgccacttctgcatcgacatgctcaacgccaagctggctgtccaaaagtatgaggagctgttcccagctttctctgattcccgggaatgcaagttgatgaaaaaattgctagaggcccacgacgagcagaatgtggacagctacaccgagtcggtgaaggaatacgactccatctcccggcttggaccagtggctcaccaacattgtttgttggcataaaaaaccatcagccaattaagagacggtaaaccaacaccccca

SEQ ID NO: 677002 - DNA, 105 bp, Homo sapiens
  misc_feature (76)..(76): n is a, c, g, or t
atccctaagacggtaccaacatttctcaccactcctcactgctttctagttttacctccatgaacatactaggcangcagtgtaacctatggtctatattctacc

SEQ ID NO: 677003 - DNA, 812 bp, Homo sapiens
  misc_feature (262)..(262): n is a, c, g, or t
  misc_feature (288)..(288): n is a, c, g, or t
  misc_feature (292)..(292): n is a, c, g, or t
  misc_feature (297)..(297): n is a, c, g, or t
  misc_feature (318)..(318): n is a, c, g, or t
cgacgtcaacgcagccgggcgagttttaccgatctgtgttccgcggcccggccgcggctgagtcttcccagggtcagggtcaggcgctttgctgagtccctttgtggccgccatggacaattccgggaaggaagcggaggcgatggcgctgttggccgaggcggagcgcaaagtgaagaactcgcagtccttcttctctggcctctttggaggccattaactgtttgatgcgagcaatcgagatctacacagacatgggccngattcacgattgcggccaagcaccanatcntccanttgctgagatctatgagacangagttggtggacatcgagaaggccattgcccactacgagcagtctgcagactactacaaaggcgaggagtccaacagctcagccaacaagtgtctgctgaaggtggctggttacgctgcgctgctggagcagtatcagaaggccattgacatctacgaacaggtggggaccaatgccatggacagccccctcctcaagtacagcgccaaagactacttcttcaaggcggcctctgccacttctgcatcgacatgctcaacgccaagctggctgtccaaaagtatgaggagctgttcccagctttctctgattcccgggaatgcaagttgatgaaaaaattgctagaggcccacgacgagcagaatgtggacagctacaccgagtcggtgaaggaatacgactccatctcccggcttggaccagtggctcaccaacattgtttgttggcataaaaaaccatcagccaattaagagacggtaaaccaacaccccca

SEQ ID NO: 677004 - DNA, 152 bp, Homo sapiens
  misc_feature (140)..(140): n is a, c, g, or t
cactgaaggagatgaaaccagttgaacctgaatttgaactggaacgtcctggcatcttgaaattagtacctggtagtccaagctgtctccgtctggtggcaccccaattcccctgccctagaccacctcctttcctcagncaccttcggctg

SEQ ID NO: 677005 - DNA, 168 bp, Homo sapiens
cgcttcgcgcctgtgcagcgccgacaggtcgcagtcgcccagcgttgattgtgccgctgtcgaacggcaagaggacgagcgacgattctgcagctatggtggtcttgccgcagccgttggggcccagcaggtcagacgaattcgtgttcgccgatagacaggtcgatg

SEQ ID NO: 677006 - DNA, 417 bp, Homo sapiens
gggggccccctttaaaccagtttggccaaaaaaaccgggtggggccgggccgggatttccggggttttgtcgacccccggggccggttttctgttttttaccccgggggtttttttcccttggtttcccgccagggtttttcttaaggggtccccttcccaggcccttgggggggattggaggaaaaaaggttgggtttttttttaaaaattggttttaaaggccggttgcccccctgtgtgggccccaaggggggcttttcccttccccggtttttggccccttcctggggggggccattcggggctttgggccccttttttttccctggggggttttcccttggttcctccttttcccgggtggccttatggtttggtttggggggaaatctttgggaaaaattttttttttaaa

SEQ ID NO: 677007 - DNA, 534 bp, Homo sapiens
atgtcacaaaagctgtatggtggacttggcctaagtgtcaaatgacgcagatgtctattttctaaggacctccgaggcaacagagatttacatgagcccagaggtcatcctgtgcaggggccattcaaccaaagcagacatctacagcctgggggccacgcgtcatccaccatgcatgacgggcaaccccaccctggggtgaagcgctaccactcgctcatttctatccctccgtacctgtacataaatccacaatgcaagcacctcccactggaaggacattgcagcatgactgcagtccacgggatgagacgagcttgatagaagcttccctggagagaaaccccaatcagcgaccaagagccgcagacctacaaaaacatgaggccctgaacccgcccagagaggctcagaccacggctgacacagagtctggactctgccctcttggagcgcaagaagactgctgagtaaaaaggagctgaaccttctgagaacattgctgattcttcgtgcacaggaagcaaccgcgga

SEQ ID NO: 677008 - DNA, 738 bp, Homo sapiens
tataaaattattagtataaaaggggaaataggtaggagtagcggggtaagggcgatgagtgtggggaggaagggggggggtttggtatgttcaaactgtcatttatattttatacgtggttaaatatgaggagtagtgtgattggaggtggagtaaattaggctgtaggtaggaatgtagaggttaaggagggtgatgggtgggctatgatgggtggggatgatgaggctatggttttttggtggaattcttcgataatgggcccatttggggcaaaaagccggtaagcgggggcaggccctcctagggagaggagggctggagtggaattaagggtgtatagctcagtgttagctggttctcagggtgcgaaaatagtagatagggtcggtggtgctggagttaaagttgagtagtaggaatgcggatagtagttaggataatattaaactcagttaaacttaaaaagggtctcatgtccagggtggtacggtaaaacggctataatacatcctagtgggggtcactggaggagtatgctaagaatttccgcgataagcggggtctgggtttaatcccacctcaagtgcctgctatgagggatcacaatttgacagagtgacggacaagggtcacgtcacagcgacggcggcaattggaaatagaggcaacggggccaaaaggcagggacaaaaaggccggtgcaagcggcctggaaccttggcccaatgaagggcc

SEQ ID NO: 677009 - DNA, 1118 bp, Homo sapiens
cgttgtttcctgcctggttgattgcggtctttcgcgattcctgcatagctgttggccttggtggcaggcttctccccgtgtccgctgctggtctgcccagtgcgtttgttggtgggtcttatccccggctgttgggccactgggctggtgcgcttttcgtcgacattgtcactctggcagattgcctcagctccgttgactgtcttttacggtatggggtcggctgtctatatgtgccaacttgctacgttcttctgtgtgtcttttccgaacccctcggagtcgtcggatttgtgcgtcactgtcgtccttgtgataccttctgctccatttgttcatggttgtcgtctggtgccccgtaatgtgcgctgttgacatggtgacgggagtggtcctctttgccagttcgtgctttcctgcttcctatctgttacgttctttccaaactttagtgattcttgtacgtactccactgccttgcagcacttgtcgacttgtacttggaggtatacgaccggctccgtcccatgtgtgggctccacggagaatgaaggcctcgaggtatcttgggctagtctcatctgcgtccactgtgtgagaactgtccgtagaatgtcttcttccgtgttggcagcatctgagcccttgaggccaatgtgctgcgctgatgctggagtaatactcgggtgctcgaccgcattgggggattgttgtccgcatcaactagtgatgaacacgcaacctctacctgtacgggccagcaagaagaagcccacatgtttgcccatgagggctgaggagactgttcagagactgcctcagccctagggcagtgtgcccaccctcattcctccagagcttgaccactggacatttagcactgacttcatccagaccgaaagagatgcctcttggtggcagtattcgccacagaggggtagctgggatcagtgctagtcacttcactgcccccaggccaccgtgctcaaagactggaccgccccactactcctcaggggactgtccagggcgccaagtggtagtgagggagagtgtcatcctggttctatttgctcagcctgctgggccctataacgtcttgagtatgctaattgatt

SEQ ID NO: 677010 - DNA, 203 bp, Homo sapiens
cctattcctacactgtacgaagcgacactccacctgtaacgcgcgtaccgcacatctcggtcagattcaaggcatttctatacagcttgctacttgcagtcctccgtgctgaagaggaccgaacgatgcgggctgaggattgacaaacatggatgcgatcgtggtagccgaagctggtctagaggatcacgctcaaaatgacg

SEQ ID NO: 677011 - DNA, 799 bp, Homo sapiens
  misc_feature (265)..(265): n is a, c, g, or t
  misc_feature (516)..(516): n is a, c, g, or t
cagtctacaaaggacagggcttctcactgtccgtctgtagcctgttgaggaatctggctagtctggttagctatgggctccatgaattcctcacgtgagctctcagggacctagtggcctatctcgtggcctagatgacagcctgtgcgcggtagccaagtccttttgatgcactggcctccgttaagggcctgccaggaggcaggagctgccgcccgcttgtgagcgagggcgccatgcccttggtgccctgggcacgtcctcnagggccctcttggctcgagctccgtgctccttgtagtagcagccgcgagaggaagtctttgtggaacacgtttaataaccacagtgggcggttccccgagcaattcttgcgtcatggcccaccttcttgtagtaagccggctgtgcagctgggagctgagctcatggaggccacacaggtccggggatcacccagtctctctgcagagtgggacttcaggatgactctggattcttagggggacagcaagnccataagaaacatcttctccttgcatttacaatcccaagctctctacagaacctttgtatgacctggaagtggccttgggaagcaaaagtatttgatgtaagaaagtggacctcactcagcgagtgggcgtattccttctgaggaatgggttcgccctgttgaactctgagcatgcattcccttcctcattagggctccatgccagggcaggaagaagaagggccagatcaggggcaggccaggccaagggaaactgagaccagagcctgtgccccgcaggtg

SEQ ID NO: 677012 - DNA, 1330 bp, Homo sapiens
gagccgtagtggagatggcaatgaagtctctgaatactcttttatcttatttagaagaatgcagagtagatgggaccttgcttggttgtgcttgcgatggtagactatctcaaggtgatgaggagactatgaacgccacgtacgttccagagtgctctcatttcgtatgtacccaggatgacgtgaatgcttaagtagaaggctaggcagagtcatatcaaggtcagcaggccaggttctgggtaacaaagctgaagaagttggacagggacgaagtggagaggggttctgtcttacaacccagctcctgtatccttctatggtgatggtactgtacgtagtagtcttataacaagctacgttccattgtttgcgtcaattctgcccttgtaattagccctaatgggcaaattagaaggtgcaagcttacgatagattgacttgtgccccgaggttgtcaatggtttgttgtatgagtctcgggtggcaattaggaagtatctttggataatgtcatgtgtcggctttcgaaaggagttcgaggtgtcttttgagtcgcccaattatttagagtgcgtgtgagctttactctaacaggaaagtactctcgttctttgagcttttggtcccttttcagtgaatcctgatattagcgaaggacgttcctttttgtcgcagttttttgagtaagagaacccatttgcaagctaacgttcaggggtttgaaagattacattccatttgggcgagtttataatagaaggaatcgtttcctggcgatagataagggcgccccagaaagaaaggggttcgctgtgtgtcgagggattgcccattcgtataccaagagggaacgcgttagacgaacacactttttaggcccttttgattggccctttttggaacactctaatacggggttgccgaggaaaggtaagaaattaccacttcaggggtcgggttgccacttaaattcccggagaagaacacacgaataagggaagaatatttttgaagagcaacacgtgtgtgttcccttttccccatttgtcttgaaccagttttatatttgtacgtttcgttaatcaggttttttaaaagcaaaaatcccacacagcatggtggggttaagttggtcttgataagggcgaagaattttaatttaaggtgaattgtaatccgaagttgtaaattcgccaagatccaggagttgattttaacgggagaggttttgagaaaaaccaaaaggggtgaagagtgggagggggccccacattgagggcgcaaaaaaagggaaaaaggtgtcaaagtcacaggcaaagaaagttag

SEQ ID NO: 677013 - DNA, 407 bp, Homo sapiens
gtgaaagcgtgcttatgggttttcttgtggagattcaccatctactccaaaaatgccacagtgggacagtcagttttgaatattaagtacaaaaatgatttttcccctaacctgagatatcagccacccagtaaaaatcaaaaaatctgggatgctgtttgtacaattggtggcaggttgttaggagagacgatgctattatttgtttcgagaccatcatttagcatcatattgggagagtcacgcagtgtgtgtaatttgtgtagttggactcttgagaattagagtgggctgagttaaattttgatactacttcagaggggagagtgtgcactctgacagacgtctctaggtattcatctgtatatgcaagcgtcacacatacgacgagatgggcgctgatacac

SEQ ID NO: 677014 - DNA, 963 bp, Homo sapiens
atttactcggcgtcgaagtacagtattgtgggtcagttgtttcggcagtgtgatacacacagtgggaaagtggttactcaaacccgtttcaccgcgatgtttgattgttgcccccgccgttgggtaaaaggttttatggggttcaaccggatagtggaccactgttgtgacagtggaagtgatgtctaccgccctttttcatagggtgttaccatgagccgcattttggggtacacagcccctcggcgcccgatgtggcgccgccgtcgtgtaatttaggcggcgcaaaagagggcccacctgttttgaggaaaggacaatgtgtcaaccagtggggggatataaaaaagtgggccccacggggcactggtttctaacaaggcggtcccaatggcgccgaaagtgtgtgagacaaggggattacgatcaaagccgagattgttgaactactcacaggggggacgggaaagtgttccatgagaaacgtcacgtcggcgagtgaataaggccgcccttcctccagtggagcgtgcagtattgaagaatcagcggggttgggcgccccacagcaaaaggagaaaacactcgggtggaagatcacaaagaaccccgaaaaagggggagcgacgtatgagctaaacccgccccaaaaaggaggttttctctctgaaaaaaaaggccacttttgaaagatgtagtctcaaaattattgctctgcaaacgagtcccccccaggaaatgttattattatttcaccgtagggcccagtagttaatacaacgcaagatcacctccgcgcttgaagggaaaacaccccgcgatgcctcgggtccctggttgaacggttgatttttaacctcttttgggcctgcgggagaaacaggcggtcttatacatacggacaatgcagtgtcctcgacgctcgccttaaccaaaaccaaatttgtaacaccccacaagaca

SEQ ID NO: 677015 - DNA, 307 bp, Homo sapiens
agcggtgggtgaggggcgagcgggccgaggccccgcccccgatcctctgccccgccgcgacgcgattatagccgatgactcagggcggagcatcacgcatacaaacccgtggaccgcggccaacttctctggactgaagccagaagtttctagccggccaggtatgcgtacctcctctttatctccgtccttcccctctggcatccgaggaggctatgtccaggacatttctcacgctcgcgtactcaatggaccaacggtacccacctgacctttaattcatcaaggtgtcgccggtcgtccaggc

SEQ ID NO: 677016 - DNA, 223 bp, Homo sapiens
aagctccacctattacccgcttaagcttgtggactggggccatttgggtgaggggcttgtaacacaccgattcattgtctgatctttcaccactaaatagcagacaggtgaagagctttttagagaagtggaaggttggtacccttggaatttgcctggttactgattttctttggtagtctttaagtggaggttcattcagttcaaccaatagtccgcagca

SEQ ID NO: 677017 - DNA, 383 bp, Homo sapiens
  misc_feature (4)..(4): n is a, c, g, or t
  misc_feature (20)..(20): n is a, c, g, or t
  misc_feature (36)..(36): n is a, c, g, or t
  misc_feature (63)..(63): n is a, c, g, or t
  misc_feature (130)..(130): n is a, c, g, or t
  misc_feature (136)..(136): n is a, c, g, or t
  misc_feature (200)..(200): n is a, c, g, or t
  misc_feature (266)..(266): n is a, c, g, or t
  misc_feature (336)..(336): n is a, c, g, or t
  misc_feature (374)..(374): n is a, c, g, or t
aggncagtgagctggttcantagacgggcagcgggnttttgggactatatcggctggctgcanaaagtcccaacaactgtgtgagcagcatcgagaacatggagaacatcagcacagccgggccaaggcnggttgnggatccgggtggcactgatggagaagcgcatgtcagaatacatcaccacggctctgcgtgacanccggaccaccagacggttctatgactctggagccatcatgctgcgggatgaagccaccatcctcancggaatgcttgatcggactgagcgccatcgactttcagcttctgtctaaagggggaagtcctgggacggngaagacccccgtgggtcatcgatttacaaaggccttanctaaagttt

SEQ ID NO: 677018 - DNA, 284 bp, Homo sapiens
accaggcaaactgtgcgggcatagtcaatctcaacaccaaatttcattcagtcaattcaaggaacaagtaatttcaacaccacatcaaattttcagcccatttcatgtttgtcaaaagtggtcaagcaatgcagcacatgtgcaatcatatgtcagtcccgtcaagcacagtttcaacagcccagttttcatctcttcatgtcgccaatccaacatatggcattcaacaccatcatccaacatcgccatcatcatcatcatcatcatcgccatcgccatcatca

SEQ ID NO: 677019 - DNA, 452 bp, Homo sapiens
tgcacctccaaggagatcggggaggatgcctgtagacctgttagacatgtttaacttctcctcaaaaaacatgcctgcctctttgcatgtataactgtcataagagaacatagtgctactttgcaccagaaggcaaccatcactccagaccacctgtgcatttagtaaacaacaattcgcagcccagagcagtgggtttgctgctgctgcaaaaaagaaaagctcaaaacccagtgtggagccttcacaggccacctggctccaaattcaccctcggaattcacaaactggtgtgtctggagctgtttctttaatgggtgtctggtgtcaggcacagagaaagacaaagggacaccagttggcggcttaatcacatcagacccaaacctcagtactgtgtgtccatctagacgccactggggctgaatgaaccacgagctgctgcccctgag

SEQ ID NO: 677020 - DNA, 1124 bp, Homo sapiens
cctcggtgcttcggtgtcggctcctcttcgttctgcggtcggtcacccgttggctgtcctgcgctacatgccattcctcggtcccggccgcccgcctgtcttggtcgtctggtggtgtgcgtccctccttctcgtggcgtgactcacggcgcgggtcctcggtggttgtccaggcggctaccggattttccgcgtgtcgccggcgccttcacgtcgcctcttcgtccgcgcggtcgcgtcccctgatggcccttgtctccttcttgtgtcctatcgttgctcgtcgctgtgtgtcgtcttccccgtcgtcctgcctgtgcgtctgcaccgctgtcctgctcggtctgtcctcttgtccgggagggccctgtgctgggctgtgtcctcctaccattcgcagggttttcaagcaccgtcgtttgccgaccggctctcttcgcttcatctgtctccctttgtcttccttctaccaccctcgtcctggtcctctttcccacccagatcctctactccacatatctaccgagtcctgtccgcttccaggggccccttcgttcggctactacttctttcagacgggcttctgatgtctgcctgcagcctgctgcacgtgtttctgggtccttgcctcacttcctgcgcatgctctatagcttcactgaacgaagggccagatggacgaacggacattcgtatgtgatgtacgaatgaatcacgatctccagtcgacggacgtcgtctggcggcccaggaagcctctgcctagtttaatgtatcggggcagcttgagggcccaggccagcccccactgatggccctcggagcctgggtggccgggcgtctgaccaacaggcacatcaacagccacatagccggggcggggatggctgtaacgtggttgccctccccgccagtgcccttggatatttctggggtgactggactggcgcgcactagggccacctttctggagacagggagggccccacccggggtgggtgctgaaggctgatgatctgtctccagccccttccattctgcccacccacccttcttccctctgggcaactggacagatctgggagccagcagctggatgctgtggctggccagagaatacgccc

SEQ ID NO: 677021 - DNA, 128 bp, Homo sapiens
gaatgctagcaaaaggaaacagagtagtgtaactaaagtgtgctagggcaaggtcatatagacacagataatcaaagaaatcttcacaagcaggtcagtgaaaaacaaaaaagtagaaataacgctta

SEQ ID NO: 677022 - DNA, 133 bp, Homo sapiens
gggttaaaaaacatgtggggggggggcccccccccccgggggggggggttttttcccttttttcccggggggggggtttttttggggggggggcccggggggggcctttttttttaaaaaaaaaggcccttta

SEQ ID NO: 677023 - DNA, 141 bp, Homo sapiens
tgtgtacgtgcctggactcgagcagagatggcacggtgcttcagctctcctggagaagagtacgagctgctgacggcaggtcatcaccatggcatgagcggtccgctgccctgaggcactcttccagccttccttcctggg

SEQ ID NO: 677024 - DNA, 94 bp, Homo sapiens
aagacactatccagactcacaaaagatgtttcacccaatcagaaacagtgacccctaccctagtgagggcacacttccacccagggcccttaat

SEQ ID NO: 677025 - DNA, 950 bp, Homo sapiens
ggatggcatggtgccgcggtcctgtcttgctgtgcctgcgtgctaagggctcggaaccaattcattcctgcacggctggggcaggagccccttcgagggagctcggtcactgtgttgcaggtcctcgcctaagacctgcgagatggagaaagagagcacgaggaccggcacgaagaggaaagccccaggagcagagtcttgcccatctctccctctgagcatctcggacattgggactggatgtctttcgtcacgtggataaacgctcatggaactgcgctgacgctgcgggaagagtcatcacctcggagagctcgtaggactcgagcggagaccaggtccggtgcgtgtcccacacactcagggatccgaggatccttcgatgctctcgctaggcccagtccgctaccgaggtcgaagagcgtcacgtctccccttcttgttcaatcttccagagagagaccctttcaggctggggagctgattaatagctgagcactgtgggagggagaaactagaaatttcagagcaaaaattactctactgttgaacaactgccggactcttcaagagtagtaactggcggagggcacgctcccgcttcgggagagcattcgctgggtgaaagtatccaccgagagccagcatactgaggtgagttcctctggtgatccagcgagtacatggctgatcgccagggccagcccttgggaatagaactaatgctaggtgttgatagaaacggacggtgatctgcacaataagcacttccgcaaatggattactagatacttgattcatctcaactggatggatagtcaagaccgaggttgattggctggcaaagggaagactggctccgggctctggttggagttgagcccactttgaatccgaaagcaggttggcctctctgagacgagccgagagtcagagggctgaatggagcc

SEQ ID NO: 677026 - DNA, 1514 bp, Homo sapiens
ggaaaggtcggtggcgccggtactgtcgctgggtggctgagaagccaggacggcccgagaactgacagtacggagtgacgagacggagtgacctagtggctcgatcatggctataaacccatccagccccgctcaagaacctgattggtccgtgtgttctttgtgacggcgatgtagcctggatgttcgatctggatcacccttctggtacgactggttcagagggtccggactgctagaacgacagtcgatcgaagctttgcctggcacatatctccctatgagttagatcgtgtggaaccgtttaagcacatgatttcccgtggaaagtgacttcttgttgttagacagcaggagcagatcaacgcggagccatcatattccggggggcaatggactgatcccttgatctgatcgagggatccactcacacgattgtgtgtgtcccgatggtgcttctccttatggtggggcttactggggtcttctgggagggcaacacggagcaaaccgttagcgagatctacgtagagaaccatcactccacggaacaggtactggctttggcttcccaaggcctaattcccgcccgaggcgtttctactatgggatagccgttgggcgcattgctattcattcatggggccgctcatttgccaagccgatcaaggcgcaaacgttcgattgcacgcttacccctttggcgacatggactacgggtggcagtcccaccatgggtcgaggcttcaattttaacccaggtaattttcccaacgggccctttccattttccacggtggaaaggacaacacagagacacaataggttaagccgagcattgggcgttaacaccattttggtcgcaacattttgtttggcccaacagcgtacagatgcctttgataaacccacagcgaggacaggggttctctggggggggacactttccccggaacagagggcacaacttccgtttacaccgcagcatagggggaggaacccgttggtatggccatatgacagccacccgtttttaaggtttgcaccgcacagaaaattgggttcgccgcgaagggcactaacgggtggtggaacacagttgggtttacgtctatacacagtttggcacaccactttaacgtttgaaactacgatggcggccctttggaacacgacacagaattacagttccgattgtcgacaacgacttatccccagggcagaagggggtggccaacaacacaagcaaagcgtgcgagacttccaagcggattgtgacaaaaggacatatcccaagcgagtgtgcgcactcgccgcagttctccagagtgatgacgtacgcagtttctcgtgcggcatcagcaggtcgcactctgtgtgctgagtcgttggtcacatacattagtggccgacacgcgacggacaacattgcattgattcatgaaacacagctctggtgttcgggtcgcttcggtcttgatgcagccgaaaagtctgatcctacgcagccacag

SEQ ID NO: 677027 - DNA, 329 bp, Homo sapiens
gctgggtgatctagaggaccttcgggtgcatcatgtgacacattcccacatgtgtacgtatccactcatacacctgggcacacacacacacacactgtgcatacaccccatgcacacaccccacacaacccatccactcatatacctggtcacacatgcccccacccacacacccatgcacacatacccacacacacccatccacacatacccctgggcacacatacacacacacatatgcacacatcccactcacacattctatccgtgcacccatccacacgctcatacccctgcgcgcacacacacacgtgcacacaccccatgca

SEQ ID NO: 677028 - DNA, 217 bp, Homo sapiens
gttttggaaaaaaaaaaacgatgaaaaatgggccccccccccccaaaacattttttttttcctaggggtactgccctcccaagttgggctgtttttttttatgggtaatgtttgccccacccatggatggtggggggtcatttttgttgttttttatccagcttttacaggtttttttgggcagtgagttggtttgaaacaagctactttgtttcca

SEQ ID NO: 677029 - DNA, 864 bp, Homo sapiens
  misc_feature (213)..(213): n is a, c, g, or t
gaaggaaacaaaggaagtgttgggacgacagcgagcgggaaagcggggtcaagaaatggaagataaagtgactagtcccagagaaagcagaagaagcaaaattaaaagcaagatatcctcatctgggacaaaagcctggaggttcagattctctttaaggaaacggtgtgcagaaagggcaccaaatattctgattctggggattacaacatngctaaagcaaaaatgaagaaacaaagcaatttcctactgcagctccggataagacggaggccactgttgaccacattcccactccgaaagaccttcctcaaggaaagccgtccctgtgtgtggtagcaaagctgtgtgggtgataaagaggctgaacgtgatgaatctgtaaaatctcattatttctccttaaatatgtaattatctacttttaatttcctttcattcactagtcatttgagactgacagttgtggaggtagcagtagtgtgtgctgtatggtggaatatacgtgtgtagagttggatttagttaaccatgtgcacgtggttgaacgaggaaccgtgttagagcaaataagtaaaactactgtgacaataagtgtgtatattataactaaattctagtgtaagtacgttgttctaacaagttaacaagcaaagttttaaaatttacgtgtgtgggttacattacttcatcttaaattatagtgtgtatgtactctttattaatataaccctaggggatgggagctcggaattaccttgtggttgtgtaaaactacgttagcccacagttagaaaagggcactttttcaccacataatggggtcgagaattgagttttgggagagaaggaacaagtgtaatt

SEQ ID NO: 677030 - DNA, 513 bp, Homo sapiens
tcgggggccttaaccctcacagaatcacatctggatcctcaagactaaccaaccagagcctacagtgctcacacaagatcacatctggatcctgattgactaaccaaccagagcttacactgctcacagaatcacatctggatcctcaagactaaccaaccagagcctacgctgctccaagaatcacatctggatcctcaagactaaccaaccagagcctacactgctcacacaggatcacatctgatgtcctcaaggcctactgttagccaggctgcgacgtggacactgtagcaaccagactggaggattctacagggaacagagtcctcactccacgaatgatcagtgcagcatcataaagattcaaaatacgtctacagaagccccagaaagacatgtctcaagttagtccacaaggttttagaacacagggaagcgactgctatcttccatacattcacaacacttcaagtgtcaatcaccagggttacgggctcccggggggtaccg

SEQ ID NO: 677031 - DNA, 116 bp, Homo sapiens
gcacatgaagccaacagcatgatgatgataagtatgtgtggaggctgaatctgaaggtttagttcagaagcaggccttgaagttgatagccagcatgaataacagtcggtgcatgt

SEQ ID NO: 677032 - DNA, 125 bp, Homo sapiens
tatccgcttagtggggatgagctgttcttgaagtgaactgtgttgtatggaaacttttgcaactaacaaaccttgtgcattgggatcaccgatctgcagaatcctgacagagctgatggggccct

SEQ ID NO: 677033 - DNA, 504 bp, Homo sapiens
  misc_feature (116)..(116): n is a, c, g, or t
  misc_feature (135)..(135): n is a, c, g, or t
  misc_feature (348)..(348): n is a, c, g, or t
ttgttactgggtatatggttaaaaaaaaaataaatttttttaccaaaaaaacccctgcactcagatgttttctgcaccagatttcgcaataacaaaggcatggatttaaaccaggnacatatgaatcttagattnatgtttcacgttcatttgcttagattaaaggcctgctgtagccacgttgctgcaaagaacattactttttcttttctatggctccatagtattgcatgtgtataagtatctcaaataccacatgttcttatttataagtgggtgctaaaccttgggtgaacctggaaacaaaaataaaaacaataaacactgggaattctaaaaaagaaaaanaaaggagataagctttgaaaaaactacttatcaggtatgatgtactctacttgggcaacgagattattaaatacccaaacctcaaaatcatgcagtatacctatgttacaaatatgtatgtgtaccccttgaatctaaaataaaagtaataaaaca

SEQ ID NO: 677034 - DNA, 956 bp, Homo sapiens
  misc_feature (1)..(1): n is a, c, g, or t
  misc_feature (71)..(71): n is a, c, g, or t
  misc_feature (74)..(74): n is a, c, g, or t
  misc_feature (175)..(175): n is a, c, g, or t
  misc_feature (209)..(209): n is a, c, g, or t
  misc_feature (212)..(212): n is a, c, g, or t
  misc_feature (246)..(246): n is a, c, g, or t
  misc_feature (249)..(249): n is a, c, g, or t
  misc_feature (271)..(271): n is a, c, g, or t
  misc_feature (273)..(273): n is a, c, g, or t
  misc_feature (278)..(278): n is a, c, g, or t
  misc_feature (286)..(286): n is a, c, g, or t
  misc_feature (292)..(292): n is a, c, g, or t
  misc_feature (295)..(295): n is a, c, g, or t
  misc_feature (305)..(305): n is a, c, g, or t
  misc_feature (318)..(318): n is a, c, g, or t
  misc_feature (323)..(323): n is a, c, g, or t
  misc_feature (349)..(349): n is a, c, g, or t
  misc_feature (354)..(354): n is a, c, g, or t
  misc_feature (360)..(360): n is a, c, g, or t
  misc_feature (382)..(382): n is a, c, g, or t
  misc_feature (396)..(396): n is a, c, g, or t
  misc_feature (403)..(403): n is a, c, g, or t
  misc_feature (406)..(406): n is a, c, g, or t
  misc_feature (409)..(409): n is a, c, g, or t
  misc_feature (419)..(419): n is a, c, g, or t
  misc_feature (430)..(432): n is a, c, g, or t
  misc_feature (435)..(436): n is a, c, g, or t
  misc_feature (441)..(441): n is a, c, g, or t
  misc_feature (454)..(456): n is a, c, g, or t
  misc_feature (463)..(463): n is a, c, g, or t
  misc_feature (466)..(467): n is a, c, g, or t
  misc_feature (470)..(470): n is a, c, g, or t
  misc_feature (473)..(474): n is a, c, g, or t
  misc_feature (477)..(480): n is a, c, g, or t
  misc_feature (483)..(483): n is a, c, g, or t
  misc_feature (488)..(488): n is a, c, g, or t
  misc_feature (497)..(498): n is a, c, g, or t
  misc_feature (507)..(508): n is a, c, g, or t
  misc_feature (529)..(529): n is a, c, g, or t
  misc_feature (545)..(545): n is a, c, g, or t
  misc_feature (550)..(550): n is a, c, g, or t
  misc_feature (564)..(565): n is a, c, g, or t
  misc_feature (574)..(574): n is a, c, g, or t
  misc_feature (577)..(577): n is a, c, g, or t
  misc_feature (873)..(873): n is a, c, g, or t
  misc_feature (885)..(885): n is a, c, g, or t
  misc_feature (953)..(953): n is a, c, g, or t
ncaggcggggtggggggctggcactcaggcggggactaggcaggggaagggctgcccccaggcatgttganganaaactgaggccagccctggcggagacctagcccagcggggtaaggagggtgggggaaaactgggtctgaaggaatgagggccccctccctatgggatttcnaaaaaaagggcctcagtccctcctgctggctggnctncacgacccccaatccttgctcccctaacccgganganggggccagaccagggagggcantngacanggagcctngggganttngggagcgcanggcagggtccatngtgtncagagggggtggcagccacctaggtngtcanttcctngcagcgatgaccacagagagtnccacaccccccaangcaacancantcnccccaaacanccacttccatnnnatnnaccangcaccctttccannncacttancanncanccnnctnnnnttncccancattttccnntacaattcnntctcctttctcctcttctccncattcttcttcaccanctttnagagctctgcgttnnatcgtcttnttngaaggttccagcttcagggctgccctcaggatggggatggcctcactgtactccccctgctgggccagcaccttgcccttgcggaagagagccttgatgttgtctggctggtgctccagcacaaggctgcaggagcgcagggctgcgcggtagtggtcgagcttcagctgcgaggccgccaggttgttcagacacttcaccttcaattgcaggagctgtgcctcctcctcgaacgtcatgtccactttggcgctggaggtgatagccttgatggcgaggtcgtaggagttggcggncaggacgaatangcccgctggtagtgggcgttgcgcactcccgcttccggttggcagggcacgcgctcctgcccgtgagntct

SEQ ID NO: 677035 - DNA, 195 bp, Homo sapiens
tggagagggagtttggcttttctgggcccagaacgggaggggagggggggtgatctgggctcagggcaacctccgccttcgggttccaagcgattctctagtctcagcctcccgagtagcggggattacgggtgcccgccatatatgcccagcataattttgggtgttttggcgagcgatagggggatcctcata

SEQ ID NO: 677036 - DNA, 209 bp, Homo sapiens
tcaggcgtaactgtgccaggcttgtgtgcactgcgtgatcgggtatacctccacctcccgggtcgagagatctccatgcctcagctcccaagtagcgggaatacatgtgcatgccacaagcccagttaattttgtatttggagtagagacagggtttcaccatgttggtgaggctgatctcgaactcctgacctcaggtgatctaccca

SEQ ID NO: 677037 - DNA, 1060 bp, Homo sapiens
  misc_feature (501)..(501): n is a, c, g, or t
cgctggttcttctctgaagtgcctcgtgtggctctttatcgaccacctggttgaatggaagtgtgagatccagatatggatggaaggccttctccttattgtgctctgtgcaaaactggggggaagcgtggagcctatgctacagtgggtgactcagagcgtctgagagcaaggtgacctaagcctggaagtcacagtaggcaatcatgatctagcttgagtaattctatggttgtcaaaagcgtgtcagcgaatgccgtatctagagaatgaccatagtggactagttctgttacgagaatagtatggagaatagacgaagtccgtacaaatctcgtggtcggagaattacgaaaacgatcagagccaagaaatcgctgacgggaaaagacacaaagtttgcgaggggtatctagcgattgagccacggcctcgaagacatataccatgagaacgcgtagtgacgtaacgcaagagacgagccatgttactggaataaancagcaaagcacagtagcagccaatggaaccacgaagtcgatgaatcccacgatacattaatcctacgatatctggcacgtcgcaacgtgattgtttgaccaaggtgccgagaacaatcatcggggaacaggacacggcctcttcagttaaagtgatgctgggaaaactggatagtcatactcagaaagagtaagacctagacccccgagctcttgccctatacaaccagttaaccgaaaatgcatctaaacctaactgttcagacgaaaatgactataaacactactaaaagaacaacataaggggaccctgcttcagcaccatcgggtcgcacgaccggattccagtgaactacgaagcttcaagaggcaccgtaacagccaagaagacaagcaataacaccagaatggggaagtactcatgaaagtcagcacggttcccctggtagccccaggaacaccaaaccggaccagagtgcaatagacataacgtacagacagggccgacacacaagtgcgccacctgactcaatccaatggcgggatccccgacccagaag

SEQ ID NO: 677038 - DNA, 932 bp, Homo sapiens
cgtggtggtagccgttgggttgggaaagttgagggattttgtgggcctcgttctcctgcttcttttctcctcccttttactttgccggtagaacacagttatgggtcgcaagatgaagaagcagctgaagccgtgggtgcttggtattgtaatagagattttgatgatgagaagatccttattcagcaccaaaaaagcaacagcatttctaaatgccatatattgtcaccaagaaatcgtatacaggacctgggcttaaggctattcattgcattgcaggtacataaatgaaaccaatagattgccgtaccaagatgcattacccttggaagaacagacatacgagtttggaacatactagtggtcatggccggtattccagaaaaagagacattggttggaaagacgacgacttcttgaacaagaaaaacaccaaggaaaggttctaaaaacagaagcaacaaagatgattctgagtgaactatgatgatggacagactctgcagactacaaattacatatacagccacagccttgttcaaaccctcaggcaaggttatattcctccaatggcaaaagccagggactgcaatcaggtaaccagggaggcaccagtgaattgcctccagggattccctcccaattaaatgcccaggggtggtccgttccgttcttacttcccagggaaatgccaccaatgtaattgccaggcaatgccaccctgggattgcatgtaatccgaggagaagatcccccaagtcttttgtgtggggacaaccttagtttgtccacgtggctggaatgtttccccctgtgccacggaaattcaccctatgtagccgcggaattcgaccgtgttagccccccctgtgtactcggcgtggagctcaagatacgcaacggtgtacccgggtgtttaataacacgtctag

SEQ ID NO: 677039 - DNA, 343 bp, Homo sapiens
ggctcactcaaatgacaatctacgcgactctcaacaagagccagctagaagtgaagtctcggaagggcccgtagagccctctaattgggacctgaatgtccagagtatggagactcaaatcgacaaagcccaagcttttactcagcctgtaccccttgcgaataagcctgtacctgctccatctacttttccttcaaaaacaggtgggatggagggaggaacagcagtagcaacatcatcattaacagcagataatgattttaaccctgtgggtattggtctaccccattcagaaaacaaccaagataaaggcctgcctcggccagataatagagataataga

SEQ ID NO: 677040 - DNA, 332 bp, Homo sapiens
agtacctcacaggaacagagtcacatgttattacactccgcaggtgaggaacctgtcatcattcatagattatgtcttgtgcaacaagatacattagtttgtaggacactggggactacaacacaacatacaaagtaagaataaatccatgctgtttaaccttccaccattctcttgcagtattaaacccaggccacctttggccacctgtcaggggtgtcttttcttctttattctcaatgtacatacgttgctccttgggacaccagcagtttcgcttcttccactctctcttcatcacaggctaagtgtagaggagtgttaccctcagt

SEQ ID NO: 677041 - DNA, 517 bp, Homo sapiens
  misc_feature (349)..(349): n is a, c, g, or t
  misc_feature (514)..(515): n is a, c, g, or t
tgataatgtctgaagcttaatgtccagtgattggcctttgcttcttaatttattttaattttttacttgtgccacttaatatcaggcattttaataaaatattgttacaaaaaatgtacagtactgacaccaccacaaatcatggttaataaaagagagtagttttaactttatttttatttgtttagagattttaagttggaacagtattttcccattgactacttttcattcttcactgtagttttaaagaagaactagtaaatgacggtgcgtatacaagtcaaaaaaatacaatgcctgcctcgtaagtgaaagttgtagctctccgtaagtaatgtatattttnactcaggttttcatacattttgtagaatagttgacatacctgaaagttcctttgttagattgtgcatattaatcattcgtgttggtattctagagtggttccgttgaaaagttttatggtataaaatatgtaacaataaaaaattaaaactcttgtttcaaaaannaa

SEQ ID NO: 677042 - DNA, 218 bp, Homo sapiens
ctagcagggatcccctgatcagagcttgcagtgtcagcttacttctactctggctatctttcagaaatttagctgccttatctatagctcacttgtcgtacagtccaattaggtactagttcatagtgttaataaatagttactctgttaagaatactatatattagaacatactacagtaagatttcctgaggttttagtatgccttatagaatgat

SEQ ID NO: 677043 - DNA, 346 bp, Homo sapiens
tcactgctacgacggctcaacggcttttggaaatctctattcccatatacaaatatttaattcatattttaaaaaaatctcactacccatactatttataggtaaagaaaatccattgaaaataagattattaagatatataattatttaaactacaatgttgagaaatacaataaaaatttatagagatactataacgatcttgaagcaacttacaaataaaattatttttctttgagatgagttatatgacttctccattataggcaaaactggaaaagtgttataatttagaatactaaagttagtgttttggatttagaatactaaagtagtgtttagctaa

SEQ ID NO: 677044 - DNA, 108 bp, Homo sapiens
agctgtgaactcgcctgactgcggacttttctcctaccgactctgtgcggactttacacccgactactggtggggactcctctacgacgtcaccctgacggactgaac

SEQ ID NO: 677045 - DNA, 616 bp, Homo sapiens
caatagcgtagttgcagtgagctacctctgttccggggactgtctatgcatgtcccgtttagagacatggcgcaaaatgcaatcacgtgtctagagtgcgaaagcattgcctaatcagagtggcaatatcattaccagagcattgtcacgagctcatggtagtagatagaaaagttatagattgagggcacttctgcagacttacgcagttggatctgtgtagatatgtatgtgtatatatacatcgaccatgtgcatattcagcctatggtgttcgtcccatttctcagtttccagttcagcattcagcattctcagcgtatgccatgatatctctacgcttacagccaccgtatgacggtttaattactctatgctcattttcaggcatcatctgaatcaccgtatatactcgcaagctcatcctgtttagtcaatgaagcactttctcatgcacatactaccgatgttttgaacatgaatctggcaattgatcaggtcttacgattagtaatttagactttgtcatatcgagcaagtcatctgatattattttagggaatctgttgaataacagccatacagaaatagtatagaagtcataaccatgctggca

SEQ ID NO: 677046 - DNA, 675 bp, Homo sapiens
ggaccgctttccgggaaactggagtcgaatggccgatgaggtattgtttctaagtcagccataatggcaggtgaagactattaatgaatgactatccagtagaaatccacgagtatttgtcagacgttttgagaattccattggtgctgtggatgagagtgctgaagaaccatgatgtctgtttctagaaatgagttgttgctagaagttggatccgagattgtaactaaggaaaagtggatttggtcttctgctgtacagcattatattcaatgtgtggggttctatttggcaacgcaaggagttaatcctaaggatacagtccagtagaacaggaatgggaagagaatcagagtatatatgaatcagagtcaaggaaataagagacaagaaaaaggctggcaagctggacagaggtgcagcttcaagatttgtaaaaaatgcgctctgggagccataattggagaaatgcgatcataaagttgcgaagtagaggtaaacagtaccgggttaagttcccggttgtgatgtacactatattcaaaaagtattttttttccccctggccgtcagcttaaagatgggaggtacctttgcttggttgcaggttgtatggactgtctgatagggaatagtaagtagggtgggttggagggaatggtggggaatatggtg

SEQ ID NO: 677047 - DNA, 150 bp, Homo sapiens
gtacagtacatcggtctgcatgttcgaggcatctatcagacgccaaaggttcttcgaggtacagatggctgcctggtatgacatatcacatgtgagtcaatgtcttaagaagtcttaaagtgcgaatctatattgctctggtcaagctga

SEQ ID NO: 677048 - DNA, 410 bp, Homo sapiens
gacagcaaatacttccgtaaaacagaccatcaagctttccacttagagcccagtgtggccccaatacctttccttgtcgctcctgcgtgccagtccgcctccgcgtggtccggccgctgcgccacgcccccgctcgccccgcccctggatttgctccctcaaagctgaagtgaggccgggctgaggctcttacagtggtccctgctggcccttggtgacgggtcgcctcagttccgacccggacccgtacgcttgcgctgacgtggctcccaaaagtagggctggcgtagggccgccatgttgcagcaggtgaggggctgagggctcgctggtagggtggcggctcctgggactggctctgcaggttccgtgggactggaggccgcgtccgcgcgcgcccgctactcgaa

SEQ ID NO: 677049 - DNA, 139 bp, Homo sapiens
caggtgtgcaagatatctcttgatagagagctgtgcatccacccccactctgtgcttggttgatgaggatagggacctgagcaagcctcttgaggccagctgcagtagcagagtcacattgccatcccagctcccccag

SEQ ID NO: 677050 - DNA, 153 bp, Homo sapiens
catgcaaataccccagctgggggactacgaaatcagcccaaggctcgtggttgagagaaacttcagagccagctggcagagttaactggtggcgtgactccccaggaaggctgaggtggaaggaatccaggaccaaagacatttgttccctgg

SEQ ID NO: 677051 - DNA, 879 bp, Homo sapiens
  misc_feature (4)..(4): n is a, c, g, or t
tccncctcaagaataaatggggatgctcgaccagagtctcgaggcacgcggtctatatcatactgggcctcagtcagttaactagttcttgagtttgttgtcacaaaccggcggatactcttccttcaaaaagttggtgcctgatacctctcttataaaattgggccctttcccgtcttctttgcggccccggcggtcttccacctctgtattttcggtgctttgctccttccttagtggcttggtccatacccttttctcagtcctttccagaccaagtagaaacctgggctgggccccacaaataccacgtgtgttgggggcccccccctgagtccctcccgagttttataaattaccccgggtcaatagccgcgccccccttggtcgcccgctttaagtccccggaggtggcaaacaactcggaaaacccctggtaagtctgccgccaacccccttgggattcccccttaattaaccgcctaggtatacgtgttttggtgagggaacactaatgccccgctggcacatttgtcgacagaatatgtcttgttctccttgttttgttctttaggagaacaatcttcgggatgagtcatggatatgctccgcccctctaatcattgcgattttgttctcaagacacaagaagggtggttcagaatggaccacccgggacaacacaatcattgaatacaagtccctcggcctttctaagtttgctaatcaagcaccccctcctcggcccgacggattgttgcccagcagtaatttcatgttttgctaccagaaaacagaaacatcatcctccgggcgcccagctccctacgaaatctctgacctcccccttcccaaaaaacctaaaacccgaacaaaaca

SEQ ID NO: 677052 - DNA, 397 bp, Homo sapiens
tttttttaacagaaaaaaaacttttttttaaggtccccctttttcagaaataaaaggctgccccaaattggcccgtttttattgcctgttggatttttgtctggggtttctttaggttttgggaagtttaattgccttatttaaataaattttttttgtttcaaattaatgggggtctaggcaggacctggggccaagtttttagttgctgtatgtctcgggggagggctgtaaaaaagggaactgacccttcccgggggggtagtgaatcccgtaaagctaaaaatgatcccccccggtttatgcataaataatttcccccttcccgggggacgtttttcctgtttttaaaacgggattttgctgtaaaaaagggcccttataacccaagccctta

SEQ ID NO: 677053 - DNA, 928 bp, Homo sapiens
cccgcaacccacaaaaaaaacgagcactcagtaatggctaggtacgaggctgggttgaggaaatctggcctccgcctgcggacctagcggaacccgtttcccgcctccacggggcagtgccagcggcctggtcctttcaccggcagctccgtgccgacgctctcaccgcttcttcctatcgccgggagttggctgggccgaccagggcggcggccgtgctaccgtccgccatatcccgctgtctctgcgccctcgggtgggccggccgaagccggtcaccgatgccgctgtggcctgaagcccgacgctgtcagccgtgtgccagaccacgtcgtcctccatttgcgaggcaagggagcgcacggggagatccttctgccgcatcattgcccttgcgcccgtgcggtgtttcaccaggccatgcgtggggccgcagccggctcgggtggtgcggtctgtccggcgaccttgggtggccagtcgaccgagccgggcggggcttccgggccgcggggggaccctttcggccagacaccttccggccacccccttccggtcagaggcaaactggtgggcgagggtgcgggacagagctcagaagttacagccaggacaattccaccaaggagggttctgactcgggctcaaaaaaaccactaaattactaattctgctcccggcttgcttgagacaggaaagtcttccaccaagagggaaaacggggagcaggacttttttttaggttgaaaaattcccattcaaaggctcctgaagtcagtttcccacttataaatcactgcaagaatcagtcttctaccagggagtatattaccaatttggcagattcggtcctggtgagtttgtgacacgatgtgaagcgcaaaatgccaactccggggtttcccggcccgtttggaaagagtgactt

SEQ ID NO: 677054 - DNA, 282 bp, Homo sapiens
cgtgtgcgtctcctgagttccgcctgctgctgtcgtgccttatatttgtggtacgccccggcccgcctgcaagcatggcgtttgtctgcttcggccaccctccagccaccacaccaaccacacgctctgttggctgcaggagattaccttcttggcagccggagggccgcttcacacggcgtcttcttgcgtctcacgggtcttggctgacggagcagaaagcatggaacgcgcgcagaacgcagtgaagcacgggtcttgcgtgacggggcaagaagctag

SEQ ID NO: 677055 - DNA, 141 bp, Homo sapiens
ttgactggcccggaggcgtgaactggcccggtatgcgtgatggcccggaggcgttgaatggccctccctaatacagagaatgtacatacacagaattgggagatcaggtcgatacggccggaagggtgtggccattcaacg

SEQ ID NO: 677056 - DNA, 326 bp, Homo sapiens
gccgcgctgcccgcgttaagattcccgcattttaatgttttcagggggtgtcatagccccgggtttggccgccccagccccgccttccccgccccggggagccctgccccctgccacgcgtccctgcgcgaccgagttagcacgacatcgagtatgagcctggctcaccgtctccctgacaacgcagacatgtgggcgcctgggaacatgacaagagcgccttgggacaagggggatcgtggaaatgtcatccgatgggacaatcaggaaacaggtgagcagattgccatcaagcagctgacgggcgagtgagctcagcccccgga

SEQ ID NO: 677057 - DNA, 426 bp, Homo sapiens
ctggagaaagtgccatcagtactgggagaacaatcggaactcgggcgagtttcggaagactggggtgctcgacgcggagttcgaggcccatatgatggacatgatggtcaaggccagcaagatcgacgtgtgccggggcaattgagccgggcctaaccgagaccgttccggcccatctatcgggcaccgggggtccagcccgggacccaggaccagcaacccgcgacccatcatgatgcagcccaggggcgtatgctgtgccccgccaatcacgagactgggggcccggccgggcctgacacccatctgcgttgcggtcgggcggagcttctgtatatcccagccaatcatgtgactcaaggaaaacttctggcgatgtgtccagtctccgccaatcaatgacctttggggccgggccagcggccg

SEQ ID NO: 677058 - DNA, 193 bp, Homo sapiens
gttcacatgaaaggacgagttcacacatttttcactttaaatcaaaggctagaattgattagcttattgaggaggtatgtcaaaagccaagaaaggccgaacgtgaggttcctgcaccaaccagccaagttgtgattgcaaagggaagttcttgaggaatttaaagtgacatagttgttaggcagcaaaccag

SEQ ID NO: 677059 - DNA, 399 bp, Homo sapiens
atatttgtgtgtagacatgcacatttgtgcaggtggacaggcatctatatatgtggagtcttggtgctgatgttgggggtctcccctaattactattcatcctattaatggaatcaggatatttcagtgggacccagaccgtgcctggcttctctacttagcaggctggccctggagattcatgtctgtgcatcttgtgcactggcaacacaggatgtcagccctgtccagttgacatgtatgtgggttcagaagatcaagattctggtccccatgcatgtatggcaagcgctttaaccattgacctgtcttctaagtccttgatttgtactattattactatgcttcttagcctgccccttcaacagtgaaatcttagtcgacgcgcccgcgaattta

SEQ ID NO: 677060 - DNA, 161 bp, Homo sapiens
actttccaagttctcaatttttccttcatcatccttagactcatccacataatcaatattttccttgacagatttcactagaaaactgagcaatatctgccttgctatctcggacttctcagattcagaaatactgttttttgtggagctcccctcctcgt

SEQ ID NO: 677061 - DNA, 389 bp, Homo sapiens
gctgagtgcgggaagtgatcacccgagcccaggatgtcgaggctgcagtcgagccgcgattgtgccactgcactccatcctgggcaacagatggacaccccgtctcacaaacgaacaatataagacaacaaacaaactaacaaggaacagagacagtatgtggcctgcaatgcctaatcattatctgtcggacactgttttgcccagccctgcctgcacagcttctttatcattcctggctttagcttgcatatcccttgggatggcgaccgttctctacctctcacgacagagtttccatggttggaaaccaagctctgcctgcgcttctttatttccggatgaaagctgtccccttgtagcttccatcctgatccctttgctagcca

SEQ ID NO: 677062 - DNA, 245 bp, Homo sapiens
  misc_feature (79)..(79): n is a, c, g, or t
  misc_feature (160)..(160): n is a, c, g, or t
gggggccggggcgggtggttaaacagggtcggggttgtggaccggcctgcccaaatatggtgaaccccttctctccttnaaataccaaaattaagaccgggtgtgggggcccgccctgtggtgcccggctcctcggggggctgggcgggggatcgcttgnccccaggaggtgggtatgttgctgtgggccggggtataccccccacctgcactgcaacctgggcgtacggggctattcttccgtc

SEQ ID NO: 677063 - DNA, 305 bp, Homo sapiens
  misc_feature (11)..(11): n is a, c, g, or t
  misc_feature (65)..(65): n is a, c, g, or t
  misc_feature (158)..(158): n is a, c, g, or t
  misc_feature (299)..(299): n is a, c, g, or t
aaatgcgtcanttatgttcaatgtagatatggccaagtcacttctgtacagagcctcagaggagnctttctagggacagcaggctaagatttctgggatctgccttcccactcctctccaccttctgctgggagatgcctagcagctaagcttgctcntgacctggtgatgttcttgaacaaaaagaaaccatgggtcgtacttttgttacattctcttgttcttcataataactttaccagaaggaaaaaacagaaatggtgataaaaataaaagattgtgtcttctcaggaaaaaanaaagta

SEQ ID NO: 677064 - DNA, 1063 bp, Homo sapiens
aagatgaagaggagatagaagaggagctacaaggtgatgatgggagtcaatgtagtaagcacgcatgggtaaaacacaagcacaaagtcagcaaggatgatgcaagcaaccaaattgctacatacaggcagctcttgcccggttattccaagcaacacaagaacacagaaaggcacagaacaatgcatatggcaaatggaaaattcaaatgggttccaggtcgttcaacagaacagtgcagaacgagatggtcaaaaacaaattgcgaaggacaaggactcaaactagacccctgtgggcaacaatttttagcatgcaagcaagaacagagaacaacaacagcactgacaaaggcaaaccagcaaggctcttgctcgaagaggcccagtgaagaggaacttccctctgcatcgttgatttgaatgacccatacttcgctgaagcacagttaaacaaatagcgtataacactcaacaaaatcggctaacatctgcaacaagatggcacatctccagaagcacagcaaatctgcacctagaacagacacacaaggctgcaaactggccttcgccttactgatggcatgcaggcacgaggacagtaagcaacacacttcacattacaaacaacgattgtgagagcacccaagaaattcatgatgccacaaagagaaagaaaaaacatgcctgcctccatggaaaacacagaaagcggcacttacactagacgggaattgacctttggagcttcaaactgttacaacgaatccaccggattccatggccaacatgtaccactttcacaacaatggttgcaaattcggggaaccgccttaggaattccagattttcaagaaaaatctaaaggcccagggaaaacaagccctgcacggcagcaaagggccggtgcaaacgcaaaaccggaacggaaaccacgaactcacaacaagcgcagtaaagacaagcaaaacacacgaaccacgtgaacaggacaaccccagacagaccaagaaccccacgcaacgaaccgggagaaacacacaaaaaacaacaacacaccacat

SEQ ID NO: 677065 - DNA, 713 bp, Homo sapiens
  misc_feature (27)..(27): n is a, c, g, or t
  misc_feature (30)..(30): n is a, c, g, or t
  misc_feature (42)..(42): n is a, c, g, or t
  misc_feature (59)..(59): n is a, c, g, or t
tgcagaatcacactcacaactcagtanganaaaagcagctanatagacagaatatttgnacacatatttaaccaaagtagatatacagatggcaaatgaagatataaaaagatgcccaatgtttagtcattaagaaagtacaaagtaaaaccaccatgagacaccactgtacacttactagaatggtctaaaaacaaaactgacagtaacaagcactagtgaggaagcagaggaaatgaaactcacataaccctgcactgggaaatgaaaatggaacaaccaatttagagaatagtctggcagtttcttaaatttaatcatacattatagtatcaccaggcaatcccaccattcagtatttacttaacagaaataaaaatctttgttcacataaaaccatgtatatgaatgtttatgatagctttatctattattgccccaaagtggaaaaaaccaaaatgtacttcagctggtgaatgtacggatttaaaaaatgaaaaaaatattcatacaactacccagcaataaaaaaagaatcaactgataaatacaacaataggaatgaatctcaaatacattaagaaaagccagacttaaagggtacatactgtgtgagtccaaatttacagcatactcataaaagaggaactatagggacaaaaaagcagattagttgcaggaactttgagtgtgttctgccgagatcctctggg

SEQ ID NO: 677066 - DNA, 709 bp, Homo sapiens
aattcaatacttttccctgattggaggagattaaagctctgaatggatgggcacatagtgacaacgcgaactagaccacttcggatggcaaatgaagatataaaaagatgcccaatgtttagtcattaagaaagtacaaagtaaaaccaccatgagacaccactgtacacttactagaatggtctaaaaacaaaactgacagtaacaagcactagtgaggaagcagaggaaatgaaactcacataaccctgcactgggaaatgaaaatggaacaaccaatttagagaatagtctggcagtttcttaaatttaatcatacattatagtatcaccaggcaatcccaccattcagtatttacttaacagaaataaaaatctttgttcacataaaaccatgtatatgaatgtttatgatagctttatctattattgccccaaagtggaaaaaaccaaaatgtacttcagctggtgaatgtacggatttaaaaaatgaaaaaaatattcatacaactacccagcaataaaaaaagaatcaactgataaatacaacaataggaatgaatctcaaatacattaagaaaagccagacttaaagggtacatactgtgtgagtccaaatttacagcatactcataaaagaggaactatagggacaaaaaagcagattagttgcaggaactttgagtgtgttctgccgagatcctctggg

SEQ ID NO: 677067 - DNA, 749 bp, Homo sapiens
  misc_feature (214)..(214): n is a, c, g, or t
  misc_feature (222)..(222): n is a, c, g, or t
  misc_feature (386)..(386): n is a, c, g, or t
  misc_feature (463)..(463): n is a, c, g, or t
  misc_feature (485)..(485): n is a, c, g, or t
  misc_feature (533)..(533): n is a, c, g, or t
  misc_feature (543)..(543): n is a, c, g, or t
  misc_feature (567)..(568): n is a, c, g, or t
  misc_feature (593)..(593): n is a, c, g, or t
  misc_feature (603)..(603): n is a, c, g, or t
cactgctggctaatttttgtatttaggtagagtcagggtttcagcacatggcacagtctggtctcaaattcctgggctccagtgatcctcccaccttagcttccagagtggccaggatcacaggcaggcaccaccatgcccaggtaattttatttttttgtagagacgtggtctggctatgttgtccagggtggtctcaaactcctgggctcanctgatccncgcacttcaacctctgccatagccaggacctcaggtgtcagccaccacacccacagctaattgttttttttgtagagatggggtctggctctgttgctcaggctggtgtgtagtaggggcacagtcatagctcactgtaaccttcaacgcctgggctgaagcanttctcccgcctcagcttcccaagtaactgggagtataggtgtacaccaccatgcccagctaattatttagtagtagnaggaggagtattatgtttgagntggagtctcgctctgtcgcccaggctggagtgcagtggcgcagtctcngctcactgcnacctctgcctcccgggttcaagcnnttcttgtgcctcagcctcctgagtngctgggattncaggcgcccgccaccgcgcctggctagcttttgtatttttggcggagatggggtttcgccatgttgcccgggctggtcttgagctcccgacctcaggtgatccatccgcattggcctcccaaggtgctgggatcgcaggcgtgagc

SEQ ID NO: 677068 - DNA, 427 bp, Homo sapiens
agtcttcccttgaagcaggggaggcagatggatagaggtgtgtcacacgcataaaacacgaggtgcgggagcagggcggggtgaaggctgagtaaactgagggctgaataccgtggaggtccagatgcggcttccctggagggcagtgccggaggcgtcgcccccctggggttgaggatgctggaccccgtgggcttggaggcctgccgggatgatgccttcaggcctctgtgcctggcgggcatcctcgggccgagtttgaccagcagtgatagactcttcgtaaccggttcagaataaatttttcagtgggacagaaaggagaggtaaaaaacattgttttgaaggtggtaagatctggcgcacagagggagtgggtctgttttatgcaaaataaaagtttgtggaatagaaaaaaaaaagaaga

SEQ ID NO: 677069 - DNA, 425 bp, Homo sapiens
cagctcggtaccaacagaacatgaccagtcttctgtctcatgtaggcagagatactactctgaagccttagtagtgggcctgggtacgtttgggagcctgagctggaattgaagctggcgtgctgctgcctgggcctggtgcgatccttggcctgtgggcttggccttagggcggcgcaggctgagccccttgggaatacgggcacgagcacgcttcccaagcttggggtgggcaatgtaggcaagtcgatcgagcttgcggctgacaccctttgggatcttgggcttaacctccttgggctttacgaggaccttgatagcctcggcacgtgcactcatggccttggcattgttggcctgcatcttctttaggccctttttgttgtgcttcttggcaaagcgcatgttcctcaggaacttggggt

SEQ ID NO: 677070 - DNA, 491 bp, Homo sapiens
  misc_feature (128)..(128): n is a, c, g, or t
  misc_feature (205)..(205): n is a, c, g, or t
  misc_feature (227)..(227): n is a, c, g, or t
  misc_feature (275)..(275): n is a, c, g, or t
  misc_feature (285)..(285): n is a, c, g, or t
  misc_feature (309)..(310): n is a, c, g, or t
  misc_feature (335)..(335): n is a, c, g, or t
  misc_feature (345)..(345): n is a, c, g, or t
cttgctgccatgcccggctagatttttttatttgggtagagatggggtctggctctgttgctcaggctggtgtgtagtaggggcacagtcatagctcactgtaaccttcaacgcctgggctgaagcanttctcccgcctcagcttcccaagtaactgggagtataggtgtacaccaccatgcccagctaattatttagtagtagnaggaggagtattatgtttgagntggagtctcgctctgtcgcccaggctggagtgcagtggcgcagtctcngctcactgcnacctctgcctcccgggttcaagcnnttcttgtgcctcagcctcctgagtngctgggattncaggcgcccgccaccgcgcctggctagcttttgtatttttggcggagatggggtttcgccatgttgcccgggctggtcttgagctcccgacctcaggtgatccatccgcattggcctcccaaggtgctgggatcgcaggcgtgagc

SEQ ID NO: 677071 - DNA, 301 bp, Homo sapiens
attatatcatatataatattgatacgtgaacgcgtgcaggacctgcgccttgcaaagctaactgcaccggtatgagatgatgtagcagcacctttagtttgtgatactcgctgagatgtcagtattctatgatgacgccagatactaacctatttgaggatcttgccacagtcgactggtctaacacatcggagggtaagtcattagcctccatcagtattaagctctacgccttatacgcaccgtcgccgggaacatgaccgacgtccatgcttttgacgtaggcctacgctgctgtcct

SEQ ID NO: 677072 - DNA, 274 bp, Homo sapiens
tttcaggatctcaggtatgtgactaactcttctatgcccagagctggaatgaggggtccctaactccctgggtgccaactgccacttcaacatttgtggccattccttaccactttttgcccttgagtgccggctgctgtgcctcagcatacggcttattgatccgattcttctccggcttggaaggcttaggaggatgtttttattcctcctcctcttcctcactctgatcctgaatcagggctgcaaaaacattaccacccttggtattctt

SEQ ID NO: 677073 - DNA, 127 bp, Homo sapiens
cctttccctgacagctgtgtactcttaggctaagcgatgtgactacagcctgcccctgactgtgttcgtcccagggctgatgctgtcccaggtacaggcaggagattacacataggtaagatctcat

SEQ ID NO: 677074 - DNA, 201 bp, Homo sapiens
ccttattctagactccatatcaatcaatagggtttacgacctcgatgtttgatcaggacatcccgatcgtgcatgccgctattaaaggttcgtttgtattcacgattaaagtcctacgttatctgagttcagaccggattactccaggtcggtttctatctacttcaaattcctccctgttctaaaggacactattgttct

SEQ ID NO: 677075 - DNA, 333 bp, Homo sapiens
cggtcaaacgcaataaaagcgtgtattaggtaagtgagggtagagagcgaagataggcgttgaccgacgtatagtttgttaaacagccgctcgctttgagactggagaaaaaagaaatggtagaagtttgaggattgagaattcaaagtaatatcctcagaaagaaacatggaatgatcgaagttattctaagttctccattataactctcccaacgtactcactgccaaccaacagataccaagtgccttcctccccctaaaggatatatttagtcttctagaatatccaaggtgacaatttaatggatatgtaaaccctggcccctgtgca

SEQ ID NO: 677076 - DNA, 623 bp, Homo sapiens
ttcatttcccgaactgaagtatggaaatttggtaatgttgtcattgaacatctataccactggatacacatctgttcagctctcatgaagataaccaaacaactaaatagtggtattacacctccgttgccctccaagactgacaattatatgtatgcaaaaatgccaggggaaggtttgcaagagaagtgataatggatgataatggaattgatactgtatttaggatcctttgtttgttatcagttttgtttgttaactataaaatattttccattggaaaggggtacctataaatgtcttctgctgctaatatttatctcagcactttctaaacccaaaagtgctacctaagaagaaatttagccaaaaaatacccagctaaggtagccatagccaagtgtatttaagtatgttatagaatatatttgaaagcttcctttcagtttgagctttgtatctgctgtggaactgttatggttgattgggtagttatttttcattcttataaggttcaaagtaacagctgaggatttagaaaacaagaataccaaatagaatacgaaataataaagataaaccaaaagaataccaaataataaagatttttaagaaatggaaaa

SEQ ID NO: 677077 - DNA, 103 bp, Homo sapiens
ctgctgcgtcgtctctagaggtccctgttgctacggtgagtgcagtgtacgactccatctctacaaaacaaccacaattttagccaggtgtgctgtgacgtgt

SEQ ID NO: 677078 - DNA, 461 bp, Homo sapiens
  misc_feature (34)..(34): n is a, c, g, or t
  misc_feature (63)..(63): n is a, c, g, or t
  misc_feature (74)..(74): n is a, c, g, or t
  misc_feature (76)..(79): n is a, c, g, or t
  misc_feature (128)..(128): n is a, c, g, or t
  misc_feature (130)..(130): n is a, c, g, or t
  misc_feature (137)..(137): n is a, c, g, or t
  misc_feature (158)..(158): n is a, c, g, or t
  misc_feature (195)..(195): n is a, c, g, or t
  misc_feature (212)..(212): n is a, c, g, or t
  misc_feature (214)..(214): n is a, c, g, or t
  misc_feature (242)..(242): n is a, c, g, or t
  misc_feature (258)..(258): n is a, c, g, or t
  misc_feature (271)..(271): n is a, c, g, or t
  misc_feature (301)..(302): n is a, c, g, or t
  misc_feature (315)..(315): n is a, c, g, or t
  misc_feature (328)..(328): n is a, c, g, or t
  misc_feature (365)..(365): n is a, c, g, or t
  misc_feature (427)..(427): n is a, c, g, or t
gtgtgtatttatccaatttacataaaagaaagcncctggccaaatctaccaaagcgttttccnggaggaagtcngnnnnggggcagggggaggaaagacattcatctcagtctttcacctgagctttngnacaaggnaggcaaattgccccctgaccncaggcagatgtttaagccttcaccaactaagaaagcnctgttattctggcctgngngcttgccccagactcaggaacatctggncaacacaagcatcacngggcgggggaatngggggggggcggcaccacccccgacccccnngaagccccccccntcccccccccacncttacatgccgacacagacagacacagtctggttggnacatgcagtggcagctcctggtgtataacatctttcacacaccttgagtctatctgcttgcngcctttgactgatcctgaaatggttggcctttca

SEQ ID NO: 677079 - DNA, 760 bp, Homo sapiens
  misc_feature (2)..(2): n is a, c, g, or t
  misc_feature (103)..(104): n is a, c, g, or t
  misc_feature (109)..(109): n is a, c, g, or t
  misc_feature (175)..(175): n is a, c, g, or t
  misc_feature (184)..(184): n is a, c, g, or t
  misc_feature (196)..(196): n is a, c, g, or t
  misc_feature (225)..(225): n is a, c, g, or t
  misc_feature (227)..(227): n is a, c, g, or t
  misc_feature (250)..(250): n is a, c, g, or t
  misc_feature (293)..(293): n is a, c, g, or t
  misc_feature (310)..(310): n is a, c, g, or t
  misc_feature (324)..(324): n is a, c, g, or t
  misc_feature (334)..(336): n is a, c, g, or t
  misc_feature (354)..(355): n is a, c, g, or t
  misc_feature (358)..(358): n is a, c, g, or t
  misc_feature (368)..(368): n is a, c, g, or t
  misc_feature (387)..(388): n is a, c, g, or t
  misc_feature (427)..(427): n is a, c, g, or t
  misc_feature (498)..(498): n is a, c, g, or t
  misc_feature (532)..(532): n is a, c, g, or t
  misc_feature (539)..(539): n is a, c, g, or t
  misc_feature (545)..(545): n is a, c, g, or t
  misc_feature (547)..(547): n is a, c, g, or t
  misc_feature (569)..(569): n is a, c, g, or t
  misc_feature (572)..(573): n is a, c, g, or t
  misc_feature (576)..(576): n is a, c, g, or t
  misc_feature (578)..(578): n is a, c, g, or t
  misc_feature (582)..(582): n is a, c, g, or t
  misc_feature (586)..(586): n is a, c, g, or t
  misc_feature (599)..(599): n is a, c, g, or t
  misc_feature (613)..(613): n is a, c, g, or t
  misc_feature (627)..(627): n is a, c, g, or t
  misc_feature (631)..(631): n is a, c, g, or t
  misc_feature (640)..(640): n is a, c, g, or t
  misc_feature (643)..(644): n is a, c, g, or t
  misc_feature (695)..(695): n is a, c, g, or t
  misc_feature (699)..(699): n is a, c, g, or t
  misc_feature (760)..(760): n is a, c, g, or t
tnattaggtggaaaaaagtccctttatgtatttgtttcagctaaagaacatactggataaggattactaaaattaacatcggtacagtaaaaacgatggcaannagggntttggcaccacatttacaaagtaaaagcatgcactgttaatacactttagatgtttctcaacaganaaggcaaanaagatggaaaanaagaggcaccatgtacaaaactccctatnantgagacaaacaagcaagaatcanagtggtcaatttagtaaatatgtagcaacaaagtcactggttntgtttggaatttagcantttgcatttctggntggaagctgnnntgggtgtgtctgtatccnngangctgactttntcatactacatcagcagtnntttggtaatctgcacaaagaaggttaaccttcaaccatnagcttaaagaaaagagagaactagaatcttattgcagaactttccaatgtaattaccatatggaaaccatnatggtactttgggcaggttaattacatttatttnatttaanaagttntntttatagccccagtggccgggnagnnttntnagtnattntgggagtattatnttctgaccataccnagagttaaaaacantttnttcctactnaannggttttttttctggatggtctggtcacatcgtgtgcatagttgagattgtntgtnttaataaagattcttttgcaaataaagaaataaaatttagtaaagttattcttctcttgan

SEQ ID NO: 677080 - DNA, 113 bp, Homo sapiens
ggtataagcaaatgcctttcttcaagttatcaacagatcaacaaacttcctctactccagttcacaattgaagcaaagttgtcatccatataccaatcatgtcagcagcttgc

SEQ ID NO: 677081 - DNA, 893 bp, Homo sapiens
ggcctggaatcagaaacagaaacgttctagactgatgtggttcagtggtgcttacataggctattgtttactacatctgcaccaacctttcaggaagcaatttggcttgtaccatttagctctgtggcccactgaacgagaatttcctgtgaggcagtggggtgaggaaccctgccttactctgctatctcagtacatctgtggaaccacacctacaaccagcgccttccttctgcgcatccctatggccaccttgtcctaacttcctgttttgggaaatcccccacgaggaggctagccaccagtgctgacacttgtataacaatttctggaggtcagaagtccatgatcaacggtgccatcaggattgatttcttgtgagggccttttctctccctggcttggcttgtggtcctcagacatggctcttcatctgtgtatgtgcaagagcagaaaaccagatttctcctgggtggccttctaacacacacacatcacgtcttcagagggccaaagtatggacattcccaaaggatggctttataataaaccctgacccaggacagagcaaggatggccggttgttaacactaagcaggaagggaccatcctatcaaaagacaaaagagccagggggccggactccctatgccctttggaccagacgtcgagaatccagcaacaccggccaacgcggatccattggcaccagaaccgggtggcctcacaagggaatcggatagcgcaacacagcacggggacagcggtttacaggaacattacagggctaatagcgcgacattgcgtgggagcacaaccccgcagttggaacgcccgtcagaactgctaaacgtgcggaacacgatgcgggaacacacacgagggtaccgcaa

SEQ ID NO: 677082 - DNA, 179 bp, Homo sapiens
tatgcactactggacaatgtggaccccaacccgcgcacttcgtggggcgggatcatctggactaaagccctgcaggttggctgtctgcttcgctggagccaatgcccggcccagatgttaccggctgaccctgcgcaccagcaaggagcccgtctccgtcacctgtgtgagctgctggc

SEQ ID NO: 677083 - DNA, 286 bp, Homo sapiens
  misc_feature (273)..(273): n is a, c, g, or t
  misc_feature (285)..(285): n is a, c, g, or t
gttcaagaccaccctgggcaacatggcaagaccctctgtttataaaaaacaaacaagtcaggtgtggtgtctcacgcctgtaatcccaacactttgggaggctgaggcgggcggatcacttgagtccaggagtgtaagaccagcctgggcaacatagtgagacctcatcgtacaaaagacttaaaaattagcaaggcattagtgggaacctgcctattagcctcagctacttcagggaggctgaggtggggaggatcactttgagcccagggntttcaagggttnc

SEQ ID NO: 677084 - DNA, 168 bp, Homo sapiens
catgattgatccaccgttcgctataatcctcctatcacattaaataacaagtggttaaaaggtgaacattaaggcctcacttactaggtgaaacaaagaacagaagaatctaagctactctagcaggtgtttgttttctactgtagaaacagcctagctggactgggt

SEQ ID NO: 677085 - DNA, 403 bp, Homo sapiens
acccccggttttttccctttttttccattggcctttgtttcctaaaatttttttgttaattttttccccttttttttccccccctttttggttccggattcttttggggaactttgggaaattttggatttcccattttttttttttggaattaagcttttagttccactttccaaatggcctgggtttttttttaccccctttttaaggccaatttccccccattttccagggtttttgtccccccctccttccccccagtttttttctcttttaggtacccccttctttttttttcccccgtttttttccccccaattttctttttttttagccccttttttccccttgttttccaaatttttccgtttgggggaatttaagttgtccgttcccttttcca

SEQ ID NO: 677086 - DNA, 335 bp, Homo sapiens
tggcgatagcactacaatgtgcaatagtgggcttctggaaaaatgcagaaattgtctggatggtcagcattgtctggaagatagctaatcctgcctgtacttagtgcatggtataaatggagagagatcgcctctcctcttggtcatgattattagtgttctcagtatctctactccctgctacccgctttctctgcagacttgattgacactgtgcatatatccctttagtgaagatgtggggggtgcagctaagagatgcctattttgggacagcattcctctcgtctctgcttgctgtagacatctccctactccttgctatgtaccgcttg

SEQ ID NO: 677087 - DNA, 160 bp, Homo sapiens
tatcttgatctcttatgacgaccgaaattaccaaaatcctctttggatatgacttgttaatggatcgcaaatagatgtgtcataaatttcatcgacagtaaacagataagaaaagaaaaaacgacaggcaaacatagttggtagtttaaattataggaga

SEQ ID NO: 677088 - DNA, 482 bp, Homo sapiens
  misc_feature (57)..(58): n is a, c, g, or t
  misc_feature (88)..(89): n is a, c, g, or t
gacccccacacgcatagatattaccgctcttgtacctccacccagccccggaatgtnngctgctaggcctgtaccagcattccccagnnatggactcaggagggccaggcttacctgggaccacttctgaaagttgcaccagccccagcttccctgaggacaaggctgagtcacgaagcatggacgaggctgagctgcagtctgcacaggtggagttaaacaggccatagccaactcgcccctcacccagggtctgcacagacctcacctgcagccaaattacatttgagcacacagtaaaaggatggaaactgatgatcctcctgctccctcccttccatttctttgctctcagtttagtcactgttttttgtttgtttgtttgattgtttgtttgtttttgagacaatgtcttcttgctctgtcacccaggctggagggcagtggtgcaatctcagcccgggcgacagagcaagactccg

SEQ ID NO: 677089 - DNA, 222 bp, Homo sapiens
  misc_feature (1)..(1): n is a, c, g, or t
  misc_feature (30)..(30): n is a, c, g, or t
ntcgttggtatcccccccgagcgtcttggnacaacgaatccctcgggaattcatctaaagatttatccaatccacattggtaaagacactggttgaagagctagatcaacgtggtaaagttctttcatcaaggattcactccatgaagaaaagacatcttaagtgaccatcggcaagacagaacaaagggtccctttctagctgtcatttagagaaaagaat

SEQ ID NO: 677090 - DNA, 502 bp, Homo sapiens
  misc_feature (207)..(207): n is a, c, g, or t
gggccataaacgtcgaagccaggtcttgagcgtcagacagaatgaggtgtcccagagcggcggaggagagccagacgcacgctggttccggtctggacggaatcgccgcggacacggcagaggctagggcggaatggctacggcagcgcagttcgccaaggctcgctccggtgtcggcgtggtaggcgcgactcccccgggacgcantagtgctaacgggggtttacgtactgccgagcgcggcaacggagacgtgaagcccgtggtgtccagcacgcctttggtggacttcttgatgcagctggaagattacacgcctacgatcccagatgcagtgactggttactacctgaaccgggctggctttgaggcctcagacgcacgcatgattcggctcatctccttagctggccagaaattcatctcagatattgccaatgatgccctgcagaagtgcaaaatgaggggcaaagctccggaggctgccggggcaagagcaagg

SEQ ID NO: 677091 - DNA, 227 bp, Homo sapiens
ccatgtcccccgtcctgttctcttcccactgcctcctcttccaagaacgtttttctgatcttcttgtccttcttccctttcttcaccactttgctctgatgggctcgtgctctctccgtccccgtatccactcgggctcccggcggctgcctgcttgcggcgccttcggccatcgcgcgtggcagttaacagcgttaccgtttccggggcatcctcatagagtcgac

SEQ ID NO: 677092 - DNA, 293 bp, Homo sapiens
  misc_feature (57)..(57): n is a, c, g, or t
ccgtttttaaaaaaaattttaaagggcttttgtttttttcccttggggccccccctnttagcccctttttttttaaacaggggaagaattttttttaccccttaagccttcaaaaaagcccgggccaaagtttccaaaggtttttggccaaaaggttttggtctcccccccaaatggtgtttgggccccaaaaaaaaatttttgttttgcctttggccttggcttaagaccaaaatggttttaaaaccaaacccctttttttttttttttgaaagttttttcccccaacccca

SEQ ID NO: 677093 - DNA, 301 bp, Homo sapiens
gtgcagtacgagctgtgggcgcgctgctggcgctcggggtcgcctggctgctgcttcgtggcggcggccgtggccctgcgctggtccgggcgccggacggcgcggggcgcggtggtccgggcgcgacagaaggccagcgagctgtggccttgggacgaacatgtgacagggcggcgcagcgcttcctggctccatgaaaaccccaagaacctgtgaccttcagaagggcgcttgcttatgcccttgtccccttgccctcaagctgggttgccacgaacgcttaccaccatggtacggaacg

SEQ ID NO: 677094 - DNA, 283 bp, Homo sapiens
tagagacagggtttcatgttgcccaggctggtctcaaactcatgggctcaagcaatcctcctgcctcaccctcccaaagtgctgggatgacaggtgtgagctgccacactcggcctttcttttctttttatgagacagagtctcactctgtcacctaagctggaaagctgtggcacaatcacagctcactgcaacctcaacactcctgggctcaagcaatcctcccacctcaacctcccaaggagaaaaagcaatgaactttaatggcacgtaccaaatatca

SEQ ID NO: 677095 - DNA, 932 bp, Homo sapiens
  misc_feature (932)..(932): n is a, c, g, or t
tctttctttctcccctcccccccttaaccattcccctgggaggggcttcccgcgggaggggagagcgggtcaccgaggaacaatacagaggaatgcagaatactataaaggagagcagagggaaacggccgaacacacagccaggacaaaatagacaaagaataagaggacaaacaaaaagaggaagcaaacaggagaaacaaaacaaggaaagctaagacaagtgacgaggaggcagcgcgcagacaggaaaaacaggaagcagagaaaataaaacaaagaagacataagacgaacaagagaaacatacataaagcagaggcaaaacaacagaacgacgaaagacgaaaagaaaccgcaatgaacaaaagaggcgacacagcgacatcggaaagcaacagcacaaccagtgagacgaacagccatagacagagaaagagcaaagagagcagacaaaggaagaggcacaaaaagcacagagcgaaacaggaacaacagaagaagcaggagacacaaagagcaaccacagacagaaaaatgaggaagagcaggaagaccaccaacaaacgatagagacataggtagaagagagcacgaagaagaggacaaaaagaagaaacgagacgaaccaaagcaagaagagagaacaaaagaacgagacacaacagaaaagcaacaagaacgaaagagaagcagaagaaagcaagaaaaaaataagcaaaagagacaagagagacaaataacaggacaagagagagaaagatagcgacgagccgaacagacacaacaagaaaaacaagacaaagaacggagagaaagaagaacaaagcacaaagcagaggagacacgaaacaaagtgaacacacagaagagacaaacgaaaggacaaacaccgagaaagagatacagataaagtacagcacgagggaggn

SEQ ID NO: 677096 - DNA, 102 bp, Homo sapiens
aattttttttttttccccaaaagggggggggggggggggggggggcccttgggccccccctttttttttggggtttggggaaaaattgggggtttcccccca

SEQ ID NO: 677097 - DNA, 120 bp, Homo sapiens
tatccaagaataacaataaatgatggaaatcagcccttaggaagcccagacgttggacttagcagacaaaaactttttaaaaactctcatagatcatgaagtacctcttcaaggagaact

SEQ ID NO: 677098 - DNA, 590 bp, Homo sapiens
gctccctagcgggagatccccccagtggcacaagccaagggctaacccagtgccttgaattatgtttcagaacctgtgcccccccctcccccaccccgaagccaatacttgtcagcaaaggggaattatgaaagcggccccccttttccaaacacagaaggggggtatttttttcccctttaccccccgcccccctttccctggaaggactcctcctgagggggggcccccctcctttgactgccccccacgtaaaaatgtaaatataaatttggtttaattttggagggggggagggggcttttaaaaaaggattgggccgcccctggcccgtttaaattttaaaatggggtagggaatcctggggatttttggccaaaaaaaaaggatttttttatttttttttaaaccccccgatttgcggcttgggccctaaaagtttgtataaaaaaaatttggcctaaaagttttttttttgccaactaaaaacccaaagcctccctttaaccccgtgaagcccctgggtccaaaggaacccggaataataaaggcctccctgccccaaaaaatttggggtttttttatcccca

SEQ ID NO: 677099 - DNA, 916 bp, Homo sapiens
ggtacggacccactgtggattcctaagttgtggatggttgatatcagtgatctcagtgcctgtataaccctcacctgtataatgactgatctacgtagtaatccttgcctcaggttgagtagtgagctgctgtgaacttcagtgaaaagctactggtacaacttgtctgttacttgtacaattcgtgtgctagtgttggtgatgcacatggagtacgcgggcgcgggtcttgttgtagtgcgcacgtcgagttcttagtctgagtaaccggctctgttgcgcgaaccattgaatgttgatctttagtctgttcacctgtcctgtgcctacgggccagtggaactgttacttctttgggatcctgatccatggactgtggcgcccacctccctgaggagatcaggtgtggccccgggaggttcctgtcgtgggtcctgctcctttccgcttccctacgtgttctcttggtctcatgatgttggtcgcccttgaggttcgcgcctggtgtggagctacgctgcagactctcgtgtatatgaccttcgggatgagtgagggagtgcgggtcttatccgttcctaggtctgcgggtgagacggtgggagttatgtgctgatggcttgggtctatccgtgtatagtcctattcagatgggaccccatgatctcttggtccggtagagagcgtctgctcctggagctatgggctgggaaggagctgatcgtccgagtggctcttgccttcctgtgtctcgtcctgaactgtcggggcgcagttagtgggcacccctggtactgtcttgcgcgcacggcggtggctggtttggtggtagcctgatgtttggtcttccccctggtcaacttctcggtgctttggttccagggacggcttttcggaagggcccttgcggccggag

SEQ ID NO: 677100 - DNA, 393 bp, Homo sapiens
cctccatggttgcggggcagaagcattagatagcgggtacattaatacttggagggataatgtttgtcagaaatgtagaggtgagattccaatgtgtttaccataggtctgccttggaaacactcataggctgagcacagtggctcatttctgtaatcccagcactgtgggaggctgaggcaggcagatcgcttaagctcaggagcttgagatcaaccagggcagtaaggtgaaaccctgtctctacaaataatacaaaaacaaaaattagctgggcatggtggtgtgcacctgtagtcccaactactcaggaggctgagttgggaagatggcttgagcctgggaggtcaatgctgcagttggctgtgattaagatactgcactccagccggg

SEQ ID NO: 677101 - DNA, 390 bp, Homo sapiens
cgacagggcatcttcaatccatcttgagttgatatctcgtatatagtgtaaggaatgggtccagctttccatctactgcatagtgctagccacttatcctagcaccagttaatgaaatgggagtctttaccccattgcttgctttggtcagctattgtcagaaagatcagctggtcctaggtgtgcaaccttattactgggtgcactattctgttccatagattaacattattctgaaacagaatgtgcctttattagtaccagttacatgctgtattggttactgtagccctgtagtatagtctgaagtagtatactgtgatgcctccagctatgtccaggccgcttaggattgccctatgctattcaggctctatttgggtacccgta

SEQ ID NO: 677102 - DNA, 104 bp, Homo sapiens
aacatcatcaataggtaaactaacctgtatagtacttaaaaatacaaaaattaccaggtcttgttggcacaagcctgtaatctcagatactcgggaggcagaag

SEQ ID NO: 677103 - DNA, 1029 bp, Homo sapiens
ggcagttcggcggtcccgcgggtctgtcgtcttgtcgttcagacagtgttgggacggacacagatccggggactctacttccagccctccgaccgccctccggatttgcctctccgcttgcaagcctccgtggcaccagtcttctcggccatctcctgcttctgggacctgcccagcagccgtgcttgtggttagcgtccttcttgccaacacaatccatgagctcccagtattcgtcacgaattattccactcgacgtggaggcagccgtcatagcagcctggttcaagtttgtacctgcaggcctcctacacctacctctctctgggctctctattccgaccgcgatgatgtgcgctctggaaggcgtgagccaattctatccgctgaatctggccgatggaagaagctgcgagggctaccgagacgtcctccttgaacccattgtcgagaacacagcgttgacgtgccgggccttctctttccatggacattccataaagcccagactggaacgaatgagtggcgtgtaaaagtccccgagacgcccattgaaaatgcttgcccattggcccctggcaagaagatacagcctagaaaccaagggcccctattgggcgattcttgcaatggccccatggggttatctggccggcacggaaccccccattctctggtgacctttgcctgggagtaatccacgttatgcataagtactggagggcaagtggaatggcttttgttccagtgaacccatgggtgcgaacccaccgtgaacccaatggcctcccaactagggccttggggtttgtgccccgtgaacgggcttgggctattacgcagcagagttaattactctaaccaaacaagggcgtccaatacctaatcggccagcgcttaagaaagcctcttgtcaggaccaccaggctgagcttctcatttgggggcccttctgcaatacgaacatagggtatatcgctctaggcctcttccttacaggcatacgggacgcttgtttacagatagccc

SEQ ID NO: 677104 - DNA, 315 bp, Homo sapiens
atctgttcaggttcattctcatgactatcaagacgtacctactccaagctcttactgccttacagtaaaatcgtgacattagctcccaagctcacattgcacaatctgtgtccaagctcccatttgtgagacacaggttgtggtatatactgatcgtggatattttagttcctttcataaaaacacaaaattaaaggcttggttctcagcagagggttctaaatactctaccattctttttttccttgagacagagtctcgctctgtcgttcaggctggagtgcggtggtgcgatctcggctgatcacagctaga

SEQ ID NO: 677105 - DNA, 300 bp, Homo sapiens
cacgaggattttcatcgatgggcatgtagttgctcgcaagtctaacattacagaccatctgctcaagcaatgcggtcgcagtgacaggccaatcacatcatctctttaaaaaagacgctgctctcactgtaactgcatctttcaagtctgccaggttctgacatagacttatattacagtgcaaacgttatcgcaacactttgatctcattattacagtttggaactctgaggtcataggtccatagtaatcatccccccagacacaaacactttaccatcaatcttccccctgggacat

SEQ ID NO: 677106 - DNA, 162 bp, Homo sapiens
cttgcggttctcatatccgccatgcatggtgatatggcccaaaaggaacgagactgtgattatgagggagtttctgtgctgggctctagcagagtttatgattaccactgacctgcttggccagaggcattgatgtgcagcaggtttctttagttcatcaac

SEQ ID NO: 677107 - DNA, 127 bp, Homo sapiens
accgaggattaggtgtaccctatagatctaacatagtacttggcatataatagatgctcaataactattctactattgggtcccaagcatgttgtgtatcacgaagttaaacatagcaacgggttat

SEQ ID NO: 677108 - DNA, 107 bp, Homo sapiens
tgggacatagagtaggcctcttagaaagtgtaggcaggtaggacactacaggacggaggtactggtacctattgacagcgtggagacctaggagtaggataggagta

SEQ ID NO: 677109 - DNA, 655 bp, Homo sapiens
gggttcaaagcttgaacactctagtctacggaagaatttcgtcctgtgggttgggaatcttggattgttccgcccgtttatgaagctgtactggctgtcgaccaacagacacctgaccgcaaactatctttatctgtgtattcccatatttctagacaatgattatcggtaagacaataaatttatccaaaacaaacaaaaaaaaaaaaacaaaaaaaacttgacggggcacggccagcgcggaccagagaggagaagagctttcagaagaacccattgcgggaggcgaggaggccgcggggacacagagaaagagacacggcgaaaaacggtggccaaaaagcgtgagacccaagggagaaccgcggggcaacaggaggcaacaaggggcgcaagcgagacgaatcctcccaacaaaataataaaaaaacagcgcgcccgggggggagagcaaacaccagagaagagcgtatttcagagacaaacagaaatcgctaccgcaacatgggacgagtaccaccgagaaggggcgaaaactaacaacgatgggcacaccccttatcacaaagagaggagcagctcaccaaaagtgacagaagccccacaaaaaaccatcaaaaaatttttcacgccccccagacaccggggtggcagg

SEQ ID NO: 677110 - DNA, 660 bp, Homo sapiens
agcgtgaggaacgcggacggcggaggtttgatagggctgatactgggacctgccgcggatgagtggatgtgagcggcggcacgcgtgcgtggctactcgccggtcccgcggttgctaacttgttgctccgttgattgagcgagacgggtggttgagtagcactctggtcgtgcttacccgcgatgacctgctcgggcgagacgccaaaagaggcagggggtcgcgcgtgaagcggaggacaggacggcggtctcggagccgacggcctgatggcgaacccaatcaatggctcagaccacgataacccaggatagtatgccgacggaggctgtcggaaaatgctgaaggagttgtgccaaaggcgccattagggtgcaggccgcaggaactcatccagtggggagccgattattgtggaggccctgtcccgtggagagacagcctctcggtgagagatgcggtctgagcgagatgtctttgtgtaaccgggcagagctaacgaccatgatgcttgtaaagaggatccatgcagttctcagtgttgctggcatgacgtgagtcatccgtgcagaggagctggcgccagatgtggaaagtgtgtgaatctcccaaggagatctgttaatagtgtgatgaatgtgggtcgattaacggaggaga

SEQ ID NO: 677111 - DNA, 88 bp, Homo sapiens
ttgatgacaaagcctttcaaattggggcagtgagattgaaagagttgatagccttcgagtttgaggagaaagaatttaaaggcaatgg

SEQ ID NO: 677112 - DNA, 192 bp, Homo sapiens
cctgtaatcccaaagtgctgggattacaggcctgatccaccatgccggctataaattactttttatgattaaaaaagtcagtgactgggcatggtggctcatgcctgtaatcccagcactttgggaggctgagtcaggaggatcacttgagcccaggagttcaagagcagcctggcaatgccatctctgttt

SEQ ID NO: 677113 - DNA, 554 bp, Homo sapiens
gcacaagcctgttgaaccaagaagtccgttagccagaatatgtggtagtcactctgaatgatgttattgaaactgcacccatctctccaggcacaagcactcaactaactgaactgatagctcttccaagagccctcaaattaagcaagggaaaagtaactaacattggccctgcctccaagtatgctttcttagtccttcatgctcatgctgccatctggaaggaaaggcacttctttacagctaatgggctctctataaaataccatcaggggccgggcgcggtggctcacgcctgtaatcctagcactttgggaggccaaggcgggcggatcccaaggtcaggggatcgagaccccggtgaaaccccgtctctactaaaaatacaaaaaattagccgggcgcagtggcgggcgcctgtagtcccagctactcgggaggctaaggcaggagaatggcgtgaacccggaaggcggagcttgcagtgagtggagatcgcgccccagcactcccgcctgggcgacaaaacaagactccgtctcccaaaaaaaaaa

SEQ ID NO: 677114 - DNA, 415 bp, Homo sapiens
taattcgggtagtgtagcagtgacactggcacatgtaattgggatgatcagtctagcaacctaaatagatgggggagtttagatcgatccatgaggctatataaagaaatggagactgattattcaacaaattctggctgggtgtggtggctcacacctgtaatctccgcactttgagaggccaaggtgggcagatcgcttcagcccagagttcaagaccagcctgggcaacaaagcaagactccatctctacaacacttaaaaactgggccgggcgcggtggctgaagcccgtaatcccatcactttgggacgccgatgcgggcggatcaccacgtcctgagattgagaccctcccggctaacacagtgaaaccccatctctactaaaaatacaaaaaattacccgggcgtggt

SEQ ID NO: 677115 - DNA, 227 bp, Homo sapiens
ctacaatgctgtggagacataggaatgctttacactgttggtgggaacgtaagttagttcaacccactgtgggaagacagagtggcaattcctcaaggatctagaacccagaaatatcatttgacccagcagtcctattactgggtatataccccaaggaatataaatcactatctctattgagacatatgcgtgtgtatatttattggcgtactcatatgcaagac

SEQ ID NO: 677116 - DNA, 1758 bp, Homo sapiens
ctgggccactgtgcctggcatcggagaagaactggagcaccgactctcaacatccaggagatcatgacccgtgcccccggcgatcgcgttctcgctggtcatagttgtcgtcgcgcttgtgccgtgaaaggccgccgttcttcgggctgctgggctacagctctgtactggatgggcctgccggaccggtgagccgtggtcctgtcgctgtccgccgcgcacgtacgtgccttgtcgtgaggcgctgcacccgcagcgcgcccgtgctgcataggtacgcgcagacatgcttgctcccgtccccgtcgtcgcggctctctctgtagggtaggccagggtggccccgcgcgtcggcctactctagtggggggtcgctccacgggtgcatgtcccctatgcccctggcacccgagagcctcccacgtgtcaaccgctcctccactgtcgcagcgctctctcgtcctccagcgcctgtcgtgccttgaccagtcgctgtgaggaccaaggggcaacgacctcgtctcggcgttgcgctacggaccgaccgtttcgatatccccgcgatctcccgaagaaatgggttggggaacccgaaagcaatcgccacccgtcgcgccatgggcgcaaaccgaaggtggccgatcggttggcactttgggcgaacgggtgggctaagggtgcgcaagggtggccgggactggccccatcagttggataatactaaggtggcgaacttgccatacaaggcttgcaacgcgaaaagggccttttcccccattggaaggggcgtgtttaacccatcagccgactgagtttccatgaggggtgtatgggggggctacatagggatatagtaggggcgccttttttcaagagcacccaaaattacaaggcccacagcacccattcaggtccaaacgtgtcccattgggaggttgcacggcaacggggcttgaccccctttggtggtcaccttaccgaaggcgcgacctttaagccaaatcacaagcgccttacacagccgcacagagcgatccaagggttgtgcgcttctccgggatggcccccttcccgaaatgttagtcgaaccgggggtggccaccccacattgatttgatcgcaccacaaaatcgcacactataggaagtcgtgggatgctacggcacacacaagcttcggcgcctatttgtcatctttctacacttatcgacgacccgataaataacagagccatgataaacgatattctatcaggtactgaatttatgggatcctatgtagaaacgacgcagaaacatatagatggaccccacatgtgggggctcagataccagcaatagcatatcggtgtcaaatttcgcccattcgaacatgcgcgagcccaagggacggaacccaatcagagcgatatggtgacgagtctagcaccaaagagatcgatgatatagcgatatagttatctccaccaatattaggaatagtagaagacccaatacctatggcctccagcttagatcaacttagtagtgaagcacggagcaacctcggtagtaccaatacttctagcccgcatcatattagacaaacggacataagaccgagccatcagctagcgcgtgctagagctaattaataagctatgctaggcgacagaacacaatatacattagaccaacacagcagggagcagcttgtactactaagctcatgcacagcttacactctaatccacgaagccaaccgatgtaaacaccacat

SEQ ID NO: 677117 - DNA, 416 bp, Homo sapiens
cccttcccccaaagtgattgatattccccacccctgtttcaagtgttctcattgttcaattcacacctatgagtgagaacatgtggcatatggttttctgtccttgtgacagtttgctcagaatgatggtttctagcttcatccatgtccctacaaaggacatgaactcatcctttttatggctggatagtattccatggtgtatatgtgccacattttcttaatccagtctaacactgatggacatttgcgttggttccaagtctttactgtcgtgaataatgctgcagtaaacatacatatgcatgtgtctttagagcagcatgatttataatccttctcgtatatacccagtaatgggatgactgggtcaaatggtatttctagttccagatccttgagccattgccacactg

SEQ ID NO: 677118 - DNA, 915 bp, Homo sapiens
accgcgtggtgcgggcaatgtcgggtccgttcgggtaaacgctttcccccttcgtgttaccggcgcgcccgagtttcgtttactacttccctatggccgctttctcttctctccgtacaagtcttggtcgtccgattcttctgttgtggcggtaacctggccgccctatatttctggttggtgccagcaccacttattcagagtcttcttccttgtcgcggtgtcctccgggacacatttgtcctcgggtattttggcccctctcttccccccggcggggttgctaaagaatggtctcccccctctacttgaggtcgcctccgcgcacatactcccccacttgggaaacgttcctcgaccctccccggctgcttcccttgaggccacccacagcgggtctccccaggccgccctcaccccccgggaggcggtcccaccgtgcctagtacaccagaaactgcgggggaaaacatctctcccccacatggtgttgtcatgacgccccccccgtcgttctcatttcggatatcatgtggtactactcacaagatctactgttgtggtgggtgcagcacaaaaccacacggcgttatggcacgcggaattaagttgaattcccccgcgctttattcactaatacataattggccccccaaacatgagttctgccataaccactatgcccctttattaacaataacaatagtactcttcttcgcttacatccagcctaagttttgtcccccaaccccactatttttataaaacatctactgcggcgctcccccaaatgaacacaaaatatctatgtgccaccaaaacgcccaacggaataaatgcgcttcgcctccatatatctttctatgtgcccattgggattttccccaaacacaaaatcactccccacccacaaac

SEQ ID NO: 677119 - DNA, 901 bp, Homo sapiens
gctgtgtacagctgctcctgtgacctgagctcgggtgtatggggccgtaggaacctggatccggtggccccgataacggaacgcccccacagcagcccgtggatggatgtgagtggtctcccttgatcttgagaatggcatacctactcgatatgagccagtggctagaacattgcgtgtcggtgcctatgaggacagtgtacaatggcccgtgatccccacagatggccacattcgtgtgccctcaagagtgtgagagtccccaatggaggaggaggtggaggaggacatacacacaatcagcacagattcgtgagagctggcttcactgagagcgaactggcagagaataatgaagcatcacacaagtgatatgaccggcgtgactggacgtctgtgcacacattaccagatactgaccgagagagatcaacggataaccctggctgtctctcgaccgcacactgtacagaccagcgaccctaaacgcgcacatcactctgcgcacaatgggaaccccccaaactaggctttgcccataccagaccaacccagacacaacggatccttagatcgctgcccaagaaaccttaacagagggcactacagcattctgcatctacgatagccacatttgaccagtccggtttccaccaccggatgcatccttagaaggaccccagcagagaaacaactacctcggcgtgacccaaacgacgggacagggacaaacaaggacacacagcgctatggccattgaaacgactcggacactgagaccacgcacactcacttaacgccgcgtcacgacgaattgggcacacgtatacaacccgagagggatcgtaaacgccatattgagatacacagaagactacccgaaagcatacttacaggcaac

SEQ ID NO: 677120 - DNA, 543 bp, Homo sapiens
  misc_feature (15)..(15): n is a, c, g, or t
agttaaaagttaaanattgttcactctgagctgtgggctgggctctcagatctgcacggcagaattctcccttaaatattaggaacttcttcctgcttacaaatccccactgacacctttgggaactctctgtgcaggatggttcagaatccatcacccagactgctccctaagtgcaaagaggagggctgggtgatgtggcattcactgccctcttgtctctctgattcagaaactcatagcgacaaaagataacagcaccaagcaatgaaactaacattagtcaaatgtgggtgggaggcagctattgctttggataccaaattaagtggcttatcttcttgcacgacacacattttaccctcatagcattaaaacggagttttaaacatgcacggtggattttctcccaagcactgtgtcatcagtatgatgaatattacttagtgaggggcacacatctaagtcactttttgtattgttttgttttgttttgttttgttttggagacaaggtctcaaaaaaaaaaaagttggcggccgc

SEQ ID NO: 677121 - DNA, 553 bp, Homo sapiens
atgtgggagaaaggaaatacccattccaacccactgtagtatcctgtcccaccaaaggagaggaaaaaaactgaaaagcgcttgtgaagttaacagttcagaagcacaggctcactaaaagactaagaacctaatcataggactgcaaaacactttccctctcccacatcttaataccaaattactaaagacctatttaccataattccttttttacccaggtacatcatgtccagctatcaagaaaaaaaattacaaggcatcctaaaaggcaaaagcagtttgaagagaccaagtaaaactaagagagtaagcaccaaaaccagactcagatatggtggggatactggacttaccatatgaagagattaaagcaactatgactaatacactaagggctctaatggataaagtagatagcatgcaagaatagatgggcaatataagcagagagatggaaattcgaagagagaatcaaaaagaaatgctagcgataaaacaaatttaaaaacccacttgtacagaactgaagaatagtagactggacacagct

SEQ ID NO: 677122 - DNA, 508 bp, Homo sapiens
ggacctttcatgtcccccctaagtgcccggacccttccggagggggcctccccgcctgtgtatataagtttcccggtatttctctgctacagggagccttttccttttgggggtgtggtttttgttttgacctttcctgtcacctttacagggctgccgtccaatgtaggtggcgtgtatgagtgaaaccgggcctgggtctttgggaatggagggcaggggtccttttcccttggggtcccagggggttttgcctgtttacccaggcctttcttgggagcccctcgcccaaaaattcagtttggccaacttggggggttgtgtccccccagcccgcccttcttttgggttgcccagctcccctttttccctcctgccccggttagaaaaccgagtttgggggccctttttcccttcaggcccctgtcctttttaacaggtgcccttcaattgtattcccaccctcctgcccccgtctttttttaaagaaggaccctcgggcttgtta

SEQ ID NO: 677123 - DNA, 333 bp, Homo sapiens
ggattggggtgatgcagctatagcatatgcaggtcggatcacatatcggatatggacaactctagaacaagttatcacagaaactgcaaagaagatatcaactcctagctttacatcctactataaaggaggataagaacagaaaatgaataggcgagaagctggtcttattttaggtataagcccatctgttggcaaggctaagattagaacagctcataggagagtcatgattttgaatcacccaaataaaggtggatctccttacgtagcagacaaaataaatgaagcaccagacttgctaaaaacaaccaccaaacattgatgcttaag

SEQ ID NO: 677124 - DNA, 234 bp, Homo sapiens
ccagtacggatgtggcctcagtctctgttggaggctggcagttccaccatcaagtacaccacgcaactccatcctccagcaggaagagctattatcactgaaagtgcgtctagctagctctcgagtcccacagtcctctaggcccctctctgcgctgcaaagccctcttcctcaggtttgccttttcactctcctggtcctccagttctccccagtctgttcccaggttagatg

SEQ ID NO: 677125 - DNA, 437 bp, Homo sapiens
atagtaagtaggatagtactactcttactgagtgtgattccatgagatgagagcacaatggtacattaactggattctgcccagaagtcctaggaaatcgccactgttcatccgtaaaccctgcctcctaaatcactgaatctgtactctgtatatctattagacttatgtcatctcccgaaatgtcagatatccaatagtcagcgaataagggaaacttttatctactggaaaggaaaacaactcgatttagaacaatgtattcatgtgtatctaatactgaaatggagaaaagagttaatgttaaagaaaaaaaaaagacactatagacatggacatggaaaagagatgtaatgttaataaaaacctaatattacctgagtaacacctcctgatgagaagtgctatattaaatataaacccattatgtggtttaa

SEQ ID NO: 677126 - DNA, 343 bp, Homo sapiens
ggcgttgatgcgtgcgtgctgctctatgatggatcccttcgattgtggactcagagggttcgggaagctggcagtgaaccttcctcggtaagaggacaggagacgacacatgcaccataaatgggtcatgggacggaatgccatgaccagcactagttaacttcgaaaacaccttctgccaccgaggcaagagggaatcccctgcctctccaagggctggcgttctcctccatgagatgctgacgggataaaaggcagagcacatgtgtgcagagaccccatgacacagaaacacatcagctcgcttggggcagcagcctgtgcccagggagatggtgagaga

SEQ ID NO: 677127 - DNA, 184 bp, Homo sapiens
gacagagcaggaagaagcgtgcaattgcgcatcagcgtgcaagacaccggcataggcatgatccaaccaggatgtgagcgcccatgttccaggcattcagccaggccgacaactcgctgtcagcgccagccctggcggtaccaggtttgggcctggtgatttccaagcggttgatcgagcagat

SEQ ID NO: 677128 - DNA, 112 bp, Homo sapiens
tctccaccttcccatcagattagttagatatagagttttgacacacaggttctctttggccccaccagagcagttagtatacatgagttgtcgattggttcattacaccaac

SEQ ID NO: 677129 - DNA, 143 bp, Homo sapiens
tcgggaggtggacggttgctagtgcgccaagatctcttcactgtactccagccctgggcgagagagcaaggctcagtctccaaaaataggcaaacacacaatttgtgccggtacctttgatagggggcgtaaacagcttccgg

SEQ ID NO: 677130 - DNA, 189 bp, Homo sapiens
ggccgactctagaaggatccccaccagagaagagtacgagatactacaaggagaagagacgagactcattcactttacgggggaaggcgcttcgtgaagctagccgttatttctcttgtcctttcgtacagggaggactttgaagtagattgaataccgacctggattactccggtctgaactcatatc

SEQ ID NO: 677131 - DNA, 846 bp, Homo sapiens
  misc_feature (276)..(276): n is a, c, g, or t
  misc_feature (569)..(569): n is a, c, g, or t
ggagaattgcctgaacccaggaggcagaggttgcagtgagctaaggtcacgccagtggcatatgcctgggcgacagagcaagactctgtctcaaaaaaaaagaaaaaaaaaaaggaccaaaaacctttccctttttcttccggtttcccttacagaagacacaggaaaagcttttgggcctctagaatcctttggtcaagggtaaatcctaagggtgacaaggagtttgcggcaggaagaagggaggagccataagggaagagaagccagtttgtnggctttggggcatagaacagggacaaaattctaggcattgaaacgggtgtggataaatactggaaatttttttgttcttacccattctggaaacgtcagcttctggcatacggtggtttccagccggaggtagggcaaaggtgagatggagaaaatagccatcagctcaggaagggtctaagtaaagggatgggttggaacaaaacgaaaaagcacccaaacaacacaacacgacacaacaacaactgtgtgggccgcgacggaccacaaaagaagtctctacaacacccgcngggggggcgcgcacccacgaggatggcaacaggggccacagtgtcacagaaagaatcgggcgagatacagtgggtgtttccccccaaaaaaaggcgcggggaccgggggtgccggaacaaccaaggggtcgcggtaacggggttcgaccgcggccgctgcatctctgccggcgcgccggcgaccaccgaccaacacggggaagagaagagaagacgacgacacgacggcagagaagacacgaggaggtacgaacggggacacgaacagtggcaagaa

SEQ ID NO: 677132 - DNA, 433 bp, Homo sapiens
tagcacggtggtgcatgctgtagtcctagctactcgggagctgaggcaagaggatagcctgagcccaggggagttggggctgaagcctgggtgacagaggaagaccttgccttcaaaaaaacaaaaaaaagaaaagaaattctttatattacaaagaattcccatataccttccacagtttcccaaatgttaatattttcccacatttgctttatccttgtctcttgatattacatatgctggttatatttttctgaaccatttaggagaaatttgcatacatgatgactgtttcctcctaaatactccagttcttattttctaaaaataaggacattctcttacacaaccacagaacaattatcaaaagcttggaaactaacattgatacaatactttaatctacatacctcattcagatttcaccgtgctt

SEQ ID NO: 677133 - DNA, 679 bp, Homo sapiens
aataagcttcttaaaacagtcctttcttacacctgcccaggccagaccctcggtcttggcctttttcaggagctaggatatctgcgcctggtgaaaatgaaacgaattcctgatttaggaattcagtttttcctcctcactccagctaagcactcacttttttatttttttttttttattttgtggaaaacagagagagactccgcgccactgctgtgtgctcccccgcgggcgtggagaggtgccgggggagaggcaacatctctgcggcctcacgtgtgagaagactccccaccctctccgcgggtttcaagcagcagattttatctgtgtgcaccctacaagccctctcctgaaagaaatgatggaggatatctagcggagatatgtgccccaacaatggaccacacaaaataatatttattatatttttatttattgtgagaaaaaacaagagagatgatgggagcaacgtgtgagtcatcccccaggcggggaggagaaggagaagagaagagggggagtatatcaatgcgcgcagacaccagcgcgtgacacacgaacacacgacgaaatcacgagtggagtataacaaaccaacaaatttaatcacgcgaagacaaaaaaagaacacaccacggaaaaaaaaaacgagcgagaaaaataaaaagacacacgc

SEQ ID NO: 677134 - DNA, 858 bp, Homo sapiens
aacctttcagaccctctgtgtgggctgggctggtcagaatcaggtgtacctccccgacaccttctttttcagtgatgttttctcttctccctgcctttcctctgcctcctcccctgccagccctagcgtgactacccagagacaaaaaaaaaaaaaaaaaaaaagggggggtggggcccagggggcttcacggccgtgtaattcccaggcacttttggggaggcggccaacgggcggggcagatagactttgagggtcagggagttcgggagaccaggcctgggccaacatggggaaaaaccccattctctacttaaaaattacaaaaatttacccggggcattggggggcggggcacctgtaattcccacgctactgggagaggctgaggcagcaaagagccggtttaaaccccaggaggcagagatctggcaatggagtctgagaatcgtgcctatggcactcccagttggggcaccaagatgtgaactttctatctcaaaaaaccagaaacaaacaaaagggcagctggggttggtccactggtaggggcagcttttggagcctgccacattgggccgggtaaattttccccttcccagtcgggatttggtcggctctttctttccccctcaccccggtataccttctttcacctcccattctctttcacttgtgtaggctcagtctctcccacgcacctttaatgggcgggccgtggggggctcctcttaccacgctccttcagaacgccggtccatcaggccgggcctcagtggcccagccattttgttgttccccgtggatttgttcccccagaacggggcgacaaagatgggcttttcccccaggttccgg

SEQ ID NO: 677135 - DNA, 679 bp, Homo sapiens
ggactccattattaggtaaaatagtcatcaattacatgccatagtccgcagatgctaggtgatatattgatttcatttcagtccttcatgttaattgcatagttgactggagttataagatgtaaatattttgaagttggcttttggagaaggagaggggaactgtacaagggtgggagtgagggagggggttgggttatatgtagcctcaaggtgtctcaccaatgcgcgcatggcgaatgcagtagcgcatgaagatctcactgcggaaagaatgcgtggaccttacgggggggcaccagcggctctacccacgggttggcgagcctttcggcaatactgggggagaaacggggggtcaaaagaggatttgggcccgtcgggagacggaaagagtcccattatgcaggtggagagacactgccgagttcagaacgtgcaccaaggggcgaaggggattgaggctggagttggtccattggggaataggggctaatcaataaagaagtgtgtctgaatgctagcaaggtaatctcttttgggaaaagagttagggaaagcttcctatggggcacgccaaatagggaatgatccagagaagggaattgtaggtgagaaatatcaggtactaggaaggctgggggactggtcccattgtaatgggagatccaaaatacat

SEQ ID NO: 677136 - DNA, 814 bp, Homo sapiens
  misc_feature (655)..(655): n is a, c, g, or t
agctccgctgcaggtatatacccgagacatgaggcgtacgcccattgtgaggcgcgttgcagaaagctagcacggcccgtcgccatgagcgcctgctctatggttcctctcattatcaagtaatcttcgactaggcccttgtgtagagctcagcatgccttactcactagtggctatcagacgtaattcatcatcagcctagtcttgcggaaatcgaggatacgaattgtgtatgcgatctgttcatatcacaagaggaatagttggcccaaactatattccaggaaagcgctagtcacgttgcgctaacatatctttcactctgagtggacatgagaataattgtcaagttggattagcaagtccacgtttgcacacttccacttccatgccactataacgtactcatgaaaactgcgggttgataacagtcggtaggatccttataatcgacaccaggtgcgtcatgctcgaggcatgagaataggtgttgctagtttcctcgtgcaacagcttaactacggattttgactcggtcacggtaaagcttgccagcgttgccacgtgatcaagattgttgcagttacgagctgccacttggtaactccgtgtcagtctagcactgttatacagagaagaatggtgacagtacatnaggccttagttctattgatcttgacgtacgaagaggatgcatgctggagagtctatgtccccgtccttggtaaagcagcggagatatagcgtggtccttgtcgctgtaccttaaggtggaactgaatgaatacctggtcctatcagagtgttagttgct

SEQ ID NO: 677137 - DNA, 219 bp, Homo sapiens
  misc_feature (3)..(3): n is a, c, g, or t
  misc_feature (19)..(19): n is a, c, g, or t
  misc_feature (30)..(30): n is a, c, g, or t
  misc_feature (70)..(70): n is a, c, g, or t
canttcagccgtgggcgancagaatgagantccagtctcaaaaagaaacttgtatcatggctagcaaagnggaatttggttttatgctaaaataaaatcctagagccaggtgtggaggcgagtgcctataatcccagctactcagaggctgaggcaggaggatttgttgagaccaggagttcgagaccagcctgggcaacataataagacctcatctca

SEQ ID NO: 677138 - DNA, 626 bp, Homo sapiens
  misc_feature (610)..(610): n is a, c, g, or t
ttatcggtgtgtctattgtgtttgatgttcttatgtactcattttattcatgatccacattttaacgatactaacgcacggtctatttggtttcctgttgctggtattttgctgttagttataatgtcaatctgatcatggttggaaataacgccttatgtgaagcatataatgtactcatggtccaactcttcgcattgttccatgggcgtacctcatgcggaaatgaatttatcatgattattttcattggtaatatatgatgcctatagttatttgctttccattgtgatgtttagttcggaagtgggtatggcaattcagtctaatcggataaactaagatgtatatcattgggcttccctggagctcctaacacaaggattaaaaagaaggcccagctggggctatccggcaagcaagcccgagactgctacagatgaaggagcagaggttctgaccgagaggctgagcccagcacggggtctgggccacttcagggagccgcggattttatgttcagaaagtgatcctggtttctaggctcctgcatctgcagaactgcgatcagagcgtgggaggaggtgggggtgacttaaatcaggggtantaactcggggtacatt

SEQ ID NO: 677139 - DNA, 111 bp, Homo sapiens
gtgggttgggtcgtacttgcggacctcggcgaagaggaccccttttattttttttttctttccaaaatgggcagcctccagatcgcgcacaagtgtttatctctgttaccg

SEQ ID NO: 677140 - DNA, 434 bp, Homo sapiens
cccaatgcgagcagggagactatagaggatgccccggcacgagcacagcgctcgaattacaggcatgagccaccgtgcccggcccagcctaattctattctttcttctctttgcaggcttttttctttttatcgttttacaaccacgtgcgggctggattccatttcaaacctctgcatctcagttgaggtgacagaaagactgccttgtgttcactggaactctgtgccactatgagaggctgttctcaaaccccagcatggaataagctgcctccacaatttgctatacctctataaggttccctgttccttagtagcttctcactcttgcagacaaactttagtataaaggtgggcttcccctctgcaccatttagttcccaggcttaggaggtgggtcaagaaacactgctgccgttacatgagcatgtg

SEQ ID NO: 677141 - DNA, 435 bp, Homo sapiens
  misc_feature (5)..(5): n is a, c, g, or t
ccccncacgttcaagcaattctcctgcctcagcctcctgagtagctgggattacaggcgtgtgccatcacgcctggctagtttttgtatttttagtagagatggggtttctccatgttggccaggctggtcttgaactcctgatctcaggtgatccacctgccttggcctcccaaattgttgggattacaggcgtgagccactgtgcctggcctgtgaatattcttatccatacttgttcacatttgtatttatttagggtagatgcctagaagtggaatattaactcaagcaaagattacatgtatttttaattgttgcctagttgctgtgaggtctgtggaagacaatttataccctgacaagcaatgtattagaatatatttccccccaataaagatggcattatctaactttatctttccaagtttatgtt

SEQ ID NO: 677142 - DNA, 284 bp, Homo sapiens
gtagagattacctgtactcctgagccggactaacagttgctaacgataagcctacaccagtatctctcatcgcgttagcacatcactgtgacgcatgcatgtgttgcgtgcccacactcttaggcactgtgtcgacaccacgctcactcacgctacagagcccaactgtctgagtcgctagacgacactctcgatgctgacgttcgtcttcgcttcgtttatgtgtcgcgcgcctcactgcactctgctctagcacgctccgtctgtcgttccgcttatcgtcg

SEQ ID NO: 677143 - DNA, 478 bp, Homo sapiens
  misc_feature (395)..(395): n is a, c, g, or t
caacgatggtcctcagcttactgcaactccgcctcccgggttcaagcaatcctctgcctcagcctccagagtagctgggattacaggcacccaccaccatgcccggctagcttttttttttttttcccaaaaggggatgtttatttggtaataaaaaataataaggggaaggaaaatatgtacttggggggggtgccggctggggtgaccaagaccatgagagtgtccaagaaataaggggccaagtcaagaagctctcatagagattaattaagggggagaaatatgagaccattagtggtaaagaacaaatcaatacccggcagtgtgctttggggaaaaccaaataacttctccaatttccggagtacacagagggtaccggcctggaaatntaaaggtctagggaaagggggagatgatcaagagtgggggtggcctagtcacaccaaatgtgtatttattacatccggctcct

SEQ ID NO: 677144 - DNA, 315 bp, Homo sapiens
gttcgctctatgagatccccgggataacataacttggttccatcacgctgctcactgtcttcgtggtagaagaggtccatcgactcaagaacagccagtccaagattttcagccgtcccaatggctacaagatagatcatatgttgctgctgacaggaaccccattgcagaagtaatctgtaggagctcttccatctactgagcttcctgacccgagagagatttaacaacttgaggggactcctgcaggaggttgctgacatattcaaagaggtccagatcaagaaactgcatgagatgctggagccacacatg

SEQ ID NO: 677145 - DNA, 150 bp, Homo sapiens
tggtgttcttgaggatccccactgttgttcatacctgcactgttgttcataccaacccaagtcaatagaagccggcgtaaagagtgttttagatcacccccgatacagcgaccaggtatgaacaacagtgcaagtatgaacaacagtgca

SEQ ID NO: 677146 - DNA, 117 bp, Homo sapiens
tcttgaggatccccgtctgccacgaaaggcacgcttcttgaagcccactccatggatgctgcttgttgaatgttgaatcgtgatattcatcgtggttaccactatcctgggctgagc

SEQ ID NO: 677147 - DNA, 373 bp, Homo sapiens
gtattcacatcagagcaagagatgagtctgcagaagatcgcatttaccgtcacttggagcctgccctggcttccagctggaacttaaccggatgcgtaacttcgatctagaccgccgtgccctgtgccacccacaagatgcacctttacctgggtgctgccaagggctgaaggaaggcgtggaagtgatggaccataggtgcttcatccgcgccatcatcaggcactctgacctgatcacaaaggaagcctccttcgactacctgcagaacgtgcgtgagcggctgctcctggcggccatgcgcgagctcggaggcatgcgaaggaggctacctttgtgactcaggtcagagtgcctcatgatagcgcgtata

SEQ ID NO: 677148 - DNA, 225 bp, Homo sapiens
caccttcagtacgtctgctccgaccgtgtgtgtaacaccagctgtccttagcgatagtaacagtaggacctacctagagagccaagggtgcttgctggcagagtccctgtccccagcccggctatgcctggcctgtccttgccttgtgcagctgactatgccccctctagtcccctgcttccccaagttctgctgtgcggccttgaacatctcctccaggctccc

SEQ ID NO: 677149 - DNA, 838 bp, Homo sapiens
agcggacgagtccgttgaggctgccaggcgagtcaggtctctctggacctcgcctgactcggctgggctgtgcctgaaattgacccagctccaccatactccttgattatgagaaaacaaggagtaagctcaaagcggctgcaatcttccggccgcagccagtctaaggggcggcgcggggcctccctcgcccgggagccggaggtagaggaggagatggaaaagtcggccctaaggcggcgggaaaacttgccaagggggctccttggagcgtcctccccgggggaaggattccaaagctctgaaacgagcgaagaaggctttggagctaagaggtggttggccaaagaccttttctttctcaggccccttccaagttacgtcctgtaattccactggcgcagctccggggaacaaggtgcacggaacctgcaggccgcggaggttctccagacagaaccactctcggcatcgcttgtctttgtggcacattttacatttggttacatttagtaacaccttttcgaaaactgatcgtcatttctctcacctctcatcttggcgaacgggagatgactttttcgacactgaaatgggacttaattattcatacttcaagaccattatgaagcaccttcgttttggaaggactgtggactgattattgaatgacagggcttacttgaattatcctcttataacttagtgcacatacaagcgccttccattctttatccaagaggtaatcataggcttcgtggtattggccattcatggggattaatgacattaattgggagtagaaataaaaactgctgggaatgtccacagaaatgag

SEQ ID NO: 677150 - DNA, 412 bp, Homo sapiens
cagagtgtacacgtgattgagacgctgaccaagtactagacctcagtgccaaccgaagtgaacagcatcaacatcaaccagggacagaatcacgtttgcaggaagccccggaaggaatgcaccattgacttcacaaccggatcggagctgctcatcaccaaggaccaagaacgggcacctggctgtggtcgccaccacggctgaaattctaggtgataaaggcgcacactgaaccctacacaaagcccaatgctttgcttttctcctcctccccttcccagttaccaacgactcgaacttccagaccgggacccagggacaccccgaagcccacctgccatcctcccacctcctgcccatccctctcttgagggcgcagcaggggccaggagcctacccaggagtgggccag

SEQ ID NO: 677151 - DNA, 194 bp, Homo sapiens
agcagcaattcggcttgcagtgggtccagtgtcttcgcaatgtgtgattgggtggggggccatccatatagtcactccaggtttatggagggttcttctactattaggattatcgcttcgaagcgaaggctactcaaatcatgaaaataattaatattagtggtgttagagaaatgaatgagcctacagatgct

SEQ ID NO: 677152 - DNA, 470 bp, Homo sapiens
ggtcgactactactactaaattcgcggccgcgtcgactgcataacgaggaggacttaaggactgatgtttgaatctcactgggaaggagaaataaaacagacactgtgagtagatgggggtggcagaatggatttattgagaaagtggagagtgaacaaatagaaaaaggagggatcatattgggggggatggaaagagagacaactggaattgggggggggcattgccaggacaagctagcaaccgaatgtaggggaaattcccagggtgaccttagctaagactcctagcaatggcagatatggatcctgaactggccatctcctgtaaccaggcaagagcagacacatctgaagcaaagcagaacaatgaagatcaaaacaaagatgtggaaaaggaaatccagaagaaagagatcacctgggaagaaggtcgacgcggccgcgaatttagtagtagtaggcgccgc

SEQ ID NO: 677153 - DNA, 886 bp, Homo sapiens
ctcggtgagatccgccactatatgtggtcttcgcggcatattgggctcaatctcacgagatgtgtggtgtacagattctggtgctgtgttcctcggtgcctgctccgaaattgttgcgccactggagtttggtgccaccgggtttgtctcctcacagccgctttctgggccctctaatgggaccccccgcctcttttacgcggctttcccgagcccggtgtgaaccccccttttgccgcaccggtatagtccggtcttgccggccttcgaaccaaggtggctccccacggacatctaccgcaggtggtcagaaattggtgcaaccgccaggctgtttcatccaccccagattcgcgccctggagcggcaagcttgttatgcaaaaccaacagggggcgggccttttcccccgcaccagccaaggaacagtacccaccggcgggttattaatgaacagctgactcaacagatcgctctgtgtttgcatcgcacgacccagctacactccccgatattgttctgttcgccaagaatgttcatggcgcccctgcaacaacagagaggtctgctcggttataaggacgtagattatatgggcgccggctctggccccccctaggcgcaggagaactcagcccaaaacagcctggctttcatcacaaccccaagtagggggcccacacatgtgacccggaggtgtgggaaaatcacggggccacaacaccgtctcctcatgaggaatcgaagagaacggagggggctgaggaaaaaaacaagacgaccgcgggggtcagaaacagtttcccgacaaggggagattagacaaaccccttttctctgccaaaaaggggtccagtatccaacccaatatgccccccaacaaaca

SEQ ID NO: 677154 - DNA, 177 bp, Homo sapiens
  misc_feature (124)..(124): n is a, c, g, or t
ttcgagctcgccacccctaaaaataagttctacatttctttaatgatgttaggtcatagttagattcattatctgaaagataaaaaagaaagtaagtgaatatgttaaatagtttagacacagnggcccatagaaaaatggtcgtttttcacgtttttcgaaaattcgcgatttttg

SEQ ID NO: 677155 - DNA, 328 bp, Homo sapiens
ccggcaaacagcgtgcggtatttgctcaacccgggagggtgcgggacaggtccggtcgggaagctaggcgacgaagccgcgcgagcagaagtcccacacctcttcggcggtgatggggtgggtggtcgcgtcgtcgggaccgccgctggattgcgcgatgaacatgaccgtttgcatggtcatcgcggccacccgcttcgggttgatggtggcgcgcagcttgccggcctcgccggccgcctccatcagctccgtcagcaacgcgagcaagggcgcatgcgcgaccttgacctcagcggggtgtgtcaccagcaaacgcggtgcgaag

SEQ ID NO: 677156 - DNA, 841 bp, Homo sapiens
gacagggggaaatgtgcccatttcctgtcgcgatgctttaccacaatgtctgcccccattggcgccccttagaacagttttggacccccttcgagtcctttgctcctagctaactgttccgaaaatgctgtcccgcaaaaacactgttgttgctcttaggcagcgggcggtgttactacattttcactcgacgcaaggataaaattaaggtcctcctcgccgcccccaaatagttgacgagtcgcctagtactccgctctgcatacaagaccaaccctgcggtaaagtaaatgcgtgtactcccatgccattgttaaccaatcggggcccaacacacaagtgttgttcttgcgctatctattagtagcgcgctataataatccgcccatggagaagtaaaggctaggttcttgctacagagtgggcgcgaccaacatactcatgcttctgtgggccctacgcccctcgcccagaaattcaaccgattacactggaattagcccagtacgcaactgtctcgccctcgatgccagcccacccctttgtgactcccccactcacctgcatcagttgtatgacatcctcaggagggccccgcggctcgtcgtgcccatcatgagccccatggcttcctattgaaacaaatcgcgggtacttcccccccgcctcttcgtattgttccctgcttctaagctccatcgacatcgacttccgatgccccgacggctggcattcatattgttatgtgtcaagtggaaacacgcaggcccgcccttgacataaaaattaaaaaaaaaatcccaaaacaaaaccaaacacccaaaacccaacccccacaaaa

SEQ ID NO: 677157 - DNA, 994 bp, Homo sapiens
  misc_feature (994)..(994): n is a, c, g, or t
gagtgccctgagtgctgatgcagagagtgaggacagtaagactcaagaggctggagattgtcaaacttcagtatcccacttggctcttgattcttggtgaatccatccctggggctcctagagggtagatctgtttagatcatgaaactaagttcaccatccttttcctctgatccccggctgcttactaagtctaacccagagatatcacagtccggaggaatatttgagtgcaatgacatggcattgatttacagctgtggcatgctgctctgcaagtaaaattatatactagctctagagagagcctagaagttagacacaccagttgagtattgtaccgactattaaactgagagccactgaagtacggttggctctgacactgtttttgattccttcaagtacagtgttcaaaggacgcgggagatgtgtcctgtgcaaagtggcatgacctggcaggactgtgagtacaaggatgctgcataagcggtcacatggagaatgctctggctaactcgtggggatacaggagcatgttacgattatactccgaaggctacccagaactgcagattcagctccagccgggggcctgtggtgacagcccaagtacgatgtctcggtgttgtgatcctagttatagagtagaagccaggaactgggagccattttgtgacttgcagttatgtttttagcaacatcctcatcattctccctttaggctgatttgggtaaacgggccccagacggggtggcggggtttaactcagcaagtccaatcggtggggccccaattgttcccggagtttggtgtatccggcggagcctgatgggaccgcggagtaacaccactactgctacttcgaagtgttccccagcggtcccgacggtggacaccaccacattggccgacacaataacacactaggatgctccgagtacacagataacgcaggattcgcattaaatatagtgcacgacaatctgatgn

SEQ ID NO: 677158 - DNA, 817 bp, Homo sapiens
gcagacagatcacttgaggccaggagttgagaccagcctgagtgacacagtgaaaccactttcttaactaaaaatacaagaaaaaaaaaaaagctacacctaattttttggagactcaaaaagagtcctcaaaaagaaaaaaattaaagcagccttaaatacgggataaatatttgggtggtgggtatataatttttaatatataatggctttttatgtataattatttttatgtatggattcagtttccccatatttggttgaggattttaatatctgtgtccatgagagatactggattggtacttgcctgtgtgagggtcctgtgtccggatttgggaataatggttatgctgacctcggcctcccaatgtgctgaagattacaggcattgagccaaagcgcccaagccttctttatatatttgggataatagtgtgacttatcacaatgtgttgtcagatttgatcaggatgctttgactctgttcaatcaagttaggcagactgatttcatgacagtattggaaccttccttatccattgaccgtggatattctctccatctggtaggctactacctagagggcctgtcatcagagttaattagtttcccttatattagatcgtgtacataattggttaatccctaagttattcacactcgggcttctgttacatttaaataaatttcttcgattttcaatccaattggtcttgcggtattaggaaaccgtgctgttgtatttaactgtaggcggtaccggataacgggtaagccggacttgtatgttaaacccccaattcacagatgtggc

SEQ ID NO: 677159 - DNA, 102 bp, Homo sapiens
gtatatgcgtctcattttattgtgtgttcttaatgtgggttcgatgcaagggttttcttggtttggttttggtttatgttttggtttggagacagcatatca

SEQ ID NO: 677160 - DNA, 278 bp, Homo sapiens
atcagaggaacacatgcctgcccaccagcatttgttttcaatctataggtatttatcatgaataataattaagctgttatgaaactgagtcatgagatttcagacattttcactttgacattcatactctggcagagataccaaccctaaagacagacaatgctgttaagtatgacctgtgtattttaaacatacaaggaaaaatcgattttaatactgaaaaaaaatttggttattggatttatttcttgcaataaatatatggaatacccactaaa

SEQ ID NO: 677161 - DNA, 109 bp, Homo sapiens
ggctcggacctaggttatcttattaaaatagtcaaacaaaaaatatctgtacattataataccctgtgccggcaaaggtgcaatgaaatgtgcatttacttattttttg

SEQ ID NO: 677162 - DNA, 155 bp, Homo sapiens
ggctctatagaggatctatttgggaatgacaatgataagctgggcacagtggctatacctgtaatcccggcactttgggaggcgaaggcgggcggatcactttaggtcagagttcaagaccagcctggccaacttgcggaaccacttctctacgg

SEQ ID NO: 677163 - DNA, 272 bp, Homo sapiens
gaaacaaatttccaattaatttttatgtcagagtccccttaagtagtttcacttttgagcccccgaagtgacctatttaaaaattttcctgtgaggtgaaaaccaaaaaatcaagtttgggaaaagggggtattaacttatcgatttagctttaaaacaaacccagttgtatttccccacaagggttttttttaattttggggcaaagaattagttattttgttaggattccttggaaaattacatgtgaaaaaaactgggttaaaatgtga

SEQ ID NO: 677164 - DNA, 529 bp, Homo sapiens
ctataatcagccgtaccgtctgagcagctgggaacagggggtatcgcaaaatcatcgggaagggaaaggttgctttgttactcatgccctatgcctggtgtgattaacggcttgtacaagttacgtttcacttttaattcattgtgcttgaggctttaattaaatttgggggatcccgttcttagagcagctcgtactgactgaaggtgcatgcgcttgaatgatgtcacggcagttcgttgaacacacggcggatgttcgtcagtgtccacagcgcagtgtgaaatgagggtagcagtagtgacgcccatttccactggcagtgctagatcctcagaaactcatctcgaatgtagtacgttgtgccgggtcacgcgtgggtcctctccgaggctcgtgagttgcatcctcaggagtagtgcagcgagcgagatactggaaagtagtcctcaaatcttcgatatcccagctatggactttctcagcgagcagatcttgcgtgtagaggcacaggatcagagagatggtg

SEQ ID NO: 677165 - DNA, 575 bp, Homo sapiens
  misc_feature (57)..(57): n is a, c, g, or t
  misc_feature (143)..(143): n is a, c, g, or t
  misc_feature (185)..(185): n is a, c, g, or t
  misc_feature (400)..(400): n is a, c, g, or t
  misc_feature (422)..(422): n is a, c, g, or t
  misc_feature (442)..(442): n is a, c, g, or t
  misc_feature (450)..(451): n is a, c, g, or t
  misc_feature (470)..(470): n is a, c, g, or t
  misc_feature (472)..(472): n is a, c, g, or t
  misc_feature (474)..(474): n is a, c, g, or t
  misc_feature (487)..(487): n is a, c, g, or t
  misc_feature (508)..(508): n is a, c, g, or t
  misc_feature (518)..(518): n is a, c, g, or t
tataaggtaaataaataaaaaaaaacttttccatattttttaggaattattaggatntggaaataaaactgccctaatcaaggtaatcaataacattctacctttttaagttttaaaaaagaagtttcatatccacatgagangatttatattatgcatatacaaaagtattttgtatgtgagcntgctacaccaagaggctacagtgacatgtgtgacaatcatttccttgaaactctgctaaaatatgcatttgaccaaacaataggccttctgcagctaggacaagcaatcacatattatacagaatgcttagaaccaagattcagatcttaatgagacttattgaaaagttctctgccccataatgaggcacccctttaaaaatatggtctgagtngagacataaaaggtgtacattngggctgttgtggtaaaatanccaaaaanngaaaaattatggttcgtgngngnggtctattctttnaaaaaacatacatacaaacantcaaactatnaacacctttacacattcacaacatctgcactaatgcataaaacttcaaaacctagaa

SEQ ID NO: 677166 - DNA, 268 bp, Homo sapiens
ttcccccctttttgggccccgggattttttcccccccccctttaaccccggggccccgggggggtttccccttttgttcttttcccccccccaaggcccttatttaccctggggggggggcggggggggggggcccctttcccccctggaggtccgggggttttccccctcccctttttggggtttttttttttttttttaaaaaaggcttttttccccggtttttttttttttttttccccaaaatggggccctggcccccggggga

SEQ ID NO: 677167 - DNA, 522 bp, Homo sapiens
  misc_feature (155)..(155): n is a, c, g, or t
  misc_feature (180)..(180): n is a, c, g, or t
aggttgactatagtcaatggggccaatggagccaagtgtatggaaaccaccccagtatggccagtatatggcaaatgggtggcaagtccccccttttggagtatacgggcccccatggaatccacaaggttttggggtagatccatccccttttnctgcttggatgggtggatttggggntcaccctccccaaggacaagctcctccccctgtaatacctcctcctaaccaagccggatttggtttggcaagttccccaccccagtgagccggggctttaaaaaaaaattgttattcatgatagggttcgatttcctgtgccccttttaaaacattgaagttgcctccgggaaaatgaaaattttttttttaaaaattgaaatgtttgggccctttagcccaaatttgctttggtgaaggacccgttttttttagttttccctttttaagtttttgttcatgatggatttgaccctgttttttttttttggcccaaaacttaaataaggtcctttaagccca

SEQ ID NO: 677168 - DNA, 878 bp, Homo sapiens
gcttgcgagtggagtgtccgctgctgcccgggtctgcaccatgatcgtcccggcttgcatcgacatcagtgaagaagatgcaggctgctgacgcttcgatgcttatctgaaatctaaaggagctgaggatccaaaagagaactcggaagcgtgggcttcatggtggatgtcactccagattattgaacgcctgtgatggtgttgtctcgcaaggaggtatgatacccgatgttggccataagtgtcgatgaacaggtggtggtatccgctactcttgatcctggagccatacatagcaagaagctttgatggaaagcctatgtgaatagctgttccaaatttcggcgaaggtgaacgcccggctctgagactgcagttgttaatgcgaccctttgccacgggatggataagaatactcctgtagtgatacacggtgtatttgcagtcttattgacagtggcagcatcttgtggggtcattccgagtacatcccaaactgagctggatcaacgttaagaagagatggattctgagtggaatctcaccatctgtttaaaaaagctatagcctttaagagtactttagtgggggcactgtgccctcgtcgactgcagtgatgcggcttcacaggccagtgtgtggcctgctctgtaatttgacccggcggtcgttgcttcccaggctcgagtgcatgccccaggggtttggccgggcttggaacccccgaatgcttgctttgtgatcccttcttttttttgaccgcccgttttgtgagcacctatgttaatctttagcctttggaggcgccggcgcctgtgggtctccaaagagagacctttgtcttgcgggtgccaatgccggactctttggggggcaaa

SEQ ID NO: 677169 - DNA, 231 bp, Homo sapiens
tcggagcactgtccgagatatcgcatcacttatctacaacagttctcgcatcacttatctacatcgcatcacttatctacatcgcatcacttatctacatcgcatcacttatctacatcgcatcacttatctacatcgcatcacttatatacatcgcatcactatctacatcgcatcacttatctacaactgttctcggagcactgtccgagatcgcatcacttatctaca

SEQ ID NO: 677170 - DNA, 639 bp, Homo sapiens
gcactacctatgcttctagaaagcccctcacctcaggacccagaaggaccagctggggggcagggggagagggggtaatggaggccaagcctgaagcttatctggaaattcttccctggggttcccaggatcccctgtctactccactgacctggaatgagctgggtaccagggcatccactgtggtggcaatgcctgatgtggtgaggtggccactgtggccccattcctccctccatgtgcatggaaggcgcgtcggatttcgaggtctaggtgattggtgctcgtgggtggagcactctgagggaccatcgtctgcccttgctgctccgggtcgggattgatgctctctctttgcctcccagtccctgtgatatcatttggggagaaacattgcaatgttggggcgtggggggtggcttgattacaactagcgcacgttcccccacggaaagcattgagcgtgtttggcgccttccctaaacgtgatcgccctcgtaatagagtcacgcgggtgaaagggacacgttgagacttcgacgacgaagaatggtcaggccccaggagagaggacactctggggacagggacccttcaaaggagttgttcttgcgcgaacgtggtgcgtcgggacgtaca

SEQ ID NO: 677171 - DNA, 567 bp, Homo sapiens
gcagtggttgctggtggtcgatctaagaggtcccccttgggagaggtggtggcagattctgggggggcagtgcaacccacgtccacagtcatcttggtagccaccttcaagttacaggtagccacatgacatttctgagcaaggaaagggaagaaaatgggcggatgaaacttctaataaaatcacggtgtcctggagcttggggtatcttttccttcttccggctgggatggcaaacctgccatcgggaggcaccggggccgctttcagggccataagtactcaaattaacagctaaggaggggggagccaaaagccaaaggcagaaagatctgtgaacccaggggaaggtaggacaaggtctgaagaatttgggtggtcactggggagaggagggcgaggggcatcgagggggtagagactaagggatgctgcgcagcaccctagagggctatgaatctgggggtaactggcctgaggatcactggtagggggggctaagggggctgaccagtggtaaaagctccggtgagcggggttcccttgatgggtgtcggaggtagagag

SEQ ID NO: 677172 - DNA, 417 bp, Homo sapiens
  misc_feature (65)..(65): n is a, c, g, or t
  misc_feature (88)..(88): n is a, c, g, or t
  misc_feature (201)..(201): n is a, c, g, or t
ctcaaatgccattcatctgacaaatattaatatttatggagcagcctctacgtgccaggcactgngctaggttcttgggacgtatcantgaacaagtgtggctgatgcctgtaatcccagcactttgggaggctgaggcaggaagatctcttaagctcaggctccttgagaccagcctgggtaacatagtgaaaccctgtntttccaaaaatcaaacaattagcctggcatgttggtgcctgtgggtcctagctacttgggaggatgaggtgagaggattgttttgagccctgggaggcaaaggttgtagtgagctgagatcgtgctactgcactttcagtctgggtgatagagtgagaccctgtctaaaaaaacaaatggtgtcctcccttcatccattcactcttctaacccatt

SEQ ID NO: 677173 - DNA, 304 bp, Homo sapiens
ccctggacttaaggctgcatgtgtgctataaagactgcaccacttggctcatgcctgtaatccccacactttggaaggccaaggcgggcagatcacctgaggtgagtgatgttcgatgatcagcctggccaatacggtgaataccccatctctactaaaaatataacaattactcaggcatggtggtgcatacactgttttcccagtctactcggtgatcgctgacggcaggacgatatcgcctgtaaccccagtgaggcagagcgtttcagatgagtccgaagatcatgtccagctgacactc

SEQ ID NO: 677174 - DNA, 287 bp, Homo sapiens
tgtgggtagcaagcaacctagggatcagttttgcaggtggtaaagccatttaccaatgatagttgtaggctaagaagggcagatttattagtagaaattcgtgaaaatatgttgcagtgggcagctcagcagagaaggggctacctgcaaagaggcaagggctggaggaaagttttatagggtcctgctgaagggtgctacgtgctgaaatgaggtcattgtgcccgcaggttgtttgtgattagctgtctctaacaattgttcatacaataattgttcattattgt

SEQ ID NO: 677175 - DNA, 679 bp, Homo sapiens
  misc_feature (14)..(14): n is a, c, g, or t
  misc_feature (32)..(32): n is a, c, g, or t
  misc_feature (45)..(45): n is a, c, g, or t
  misc_feature (87)..(87): n is a, c, g, or t
  misc_feature (92)..(92): n is a, c, g, or t
  misc_feature (171)..(171): n is a, c, g, or t
  misc_feature (354)..(354): n is a, c, g, or t
  misc_feature (590)..(590): n is a, c, g, or t
agcggagctgagtngctggtagtgcccgtggntgcttggttcganggtggccgtgtagtatgactccgcggagttcatctccctggntattncccgtcctaacgtcgctgcgcctttcagtcaggatgtctgcccgtggcccggctatcggcatcgacctgggcaccaccntattcgtgcgtcggggtctatccaacatggcaacggtggagatcatcgccaagcgaccatggacaatacgcaccaccgcgccagctacgtggccttcacgggacaccagagcgcctcatcggcgacgccggcgaagaaccaggtggccatgaatccccgatactagacactcatcattcgacngccaagaggctgagtggacggaaattcgaggatgccacagtgcagtcggatatgaaacactggccgtcccgggatgagtgagcgagggaggcaagcccaaagtgcaagtagagtacaagggggagaccaagatcttcttcccagaaggagatatcctccatggtcctcacgaagatgaaggagatcgcggaagcctacctggggggcaaggtgcacagcgcggtcataacggtccnggcctatttcaacgactcgcagcgccaggccaccaaggacgcaggcaccatcacggggctcaatgtgctgcgcatcatcaacgagccca

SEQ ID NO: 677176 - DNA, 392 bp, Homo sapiens
  misc_feature (371)..(371): n is a, c, g, or t
  misc_feature (388)..(388): n is a, c, g, or t
gagaacggagtcttgctttgtcacccaggctggactgcagtggcatgatctcggctctgcaacctccatctcccaggttcaagcgattctcctgcctcagcctcccaagtagctgggattacaggcaggcaccactatgcctggctaattttttgtatttttagtagatatggggattcaccatgttggtcaggctggtctcgaactcctgaccttgtgatctgcctgcctcggcctcccagtattgggattacaggcatgagccaccatgcccggccttaaaatgccttcttaaagggaaaaatgccaactccatccttaaatctcaagggaaatctggattgtccaaataggattctgttaaatatgtnaacatattaataggggnaact

SEQ ID NO: 677177 - DNA, 389 bp, Homo sapiens
tgtgaatccaatatggatttaaaagaaggtttctatgagcaaatatatcatcccgaattcaacccattaatgtagaaaggaagtttcagaacaaatctcattttcttaaagtgtcaatacctattgatatggtttggatctgtgtccccaccaaatcgcatggccaattgtagtcccacatgtgtcaggtggggcctggtgggaggggtttaatacaagggggtggatttttcaagaatggtttagcaccgtccccttggagttgttcttgaaataatgagggcctgggagatgtggttatttaaaagtgcgcaacacctccggtcctccccaccttgctcctcatgctcctgccatgtgagacaccttgctctccttttgtctcacca

SEQ ID NO: 677178 - DNA, 115 bp, Homo sapiens
cccgtcacggtactcaaggcacacctacaccccttatccccatactagttattatcgaaaccatcagcctcccaagtagctggtattacaggcatccaccaccacgcctggataa

SEQ ID NO: 677179 - DNA, 881 bp, Homo sapiens
gatggctgtggggtcaagtacatccccagtcgtgacctctggacaagtgggggccctgactcatgagggcttccaatgtgctgcccccctcgttaatactcaccaagtaaattctacgttcgctgtacaaaatgaaaaaacacaaatgacaaaaatacaacagaggtttgtgtgtggcgggcctggggccattagcaagcagtctcacaaagaacacctcggtggggagggcaggggggacatagcaggttagcgcaagatcggagatactgggggttcaccgagagagggaccggaggtgtgcggaaaacgcgacgggggtggctagtgcctccccaaagaggtaaaaaaaaaacgtcggctggggagaaaccaggaggccgctttctagcagaacaagaccgcgaccgaacatggagtgcgccaacggaggcggcgcacgaacgcggaggagccaacctggcacagagcaggagcgtccactgggccgacagcgtccagtatacaaaaagttgtgccctcgccacgcgtggagggttagacaagacgaccattagccgccgaacttcgaacgcactcgacagcaggtcgtagtcgcggccacgaacgacacaatcgacgcactcgcaacaacgcaaacacacccatcaacggagcactgcatcagcaagcagtccagtccagcattccagacgcacacacaatgcaccgcacccgcgccccctcgcagcgccacgcacctcagacacgtaccacacaccacactccattcaaaccacgccacagctgagtgcccatccatcgcaacattcaaggcgtccaccatcaatggacagcatgcgaaaccgtaacagagacgaagacgaccaaaccgacaacgc

SEQ ID NO: 677180 - DNA, 159 bp, Homo sapiens
  misc_feature (97)..(97): n is a, c, g, or t
  misc_feature (99)..(99): n is a, c, g, or t
  misc_feature (122)..(122): n is a, c, g, or t
  misc_feature (134)..(134): n is a, c, g, or t
ggggatgaaagagggatttttaaatggcagaaaagtgttcctctggctgctgcccgggcagggcgggttgtgacttggaaaaagaaagggaaggtangnaagccttgaacttaaggacaagncagcaaaatgancctttgcagttttttggaacccaag

SEQ ID NO: 677181 - DNA, 103 bp, Homo sapiens
agagtgaaattccatctcaaaaaaaaaaaaggatccttttttttaatttttccaagggttcctaaatggttagaatattaaatactaataaagcggtttggaa

SEQ ID NO: 677182 - DNA, 137 bp, Homo sapiens
gacagagtaacagttaagttagagggtggcaggtcttttgtaatttcatggtcattttctcaatgcagtaatcattaatattatttaaataagtcacgacattaaccaccatagattataattttccaattatataa

SEQ ID NO: 677183 - DNA, 514 bp, Homo sapiens
tgtccgtgggtatccactgtaggacgttttccagacggtaaactttttgaggcttttcatgttgaacgtgttcttttttctttctgagacagagtcttgctctgttgcccagactggagcacagtggcgtaagctcagctcactgcaacctccgcctcgcgggtacaagcgattctcctgcctcagcctcccaagtagctggcattacaggcgtgcgccaccatgcccagctaatttttgaatgtttagcagtgacggggcttcaccacgttggcctagatgggctcaatccgttgacctcatgatccgctcgccccagcctcccaaagtgctgggattacaggggtgagccaccacacccagcccagtcagtgtatttatttaaggcatgttggaactggttctcatttggttctggggttgacagtcgtgaattagaatattattggtaacctcaagaggattctttccagatgcaattagaattcttaccactgagtaccatgaaaacatg

SEQ ID NO: 677184 - DNA, 276 bp, Homo sapiens
ctctatagtatttgagctagggatggggtttcactgtagtaggccaggatggtcttgatctcctgaccttgggatctgccagcctccgagctcccaaagagtagtatttattttaataggcgtgtatcactctctggaaattagcttctttcttctttttccttgtgatcatccattttcccgaaccagaatagaagtttctgagggccgaacttctgtctctctggccctcactatgtgtctctggcgcataacccagtggccacttgctttgcg

SEQ ID NO: 677185 - DNA, 243 bp, Homo sapiens
actcgatgtacaacacagcgaaacgtagccgacacgtattggtttaaacttcacgaaagagatcggcgggcgatcgcgcggttcaaggcagacgagtcgacgtggcgcatttgtccgcctgcgccatgttctgatagaagcgctggcgatcctgcttaaaccaaagcctgcggacgggcagaccctttttcagtgaaatcggcctcgatcagccgccctttgctggggtagaacaattacctc

SEQ ID NO: 677186 - DNA, 468 bp, Homo sapiens
acagcactaggggaatggggaaactggagaaaagggctcttatcccaaaaggaccagatccattggaacagatagaggtaaggaggcaaagagagaggaacagtacaagtgtaaaattgggagaaatagtttttaaagggggtcatttatttggcacttttaccaatttgttttgaaacagagtctcagtctgtcgcccaggctggagtgcagtgctgtgatcacaactcattgcagcttctaaggtcctgagctcaagtaatcctcctgcttctgccgagtagctaggactatagggtgcctggctaatttttattttttttgtcaaaatggaggtttgctatgttgcccaggctggtcttgtactcctggactcaagtccttctgcttcagcctcccaaagtgcaaagtgctgggattacaggtgtgaaccacctaacctggcctctagtttgtttgtttgacaca

SEQ ID NO: 677187 - DNA, 216 bp, Homo sapiens
ctcctgagcatgaacaaggttaatgatgatgcaaagcttaagatgtctcataagtacgttcctgacacgcgagggcaccactgttatttccacagctagcgtgctaacaggaaccatggcgcgtgtgagctcactgtgccagagtgcttgccgccttgtcgcgtcttgcaacaacctcgctccacatcctcagcaatgagaaccccatggtgaaac

SEQ ID NO: 677188 - DNA, 126 bp, Homo sapiens
tagcaggatctgtaagatctcaaatcagctctcacctgttactgtctagcactgctacttccaaatgagggaacaacctttcttttcttatcctgtgtacctacatccctggtatagggatgctgt

SEQ ID NO: 677189 - DNA, 158 bp, Homo sapiens
cccccccccgcgccgccgctcgctctctcaacgggcagacgcccgccctctttggttcgcccgaggctcccaacccccaagggggaaagaggggggtaaagtaaagagaggggctctcttacccactgtgttcgtaacaaaaaagagagattcccccc

SEQ ID NO: 677190 - DNA, 126 bp, Homo sapiens
caaactactttttcaaccctaaataggacccatgtaatttttcaaaagtgattgaacagtttgcccccccttagtttgttggttttatgtaaaacattggctcaaaataaagtcccccctgtttta

SEQ ID NO: 677191 - DNA, 954 bp, Homo sapiens
ggcatttatgaggcaccaactgtgtgcggaaaccaggtcacgtgccaggcaccatcctggggagacgcagtctggggtttcacccccttcccagagacgatgcccacacacactctcccacagtttccaggggactgaggacacaggcctagcaccgatgccaggaactgtctctggtttagggatacaagctagggtgctgcctgcacctcactttcccattggctcttctttttaaaaaacttttttcttgagatagggtctcgctcctcacccaggctggagtccagtggcgcaatcttggctcactggaaccttcgagctcaggcagtcctcctgcctcagcctcccgagtggctgggattgcaggcgcttgctaccgtgcccggctaatgttgtgtttttagtagagatggggtttcaccatgttgcccaggctggtctcgagctcctgacctcaagtgatctgcccgccgcggcctctgaaagtgctgggatgataggcgtggcactgctcccggcctcccgtggattttgagggtacagctcggttggtccgtgagcggtgggggaagccggagggggcagctgtgcccatggtgcccccacccaggcgacagagcactggttactccaacaccaagcccagccaggtgagaggagaccaggcggctgcccctctgatggacgacgggctcattagcgctgtgggctggcaggcgctaggatcgggtgtcaagcaggggaagcctggccgccgggacgaggtggcctggtctgggcggcatggggcgagcagatgaagggcacagtaggccaaatcccgtggtgggtgcagctagccacgctacacggcagaaccagcggcagaacgtcaggagagcaagcaacacaccccagacgggacagggagacctcacgcagaagacacggcggacttagaagggaagacta

SEQ ID NO: 677192 - DNA, 311 bp, Homo sapiens
attcgcggccgcgtcgacggcgtggtggctcacacctgtaaccccagcactttgggaggccaaggtgggtgcatcatgaggtcaagagattgagaccatcctggccaacatggtgaaatcccatctctactaaaaatacaaaaattagctgggcatggtggcatgcacctgtagcccagctctcgggaggtggacagaatcacttgaactggggaggcaaggtgcagtggccgagatcggtcactgactccgtctaagaacagaggaaacttgctcaaaaagaaaaaaaaaataagtcgacgcggcgcgaa

SEQ ID NO: 677193 - DNA, 375 bp, Homo sapiens
ctgaggggaaaatcgttggggatcatacacaagatcacatttatctaattatcttctggcttaaaataggcgagaagcaacagcggctgccacatttttttctctctctcacaaaactggaattcttctcgtggaaaagaaagagtgggcaccaattaagtattaacaaaatacagatgaactgtttactaccttcaataatctttatatgccattgataagcaaaagactactgggatactgtgggactgtaacccatagagtttcttagatgctattggagagataaaaggattggcaccgaggattcaagagaacaatggagtcaacactgaatgggaatcaaataatctgtgaagtcctgactgccactcc

SEQ ID NO: 677194 - DNA, 909 bp, Homo sapiens
cgatactaagtgtattactgtgtctccctgtcttaggatatctgtagatggatggcgatttcttaaatctgaaatgatctttacactgtcattctcagcatactgattatggagaaacacttgttgatttggttatacttgacttaactttatggcaatgtgaattaatggcactgctaagtaggaagatgtgtaattttattggtggctattcacatttgaattttttccgtgtataggcaatattatatgacaccttttacagatcttacgtgtagctttttccatataaataaaatgctttttctactattgtcttgattacttaaaaaaataaaaatataagtaaggatcaaaatctaaaatttgcatgaaaattacatccaaatgtgtgaaaatcagatctatttgttgccattagtcaccattagttatataaatttatggtttaggttagtatctctttactaaatgtgtcagtctataagataatatatgtgtgatcccttgctgtagaggagaattagagtaattggggtagtctggattatatctaaatggattatcgttacaagtactgaaatgagtataaggcagtaatcacccatccaaaaagaaggtcttatagacctgcgcagtcacctaagaataagttcatttaaaatgccccacctgatgtaattgacattacatttcttaaccactcttaaaatatgaattctaaaatgtatttactgcctcaccatttgaaaacctttttttctcactatgcgaagttcaacggaggtcaaaattatgcccctgggtttaatgtgcccgtaacggtgttaaaagggtactctcgctcagaacatacacgttgtcagggaaacactctcggtgcgtgcccggggtttaaacgggccgttg

SEQ ID NO: 677195 - DNA, 102 bp, Homo sapiens
acttatagctagtattcccgtaggagcatccatggctcaatgacttagatgctgtgcgattctcgactcaatgaaaaagggcccgtgtggaaccgaggagta

SEQ ID NO: 677196 - DNA, 341 bp, Homo sapiens
cataacataggagaacatgtcaaaacatagggagaaccaacataagtagtcttcaaaagacactagtgtcttggtatattcacatagccacctttgtgagatgcagcacattaatacatctgtcatatagcacgttaaaatggccaactttttaggtgcttgtggtactgtattctcgccacaatgatgtgactttccaaaattgtccagtgggaagggtgtaacgtggcaatgtggtttagtatggaacttactttgcactgtatcgggcggttgaattttgcttttattggactgtggacttgggactaaggcgaataaaacttaagctcacttaaaga

SEQ ID NO: 677197 - DNA, 828 bp, Homo sapiens
  misc_feature (48)..(48): n is a, c, g, or t
  misc_feature (110)..(110): n is a, c, g, or t
  misc_feature (115)..(115): n is a, c, g, or t
  misc_feature (117)..(117): n is a, c, g, or t
  misc_feature (124)..(124): n is a, c, g, or t
  misc_feature (135)..(135): n is a, c, g, or t
  misc_feature (140)..(140): n is a, c, g, or t
  misc_feature (156)..(156): n is a, c, g, or t
  misc_feature (160)..(160): n is a, c, g, or t
  misc_feature (163)..(163): n is a, c, g, or t
  misc_feature (200)..(200): n is a, c, g, or t
  misc_feature (213)..(213): n is a, c, g, or t
  misc_feature (216)..(217): n is a, c, g, or t
  misc_feature (231)..(231): n is a, c, g, or t
  misc_feature (235)..(235): n is a, c, g, or t
  misc_feature (240)..(240): n is a, c, g, or t
  misc_feature (245)..(245): n is a, c, g, or t
  misc_feature (256)..(256): n is a, c, g, or t
  misc_feature (258)..(258): n is a, c, g, or t
  misc_feature (260)..(260): n is a, c, g, or t
  misc_feature (279)..(279): n is a, c, g, or t
  misc_feature (284)..(284): n is a, c, g, or t
  misc_feature (299)..(299): n is a, c, g, or t
  misc_feature (301)..(302): n is a, c, g, or t
  misc_feature (311)..(311): n is a, c, g, or t
  misc_feature (317)..(317): n is a, c, g, or t
  misc_feature (321)..(321): n is a, c, g, or t
  misc_feature (354)..(354): n is a, c, g, or t
  misc_feature (358)..(358): n is a, c, g, or t
  misc_feature (360)..(360): n is a, c, g, or t
  misc_feature (389)..(389): n is a, c, g, or t
  misc_feature (391)..(391): n is a, c, g, or t
  misc_feature (411)..(411): n is a, c, g, or t
  misc_feature (418)..(418): n is a, c, g, or t
  misc_feature (429)..(429): n is a, c, g, or t
  misc_feature (431)..(432): n is a, c, g, or t
  misc_feature (448)..(448): n is a, c, g, or t
  misc_feature (450)..(450): n is a, c, g, or t
  misc_feature (482)..(482): n is a, c, g, or t
  misc_feature (504)..(504): n is a, c, g, or t
  misc_feature (563)..(563): n is a, c, g, or t
  misc_feature (573)..(574): n is a, c, g, or t
  misc_feature (604)..(604): n is a, c, g, or t
  misc_feature (608)..(608): n is a, c, g, or t
  misc_feature (619)..(619): n is a, c, g, or t
  misc_feature (629)..(629): n is a, c, g, or t
  misc_feature (682)..(682): n is a, c, g, or t
  misc_feature (684)..(684): n is a, c, g, or t
  misc_feature (707)..(707): n is a, c, g, or t
  misc_feature (717)..(717): n is a, c, g, or t
  misc_feature (817)..(817): n is a, c, g, or t
attgctaacaactccaaccctctatattgtgtttcttttgctcctggngtcctcttgcagctttaattcttgacactcaggcggcacaccagacattaaatccccacccnccgangnattagtnaaccttttgcnggtcnttcttttccgaatgcnaatnganaaattcttaagccctcttattcgtttcatgatgatcnttagataaaaaanttnngcctaacttgcatnttgnaaatnaatgngggggggggcncngnagggggttgcggatgatanatatngcttattcacttatntnngacaaagtncaattngggngactctcaatatcgttgcggtccattgtgtacnttcngngctgacccttgtgtcagtagctgtttgtnancttctttcgcttcctctgtnaagtgtncttttggggantnnacatcttaagtgtttntnaaagagcccttgttattgttgttgtcaaagtnggggagcccttcccctttcttncatagcttcgctcctggcctggtgatcttatcccgggaaatatgtaccttgtgaccatncaagtgagtnntatccatctcaaagccacccagttactcanctantgagattgtcncatttgtgtncaaatcatctcctctcctttcaaatattgggtgcttgacaactttgattcggnancgtaaatctccaggctccccatncacgtgaggntcaccttctccaataaaggggtactccatgccgtctctcaccccaggctctatttctacttccagcgttcgttcttcattcactagtttgacattagggnattcgtcgcag

SEQ ID NO: 677198 - DNA, 280 bp, Homo sapiens
gcctacgccagagccacagcaactcgggatccaagctgtgtctgcaacctacaccatagctcatggcaacaccatgtccttaacccaatgaaggaggccagggatcaaacttgcattgtcatggatcctagtcgggttcttaacctactgagccatgacaggaattcctgcagagaattttgaaggtctcagtgagaaatctggggccagtgacatgacatattatacacaaatcacccattttcaaaggcttaaaatctagtaaagtagtccttatatg

SEQ ID NO: 677199 - DNA, 334 bp, Homo sapiens
  misc_feature (277)..(277): n is a, c, g, or t
ggcttgtgcagcaatggccagatcagggctcgagatcttcgcgggaggaggaaggaggagctgctgaaacagctggacgagctgaaggtggagctgtcccagctgcgcgtcggcaaagtgacaagcggtccggcctccaagctctctaagatccgagtcgtccggaaatcattgccgtgttctcacagttattaacagactcagaagaaacctcaggaattctacaaggcaagagtacagccctggactgcggctaagagacagtgcatgcgcgcgntcacaggacgagagacttagacagagcagcacgaaggagcgcttacccctgcgagta

SEQ ID NO: 677200 - DNA, 458 bp, Homo sapiens
gagccggtcctgtgtgagctgctgagatgccatgaagtccacccttgtcgtatcaacagttgggtgccagccagtgatgtactggtaaatgcttaacaaccagctcttctgagaaaaaaaaaagtcagaccggtagcattggctgatttccatgctgcaaatactcccacaagggctgatttcatgctatcaatgtggtatcactgatggcagagttgagcagaagtacaggaacataccattatatgtatattcagtatttccaccatacatacagaatggacaaaataacttcaagagtgtagataagacctataatcccagcacttcaggaggccaaggtgggtgggtcacctgaggtcaggagttcaagaccaaccttgccaacatggccagcatggccaacattgccaggcaaattagccaggtgtggtggtgcatgccggtaatcccagcta

SEQ ID NO: 677201 - DNA, 163 bp, Homo sapiens
taccagctcgcaggggctgccggcagcccctcaccctgcagctggcacgccgtcttcccagcccaccatccccatcgtgggcctcgttgctggcctggctgtcctggctgtcctagctgtcctcggagctatggtggctgttggggtcaccgcagctcgacat

SEQ ID NO: 677202 - DNA, 808 bp, Homo sapiens
gcactgcccagttccgtgtcccgatgcccagcgccagcgcagccgaagagtcaggagaagccggggagatcatggagcggggaagattatgctaaagagagatatggaatatctctcagtgatacaatcacaagaaaaaccagatcgagtttgggtccgggtaaagagacttgacaatacaaaaagctgatgaagttgtgtgggtacgtgcaagagttcaatacaagcagagctaaaggggaaaacagtgcttcttagtcctacgtcagcaagcagttaaagtgtccaggctctttgtggggggggggagaaccatgcaaagcaaagcaagatggtttaaattgtgtgccaacatcaaacaaaagagagcatggtggatgtagaaggtgttgtgagaaacggtgactcagaaatattggaagctgtacacagcaagacgttgagtcacatgtcagaagatctatgtgatcagtggggtgaacccctgtcgtgccctgaagtgaatgatgctgtcggctgaggcagaaggagaaagaggaagggaagagctagtgttaaccagggatacaagatttagaccaccagaagtcattggatccttagggacattcaattagtcaggcagtctccggtctccaaggtgtggatcgtggaatctcttccggagaaagtttaattaaacacaggttgtgtggaatccaaaatctaaattttttaggtggcggggaaggggggccatgtttatgggcctatttaaaaaaatgctctctgggtgtgccaaggtttttcaagggcttgtgcggttgac

SEQ ID NO: 677203 - DNA, 1222 bp, Homo sapiens
  misc_feature (126)..(126): n is a, c, g, or t
gatggatagaccctgtcatgttctggggcggcaagccagtgccgagttctcgttgtatcgtaattagccttcgcatcgagaaccggtgccatcgcagtgagcctacgtatccagagtggtgcaggnatacagggaagcctgttatcatctgtagtggtgctccgggatgctgtgaccgcgccgcattggggaactgttcgaatggtcaatgatcctgtagaggcggtaggacgacagtcgctttagtcacttgtcttggggtaagggccttggccaatgcgcaatgatcttagcgagggaaactggagcaggggagtagacacattcagactcagcggaatggggagttgctatcaacagatactgtgcgacatgctcccactacatatggaagggccctctcctgagggccccatttcgcaacactatatcacgtagacggggaggccagagcgtcgttgagttcaggactggcgcatggggaactgctgaccccaactgagtcctgtgcatgaatacactactacttagggtgccactgaagaatgtcgcatgcggtttatgcggggtagtgaccatggaagagggagcacatgggatgtctggcggtatacagctcgtcgctgccaaaatggagtgaaccaaaggcctggcataaggtccacgtcttggagaaataagccaactgtgggatgaggtggtcaaatcaaagggaaggcctgccttggcgcggagaccgtgcaccagtcattgggcaccaacaaacattggtcgctggtctcccactgctgcattctactcgaatgttgcttagcagggcctcccagctcatacaggagcccgtcacggaaaaggagcggggactgaaagcttcgtcaggactcttggcggccttgagagatcgtttcatagacaaaggcagtcaggcggttcttccaattgggccatttccccagaagggttcctgtgccgaacttacccccctggtcgtaatcaaaagacgcttcattagcacgcaggggactgtacaggccgtgttaagctttgaagccaactaaggaggcgagggaaatggcaccccacggtggagcctccttcgcgccaaaatttctcttctaggattttccccgacgaacgggctcggaccttgtcttttcacacagccaaggtattacacgctgtttatgtgacactggggcccgccaaacagcgaatgtggcct

SEQ ID NO: 677204 - DNA, 305 bp, Homo sapiens
  misc_feature (16)..(16): n is a, c, g, or t
  misc_feature (24)..(24): n is a, c, g, or t
  misc_feature (52)..(52): n is a, c, g, or t
  misc_feature (54)..(54): n is a, c, g, or t
  misc_feature (67)..(67): n is a, c, g, or t
  misc_feature (72)..(72): n is a, c, g, or t
  misc_feature (74)..(74): n is a, c, g, or t
  misc_feature (96)..(96): n is a, c, g, or t
  misc_feature (98)..(98): n is a, c, g, or t
  misc_feature (160)..(160): n is a, c, g, or t
  misc_feature (238)..(238): n is a, c, g, or t
cataggggctgttgantgtgggancgagagctagcagacgcactttgtgctntngctctcctgctgnaggangnggtggtggtgtacttgatggtngncactgccgcctccaacagagctgaggccacccccaatggctctgccactgctggaactgaanccacctaccaacgccaagaccactagccataggagtaagactgcttcactccacccaggcctaagccactgccgacancactggcaccgccatagccactggagacggtggactgcaccacagagatgttgcctttcggagaaga

SEQ ID NO: 677205 - DNA, 1340 bp, Homo sapiens
aaaaagaaacagaagaggcaggctgagttattggagaagctgcctgcaggagatacgaagaattggcatgcgagaagctgaacaggaaaataatagaagaaaacatcacctctagctgcaccgttccgaatgaccagtgatgtgcgaatactgcccagaggtgaaactaaaaacgaacaggattagcaggacggcggctgacggcacgaaagactgacacaggcgacaaatgcgcgacacgctcgacggcacccacggaacgacgacaccacgacacgaccgcctgacgacacacgacacaacaccactcgacaaaagactcgcaacgactcgcactgtacgatacagcggaaccttagccagaaaacgataaagaaacaccataaacgttgcgcgataccgcaacctccagcctacagaccagccaagcttgcgccccatacttctgacggacattggcccccaacctccatccaacttcggaagcccacgccacacccctgcccaccccaccccacacccaccccacctgcacctccagaacccaacccacctagcccccccaacccttccccctgccaccccccactactccacctcctctgacaatcaaccccccaccattcgcaccaccaaactcccaccacaacaacacttctaacccgaagcacctcccctcacctggaccacaactcaccccatcgggtcgaccctaccgccccacaccatgcgcccccgaccacctcagacacacgtcccccgagccggaccccaacaggaccccacgacgaaagaacccccacaacaccgaccactcccgacgccctccatgcacagcaccatcgacaaacaccccaccgactcgaccaccgcccgcgcacaacctggcggccaccaccccagcagcaccgaccccaaccgcagcgctctccctgcaacccacgcgcaacgagaacgaccgccacgcccccacacccccccccccccccacacgcacaagacccccaacaccgaacaacagaggcccgaccacacgccacaccaggcccccccctccgcccaacacaccaccccaacacacgcaccgggaggacaacccctctcacactggcgagccggggggacacagcgacgcgcagcaaaacccccgacgcgacatcggcgccaccaaacacccacaagacaggcaccacaacagcagccgcgccgccgacgggcaaacaagggcacacgacgagcagcgaccacaccgacacgccacacacgcgccccgaaccaccccagccaccccgccgcgcaccgcgcgccccccaccacacggtcccaacgcaccacccgcg

SEQ ID NO: 677206 - DNA, 572 bp, Homo sapiens
ttttccggagggggccggggcgcgtatggaatagcgaatccatattagcacattgtgcaaacgagcacgagttcggtgggagatcccttccaatatgttctaacaataggagggggtttggccataagaggagggttcattcgctgatttcccctattttcggggtaccccctagaccaaacctacgccaaaatccatttcatttttatatttatggggggaaatttaatttttttcccccaacattttttgggcctatccggaatgccccgaggttattggggataccccgagggaaaccccccatgaaacatccttttattggtggggtcattcttttttttaacagcgggaaaattaaaaattttcatgatttgaaaagcctttgctttgaagggaaaagtcttaatagtaaaagaaccccccataaaactgggggtggttaaagggaggcccccccccctcccccacatttgaagaaccgggaaaaataaaatttagacaaaaaaggaaggaattgacccccccaaagggggttttaagccacccccagggcctccatgattttttca

SEQ ID NO: 677207 - DNA, 324 bp, Homo sapiens
  misc_feature (242)..(242): n is a, c, g, or t
  misc_feature (285)..(285): n is a, c, g, or t
  misc_feature (304)..(304): n is a, c, g, or t
taagtacttcaagtagcataattaatattagaaaatgactttcatttggtgaagaaatgtagtcagagcatgtggattcactaaaattgtcattgctccccagccgttacatagaacgcgggcatagaatgagcattcagccatgtgcgtgggtactccaaggaacagcactcgaggtcgtgatccctggtgcagagcacgagtgtagtcatgtgatgttgtgtagagagtgggatttcatnacatgttgcccagtgctgattctgagaactcctgtgcctcaangcaatcctccctgcctcangccttcctgagctagagatc

SEQ ID NO: 677208 - DNA, 1073 bp, Homo sapiens
  misc_feature (49)..(49): n is a, c, g, or t
  misc_feature (75)..(75): n is a, c, g, or t
  misc_feature (117)..(117): n is a, c, g, or t
  misc_feature (119)..(119): n is a, c, g, or t
  misc_feature (122)..(122): n is a, c, g, or t
cgcggcagcggcaggaccgccgtggcgcctagagtagcgacccgggggnagcgcggggcgacgctggctgcaggnacccggtgacagcgtgagagggtactaggttttgccaagttncnatnatgcgtgcagtcataagctcagtcagtatcttggctcaggcaggcagttggcacacagtctgcattatgacatgtaccaatttggtctcaaggacatttttgtcagcacaaaatcacgatcctcacgcatcagcacagcattccttcatcagcaaagcaaagttagcacagtcagcatgcaacaaccagtgtcatgcttgcacaatctttggcataactagcacggcaacaggcagcacatttaccagcacatgcagggcatttcatacactgcacacaacatggcacaaggcattttaggcattcagtttaattccgatcacagcgaccagtccaccatttccacagcatttacacagagctgagagcaaccagattcttcgagttaaagacactgatgatgtaccaatgacttacttgtaggtaataacgtgtgactaggaagatgcacgagttgtagggaaggaaccaggtcaaaatatagacaagaccatgggcacacacatggtgcctacttaccgactctttcttgcaacatccgacacataccctggtcaactgacgctcttactgacctacatgcggcgagttccgagacacaatccagtgctgggaaggctacgcaaagaggtataatgtccgcctgctttcaatatactaaaagcattgttattatgagcaggtctcgaaacatgtgaccagattcacagtgtcagatccaagttcgataaactaccaacatctaaatggacataccgatgggggaccacacacgaaggggcacgcgatgcccacacacgaagaccactcaacaacacacgaccaagaaacaaacaaacaaacgagacagatgcacgccacccgcggacccaagcaggccaagccacacccaagcgacaaacaggaagcacccagcccgcagagcgagagccgagaaaagccacaccaaga

SEQ ID NO: 677209 - DNA, 167 bp, Homo sapiens
acctgggccgtataggggaacagcgtacgctctaccggcaatatgaagtgtatacttcttaccgtacatagtctttaaagaaacatcggctgtagctgaatcgcttctcttgtaagccttaccattagctccgaagtagtaccaccactgagtgggctcgttctctt

SEQ ID NO: 677210 - DNA, 297 bp, Homo sapiens
agtcacgagatcccggaatgtgtggtgttatgctatggtatgtacaaagctaggcatagcacatgcagttggtgttgttagtcggtatgtcatcaatacaggcgaagaacattggttggctgttaggtggattctcagatatcattgaggctcttcaaaagtgcgtttatgctttggaagtgatactcctatttttaaggctttacagattcggatatggctggtgatgttgattctatcaaatccatatcatagtttttaagtacctttgcaagcggtacataacaccacacaatt

SEQ ID NO: 677211 - DNA, 520 bp, Homo sapiens
  misc_feature (302)..(302): n is a, c, g, or t
gacaggggccgagagcggggcgtggagacgcgcctagagggagagccagcgatgggacgggcccagactgagaggcggaaaaggggagctcaatggcggctgctacaagtgcggggaggactacgggggggctgtgaacccccgcgggggggggtggctaaggacaacgcctgaggaacaccgcggggaaagcccaacagcgacaaggggtgcccctcctcggccgggggagggcgcgcgagtaacggccaactcttgcgaccatggtaacacgggcccaccacgggagagaggccccaatnacagaggggcgtgcagagacaaagtctccagccatatatcagagcggggacacagcactcgcactcggatatataaagcgtccaggttgtttcgcgacagaattgagacatgatgtgatgtaatagacgtgcgtggatcgtgtgtcagcctcacaggtttgtgtgggttgcgtttgacaagataagccccccgccccaccaatagtcagagaaaatac

SEQ ID NO: 677212 - DNA, 450 bp, Homo sapiens
  misc_feature (79)..(79): n is a, c, g, or t
cgactctctcgctcttgatcttcatcttctatatcactttgagaagctatttgtcataagattgcattggtgcttctgnttccgagcaggcgttagtgatctgcactttctgtggtggaactgagcttctgaaccaattcttctattggtaattcagcatgccataatggaggctcaaagttcagttcgggagagttaagcagctgctctaaagactgtgtatatgtgctggcggaagacacagactccgtatcagttgtctccatgccttctccctcttcccgggttacagtgtgcatgtctagaagcgggaggtctgtgtttctcctttctcgaaggttcttcaaagattgttgagaggaacctgggcttcttgtggtcgggttcattcttaagcttggaagaagctgtgcttccatccttggaaatagcttgctgtacttgggggac

SEQ ID NO: 677213 - DNA, 264 bp, Homo sapiens
tagagttatcccctcataggcttcgcaggacatgcctgccttctgccacaccaaggcctgtcggggtcaagctggaaaggccagcagccttccagctggcttctcccaacactcttggggaccaaatatatttaatggttcagggacttgttcccaatgttctgacagccagagcgtttgaggggccagccggtccctcccaggcgatcttgtgctctactctaccgactgggccctgagggtggtttacctgcgaacctatga

SEQ ID NO: 677214 - DNA, 318 bp, Homo sapiens
  misc_feature (123)..(123): n is a, c, g, or t
aagggcctaccacctataacgcctgttcctccacacgctggaatgatggcgtttctttcccaatccagtctggtcacggctgcctgggctgtgcggaaaatggtttctgggatcgcgggcggnttcccgctggcgggcgtcaccgggcgcgcggaagtaatggatgccgtcgttccaggcggtctgggcggcacctatgcgggtaacccgattgcctgcgtggctgcgctggaagtgttgaaggtgtttgagcaggaaaatctgctgcaaaaagccaacgatctggggcagaagttgaaagacggattcctggcgata

SEQ ID NO: 677215 - DNA, 323 bp, Homo sapiens
ctcccagaagaggtatacttgttgagctctatgtgtctgttttttagtagttctcattttagtagttcccaggctctttgctttgtttttttttgagataaggtctcatcctaacgcccaggctggaggagttcgagaccagcctggccaacatggtgaaaccccatctctactaaaaatacaaaaattggccaggggcagtagctcacgcctgtaatcccagcactttgggaggccaaggcaggcggatcacttgaggtcaggagttcgagaccagcctggccaacatggcaaaatcccgtcctcactaaaaatacaaaaaa

SEQ ID NO: 677216 - DNA, 211 bp, Homo sapiens
gtctagcctcgccatgtggttggcattcattcacgtgaatccctgtggtgtaaaataaggcacaacaaggacaaaagtttgaggccgaggtgggcggatcatttgaggtcaggagttcaagaccagcctggccaacatggtgaaaccccatctctaccaaaaacagaaaaaaattagtcgggtgtggtggtgcacaccgtgtaatcccagc

SEQ ID NO: 677217 - DNA, 422 bp, Homo sapiens
agttagagtctccatgcccggctgattttaaattttaaaagtaagccttgtatagcctgggcaacatggtgagccccttccacaaaaatgaataaataaataaaattaaccaggtgtggtgatgtgtgcctgtagttccagcgactggggaggctgaggtgggaggatcccttgagcccaggaggtcaaggctgcagtaagctgtgatcatgccactgtcctccagtctgggtgacaaagcaagaccctatctcttaaaaaaaaaaaaaaaaaacccaggtgtggtggcccatggcctgttatcacagcactttgggaggccgagatgagagggttgcttgaggccaggaggttgaggctgcaatgaactgtgattgtgccagtgcactccagcctgggtgatagagcaagtactctgtctc

SEQ ID NO: 677218 - DNA, 245 bp, Homo sapiens
ctttcgccagccgctgggaacctacgccctgaaaaaagtggacaagacacgatccgtagcatccaggaggtgccggccccggtcctcagctccctcagtgtgccccgtggtgtccgggactccaggcacccgtccctggaccatgccaggcacgtggagaggcgcagctgctcgtgtcctgcccctgccacatcagtatgcttattcttttcaataaaaaggcacggtcagagctggaggctgct

SEQ ID NO: 677219 - DNA, 830 bp, Homo sapiens
cgtgtacgcgctgtgtcgtcgatggaggctaagggatttgggtactggctgcaggtaggagaatgagctgtgacataagagtagccatcaagagaaatggtccttacaggatccccagagtgaaaaacatgctctacgtgtaaactcgaaagagttattagaagacttgagcatgataacgattgtgaaagtgtttgagacttctaggctcccagtggaagccaatgaacagacgatgtgggctctcttacggaactgaacagatgttgtacatcgcttcaggagtacatggagacagacttgggctaaatgtgctggagcagggcccatttagcgtggaagagcatgccaggcttttcatgtatcagctgctacgggggctcaagtatattcactctgcaaagtgtactgcacagagatctcaaagcgcagctaatcttgtcacttaatacggaaggacctgggatgcctgaagaatacggtgactgtggggtcttgcacggaatcatggattccatcatttgattcccgagtaaggggtcaatgcgtttcgtgaagggaattggataaactaagaatgggctacaggattgtcgcgacgtgcttttatacgtattcgtcgctaagtacatttcatacgttaaaggccactttgcaccatgttgggggcctggcatggggcttggccattctatttggcttggacaagatgggctggaagctgaggttacagaaaacccccttttgtgaggggcagaaggtgggccaccaattggaaaccctttggaaaaccccggaattggcaaggactggaagttccatgaagccaa

SEQ ID NO: 677220 - DNA, 164 bp, Homo sapiens
acgtactgtcgcatatacatacacagaaggaatattcactcagaccttaaaacaggaaggaaattctgatacatgactgcaacatagataaaccctgaggactatgctaagatgaaataagccagtcacaaacataaaatactagtattcatttccacttaaat

SEQ ID NO: 677221 - DNA, 291 bp, Homo sapiens
actgatcagtcgactcggtaccctatgactatgcgcctgagcgcgaaaacataacgagtgacggacacatgatagagcttcttattggcgcggcggtggcggcgggcgtgggccgttacatcatcaaaggatattccgccaccggtgtcttgatggtgggcgggttactgctgcttggcatcagcgccctgatggggaaaacgctgttgccgtccggcgccgcgtctaccggcgggcgcgcgaccgatattatcgaatacgtcaagatcttgctgatgagccgcggcggcg

SEQ ID NO: 677222 - DNA, 314 bp, Homo sapiens
tcatcagctcggccccagtttacacagtgtataaatcattagccaatggaactttaaggagtccttatcatataaggtaatacaagtattaatattgtaaaactagatgtgtagacttgatcttataggggacaggaccaccaaccaatacatgcagattttgtgtgtgtggacggaaggtactttagacattcaattttcgctatatagaaacagaatgaatcaatgaccttgtttctatttatactttattattgcaagaggtacgtcaaagattacaatttgattcttctagagtcgctgtagtaactagg

SEQ ID NO: 677223 - DNA, 125 bp, Homo sapiens
  misc_feature (65)..(65): n is a, c, g, or t
cccaattatccctgctatacgtgctacactgaggcctcagtactagagatgaaactgaacgtgtntgatgttatgataacggatagagatattgatttgtgcaggtataagaatttccatgtaat

SEQ ID NO: 677224 - DNA, 748 bp, Homo sapiens
tctctcgcgctcgcatagctccctcccgcgcgctgttatatcccacggcgcgggcgaggagatatttggtcgcccttcgctcgcgctagataaaaatatatatagtatgataacatctctgcgtgagtagctgttcgcatctcgcgttgttgagtagaagagaggaagcaccgcgctgcgcgcgctgagatgtaaggcgcggcgtgctgctattttgttttttttgtgcgcgcgctcctcgctctactatatccgatagagggtgctttcgtgtgggagatatactatttagctcatcgcgagagatagacagacgaaaataagagagcagctcacacacagagatagaagagagagaggaggtgctcacctccataataaatatttgttgtgggtttgtttgttggttcacacaaaacatctatattggcccctctgtcctctcggctggtgatctctatgtagagacaatatatttccgccgagcactggtgtgggtgctttcttctctcgcttgtgggtgttagcaggaggtgtcccgcgcgtcgacggggtatattcttcttcttcgcagaggttttgatcggaggggtctctctcttttgtgttctttttccccggccgtggagtcatctctgtctttcgacgcggggccacctccgcggcggggagggggggacccccccccccgtttttattatttctggggggggcccccccaaaaaaaaaaaaaaggttgtgtgaaata

SEQ ID NO: 677225 - DNA, 223 bp, Homo sapiens
agatggatggctccatcggtccactaggatgatacaaaaataagcccggaatgatggcgcatgcctgaaagtcccagccacgttgggggctgaggcacgagaatcacttaatacccgagaggcagaggctgcagtgagccgacatcacaggactgcaatccagccggggcgatcagtgcgagactgcctcaaaataaatagatgaataagaaagaaagggcca

SEQ ID NO: 677226 - DNA, 159 bp, Homo sapiens
tgagctggtccagcaggctgggcccagataagatgtagattgctcgaagtgcggaccgatccttagccagagaactctctggagcattaaatgagatcctggggtactgccagtcagtgtgctgtaatgttgatggccgccatcctcatgacatcatcg

SEQ ID NO: 677227 - DNA, 374 bp, Homo sapiens
ccccctttttttggacccccccccggttttctaaaaattattctgaaataaaagaaaatttctttagccttccccccacacaggggaaaaaaaaaaagcttttttttgttcatgaatggacgccttaatggaatataggagtcatgtgtgtatgtgtagctttaagggcaatttccagaaatgcattagatgaatgacatttttaaaagcgatcccccaattgattctacaggctattatgtctcatgttgattcatgatccaggaagttttatgtatttaaaaaattgctatcgtgttatatttttccaatttttggagaagaaaatagctgtttaggctctctagccccaataaatgtaagcaggaaatcca

SEQ ID NO: 677228 - DNA, 377 bp, Homo sapiens
  misc_feature (368)..(368): n is a, c, g, or t
ggctgaactagaggttcccaacattctatatgccacagctcataatctgaaaaagaaatcaagaaagtaatcccatttataatagctacaaatataaaagatacctaggaataaacttaaccaaagaagtgaaagatctctacaataaaaactataaaacactgatgcaagaaactgaaaatacaacaaaatggaaagatattccatgttcatggattgggagaatcaatattgttaaaatgtccagacttcccaaagcggtctacagattcaatgcaatctctatgaaataccaataatactctttacagaaatagaataaattatcctaaagtttatactgaaccacaaaaaacctcccgtaggcnatcaagctt

SEQ ID NO: 677229 - DNA, 809 bp, Homo sapiens
  misc_feature (344)..(344): n is a, c, g, or t
  misc_feature (354)..(354): n is a, c, g, or t
catggtggcacatgcttccagtcccacctacatgggaggctgagccaggagaattgcttgaacctaggaggtagaggttgcaatgagccaaggtcatgccactgcactccagcctggctgacagtgagactctgtctcaaaaaaaaaaagaaaagggtggggcacgggggcctcaaggccttataattcccaggcactttggggagggccaagggcagggcgggattcaagagggccagggaaactcggagacctatcctaagttaacattgggtgaaaccccaatctcttaggtacacgagtccaaaaacattagcggggacagtggggggggagcacctggntgtgtcccangtaacttgtggagagcgctgaggcacacaagaatgtggggtgtgacacccgaggtagcgcagagtcttggcgagggaagccggaaattcaggtgccattggtgagcttcaaatcaagcctgtggcgccaaaccagttaagcccatggacactccgggtccctcacaaacctttaccttcaagtacatctacatgtcactgttcagaagaggacttggccttgctctccaaacagtaggacacacagattctctcaggcatttcaacgcccatctgatttctctcgcgggaaaacaaaccgagggtttcctgggggccccactgcctataataacgggggagcattcacgcaccaaagatctcgttttgcatccaatggggcgccataaaaggtgggggacaaacacattaaggccttccacaagggggtatacgccaaagattattcgggagtgg

SEQ ID NO: 677230 - DNA, 93 bp, Homo sapiens
ctagaagattcagcaaagtacttttgtgctcttggggaactccccaattccttcctacgctactgggggtttctgtacaccgataaactcact

SEQ ID NO: 677231 - DNA, 706 bp, Homo sapiens
ggccatttcaagggaggtggtaatttctcatagtgtgatttcatggtatgtaaagggtttagataaggagctacaagatccctgaggcattttggacctctcttttccctttggctcactctatttggggggactccaccacagatagagggtctgcctttgcctggatgaccattccaggaatgcccttgctcgaggggtcaattcaaacctaatgtaaaggagaactcacttgtaacttgggatgtggtgtttgtgacaaagttgaatccaaaattgggttcgcaaccagtagagtgtgtctgtgcacacaggtttattgagtgttaaagtgaaaatagacttgccaccctgatgggcaataatgaattaacccttttgtcttaggcttcgggtaacaccaagaaacagtccttgacagaaactgtcaattgccaaagaggacttaaattggttcactggcagtacaagaaatagaaaggaatcctggccattccctcacccctaagggaaatgacagacagctatctcttctctagggcttcagaatcccactgaagagctgcttcagccagggacctttgagttccacgggtaaggaagcagagcatttacggaagcacggagaaaaaaggaaggagaaattccagtaaagtacccatgcaagccaacaagaagccggccaggtgttagaaccctagtattg

SEQ ID NO: 677232 - DNA, 812 bp, Homo sapiens
gccgacctttttgtttgtctttttttaacaaacacctaaggttgattaataaattagtacactggaaggcattttgctgatatcggtccttcacgcactacccacgaaaccccgacccacacaaaaagggaagttccacggccacccttgggcatgtggcaaccgtggcaacggggaggcagtctagccaaggggtacgacttggggtaaaagtggtgagcccaatagagtgttgccacaaactaatatttctacggaccacgagagggtgtcgtataaccaacgatgtgtgatcgaagacgcaactatgcgtatgacatctctacacaagcgattagactccggcgtgcgacagaagagagcggtacatctccgccctccaccgatgagcgcgaccccagacagacgcagtcccgtttgcgaaggccaaacggccattcagagttggggggcacccctttaagtgtggggacgtttcgacctgccgtccggatctcttatcttaacacccacaacacccctacaacagggtggacccaaagtttaccattatcagcgaccacaagcactcgcgggcccacacccaccgcccgtcctccatgtgggtgcacgccccaccacaacaacatgcccccacactcccagcataatgttgggggaaacacaaccaaggggggagacagcgcccacacaccccggtgggcgcacccacaacccgtccactggggagcaccaattcacaccagtcggcgtgacacccctgcttgatgtacacccccacccataagaacagcgccacccagtggaggtcc

SEQ ID NO: 677233 - DNA, 188 bp, Homo sapiens
  misc_feature (8)..(8): n is a, c, g, or t
  misc_feature (53)..(53): n is a, c, g, or t
gggccatngtgtcggatctggtggagcggaccactcccctcacattcacaggnccatggactcactttgtaacaaactcctatcaacactgagcaataaaaaaaacggtgggttttttttttttttttttttttttttttttatttttttttttttttttttatttttttttttttttttttattata

SEQ ID NO: 677234 - DNA, 216 bp, Homo sapiens
cggcccatcgttctttattttgcgtatttaaaactattagatcgtgtgattatatttgacaggtcttaattgacgcgctgttcagccctttgagttcggttgagttttgggttggagaattttcttccacaagggattgtcttggatttttctgtttctccctcaatatccacctcatggaagtagatattcactaggtgatattttctaggctct

SEQ ID NO: 677235 - DNA, 996 bp, Homo sapiens
gtgcgcgtggcctcttgtgaagtgttcctcacacgagtgtacatgctgtccactataggagcgaaggctgatgactgtacatccgatggataaacctcgtccgtggcgtaagagatggccctcgtacaaattaattgaactctcacttatcccgactccttcatacgagggtccgagttggtatcgctgcctgaatccagttcgagagatcgagagctctcgggaagccatggagtgcgtatcttgcgagaggtacgtcctgtgaggctagcttgctcgcttgtgtgatcgcgggtgtccaataacgaatttgaaatatcaatgcctgagactaatttttagtttgaagactgggtactactgaaggtataagacggtcgtcttagctgagtgtgactaggagctttgctctacggcataacgaagcatactaattctatgtaatgtcaccatgggctttttcttttctttcagatgagaagcgccacttatctttatgtcccacgatatcatttcgatgggtgcatccttggacatacgtaggtggacactcaaagaccttgagcataggtacaggtgaagcattcacatcgccctgggatcctaagagaaattagccctggtgcagccgaaggacccttggacattggcccgtgcggactatgttgcctccaaaggaggagttgattccagggaagacggcgttgtctcgcattgactctggaggtcctgttaaggggctcactcgtacattcatggtgaatggtcgagtggcacatcctttttccttactaccctagcagaacagtcgcacgtcgaaaggaatgaaggccaaggaataaggaatacagccaaagagaaatcaaacgatctagtaaaccactggtcctgaagatagtctccaacttggcatgtgaggacagaattcctgttcgcttacttttcgcatttaagcccctgtattggtggtaggttaaccttcgaggtttacaccta

SEQ ID NO: 677236 - DNA, 82 bp, Homo sapiens
ggatttgctggtgcagtacaactaggcttaatagggacatgagctccaagtacttgaaagtgaaagagaaaactggaaaaaa

SEQ ID NO: 677237 - DNA, 160 bp, Homo sapiens
  misc_feature (119)..(119): n is a, c, g, or t
  misc_feature (130)..(130): n is a, c, g, or t
  misc_feature (135)..(135): n is a, c, g, or t
  misc_feature (147)..(147): n is a, c, g, or t
ctcacccacagagcatggggtaatggtgtgtagacacaggccctctgcagaagcgtggggtggggacactgacagcccctatctggtccccaggaacattctaccattttttgccactngtgttcagctnccttntttttccccaanaattcccaaggat

SEQ ID NO: 677238 - DNA, 207 bp, Homo sapiens
atgattgcaactctccgcaccaatccccgccgcaaaaaaagcttaaagtgatatatttttaaagagtcagtaatataccgaccagatctttctagcattcaggtataggcgtttatgggggccagcgaacttgtatatatcagtgttctagaacatgtaattcttaaactctaagtaataaatacttccaatggtaggagaccgtcg

SEQ ID NO: 677239 - DNA, 401 bp, Homo sapiens
  misc_feature (11)..(11): n is a, c, g, or t
  misc_feature (36)..(36): n is a, c, g, or t
  misc_feature (58)..(58): n is a, c, g, or t
ggcctaaatanataatagcctgaatatttaattaangagcctttccttatgccccggnccctatcctaaagagccttaaccctactgtatcattgcatttaatcagcatgatactaggaaaaaaagcactgtgagtattatcttcatggtgtaaagaaatgaggctaaaaacataaaatattttgctcaggtcatgcagctattaattgatgaagttaaaatctgaacccaggtttcaattttttttttcaagacaggatcttgctctgtcacccaggatggagtatagtgacatgaacacagctcactgtagccttgacctcccaagctgaagtgatcctgccacctcagtctgctaggtagctgggactacaggcatgtaccaccatgcccagcttaat

SEQ ID NO: 677240 - DNA, 111 bp, Homo sapiens
agagcgctctagaggatccgtgagaggaggcgggctatagataccttcttgagctcgtcgtacaggacagcacgaagggcccccatgcccgaggacgttggacacgcaccc

SEQ ID NO: 677241 - DNA, 555 bp, Homo sapiens
ggggctgaataatattccattcattatatgaatatgccacattttaaaaaattctttatcagttggtggacatttgggttcttttctactttttggttattatatatagtgcttctgtgaccattcatgtacaaatttttgtgtggatatatgttttcagttacattggatataatatttaggaatagaatcactgggttatatggtatcttaactctatatttaaccctatacaagactgttttacaaagtggctgcactattttaaattcccaccggccacttgtgaggttgtaatttctccacattgttaccaacacttgttattgtctatctttaaaaaaaaattagctatcttagggggtgtgaagtggtatcttgttacagttttgatttttattttcctaatgactaaggatgtacattgagcatcttttcatatatgagctattatttttatagaattgaaagattggaattaagacaatagaatccataacctggataaacactattgctttcattagggaaaattcatcattaaagttcttcaaa

SEQ ID NO: 677242 - DNA, 137 bp, Homo sapiens
  misc_feature (6)..(6): n is a, c, g, or t
  misc_feature (119)..(119): n is a, c, g, or t
gatggncctcaaggatgctaagaacaagcgggaagggctggaggatgcccggcagaagggcaagcaggacctggccgggttgctgaaggagtaccaggagctgatgaacgtcaagctgngcctggatgtggagatcg

SEQ ID NO: 677243 - DNA, 202 bp, Homo sapiens
tggagcgatatcgttattaaaggaagtagaacagctacgaatggaatgctacagattactgagcagccataacacgatggttctaggtctcatagtggacgaggcagaggtcgtcaggaccctaatcacacctccagcttatggtacaaattctaagacagtctaacccctcatgaaatagaatctgacgggtaaagacaac

SEQ ID NO: 677244 - DNA, 432 bp, Homo sapiens
tcaatcaagcaggaattgcacaattgactcaatgctatgtgttctcaaggagctccttcagtctaggcttgcctccggactgccctcctgcccctaaggcaccgggacacacagatgagcctcccacaggcagctcctggagctccccaggtggcctctcatggtcacctacagctatgagctgtaaggcccggagcctgagccaccagactcacctggctcgccccaccctccctgctagcaccaaggcgtgtacagcatcttaagcttggaacaagcagactggaattttcctctgctacctcttgtgtacagaatcttgtttataaatttcaaaaggaagtagctaaactagggaagactctggattctaaatttggttcatgtgtggtggagttcttagcttctaagagtataaaataaatttttcaa

SEQ ID NO: 677245 - DNA, 824 bp, Homo sapiens
agcggagtatctgtgggtacccggagcacggagatctcgtccggctatacgtgtcagctcggtggtctgcaggcatccctccggttcctcctcctcagagcggacggagaccccaagtggactagaagttcgaccatcgttgcatatctctgcgagacgtagtcgcatgtcgctaggggaaggagtcttctgagcatcttcgcgggggaactccactatctgtatagatggtctgatcgtactctctacgcttcatacacaggtcttcgtgtacaagatggctgactgtggcactcaggttggatgtccttcacacatgagttctcatatgagtgctcgctagaaggtctccagggaacagatgacctaagacatcagtctatactaggggcaaggagttgtttcacaaggcgtgttagaggccactaatccaataaacacatatatggcgctctgccgatgggtgtaggctaacagaacatccgtgcaactgtctacgaggaacaacgaggacagagtgtgcacagatctgcatgatgcgagcagttggatggcatagcagcaaaatgagaatcttcatgttgggatgctgaacgccaattctggggtgtgtcccattgccgtctagcaaagcttggtgccgagttagacgaagtggggtcccgccatgattaccggcaaccattcggttggacttgggccttgtgcacactcctgaagtcgatcgcgtgcacatgtgcccaggggttgcgaatgtcatcgaatggggggttctcaatgtctgggaacgagctaggtcatgcaggagttcatggatcttccca

SEQ ID NO: 677246 - DNA, 790 bp, Homo sapiens
caagaatctgaaagtctaagataggaaaaaaaagtgggggggcattataaatctataaaatgtacttctattggcatgcctaatacgtctttatatgtatgtatgtgttgtgtacacgatgttttagtgctaaaaatatgtaaaagagctctacttggcttaaagaaaaataaaagtgcttaaatcagatactaaaaaagaaaaggctagtcaaatgctttttcaaatttatgtaacttaagtaaaatctttaataaataaagtagctttaaaattattggtaaagtagtattagaaatgtcttaagaattgccagcatacatttttgtttgcattatattaatcaaacagttttatacttatccctgccaaataccagaaggtgtcaaaatttcggcataggggttataaaactataaacccagcccaaaacagaatgatctttgcttgtgtaatttttaataaataagacattgatatgggtttaatgaaaacagctgcatcttgaatttagtaagattaccataacttctaatcctgtggctttaggcagtttagtccacagacaattaaggaggtttgtttgggaaaaggactgttatcgtcattgtttcgaagctgaactttaaactaggttcctcccaaagttcattcggctatgcccaggaatgaacaaggacagttggaaagttaagagcaaggtggagtcagttaggtcaacatccgttttccactgtcctcagttgttaattttgcatgggaagtttcataactttttaatcatgactat

SEQ ID NO: 677247 - DNA, 244 bp, Homo sapiens
cacgagcgccccaaggggtattcagcaatgcccacgggtttctgctggacacgagtctgaagcctcctctgtgcggacagacattgtgtgacaacacagaggccattgccagctacaatcagctctcaaggctccgccagcccagggaggtgcgctaccgcgtgagcaacctgtatgaagatgatcataggaccccgacggcgacgcgcgagcgggtggacttctagcaccatcagctggctga

SEQ ID NO: 677248 - DNA, 1131 bp, Homo sapiens
gatccccatggcggctgggagcctgtgcacgtagtccgggacaataactggcagtggtctgcgaggactctcactctggtgtctgcagtacagcggggctcagagtctcgggatgcgtctcacgcaccagcagccaacattccagtatataggtgcacaatccaacacgacacgtccgctgaacctttcgtaccgacaacagtttcctgtgcggccaaggatcccacgacatttgaggggttagaaagagtggagttctgtgatggattaagaagatgccaagacgtcgcatatgccataacctaatgtgaatgagatactgagggaagcatgctgggcgaaagtacttctcagtaggctacgcagcactcatggttgcgtgcagatggagtgagcatttgcctggatgccgaaatattaagtggcccacgcagtcccatgatagccctgaggaatgttttaccccacaggcataggggtcagtgcagtgccagcccagcagatataaagaggtgcgcacatgtaagtacagtgccgaaatgcgacgcggatacggtgaggagcgaaatgtgctggtgagcctggggtggcagtggcatgtagcttggacaggaagcagaagggagctgtattcctggatggggccggaagcgaaggtgaaccattttgagacatggacaatcgagcagatttggacatgtcgaccccattgttgaggtggggcttctaatgaggcaagggattctaagaagacccttacttttaccgcccaggggcccttatccgcaatgaaccaaaccggactagagtttccctcaccctagccatttaacgcaaggcgccccagttccggggactgtctgtgggggcgacacgtgacaacttgtgttgacagacagatgggcccagagttgggatgggttaaaaaagaggtatggcaggagaaacccaacccttgaaaccagggggaacgacccacgggaacaggagaaaggggtgtcaccgggacgagagacaaaagcacgacagcccacggggggaaacggaaacggggcgacacgaaagggcggtggcccctgagacctgagggaggacaactgggatagaaagttgcgaacggagccggagcgc

SEQ ID NO: 677249 - DNA, 109 bp, Homo sapiens
cccacaacaagtgtgatttatagcatcctgggcatgcacacagtagacttggggctctgcaccaggcgtttcttcttgtgttacctcttctcctcttctggcagagggc

SEQ ID NO: 677250 - DNA, 460 bp, Homo sapiens
ggtaactcagcaaagtagagaaagctaatgtttaattgccagtcaataagaatgtcgataaaaaccaagatgatattctcattagaacccaagagagcctaaggactagaggtgctggtgagctttgaaaggcaagacaagaggtggggtggatatgaagatgatgaacttagatttagacttccagattccctcactcacctgcatactcaggtagcatctcctccccgaacctagcaggcaatagaggtttatcttcctgagcaacgaatccggagagactctggactttgggttatcagagacagttgagtagggaagtgaggaaaagaggcaaaacaaagggtgagctaaaagtctctctactgaatggtgagacactcagcccgaatctcctggctcaagtgatcctcccacctcagtctcccaagtagctaggaccacaggcacacaccaccac

SEQ ID NO: 677251 - DNA, 548 bp, Homo sapiens
gcgagtttctggcaaccctgggaaaacgcgtgggccagccacgttaacactcctttcggtgtggaacgcagggaaatccattgccggcgctgcggcggtcatcagggccatgtgttcgatgacggcccggcacccaccggcctgcgctattgcatgaacggcgcagccatgacgttcaccgcggcttaattcgatgtcttcttataagggaataccccatgtggcttttggttctcgcgtatctgggcggcgtgctgacgattgtcagcccgtgcatctgccggttctgccttttgtcttcgctcgcaccgggcagccgtttttgcgcagtggcttgccgctgctgctggggatggcgatgacgttcgccctggtcgcctcgctcgcggcggtgggcggcggttgggtggtgcaagtcaatcagtacggtcgctggctcgcgttgctgtttgttgcgctattcgggctgaccttgctgctgcccagtctgtccgaacgcctgacccggccactggtggcggcgggcagtcacctgtcggaagccgccg

SEQ ID NO: 677252 - DNA, 389 bp, Homo sapiens
cagagacatctacaagctgagcatagcttactaggcagcatgggctcagctatcaaactcgagcacacatcataatgacagtgtagcattcacctgtgcagcaatcagcgtgagtatcttcacgtacgagacgatatactcggtacctcaagtatggcatttatccagttggtctaatccatatggaatgaccatgtcaccatgtatagtcatgcaaggatccaagctgtgtctataaagcagcgtgtgcccattaagcctgctcgcctccgccagcactagtgagcacgtgtagccacggttgatggtcgtgccctacacctcaatccgaacgtgagaatatgaaaggtgacgaacccgcccgacgagctctcttccccgcgtgcgac

SEQ ID NO: 677253 - DNA, 455 bp, Homo sapiens
gcacagagcagggagcagcacagagcagggagcagcacagagccaaggaacagcacagagcaggggaacaacacagagcagggagcggcacagagcagggaacggcacagagcagaggaacggcacagagcagaggaccggcacagagcaggaaacggcacagagcttgggagcggcacagagcttgggagcggcacagagctgggagcggcacagagcagggaatagcacagagctgggagccaagagcccggatcacgcccttcttgctggcccttactggccactggcacttactgctgactgctcgggtcatgtgcccgggctttcggaacaagaagagctgccagttctgactcgtccccgtgtcctgcacacagctggcaatcaatgctcactgcatggctggaaaccgagttccagaacctgctgtgtcttaacaggtcgcccaggtt

SEQ ID NO: 677254 - DNA, 1063 bp, Homo sapiens
cgcggcggtggctgccgggaccctagcagtgtttcacgtcatgtgagcgggggcggcggcaatcgatgggatgagaccggcggtcggagtgtggtcctgcattcaagaccaactatgctgtgcgagcagcaaaatggagcctttctacaagggcggaaaagcacagctggacctagacgtggccacagcaacgctcttctgcgttctgtggcgaccagaggtcaacattctggcaagtggcctcgaggggccgtgtgcttgcgtgagtctggagcatggaggaccaggaggacatcgactgcgctttgacctcatgccctgacaacgaggtgctggtgactaggcagtcgggcattgctgctggctctgtgggaccggtgcagtgagggcatgcgtttcccggctgtcgaatggcgagtaacacgaatcgggaccccgttggggccgccattgggtcttcgaacctcctaggcttcctatctacttgctatggcccacagggtgggcttgtgatcgtggggcctgtgcgctgtctgaggacagtcgctgcggctactagcgggacgacaccagttgccggagggctcgacaccggctgttctgatggcaccctaggtgagaccttccacaccgggagccctacgactgacctgtctgcctcttgcgtccctcgtgcccacgggattgccgcccatccgtcgtgtggacacgtgctcgggagccggtcatgccgtgggcttgtgcttgagcgtgtccactaacagcgcccgtctccctcacttggggcttcaggtcggccgacgggcacaccatgcgtcaagcttcccggcaccggtgaaccaaagcatactgttattcaatctgggggaaccttttcagagaagactggccaaggggtgcagaggaagggaaccggtggccctggcggatatggaaaaagcgctgtgaaggcatggctgctgcttgtcgcgcaagaggcaaggccaggttgggccccagtgtgggtgttagtagttccccaaaggggtctgttcgctttctgaacagaccaggcggaaccaag

SEQ ID NO: 677255 - DNA, 141 bp, Homo sapiens
  misc_feature (1)..(1): n is a, c, g, or t
ntcccgatggttcaacggaactttactaaattctccagatagagctcgcgctgcagctcagcccatgggagagcagcgttgtaacagactcctgacgcccacacagttcgttcctggccagaagtaaaagcacagctgcct

SEQ ID NO: 677256 - DNA, 199 bp, Homo sapiens
cttgctcctcgaccggggcgaaggggtgcatctgcgagaaagccggccaggtcatagcctccatctcggcagcggcattgagtgtcatcgtgcacgaaccgagcgggatcatgccgcggtccaggccataatcgcggtccgccaaacgcttgagatagcgcatcatggtggtttcggtgtggtagctagaaaagaccgg

SEQ ID NO: 677257 - DNA, 211 bp, Homo sapiens
  misc_feature (58)..(58): n is a, c, g, or t
  misc_feature (64)..(64): n is a, c, g, or t
  misc_feature (147)..(147): n is a, c, g, or t
catggtagcccaccctgtaatcccaacaccttggaaaggctaacggtgggcgcaacanttagcntttgaagcccccaatgggacgtttgtgcagaacagcctaggcaacatggagaaaactcccgtctctacgaaaaatacaaaaanttaattcttgggggctcgcttggcgtggtgttggccaccaccccttttatttgggcttccccaa

SEQ ID NO: 677258 - DNA, 213 bp, Homo sapiens
tgactctgattagtggtgcactagttgtatgtatatcagatctcatggagacgttgtaagaagaattagttacttttattgatattgcttctaagtgaacttaacctaaaggtatatcagtaacagcggcaatacccttcatttcctcttcaaaagggccaggaaagttgccaagtaggccaggcaatttttcatccaccacctgcacaactg

SEQ ID NO: 677259 - DNA, 215 bp, Homo sapiens
agatacgcgtgtatacatatagggtgtgacatatatacactgtgtatctatattatatatgaagcgcctaaattggtagatactctatcacggggcggagggtcctagcgggagtgtacgcaaatgcgcgtatccgtactaatctgtcttgaagctagcgttagggcggcaatagcacctccgacgcttggtgggacgagtgacctcatagggtt

SEQ ID NO: 677260 - DNA, 342 bp, Homo sapiens
gaaggtagaggtctttttgtttaagcgcgcgaaccggatctaatcgcacgaaccgtttgtgcaaacggtagttccgttcgggccttggcacacgccgttggtgcaaacggtagtaccgccgggtccctggcatacgccattggtacacacggtagtgccgccggggccttcgcacgtgccgttggtgcaaacggtggtgccgcccgggcccacgcaggtgccgttcgtgcacgagccggggccggcgaagccgccttccgagccgccgtagggatcgttgggatccgaggggccttcgttcccgttgtcgccgccgtcgctggggggattcacgtagtcgta

SEQ ID NO: 677261 - DNA, 537 bp, Homo sapiens
cacccaaccgttgaaaagaacccctttaaaccaattcgggggtgggaccaggggggtataaaccattccttgacccctttattcccagctacaaaatttgataaagggaaagtctggcaatgcggccctgaaaaaggggacccttcccggggttaagggccaagtagtttccttccatgtacgaaaatgtgatgagtgcacacacagccccggttgtgtggggcagcccttgaggcatcatttgccaggacacccaaagaatatgcccgtcaccgcggagacttggaagagggagaaacccattgggtcttcattgtctaaaccccttgctcataacaagtgatgtggagtccccgtgaccagtgggccctcattcccattggcagaacaatccttgttcttgttgggacggatttaaaggatcagcaaaccatttgtccatgatatccttacctttaagtagtaaattgcaaatactgcgtgatttccatccatattgttttaatggattgttgaagggaatccatgttacaaacc

SEQ ID NO: 677262 - DNA, 279 bp, Homo sapiens
cacgaggggtattgttcgtccagcatcattacaggttcacagtgtgctggttacaagttctgactcaagtgtgattattcaggagggagtaccttcaccaacctcaagtagtgtaatcacccaggcaccatcctctaagaggccaattgtccctgtaccagggccatttcctcttctgttacatcttcctaagggttactccaagcctgttgctattcctgcatcaattacaagttctgatgtgaatgttccagatgcattccgactcgtttgaccagt

SEQ ID NO: 677263 - DNA, 506 bp, Homo sapiens
ccaaccttcaaaccgcctgtgccatatttcgggaggctgcaaggagggctccaagctcgaagaaccatcatcatcaaggggtatgtgcctcccacaggcaagagctttgctatcaacttcaaggtgggctcctcaggggacatagctttgcacattaatccccgcatgggcaacggtaccgtggtccggaacagccttttgaatggctcgtggggatccgaggaaaaaaagatcccccccaacccatttggttccggacagttttttgatctgtccattcgctgtggcttggatcgcttcaaggtttacgccaatggccagcccctttttgactttgcccatcgcctttcggccttccaaagggtggacccattggaaatccagggtgatgtccccttgtcctatgtccagatttaatttatttctggggccataactcatgggaaaacaaaattatcccctaggactcctttttaagcccctaataaaatgtttgagggggtcca

SEQ ID NO: 677264 - DNA, 743 bp, Homo sapiens
tggacaaaatgggggcaggaggcaggggcgttggtgggaagcgcagttcgaaaagcgatgccgattctgggttcccgggggtcggcggcccatcttcggtggacccagcgctgaggcggcggcggagaggcccaagaaaataaaaagcggggcgtggcggcggctggcgtcaggacccgctggggcttggaggtttgcccagttcccgtggaaaacggtgcggctacaggagcgcacagagcgggggctggtggctcagaggccccaatgtgaaaacactctctctccggggacagggggccccagaggcaaacaggggcgtgacaaagagagagacaccaaggtccagaaaagaagttcagcgtgcttctcaagaaaccccctttgcgggttgtgaccctcaatccgtcgagaacacttccaagagtcccgtgcccccaagagacgtccttcgcccaccgaggtcccccaagcgccaaaaagtctcaggcggaaggagcagtctatgggagaagctgggccaagcaagggcaagtctgccccgggatggtgcggcagggcccaggcccgggttcctcaacctttctgcaacatgggccaagccccgggcccaggaacaccgtaaaagggccttctaaacctgtgggcctcagaaacccttggaaggccgttgttggccagataatttcctgggcgacccgaaaaggttgaatgcagaacctgcacaacgccagcccccggtg

SEQ ID NO: 677265 - DNA, 144 bp, Homo sapiens
gccggctcaacgtgttgatcttactcttctgcttcatctgggactttttctattagttattccccaattctatctttaatctctacatcggccatcaaaaacaaaaaggaaaaaaaaatttaagccccaattgagggccctttc

SEQ ID NO: 677266 - DNA, 444 bp, Homo sapiens
ggcatattctctgcagaatttctgaaagttttccttccatctctgctgctctctcatttgctggccatcggattggggatctatattggaaggcgtctgacaacctccaccagcaccttttgatgaagaactggagtctgacttggttcgttagtggattacttctgagcttgcaacatagctcactgaagagctgttagatcctggggtggccacgtcacttgtgtttatttgttctgtaaatgctgcgttcctaatttagtaaaataaaagaatagacactaaaatcatgttgatctataattacacctatgggatcaataagcatgtcagactgattaatgtctactgtgaaaatttggtagtaaattttcatttgatattagatataaatatctgaatataaataattttaatatactagtccatgatgtgtgttgtatt

SEQ ID NO: 677267 - DNA, 81 bp, Homo sapiens
accgggccggaatgtacaaagccctgatgcggggtgttaggaattacctggaattgtcaataaacaaatgctgctgtccga

SEQ ID NO: 677268 - DNA, 209 bp, Homo sapiens
caggaaaaggacgctagaaccaaaatgtgtttagccacagttatacatgaatacaaactgacaagcttcactattttatgaatgaactgtatactcccagctatatacttttcgtatgagcaactagatcattcacttttacgaagcttactcctcaacttatgactcttttaagaaatggtaactttggagcatatagccttttttaa

SEQ ID NO: 677269 - DNA, 361 bp, Homo sapiens
  misc_feature (307)..(307): n is a, c, g, or t
  misc_feature (322)..(322): n is a, c, g, or t
  misc_feature (358)..(359): n is a, c, g, or t
cgggcaacatgtcaaaactcccatctcccacaaaaaacacaaaaaattagcctaggtgtggtggtgcaggcctgtagtccccagctactcaggagactgagtcgggaggatggcttgagccccaggaggtggaggttgcagtgagctgcgattacacccactgcactccagcccaggcaacagagccagaacctgtctcaaaaaaattaaaaaaaccaaatcagcaaaaaggtcttagatagccaggcatggtcgcctgtagtcccagctactcacagggttgaggtgggaggatcacttgaacccnggagttagagaccancctgggcaacatagcaagccctgtttctgaatatannaa

SEQ ID NO: 677270 - DNA, 145 bp, Homo sapiens
cggacgttaaccgaacaggctactgaaattgtcttgctcgtttgcttgtttcccctcagtcattcctgttgcgacctgagctccacaaccacaggacactgcaggtcagacatgaagacagagcctttgtcctggacctgttcgg

SEQ ID NO: 677271 - DNA, 136 bp, Homo sapiens
attctcctctcttctgtgctgtagtgtgctatgcgatcatgggtgtcgcaactaagttcggcatcatatggtgactcccgggactgttggacccaccaggttgcctaaggcaggaggaggaatactgccgggtacc

SEQ ID NO: 677272 - DNA, 113 bp, Homo sapiens
tctatagatctcgaggttgtggaggctgaggagctgggcgggcagggagagggtcttggggacagccctcctgggtaatctacattgtgttccccctaccctgccacacacct

SEQ ID NO: 677273 - DNA, 902 bp, Homo sapiens
tctaatcagaatcttgatgcgcatgcagtttaacaaggtcagaagagatagagttgctaaacccagtgtgatacctcagattggagcgggaattcaccaggtatgcttgtagcacagcaaagtatagttgtgttgaacatagaactttatagtcattttcgggtttcatcctctatgtgagtcagctacaacaagtggtctcattttaacaacagtagaacttcctcgcttttctactgtaatcttcccactgactttactgcacaggtatgaaatactagtgtatggatctcagtaacctttttatttcctagatgattgaaatataggtatttactccatttaaacccaggtgataagatgatgtaaatactcagggagggtaataacttgttacttattgctcgtagggggtgtaaagtgccatgatgaataatcttcaattcatgattctagagtaagtttaattggaaaaagggggctcacacatggggtggttgaccattgattctttatattaaaaacgatgaacatgtttgtggactgatacattaaatctactgaatatgaattgtgatgatattctcactgcaaaatagccgtttgaaactaggaagaccacggtccagtcccccattttgtcagtaggccaaccagggaaataagttatgatcccgggtgcaggaactggcaagcgaatgcatggtgtggaaccatattgaacgggaggtgacgtggtgcggtaccacctaggaggggggaacagtgccgagtgcgacggagagtgtacacggccactggtaaggaaactaaaagaaagtgagggggaacgtgaaaatgagacgctagagtgatattacaagctctcttctccttcacataattttaggaataggggggga

SEQ ID NO: 677274 - DNA, 338 bp, Homo sapiens
tgggccgcaagaagggagccaagttgactcttgggggagaagggatttttcacaaaaaaggatttaaaaaaattccgaagaaatttgttgaaaggaaaaagaattccaaaatcagctgttttttgggggagcagttccagcagggcaagctttttgcgtgcatcgcttcaaggccgggacaattttgccgggcagatggttttgttttagagggcaaagggttggggtttttttttaggaaaatcaaggcccgcaaaggcaaataaatccttgttttgtgttcacccatgtaataaaggtgtttattgttttgttccccccaaaaaaatgacaaaaaa

SEQ ID NO: 677275 - DNA, 857 bp, Homo sapiens
cacagtggctcacacctgtaatccccatactttggaagtctgaggcgggcagatcgcctcaggtcaggagttcgagaccagcctggccaacatggtgaaaccgtctctactaaaaatacaaaaattaactgagcgcggtggctttcatgcgcgtccgtgtgaagagaccaccaaacaggctttgtgtgagcaataaagctgtttatttcacctgggtgcaggtgggctgagtccgaaaagagtcagcgaagggagataggggtggggctgttttatagtatttgggaaggcaatggaaaattacagtcaaagggcgggcaggagtggggggtcgcaaggtgctcagtgggggtgcttctgagccaggagaagaaaatttgcagggttaatcactcagttaaggtggggcaggaacaaatcacaatggtggaatgtcatcagttaaggcggggcagggccttttcacttttgtgattcttcagttacttcaggccatctgggtgtatatgtgcaaggcacaggggatgcgatggcttggcttgggctcagaggcctgacagtggcacacgcctgtaatccccagctacttgggagcctgaggcaggagaatcgatgaacccaggaggcggaggttgcagtgagccgaggtcgcacattgcactcagcctgggcgacagagtagggtccggctcctaaaaaaagaaacaaaaaaaaacacaactggggggcgccggcccaaaaagttaaaccattggggggcgggcccagagaagaactggccacacgggccagaaccggagcgaaggtggttccaaaaacccggcgcgggcacaacggggccggacaaaccaaaaggg

SEQ ID NO: 677276 - DNA, 245 bp, Homo sapiens
ggtggaactgagctccgctcctgaatctccaaaggagcccatgctgcccggcttccctgagtcattttttccagcatcctgtcagatcccttcatgtacttatttcccccttgtgttaactattacgataataattttttaggaattgaaatgtcactctttttatattcaactcacattacgtatatttagggatataaaaatttatagagattgtataaactctcatcttgtggtgtgatata

SEQ ID NO: 677277 - DNA, 493 bp, Homo sapiens
  misc_feature (183)..(183): n is a, c, g, or t
  misc_feature (191)..(192): n is a, c, g, or t
  misc_feature (203)..(203): n is a, c, g, or t
  misc_feature (218)..(218): n is a, c, g, or t
  misc_feature (220)..(221): n is a, c, g, or t
  misc_feature (233)..(233): n is a, c, g, or t
  misc_feature (245)..(245): n is a, c, g, or t
  misc_feature (275)..(275): n is a, c, g, or t
  misc_feature (279)..(279): n is a, c, g, or t
  misc_feature (283)..(283): n is a, c, g, or t
  misc_feature (291)..(291): n is a, c, g, or t
  misc_feature (301)..(302): n is a, c, g, or t
  misc_feature (308)..(308): n is a, c, g, or t
  misc_feature (322)..(322): n is a, c, g, or t
  misc_feature (334)..(334): n is a, c, g, or t
  misc_feature (339)..(340): n is a, c, g, or t
  misc_feature (347)..(347): n is a, c, g, or t
  misc_feature (351)..(352): n is a, c, g, or t
  misc_feature (361)..(361): n is a, c, g, or t
agaaggcaaagacgcagaaagaaaattccctgctttcaaagaaacgatggacaggagaagcaagcaggcgaatcgtaatgaggcgtgcgccgccaatatgcactgtacattccacaagcattgccttcttattttacttcttttagctgtttaactttgtaagatgcaaaaggttgatcaagnttaaatgnntgtgctccccnttcacatcaaagaantnntgacaacgaggncgccctgccttncccatctgtctatctatctggctggcaggnaagnaaanaactgccngttggtgaannaaaaantggggtggaaaaantggggtgggacncccanngaaatcnagannaaaaccaantggcccaaggtgtcctgcaggctgtaatgcagtttaatcagagtgccatttttttttttgttcaaatgattttaattattggaatgcccaatttttttaatatgcaaataaaaagtttaaaaacttaaaaaa

SEQ ID NO: 677278 - DNA, 117 bp, Homo sapiens
tgtggtgttactgtctgtgacacatgtaagcgtattacggactgcttctccctggatccacatgagctttccccctcttagttgtttttctaaaagatacaacacccacctagccac

SEQ ID NO: 677279 - DNA, 227 bp, Homo sapiens
ggtagatacgctatcacctccactaccatttgcgttcaactgtggagagagatggacctataaaaacatctgctttacagtgtgggatgtgtgatgcgacaggacaacattcgatcccctctggagacattacttccaaaacacccaatgggttgatatttgtggtcgacagcaatgatcgggagcgagtaaatgatggcccgggaagagctgatgagaatgctggc

SEQ ID NO: 677280 - DNA, 363 bp, Homo sapiens
ggcgcagctcacacagtaatgatatgacaggtggcggagctcacacagtaatgactgggggcggggctcacactagtaatgctttggcaggggtgggagttcatgctagtattctttggcctggggcggggctcgaactgtaatactctgtcaggggggggggctcacacagtaatgctctggcagggggcggagctcacacagtaatgctctggcagggggcggagctcacacagtaatgctctgccagggggcggagctcacacagtaatgctctggaagggggcggagctcacagagaaatgctctggcaggtggcggagctcacacagtaatgctctgagaagggggcggagctcacag

SEQ ID NO: 677281 - DNA, 195 bp, Homo sapiens
  misc_feature (153)..(153): n is a, c, g, or t
cataagtcttcccgggcggcaaggagtacctgatgcgggccacttcggcctgctagtgtggaggcgaagacaaggagggcaagcccccgatcagtgtcaatgttcgagatcctcttacttcactactctccgtgcatccagtgtgcgctactnctgaagatcattagacgaagatgtgggtaccacggccctgcc

SEQ ID NO: 677282 - DNA, 188 bp, Homo sapiens
tgggggggccggggggggccctttttttttaacccgggggcccccccccggcgggggggaaaaaaggcttttaaaaaaaggggggggggggaaaaaaaaaaaccccccctttttttttgggccccccccccctaaaaaaaaaccattttttttttttttgtggccccccgccccccccccccaaatta

SEQ ID NO: 677283 - DNA, 574 bp, Homo sapiens
aggtcgacggagactctcaaagtatgggccagatctttagcatggaccatactttgagagatatgcttcaaacagaaaatgcccacccctcctcctttacccagcataaactctatggttaattcttaaaataatgccttacagtctccattaactcccttgcccttctcttgctttgtcatgctcgcttggcaaaacctcatctctgactaaatgcagttctttgccttctctgttcctgcaccaaaaatgatcaggagaaagcatattaccaggctgaactgtcactttaaattcatgaccagtaacttcatggaggcccttaacgtttcctgatggtcatactacaatttttggagtccacttaactcccctgctttcctaggccactactttatactttctctcttctgtaacttccaaagcatccctctcagttctcatgctcagctgatggttatttttctgcctcggcgagagtctccgtcgaactagttcgacggagactctcaatcccaggttttcaaagaaaaacctatctaaggaatacttaccaaaatcagataagaaaatt

SEQ ID NO: 677284 - DNA, 1747 bp, Homo sapiens
  misc_feature (1302)..(1302): n is a, c, g, or t
agatcagccttagtcaatatactttgcggatcttaagtgatacagattaagcaatccagggtcctgtccatacaagatgggagagagttattaccaggatgtatatatgaccgaaactaagggtggacgtgatgacagttagtaggtaggctatccagtcggaacgttgtagccctagacaggtgatacgcgccaagagagtcgggatctctgagaattccaaggtcatgtggcgtggatgcagtatgaccctaggacattgatatatcgtgtcgtaataccatgtacgtacaaacacgaagctgactgatcattccagatggtgtcttagtcattcttcactgaagagtcagtgcgactcgcaggctcaagatggtcagttgtgagcatcattattggcatgcgagtccgatgctcacggctaagtgttgtgtcatgccaataactaggtacaacgaaagtgtacgcctgcgaaaagacttagggaattttagcgtgcagtctccacgcggtgacaatgaatgccacatgtatgtgagagtatcgtaaaccatgtgtctatgtctgagggactaagtgtggcacgaaactagtattgatgcacggtgttcgacttagagacacatcatgcatcagaaggcggagacctaaacacatgcacgcgatggctgtgggtctacggctatgcgcccacgaaatagggggtcacactggtgcgccggcggtgtccatactagataatctcttgtgaggatatccatattgtttgcccgccgagatgtacgaaagggacaaatcctctaatatgtacggggccacttttcccaataggccgctaagtcaagatgttaactaaccatttgccaggctcggttgccacaatgggcgtcctctggatctagatactcgggctaagctcaagagggtcaccggacaactaaaatagagccatagggcatggttaccaatgaggtctagggcgagattgcctatttgtttatcccccccggaacagctatgccttccaaccttattctttcttttaaactcacggcgtaacctgagtaaaggccggttggccttatatagtcaaccaggtcggcaggcgggcattggaaggcccttctatcctaggtacaccttaggagtcagggaggcacatatcggggagccgctttttatcgttacccaagcgccaaagacttcaccctcgggcggacgaacacaaaaggccctgcgtgagcggtcacaccgtggcgtcgtttaccacacttgtaggccacagggcacacagagagttancgaaacagaccccccacggacggctatcccccaccaaaaagccaaccagggtaggcagagacgccctctggcgaggcgcacaacacagggcctagggcccgggacaacacagagagaccgacgcagtcagaccgcgaccagctgaccaggtgacttgggttccccccctgaagttgtaccccaagagtcgacaccaccccctccgctgcaacggaagaccaccaggcgaggacgaaccgcatgaatacatacatacgccaatcctaccgacgagacgcatcagcccagtgtggcctagagggactcaagaacgcggcacacagatcgcccgtcacgaaaagagaccagaaatcgctccacaccactggacgagtcagaacacgaaccaccgcacacagccgagaagccctaccagcggcagcaccagcagaccacacaaacgaag

SEQ ID NO: 677285 - DNA, 140 bp, Homo sapiens
acatcagagtacagtaggtaccacataaatcacggggaaaaaacggataaaacagtaatataaaagcatttacaaagtcccagcacattggcacgccatggggataaggggaccctcaagatgtccagccctggcagggc

SEQ ID NO: 677286 - DNA, 322 bp, Homo sapiens
taaattggggacccccaaggtggtaaaaatgtttgttttacctgacagttataccacaggtaaactgtcaattgtgaaaaaagtgaatcaataactgtgtattggtttaaaaaattaaattaatcctgtgaaaaaagtggctttttttttctaaaggaagttatagtctttggacccactaattttggatgcggccatcttccatttggggtgcacctggtttccaccaagcaggcctgttaactctccatgactaacactggtgtaagtcgctcaaaaagggaataaaatggcttttctcactataagaaaaaaaaaaaag

SEQ ID NO: 677287 - DNA, 1772 bp, Homo sapiens
  misc_feature (1)..(1): n is a, c, g, or t
nctgtcgcagtcgtgctgctatttttacctctcgctgttctcttctcgcctgctgtggttcgtctgttgagtggctggcgtcggctctgcgttctgtgtgggtatcgtcgctgctgctgcgtctgtgtgttggctctgcgtcatgacagtcgtcgtctgtcgtggtcatctcatacagtgagtcacagcaatacggggatcgcctttgtgtggtgttgatggagggcgtcctctattgtttccacagcagctatagttgctccctgctgtgtagctggtttgggtgtgtgatatttgcctcctcgtcttcctgtttggcttttgtctcttcccttctacgctcacttgtgtgttgtgttgatgcgtccacgagtctggccaccaacccactccctttgggcttttttgcgtacatacaccttctctgggtcgttggaggtggtggcctcttgcctatggtcggctctctctgtgacatacccggctcctaagcggatctttatttctcttgtgaggctgtgtgctagttctcgggcgctttgaatgcccagcagtgtgtcttgttgtggaagtggggtgcccccttctttgggggggttattttgttgagataatggtgggctcagccgtttggtttggtctgctcccgggggggtagcccccctaagagccgtgcttgtcggcgctagggagatggtcaaaggggtttgggtgttggtaagatgctcccacgcgtgttttgtattgggggggctccttcccactgcatagcccagcgttccaattattgtgttgtgtgtgtttgggtagtgaattcgcctccgttgtgtctcacaacctatttggcgctgttggttgggtgccaccacctacaatgttggtggagattcctcctccctctgtatggtggattgatactaatgggttccaatcctccaacattttttgggagaggtccaccactttcgtagcgcgtcgcttgtggtctgtccacccacttgttttgggaaggctctcccctcgtggaaaagggttgttatacagtgcccctctgcctctctggggcgcgttcggatttgtcttcttttcccacgcgcccactgattttgtgatcggtatgctcgtgtttcctcgtgcctcgtctgtgataggttgtgtcgctcggtgggccacccacgcgccctccctctaatagtgcacacacttttatggggcacttcttgtgtcttcgacactgtcgtctcccacactctgtgccactgttataggctttgaaaacgccctctcgcccacaacggtcccacacagagtgttcacaggctatagtgcgccccacaacagagagagatgtcacagtggcctcacaggaaaaccactctataaaccacggtgtgggcaccacagcacttctgcacgctgcacttcttgcacctggcacaccctcgagagttgtggcacaacactgtgtcttgcacaagagtgcccactcttggagattgttttatagtggagactataacaccctctggtggcactttctatgaggtggcacaataatttatattgttcgccgcgttataaaagagaagtgagccacgtggttagctctagtgtccttctctttgagtgtaaggttaattatgagttagctcttggtgcacctcgtttcacctaactccacgcactgggaacccacagatgaaattccactttgtaaggtagtgagaccaaattgatgatcccttaagttaaccataaaagtgtcccattga

SEQ ID NO: 677288 - DNA, 517 bp, Homo sapiens
ggagagagaactagtctcgagttctatttatatttttcttgtaaaaacggggggtggggctcctgctgtgctaaggctggtcttgaactcctaggctcaggtaatccttccgcctctgtctcccaaattgctggaattacaggcatgattcaccatgcctggccagaacaatttgtgttggaaaattaccctgagccatttcctgaagctcacctacacctggccatccccacagtgggagaatatcttcacgtgtatctaccggctaggagaaaaatctggggggcagaaatcaccttattccaaaagcaagcaatttacgacgacagtaagtacggatgttctcgcagcggacgatcgtcaccgccataagcggacattgctcctaataacacaaagtagaccgacttcggaacacacaccaaaggcgagaggaacactccacccctcctagaactccccagcgaaatcactacaggccctcatgtgagaccaaaatctacaccctcgcgacaaa

SEQ ID NO: 677289 - DNA, 697 bp, Homo sapiens
  misc_feature (265)..(265): n is a, c, g, or t
  misc_feature (395)..(395): n is a, c, g, or t
  misc_feature (514)..(515): n is a, c, g, or t
  misc_feature (607)..(607): n is a, c, g, or t
  misc_feature (610)..(610): n is a, c, g, or t
  misc_feature (616)..(616): n is a, c, g, or t
  misc_feature (634)..(635): n is a, c, g, or t
  misc_feature (685)..(685): n is a, c, g, or t
gcctcctactcgtcatggtacccattctagtcgcaatggcattcctaatgcttacggagcgagaaaatactaggctatatacatactacgcaaaggccccaacgttgtaggcccctacgggctagtacaagccttcgctgacgcctattaatacgtctttcaacaaagagcccctaaataccctggcatcatctaccatcaccctctatgtcactcgccccgaactttatctctctagcatcgcttcttctactatgaacgcccngctttaccgatagccaattcgcccttgtgtctagagcgtcatagccataggtcctccataattgtattcatagacgcaacctcgtatgcctgatgcgcgttatacatcgaatgcactctgatcatgggtngatgcatccaaatctcataagctacgccactgatgcggctgcacttggcgaagtcagtgagcccgagaacgacatctgcactattgagagtcagccgctgagccgatcagtgtctacgnntatcaacgaattactgaagtaatggctggcatccttgtatagcctcatccaacgcgcttaatcaaactaacgaacagatggagacagcctcnttngattancgtcgctgcccgatcganntgatcccttggggccccatacatcatcgcatctgtagtcatcgcgaactnacttaaaagcag

SEQ ID NO: 677290 - DNA, 1182 bp, Homo sapiens
  misc_feature (49)..(49): n is a, c, g, or t
  misc_feature (81)..(81): n is a, c, g, or t
  misc_feature (83)..(83): n is a, c, g, or t
  misc_feature (89)..(89): n is a, c, g, or t
  misc_feature (107)..(108): n is a, c, g, or t
  misc_feature (178)..(179): n is a, c, g, or t
  misc_feature (181)..(181): n is a, c, g, or t
  misc_feature (184)..(184): n is a, c, g, or t
  misc_feature (205)..(205): n is a, c, g, or t
  misc_feature (211)..(211): n is a, c, g, or t
  misc_feature (232)..(232): n is a, c, g, or t
  misc_feature (249)..(249): n is a, c, g, or t
  misc_feature (312)..(312): n is a, c, g, or t
  misc_feature (324)..(324): n is a, c, g, or t
  misc_feature (389)..(389): n is a, c, g, or t
  misc_feature (412)..(412): n is a, c, g, or t
  misc_feature (451)..(451): n is a, c, g, or t
  misc_feature (487)..(487): n is a, c, g, or t
  misc_feature (513)..(513): n is a, c, g, or t
  misc_feature (593)..(593): n is a, c, g, or t
  misc_feature (657)..(657): n is a, c, g, or t
gatgccatctgtgagcacgctgtgggcaggtgggagcttgattctcagnactgggggatctgttgtgtacgtgaagagagntnaggtgntgggagatatagaggggnnctgcctggcccccagctgtgtgtacagagaggtcaagcccaggagaactgccccgtgcagactggtgggnncnctngtagagatggaggaggaggcnattggnttggcgctaggcatacaagtnggggttgtgggtgagcnagtgcacttggcctctggattgtgggaattaaggaagttactcatcctcttgaagatgctganacaggagagaanggggatgtatccatgggggcagggcataacttgtcccatttctaaaggcctcttctcttgctgtntcataccaggccgccccagcctntgagcccctggaactgctgcttcttaaccccagtaagcnactgccacacttctaaccctctccaccccatagtgnccggctgcttttccctaagcctaggncctcttgcggtcccatctaactaacacacaaaatgtacccagtattctaggtagtgccctattttacaattgtaaaactnaggcacgagcaaagtgaagacactggctcatattcctgcagcctggaggccgggtgctcagtgnctgacacgtgtccaccccagtgcacccactctgctttgactgagcagaactggtgagcagaactggtgggatctgtgcccagagatgggactgggagggcccacttcagggttctcctctcccctctaaggccgaagaagggtccttccctctccccaagacttggtgtcctttccctccactccttcctgccacctgctgctgctgctgctgctaatcttcagggcactgctgctgcctttagtcgctgaggaaaaataaagacaaatgctgcgcccttacacatgaacaggagatacatcaaaggcctcaagttcaaccttcaacggagaacttctgagaggcaaggaaattcaccagagcttccagcacctccatgcagcaacctcaagtcagatacaagcgatgagctggaagctgagatatgggaaatgccatgtttgtcaaaagagcaactcaggtctgctggacaaggtacacggagggatgccaaagaggctgtatggtccgaggcctttgcacatg

SEQ ID NO: 677291 - DNA, 343 bp, Homo sapiens
  misc_feature (326)..(326): n is a, c, g, or t
  misc_feature (328)..(328): n is a, c, g, or t
gctggagtatgtttacgttcttgtcatctgttcccttaagcaattcctaattctaatatgtttttgtatcttacagatagaagtatgtgaagaaaaagcttcagctgttcttccccctacctgtatacagcttcttgacagcagtaactggaaagaaaggctggcttgtatggaagagttccagaaggtagtgcatagggaagaattgagtgtgaaagaaaattagattatatggaagcagcgaaattgatgaatgaaggatttgtcctaattgctgtgttttataaccggtgaacacgttttatggcattaaagatgaggtgggncnttttaaaaaaaaaaa

SEQ ID NO: 677292 - DNA, 482 bp, Homo sapiens
tagctcggtaccgacgctctctctgtgcgggtggatgagggtcagactgtgtggagggcttactggggttaatgaagcagcagtccgagtgtgcctcagacggcggtggtgcgtgctgatgatgacacagtcaaggtagaaaggcctatgagaaatgggagaaagtcatggccctgtcccccatgaatacatccgcttgctctcctgtttgcagcatcttcgagaggatgagtcatttcgttagttcccacaatccagaggccaagtgcaactggtcacccacaacccctacttgtatgcctagcgccatcccaattgcctcctcctccatctctaccagcgtcccctccagtctgcacggggcagtcctcctgggcttgacctctctgtacccacagctgggggccaggcagcccccctctatccctcccagcacctcatccctctccacgtacacaacagatcccccacagagagagcgt

SEQ ID NO: 677293 - DNA, 100 bp, Homo sapiens
gatgagtggtgaaaccccagaagcagctgctctccgggagcttgaagaagaaactgggctacgaaggggacatagccggatttgttctccagcggtctgt

SEQ ID NO: 677294 - DNA, 431 bp, Homo sapiens
  misc_feature (266)..(266): n is a, c, g, or t
ggcgccactgcactccagcctgggagacagagcgagactccgtcccaaaaaaaaaaaaaaaaaaaaaaaaaaaaattttgtggggcgcggcttgggccttggaaaaagttttttaaaaccatttcggttgggcgcgcgcgggggccccaagagaagggtacgtgtgagaactgtgggcacaatagcggtggttcccaataggagagagacccgggagacaggagactaagcggggttgggagttctcttccacaaattaaaaaaanagcgccgcggggggggaaaacgcgagagggttttctgggaacacaattctccgagagatggggagttcgcggaagggctcatatacggggggatcttatattcaagggggaggttccaaggagagactgtggaattttcaattttaggccccggggtgtgtggat

SEQ ID NO: 677295 - DNA, 1027 bp, Homo sapiens
  misc_feature (1027)..(1027): n is a, c, g, or t
gcccactccagcttactagcagacaagcttagccaagaccattgtacccaatataaagtatagggcgatagaaatggaaaccatggggcaagtagatatagtagccgcaagggcaagagatgaaagaattataaccgaagcatcaatatagcaaggactgaacccctataccgttcgtgcataatgaattaacgtagaaataactttgcaaggagagccaaagctaagacccccgaaaccagacgagctacctaagaacagctaaaagagcacacccgtgctatgtagcaaaatagtgggagagatgtataggtagaggcgacaaacctaccgagcctggtgataggctggttgtccaagagtagaatcttaggttcaactttaaattgggcccacagaaccctctaaagtcccctggtacaatttaactggttagtccaaagaggagacaggtcttgggacactaggaagaaagactgtgtagagagagtagaaaaatttaagacccatagtaggcctaaaagcaggcagccaattaagaaagcgttcaagctcaaagacgcagtagctagaaagatgcgaaagatatgatgaagtcctcagagccaattggaccaatctatcacctatagaagaactaaggttagtataagtaaccatgagaacgttctcctccaattagactggttcggatgaaacactggactggccttaacaggccaagtatctagagtcaacaacaagtcatagtacctcatgtgtaacccaacagggtaggccataggaaggtgtcacaggtacaggaacggaaattaaccggggtaccagactacctcagatacagataagggccgctgcaaagccaggtaaagggcgaccaacgggaagagaaaaacggccaaaagcgcgtgaggtcaaagggaggctataaaagaaaacggaaaggtaacagaaacgggaataggacaccggctagtaggcgggtaccagatacacacctgcgcgcacacatatcatcattgacgan

SEQ ID NO: 677296 - DNA, 850 bp, Homo sapiens
cgcagtggctcacgcctgtaatcccaacactgtgggaggccgaggcgggtggatcacctgaggccaggagttcgagaccagcctcgccaacagagtgaaatcccgttctactaaaaatacaaaattagccgggtgtggtggtgcatgcctgtaatcccagctacttaggaggctgaggcaggagaatcacttgaaccctggaggtggaggttgcagtgagccgagatcgtgccactgcactccagcctgggcgacaagggccagacttcgtccccccccaaaaaaaaaagggctggactcaggggctcatgcctgtaatcccagcacttcgggaggccgagatgggcgaaatgcttgaatccaggagtcgagaccagcctgggcaacaaggtgaaacctatctcaaataaaataattttttacaaaattttaaataaataaataaaacaataaaaactagcaaaaccagaggaaatacttataaattcaaagtaagcctccccgggccaggcacactgggctcttgcttgcagtccagcactttaggaggctgaggcagaaggatagcttgaacccaggagtgcaaaaccaagccctgggcaaaactagggaaacccgtcttcctacagccagtttaaacacaaaagaaatctcgccgtggtggcgagaggcctggtacccccgtgctggacgcgggggaggaaatttgaccggaggggaggtcatgactgatggctagcgaccatgggaaagcaagtccctggaaaaaaaaaaaatggcgcccccaatataccgggccgcataaaagaggcagcccgcaggtcaccacggcaccacagggtgcaacgcg

SEQ ID NO: 677297 - DNA, 145 bp, Homo sapiens
gaggagaaagcagaccctgttcccatcctctgttttttcccttgctaccaattcaggcccacgctcatgcacattctctgagaattatgtacataagtacctgatctctcctggatgtaagctgggtgggcttagcaggcagagg

SEQ ID NO: 677298 - DNA, 145 bp, Homo sapiens
ggggcaaggagcttgcgcgggcccgcgctcgggcgggcgaactgctcgcacaggtggggctcgagaactgcgcggaccgccgcccccatcagctctcgggtgggcagcgtcagcgcgtcaacatcgcccgggcgctcatgaacag

SEQ ID NO: 677299 - DNA, 254 bp, Homo sapiens
agacacaggctcaagatggagagatagaaaaaaaagtttttttaattttctttttttgagacagcatctcactctgttgtccagccagagtgcagtggcaccatcgcagctcaccgcaaggctcaacatcacaggctcaagtgatcctcccacctcagcctcccaaatagctcagactacaggcatacgctactgcgccctgctaattttttgtattttttttgtagagatgaggttttgccatcttgagcctg

SEQ ID NO: 677300 - DNA, 832 bp, Homo sapiens
gagcgggactgcagccagccccctggggcgccagctttggaggcccccgacagctgctcgcgggagccgcctcccgacacccgagcgccgcggcgcggtcgccgctcccggcgcccggctcctggctcgctcgggtcatagagaaggggattaaggaggatgaagaagaaggttgatgaaaaaagaaaagaatagagtcatacaagcacagaaaataaaaagaaaagaaaagggatgatgagaagagaaataattaaagataaagaaaaaagaaatagaaaattaacaagaacaagaagaaaaaaaagtacgaaaacaatacaatcagtaacagccaccagaaaacaaaaaataataaatagcgccacaaaacagcacgatccaaagaagaaaaagagaaacaaatacaaacacaagagacacaaaaggagaagaagaacgaatagagaggagagaataggacgaacgaaatgagagactagaagaacacagcaaggaacacgaagaacgaaaagaaaaaagaaagaacgggacaaaaaaacaacgaaacaagaaaaaacaaatagaaggaaagaaacagacaagaaaaagcgaacagacaagaacagaaacaacaaaaacagagacacacacaaagcacccccgacaatccgaacaaccagagatagagacaacagaaaagaaaagagcacaggagaaaaaaaaaagagaggaacaaaagaagaaacaacagaagaccaacaaggagaaacaagaaaggaggcaaaaaagggaaaaagagaaaagagacacaaaaaaccaaaaatgacacaccacaaaaaaacaggaagaa

SEQ ID NO: 677301 - DNA, 144 bp, Homo sapiens
gtggaatctacaggatccccattatggacttggactgtgagagcttctaccccattgtgtaggcctctggttgatgcctggcctctgctgtgggtgaatttctgtactggaagggagtggggctccttttacgtttctttaaca

SEQ ID NO: 677302 - DNA, 138 bp, Homo sapiens
accgccgatccttgcttcctgctctggaatcgtggcttgtagttcctgttttgttgtccgtttggatctcttctccttctgttccttcttctttcttaatttcttgcctaatttcttctcttttcctcctgtttgttt

SEQ ID NO: 677303 - DNA, 180 bp, Homo sapiens
gatcagcacgttgggaggctgaggcaagaggattgcttgagcccaggagtttgaggctacagtgagcagtgagctgggatagcccactgtattccgcctaggtgacagagcaaaactctgcgtcaaaagaaaaaccaaggctgggcacagtagctcatgcctgcagttccagctactcgg

SEQ ID NO: 677304 - DNA, 130 bp, Homo sapiens
cggctcggcaccccacacttgtatgaagggcacagtcagagcttgtcctgttaagtgcacatggtagtcgaaacaactgccccttttctgtggggaaattgccccaggccaccgtgctcttccagatatg

SEQ ID NO: 677305 - DNA, 102 bp, Homo sapiens
tcgtgcagaagatccacctcaattcaacatgcagatatcatttattttcttatatgctgattctgaggtgatcttcttcacgataggtgatcttctgcacga

SEQ ID NO: 677306 - DNA, 617 bp, Homo sapiens
  misc_feature (196)..(196): n is a, c, g, or t
  misc_feature (602)..(602): n is a, c, g, or t
tttacctcccccccccccccccccccctttggttgtaaaaaaaaaaaaaaaggggtgttaaaaaacaccgcgggggtgggggggccccccttttgtttgtccccccaccaagggggggggggcgcgcccctctctttttataaaaaaaaaagggggggggggggaggaacctccccctccccccctcggggggggnttttgattataaaaaaaaaaagcgctccccccccgggggggttgtctccccccccccacgaggggggtgttttttaaaaggggggttttttttttttttctcccccctttttttttcccccacaaaatttttttttttaatttaccccctcattccccccaaaaacccctttttccccccccaaggggggggtttaaaaaggttttttttttgggcaccttttaaaacggggggggaaacccccccaaattccccccttttttaaccccccgggttaaacttttttttgggagtttttttggcccctttcccaggaaaaccaccccggccccggaataaaaaccgctgggggttttagcaaaaaacccctcccttataaaaaaggtttggaagaggggtgggtatnctttcccctagtctg

SEQ ID NO: 677307 - DNA, 425 bp, Homo sapiens
ccggtaccgcagtcttctcccatcagcatctaaattctatgtcctgttaactttctcatgacacactgttttttttacctccacagtagcattaagacatgcatgcattcacttaaacagtcattgttaaatatattattccatcacactctacattctatgaggtgactacagtcaccactatattcccaatacctagcacagtgcctagtacaagatatacattcaatattttcttttttaaaaaaaacattttccccccgggcgcggtggctcgcgcctgtaatgccagcacttggggaggcctaggtgggagtatcacttgagcccaagagtttgtacaccaggctaggcaacatagtgtgaccccatctctacagaaaaagagaaaaaattgaacaaagaactgatgggagcaagatgcg

SEQ ID NO: 677308 - DNA, 957 bp, Homo sapiens
  misc_feature (3)..(4): n is a, c, g, or t
agnnctaatgattataaatcaagcagtccatcatacaagagacaacaacaaaatgaggtcgtcggcgctggaccccggagtgctgaatatagtgcctataatctgcgctccatcacgacaagtgcttgcacaaaggttgcatctgttcccaggatgcctgcccatcacaacaggggtccaactcctcctctggggtatcctaacgtgtcccgtggatttccttcaccccgtcgtggctgatatatgttcgcacgataaacatccaggctgtcgagcctacctagtatggaccccctataacccctgtggggggtaacccccgcgatttgaacgacagggttgtgaccccgaaaaacatgtggacaaaagttggtgccgcacccagttgttggtagcccccccgggtgggccggccccccattgctttgtcggcgtcacaatgggatgcaaccccaccggcgcatttcccattcaccgcggattattatcgcccctaagtccaaatggagtgggtgaattcctgtgtcgcgccccccacccccggggcaaccctcgtgttgactcaactcccggatgggtggagttcccccgccccatgtacgcgcccacgactctataactgtcggccgtctaatatgaggaaactgcccccaccccgcgcctgaatatataattaaggggaaaagccaaattatatgcgtcttaaggcacataatggtttgcggagggcgccaaaagagggtgctccagtcaaaattaatcggcgttttcctcatatcagggggaaataaaaccacttagtacacatgtgatgtgggttaaaggcggccccacaccttgagaaaaagataccattagacaccaccggatggtagatacacttgaaatgtttcacacggtgcgggcgaaaagatttttttccccagtgttataaaaaaataaaactcccacataaca

SEQ ID NO: 677309 - DNA, 106 bp, Homo sapiens
cgactcgtgaggatcccctgcctgctgtcgctacgaatggtttagggcacggaagatcaaggcacgttatagatcaaggcacggaagatcagggcacggaagatca

SEQ ID NO: 677310 - DNA, 124 bp, Homo sapiens
cttatttgctgttcttaaattccttcccctaccacttcctcttgggcttattattctcttgttgatcaatctctttcatgtgatactttacattgaatcatctcgactcctttatcccatcctt

SEQ ID NO: 677311 - DNA, 1172 bp, Homo sapiens
  misc_feature (97)..(97): n is a, c, g, or t
gaaatctgggtttagaagtgtgcaacctgaaggtttatagtccgtatatctctactcgaggagctgtccgagatacaatctcccataattgtatggntgacctacgtactcgtgaagtacaataacgaatgcagtattagtgagtactagatatggtatgggtgcgttgcagtttcatgtatatacaatatgaggtgttggcgtagtggtatgatgagtttgtgagtcactgtaatatttttacagtgaagaatgatgacaggttaagacatggaagctatgattttacacacttcacgtggtgaagcagtgaaagttactctagatattagcaggtagaacggggtaggtgaagaaggtactactagactgaatatgcggtacttaagcgtccgtcgggtaaagtacagtatgtaaagagtgagtgctgtacttttacgtatgactgcatgtatggctagcgtatgggagtgtacagttcgtttgcttgttgatctagtcagtagatgggttgaaggcctgtggaacaatgggccgatttgggaattataggacggaaaaggctcattcaatcgtgagaaacaacttcaggtactttacgacgctgacgactcagttatcggatctgttcgttagacatcgacatgtttggtgttaactggtttcaatagtcgattataagggatgccatggttaattgttggcccagaattcgatggatgcgttaagaggaggtaagccaagttatcgaaacttggtagatgtttcctcactttaattactttctaagtgggcttagaggacacctattaagaacagtggaatcctcagtttacggtgtcggaagagacaattacctgattctgttgaacataagagtggcaattgaattctccaacttctgacgccgcttgaactatgttcacctcagagacgtgtttctgtcttgccacagaacagataagcaacctattaccgtccgcggggcccctaagttaccgtggttgcaatggccccgcgttacacgattgctacacttgcgggaaagcggtatcaccctcgacgtgaaattgacgtacttatgcgaaaccccacttgggtgtcacaaactgtgttccataaatgaacattcattgtatcagggctgtcatctccacaaaatgtctatccga

SEQ ID NO: 677312 - DNA, 109 bp, Homo sapiens
atcagaggatcccccagaggcacaaggaggcagaggcaccaaggagggcgagaaggtttacatactggcgctgaagggctgaggtacgtgctctacggccggtgtgacg

SEQ ID NO: 677313 - DNA, 193 bp, Homo sapiens
  misc_feature (181)..(181): n is a, c, g, or t
ctgtacagatattactaatttgatgtcatcatcattcttaaagatctgagtttcactgtagtatatactatcttcagcatttccggtagcacaatttgatggtgacaaattttatcagttttcctttttctgaaaatattttcatgtaatgtttattcttagagaatacagaattctatgnctttttctttct

SEQ ID NO: 677314 - DNA, 672 bp, Homo sapiens
  misc_feature (89)..(89): n is a, c, g, or t
  misc_feature (386)..(386): n is a, c, g, or t
ggggtttcggggcgagcgtgggcgccgccggccggctgggtgctcggtccgactcagcggtggggagcgagccaggctcccgccaccgntgtgccgcaccactgcgtcgggctggtgcagccccgggccaggccgcgccggggcaggagcgcaggggttgtgttatgcacctaaaagccatatgtgaaggctccagaagaaaggagcaccccccggaagttcagcagggaaaaaggcagagaattcttatgaaccaccaaaaagggcgtgtacttgatgaaactgtgcaaaggttagaccaatataactatcaaggtgtgtctttccttcaggcctctctgcggtaaagcatcatctcggaaaagccatgtggggatccttttctnccaaatgttctgtgcagtaatgaggtgggaaagagtcctgtagagaggcagttggaattggtaaaaacaaaaaaatgaatgtgcacctattctttggcagggattccaaccagggggggaaagaaagaaagggaccactgtgaaatatttctgggctggtgggtggaacgtgggaaaattcccaagggacaaacactggctttcttggggattcccaacaggtgtaggtaccgggatagggatctatggacaattaaaatgtccctggatattgatgggaggagca

SEQ ID NO: 677315 - DNA, 164 bp, Homo sapiens
aagctaagctggagctgctctcatccctccaccaggagggacttcactgtacatctttgggccaagctgtctcaatgaatccgccatggaactgacctgttgtgatgttgtctgccaggattcccaatgctttcactcttatctaccctttggcccttatcgag

SEQ ID NO: 677316 - DNA, 566 bp, Homo sapiens
  misc_feature (94)..(94): n is a, c, g, or t
  misc_feature (358)..(358): n is a, c, g, or t
  misc_feature (365)..(365): n is a, c, g, or t
  misc_feature (395)..(395): n is a, c, g, or t
  misc_feature (418)..(418): n is a, c, g, or t
agaaaagtcattattcccttgtatttcagaatcatgttaatgaggtagcttaactgctattcagctgcaggctcaactgagtgaaaaaggacanctagtaatggtaaactgaaggaaagactagtggaatcttgagaaagaataagagaaaaaagagaaatgttattgttttgatattacagattaagctaaccacagtacctgattcttagcaggtgcacaataattatttagtcaataattaatggagcaaatatttattaagtaacattgtatgtctgtgctgtctattgaagaatatacaaaagaaacctgaggctgggtgtggtggctcacacctgtaatcccagcactttgngaggctngacagaaggagcacttgagcctaggagtangaagaccaacctgggcaacatanggaaaccctgtctctaccaaaaaaaaaattagccaggtgtagtggtgagcaggagggtcactctagcccaggaggttgaagctgcagtgagttgtgatcataccactgcactccagcctgggtaagaaagagagcaagatcttctctt

SEQ ID NO: 677317 - DNA, 239 bp, Homo sapiens
  misc_feature (71)..(71): n is a, c, g, or t
tctcttgaaatgtgtgtcatttctagaaaggattggtttgatctaaaaataattttaattggaaaaaaaanactaccagaagcagcatcagatgactagtagaagcaggaattaacatttcaaaagatagcaaaacaccccgaaattgtatggttagcaattatatgttaataccttatatattttcattcttttaggaaatttgattttgaataaaccaaagcagattacttcttaaa

SEQ ID NO: 677318 - DNA, 1150 bp, Homo sapiens
tgggtttaaatcggcaccagggagcgccatttaaattgagatgctgtatgtaagccagggttcagcaaaggttcagcctgtgacctggtgtgtgtgtgtgtgtgtgtgtgtgtgtgtgtgtgtgtgtgtgtgtgtgcgcgtgtccctgagtaaagagtggtttaaggcgtgtataggattaaaaaaaaaaaaaaacccaaaaaaaagtgtgggcccccaaaataaaagcccgcttacaaagatagtgtgggcgcccccgagaactgtcctcgccgggaaaccagagagtgtgtcttctgatgacacacgtcgtggctcttcacccccaggggtgggatgctgcaagggggaagatgaatcctcagtcgtcacgtgaacgccctccacccgccgggggtacaaagaaatttcgtgccatcagcctccatgatgtaaggtggggatcaaagggggtgtgcaccaacacagacagccatacttatcacgagggtgtacaccaccacaccaaaaaaattcaacgtatgaccccgggggatggtggggggttgcagagacccaaagtatcgattgggacgtgtcccaccagctgcgggggacgacagcagctgctgctgaaacaaataagaagtctagattgctaggcaacaaagttagggtggttctacccaacgaggaacgtctgggcaaatgcagaaaggtcatttaagcggcattactatccccctttcttattttatacacaaggggggggggaaaaaacaacctgtgtgaaaaaccaacgttttttattactattccaggagcagggggccccccaggcccaaaaaactataccattggcaggccagcggctgaacagggggggttttcaacctcggtaaacacaccacgcgtatgtcatactccacgctgaggggagacccacaccccttgtggataaagaccctgtggcgacaaagagtatctaagacacaacagtcagacacctcatcaagggaaacatccgcaggcgacgcggcaacatgcgcacccgaacaacatcatataggaacacacaaccggcaaacaacaagtggcgacagagccagacaaggcaacttattaggacaaccccaaaccagaagtatatgagagtaccaacaaagccacg

SEQ ID NO: 677319 - DNA, 91 bp, Homo sapiens
atcagtaacatgaagagccctcaaaaattggcgaatgtcatcagtgttttaaacagaataaagattccgaacactttgaatagaaaaaaaa

SEQ ID NO: 677320 - DNA, 126 bp, Homo sapiens
  misc_feature (117)..(117): n is a, c, g, or t
gctgtggtcacttgcctgcccaggcagctgtttgcagctgaagaacaactggtctcaggctgtcttgcctttattcctggttagggccaggtggtcctagacagcagtttccagtanaagctgaac

SEQ ID NO: 677321 - DNA, 297 bp, Homo sapiens
gaaaagcaaaggaaggcattcccctttttcatttttttccttgggggggcagcttttcccagtgatgttgagagcccccgcagcaatttggtccccagtggcccaatttcccccaaccccaaaggaaagcaaatccctgtgggggcagggttaatggcatccaaagtccattttgggggttgaggtggaaggaaatcccccgggccccccgccaaaatttatcagctttcagcccgggttttgttaaccagccagggggtattatttcaaaagcttcaataaaaaaagggtttgcca

SEQ ID NO: 677322 - DNA, 832 bp, Homo sapiens
  misc_feature (44)..(44): n is a, c, g, or t
  misc_feature (62)..(62): n is a, c, g, or t
  misc_feature (106)..(106): n is a, c, g, or t
  misc_feature (117)..(117): n is a, c, g, or t
  misc_feature (129)..(129): n is a, c, g, or t
  misc_feature (150)..(150): n is a, c, g, or t
  misc_feature (161)..(161): n is a, c, g, or t
  misc_feature (166)..(166): n is a, c, g, or t
  misc_feature (203)..(203): n is a, c, g, or t
  misc_feature (216)..(216): n is a, c, g, or t
  misc_feature (277)..(277): n is a, c, g, or t
  misc_feature (307)..(307): n is a, c, g, or t
  misc_feature (323)..(323): n is a, c, g, or t
  misc_feature (338)..(338): n is a, c, g, or t
  misc_feature (358)..(358): n is a, c, g, or t
  misc_feature (367)..(367): n is a, c, g, or t
  misc_feature (393)..(393): n is a, c, g, or t
  misc_feature (412)..(412): n is a, c, g, or t
tattatagactgttttcacgttatttttaaagaggaagaaaaanctggttggttaacgactncactcgattctcgagtggacacattttggtactacgccaaggtngagctggttcntcccacccctgntgagatccctagagctattcngagcctgaaanaaatngtcaatagtgctcagactggtagcttcaaacagctcncagttaaggaagntgtgctgaatggtttggtggccactgaggtgttgatgtggttttatgtcggagagattatnggcaagcggggcatcattggctatgatgtntgaagaccaatctttnacatctgattatatntgatttattatttgagtgtngttggaccntgtgtgatcagactgctatctgaatnaaataagatttgtcaaaantcagtgtttcgtccatcagaactgcatgagaggtcacaatttctcttggtattaatgcttgggttgcttgtaacaaccctaattacacgtctgtttagcccgaaattggaaaggatatatggtggctttattgacccggtccttgatattttggggatacctttttactccaaagggttggaattattatatctaaaccttaatttgccgaacactgagggctaagggcttgggaaaccttccctggcccaaggtgaaaaatatttattccttatgcatagggattaaatccatgcagataatctttaaaatacaattgaaacgtttctttgggtaaaaaccgaaaagctctatgcctactctgtggctatgaaaagtataacactcggtatcttagtttagcccaaataaaaagcctga

SEQ ID NO: 677323 - DNA, 877 bp, Homo sapiens
  misc_feature (151)..(151): n is a, c, g, or t
  misc_feature (162)..(162): n is a, c, g, or t
  misc_feature (174)..(174): n is a, c, g, or t
  misc_feature (195)..(195): n is a, c, g, or t
  misc_feature (206)..(206): n is a, c, g, or t
  misc_feature (211)..(211): n is a, c, g, or t
  misc_feature (248)..(248): n is a, c, g, or t
  misc_feature (261)..(261): n is a, c, g, or t
  misc_feature (322)..(322): n is a, c, g, or t
  misc_feature (352)..(352): n is a, c, g, or t
  misc_feature (368)..(368): n is a, c, g, or t
  misc_feature (383)..(383): n is a, c, g, or t
  misc_feature (403)..(403): n is a, c, g, or t
  misc_feature (412)..(412): n is a, c, g, or t
  misc_feature (438)..(438): n is a, c, g, or t
  misc_feature (457)..(457): n is a, c, g, or t
cggatcggggctgatggactctccattgccagaaccatgggccacgttgtccgtaaccttgtggagaagacccgcggtgctggtgaacgcggctgtgagttagtcgaagcctcgaatggggcacacttatggtgtaatctacgccaaggtngagctggttcntcccacccctgntgagatccctagagctattcngagcctgaaanaaatngtcaatagtgctcagactggtagcttcaaacagctcncagttaaggaagntgtgctgaatggtttggtggccactgaggtgttgatgtggttttatgtcggagagattatnggcaagcggggcatcattggctatgatgtntgaagaccaatctttnacatctgattatatntgatttattatttgagtgtngttggaccntgtgtgatcagactgctatctgaatnaaataagatttgtcaaaantcagtgtttcgtccatcagaactgcatgagaggtcacaatttctcttggtattaatgcttgggttgcttgtaacaaccctaattacacgtctgtttagcccgaaattggaaaggatatatggtggctttattgacccggtccttgatattttggggatacctttttactccaaagggttggaattattatatctaaaccttaatttgccgaacactgagggctaagggcttgggaaaccttccctggcccaaggtgaaaaatatttattccttatgcatagggattaaatccatgcagataatctttaaaatacaattgaaacgtttctttgggtaaaaaccgaaaagctctatgcctactctgtggctatgaaaagtataacactcggtatcttagtttagcccaaataaaaagcctga

SEQ ID NO: 677324 - DNA, 1279 bp, Homo sapiens
  misc_feature (279)..(279): n is a, c, g, or t
acctttctctgccgcaggctccgcctttactgcgtctccaacgggttgagcgtctgtcggatcacgacacgtctggggtgggggcccgggtgacgcctcccgccgtcttatagggctccggccgacgtggttatgtggtccccgctttttctgccattggcagggtatttggtggtgtctgtcattaactgcgtgtttgttcgggccccacctctcttagttcccggctgatcgcccttttggcgcccgacttatggtttattcgtgttacccgtaatnacacagcgcggaaacaatcggcgtacggactgtcttttcgtcggggcgtttctcgccaaatcagtgggagcccatttgcccttggtggattccagcgctgcttccgcatattccccctcggctcacgggggtctcgccttccttctcagggctacagcggcgggctaatctggtgatttggtcttattgtccgcactttttgttgtgcggggcgtactttcccttttgggcccgcgctctttcttcctggggcacaaattgtgttcttgtctctctggtgtaacacggcgccgtgtagtgtcgttattaggcaccctctttttacgtggtggggcacatgtgtttttgtggagggcatctctttcatgtggcgcagaaacgttgggccccttcgcacggtgggtcgctcctccttcgctttggggaccactcctgtcagtgggttcctcttgttcccatgcggctcactgcggattggtgcctttgggtgtttcccttgacgtggacaggaactgtctatgccccttttcccttcgtgcgtattttattgcccttctctcccctggcagctagaggcatggctgttctttttggacttgcgttttcgtgttggtgctcttgtctggaccagtcctttcatgacccttcctcgatctctttcttcggagtcctttatctataagtagctctcctagctcgccgcgcgacgcgcgcgtgatggttgcgagctgtggacgggcccgctggtatagtacacgacttacctgcagtcgatttgggatcttgcctaagtagcttttacagagcctcagattctgtgtgcatgtgtgtgtttgtgtatatatacatatctagggctagtacttatgtttcacacccgggagctgggagacataacctgtacagttgtctttctcttatttttcataagatagaaaatcgcgcacttgcgcgtcccccccccccacccccttttttaatacgtgcttagctgtgccgg

SEQ ID NO: 677325 - DNA, 1299 bp, Homo sapiens
  misc_feature (299)..(299): n is a, c, g, or t
tcacacttcaaaaggttttaatgggattaaattccccaaacacggacttttatagacaatttggcaaggactctgaattttggcagggctagtttgtgggactacgggtaaagacacaaaacaaaaagaaacaacacacacacacaccacacatttcattagcagaagcgtgcctcggcggcgctacaagggccctcttggagggaaggacagttcccaaagggcacgtgcccgggtgacatgggggggcgccctggcccctgtccttcagggcgagccaggctcacaggccaggggcnccgtgctccagggggggctccaacagagaccaggataatctcaatcatctcccaggccaagggaaaccccaggcccaaaagagggagggggagggcctacagaaaggcctctggtatttacccccgagcggggggagagtggggggcgtatacgcgagcgaaactccgcgagggggggcgaggggacacccgatactgcaagagtgtatcacccgggttaataaggcagaaaaacgcctacagaggggcgcttcgcggggacatataagccatacactcccgggagagagaaaaaactctcgtttgatccgagagcgcccgagaacagaaaaaagaaacgcgggtgggtcctcccgaggtgtggtgcgcttccacgaggaaagaagggcctgtgtagaccagtgataacataccgcgagtagtgcacccgaaggagtgtctattctccgcagtgggagatagtgagaggagcacctccgccccacggagggggagaagaagcccttctcctcttagtgcagggaaaagatacacaaccacaacaagacggggcgggttccaccacaacattgctcgtgggcggtggcggaggagacacacccagcggcggccaccaacaaggaagcagaggcggggcaccaaggaggagacgacggcaagtggtggggggaccagtctccacacagatacgctgactcacagggagggccccccattgacaaacaaacccccgaggtgggagagggaaaattgtactgccgcgaaggaagaaaggagcacgaggacccatcatcccagcaccagggcaccaccgaggggggggaccctcgtctaccaccaaaaaaaacagggcccccacagtatgggggaggacacaccacgggcgagagtaggcacacacatatgtatgaggtggcacacacagcaccgggtatgacaacacacacaggtgtggagtagtgggagtgcccccgccgcggaaagagagaacaccccccag

SEQ ID NO: 677326 - DNA, 522 bp, Homo sapiens
  misc_feature (410)..(410): n is a, c, g, or t
  misc_feature (493)..(493): n is a, c, g, or t
cttcactgttggcaaaaattcagagagagctatgtcatcattttctaccaattactttagtagaccaattaaatatataaaactgttgggaagcactctaaggaaaaactaaacaacagcttatttgttatctgaatttttaggctttaagaacagttacttaacagacattgacgatgtcttgctaggcatacattttggtccttaaagtagaaatccacattttaaaacataatttgctgttagcattttgttcaaactttccccattccttctttctcaagtgtcagggagaactaagtcacatagaatctacgaaccacaattgtgtctaatagctatcccttatgtgatccagaatttttgctgtattgtagagctgatatcattgaacacaagagacccatgtngaaaatacatacattagggtcgggtttactgtatgtacttcaaaaatatggctattgtaaatgcttcacttggtgaaatatgnggagagtatgcattttcattggatatttt

SEQ ID NO: 677327 - DNA, 353 bp, Homo sapiens
agtggaagcaattcaatgggatggttcagtctctgaggtgtggattggtaaactccattgtaatgaccagtcattttactgctccactaaccccaccctggcctatttgtgccatcctttagacacaaagagatatttgcctcaaggtgggaagaatgaatgtgggtggtttctccaaggtaggtctacacttcaactcactggcaacatccaggaggaacagagaaccccatacccagataaagagctaatagtctaccatgcctcccgatgacaggatatcttatcctttccccacaatacagaaggaaatccatccatagtgaatagacacaatacctacaaaaacatga

SEQ ID NO: 677328 - DNA, 452 bp, Homo sapiens
gagagcttgtggaggccatggggcgcgtcgatcgcggagctcgtctcctcgctgctggaggtagtggctgattgctgtgcagctgacggagtgccccgagggcgccgaggctgcgtgcgtccgccagatacaaatcgcgattgattggagccggaatgggtggcagcttcgagcagcctattactcgtgcggtaggaaatctgggaacagatgtgaacgatagacctgtttgacaggagaatgaggtcggcgggccgccctggactaccagtgattggtgcagggagcaagaataccgaggcaggaggttctgtcatccatcctttaagagtctgcacatgaaacgtttgtcaagaggacctgggtctctctgctgttcaggcctctggtgggctactggggatctataatggaaagactctggtagttggaggagagcaacgtggttcata

SEQ ID NO: 677329 - DNA, 965 bp, Homo sapiens
tcccttttcatacaaacaaaaaaaaaaaataagaaaacagagagagtacgggtgtgtgatacagcaggacgatatgttacatgggcgggtctttttcacggggaatatcacttctgctgctggctcacgtgggtctcccgttgtggcctgtattttgggcttacagcgcccctgtcccaatggagtttcccccccggcattttccccccttatgccaggctgccgatgatcaggtgagattgaattgaggatatgggttaaaaccgtcccccggaggtcaagtttaaaaggaagatattgacgaaggattggccaactcccaatgagaagagtgaagcaacgtgttaaagaagacttattgaagatacccacagccattatatctaaggaaccagtggaagaccgcgtgtctgtgttaccctggagatggtggaaagatgccttggaccagcttcgaggcccggtgatgattgtttaccccctggggttgcccccgtatgatcccctccgcctggagtttgaaaataaggaagacttgtcgggaaccccaggcagggctcaacgtccattaaagaggcagaggcgccaactgtggtgggccacccaggagctgagaagatacgaagaagctttccagactacgtggggaagaatgaaaaaacccaaattatccgcccagattccagccaaggggacagggagctcccagcccgagagcctattattagccagtgaggagccagaagccagctgatgctgtactatcaccagaagaccagaggagctccagagattggaagaaaatgatgatgatgcctatttaaactccaccctgggccggataaccctgctttgaaaagacattttcatggagtgaaagacataaagtggagacccagatgaagttcacccgctgatgacacttcccaagagattagctcccctttctcctaggccattataat

SEQ ID NO: 677330 - DNA, 237 bp, Homo sapiens
  misc_feature (166)..(166): n is a, c, g, or t
  misc_feature (202)..(202): n is a, c, g, or t
  misc_feature (220)..(220): n is a, c, g, or t
  misc_feature (222)..(222): n is a, c, g, or t
  misc_feature (225)..(225): n is a, c, g, or t
  misc_feature (227)..(227): n is a, c, g, or t
tatcataacagaggtagttttaaaaaaatcattacaggtgtgagccaccatgcccagcctatttgtcacattatttgtcacatttattttacttttatttattttttgagatgaaatttcgctcttgttgcccaggctggagtgcaatggtgcagccttggctcantgcaacctccgcctcccagggtcaagcaattctccngcctcagcctgggcaatngncangnctcttgactc

SEQ ID NO: 677331 - DNA, 127 bp, Homo sapiens
  misc_feature (113)..(113): n is a, c, g, or t
cccgcagcacatatagtagccaatcttcccgaagagcaggccatgaggacccgccaatcatcccgacatgcaagggtacatgcaagcccggtacatgggtacatgcaacccgntacatgcaacgggg

SEQ ID NO: 677332 - DNA, 852 bp, Homo sapiens
cacggtggctcatgcctgtaatcccagcattttgggaagccaagcagggcagatcacctgaggtcaggagttcgaaaccagcctggccaacatggcgaaaccctgtctctactaaaaatacaaaaattagccgggcatggtggtacacacctgtaatcccagctacttgggaggctgaggcatgagaatcttgaaccgaggaggtggaggttgcagacagccaagatagcgccactgcactccagcctgggcaacaacagagcaagactctgtctcaaaaaaaaaaaaaggaagaaaagaaaaaaaattggacaaaacaaaaatttacagcccagaaataatttcacctatacttgaaattttggtactctgatacaggtagtatttcaaaccaataatgtggagacaagagactattccccttgggataaaagaatttgtagatcccaatttttcacacctgaacaaaaataaatttcagaacaactcaacttttgaacttaaaatttacaccttatagaagtctagaagaaaccattaatcatattttattaaatcctggattggagaaaggcccccctcaaccattgtagccggaatcacattatctcagtgaaacgactgatggattccgactactttaaaatcaaactttctctattgcaagaatatatacttaggaaggcaaagtcggctggtcacccatgggcaaggccaggtccttgtatcaccatcttaaaattggttattacctatccttagtcataagaaagcgaatccccttaaatatccgtttaaaaaacggccgcgataggagacgttttaatacacaactggcggcacggcacgtac

SEQ ID NO: 677333 - DNA, 406 bp, Homo sapiens
ggaggtgatctagaggatccctcttctacgtttcatcactggtcatagagaaatgcagatcaaaatccacaatgagataccatcccatgcagttagaatggcgatcgatcattaaaaagtcaggaaacaacagatgctggagaggatgtggagaaatagcttttacactgttaatgggagtgtaaattacttcaaccattgtggaagacagtgtggcgattcctcaagggtctagaaccagaaataccatttaactcagcaatcccattactgggtgtatacccaaaggattataaatcattctactataaagatgcatgcacacgtatgtttattgcagcactattcgcaatagcaaagacttggaaaccaaaccaaattcccatcagtgatgagacgtagaagg

SEQ ID NO: 677334 - DNA, 130 bp, Homo sapiens
tcataagtttctctcatcatgaactcttattaatatttactgctgtcagagaaatgaatgagcctacagatgataggatgtctcatgtaggtgtatgcatcgcgggtcgtccgagttacgtcggggcatt

SEQ ID NO: 677335 - DNA, 516 bp, Homo sapiens
gcaatatattagtgttttgttgtttttttaaataaagtgtatattatttaaagatcctttgccctagagtatccgggtcttaaaattatagaaaggtactaatttttaccaataaaattttttttctagtacaattggcataattgtcattagcataaactttccgaagtagaaatgttgaagctacctagtatataatacagtcaaattcttggctctactgctgccaactgtattttcaaataacttttttctttcacctcctattttccattccctttctcctttcctatctaactctattactaggcaaaaccaagggcttctatccccaagaatggttgtgtctccagaagtgagatcagttgtaaattctcttttgctaagtgtagccagctgtagtaagtacagtacctccaatctgtgtgttgcttcttgcatagcaggagttttgcttgcactgactgatgtgtgaaattatgaaatctggctttgttttttatgttacatgaaaac

SEQ ID NO: 677336 - DNA, 331 bp, Homo sapiens
cattatgcatctggaatatgtatgaaattgccaacatattatatggttaatgatcctcccattcctgtcgccacgatcgctgcgctgtcagcgtctgtggtggtcagcagggtttgatgtgagtggctaccccaccatcgagatccttgagaaggggcaggctgtcgactaccagggctccatagcccaggaagaaattgttgcctcggtcagagaattctcccatcccgcctggatgcctccagcataagtcacgctagtgttggacaaagaggactttgatgcagttgtgaatgaggcggatatcattctggtggggtgtgatgcccca

SEQ ID NO: 677337 - DNA, 331 bp, Homo sapiens
  misc_feature (277)..(277): n is a, c, g, or t
tgagacaagatcttgctctgtcactcaggctagagtgcagtggcccatcagagctcactgcagtctcaacctcctggactcaggtaatcctcccacctcaacctcctgagtagctgggactacaggtgtgcatgaccatgcccagctaattttcttttttttcttttttttgtaggatatgggatctatgttgcccagggctggtcttgaattcttggggctcaagcaattgtcccacctcgggcctcccaaagtgctgggggttacagggcgtganttgctgcgcccagctgagactggggaatctttataggagccccatattcttaca

SEQ ID NO: 677338 - DNA, 1903 bp, Homo sapiens
  misc_feature (1178)..(1178): n is a, c, g, or t
ttttatatccatcctccgttgtctcgattggtggtttatattgtcgctgttcgttttgttgttgtccgcggggggtgttactcttgggggagtttgtttagccgccacgcccgtctcgtgctcactcactatggcgtcgggtttgttgtgtttcttccccgtcctctaacagttgggtggttggtatacactcccgctgcctgcttgtccgcacatatgttgtgtttgctagctgcttttttcacctactacctgtacgggtcgttgctggtccctaattatcttagcctgctgtcgcgtcttctcgcggcgtcgcgcttgtggttttgtctgctgcggggcaaccacccgcatcgggggtgtgtgtggtcgcggcccccctctttgtctttgtccccgctgaggtggtttctactgcctcctcaatcttgtccgactcgtttttggtgccccccctctgtgtggatgcaacctgtctccgccgccctgtctgtcgccctggtgccacctaagtgtcacagcgatcgggtgtctcaggttgtcacgccgcctcttgattagtggtatgtcttttctctcttgtacacggtggtgtcctcgatcggttgtccatcaaactcgtcccttccctctctctctctctgtggtggtccacgttttagcattaattactcctctcgccatctgtttgttctcgcccaccaccaacaatgtaagatttgtttgttctcatctgcgacggcgggcgattcttattggaccacccgcgggggggggcacccatctttttactatcccgtatcggggttccatctctcctcctcaccggaggtcctcccctcccccctgggggggaagacggttgtcttcgtttgtttaggtgaacccccttcttttgtggtggaacacacgcttctccacgcggtgatgagtgtaaccccgtgtgtgggcccccctcttctgttgctccgcttggtgggccaacacacacttttcatctacgtccgcgatcaccgcgcgtcttctctgtctcggcgtgctttatatttggccccacccacatatgtgcccttctttctccgcgggactctgcgctggttgacaccccacgactgctttcctcaaaacgcgcacctctcggggcccgcgcgcttacacctctttcttcaccagaagtnctacttttcccacgcgcgcgcgcgcttgttgttcacttgtcactccccgcattgtgtctcctctctctctcctcgcccactgtttttctgtgtggttctctcggtctctatattagagagtgttctctctgcacacagtgatctctttttcttctctccctgcacactatgcgcttctcacacgcgtcgtgagatgagaagatctcgcgagcgctctcgagattatacatccatacagagagaaagcgagagatctacatagtagagataatactttgtgttctctctaagaagagttcactcttttctctcgtgcgctcgcgcactttctcacgacgccctctctgggcccttctctctcctctcacacaccgctagagatggcactctatgtttctatgtttttgcacacgaggtgctcctgcccctcagtgggcccctctctgtgctctctcccacatgccctctaagaagaagaagtgatggggacggcacacggcccgctcaccccggagaaggctgctgttgcggcgggaacactaccgaaggtcggtcggtggaccacgagaaaggacacttgggaaaggggaagcgagaaattcgctttttctcttcctccctgggccagaatagtagcttttttgcttcactgtggcccgcctccttcctggatccttagatccccgaggagggtaagaaaatttgccgtgacctgaaaaccagta

SEQ ID NO: 677339 - DNA, 177 bp, Homo sapiens
tgagaccctgtctcgcgaggagatggaggagctggagaaggagctggacgtggtgacccagacgggagtgttcccgtgcggctgcggcagagaaaccagacggagaacagtcccgggtgttacaaccgggagccatgctcaacttctgtgaaaaggagatcaagagcgactaacagg

SEQ ID NO: 677340 - DNA, 164 bp, Homo sapiens
tgtcgcatctcacagcttccccatcatcccaggttaggctctctctctagctctctttctccctcccctaccagcctcattcttcctccggtagccaagcgtggactagtactagtccacggtaggctaaggttctcctccagcgtactaccagacaaccttag

SEQ ID NO: 677341 - DNA, 386 bp, Homo sapiens
tataacacgcataatatagcacgactaacccctataccttctgcataatgacttcactagaaataactatgcaaggagaaccaaagcatagcaccccgaaaccagacgagctacctaagaacagataaaagagcaccacccgtctatgtagcaaaatagtgggacggtatatacggtagaggcgacaaccctaccgagcctggtgatagctggttgtccacgcatagcatcttagttcaactttaaatttgcccacagaaccctctaacatccccttgtacaaatttacactgttagtccaaagaggaacagctctttggacactaggaaaacaaccttgtagagcgagtacaaaatttaacacccatagtaggcctaaaaagcag

SEQ ID NO: 677342 - DNA, 274 bp, Homo sapiens
gcccgctttacagatattcaaggccggatatcgggatatctgctatgcaacacagaagcgccaatctgcggtaagggacttgagcaagctggtcgacctgatcctggtggtgggcgccgccaacagttcgaactcgaaccggcttcgtgaaatcggcaccgaggccggggttgcgagttatctcattgccgacggagggagcttcaatcccgacgtttggtcctagctggggttaggttaccttgggttacggtctaccctgtggggtaccaga

SEQ ID NO: 677343 - DNA, 173 bp, Homo sapiens
caaggatccgatatgcgttcatcagtgtcatcatatttgatttcttatctcacatagtcggatcttttgccaggtcactaaacaggaatcgggtatcatctgttgacccagcagcaggtcaatctctttcggcctttcctatgtccgcagcttttcattctttagaacagcta

SEQ ID NO: 677344 - DNA, 961 bp, Homo sapiens
gggtctgaatctgagacggttcgtgaggaatgtgcgtccgggttgcttgccggtgctggccgcgtcgggagagcccggggcagagcagaggtgctcatcagcactgtaggcccggaagatgtgtggtcccgtcctgacccggctaaggtccctgtcttgcagctggatagcggaactactcttctccatagtgcaatctgccgatatatatatattcgagtaatctaggctgggagcaagatgacctcactaaccagtggctcggaatgggaaagcgacagagctgcagccagctttgtctgctgccctgtactatatctagtggtccaaggcaagaagggggaagatgttcttggttcagtgccggagaagccctgaatcaacattgaccaaagcttgagtcgtcaggaactgtcctttcctgcgctgggcgagacagaatctctagccgacattgttttgtggggagccctatacccattactgaagatcaccgcattaactaccctgaggagcttgagttggcctgaacaagcttggtttcaagaaactgagtaccaggaaccatgtacaggcgagctgctgagacttgtacttggaaaccagccaggtgtccttgggacctccgggctaacctccaaaagaagccagccagccccgaagaagggaaagagctagtcaccaaaagcgactagagagatgaggaaggtggatacccactcttggaggagggagatgccaaagggagatactgatgggaagaagggctagcaaagtaggacccgagcggccagaaaaccacgggtgctgggctgagaaaggcaggccaaacacgggcactaagaacacaggcccacctgggacaccatgcagggcacagcgcagatagcaagaacacagcacagggaaccctatggtggaagcagacaaagacagcagagggaaccaagatgaaaaacgg

SEQ ID NO: 677345 - DNA, 221 bp, Homo sapiens
ttacttctgaaagacatccactatgactgcagtgtcatgctcgtctgggtgaagagaccaccaaataggctttgtgtgagcaacaaggctgtttatttcacctgggtgcaggcagactgggtctgaaaaagaagtcagcaaaaggagatggggtggggcagttttataggcctggggtaagcagtggatagttacaggttaaggtggttatctattgtcag

SEQ ID NO: 677346 - DNA, 283 bp, Homo sapiens
caaatataattacagtttattagtacatgtgcacgcacacacaaatcctctacggaaaattatctttctcaccactcacccaaatataaacgtggacaatttatcaggggtaaatggtgaaggtaggataacgccgtgattccaattccttctcaaaccaaatacaagttctcctaaaacgggggtggcatgtccctgtcaggcgcacttcgacaggcccgttcctacggcctccgaggttacacatgtcccaaaaggcccccccggcgggcgggacgggggc

SEQ ID NO: 677347 - DNA, 116 bp, Homo sapiens
caggaacgagagaagcatttcgcagagagaagagcaagagcgccttggagagaaagaagcgacttgaggagattatgaaaaggacccaggagaacaggaggtacaagataaggaaa

SEQ ID NO: 677348 - DNA, 901 bp, Homo sapiens
  misc_feature (495)..(495): n is a, c, g, or t
  misc_feature (499)..(499): n is a, c, g, or t
  misc_feature (508)..(508): n is a, c, g, or t
  misc_feature (513)..(513): n is a, c, g, or t
  misc_feature (544)..(544): n is a, c, g, or t
  misc_feature (550)..(550): n is a, c, g, or t
  misc_feature (554)..(554): n is a, c, g, or t
  misc_feature (556)..(556): n is a, c, g, or t
  misc_feature (593)..(593): n is a, c, g, or t
  misc_feature (608)..(608): n is a, c, g, or t
  misc_feature (630)..(630): n is a, c, g, or t
  misc_feature (636)..(636): n is a, c, g, or t
  misc_feature (639)..(639): n is a, c, g, or t
  misc_feature (643)..(643): n is a, c, g, or t
  misc_feature (658)..(658): n is a, c, g, or t
  misc_feature (702)..(702): n is a, c, g, or t
  misc_feature (812)..(812): n is a, c, g, or t
  misc_feature (854)..(854): n is a, c, g, or t
acaagacagagtccaccctggaaagtggccacaggggaaggcaagaggcgatagctgggggtcacttgtcactagatggaagctccttggtccacacagtcccaaagaaaggtctgcccttgggcccacgaaacccatcccagccctcacaggctgaacctcaccctgggttttcccagagaggtgcccaagaagacccaagctgccccaagtcagaggagcagcaggaaacagcctcagaagtccgtcactcttcagtactcctcccttagaatgtccacttcctgtttggtgaccatggcaaccaaaagacaatggcagtgcagtgcgtgtgggatgggggagctccatcttccttgggtacatggggaggagactccagtgaccaggagaagcggggagagccatgggagatgttagagggacccagagaagatgggggacaggaaaaaggagagatttgttctcaagtaatggctccgcttggacttcggngaangtggtgggnttctnccgcgcgagggaggaaagagtggtcccattngccctntagntnggccccaggttgcctatctatttggtggccagattcntccctgaagtccccnccccaggggctccgaggaagcncagagngtnggangggggtctggggcanacaggggtggcccacgagagcccgtgggaggtggggtcttgccnaaacagatggcagagtgagctaagggcaggaagctctgcagggtgaggtcatccccctcacggtcctccctgggctctggcgtcaagcccgggctcttggcttggacagnccccattggctgtggcagagggccctcaccccatcaggcacnaggatgagatgcagacatctcggtgggggataatacgcacggcgtac

SEQ ID NO: 677349 - DNA, 960 bp, Homo sapiens
gcagtattaacccccggtcttgggtacttgttacagcgccacttcgatatgtttcctttgggcccacaattttgccgccccagatctgttctcagagacccgcctggtttccatttggggcctccttcttttttagtgccgcctcccgggcccccggggttctttcggcccccccgcgcattgtggcgccccccttcgggccccggttgggtctaccctctgggcgggtctcgttctcccctgtgctcctcctcccgcccttcgtgcccggatggatttcccaccccgcctcttgtttggacaggcgttaatttcccgccgcggtggcgtccatcttcatgtttgctcagagcgcccgctttttctccccgggctttttaccccccgccattaccagtcgtcgcccgttggacgtatccctcctgccgctttcggttgagtggtcctcaagtggtcgccctcagagggggtcccccctttctttaccaccgggctttgcaggcggcctcttcgtggcctagaatcccgggtcgcctgggagggccccctcattcattgtgctcgctctcctcccctcggtgaggagctttctcctctagcaggccgggtgttctttggacgcctaaactccactccatcgccatgtatggaatcttcttgttgcacagagattcttcgcctttcagaacgcccttgtgcggtcctacgaaacgccagcctcgcccgctgagagtggggagccagacccgcggcgcgaatgccccctccaaggggagtacggcccgccgtgaaatagtggttgcgtcaggttgtttaaccacgccgcgactatttccttgagagcgccacgactgtcggaaacacataggttacatgctggctgtcccaagtctgttactcacctcccgatgcaacatgtcctcaccgaagccccaacccaccccccccgcccacaaacaa

SEQ ID NO: 677350 - DNA, 907 bp, Homo sapiens
atctttctacaccatccgtcggttgctcgtgccccattgggtagctgactattgtcataggtgttgcctaggagatcctggctcctgactagtgcttgcaatctcagaagtaaaaaacagccggggggcgaactcgagctgtctgaacaaattcgagatagctacgttcgggacggtcattattgccatcatcattcagggagcgaatgtcccacacgagagttgcgcatataagaattaggccccagctcggtgaaggtgggaccagaattttgccacgaggaatgttaagttgattgcctttcaatagacagtgttgaggaccatcttgcctgagcaaggtatcaatgcttacaatttgtgaagagccacagaaaacgttaccttttcccatcatcgatgataggaatcgggagcttgccatcctggttgggcatgctgcattccaggcaggaggaaggatgaaaagggcatgccttgtgacagcctcgtgtggtggtgtttttggtcctgataagaagctgaagctgtctatcctctacccagtttaccactggcaaggaacttgatgagatactcagggtagtcatctctctccagttgacagcagaaaaaagggtttgccacccccagttgatgtggaagatgcgcgatagtgtgatggtcttcaagcatcctggaagaagaagccaaaaaattttcccgaaaggagtctcacaaagagtcccatttgggaagaatactccggttaaaaccaaccttaagtcttgggaagtgtgctgcgccccagttgtctgtgccatggtgtctgcgggatccttaacctctgggtgtcccggcagttcgccgctccacggttaaagacggcacgtttggaatttctcgccgaaacacacaacccctcggt

SEQ ID NO: 677351 - DNA, 164 bp, Homo sapiens
gtcgctaaagcaagccacgagatatacgcattcacactgcacacaggacacgacgctagacctcacacacaaacctcacacaccacacatgacctcatacacacatgatctcacaccacacacaaacctcacataccacacacagacctcacacacaccacagt

SEQ ID NO: 677352 - DNA, 100 bp, Homo sapiens
agaactacaaattgaaacatgggccacggattcacagtgacaggcaggccatgcacgtgccacgtgtgatgaccaggacggacatgtggcaggatacatg

SEQ ID NO: 677353 - DNA, 496 bp, Homo sapiens
agatagatgtcctgatatgaagtctacattcttttactgtggggcatctatatcttttatagccaggtggtgggctcaaatgacttttgctggcagagtttgaatggaggcatgtggatgagtatatggataaactatggcacagtgagagagtctgtgatatcatgctgccccgactacgggtaagaaataaaggtctggttaccagagtcacccttctcttcctagaggggcagacagacaaacacatacagatagttaaaacactgaagcctgtgaatctaatgggtcctctaaaggaatagtcttccggtcgggagagtcccaagatagtggatggggagtgagaggaacatagatcaactatgggaggggtagggctaccaaagtgcctggttgacaccaaggaaagttggtttgcctccatcctttggtcgtccaggtgcttgtgtgagtggtgcctccctcagaccttgttacaaagtccgcacattac

SEQ ID NO: 677354 - DNA, 383 bp, Homo sapiens
tccaatttacaggggaactgaagtttagtggttaaataacgtacccaaagtcatgcagctagaaagcagcagccttctgaaagaacaattgatcttaactactttgccctactcctccagcagactattcaaacgataacttcctggtatcattgcttataaaagtaaaatattttaatggatgcaatgaaaaaacggcattaaataaattgggagaaataattgctgttatactttttaaaaaactgtctaagtataaaggttatagatctccaaacgagcaggcagtaaatttatttttcttgtaatctgaaaatagtagccatgtttccctctcaatgtttgagttggggttgggatgggtggaacaatgcggaatcatc

SEQ ID NO: 677355 - DNA, 359 bp, Homo sapiens
tcaatggaatcgaaacccaatagttagttaatataaagccagaaggttttgttttttttcaggtggggtctcgctctgtcacctagactagactggagtgcagtggcctgatctcggctcactgcaacctctgcctcccgagttcaagcaattctcctgcctcggcctcctgagtagctgggattacaggcgtccgctaccacaactggctaatttttacatttttagtagagacgggggatattgctatgttggccaggctggtctcaaacttctgacctcaaatgattgcctgcctcagcctcccaaagtgctgggattacaggtgtaagtctctgtacccagcccaaaagcagttt

SEQ ID NO: 677356 - DNA, 269 bp, Homo sapiens
cgttagcaccaccctacgtcagtcctgccaccaccctacaccaccataccaccaccctgcagcctaaaacaaccctacaaccactctagcaccaccctaccaccaccctacaccaccttacaccaccctaccaccacactgccaccataaaactaccctaccaccaccctaccaccctacaactaccctacctccacctaccaccgggctaccatcaccctaccatcacccgcctattttacaccaacccctgttcggttgagcggaga

SEQ ID NO: 677357 - DNA, 729 bp, Homo sapiens
tcacgccagacagcggcccgcgcgccttctcctcggcgtcggccgccgccagctcccagaaacctcttcgtgccctcgacagtgccaggcccgcggcggccgcaaatccgcgggttcaccagcatgtaccgcttcaggacccctggcatgcggatgggggagggaacccacgcagcacagcgccgggtaccgagcaacagcaacccgcaacatcgcccgggatccccagcagcagcgcagcagcgcaggcaggcaacgcaggcacgcaggcacagaaagcaggcaggcagcgcaggcagcgcaggcacaaaacaggcaacaagccagtcgtcacataccgtaggccacacgggcccccagcacgggcacccacagcaccaaccgaccgttccgccagcaagggctctcgcagcccatcgccacacgtccatccctcacccatatagcacaagccaccaagccagcccccatccccaaccacattcggcccaccaccaggggcacccaacgcgtgcgcgcacggccccaccaccctctcccaggtacggcaacgcaacttccggcacgcaacgcgcactccccgagtccgctaccctgcccccctcccacacggtccacaccagcagcaggcaccacacaactcgtgagaacttgcgcacaccatgtgtcacgccaccaactcccttccaccccacgcgccacaaccctgccggtgcgatcgcccccacg

SEQ ID NO: 677358 - DNA, 229 bp, Homo sapiens
cggaggtcttttggaatagttcttctgtactctggaaggtacatcttaagctgatcaatgtaactggagggctacattatttaggcagtatttgcatcccagacatacaacatttaaagataccactaaaattctgaggtagctatgctgcaaaattatttaaaatttaaccattggaccgtactcatttattgttgaaattcccgtcctaggaccaggttgggggccc

SEQ ID NO: 677359 - DNA, 666 bp, Homo sapiens
  misc_feature (666)..(666): n is a, c, g, or t
agcagtgtctcacacctctaatcccagcactttgggaggccgaggtggacagataacctgaggtcaggagttcaagaccagcatggccaacatggtgaaaccccgtctctactaaaaatataaaaattagctacgcatgggccgggtgcggtggctcatgcctgtaatcccagcactttgggaggctgaggcgggcagatcatgaggtcaggagatcgagaccatcctggttaacatggtgaaaccccatctctactaaaaatataaaaaattagccaggcatggtggtgggcgcctgtagtcccagctactcgggaggctgaggtaggagaatggcatgaacccgggaggtagagcttgcagtgagctgagatagcaccactgcactccagcctgggtgacagagcgaaactccgtctcaaaaaaaaattaacttggcgtggtggtgggcgcctgtaatcccagctactcaggaggctgaggcaggagaatcactagaagctgctaggcagaggttgcagtgagctgagattgtgccagtgccctcctgggcaacaagagtgaaactctgtctcaaacaataatataacataggtggtctttatatgttcgtggaaggattttgttcaggaccccacttatattaatggattaatgctgggcttn

SEQ ID NO: 677360 - DNA, 251 bp, Homo sapiens
agtcactttgtgcatagtgggaatctggactttgagtgttgccatgctgtgtagcacacattgggcaggatctctatagggttctttgaacatgaccctgaatgtgttagctgtcccatcacaactaaaagcggtatcattctgtcccaaggtttggttttttctcatattcaatgatctgattcgatcactcgttccactgtatacccagcgggtttctacttgctggaatctatttgatgcagcataca

SEQ ID NO: 677361 - DNA, 578 bp, Homo sapiens
  misc_feature (158)..(158): n is a, c, g, or t
gctaatttttcgtaattttaagtagagacagggtttcaccactgttggcccggctggtcttgaactcctgacctcgtgagtccacccccccttagcctcccccaagtgctgggagttacacggcgtgaagcccccgtgcccggcccacggacttgttnaaaaccagcattcccacggggagttccggtgcctaccacgaaaagtcgcaacactgcttggctcttgagggcgcctaggaggtcggtgtcgcctaagatgggataatggcttcacggccactcctagccttccccatatttcctgcctcagcccccctggccccatgctggggcgtcagctaaacctgatgcttcccagaagtcaggttgcccaaggagaggaggccttttgaggaccctcccccacaccccccaggtttccacaggccctccgtaacctgggggatcaaccacaggagtttttgttttcgaagaaccccaggcctcatgatggttctacggtagaggtcccacaaatacagcctgtgggccacatttggcccccgcctgatttgtaaattaagttttattgggacacca

SEQ ID NO: 677362 - DNA, 185 bp, Homo sapiens
cgatccccgatgcttataatacacagcgcagaggcctggcacttaggagagggcagcactcactgccttctgaggggatcttggactacacggtgtaataagggagaggatggtattctcttctgccctacactaaggccatagggaacccagagagcaaatcccaccactgccttccaatcact

SEQ ID NO: 677363 - DNA, 306 bp, Homo sapiens
agtaggagctcaggaaagagagaaagaagaagaggaagaggagaagaaggaggaggaggaggaaggaaggaagaaggaagaaggagaagaagaagaatcagaagaagaattagtagtagtagtagtgaaagcgaagagaaagagaagtctttatgttaaggaaagctgtcaagcttccagtggaggaacacaacttttccaaaattatacattttgctagaaatctccaattttatcattggcacaacaaataccagttgttttccgtgaagaggccaacttagttcaattttgagaaaatgtctg

SEQ ID NO: 677364 - DNA, 541 bp, Homo sapiens
tttttttctagaaaaaaattaaaagggaaaacaaaaccaaaaaaaccagaaaccacgaataagaatggaaaaaaaaaaaaaaaaaaaaaaaaaaaaaaaaaaaaaaaaaaaaaaaaaaaaaaaaaaaaaaaaaaaaataacaagaaaacaaaaacaacaaaaaacagaaaacaaaacaaaagaaacaaaaaacaacaaaacgaggggcggcggcggacgactttgtactctcttccgtcggtgatagcgaactaaagaccgtgcgcgccccctccttttatatataggagagaggccgacccagagtaggtcattactaatacccacgcgcgtacttaaaaacaacacacacgaggagagaaaaaagaataatacatcaatgatataaggaagagagaacaaaaaaattggtggaggaggaaaggaaaggaggggagaaaaacaaatgaaaagagataaaatcagccgaagcagagaaaaaataaaaccataaaagagggaaggaaagtgggcagaaaacaacaaaaaatagagagtgaaa

SEQ ID NO: 677365 - DNA, 543 bp, Homo sapiens
  misc_feature (37)..(37): n is a, c, g, or t
  misc_feature (67)..(67): n is a, c, g, or t
  misc_feature (90)..(90): n is a, c, g, or t
  misc_feature (96)..(96): n is a, c, g, or t
  misc_feature (160)..(160): n is a, c, g, or t
  misc_feature (184)..(184): n is a, c, g, or t
  misc_feature (190)..(190): n is a, c, g, or t
  misc_feature (195)..(195): n is a, c, g, or t
  misc_feature (245)..(245): n is a, c, g, or t
  misc_feature (269)..(269): n is a, c, g, or t
  misc_feature (274)..(274): n is a, c, g, or t
  misc_feature (290)..(290): n is a, c, g, or t
  misc_feature (368)..(368): n is a, c, g, or t
  misc_feature (443)..(443): n is a, c, g, or t
  misc_feature (526)..(526): n is a, c, g, or t
attgaagtgaaaagtaaagaaacgctttgtagccgcncggatttccttaggggacagcaagtaaatncttataagcggtcctcagaaganacaatnttgattaaaatcagacccatctcactcagtttataaaaccctgaaggaaggatactcttcaganatagaagacatgcctttgattaancattcnacccnattgccattccaagcattaccaactatgttgcacctctagaaagagaganccttcgaattctaggaagacacanttacnaaaatccccaggggcncatgaccgcttctcagcccgccccgctgagaagaacccaagtggttagcggggatgggggggggtggtcaccactggngaggcaaaaacctagttacataattcacttcatggtctgcagttagggtcagttacttacgacaaaattcctgcntgatgataattaaattgacagaagcctgaaggcagagggagtgactgggcttgcgccaccactggctgactccgtagccttanacagtttacaccacacc

SEQ ID NO: 677366 - DNA, 308 bp, Homo sapiens
tgggccacagcatgaaaggcagagctggggctccatcagcaccaggcctcacctcctgcctgtcttatctcagggtcctggaccatccagacggagaggggaatgccctgggggtgctgcgcaacctgctctggccggacccaaccttctaccatgcttccctcaccaagaactatggctacgtctacagcgggcactggcgacaagaacatggacttgcccttcatgctatagaatgggagccaccctggatgtatctaaacagagtctagacatgattttgttaagcttcaaaaaaaagaaaaaaa

SEQ ID NO: 677367 - DNA, 1256 bp, Homo sapiens
  misc_feature (1256)..(1256): n is a, c, g, or t
gtaccatctcacttctaggaatactgagtatatcgactcagccacctcatgtcctccctactactgtcctagaaggacctaatactatcggctgctttcagtatagtatgctacctctcagtagaacccatcagatgaggccatctccgcgtgcttaggccaactattgctggcctaattgaccagtactacgatctttgaccgtctctgacgaacgtcagccggtgggtgctagtctgctatcatagttctcaagtctccaacgctatattggcctaggaccgtagcgatagcactaaagcactaacacggctatgcatccatgtgccatagaacagctatgttacggttgccccaagacaatcgactatttacctagccaccgtgaccactgagcgtatgtcacaatgcatacatctactaagtatgtgtacatgcaaaaacgcaacatcacactccacagggtcgtacacgtgtaagtatatgccattataagcacgcgctggcatactctcgcttgcatgcttcgtgcacacgcatgcgacgcgcacagggacctcaccctttactgaataatgcctgcactatgcatacgtatcaatgtacatggaacgctcgtagttacgatcccctaaggttacattcgctggcaaggaaacgcgtagtaattggactactaggaatgcttccttattagtgttgcccggtgctaggcaacataccctagcgcacagcaactgcgcaccgctcaaacgccacacaaacgcgacggcgaaaaactacagaggaactccgcgtatcagcatacagcaagctgccaggcacgagaccgccgtatacgcacaccactaagcgaggcgactatgattcgcgaggatagggtaccatttcctgcactgagcacccgggaccaacgccatgagtgacctaggttccctgaaccaccgagaccgccatcacgacacctacatgatacgtggagtctgcaacaacgcctattggatccgatgatcacggtcgccgagcgtttgcgcccatcgtttgaggttctgcacagggcccctgggacacgaattccttagtgctgccctaatgtgagggcctcgaaccgggatcagccaggaacgccaaatagacatgcgctaccacgcctcggatcatatccaactccctatggagtctgtatcgacatccatgactctttcagaaggcaaccgaattatcgacgtcaacaacgccgcgtttccgtagactcn

SEQ ID NO: 677368 - DNA, 175 bp, Homo sapiens
  misc_feature (4)..(4): n is a, c, g, or t
cggntagcgcggtctctaattgtactgtccctagagagagcccccagcccgcaggaggcagggaagatgagcatctcaagggaagagcctccaaacagctacccatctgctaaggcgcttatgtcaccatggagaccagttggctatctttcatccaatcagagctggctttacc

SEQ ID NO: 677369 - DNA, 305 bp, Homo sapiens
cagggagcattcatgtgaccatcaggcaaagccatgagatcaagaccatcccacagcctttcaacaatgaggtacaaccacctgggggctatctcctcttgaatgtattcctgagccaggagcgtatgtgaaaacatcaaccactgcacatgacaggctgggtcctctcatacagatgggatggggttcagaaagccagagccagtatttccatctggcgtttcctgtgtcctccaggtttatatgggcacatcgaaacagtttgttcaatctgatggggcagcagtccatgggcagatttccct

SEQ ID NO: 677370 - DNA, 1581 bp, Homo sapiens
  misc_feature (690)..(690): n is a, c, g, or t
  misc_feature (914)..(914): n is a, c, g, or t
  misc_feature (938)..(938): n is a, c, g, or t
  misc_feature (943)..(943): n is a, c, g, or t
  misc_feature (969)..(969): n is a, c, g, or t
  misc_feature (973)..(973): n is a, c, g, or t
  misc_feature (976)..(977): n is a, c, g, or t
  misc_feature (987)..(987): n is a, c, g, or t
  misc_feature (994)..(994): n is a, c, g, or t
  misc_feature (997)..(998): n is a, c, g, or t
  misc_feature (1013)..(1013): n is a, c, g, or t
  misc_feature (1022)..(1022): n is a, c, g, or t
  misc_feature (1027)..(1027): n is a, c, g, or t
  misc_feature (1034)..(1035): n is a, c, g, or t
  misc_feature (1043)..(1044): n is a, c, g, or t
  misc_feature (1047)..(1047): n is a, c, g, or t
  misc_feature (1050)..(1050): n is a, c, g, or t
  misc_feature (1052)..(1052): n is a, c, g, or t
  misc_feature (1058)..(1058): n is a, c, g, or t
  misc_feature (1060)..(1060): n is a, c, g, or t
  misc_feature (1070)..(1070): n is a, c, g, or t
  misc_feature (1076)..(1076): n is a, c, g, or t
  misc_feature (1079)..(1079): n is a, c, g, or t
  misc_feature (1084)..(1084): n is a, c, g, or t
  misc_feature (1103)..(1104): n is a, c, g, or t
  misc_feature (1119)..(1119): n is a, c, g, or t
  misc_feature (1123)..(1123): n is a, c, g, or t
  misc_feature (1154)..(1154): n is a, c, g, or t
  misc_feature (1157)..(1157): n is a, c, g, or t
  misc_feature (1174)..(1174): n is a, c, g, or t
  misc_feature (1186)..(1186): n is a, c, g, or t
  misc_feature (1190)..(1190): n is a, c, g, or t
  misc_feature (1193)..(1193): n is a, c, g, or t
  misc_feature (1222)..(1222): n is a, c, g, or t
  misc_feature (1235)..(1235): n is a, c, g, or t
  misc_feature (1264)..(1264): n is a, c, g, or t
  misc_feature (1266)..(1266): n is a, c, g, or t
  misc_feature (1344)..(1344): n is a, c, g, or t
  misc_feature (1357)..(1357): n is a, c, g, or t
  misc_feature (1379)..(1380): n is a, c, g, or t
  misc_feature (1400)..(1401): n is a, c, g, or t
  misc_feature (1407)..(1408): n is a, c, g, or t
  misc_feature (1413)..(1414): n is a, c, g, or t
  misc_feature (1455)..(1455): n is a, c, g, or t
  misc_feature (1563)..(1563): n is a, c, g, or t
  misc_feature (1575)..(1575): n is a, c, g, or t
ccctcgctcgtgggtgtgtcttgtcgccggggtagcggtgtgcctctgttgacgccccgcgttcggtgctatccattctcggtgcgggttgttaggacgcttcgtgcgtcactcccccgttgtctcgtcctgtggttgaatgggtgagatcgcggtccgtctcttgtgggtgactcgagtccctccctccttgggctctcttccccccctctgagctgtgttcgtcggtccccccactggtgcccgctgatacgtgggggtcgtccgccacacgactgttgctcgggggtagtgaccccaccacgcggggttgtcactttttacacgcggcccccccgacgtgcgtgtgtcgtagtatctcctgggcctcatcttagttgtgctccgccacgtcccacaggtgtgttttatttggggggacgaccctttctgggtgttatccgttgtctgtgggggttggtggttgtttttccccccccgaacggggctccaccgtgggagggggtctccccgcccacgccacgccgaggtagattcccccccggggggcccccccagtataaacttgcgcacagtgggggagttccccccctgggggacctcttggggggagggggaacaccccttgcttttctttgggtctttggtgggttggttgtggcccccccaccgcccaccgggaatttctgnggggccccccggtgtcccgcccacagtgtggagggaggccaccatctcacagagagcgcccgcgtgtgttggcagagacactgcccctgggctcacggacgcccccacaacaccccacggtgtgaaacacgccgtgttttgtctttgggcttcccccgctcttcacggcgcctcctcacggccccccgctgttcgccgcgcactttctgttccgcaccccctcngtgagcgctctcactgtcccactntgagngagccccctctggtggccctcggctntctnttnncgtgcacacncctctgnganncacacagagcacacnccccaagtntcggngaccacnncacgagtnnccncanangcacgncncaaggccccntgtctntcncccanatctgtccacatcttgttnnacacacaggggcgcngagnggtctccacggagaagtgtgccccacaaagnctntgaccacgagatccccncgttctcctgancacntcnccacgcacgccctccaacacaccaaggcntccacagagcctnatggctcacatggaacgcaagaatgggananggcacacacgggaagaaagggaatatacccctatcaccccacgagccccacggctggacacacatgctgactgtcctnctcccctcccacncctcttggcctctggctttttnnagcctatttaacctcgcacnngctgannccacnntcttcttccctctttccccacgcactcacctccccaagganagaagcccactgttttccacccataatacccttttgccgacccctagttccctctgctcagacccagcttgttatccgcttttcagggccctggttcaccttagaatnaaaggtagtaanttagga

SEQ ID NO: 677371 - DNA, 404 bp, Homo sapiens
tcagcataatcgttatactgctagttattgcattcatgagttctgtaaactcatctcagggaatccgtcttccaagtgtatcaagcaatgtgctgcctctcccctatcctccctaacactacgtcgtgactgctacaccactaaataggttaagtgactattgatctgcgagatcagtgctctctatcgatgttcttgcaggtctccagaaccattcgctgtggcatatagactagaaagactcgtagattatgtgatagccagcacgtttcccactaaccatgtctcacgaactgatctaaactccagctcacttacccgaatcagatgggtcatcgaaatccaacgcttgatgaatacttgttctcaaagattgtaataagcgacatccaagtatcataaag

SEQ ID NO: 677372 - DNA, 900 bp, Homo sapiens
gcactattatataataccttgagatcttgtaatgtcatagaagagggtaatggaaatgatcatggaaacttttacaattttatcagcaatgttctgtggtgggtgcatgcatatgtaaattatggctttaattagagcagcacatgtgtaaaataaaaaatacacttaatttttaagaaataatttaaatgaaacaatttccattcctttaacctgcttagacttatatgtgactgtgtatggtctcctggtaaaaggggaatggggtcagaatattcttgcataacaattatttttcataacagtcctttttaaatatatttgggtaaacataaatatcttcagagaaataactgtggaaagcctactcaggaataatctcccttaacctcttaaaaatttaatctcatgtgaaagtgtctcagtaagtaattcacctgaatggtcagttccttccattggtatcaccatatttacattcttaattatggaggcccatgtgagtaataaaaaattacggaatatgtagaagactaagaaggggtggcaatataatctggggaatatgcttcatgttatttaaaccagaaatgtttatctctaaaaatttacgtagtaattatttacccaacttaagaacctttctataatataaaggttgcttatatttaaggacaatataagggtagaattggtgcctccggacctaacatttaggggaatgatcatcaaaacaagcttccaccaaatgggttaaatctgagatgagctctggtcccgcgcgttgaaccacctggggaacttacacactcccgcagcctggtcgtgtgttcggcgacgctagagctagggcactcgggcaggcgaggcaagaagagggaactgcaacgtgtggagata

SEQ ID NO: 677373 - DNA, 304 bp, Homo sapiens
  misc_feature (66)..(66): n is a, c, g, or t
  misc_feature (74)..(74): n is a, c, g, or t
  misc_feature (83)..(83): n is a, c, g, or t
  misc_feature (139)..(139): n is a, c, g, or t
  misc_feature (167)..(167): n is a, c, g, or t
  misc_feature (240)..(240): n is a, c, g, or t
  misc_feature (275)..(275): n is a, c, g, or t
  misc_feature (285)..(285): n is a, c, g, or t
cagctgggacaaggatgtgtaccctgagcccccgcgccggcacgccgggtcagcccaatcccatcntctacatnatgaaagcnttcgacctcatcgtggaccgacccgtgaccctcgtgagagaatttatagagcgggnaacggcaaagaacagggtattactactnccaccggcagtaccgccgcgtgccagacatcactgagttcaagggaggaggacatcatgttcatgtatgaagncgaaattcagtggaagagggggctacaaagtcgancaagaaattnttcaagatttatgccagga

SEQ ID NO: 677374 - DNA, 959 bp, Homo sapiens
gtggaatggccgcgggcggctcgaccgcagcagaggcgacgcgagatggcggcagcttcagcggcggctgatactcaggagctggtcgctgtcggcgtaagcaagattggagctacgtcgtcgtccacctccagctcgcgtaagggtggctgtgctgactgctggccattttgtgtgatggaacagcggtgagcaatgtgattcccgcccgtgttgtgccgggcgcatggagcgagctgcgtcgtctatgagattgctatgctggaggaaccaccaggagactctcaacataccagttatgagtgccttctatggggagaggagtactcagctaggactagtctagtgcaggttcagtgcatgcccatccgtaaggctacttgcctggtacatgtggcacgaatgccgacgtgttgcattgtcctatgtgacccacgaggtagtctggcgaagactgctacaacaattgcttgggctatgcccgatagcaaaccttgggggttgatcaccgctggagctctctatgtgacctacctgtctagactcgacaaggcgcaggacgggttgccgagtgggccggccgatgggctcgtttcttgtcacccatgatcttaccttatacgagtcgtggcacggagcaagggtattagatcctccttggaatccgtgcattcgcgcgagaacgcgtggtagagtcccgaggaaagacctgtccggggggacatagtccttgtattccgtgggtcgtcgtcccatgagagctccatccggtagcgtttgcttgatttctcgatgctggcacattctctggccagcctagtctgaaatcggaactgtagtgatgccagcgcgggttcaaaccaggggctcctcgctgcaggtcatgctgtgctcctggtcaaggtggaccaagcgggaacggtttgggcccatttcgccagcgagagggaaaaactcta

SEQ ID NO: 677375 - DNA, 141 bp, Homo sapiens
ctccagcatcaagacacattacagtcacaattgttgaaagccaaagacaaagggatatttattatttttttttaaaaaaagggtctcaccatgatatggcccaggctggtctaaaactgcgggcctcaatggattctccca

SEQ ID NO: 677376 - DNA, 515 bp, Homo sapiens
gcaatagacaggaacagtactagtactacacagacagctccttaatctacaactagctaatcataggaattacataatacctaggagataaacagtggtaacatactcacgcactactgctatctctgcagttccttcacactttgctgtggttttacttttcagatgcccttaaaccatatttagggcattgtggcacagacccacctatctcctccaaccttacatttaccattaagtaggtggccatgtgacaagtcagtacagttgttcagcatcactggaggagtggattggcaatatgcaaagcggcaaaaaatggaaacgaacttatccaagagcttctaacataaacagcaatgctaagttgattcaaagcagaaaagagtaaagccacatatccctatgtgaagcaaaacagattttgaggtacatatacgacaagcctgagtaggacgttcagatgacaataactgatttactaagggattttggcagaattcttacccctgaag

SEQ ID NO: 677377 - DNA, 360 bp, Homo sapiens
atcattgcccagatcatgtcaagacgattcttgctccttatgtttctcttctacatagatttatttttatcagcgtcttgactggaagacactctgtcgatttaattggtatcctttttttctgccaatttactacagaacttattgaatgtggaaaagattcatgcaatcatgagttttctgcctataattttgaatcagctcttcaaagttctggtacagaatgaggaagatgaaataactacaactgtcaccagggttctgaccgacattgtggccaagtgccatgaggagcagctggatcattctgtccagtcatatattaaggtatgaaatgcctcttggaaattgctcatatcc

SEQ ID NO: 677378 - DNA, 943 bp, Homo sapiens
gagcaaaggtggaaaggtgtatgaactgagaccagaaagaaagggagcaggggccaggtgacagagcgagactccgtctcaaaaaaaaaaaaaaaaaaagtaattagttattattcgaagggggcggggcaacctgtagtgagaccctcgtttctacaagaagtttttaaaatttttagccacctggtagtctcagcatacatcgggaaggctgcggggggaggatcatttgagacccgggagggtcaaaggcccaacacgttgagggcatgggttggtgccacccacattcccagccggggaaacaaggtggaagaccccttctgctcttggtttgagttgttgcacaacaaattaacaaaattaacggggggcttattaccatctaaacaaagggggattttagctcccagggaaaccatctaggtgggcttagaaacttccgagaaagtcaacaagggtgtgaaatactagcacatggcttctttacaagattagacgacgcaagaaaccaaatattgatcattgttcatactaacttattggaaagagccattttgggcaaaaaagtccaaaagaggcttcaaggtgaaagcacacagaaaagaagagttgacacggaagatttgcgggggaggtgttcaaaagctcgaacagggggacatatagcaaagaagccacaaagataagaattattcggggcgcagatacacatatttgggttgcgcctaaggcgagggaacagagaccaggatgtatatacattggcatatctattgacaacaggtttgggggtttcagccagaataataaggagagacaattacaagacatcagagtgaaagaaaggaaatattctaggcaaagagctggtctaaaataaactaagggcgcccaaaatgatatacaatcggaggggtggaaataaacgagggagagacgg

SEQ ID NO: 677379 - DNA, 223 bp, Homo sapiens
ttgcttatcccatgatctgatagcaaaaagcaactagtacagtgacaacactgagtgtctggccagactccatggcagaacaacatatgacaaatatttgggaccacggtaatgtcgcagagcattactacatctagaaaaagtgctcaaactcccacacctccatgggaagcctgtagaattcctacacggaagtaaacaaccgacagagaggatgagccca

SEQ ID NO: 677380 - DNA, 304 bp, Homo sapiens
  misc_feature (20)..(20): n is a, c, g, or t
  misc_feature (162)..(162): n is a, c, g, or t
  misc_feature (291)..(291): n is a, c, g, or t
cactctgttttgcccaatanctgtttttttttgttcttgtttttcccggcggtttctgttaggtcggtggtttgggtgggaacccagtcccaaaactttcctgtttcaaaataagtttctccttccctttttcttttccttccagaccctttttttttttanggtttcttccttcccattccccctggcttattgtccacctcccgttttttttttttttttttgagagggcttcggtttgtttttctttattggtccctttcggggtgccttttctttttggtggttggncttgtttggcttc

SEQ ID NO: 677381 - DNA, 139 bp, Homo sapiens
caccacctgagtccacacacgacctgagtccacaccacctgagtccccactaagtcacaccacctgagtccaccataaaatgggcttaagctggcacctgcctcatatcttagtgtagcagcaaaggtggaatgagata

SEQ ID NO: 677382 - DNA, 329 bp, Homo sapiens
ggtagtaccgcgattgtgtcccctgtatgtactgctggaatctgccaccgagtgtactgaagaacttgtgtatcaacgactgcttggaagtggtgcgcgggtggcaggaatttattgcggaaaggacgtgaaggactggggcccgaagccgaattggggcttgtgggtgagctctgtctgctgcgtaagtgctttgatgaaggcgttgtgatttcctcggctgtccaaggtgggaaagggccgctcgaggccttccatgactttcaaatgggtatgggggcgatagagggtcaattccacatgtgccaacgggaaggcttcccgggtga

SEQ ID NO: 677383 - DNA, 633 bp, Homo sapiens
tccaggggaaaataactttaattggaaacccccaccaactgcaacaatctgtcccgggcataaaccttccttctccctttgcaatccggtctcttctctccagtgtggccccatgaatgcttcctctcctccctccagtggctcgtggaagcggccagtggcccaaactaggaggtggctgtcaactgaccttaaggctcaactctctcctccagaccccgccgctttcgtctgccccagcaaggacttgccggagggttgaccccccgctctctgggtctcccaccacacagccttctcagcattgacacaagctcatgtggctcacttcaccattaggtggaccaaagccaccccagcagggttgactgctcttgtcagcataggctcatacctcacgtggacggcattggtctcttgatcagcttgccgcccttgactaccggtacccctggccaatcttataaactctccttgcggacctcagggccggtgatggtacccttcctgcccagccgcttgccacagaacaaggctacacgacgcaggatgccatgccccatatacaggccaccttgcccaggcctcggtgggtcttgcggggcacctttgtgtgtgccacccattggtgcc

SEQ ID NO: 677384 - DNA, 948 bp, Homo sapiens
  misc_feature (1)..(1): n is a, c, g, or t
  misc_feature (249)..(249): n is a, c, g, or t
  misc_feature (259)..(260): n is a, c, g, or t
  misc_feature (270)..(270): n is a, c, g, or t
  misc_feature (273)..(273): n is a, c, g, or t
  misc_feature (297)..(297): n is a, c, g, or t
  misc_feature (304)..(304): n is a, c, g, or t
  misc_feature (308)..(309): n is a, c, g, or t
  misc_feature (313)..(313): n is a, c, g, or t
  misc_feature (321)..(322): n is a, c, g, or t
  misc_feature (325)..(326): n is a, c, g, or t
  misc_feature (330)..(330): n is a, c, g, or t
  misc_feature (332)..(332): n is a, c, g, or t
  misc_feature (336)..(336): n is a, c, g, or t
  misc_feature (340)..(340): n is a, c, g, or t
  misc_feature (353)..(353): n is a, c, g, or t
  misc_feature (355)..(355): n is a, c, g, or t
  misc_feature (379)..(379): n is a, c, g, or t
  misc_feature (383)..(383): n is a, c, g, or t
  misc_feature (389)..(389): n is a, c, g, or t
  misc_feature (393)..(393): n is a, c, g, or t
  misc_feature (397)..(397): n is a, c, g, or t
  misc_feature (405)..(405): n is a, c, g, or t
  misc_feature (412)..(412): n is a, c, g, or t
  misc_feature (422)..(422): n is a, c, g, or t
  misc_feature (426)..(426): n is a, c, g, or t
  misc_feature (451)..(451): n is a, c, g, or t
  misc_feature (453)..(454): n is a, c, g, or t
  misc_feature (457)..(458): n is a, c, g, or t
  misc_feature (460)..(460): n is a, c, g, or t
  misc_feature (463)..(464): n is a, c, g, or t
  misc_feature (470)..(471): n is a, c, g, or t
  misc_feature (476)..(476): n is a, c, g, or t
  misc_feature (489)..(489): n is a, c, g, or t
  misc_feature (495)..(495): n is a, c, g, or t
  misc_feature (508)..(508): n is a, c, g, or t
  misc_feature (510)..(511): n is a, c, g, or t
  misc_feature (516)..(516): n is a, c, g, or t
  misc_feature (522)..(522): n is a, c, g, or t
  misc_feature (526)..(526): n is a, c, g, or t
  misc_feature (537)..(538): n is a, c, g, or t
  misc_feature (541)..(541): n is a, c, g, or t
  misc_feature (543)..(544): n is a, c, g, or t
  misc_feature (553)..(553): n is a, c, g, or t
  misc_feature (555)..(555): n is a, c, g, or t
  misc_feature (568)..(568): n is a, c, g, or t
  misc_feature (571)..(571): n is a, c, g, or t
  misc_feature (580)..(580): n is a, c, g, or t
  misc_feature (597)..(597): n is a, c, g, or t
  misc_feature (608)..(608): n is a, c, g, or t
  misc_feature (621)..(621): n is a, c, g, or t
  misc_feature (628)..(628): n is a, c, g, or t
  misc_feature (635)..(635): n is a, c, g, or t
  misc_feature (946)..(946): n is a, c, g, or t
naataattcagttgtaacaaagccaccaacagagcaaaacaaaaacaaagctaattaagaagcattgcttcagctcaaattagttatctcctttaaacaggaaaaacgaccattagtctactggttctcaaccctgtctgcacatgagaggaatggagggaaacaggacaggtgtttaaaaaaatagttatatccaagacccacctcagaactattaaatgagaatctctcaagagtgaggcccaggcnaagatttttnnagtgctgtcngtnttgaaaactacaggctctaaagtnataaggnatannaccntgcctcgnngcnnttcncnaccnagangctgattatcccntnccttttttcctctcctcctggganaacngggggnagcnggcnccgcttcngttttcntttttctttntccntcttcagttgcccatagtagcagcntnnccnncntcnnatattnnccgcnttgcccccccgcncccccnattgccattctcncnnctttncctttngccngctcttttcannccntnncttttaccncnatcccgcccatcnccngtttgcctngatgtccccgtccgccntttgttccacnccccgcgtccatngcctgtnttcgacngtactttcttaacaagttattataaaacaatattcattttatataccacaaataaactttttggtgcagataggaggaatatttgagtttttcccacctatttctaaaactgctagaatttctttttataagatcagtaccttcaattctagaatttaaacaaaactttttgctctaagaatgcatacataaaatacttcccctacaactgtactctatccttgacaaatccttattaagaggttcagtagtaactgtaggtatttaatgtcagaccaatctttcttcatttctcaggtttggaaatatantt

SEQ ID NO: 677385 - DNA, 324 bp, Homo sapiens
caacagtgcaaaagttaagggatgcaggctagacaccagggtcatctaggatgcaggtcacacagaaaccctctcctaaccccgcaagactgcgcgtcctggtgtcttctttcctccaaactctctttacctaacctctcttcatcagacaggcaagcgggaatctgtaccgggtttcagtagcagtgggagaaaggacaggcaaaggcacagatatttaggcgagagttaagctacttctggcccttgcatgtcccttattcaggaatagtgggccccgacgactggcactccgactctcaactctggttttgggagaacatt

SEQ ID NO: 677386 - DNA, 175 bp, Homo sapiens
ctcgatggcttgggtggggccccgggtggggtcttggcagcaaaagatataggccttagttggaaccattaaacagataatttctcaagggtgaggtgtgtcaagaagaccacgttatcaattccatctatatctaataacacatggtgggcttgaaggtgataattgacctctc

SEQ ID NO: 677387 - DNA, 147 bp, Homo sapiens
tggtagatctctagagatatccccggcccggtatgaagttactctaaatgtgatacaaagttttaaacttcaaagaaaaattttattagtactgactgtacaatgaaagcaaaaaagaaaaaaaataaaagcaatgtacatgttgcc

SEQ ID NO: 677388 - DNA, 816 bp, Homo sapiens
  misc_feature (11)..(13): n is a, c, g, or t
  misc_feature (15)..(15): n is a, c, g, or t
  misc_feature (27)..(27): n is a, c, g, or t
  misc_feature (29)..(29): n is a, c, g, or t
  misc_feature (31)..(31): n is a, c, g, or t
  misc_feature (38)..(38): n is a, c, g, or t
  misc_feature (49)..(49): n is a, c, g, or t
  misc_feature (57)..(57): n is a, c, g, or t
  misc_feature (63)..(63): n is a, c, g, or t
  misc_feature (66)..(66): n is a, c, g, or t
  misc_feature (68)..(68): n is a, c, g, or t
  misc_feature (77)..(77): n is a, c, g, or t
  misc_feature (79)..(79): n is a, c, g, or t
  misc_feature (87)..(87): n is a, c, g, or t
  misc_feature (90)..(90): n is a, c, g, or t
  misc_feature (99)..(99): n is a, c, g, or t
  misc_feature (112)..(112): n is a, c, g, or t
  misc_feature (134)..(134): n is a, c, g, or t
  misc_feature (137)..(137): n is a, c, g, or t
  misc_feature (142)..(142): n is a, c, g, or t
  misc_feature (153)..(153): n is a, c, g, or t
  misc_feature (163)..(163): n is a, c, g, or t
  misc_feature (193)..(193): n is a, c, g, or t
  misc_feature (196)..(196): n is a, c, g, or t
  misc_feature (203)..(203): n is a, c, g, or t
  misc_feature (210)..(210): n is a, c, g, or t
  misc_feature (218)..(218): n is a, c, g, or t
  misc_feature (223)..(223): n is a, c, g, or t
  misc_feature (226)..(226): n is a, c, g, or t
  misc_feature (243)..(243): n is a, c, g, or t
  misc_feature (252)..(252): n is a, c, g, or t
  misc_feature (264)..(264): n is a, c, g, or t
  misc_feature (284)..(284): n is a, c, g, or t
  misc_feature (287)..(287): n is a, c, g, or t
  misc_feature (296)..(296): n is a, c, g, or t
  misc_feature (310)..(310): n is a, c, g, or t
  misc_feature (327)..(327): n is a, c, g, or t
  misc_feature (331)..(331): n is a, c, g, or t
  misc_feature (334)..(334): n is a, c, g, or t
  misc_feature (340)..(340): n is a, c, g, or t
  misc_feature (349)..(349): n is a, c, g, or t
  misc_feature (351)..(351): n is a, c, g, or t
  misc_feature (367)..(367): n is a, c, g, or t
  misc_feature (376)..(376): n is a, c, g, or t
  misc_feature (384)..(384): n is a, c, g, or t
  misc_feature (394)..(394): n is a, c, g, or t
  misc_feature (401)..(401): n is a, c, g, or t
  misc_feature (404)..(404): n is a, c, g, or t
  misc_feature (412)..(412): n is a, c, g, or t
  misc_feature (415)..(415): n is a, c, g, or t
  misc_feature (448)..(448): n is a, c, g, or t
  misc_feature (459)..(459): n is a, c, g, or t
  misc_feature (466)..(466): n is a, c, g, or t
  misc_feature (471)..(471): n is a, c, g, or t
  misc_feature (477)..(477): n is a, c, g, or t
  misc_feature (486)..(486): n is a, c, g, or t
  misc_feature (545)..(545): n is a, c, g, or t
  misc_feature (560)..(560): n is a, c, g, or t
  misc_feature (608)..(608): n is a, c, g, or t
  misc_feature (695)..(695): n is a, c, g, or t
  misc_feature (740)..(740): n is a, c, g, or t
  misc_feature (746)..(746): n is a, c, g, or t
  misc_feature (801)..(801): n is a, c, g, or t
tgagtcataannntntcattttttaanancngtagggngaaagtgaacnaataaacnaatganccncngagagtccncntgccggcngtnaggccggcngccgggtttaggngccgaggcagccgaagaccggngcnttccngtctttaattnccgtggcccngacaccgatgcctggggtgaagatacaccnccngacaccnaaggggntcggcccnagggnggnaatgaaagccgttaaanagacgcccngccccccccccncaccagcctgcctcagaggnccngcctagccncagacacaatcccngacaacccccaagaacnagcnggnagagcnataaaagancnagggtttattttagcnaagaaaacncgtaaganccacactggnagtcccnggngaggcccngcngccaatgccgagaaaagccagtggctttttgcncagcctgcccntgggggnggggngccccngagccggcncccgggcccccagccgtgcctgggaatagtccaggctgtgctcccgaggagccgccccnagcagaccctgaggnagggcacaaatcccaaatgctgcttgctttaaacaggcaccctcggtnttgcctcctctgaggctggcagttccttcctggatatgcagggtcaagagcggagggggaagcagaaagagttccgcctcacacgtnctccccacagttggcgatgatcaccttctgctttggcttcccgtncttgcngccctgggcctcaatttgccgcaagaaaactaggccttcggtgacctctccaaanaccacaagctttcca

SEQ ID NO: 677389 - DNA, 173 bp, Homo sapiens
catgactacggggttaatcagtccccagatgagctgagcccccagagagagtctgacgtcacaagtaccaggccagctccaggccccaatccgccagctctcccgtctgatctgcatctaacatcgatctgctgtcatgggaagaacagaattgtcctgatgaacacaccacg

SEQ ID NO: 677390 - DNA, 413 bp, Homo sapiens
  misc_feature (1)..(1): n is a, c, g, or t
ntattgtattgttcatatcacagctcctatagtgcaacgcttgtatctctaagtccatctaatagcatctccatgtcgtgctgcttctgcttgctgtctcctgccacccataagtgtacataagcgtgtgtgcacgattgggccacagacagcttccaacctccacactacagcatccaatccacacacagcagactcttcggcatgccgccctctcacaggaagccagaggcttaggagcttgccatccatatttatttggcaaggtcataagaagcatctatgagacaagggagaggtgcaggttgaagcagcgcctcaacagacagggacatgtaggcaacacgagcaggcacagcgcggacaccactgtccacacgctcacacgagtcaggcgcgcagggcctcgtgcc

SEQ ID NO: 677391 - DNA, 831 bp, Homo sapiens
gtgaactccaagccgcgagcagattaaatgcatgtcgacgagaaaagggccccctgacgaaacgagacgaggggggccctgtctggtgggccagcagtaggagcacccccaggctggagatgaagcctcctctgtagtgtggcagtggcaaccagcatgcgtccagcaatctccagccatcagcctaagcccagcagtggaggcctggctgactgaggtgtggccagcgccacgaaggtgaagtcccagggtggcctgtgtgactcctgccagctggctgctgaaccttcccctgggacaaccatcacgagcccagaggggaggtcctcaatcgtcagtgggcacacacatccgaaccgagattgtggcaagtaggcagctaatgaaccgcgcatacgagaaagcattccacgagtacaaaggccacaaaaagcggtagtgccctcctatcaatatgcacaccaagagcagcagtgaagcccaaagtgggggaagaaacagaaaagaaaacggcatgaaccgaacaaagaacaggagagaatgaatcacggcaagggaacaggaagaacaaccatagtctaagtggataacttcagccgacccgtatagttgccgttcagcgcaccacacaattaacaagacggcgacaaatcatgagggcaaccatataaaatcaacaaaacaacagtgtgaaaaataaggaaagtaaaacaagcaaacccatgaacaagaggaaatgatagacatgatcaaaagaaaaaaaaaaagataaagaaaagcaggtgaagcagcaaacaaacacaaaaaaacaccaacggcaaccacaaacgc

SEQ ID NO: 677392 - DNA, 441 bp, Homo sapiens
  misc_feature (22)..(22): n is a, c, g, or t
taccaaacactgcagttgggtngcatcgccctccccaacttctcattgggtttccttttggcccccccatggtgcccacttgtgggcttgccaaacctcatgggccccggaccctttattttgccctgctggtgttgaccagcccggcaaccccgctccttggcagcctgttcctgtggcgggaactgcaggaggcccccctgtccctggccaagggctggcagctcttcctggcagcgctagcccagggtgtgctggagccccccccctacggcgccctgcttttcccactgctgtccctgggcctctacccctgctgggtgcttttttggaatgtgctcttctggaaatgaaatctgcccgtccgggctgggacaaaaaccccccaaggacccccttttccccccttttggggaaaaaaataagggtttgtttcaccca

SEQ ID NO: 677393 - DNA, 896 bp, Homo sapiens
tgtagtcccacctactcggggggctgaggcgggagaatcgcttgagcccgggaggcggagattgaggtgagccgagatcgcgccattgcactccagcctgggcaacaagagtgaaactccatctcaaaaaaaaaaaaaacattggcaatcagctataatccttccctaaactacgtgggttgtgactggtgcttctggactccttcaattattacccaaaagatgattggactccttagtggacccttgggcctaggaattattcataggcttctggtgagcaaatgggaacctggggtctcactcaggatactaagcatgtctgaatccctgggaagctttacctttcttcctggcacacacttcattccggggtccctgtgcgggccagccccttggatgttccccactcccctggggatcctcaaggggggtcgaggttcctcctactgacattacccttgggtccccggcaacgtctgttgtcggcgccttccctctcttcgagccgggtctggctctgtcgcccaggctgcagtgtactggtgcccgtctgctcattgcactttctgcccgggctcagggcggtttccccgctcagctcctcgagtatcacgactgtcggcaggtgtcaccatgcccgtgcaaaacttgggcttctatggcacaagagggtcggcgatggcccaggggtccaaacccgactaagcactgctgcagctcccagtctggcaaagccggacagcgccacaggtggagtcggcgtggggcaacatggtgcaaggacctcgattaggcacagctcgtagtgccgtcagcgcgcgatcgagacatgaccagggagcgcgccggacgggccgcacccgcgccgaccacacgcgccggcggcatacaaa

SEQ ID NO: 677394 - DNA, 126 bp, Homo sapiens
ttgcggcgttgcccctcctgtccactgagcctgcccctgagggatctcctctgagcagaggcacctgctaagctaccgtacttgtcatcctcagcaaaacgcaaaattgagcataaaagcccaggt

SEQ ID NO: 677395 - DNA, 267 bp, Homo sapiens
cgtgtcagcatttattcagctcaagtctgaagctgtagatctggaagacaactgcaccttggaagggtgggccgaacacagttgattgtctctacagagctatgacgggggcactgagccccgcggtatgtctgtggagggtgctccggtccaggtactgcactggacactgcccatccctgggtgtcagagcaggtggctgcaccctaagcccggcgcaaaggcctgcgccggcaggcttggcatgagttggctggcgcgtgacag

SEQ ID NO: 677396 - DNA, 87 bp, Homo sapiens
gcaagatggtgtctttattttttatactcttttaagtgtgcattcttgataaatggttaattcagaataaaggtgactatgtgatat

SEQ ID NO: 677397 - DNA, 258 bp, Homo sapiens
cagctgacaggtgcagcaaccgaagtgcatgactcagtcggcgtgtcaaatcactgaagcgagccctcgagacaacctttgacctgggaattcctcaggtagtacttcccccattaccatcgaggcctgctcttgaaaaaaccaacggtgccaccgaagtctttaacactggtatttaccaataccaacaggctctagctaacatgcagttacaaccagcatacagcatttctcacaccagttcccatggtgcacggt

SEQ ID NO: 677398 - DNA, 318 bp, Homo sapiens
ctcgacacgtcagcaaaaacagaagaagtaaaatggtttgtatgtccttatattaaatggctatatttgcctttcttcaggccaaaggcaaaatacttttatcttacccataatagtatatgaataaaaaatgagatataagataaactgaagctaatgggctaatatcaaaacactacatttgaactactcatggggaattgggtagagcagagtaaaagttcatttctgttcgatagcatccattttggagtacatccagtagtgtaagtaaaattagaacagaaccattaaaatacataatgtaactcatcatat

SEQ ID NO: 677399 - DNA, 359 bp, Homo sapiens
cgagaccagcctggccaacatgctgaaaaccccatctctactaaatatacaaaaattacccgggcatggggacgggtgcctgtaatcccagctgttcaggaggctgaggcaggggaatcgcttgaacccgggaggcggaggttgcagtgaacagagatcgtgtcactgcactccagcctgggtgatagagtgcactccgtctaagaaaaaaaaaaaaaaaagaattcaagggccggccggtggttttagacggcaacctttaccgaagcctcagtgcacagccacagcagagggacacacacctgtatcttttctaagactgggagaattttacaattgcttgactaattgaacagtgc

SEQ ID NO: 677400 - DNA, 420 bp, Homo sapiens
cgagaccagcctggccaacatgctgaaaaccccatctctactaaatatacaaaaattacccgggcatggggacgggtgcctgtaatcccagctgttcaggaggctgaggcaggggaatcgcttgaacccgggaggcggaggttgcagtgaacagagatcgtgtcactgcactccagcctgggtgatagagtgcactccgtctaagaaaaaaaaaaaaaaaagaattcaagggccggccggtggttttagacggcaacctttaccgaagcctcagtgcacagccacagcagagggacacacacctgtatctgcaaaaaaataacaaaaattaggcaggcgtggtggcacacacctgaggtctcagctactagggaggctgaggtgggaggatccctagagcctaggaggttgatgctggtc

SEQ ID NO: 677401 - DNA, 799 bp, Homo sapiens
aggttgttgccggattagaattctgccagccttttgtcggccggtccggtagtaggggttaaggcttggtgatgtgggcgtagatcccgctcagggtcagctgccggtcctggggcggaggagatggcctgcacgatcagctgcgcgtaggagaacggcggctttgacctcatccttggggctgtctcctccagacgtgtctgcctgctgctccgacgcggcctttgctgcaaactctgctgccagctgcaggtccgaggtcacgttctgcacaaagcggtaactggaggagccggcaccgcgtggactggctgggcaggagttggggacactgatggtgcccgtcggggaggggacggggctgaccatgactccggaggtccggctccgggatgtggatcttcagaggggagatctgggggtacagtggccgcagcggggaggctggggcctcttctttgtgatagagcgacgtgaactggatcttgatggccgtgctgggaaaccggaaggtacactgcttgggcagctgcagggcgggcgcgccgcgtctctggaaggccccgtccacgaagacgccgttcttgccgaggcagcgcaggtagaagtgcggctcctggaagctgagctgcaggtggcgccgcgagatgaagctggacaggcccatgctcaagtccaccgagccctgcgacgagttgcggccgatggtgacgctgggctggcgcatgaggaactcgaactcgcggccctccagccgcgccagcgccggccccgggctctgccgtaccgaggcggccgc

SEQ ID NO: 677402 - DNA, 834 bp, Homo sapiens
aggttgttgccggattagaattctgccagccttttgtcggccggtccggtagtaggggttaaggcttggtgatgtgggcgtagatcccgctcagggtcagctgccggtcctggggcggaggagatggcctgcacgatcagctgcgcgtaggagaacggcggctttgacctcatccttggggctgtctcctccagacgtgtctgcctgctgctccgacgcggcctttgctgcaaactctgctgccagctgcaggtccgaggtcacgttctgcacaaagcggtaactggaggagccggcaccgcgtggactggctgggcaggagttggggacactgatggtgcccgtcggggaggggacggggctgaccatgactccggaggtccggctccgggatgtggatcttcagaggggagatctgggggtacagtggccgcagcggggaggctggggcctcttctttgtgatagagcgacgtgaactggatcttgatggccgtgctgggaaaccggaaggtacactgcttgggcagaagcctgtgaagctggtagcagaaacgagaaggaacgaaattaactccaaggcagtaagccatccacaagaccactacacgaagttaaggcatctgactctgcagaatccatttgccaaacctgggcgtggtggcgcatgcctgtaatcccagccacttgggaggctgaggcaggagaattgcttgaatccaagaggcagaggttgcggtgtgccgagatcacatctgcactcctgccgtgttagccaggatggtctcgatctcctgacctcgtgatccgccagcctcggcctcccaaagtgctg

SEQ ID NO: 677403 - DNA, 479 bp, Homo sapiens
  misc_feature (18)..(18): n is a, c, g, or t
  misc_feature (62)..(62): n is a, c, g, or t
  misc_feature (123)..(123): n is a, c, g, or t
caaaattggttggttgcnccctttcaccttttaaggcaatggtttttaacttaaccttgaanccatagaccccacaatgaaaccttcatagaaatatatggaatgtatgattttgcatgtaantttgagggccttcatggttctcctgatgcctcattccctaggttcctatgctgtaggttaagaatgtgttttttcttaggctgggcattttggcttatgcctgtaatcctagccgtttgggaagccaaggtgagtgaattgcttgagcccaggagtttgagacccaggatgggcaacatggcaaaaccccatctctagcaaaaaatacaaaaattagctgagggtggtggcacacgcttgtaggcccagctgttggggaagctgaggcaggagaatcgcttgagcccaggaggtagaggttgcagtgagccaagattgtaccactgcaccccagcctgtgcaacagagccagacct

SEQ ID NO: 677404 - DNA, 342 bp, Homo sapiens
  misc_feature (27)..(27): n is a, c, g, or t
  misc_feature (60)..(60): n is a, c, g, or t
  misc_feature (63)..(63): n is a, c, g, or t
ctgctctttcagcacagcccacactcntagggacctcgcacttcccggagcaacaccctnccnctgtcctggctgcagggcgggcgcgccgcgtctctggaaggccccgtccacgaagacgccgttcttgccgaggcagcgcaggtagaagtgcggctcctggaagctgagctgcaggtggcgccgcgagatgaagctggacaggcccatgctcaagtccaccgagccctgcgacgagttgcggccgatggtgacgctgggctggcgcatgaggaactcgaactcgcggccctccagccgcgccagcgccggccccgggctctgccgtaccgaggcggccgc

SEQ ID NO: 677405 - DNA, 1517 bp, Homo sapiens
  misc_feature (899)..(899): n is a, c, g, or t
gctagatagaaatgatagatagatgaaatcatattatgtataatgttttgttatattgttattttctgttttgttgtctctattgtgtgtgttttgtatttggttagtatgagatgttcttatatgtgtgtttgcatagtatattttttgttttaatttatagattgatgttttgttgtttttttgtttattgtgtgtttgttgttgtcttgtttttacgctagtgtgggtgatgggtgtgggttgaagtagtaaattcagtccttttttggatcccttcgatagtgttccccctgggggaaccctccttccagcctcgggtgtgtgcacccccagtaggagacaccccgggggcccagattctcactcttccggagttttttaaccctttatagtcccccgggggccggggattacccacatagttttcgcacagacggggggaacccagccttattggccaccattctagtcgccttaatattagtgggcaacaccttatagaggacacaatgtttggtgaccacaagaaaagcccaggcgttgggtgtacccggtttccggggaatttccccccggggattatttctgtgtgaaaaccacaaacgcgttttccgggccgcggaagggttccaaggtctcactgggtggtccttttaaatgggtttctgaagagcccactttttttatccttggggccacacccttgggcagggcacacattttgtggggcgtataaaacacaggtgatactctgtctgggggacccgcgaaaaggtttgcgttgtgctctctcattaaccgccctcgttgagaagggccactattcacaaccacatgttttttggcacacattttgtttaccacggagacaccacaaggttgtagaagtaaacgcntggcgttttctctttctcggcacatagccgcgagtggaacacccacaacccccttttctccgagaggcgccccttataccacagttctctaggggcgcccaccatacaccgcgaattttttttgtgcgcggagccacgttgccgagaggtatatatttgtcgccccaccgaaaccacaagcggagagacccaaggccacgcttctttggagcccgtcttctaaaagggtgttttgacacggcgaatctccaccccgcccttatccgaccacaagagaaaaagccggagatggtggttctcctgcgtgcccctcacaaggtctgtgcggtttgaaagcctaacacaagagaaagttttgccctaatcttggggcgcgcctggcgtctaacagagaggttggctggaagtaccacggcacgtgacagccacaccctggaaggagaagaggagaaagagaaagcccagagtccacctaccggagaagaagaaacacgctcaatgaggctacggagaaacacggccgagaagaaacgtggagaagaaaattgaccaaaacacagaggtcctcaagacccccggactcctggtttgagccccataaagactgttaattcctca

SEQ ID NO: 677406 - DNA, 119 bp, Homo sapiens
ttctcacaggtgacgagggggaaaagggttggggcggatacactccatgaatgtgaagcctggagccacacaccccgctggcagccaatagaatacaaacaaaaaatcttttgcggccg

SEQ ID NO: 677407 - DNA, 1324 bp, Homo sapiens
tggcatacactacgtgctgccgtgtgcaacatgaatgccacgagcggcatcatggcatgcctgatgtgtgttgcctggggactgtgaactgtgatgtgtgcaccccccgatgctgctgctgtgccccccgctgggcagtgtttaaaactcccagttcatggcgtcccccgggtgtggccagccaggaggctccctgcccggccagcatgcagctgcagaagctcaacaaccagtatttcaaccatcacccctaaccccaggaagcactacatgcctggatttgcaccctgctgcagggccaccagatgaacgggacaaaccagcacttccgagattgcaaccccagagcacagctggccggcagcagcaccccctggcggctcgcggctggcagcagcgaacccccggacggctctggcagcaggctcgggcgagcaggcagccgggccaggcacgaacacacaggctggactgtgcgtgccagcggcaacgcggcacgccacattgcccggaacctccgatggacccaacggtcccccgagtgccatcattgcttgcctgcgccagatggtacataagacaccacctgcattctacatcggacggagcgaacggttcctacacatgtcctttggggctgatcggaaccattggcgctccacgggaaccgcgatcaaggcagcagcctagtcccgcgacagcatcttggcctgtgtgagccaagcacccgaacggtaccggcactcgcgcacctcgacacgctgacgtctcagcatgatcgccacgcgccagcgcaggcgccaaggcacgacagcagagcgtggtcggaacttccggaacgccgaagcagccccggggcggaacacgcggagcacatcgcagccccccccgcgcagacggcttccatatccgcggccgctgcagagttcaacccccgacgaacacagcccgtggcgcgccgccttcagcacacgcgcccgggcgtaagattcttcaacagagtatagacagacaacacttatggcacacacaggcgcgcggagccgggaaccaggcacctggcacgcagcccacaacgccgcatccaaccccgacgcaacaaggcctcctggcacccagcagatcggggagcacacacccgaaggcccaccccaggcactgggcccacggctcaacaagcaccccctacagacacacctggacagcaaggcaaaggaagggaagccacgaccgcgcacgacacaccacccccccagaccgaccagcgccgagcacagcgaacgcgccgcacgacgagctgcaacaggagcaagagctcggggag

SEQ ID NO: 677408 - DNA, 346 bp, Homo sapiens
tggcctgattctcactttgatgtccaggctggagtgcaatggcacgacctcggctcactgcaatctccaccccccaggctcaagagattctcctgcctcagcctctcgagtagctgagattacaggtgcccgccaccacgcctggctaatttttgtatttttggtagagacagggtttcgccatgttagccaggatggtcttgatctcctggcctcgtgatccgcctgcctcggcctcccaaagtgctgggattacaggcgtgagccaccgcgcctggccacattttgtttttctctactgtgtgctacttgtatgacgtaacctgtgtccaaagtttgactatgg

SEQ ID NO: 677409 - DNA, 179 bp, Homo sapiens
atgtcttggcttcatttaccagttcttagaattcagtttggtggctacaaacagcctttccatgctgctggagtggctgttttgggaattaaggtcaaaaaaacaagccatgacctatttgccactctcatgatttacgaatttttccaagtagctgacaatgggcagagggcaaggtc

SEQ ID NO: 677410 - DNA, 152 bp, Homo sapiens
gatagtgttaggcgactcacattatatatctagtcgcctatagcgagtgtttctctgctcaggtgataagtttcaggagagcagggacttagtctgtggggtatccccagcacttagaacaatgttcagcacacatagctggtggtccatat

SEQ ID NO: 677411 - DNA, 764 bp, Homo sapiens
gatgacaaacattcgtgaaaccagttgagagaaggcttgatgtgtataaaagacgtgatgtgcaccacctcgactctcggtgtttcaggcactatatgcaacaaaaccaagcccatagtatctcattctcgttctatcaggatcctagaagacatatcctgtgtttgtccagtcgatgtttagcccacgatgttttgggcatggatactgtgaagagtgcctagctcaccattgatcccgtgcagtcgtgtacaccgtttcgattgtcactgacgcactcagaaggggccacgggctcctggctgtgattcctgagccctcgcgtcgtgcctctcccagtagagtagctgtcttgggccattgcctgggtcgatggggcacgacctagtgcgctagggcgtcatgcctcgcgggcgcatgtgccgacgtgctagcaagctcgtgctgctgaagctaggacagctggctgagaagtgggttcaggcgaagggtagaagtccatgtcgctagcattctcctgccagtgcaagatctggagaggagctgggccggaaggcgtggttgtgaaagcacccttcttactgtcaggaggccttggggacaagttggagtatcttcaaaaatacatgtaaaggtctgtagtgcgaatggtacgtctgccccctggataccagtatacagatagcatgcctgcatggctcgactttggcattctgcttttttctaccgatgtttcatctttagtcacttgaggcttaccccag

SEQ ID NO: 677412 - DNA, 358 bp, Homo sapiens
aggtcaggtaccgtgggtgtcccagtgtgaggagaaacagcgaacgtttgcactcgagatgcccgagttgggacactaagttctatggtcctgctgcacaagactcaccttttagagccagcagtcatcaaacttgaatcatgtgctggactccatggcgaggcatacaaattcctacaaagacacctcaagctgtgtatttaaactatgcatcagagaatgtgatttacaacacaaaaacctgaacacaggtataaagtcgccatccaatcttccagctgttcaagtcaactgttttcaagccatccccaatttctctctgtcattggtatcacacgtgccattggtcagcaaatcc

SEQ ID NO: 677413 - DNA, 1060 bp, Homo sapiens
  misc_feature (552)..(552): n is a, c, g, or t
tttttctcggcaaccctctgtgtctcttcctcgccaacacgcgtggttttgtttataacaggttgggctccctccctagagttctctctttgtcgcgttcttactatagggtgcggcggtggtcttatagattttccccccgtcggcggggtttcttttggtaactcacactccaatctttgtgtcggctagtcaggcacttatttcactcccgggggaggattctttcttatccttgttgctcctgggcggagcgtgttcttcttatttaggggtggtcttcttcctgcgcccatcctcctctttcttgttcggtgatgccacattcatcaatagagtgagagagtttggttttctctacctccagctctcatgagagttgcgttttccgttttgttatacactcatatgtgggctgccgcatggggtgcaccccatcttgttgtggccggcctcactgatttgttcatttcggaccacatatctctctttgtcttgcgaaaatttcttctctcttgggggcgcttctccacctcttcactttgtatgggngggcacaccaccacacaagtgggttctcacccagacagggtggtacaacaaaagaggtctttctctcttctttacacctcctctgaatcaacgacatggttggggcgcaaaccacacaagcggcgcctctcctactcgaggtctttctctcccctgatgtgtgtcaaactcttcgcgccgctctttaatagggcgtctgattggcacccctcgcgctgcatctccaccacaatttttcctgggcgatcttttgcgtggagagaccaccataggagacgctcctagttctactcttgtctacacctccgaagcaccacatccttgccactggtggagggggccaccaccccctccttctcttcccagcccgctgggttcaacaaatgtggctcctctaggagctcaacggcgggtgcggggccaaaaagggtcccaacaccgggcccccccccaccccccccccccctttttagggcccccccctataaattgtgggggaattttttta

SEQ ID NO: 677414 - DNA, 170 bp, Homo sapiens
actctttctgcggctgtttgtggggctgctgctgacctgggagagtgggcagttcctgcgggaacaggtgttcatgggcggtggggcggtaattccttctgatgcccaaccacagatagtgcagactggctcgttcatctggagacgagcggacagactccaagacgcag

SEQ ID NO: 677415 - DNA, 750 bp, Homo sapiens
attaatcccctggcccaacccgtcatctactctaccatctttgcaggcacactcatcagagcgctgagctcgcactgattttttacctgagtaggcctagaaataaacatgctagcttttattccaagttctaaccaaaaaaataaaccctcgttccacagaagctgccatcgaagtatttcctcgacagcaagcaaccagcatccataagtccttctaatagctatcctcgttcaacaatatactctccggacaatgaaccataaccaagtactaccgaatcaatactcatcattaataatcataatgggctatagctaataaaatctaggaatagccccctttgcacttctgagtcccagaaggttagccaaggcagccctctgacgtccggcctgctttgcttctcgacatgacaagaaactatgcccccgatctcgaagtcatataccaagatctctccctcagctgatacgtaagccttctcctcactctcgtcaatgcttatccatcatagcaggcagttgaggtggattaaaacagatccaggctacgccaaaatcttagcgtactcctcaatgacccacagtaggatgaatgataggcaggtctaccgtgacaaccctaagataatcattcttaatttggactatgtatatgatcgctaactactaccggagttcctactactcaagttaaagctccagcaccagcaaacgctagtactatctcgcacctgatacaaagcta

SEQ ID NO: 677416 - DNA, 173 bp, Homo sapiens
gctgagacacacaggccgaatccgggtgcatggtatatggctggtggccacaagcaaccgtgatctgaatgattgacttacttgcgtatcctggcctgagtgagaccaagtcagcgaccctcttgagtgagacaggttatccaatgtcctgctactgatccctggggtacctg

SEQ ID NO: 677417 - DNA, 1864 bp, Homo sapiens
  misc_feature (161)..(161): n is a, c, g, or t
  misc_feature (232)..(232): n is a, c, g, or t
  misc_feature (283)..(283): n is a, c, g, or t
  misc_feature (308)..(308): n is a, c, g, or t
caataattcagaacgggcgtagcaagccatcaactacacgcagctatcctcacgaacgatcctcaatattggtaagctgcattacatcactacacactagctaacatgggtggccacatatcatacgatcatccactatacgcagagatggcataatgtgntgtacgcatggtaacgtgtacatgcactaacacatggcactttcgtgctgtccgctagtaacgactgcagnggatgcagtacggtgacacacacgaccgtagtagaccatcgcctcattganatagcgacgacactcgaaagtgatncgtaagccacaatgcgatagctccatagcacacatgctcgattgtaagtttgagcacccatgcaaccctggttccgatatcgcaccacacccaacaaagtgggccattagccccttcgaatcagaggagtaaatacggattttccacaaaatggaaatctcccagaaaagggacaaatgtcgggaagcgcaagaacactcaatctcacactcgccagtcactcttggaatgtcacacgcgcagacagacaacctagtcgataccctcgtaaaggcttcatcggactcacggggtcaattaaggcaggaggcccacctcggaatccttagcccccgatgcgtagaacccaatcgagttatgtattgtcacattacggaggcccccgcgcgcggccttaggcgcacaattgacaaacggctgctagccaagagaggaagatgacgttcaacttacaagtttcaaggcctttaccgggtgtgacacctttcttaatacacttccacaggtggcgcacaccgcggtgggttaacttggggacacgtaagtgggtttggccccacccccgaaaaaggggaagggtttgccaaacgggcaattcggggtttcctttcggttgttcactccgttggtcactacatggaccaaacggcccacgcgcatgggcatcatcaggtttcatgaggaacacccctttgaagacgccgccaaggcgttcgcaaaaagggaacaagaaagcgggcggccgccggatctttagacattcaaagccaccccacaaaacaggcgccactccggcacccgcagaatcgaaattcccctttccaccttgagacaaagatcactcgttggtagatccgttgtggggaaccttttcaaaagtggagcctaccacatgcacaaagggctctaggccccgttaaagcgccacagtatgtagtggccatccgaaccgacgggtagtgctatcctctattacgagaaatgcgctataacaccataaaaatgccgccgttgggcgcatatttttaacatcaggacagaaaataatatgcggcggccgtatggcgcaggtgggtcaggtaggcctgttccgaaggaaagacaccatactgggagacatgtcctccgacacggccgcgatcgcgggaacaacccgagggatagaccacgtggtccagttaaaaagcaatcgcgtgatacacaggcacacgcggctcggtacaaacggcacgtgcacgtacggaaacaccttgatgaatggtgcgcccaaacctgggcgcagcacccccacaggttgagacccatgtggccacgcaacacgcggcaaaaccacaaaggggttgacgcccggcaataacgggaggagccatacacagcagcagccgcgcgaaccacaccgcagacgtatgcgacgacagacagcaccctcccgcagtccaatcagcacggacgcccccagcagcacgaagtgaccaacacgacgacacccaccaggagagagccgggggcgagaccaagacgcataactcccccaccagcagccgcgcagcaatgcc

SEQ ID NO: 677418 - DNA, 379 bp, Homo sapiens
ccctccagcagtatttctgtcagatgctacgtcctgcagtctcagccagaacagctgcctctgcgctggagcacagctggaacatcctgtggcggaagccccctcgtgtccttgccaggctcaggtgggtggcgataagaattattgaaatgcagtaagaattaccaaaatgttgaacaaagacaccaagtgagcacgtgctgttggaaaaatagcaccaatactacactagctcaacacaaggttgccacaatcgctgtaactatattgaaacaatttgggccaggcaagtgggccagggagggggtggctcacaacctgtaatctcagcacttatggggggccaaggcaggcggatcacctgaggtcaggagctcca

SEQ ID NO: 677419 - DNA, 168 bp, Homo sapiens
  misc_feature (144)..(144): n is a, c, g, or t
gctggatggcgcgactcacagtgtatcaacagtttctggctcagaggatgggagagggtctggccataatcatcgccagtgggtggtgtagtacaatgttcagatggctgtgtgagcaggtggattcttgtcagctccctttangagatgcaaggttcatagatgcac

SEQ ID NO: 677420 - DNA, 484 bp, Homo sapiens
ggctcggtacgtagcgctgcatggtaactgccgttgtcacagtatagcacacagacatatacatacacacacacgtacgtgtgcacacacatttttttttccaattattgggaatggggaagaaggagaatgactaatagccaagcctacccctgttccctagggttgtgggaatattctgcttgttccctttggcgaaatggaattggagttttttgtttttgtttttgtttttgtttttttttttttggagacagattctcgctctgtcgcccaggcgtggattacaggggcgcaatctcgactcacgtgcaagctccgcctcccgggtttcacgcccattctcctgcctcagcctcccgagttagctgggactacaagtgcccgccaccatgcccggctattttttggtttttttagtacagacgggttttcacctttttagccaggatggtctcgatctcctaacctcgtgatccacccg

SEQ ID NO: 677421 - DNA, 105 bp, Homo sapiens
gggtatgatcttatagagtagaaaatcaaagatgcgttcaaaaatctcttaaattcgataaatgaattcagtaaagagaagattccaaatgggaaggaaaataag

SEQ ID NO: 677422 - DNA, 1495 bp, Homo sapiens
agcggaggtgcgcgcgagtccggggactgacggcgagctctctgccaccgggtccgcccgggaggctcaactgacacggggcggcctgcgcgtcccgcgggggacccaggaaatcgcggagacagctgaaagatgccctcgggaggagcgagggaccgaggtccggacagatgccagacgctcatcatcagagtcggatggacagggtcagggcagggacggtgcgtaccatgtaatccgagagcacgagaatctagcgtccatcagggcctgatcagttccccttcgctcgtccgcacctcacgtcgcccgcgacgcgacccgaggacggtatatgtgcttgtactttgctgtttccttttcctaacgcatttctcctgagtcggcattctccatgctggaccgcgaaggccgtgcgtccaccagttgtcgtgggtgtcgcacggcgtcgtcggcgagacttccacaaccgtcacctctgtgccttatcccacccatgtcgtgctcccactgtaagggcgatggcaactttgggctgctgtgcgcgccgtaggttagcctagatcgcatccatcacgagatctgtgtgggcacccattgcaaccgaggtcgcactgtgtgggggggattgccaggtcgttggtcgtcccgtcagcacggtcacttcggtccccgaggtccggggtagcgttcccttcaccatgcccgcgggatactctcgccgcgactgcgaaaaagagcgcgattctagtaggaaactaactcgatgccattgggcaacttgctttcgaggccggacgggcaacggagcaagggtccgaagttggttcctttgggcaggcattgcgtttcccaaggcagccacggccatggggttagttggcaatccgcacattggcacagccaacagggccgatggacacgagttccctggggcaggtaggacggcctcccctccggcaatgaccaatgcgtggacggtaaccgggtggggcaaacctttttgggcacagtggcccgccccatgcgagctttcacttcaggaccggattgggcgtcccccttaggcattaccccgttcgacagtaatgccttaggccgttacgcctttggacatgtaggggttaggtctatcgcctttggaaactttcgcgaacgacacctcaggggacgcaccaattggcgggttccacgaaaaaccgacaaaggggcggtgccaaggaagaggattaccgagccataggcgtcaagagactttcgggatactcaatctgcggctatgagagctatacacacgacgaggaagagcttcttcgcgcttccccctctgtcaattattccccgcacccggaagcctatttgcgagagtttctacacacagtttctccgacttggacactctgccgagtacctacccgagagcaaaacaacctccgcgacttggacaagaaaagccggttatacccccagttgcgagcgcctggtacgttcacta

SEQ ID NO: 677423 - DNA, 393 bp, Homo sapiens
  misc_feature (34)..(34): n is a, c, g, or t
ttctagggatgtggcattctgctggatggctttntaaaatgggttttttcctttagggagaccgaataaactgtgttgtgcacctgcattttgactgtgacctgttatgtgaggtcagatgtggaattttctacctgtagcatcattttggtgctcagaaagttttgaattatggagcacgaatttcaggtttcagatttttggaaatagggatgttcatcctgtatttatacatgtgtgtttgtgtgtgtatagacacatacatttctaaaccttttgaaactgattgcaagcatcataatagttcaccccaaatgtgtcagcatgcattttctcagaataaagacatcttcctaaacaaacacaaaaccattatcacaactgcagcagtta

SEQ ID NO: 677424 - DNA, 171 bp, Homo sapiens
atgtgattcccctgattaaaaaaacttcaaaggcagattccccattgctcttaagataaagacctggaaatggactccaaagacctgtatggaccagacgtctaaggaatctgcagttacatctcgtgtctgtaactcatgatcaacatcctgttcctactgcatggcaca

SEQ ID NO: 677425 - DNA, 271 bp, Homo sapiens
ccaaacacagtttttacttttctcagagaaccacgaagtgatctcctaacagcagatgcaggctctaccagcatatgaggtcaaacttgttactagtctacaatatgggtagatacattgcttggaagtgcctgtttctggcttctggctggaggctcacttcccagcctggcatttatttatgagaaataaagctctcctttccaaataaaaaaattttccatcctggcttacacagtgaaaccccatctctctagctgaataatctcaa

SEQ ID NO: 677426 - DNA, 294 bp, Homo sapiens
  misc_feature (201)..(201): n is a, c, g, or t
cacgagggcggcgtgtacatataaatgtccatacaaatatatatgtttcccatagatacatacacttctctcaatgcatcctgctgtctttgagtttctctgtatttctcccactatcttcagagggaattctttaatctttagaaagctctctgctgggtgcagtggctcatgcctgaattctcagcactttgtgaggcnctggtgggaggatcacttgaggtcatgagttcacggccagcttggatcacatattaagacccttatcttcactcgcgcccagcgcctaacctg

SEQ ID NO: 677427 - DNA, 224 bp, Homo sapiens
aaaacgttcggggcagggtgggagtgggtatggaaatccaatttgggactccggtcgctcgcgtggaagttttgtgtgtacgttggtccgggtgggttcgaaacccggtgcgagtgggtaaaaatgtaaagcgtcaaagtccctgagcttgttggcctgatcttgcgtttggaaaaaaatcttgtaataaaactgcacccgtagggcttcaggcagcttcccca

SEQ ID NO: 677428 - DNA, 149 bp, Homo sapiens
  misc_feature (141)..(141): n is a, c, g, or t
tttagtagagacggggttcacgtagaggaaactggcattgcagtcaggtggtataataggcttgtccacataaaccagtacatgttcatcctattagtgcaaaaagccctaatggcatagtaccctatataaaattcaggnacatctcc

SEQ ID NO: 677429 - DNA, 313 bp, Homo sapiens
gtgggggggggccccgggggagattccaagctcagtccccccaaagttcagggccggttggaggcaggggcaggtccgggttcaaaacaaggaccccccagttttttcgactccagcaacaggtccaacgatttgggcccggatgtgaagttcccccctgctgggtccaaacagcccgaaagcattccgggcaaggccaaaaagccccaagttaaaaaaaaggaaaagggcaaaaaggaaaagggcaaaaaaaaggggggtccccccttaagggccctgggcaggggtcatttaaccttcctttttgccttca

SEQ ID NO: 677430 - DNA, 380 bp, Homo sapiens
  misc_feature (192)..(192): n is a, c, g, or t
  misc_feature (220)..(220): n is a, c, g, or t
  misc_feature (315)..(315): n is a, c, g, or t
tggtataatagactgatcgagcacactgacagaagatggagtgagttaatttgccgtctcgacatcgaccatctacattcacgtggcagagagtattggttacaatgacgatttctacgaaaaataaccatcgtgcagggaaacacagagaagggtcattacctggcaggcgcagtttgaacatcgcagtgngccagcgagtatcatgggcggtgctggnccctgacgtgacaagcctcgcaagacattgaaggcacgtgctgggaaggggatggtgggtggccaggtgaccaaaagcgtggcagccctgtgacncagcagatgattttggtgaggtgtttcccaacccctggaagcttcatgtggagtggacgcgtcct

SEQ ID NO: 677431 - DNA, 298 bp, Homo sapiens
  misc_feature (38)..(38): n is a, c, g, or t
  misc_feature (42)..(42): n is a, c, g, or t
  misc_feature (53)..(55): n is a, c, g, or t
  misc_feature (57)..(57): n is a, c, g, or t
  misc_feature (59)..(60): n is a, c, g, or t
  misc_feature (62)..(63): n is a, c, g, or t
  misc_feature (80)..(80): n is a, c, g, or t
  misc_feature (87)..(87): n is a, c, g, or t
  misc_feature (89)..(89): n is a, c, g, or t
  misc_feature (101)..(102): n is a, c, g, or t
  misc_feature (110)..(111): n is a, c, g, or t
  misc_feature (115)..(115): n is a, c, g, or t
  misc_feature (121)..(122): n is a, c, g, or t
  misc_feature (125)..(126): n is a, c, g, or t
  misc_feature (128)..(128): n is a, c, g, or t
  misc_feature (133)..(133): n is a, c, g, or t
  misc_feature (140)..(140): n is a, c, g, or t
  misc_feature (162)..(162): n is a, c, g, or t
  misc_feature (174)..(174): n is a, c, g, or t
  misc_feature (176)..(176): n is a, c, g, or t
  misc_feature (179)..(180): n is a, c, g, or t
  misc_feature (182)..(182): n is a, c, g, or t
  misc_feature (201)..(201): n is a, c, g, or t
  misc_feature (210)..(210): n is a, c, g, or t
  misc_feature (231)..(231): n is a, c, g, or t
  misc_feature (266)..(266): n is a, c, g, or t
gacgcagctcctcaactaggcaagaggaagcgcgaatnggangtggaggaggnnnangnngnnaggacagaggaaaaggngggaggngnggggaatggtanntgtgctcnngtgnggttanngtnntnggggntgggggngggggggggggggggggggggngggggggggaangnggnntntggaggggggggggggaanggggggtgnggggggggggggggggggggnggggtgggggggggggggggggggggattgggggngggagggggggggggggggggggggggggggg

SEQ ID NO: 677432 - DNA, 297 bp, Homo sapiens
aggtgcccacatggcaggcatttattttctcacagatcatatgttccacacatgtttgttcaataagcatggactgcaaccacgtacatgaatattcatagctcctcctgtagcctgttgaatatgtatgtttagcctacctcttcagcataaagctcctgcccaaacccctcctgctcctaaatgtctgtctctggtgttaaccagaggttgctcttcccaggctgctggatggctaccttgcaggctgtcacccttaacaaaaaatccagtgtcccctgcaaatgcaaaaaatat

SEQ ID NO: 677433 - DNA, 360 bp, Homo sapiens
  misc_feature (247)..(247): n is a, c, g, or t
gcaccgtctgctctgcaggcgtgatccagcaggcgtgggcagcaggagtgggccctcgggcaggtgaggctagagcagtgccggacggtgagaacaggtcagtgtcctagaggcagggcgtccccgagagggcctcttgcatgctgaggtctaggaccaggtagccgttgtggattccgccctgtatgcccagccccagcgtgtccaggtcgtcctgccgctgccgtaggatccagtcccgcaccgngcggtgccgctcctccgccttcaggccctccacgttgggttccagaagtttctgcacctcagccacagtcaacggcagcaccgcatccgtccgcaggttcatgaacgttggca

SEQ ID NO: 677434 - DNA, 220 bp, Homo sapiens
ggcgatctcggtacacaagacacgggcttgtagctggcagatcgctccattctccgtccagcacgaggcatcacgcgtcctccacgggctgctcctcatagtgggcccagaccttctctttcttctgcttggcggcctcctcggcagacagcagggactcgtagtaggagctgcgttcggcggtgaagtggacctgggagagcgcgtgctccaccagcag

SEQ ID NO: 677435 - DNA, 269 bp, Homo sapiens
  misc_feature (132)..(132): n is a, c, g, or t
  misc_feature (144)..(144): n is a, c, g, or t
  misc_feature (150)..(150): n is a, c, g, or t
acccgtatgtctctgatttctttgttagttctgagccaaaatctcaatggagtctcatggcagcacgaagttcatcagcatcaatgcctacaggtgacctgtaagggctttcttcagtgtttcatcccaggngctttccctgtntcctgngagatatgctgctttgatcctgttgacgctgtgcattgtttcgcttagttagaatgtccatgatggttgcttcatccacacctttaaccattatggccttatgcaaggcagcgacatcc

SEQ ID NO: 677436 - DNA, 1406 bp, Homo sapiens
  misc_feature (744)..(744): n is a, c, g, or t
gctgttgccaggaagagacagggggtcttattatgtcagaaaaagacgctggtggatgaacgccgcgccttcctctttgtgcagagaaagccaatctgttgttgtgggggggaaaaaataaatagtggtggagacgacacaactcttggttgagagagagggttcctaccaacggacgagtgagtttgtgttggattgagttgtgtcagtgaggttctgatgttgcgtgttgtgaaaaaaagaggttatccatacgtggacgacagctctttgtgaaatgttggtgccccaaccaccctccctctttcttctttctccacataaattgggggttgttccaacatctttttttccctggggaagcaccacatatctctcttgtgtggtcgcccttcggcaagaactctgttggtggacaacaacccccgctgttttgttgttagacagcggcgccccagaaaaccgtcttctttggggcaaaaagggtggtccaaccgcgtgtgttgtcaacgtgctcccccctcggtttaaaagcagcccacacaaatagtggtgtctcttttgtgacacacgcgccacagcagtagaaagttggggccacaacatatattgatggacccggaagagatttataaaagaggggaccacaggctctaataaactcggagagtgcgcccaccacttataggaggaggagagacacacttttatactccggatagaccccccccacacagggtttcncccacagagagaatggcgcccctcgagagagagattgtgtgtggttgttaaaagggggagaaacacacgggagagccacagcgagaaaatgtgtgacacacacacaccacagagtgttgtctctctgtgtcccttctgtgtggccacacactagactctctcttctgccccgtactctcacacaatacacacactctggcacacaccacgctataatctatcaccacgccctctcctctttctttctctcacacaactctgtgattttttctctcctcgtgagaatatgtatatttctctcacagagaaattgagacctctctctctcttccacacacaccacactcttcaacacgaattcctctttctcttgtggttttgtgggtttcttgcacgtgttctaatgcacattttataaaatatacacctcttggagactcgccacgcgtataaaatgccacaattaaggagacacacctatacccacagtatgacgaaacccagttcccctaggccacggggtgtccacaataattttagctttccctggagccgcacattggaaagaaatttttcttgggccacacacatgtaaaaacaccacctaaccacctaaaccacatagttgatgagctttaaaaaattaaaatagaaaattgcca

SEQ ID NO: 677437 - DNA, 286 bp, Homo sapiens
tgtacagatactaaaatgtgaaacattagaaaaattaactatattcatgtaaatatgtgagcatatataaatacataaagattttctatcagtgaatatcttatgggcaattatttagttcattacaaattaatgatttcacataataaatttactctttgttatttctagttgtggagtgtaaattctttatagatcaaatacatgcaaaagtggcttcacatttttcatctcattactccatgaccccgcccatggctgataatgtaacttacattttaacaag

SEQ ID NO: 677438 - DNA, 1066 bp, Homo sapiens
gggctgcgtcgggctgcaggagaagatggcggatctccacaggagttacagttcctcgtaatttgcgcttgtcggaagaacttgaacgaaggacacaacaaggagtaggcagacggtacagattagctgggtgccttgaacgatgcatgaagatatgacaccttacaaggtggacaggcatgatatattgggccaccaaggacaaattatgaaacacacgacatatatagcctgaacagtagaatgtggacctaaatacccagaagctcctccgtcagttcagactcgtacacaaaaattaatatgaacggcactacaataattccagtgggatgagtggatgccccggagcaataccagtgttagcaaaatggaaaaattcatatagcattaaaagtcgtacttcaagcagctacgaccgtctaatgatgtccaacagacaaatatgaagcttccaccagccaccagaaggaccaacatacaacaaatctacttttagtggatctccacaccttgtccttcacatccaccaaaccttctacctcatgtcactgtctctgcatcacatatcaccacatgcaccactacaacataaagatacaagaattccacacggataaacatgaccctggacatacgggtacagaacaatctattataactacatcttgtatccaccccatttaatgtaacacaggagaaaccgagaggcacaacatggccagcacaccattataacaaccttgacaagcgcaccagccaattaacaaccattaacacctggaagaaacagaaaaaagacaatcacgagatttacaaagatgacaacgcggtggccaaacaaaggtaaaaatgagacacggcaacgatgagctgctaccctcacaacacacactcccccgaccctcatgagaattctaccacatcaaccacaccccacacacacgtgctgccacagtactgaccagacacacaaccaactctcacacagtaacactcgaaaaacaacgctgaccaaacacacaaaaactgacacgaccacctgccaaaacacagagccgccacc

SEQ ID NO: 677439 - DNA, 188 bp, Homo sapiens
tcccccccccccctcccctttttccccccccctttttcccagggggtttgctttgccaaaaatttcgggggaaggggggcggggaaaacccgcccaaacttgtttttccccaagggtttggggtccaaacccccggttttaaaaaaaaaggggggggggccttaaaaaaaaaaattttttttttttta

SEQ ID NO: 677440 - DNA, 209 bp, Homo sapiens
ttaccctagggataacagcgcaatcctaggctagagtccatatcaacaatagggtttacgacctcgatcttggatcaggacatccgatggtgcagccgctttaaaggttcgtttgttcaacgattaaagtctacgtgatctgagttcagaccggagtaatcaggtcggtttctatctacttcaatcacctgtacgaaggacagagaata

SEQ ID NO: 677441 - DNA, 329 bp, Homo sapiens
cgtagatagagaatgacgcccaggtccaaagaagattgcagcctctgaaagctgggaaaggcaaggaaatggattcttccctgacagcctccagaagaaactgtgtccctgatcggttccttctgatgggttcttggtctcgctgacttcaagaatgaagccgcggaccctcgtgaaaacatcaatattctgaatggacatttctcaaaagaagatatacaaatggccaataagcacgtgaaaagatactgaatatcactaatcattatggaaatgcaaatcaaaaccacaatgaaataccacttcaaatccattaggatggctactac

SEQ ID NO: 677442 - DNA, 293 bp, Homo sapiens
  misc_feature (212)..(212): n is a, c, g, or t
  misc_feature (285)..(285): n is a, c, g, or t
ttcgatgtgggactcagagggggcgcagcctcaaaccctgtctttcctttacttttacttttttttttttcccttgtgaagagagaagaacagatgtgtcgattctgccctattatatgttctactcgggaacaaacgttggttgtgtgtgtgtgtgtaccctggtgtgggtttttaaaagaattggggaagaagaaaaaaaatttctcggnccttttcctcgatctcgctccccctttgggtacttacgacgggtcccccttccctttggggtccggtacggtnaggtttgg

SEQ ID NO: 677443 - DNA, 146 bp, Homo sapiens
ccgtaggtctcagagaagagtggatgcgagccccccccggtacgaggccacgttgaaaattgaccatagttcagtagtattttagaagtgtcagaattctagcattatttaaaaaatcatgacataccttttgaagaagtttatta

SEQ ID NO: 677444 - DNA, 573 bp, Homo sapiens
  misc_feature (167)..(167): n is a, c, g, or t
  misc_feature (301)..(301): n is a, c, g, or t
cactgctataatgaacagcccccaaatgccagtggtttaattcagtgcaaagagttcctttatcctccccaaggatggaaaatacaatttattttgcttaccatacaaaaaaaaaaaaaaaaaaaaaaaaaaaaaaaaaaaaaaaaaaaaaaaaaaaaaaaaaaaanaaaaaaaaaaaaaaaaaataaacaaagaaaagaaaagaaacaaacagacaaaggaagaaacaacaataaatagaagagccagcaacggagctgcgagcgcgcgcggcgcgacgcggacactaagtatagtcttntacacagctagctagagacagaggaaacagcacataacataaaagcagtagactacagttataaaaagacagagcgaagagagcgaagcgacgcagcgaccgagacgaccactacacacacggtatcacgaagcaaagacacagagcactagctcgatagcgaagggacataaaaacatacaaaccgaagaacctcagtacacacaagccgacacaaaacacagtagagacatcctatacatcaaatacgcaataggtcacgagacaggcga

SEQ ID NO: 677445 - DNA, 269 bp, Homo sapiens
  misc_feature (261)..(261): n is a, c, g, or t
aacactttcaactgagtaactaactcctcccaggaaagcatttcctccctggtgccagaaaacactttccccaaagataagcctcacaccctcaggctaggaaaagttggccgggtaatagcaaatgcctcctcctgttttaaaagcagaggaaaaggaccatacctggggagatcttcaaatattattaacaccatacttgtaattgctggaaagttcgggaagtttgggaggaaaaaggacataaggaagggatgattntaagggaa

SEQ ID NO: 677446 - DNA, 231 bp, Homo sapiens
cacgcactgggagtggactccggtggtggcgcagacgcggacgcagtgagcgtcctcggtgcacctgcctcaggaagagtacctctggcgaacgtacttgcctttgtcatactggtgctgcccgctgctcttcaggggtgcagagccggcgtcgtcatcatccaggatgtcctcgggctaccggcgcttctcgtattttgcagatgatggtgaccagcaccagcacgaata

SEQ ID NO: 677447 - DNA, 625 bp, Homo sapiens
  misc_feature (589)..(589): n is a, c, g, or t
ggtcgtactctagagagactcccccaggaacgctatacgaaactggactggcgtatggagaggagtcctcccctctccccaggaatggggtctcaggtgatcagcatgctctggggcctgcattccccattcacttgtacttccattctgagactcccagtgtgaccgcttggacaggtccctcttcccaggaatgcgaggctcctcctctcatctctcaatgtacatcgcattgattagctgctccaccttataagccagccgctgccgtcgtgactggtaatacgttgccagggccccgatgagctcctcactatacttgctgacataggagtagatctcattgagggcactcagcatgttgaactccacggcgtgcaggcgggactgctcggcgaggtaggccttcatgtcctggtcactgatggctgggggcttggcgatgtctgcgtagtatctctccacccagctcttgtagcttgggatgtccttggcatagagcagcttgttggagggggagtccttgcccagccggtgctctgacgttgaacaagagtccatgaaggtctgggccaccacagagaggcangcgtccgtgatgctgcccttgtggattttcaacacg

SEQ ID NO: 677448 - DNA, 150 bp, Homo sapiens
acagcgctcaccgctttgatcatcgccacatcactcgggcggaaattatggtgggcatccgtacctccacgcaatgggctcaatatctttatctccccttcctacaaacggggggggctatatacggtcattttctactaagaacctaac

SEQ ID NO: 677449 - DNA, 363 bp, Homo sapiens
atttccatatactacacccaatcaaaggtggctcggaatgaggtgaatacgtgagtcatgtatacaggtgttgttcgatgaaattgttatctattcccaacgctgcagcaagagatgagacatgattctgttattaaggctaaaatactgcatatctagcaatttttctcctttctgatatcccgtgacactcaagtgtgcagtacttaaaatagagcctggattgcctataattgtggcttttttcaccctttcttggctatgaaatagttcatttcatacctctaggctttatacaacgatgtattgaatttagagaaggggcatgtgctatcttgcccacttacaaatgtagttctcggc

SEQ ID NO: 677450 - DNA, 263 bp, Homo sapiens
tgccgactatggaggcggcgactaagcacgattgtcggcttcttcctctgcaccgatccctacggtggttgtaacttgtaagcatgtcaaaccattcttgtaggtaggatagcgagtggtacataggggtagatatgatagcctcgactttaggtgatccattctacgacgatggccctgcctagatctccgtcgagcactgcgacgctctttctccttggatcttcgtcgagcacggagacgattatgttggatgcttctgt

SEQ ID NO: 677451 - DNA, 803 bp, Homo sapiens
  misc_feature (11)..(11): n is a, c, g, or t
  misc_feature (96)..(96): n is a, c, g, or t
  misc_feature (128)..(128): n is a, c, g, or t
  misc_feature (247)..(247): n is a, c, g, or t
  misc_feature (298)..(298): n is a, c, g, or t
  misc_feature (301)..(302): n is a, c, g, or t
  misc_feature (307)..(307): n is a, c, g, or t
  misc_feature (403)..(403): n is a, c, g, or t
  misc_feature (407)..(407): n is a, c, g, or t
  misc_feature (410)..(410): n is a, c, g, or t
  misc_feature (419)..(419): n is a, c, g, or t
  misc_feature (486)..(486): n is a, c, g, or t
  misc_feature (497)..(497): n is a, c, g, or t
  misc_feature (505)..(505): n is a, c, g, or t
  misc_feature (514)..(514): n is a, c, g, or t
  misc_feature (517)..(517): n is a, c, g, or t
  misc_feature (603)..(603): n is a, c, g, or t
  misc_feature (607)..(607): n is a, c, g, or t
  misc_feature (645)..(645): n is a, c, g, or t
  misc_feature (660)..(660): n is a, c, g, or t
  misc_feature (662)..(662): n is a, c, g, or t
  misc_feature (673)..(673): n is a, c, g, or t
  misc_feature (681)..(681): n is a, c, g, or t
  misc_feature (795)..(795): n is a, c, g, or t
ctgaataagtncactatggatatatataggaagagatatacatatattctatccacagatacacacacacatatatatttctgcatgtatatatanataattctttctatagttacaggaaatacttnttctataattctgattttgactcccatcctccaccatttactcatccactcattacctaaatcttggctttctttcctatattgtaaataatccatccaaacttctagccagtactgtnaggagggttcttgctcgagtgagcggtgaatactattttccactgagaaanaannggggnggaggacacagtgtatctgaagactccgctgtatacttccaacaacgggggcatttttctttcgtagtgggcatgaaaatgactttataggaagantctncangaatataancaccttctaagttgatgaggaatttccctttaagctcgattacatctgcagttatctcttgtggttnctgagcaagtnaagttganttagaagcnatnattaattcatttaactgagaggtgctggaagtttcttcagaatgcagcatctctattatctcaaaaagcagttcaggttctatcanagtnataaccttgtactcagctgcatttttgccagggatgcntccaagaaatgagtntngcattgcacangcactctncacagcttcttccaacccgggctttttccagaaagaactagtactaatccacccagtacgggaaaaacttttgggctctttaatataaggtatgttctggaacactcttcagcnaggtgagg

SEQ ID NO: 677452 - DNA, 228 bp, Homo sapiens
tcgacggcaggactttgagactacagtaggctgtgattgcacgactgcactccatcctgggcaacagcaagactctcttaaaaaaaaagagcatggactgggcgtggtggctcacgtctgtaatcccagcacttttggagaccgaggcgggcagatcacgaggtcaggagatcgagaccatcctggctaacacggtgaaaccccgtctcgtctctactaaaaatacaa

SEQ ID NO: 677453 - DNA, 847 bp, Homo sapiens
acacgccgcccgtgtttgtggcgacgggttgtgaagagccacacaacacaagaggttgttgagagccgccctcgggcgaaggcacctccaccccctgtggggggggcccccgtgaccacctcgtggggtgtctacaccgccacgttttaaacaacacacgggggggttgtcccccggccacacccggccgttattgtttttcggccgcccaccacctgggggggtggacgccccctcttttctccgcgcacactgcatccccaaaggaggcaccccccccccacccgggtgtgtcgcccacccgaggtgggccattttttgagacgtctttttccccgacgcaagtgtcccccggaaaataaacaacgtcgccacaagagtagttgttccccacaagggataagatgatctgcgccttcaaccacggcgggggtcacaaccgcccacaagaaaagaaggggggctcacacaccaccacaacaacagggtccccaccaagagagaggtgctcaataaaaaggggttttttctccttgagagagcccacctccttctcgcccggcccgctgtgccgcggcgaggcccccactaaaagtggtccccctctcactttcctgggggcaccacatggggtgcttccgttgggggtttatattttcaagcaggagtggtgttaaaaagatggggcgtcttccctcctcttggggtgtttatctgcatcccccctctgtttggcacaccccgggggttttttttctaaatttttccaccggccgtggggccccccccatccccccctttttggtttttttttttttaaagggggggaaacccccctttttttata

SEQ ID NO: 677454 - DNA, 431 bp, Homo sapiens
tctctacagatccccgcccgccacagcttctgtagctcgactctagtgtggctgcggaattggtattctctgctttgcacgtccagagttacagctgatcctcgtcccgagctctgcgcagctagtggctgtgtgtatccatgctacccttctgggcttggcgtattgaaaatagagcccctgtgctggggtggctgctgaccctgggaggagcggtgcactccactggtcgctctgcctgtcgatcatggggctattctgcagcagcttctgctcacagggtagtgcgtggcggtcgggagtcacaccttacactcctaattcctaggcagtgcatctgcactaattccaggctgctctgtcgtctgggctccgggcttgtgagaagctgtggcggtcggtgaagcttggcggcttgtgtcccagctcta

SEQ ID NO: 677455 - DNA, 337 bp, Homo sapiens
ccttttttccccccgggggcccggggggggttggggggtgggggggtttacccgggctccccccccctttcccccccggtttgggggggggtttttcccccacccccccggggtttaagggcaggggtttccggcagggtttttggcccccctcctccgggcttttttttttccaagccccccccggggggccgggggtttttggggttaaaatttctttagtcccccctcaagggggcttggacccggggggggggggttttttcccccccggggttcccgggggggggtttttttttcgggcaaagggacccctttaggtgcccccgggggtcca

SEQ ID NO: 677456 - DNA, 977 bp, Homo sapiens
gagcactagatcagtgacatctggtgccgtcagcggcacattgatgacacagctggggtgtggtaacaccacagggcgcgtgtggacagacatggggcacaacaaacggggtgttagccaccagggtgttgtaccggggtatacgggccgctggattataccgggggggaccgttctgtgcgcgatgtgctcctcccctatgggggggtgcccctccccacgcggcatgggcgaccaacacgccgtgggggacagcttgtcccacgcgcccgcgtgtggttgttagggccttcttgccccactattgtgtctacgaccccggcggccctcttcttcctggcgggcagcgggcagcccattttcagcggggaccagccaccaggggcccacccccgccaggggcaactccgtgccctgccccccccccgcgagcaaagggtgccccaccccccgagcggaccgccccccacgaggtagttcccccgcggataaggcgccgccagatagtccacgcaagtcggcccgaggctgtcttgtgcgagcccatgcaggaacgctggcttgtcaaatcattccggagcctcacggcgtttttctgcggagaacgcgactaaaggtccagcggccctccggcgacacaccacagatcggtgagccgtttcacagcggggaccaccccccccgtacttgcagcacctcgaggtagggagccactgatgcttttccaccgcgaaagttattaggcggggccccccagcgatggcagccccctaggcgtggtgccaccacccggtgcctgtcgacaaacgggccctgttggctcctttgggatgtggacaaccaactcgccacgcttgcccggttggaggcttcacggagatcacgcactgctctggggcgctcctcccccaggttttcgcccaataatgggttcaacatttgggggtctaataaaatctcccccggcaaacaatgac

SEQ ID NO: 677457 - DNA, 243 bp, Homo sapiens
cactctagaggatcgctgcaggtgttgtgggtagttgaggataggggctgggcaggaaggatgcagtgaaaccaacttcttccgggcttgcttactgtattgagttaagaaggaagagacttggttccggaggagaggcccacagtgcagaagtcacttaaaacactgtgcaaccctcatgcaaaggtggtacctgtgctgtgcacatatccctctctgtttgtcctgtggtggtggccccac

SEQ ID NO: 677458 - DNA, 165 bp, Homo sapiens
gggactgtttccctactgctgggattttgggactgcgttccttgctcctcagcttgcagattgtctgtagtgggactttaccttctgatcgtgtgagtcaatactctttcataaactctccttcatgtatacacttatcctatgggtcctgtctctctaaagcag

SEQ ID NO: 677459 - DNA, 80 bp, Homo sapiens
cgttttccggatttttctttaatacagttgccatcttacatgatgtactattaagtgccttcttaatagcatctaaccta

SEQ ID NO: 677460 - DNA, 1413 bp, Homo sapiens
cctctcgcaaaggatctccttcatccctctccagaagaggagaagaggaaacatcaagaagaaacgcctggtgcagagccccaattcctacttcatggtactgtgaaatgcccagtgatgctacttaacagtcaccacggtctgtgtagcctcagtgcactaaacggctagtgttttgtgtgctcggctgcctccacttgtgtcctctgccgagcctacaggtaggaaaagcaaggctttacgagaacggcatgttaccgtctcgagtgaaggaaagcgatgcaacctaaaaaggcaacatctgaaagtcaaagatcgatgtgtggaatacccatcttctaagtatagaacaccatgtgttggcatgaataaacaacagagacaataaaaaaaactctgaaggcccctcctggtgggaagagaggaggcgcggtatacaatagaagtgatccactgaaaaattggcgctacctgtgggccacagtgatccggtgattccgcgtgtgcccagatgtcttcggtgggtacaaagagtggggttaatattgcatggccgtgatcctcacctttacatatgcgtgagacggtgcgtgtatcttgcacagtgtctcagaaatacaccacaagtggtactaccccagtggatgtgtaggtaaaccttcgcgacaaagttccggggccggccacacactactgaacgccctggacaacccaagccgggccttttcaacttatccaagacttgcgcttgacagcccatcccgccaaagactttcccttcccgaaagaaacccatcatataccctttccaagccaacaacaaaaatacggccccaatttcctctgaggcgcttaaacacctggccaaaagcaaaataccacgtgtgggacaaacccactgcaatgaaacgacatcttggtgaacaaaggacacatcacaacccgcttgcgtcccgggattgcgacttcttcacaattcgaactttaacgccacacggcattcgctcggcctcctatccaggcaacaacacttaacccttccacccaaacttattaaaaatcgggcattggcctcggctccacctaacgtaggaacacaaaacggagaaaacaccgggacacttcagcgacgaacacaatccacttagaccaaacctaatgaaacgaccaagcctacacacacagggaaagccctggcgaaacggccccagaacagtggaaagcgcgatgggccagcagacaccatgcaccggcacgccgggcgcccaagaccacagcaaccaaccgcagcgggaaccgcgaccagcatccagacagaacccaccgcgacacacggcacgcacaaccagtgatctgccaacacataaaagacgccgacaggacaaagcaacagtgacgaaaaaacaccgaaac

SEQ ID NO: 677461 - DNA, 293 bp, Homo sapiens
ctggggtcaagggctgggtagcccccagccagccccctcctatggataaacagaccagtgagcccaagtggacaagtttggggccccccagggaccaaaaacaaagcctttgcaggacacagcaaatgggcacctgggaccccctccacccagggccctgccccaaacgggcaaaggcccgacccaagggaaaagccagccccttgtgccagacctgagtggcagaaaacaaaaagttcctttgctgctttaatttttaaatttttttacaaaaatttaggggtttccccata

SEQ ID NO: 677462 - DNA, 719 bp, Homo sapiens
  misc_feature (716)..(716): n is a, c, g, or t
gggcagggttcagaaagcccacccacaaagcaggcgtctcctgagagtaccatgggaggggccctcccagaaggagtgagagccttggatcccagtgaaccgggccaaggtgacccctggaagccaggtgggcacctgggcctcatgcaggttgggatgtgcatgtcaggtgctgacagggtgggggccaaccggggacagcggtcactgctgggccttccacgtccacccccacgaaggataacagcaaaatgtccctgccacctgagtgcccggggccaggtatctgcaaggatgagaaacgcacacgtaaactgacgcccgtccgctcggaacacactgcactaccccgccaaaaagcacttccaagagtcctcgcgtgtcctccacaagaacacaatgctctgcgaccggcaggagggtgactgggggtggttcatcacacggacgcagtgctctgcaaccgacaggacggtgactggggtgggggttcatcacacggacgcagtgctctgcgaccagcaggatggtgactggggggggttcatatcccacccccactcctcaggagcccagtctctgtcccccgcaccctccaggcctggtcacactctgcccacagcagagtgcaggggtggaggcagccggtacccagctgggtgaattgacgggccttgccatataccctcgggccacctttctgaaccctgccctancca

SEQ ID NO: 677463 - DNA, 133 bp, Homo sapiens
attttacgcgagagaagggagatgagattgcccacggttgcctaacagatgtggagcgtggcatgcgaacccaagcagacctggctccaggagccacatcctttaattattactaaacccctatttatatatt

SEQ ID NO: 677464 - DNA, 371 bp, Homo sapiens
  misc_feature (104)..(105): n is a, c, g, or t
caagcaaaagccttgaattctagacaagaggtgctgagtagagatcatgtcagccaggcacttagagtcagaagaggaaggaagcagacacactgctggagcanngccacatggcctatgacagaaagagacagagagagtcactgagcttctcaccctaccctaggcctcacacatatctctctcaccccacctttccctaaggtggcccaaattgatagggaaggaggcagggaaattctgggccaaagagggtaggtccccagcgagggccccaccctcaagccgaaaagcctaataccatggcccaaagtgagaactgacagccctgtttcccactcaaatgttgccttttccaaaacaacccatgg

SEQ ID NO: 677465 - DNA, 283 bp, Homo sapiens
  misc_feature (121)..(121): n is a, c, g, or t
tcactctaaggatagtatcgccacacgttcatgctcactactctcgttgtaggagagagtgggactcccagcaaggattacacccggcttgaggacggaactgcgctttcctcccacttcncctaggacttggcgatgcagtggcggacaaattcacactcagggctatgccagaaagcggtgtacaccagctcagcaaatttcaagcccaggccttgttttgattttgcacacctcccagtccatggtgaaggcctcgatgtctaaatgagtgtggtaaagg

SEQ ID NO: 677466 - DNA, 725 bp, Homo sapiens
  misc_feature (506)..(506): n is a, c, g, or t
gaaaaaaacagcgcgttcttccttagcaggatctagtgccggtagcacgttgtgatagacgagcgtgagctgcagaaactggcccctcgtacacatcttgccgatgactgtgctcagagaatacatatgcataccgcactcactaattggctagctccttactttgcttcatgaccctctacctacccgtatcatatatgtcgttcttactacctgaatgacttgaatctgataatatcagtgatcctctgatatgagatgagaacatttatttagacgataactacgaaccatatataacatatctatgcagtgcacatgagacacaaaacctttacacacaaatgttacatctggtacaagttgaaaaactctaagtcagtcacgcatgtactatgacaacatctgttgtatgcgataatcacacaagagctgttgcatcacctctgtaatttggggtgtgcatttgctgagtcagaactaagatgacctgaactccgccctcntcagggcctgctatgaggtgttgaagcctaattcttcatatgtgaccctttcgcatctacatagaccctccttcaacctatcctgtctggggctgttgagcgcataatctatcgcagagaatgattccccgtatataagacacaagctccatccactcctagttgaatagcactggaggcctgcgaatatgcaggggacttggtggcctgctttttatt

SEQ ID NO: 677467 - DNA, 1284 bp, Homo sapiens
cccacgcgtcgcggacgcgtgggtcgacccatgcgtccggccaataactatgcccgagggcactacaccagttggcaaggagatcattgaccgttgtgttggaccgaatgcgcaagctggctgacctagtgacacctggtcttcaggtgcttcttgtgtttatccagcagcttctggtgtggtgtgcactgtgttctgtgttcacctccctgctcatggaacgtctctcaggtgagtcatggccagaagtccaatgctggacgttcatccatttacccagcaccccaggtttccacgagctgtagttgagcccgtagaacatccatcctcacgcaaccacacgcacccttggagccatctgcatcagtgccattccatggtcagcaccaaggcaggcccatctcatgcaccatctagtctgtcagcaaaccttcgcatcatcgcagcggcctcaaccatacgactacggcctacaacctggccttcctccagggcaatgatctggtgtacctacccatacacctgactatccactgacgactacttgactgcgacggcccttgacacattgactgacacctgtaccagtaccttccaagaccgcaaagcgatgggtggccacataaaccgccacgcaaatccaactatccctactgggcccaacatattgccccattgcacaatcttctgcttgcagaaaggcctgaaccatgaaaccagtttccctggaagccggcaggactcaccaaacggccacgcaccattggagcccacgccgaacaccaccgacttcggagcaaacaggtacacccacagaacaccggagacccacacagcatggacaagccgcaccatagaaggaacacagaatgcaagaacaacggaacaccagcaaaacaggtcaatcccagcaataaggcacacaccacacacaccgcaagagccacgaccacaagcagcagaggcactgtcgtaccccccaggagcccacaaaagcatgacacaacacccacccacccccccacaccagggagccacggaggacacaagaacccgacacgaatacacacaacagccgagcgccactcgcggacacccaacaacagacccaagccgcacgcagccgcgacacgaaaaagaagagcaaagcgaagagaaaccaccgccgagcagccgaccaagaccgaagcgagcagacgatccgggagacgcacggagctgccactccacgcaagaccagccaaggccaacaaccgagaacatccccaccagacacagcagaca

SEQ ID NO: 677468 - DNA, 155 bp, Homo sapiens
agtctaacacacgttgaccctacttttttgacacttccattgtttaaaaatacacatggaaaaaaaaaaaccctatatgcttactgtgcacctagagcttttttataacaacgtcttttggttggtgggtgtgggattctttacctatatattat

SEQ ID NO: 677469 - DNA, 178 bp, Homo sapiens
ttctcatcttgcatggattaaatgcaacactgacaggtcttcactctcctcctccttgaaacatttcacttagcttctgggatgccacgttctttgtcaactctcacttcagttactccttcttgggctcctttgtaggttcgtcatttttctaaatgttggtgtgccccaggtgtag

SEQ ID NO: 677470 - DNA, 125 bp, Homo sapiens
cttaaaaaaaaaaaaaaaaattttggctgagaattggaaagggaataagggaatatccttctcactcagatttaaaaccctaccttttccccagttcccaaaccctaaatgccaggaaaggggta

SEQ ID NO: 677471 - DNA, 917 bp, Homo sapiens
ctttgcggaggcgcgccgtgttccgccgtgctctgtggcctcccttccccaagggtttccgggctcaaatttcgcgagtaccctcctcttccagggttctgacgtggtgttaccggcccccgaagaacttctctgatgcattttgagccggccctctcccttgctgcggccagacgctcccccacttgggaaggtatttcagagacctcgggtcccccactgcgtcgccagcgggcaagtttcgtcagcaggggtacttgccctcctgatactcccgcggcggtgcccatggtcccaacaccctcgttgcaagagcagcttacagtgtgccaaacatgtttgtgccgaaacgggctctttctttcccccatccccccctcctgataatgctcacaatgcttcttctgcccgccaggggacctcgtatgttggtggtctccccccgccccaaattgttgaaagcacttcaatcttagtggccgctaatatagtgttgatcccgccagcgcccccccgttgacaaacatcttttcaatagggagctaacaagtgggagtcaaacctgcaaattgtttattcctccttcttgtaataaacggcgcgcgcttttgatacattcgtcatattttacgtggcgcagcatatttttttaaaggcacgagaaaacctggggggtcacgagggggctaaaggatcaatcatccgtaatcgcgtgtgcccttggagacaacaacaattttgcgagatagagttcaactctaggagattctcgtttggagcctttggtagacagcagaaaatcattgcggcaccacgtctcgtaatcacccctgctgctgtcccccacttagtgtgatccacggagcattccctggcatcttgtccgggtaaaaaaaccccccccgccaaacaaaaca

SEQ ID NO: 677472 - DNA, 86 bp, Homo sapiens
ggatttgctggtgcagtacaactaggcttaatagggacaagctcagagagaagagaaagcgaaagcctccgagctctccaaaaaaa

SEQ ID NO: 677473 - DNA, 131 bp, Homo sapiens
ggcctcactttgtggctgctgaggcattacagcttaatggggtcatttggaaggcaattgccaggggttaatgtagtatagagaggtagagtttttttcgtgatagtggttcactggcctacactagtgga

SEQ ID NO: 677474 - DNA, 104 bp, Homo sapiens
agtctcgttatcgcccaggtggagtgcagtggtgtgatcttggctcaatgcaacctccacctccaggagtgcagtggtgtgatcttggccattcaacgcctccg

SEQ ID NO: 677475 - DNA, 171 bp, Homo sapiens
gcccagacagtgctgaaccaatttacatggatccatgcccagttctccaattccttcatgtctgtcgtcctcctcttctttcttcttggcgggttattgattggtagggctatagatgggaacatatgggtagagggtgactgatattcaggtgtccacttgactttccat

SEQ ID NO: 677476 - DNA, 290 bp, Homo sapiens
attcaaactaggcaatcctaaacctgctcatcctacctcacctgttccttcctacagaaaccgcaataaagcctctcacccatttttttcttcctactccttccgtctcctgagctcctccatggggccctgcgtgatatgacacccccatcttcttgggaccttcttgggaaagtaacaaaactttcttctcaagagcagtcgtctcctggtctgttgaccttactctacctaaatcatgataaagcctatattttaaaaccattccctgccctggattttctggttcg

SEQ ID NO: 677477 - DNA, 451 bp, Homo sapiens
cagaggtccccttgtaaaccttggaggatattgtttgatattgaaactgagattggaggggctaggggcagaatatatggtttggctggttccctacccaaaactcaccttgagttgtaataatctccacttttcaaaggcaggccaggtgggaggtaattgagtcatagggcagtttcccccatgttctcctggtgatgaatgactctcacgagatctgatggttgtataaaggggagttcccctgctcatgttcttcttgcctgctgccatgtaaaacatgactttgctccttattcaccttctgccatgattgtgagtcctccccagccatgtggaattgtgagtcaatagaacctttttcctttgtaaattacccagtctggggtatgtctttcttaagcctgctgagaaaggactaatacaattatttatagttaaagtattgtgg

SEQ ID NO: 677478 - DNA, 134 bp, Homo sapiens
  misc_feature (37)..(37): n is a, c, g, or t
gtcaggaagcaggtcagatcatggagagcctcctacncttattcggaaaatcactccagctgcgtgtgagaagaagggggacagggctgatggggatggggagacaagtctgaggctgtcacagatgatgagtg

SEQ ID NO: 677479 - DNA, 401 bp, Homo sapiens
  misc_feature (106)..(106): n is a, c, g, or t
  misc_feature (203)..(203): n is a, c, g, or t
  misc_feature (358)..(358): n is a, c, g, or t
ttcggcacgaggggactccccttctgtcagcatgaagcttatccataattaacgaactctgctcttcccagatttaaaatcaagatgaaattaatgtttcccttanaaatgcgtgctgtggccccaggcacggtggctcatgcctataatcccagcactatgggaggctgaggcaggtggatcacaaggtcagcagttcaagnccatactggccaacatggtgaaaccccatctctactaaaagtacaaaaattagcttggtgtggtggtgcatgcctataatcccagctacttgggagggtgagggatgagagtcacttgaacccaagaggtggaggttgcagtgagctgagaattngccactgcacttcagcctggtgacagaacaagctctgtcaaaa

SEQ ID NO: 677480 - DNA, 510 bp, Homo sapiens
ttactgttaatggccgcgtctgttcaccgtgttgcgacggctcgacgctgtgctggaaggcaccaaggacgcggtgctggaacgcaaaaagttcctcgacgtccaccaggtggccgagcaggacggcgcgctgcgtatggcggcgggtcaggcgttctacaacgtctcggaattcacgttggccaagctcaaggccagcgcggcagggcagcgctgcgtgatgacttcattgcgtatctggacggtttctcgctcgacgtgcaggagatcctcaccaagttcaacttccgcaaccagatccagaagctggtggattcccatgttctcggctacctgatcgaagacttcctcgaccctgaggtcaatcttgcgccgctgcggtgaaggatgccgacggcgcatcaagttgcccgcgctggacaaccatggcatgggcacggtgttcgaggagctgatccgccgtttcaacgaagacaacaacgaaagacgcggcattaacagtaacgaaag

SEQ ID NO: 677481 - DNA, 262 bp, Homo sapiens
  misc_feature (12)..(12): n is a, c, g, or t
  misc_feature (23)..(23): n is a, c, g, or t
  misc_feature (88)..(88): n is a, c, g, or t
  misc_feature (90)..(90): n is a, c, g, or t
  misc_feature (122)..(122): n is a, c, g, or t
  misc_feature (161)..(161): n is a, c, g, or t
  misc_feature (176)..(176): n is a, c, g, or t
acttctttagancgaggaatganccagatgggaagggttccctggtaaaactccaaatggcctgtgcactgctctggggtggagccananaagttcgctcctcagtttgcagctgggaggancctggccctcctcttcctcgggagaacctgggatttaanctgtgaggtgggaancctacaactaggagaactctggctctgctgagtccctgttcccctttttcttcctttacacccaataaaaccctgccttacccttc

SEQ ID NO: 677482 - DNA, 316 bp, Homo sapiens
gctcgaccagggtgtggtggtgcatgcctgtaattgcagctactcaggaggctgaggcaggagaatcacttgaacctgagaggcagaggttgcggtgaccgagaccgcaccattgcactccagcctgggcaacaagaatgaaactccatctcaaaaaacaaataaataaataaatcaaacaaacacatgtccacacaaatgcttataacatcattattcataatagccaaaaggtacaaatgatacaaatgtccatcaactgatggaatatggaaaaacaaaatgtggcatacacacacacacacacacgtcgacg

SEQ ID NO: 677483 - DNA, 204 bp, Homo sapiens
gtaatttttgtgagatcttaaacttagggcaggaaaaccacctccggtctgtctgacatagcagggacattataattgcagctgttggcaaaagagctctttgtttcacctgacggtttgaaagaactgatgggatgtctgggcagagcaatacatttaaaaaagtgaaatgaagcttgacaaactgggtatgttgaagcttgg

SEQ ID NO: 677484 - DNA, 107 bp, Homo sapiens
ttcgacggaagcacccagctatttttttgtattgtttgtagactggggtttcgccacgttgcccaggctagtctggaattcctgcaggcctgcctctctgtcctgtc

SEQ ID NO: 677485 - DNA, 361 bp, Homo sapiens
agtgcacctgaatgcctgtaggtcgatctagagtatccccatattgcggacgaatgtgtggtagggctggggggcatccatattgtcacttccaggtttatggagggttcttctactattaggacttttcgcttcgaagcgaaagctcctcaaatctatgacaattatccctattactgctgttagataaatgaatgatcctacagatgatcggattgtttcatgtggtgtatgcatcgtggtagtctcgagctacgttcgggacattccggataggccgagaaagtgttgtgggaagaaagttcgatctacgccgcataatatcattgttaattgcattttggcgtacgtttggtctcgt

SEQ ID NO: 677486 - DNA, 122 bp, Homo sapiens
agttttgggaaatttttttgaaattggcatgttttcggcctgtcttgaaaaaatctgtttattaattaaatttcaaacccccccccttttaaaaccagttcagttatttttccctggggcca

SEQ ID NO: 677487 - DNA, 190 bp, Homo sapiens
gatctcatagatcggatccccatcgaaacctctgactttcgttcttgattaatgaaaacattcttgtgaccggcgcatgacggaccacagcgaagagcactttgccaaagaatgttttccatttaatcaagcaacgaccagtcgagagggtttctgatgacagggatttcagattacaagggtttccgat

SEQ ID NO: 677488 - DNA, 314 bp, Homo sapiens
gcaggatcctagaggtcgtataaaaaatagttgctgttatctaaaaattcaataggtgagttagacatggcttttcaagtaggattttcagtggcttcagattccatcatacacaagtgtatgttttttctagtgtaagttttttcccgtgtaagttttttcccgtgctcaacacgtaagtgctcaaccaatctttcttccccactttaagtctagctaatggtcaaaaaacttgcattcaagcttttggtgtgaaagatcctggttttccgcaggaatatatttaaattgttatcctaatgggatgaagagaa

SEQ ID NO: 677489 - DNA, 101 bp, Homo sapiens
gattgcaggcgtgagccactgcagccagcctcttttttgtttttctggttcttcagcctgaaatttcagagagttcacagacaagaaccggggatccttta

SEQ ID NO: 677490 - DNA, 1028 bp, Homo sapiens
ggagtgtgtgctccgggctcggaacacacattattattaaaaaatccaaaaaaacatcgtcaaaaaatcttttaaaaaaccccacaaaaatgtacaaaaaatccgcgtcgtcccccgcggagactttatatttttattcttcctcttttattaaaataacccggtgaagcagccgagacgaaccggccgccgagtgccgaagagctccaagaaggaaacaagaagaactgaggcattcccgcatgaccggaaccgaaacgtcaaccatcgcattacccgacggaagcgagaagcacagaaggaagatgtgatcagagacccggcaatggcgggacgaagaagatagaaactcaaaatacggaaggaattactggaccactcttgagatagcatcgcacgattagaaaattaagatgacagcatacaaccaataaaaacacgaaaaaaaatctaacacaaaacgcgataggcacacaacagccagacgcaaccacagagaaaaaacgacacagcgacaaatacacatccgaccagctaacacaactgacaacaaaacaaacaccacaacaacgacacgaggaacaatacagcgaccaacacacacccacaaaaaacagagagatcacggcaacaaacataacaaagaaaccacgaaaggaaagaagacatagaaagcatcacataccgccatcagcggggaaacgcacacaccaaagaacagcgagcacagataacacgaaagaaagatacacgaaacaacacacgaatagaaccgacaaaaacgccgacacgagacactaaaaagaagatgaccaagaaggacacaagaaactataagagccaaatacagaatcacagaacaagaccataccaccgagacataagacaagacaacaacacaaacaaaacagacagactcaacaagaagcaagaaagacacgacaaccaagccacgtgccagccaaccgagacgacaaagacaacagagcaaaccaccacacgcagaacgacacaaacgacacacgaaa

SEQ ID NO: 677491 - DNA, 638 bp, Homo sapiens
ggcgaggcctgggtgaggctggcgagggcggcccgacggtgcgcgggacgggacgtgggcagcgagtggcgccgggagccgtttcccggaatcggggcgcttcgctcaccgggccccccagcatgaagaccccggcggacacagggtttgccttcccggagttggtgccgtacaagccaagagtcgtcccctggtcatcaaggcacgatccagctgtggcgactttatcctggagctgcatgcgtgaatggaggagtaccagggcgtcatttgcctgtgcagggtggactacggggaattcgtctatcgaaatgacccttgatgagtgtggcccggctgtggggctgttcgctaaggttgctaagccccaggatgaacttactgatcaatgctgtagtccgggccctgcgctattactataacaagcgcattctgcacagatgaccaagggtgaaacgcgttcagccttacgagagcttcaactttcaacgaagactgtgtgctggtcaattacccattcgattgatgtggggttggctgagtgggtgcagtgccccgagagtttgctcccgcctagatgccgtcgggtggtagcacacttccgcttccgctcccgtcggtgcgctcgtccgaggtgc

SEQ ID NO: 677492 - DNA, 281 bp, Homo sapiens
  misc_feature (12)..(12): n is a, c, g, or t
  misc_feature (93)..(93): n is a, c, g, or t
  misc_feature (115)..(115): n is a, c, g, or t
  misc_feature (119)..(119): n is a, c, g, or t
  misc_feature (266)..(266): n is a, c, g, or t
ccggggcccatnaattctaccatgttcctcaaccatgtttggggtggaagctgaaacggcaggaaccccgaaggaatgtgaattcgcaaacgnctttgcctgcttcgaacgaggnaagnctcaggtttaatccatgaaggaccgacctccgggaagctgctcaccaccatgggtgaccgcttcaaagatgaggaagtggacgaaatgtaccggggggcacccattgttaagaaagggcaacttcaactacgtggagtttcacccgnattccttaaacatgg

SEQ ID NO: 677493 - DNA, 196 bp, Homo sapiens
gctcaggcagttcttctgccttggcctcccaaagtgctgggattacaggtgtgagccccatgcctggccactgtcagcatctattaaatttactgatccaactcagctgacttacctggtagcaaataaaggctcacttgacattcctgcattgataaaagctgcccacttaaaaaaataggtttctggaagcagc

SEQ ID NO: 677494 - DNA, 724 bp, Homo sapiens
gaagcacagcctgggtctgggccatccccggagcctgaggggtcgccaccagcccacccgcagtgaccctacctgtcacccagatgcgctaacagatggggcccaggccttcctcggtggaatcccacgggtcctgtcccaactgaatactgggatcgtgacttgcttgcatttgggaatgctggatgacactcagggcatttatcaagcgcacaatcgtggatctgcactggcaagtcttacacatcaaaggatgacccctaaacgacgagagagagcaggggacaggccaaggggaggcaacggacatggaggtaacgtatgaatagtaggaggcgaattgggtacagaacggaaagcatgatgtatccattaaggctcaacagtaaatcgattagcttaaaacatcgtaatagatcatataaaacataaggaacgcggaagtgaagaccgggctcccttcacaaccgagtcactcagagcaggagagaacccgcaattgccgctctgacttcctcgtcctacatcgtaagtctactctagtcacgctccactccatccgtgtcgccataaaccagctcagcaatactaaacaccgagcccaacaacaagaaggtctcatcagaagcagtcgactaaggaggacctctcgccgacgtcgcctctactaacgtaggccagatcttgctatccacacgaaggtgacggaacagcccatgaagcc

SEQ ID NO: 677495 - DNA, 238 bp, Homo sapiens
cgtcgacgtcagggcctgagtcagggcagggacatgaggctcgtggccagcgctgaacgagaggccacaatcccagggccagtgtggccagggtgcaagcaggggtgtctggagaagagaggaggcggagagggcagtgacaggacgagagccatgctgcatgctccatgctctggggtccctccagctgagacctggcccacccagcaccccactctccctcggcaccagggtcgac

SEQ ID NO: 677496 - DNA, 798 bp, Homo sapiens
agctacaggagctatagatttgaatctaatgttgcgttagtcttgtcagtatatcttctacctccggtataatctactgtaataagtgtaatgtaaaggccttccatcaattgaaccaggttcatcttctatctcccctgggatttactataaacagttatattggatatgattggttaagaaataatttgttattaacaattctgtctgctaattggatctggaaaagtatccagagtactcaaaaggcaatgatatgtgagattgattatggtatgtccacggagccctgctcatcaatagaataaccgatatgtaataatcgaattcattttatatgaatcttgagtacgtggaccattgattggattgtaaacttatagtggcagatttgtctcgtttctgtattgcattgtgctattctccatgagtatcgctaaagctgaatagtttggtctcatgggttttcatccttagagaatccatggagaatagacttgagaagtgtatggaaatctataaatgtggcatgagggtgggtgggaagatgaaagttagagctatctatccccgtgaagaaatgttctggcaataatagttttcatatccttttcccaggggcaaaaaacaaaaatggggtaattccttttttccattacaaaacaattttttgcaaaatggaaaccctttaggaaaaaggttctttaaacaatttttaaacgctaattggattggccccaggaaattacacgtttggaatgtggttaggaagaagaaactcgggttaatgggaatttg

SEQ ID NO: 677497 - DNA, 969 bp, Homo sapiens
tgcaggcggtagcagaaggcagcagcagcggtggcgacatgagcatgcggcggcggcgtccgggacagggcgggggcggcccgggtcgggggactgggcccgtggacccccgacaagcgagacacacaagctggtggtcgtgggcggtggcgggttgggcaagagcgcgctgaccaatccagttcatccagtcttacttcgtgtcttgactacgaaccccaatatggaggactccttacagcgaagcatctgcagtcgtgccatggcattcccaggccgggctgtgaacatcttgggacaccggtcgggcccaggacagagttccggggcccattgcaggagcagcgagtaccattgcgtgactgtccacggtggttcgttgctggagtgtcctgcccattacacgcgaaccggtcaagaggtttcacacgtcaggttgcggccacagcttcatttcgacggcgaggctattccgtgcgaggcgctcaaaggtgtacccgggcggacaggacgttttacccccgcggatgggtggctcgggcaccggggagacacccaacgtgtgccacgtgaatttcgtggggtcagttccatcaagccgcacatagggagtttcccacccgcgtaattcaatgaaatagccgcttcgtgtgccccttttaggggaggggccattcccccaaatcaatatggtttgtgaccccataagcgttttttgtggaggagacccttctgggggctcacacacaacgtatgcgggtttactttccaaaaggtgttttgatcaccgacaagcgacatattatgagtggacgcccaaggcactggacatccacgagcgatgtgttccccgtgagacagcatttagcccacagtggaaacaaccaaaggaaggggcttctaccaaaagctggaagtgtcaacatttcccacgataggtgttgccctcccccatgggggcaaacagaa

SEQ ID NO: 677498 - DNA, 316 bp, Homo sapiens
gagagccggggatgaaagtaacgggactggagagcagatgggggtgtcggcttacgtgcgggaggccttctgtccggggaacagtcatatctcgaggtacaaaggccaaaagcggagaagcggtgggctaagataggtcctacagcaaaccacccctccatattgccgtaccatttacaatgcgagtatctgtgacatcgtgggaaaaccacgggcaggaaaaatgcagatattctcgtaagtttatctcttctataacacgtctatatagagctagtgtgagtactaaccacagtggaataatagtttataaaag

SEQ ID NO: 677499 - DNA, 99 bp, Homo sapiens
aagcgttcaagctcaacacccactacctaaaaaatcccaaacgtataactgaactcctcacacccaattggtacaatttatttcattttggaagcgtgc

SEQ ID NO: 677500 - DNA, 103 bp, Homo sapiens
caggacgcgggcgtcaggacgccagagctgggtcagagctcgacgccagcggcgcccggagagattcggagatgcaggcggctcggagtggtcgcgacgcttg

SEQ ID NO: 677501 - DNA, 368 bp, Homo sapiens
gaaggtagtattatacaagaagtaaagtgatataaactgacacatctcttactcactctcttaattatatcctcctcatggtatagaactactgacacattttttttactcatcttaattatttcctaatctggaaagtgctggcgactacaggttcctgccaccaccacccagaaaactaatagtattaatagtagagatggcgttccccatgttggtccggctggtcttgcactcctaacctcaagcagtccatccgcctcgacctcccaaaatgctgggattacaggcatgagccactgcacccggcctattgttgtacgtcctacatctacatgtacaaactaaaacttcatgcagcctcctac

SEQ ID NO: 677502 - DNA, 483 bp, Homo sapiens
  misc_feature (31)..(31): n is a, c, g, or t
  misc_feature (38)..(38): n is a, c, g, or t
  misc_feature (89)..(89): n is a, c, g, or t
  misc_feature (193)..(193): n is a, c, g, or t
  misc_feature (216)..(216): n is a, c, g, or t
  misc_feature (373)..(373): n is a, c, g, or t
  misc_feature (387)..(387): n is a, c, g, or t
  misc_feature (458)..(458): n is a, c, g, or t
  misc_feature (467)..(467): n is a, c, g, or t
  misc_feature (469)..(469): n is a, c, g, or t
ccattgtcccctactccagcaactaagacangcacccnccagcccactgcgactcccaccacgaaggaccccagccctctctcagccanacaacggccccgcccaccgtctcagacatcgtgcttcttctggtgggccaggagtctctcctcgtcgtcgaaggtctggccacagatggcacagcagaaggctncgtcccggatgtggctcttgcgntgggtgatgaggttggacttctggctgaagctgcggtcgcagtcgggacaggcgtaggccgctcgcccgtgtggatgcgccggtgcgacaccaggttggacttctggctgaagctttgccgcagtcggggcagacgtaggcttctcgccggtgtggnatgccggtgcgccnccaggtagggtttgtggcggaagccttgccgcagtcgggacacacgaagggccgatcgggggcgtggatcncgtatgcgncncagatggctgccct

SEQ ID NO: 677503 - DNA, 394 bp, Homo sapiens
gggcccatcatgtcgctgatgagatagttatgtttatcgtaatggtgcaaatgaatttgctcgtggcaaaagaaaggccttgtgactcttaactagaaattgatatatgtgaatgtcctctggtgatatttataattgctagaatttaatatttaggtgtagctttaaaactgttgttgctagtattctttaggaaaagtactttgatactgaaagcctccagccccaaccttttttagttcaataaaacaattgagtttattttaaatatgatatttgataacattgtgtaggcactctctctcagattatggatgaacacattttattttctttcttctcccaggtaaagtattacagagttacattccagtcagcgacggggatcctctag

SEQ ID NO: 677504 - DNA, 452 bp, Homo sapiens
  misc_feature (211)..(211): n is a, c, g, or t
  misc_feature (248)..(248): n is a, c, g, or t
  misc_feature (430)..(430): n is a, c, g, or t
tttttgacccacgcgtccgggaagtgaccgatcgaaagctggcgtcggtggtgttggcgctgaggacccggacagccgttacatccttgctaagccccactccggctacagctcttgctgtcagatacgcatccaagaagtcgggtggtagcttcaaaaacctcggtggaaagtcatcagggagacgccaaggcttgctgttttggaaggncactatgttcatgctgggaacatgggggggacacagngccatcccccctggcacccaggtgcccatgtgggtgttgggaagaataaatgtctgtatgccataaaaaaggggatagtccgctacactaaggaggtctacgtgcctcatcccagaaacacggaggctgtggatctgatcaccaggctgcccaagggtgctgtgctctacaagacttttgtncacgtggttcctgccaagcctg

SEQ ID NO: 677505 - DNA, 193 bp, Homo sapiens
caagctgactcttccctttcatgggtagactctacacgcctctgtggtcaacagcccatcagcgggtactcacgatttgttacttgtgtactgttgcagctagctccagaagccatcccccagaattagaaatttacggctattaataaatgcccagggtcattctcgtgacttgttttgcttatagtcctaa

SEQ ID NO: 677506 - DNA, 107 bp, Homo sapiens
gtgtgcaatggagcgcccatcacatctgggagcagaaaagggatgaatgtgagcagagcaaaggctgggttgagaacaagaggggagagtgggatgcgggaagtggc

SEQ ID NO: 677507 - DNA, 377 bp, Homo sapiens
  misc_feature (10)..(10): n is a, c, g, or t
  misc_feature (312)..(312): n is a, c, g, or t
  misc_feature (354)..(354): n is a, c, g, or t
aagaagcttnaagaggaaggggaacagttcgtgaagaaaatcggtggcatttttgcttcaaagtgaaagatggccctggagcaaagaagctacctgggtggtggatgtgaagaatggcaaaggatctgtgcttcccaattcagataagaaggctgactgcacaatcaccatggcctgactcagacttgctggctttgatgactggaaaaatgaaccctcagtcggccttctttcaagggaaactgaagattgctggtaacatgggactggccatgaaactacagaaccttcagcttcagccgggcaaagctnagctgtgaggagtccctttggcaacctcaggacatcaagatnagatgtgtaggataggtagagat

SEQ ID NO: 677508 - DNA, 203 bp, Homo sapiens
tctgtactatgcatgcaaagatatttcaacacttaattggtgcaaccaaatgtgtcatcgtgtcataaacagcatgtatcaaaattcagctttaataaactgatttaagacagtaaatttgaaagcacaaacattcaagtctccattcaggagtggtccattcatgttgcatccatctcagacatcaacactagattcaaccc

SEQ ID NO: 677509 - DNA, 538 bp, Homo sapiens
  misc_feature (27)..(27): n is a, c, g, or t
  misc_feature (142)..(143): n is a, c, g, or t
  misc_feature (156)..(156): n is a, c, g, or t
ctggatctgcctctgcaggctggctgnctggtgccccgaggatggctgctgagccccaggccatggtcccctctcgcaggacgtgaacctgggatgccacgccctcgctgcggggcctgtggagagtgggccgggccccggnngccctgagccggnggatggctcgccccgcccggagcccctagtctagcccaggccgctccgccctttcccacacaccggccctggggaggttgagaactgggcgtggaaaagataccccagtctgcggtgacgaggacgtccaagtgcccgaagtgcaggctcgaccaggcctagctcagtgcctgagcccttagcgtggactgggctggacccggaagccccaacgggctctacctgacccatgcagggtagaacacctgaaggagaagctcattagccaggaccaggaagtgagaccgactgcgatctgagctggggggacaccgaccttggacgcacagcaccggggacctgctgatggctggagaatgagccgactgacagcagggagact

SEQ ID NO: 677510 - DNA, 237 bp, Homo sapiens
ttcgttatgaggtcgttaaaaatccaagcaggtgccgggcgtggtggctcatgcttgtaatcccagcactttgtttgggagattgaggcgggtggatcactcgaggccagaagtttgagaacagcctggccaatgtggtgaaaccctgtctctactaaaaatacaaaaattagccgggtgtggtggtgcaggcctgtggtcctagctactgagggtggctgaggcacaagagttgtt

SEQ ID NO: 677511 - DNA, 145 bp, Homo sapiens
agcggggaacaatcacttgaattgtagtgattgttaagtgatggttaagtgatggttaagtgatggttcaggtgatggtgaagtgatggttaagtgatggtaaagtgattgtaagtgattgttaagtgatggtaaagtgattgtt

SEQ ID NO: 677512 - DNA, 525 bp, Homo sapiens
gcgacctactactactaaattcgctgccggtcgaccactaccacttccccaagctcgacgcgctgatgaacatcctcatcctgctgcccttcgcggtgcgccggtggtgtcctcggtgggcctgttgcagctctacggttccggaccgttcgccatggtcggcacgccgtggatcctgatcggttgctacttcaccgtggccttgcgttcatgtaccgggcgatcaccaacaacctgcaggcgatcaacctgcgcgacctgatggacgccgcccacctgctcggtgccagcacctggcaggcagcgttcctggtggtgctgccgaatctgcgcaagggcctgatggtcgcgctgctgctgtcgttctccttcctgttcggcgagttcgtgttcgccaacatcctggtcggtacccgctatgaaaccctgcaggtgtacctgaacaacatgcgcaacagcagcggccatttcaccagcgccctcgtgatttcctatttcctcttcgtgctggtgctcactgggtcg

SEQ ID NO: 677513 - DNA, 183 bp, Homo sapiens
gtggtgtggagcagtgtgacagagcccaggatggaagcaatggtgagggcacaaatgtgaggggcagtgttgcttcagtgtgagaagcaggagggagaaagtgggaccagcatgtgtgtgtctagtgggaacggggctggtgtgtgacgggaggcagacgggggatcctactagatgctcgac

SEQ ID NO: 677514 - DNA, 245 bp, Homo sapiens
tataatggctctaccaaaacaactaggaatggccccctttaattcctgagttccaaaggttacccaagggacccctctgacatccggcctgcttttttttacatgacaaaaactagcccccctctaaatcatttaccaaatatgtccctcactaaacgtaagccttcttctgactctctcaatcttatccatcataacaggcaggtgaggggggttaaaccaaacccacctactccaaatcttat

SEQ ID NO: 677515 - DNA, 763 bp, Homo sapiens
agggaagttcgtaatctttggagccacctctctacagaacactggagcaatgctgagctacctcttcatcgtaaaaaatgaactaccctctgccataaagtttctaatgggaaaggaagagacattttcagcctggtacgtggatggccgcgttctggtggtgatagttacctttggcataattctccctctgtgtctcttgaagaacttagggtatcttggctatactagtggattttccttgagctgtatggttttttgttcctaagtgtggttatttacaagaaatttcaaatttcccctgtgcttggttcccagagctaaatttcaacatgtagaggtgctaattcaacaaagtgctgacacggtgtacgccaaaatagtgttacacttcaagttcaaagaccgtggtatgctttacgccacgcattgcatattgcattaaggtttgccacccgtcaggtccgtgccaagtttacaggtgagcttacaagaccgagtcacagaagaaaaatgcagagtggatttcaaagcattctccgtgttgttcgcgcatggtggggttagtgtacattcttggactgccatatttgggctacgttgacacttctagtgaccaacgctgcagatccagacgctcgcttcaacagaatattcagagtaacagatgacacttctcagtcctggacaagtgcgacctgcgctgtcaattgattgctggtgcatcctcaccagctgccaggtgtcaaatcatatacaacgg

SEQ ID NO: 677516 - DNA, 124 bp, Homo sapiens
catctcctgttcctgagcccagtcagcaaattcgggcaggcgaggcacccgagtggatgatccagcaaatagggccaaaacttgatgggaaaatcccggcgtccagagctcaggagttttctgg

SEQ ID NO: 677517 - DNA, 305 bp, Homo sapiens
gagatcatgagatctcatcactcaggatggctgtgatttattttattttattcttttttttttagacggagtcttactctgtcgcccaagcgggagtgcagtggcatgatcttggctcactgcaacctccgcctcccaggctcaagtggttctcctccttcagactcccaagtagctgggactactggcatgctccaccacacctagctaattttggtactgttaggagagatggggcttcaccatgttggccaggcgggttatgagttggagtcatcttctttcagtgtctttatggtagaaag

SEQ ID NO: 677518 - DNA, 177 bp, Homo sapiens
aggcctgttgactgcgtgttgcttggggtgcacctcgtcgtagaggaactctgcctgtcagctctgccccatcgccactctcacttctcttggcgatctccagctggaagtcctgctccatggagtcgaggcggcgtgtcttgacgctgacgtacgacgattcgctccttgactgct

SEQ ID NO: 677519 - DNA, 102 bp, Homo sapiens
cgattctgaccaaaacatttaattgagtcagggtagaaaaaaatgcaaaggccttggtccctaggagaccaacactccagctgagctggccttagccccagc

SEQ ID NO: 677520 - DNA, 230 bp, Homo sapiens
aatgggaatgaacatcctagtcatcatctcatagggtagtaacaggtcatagagggcctgaaagtataagcaaaaatgtagctatattatcctccctagtcttatccatacctgacataataatttcacttgtctctattgcttattatcatctccgactataattgtcacatgctctgaaagcaagacatcagtctatacttggcttctctactctcagcacacgcgaa

SEQ ID NO: 677521 - DNA, 844 bp, Homo sapiens
  misc_feature (1)..(1): n is a, c, g, or t
  misc_feature (681)..(681): n is a, c, g, or t
  misc_feature (723)..(724): n is a, c, g, or t
  misc_feature (726)..(726): n is a, c, g, or t
  misc_feature (728)..(729): n is a, c, g, or t
  misc_feature (759)..(760): n is a, c, g, or t
  misc_feature (766)..(766): n is a, c, g, or t
  misc_feature (779)..(779): n is a, c, g, or t
  misc_feature (781)..(781): n is a, c, g, or t
  misc_feature (784)..(784): n is a, c, g, or t
  misc_feature (786)..(786): n is a, c, g, or t
  misc_feature (797)..(797): n is a, c, g, or t
ntagtggaaagccagcagagcccgacgtcgtgtgatctaccagcgcctgcgcccctccccttcagagccgcacggcttcagaacccctcgtaacggagagaaacgggcgctcatggcggtgcacagtccacagcatgaagacgcaagctcttcgtaggcagcacggcccggcccctcacccgtctgtccacacgaggggacccaagggggcatgctcagcgcagggacacagagtgaccaaagtcccgtcctgcttgcctggtacctgtactgtgctcatggagggacgaaagaggggcctgaccgcagactccacgtcaggtgcacacatcacgcaggagacatcggacaggacaacccgggctggctgcttgacagccagcgagaacggtgcagccgagacaggagtagtactcgacgtgtgagctagtgttcgtgcatggaaccttaggaggcactggcgcgtcaaagctccctccccacaccaagagaggaaggacccctcaccacccccactggcgagacaggttacttcgccgactagccatgtttttgccgaaaccaagattttgtaggaaatgattggccagcgccagggcccaggccatgtggcctgcccagcctcaatgtcacttggcggcggggtggggtgggggtgggcagcagcatcccagccttganatgcttcactttccttctctgtaaccagactttgaaaaattnntngnntcatcaggctctgttcctcaatggcctttnnctagtncctcccgagaatntntcntnttgtataaatnacaaagtgttaaaaatgtatttcctgaaataaatgtttcaaatgcgg

SEQ ID NO: 677522 - DNA, 380 bp, Homo sapiens
tacttttcacaggggtaagtcacatcagcctgtgcccaaactgcaaagggcaaactctcctctttccaaagataaactcggccgggtgcaatggctcacgcctgtaatcccagcactttgggatgctgaggtgggcggatcacgtgaggttaagagttcgagaccagcctggccaatgtggtgaaaccatctctactgaaaatacaaaagtagctgagcatggtggtgcacgcctgtagtcccggctactcgggaggctgaggcaggagaatcacttgagcctgggaggtggaggttgcagtgagccaggattgcaccactgcactccagtcccccgcccccgccccctgcaagaaaaaaagcaacctgtgtttgtgttt

SEQ ID NO: 677523 - DNA, 202 bp, Homo sapiens
ccccccttttttcccccaaaaaaaaggggggggggggggggggggtaaaaaaattcaccccaacccccccgtttttttttcccccgggtcccccaaaaatttggggggaaatttttgggggcccccgggattccttttttttaaaaacccccccggaaaaaaaccccccgaaaaattttaaaaaaagggggtttttccccca

SEQ ID NO: 677524 - DNA, 377 bp, Homo sapiens
tgggtgattaaggatccagtctatgattagggtagttggtctaggtgtagctgagcatagggaatcagtgaatgaaggtcctatgatggcaatacagtcctattgtaggactagtgaagtgggtacaacgtatacgtgtcgtgtagtacgatgtctagtgatgagtttgctaatacaatgccagtcaggccacctacggtgaaaagaaagatgaatcctagggctcagagcactgcagcagatcatttcatattgcttccgtggagtgtggcgagtcagctaaatactttgacgccggtggggatagcgatgattatggtagcggaggtgaaatatgctcgtgtgtctacgtctattcctactgtaaatatatggtg

SEQ ID NO: 677525 - DNA, 756 bp, Homo sapiens
  misc_feature (543)..(543): n is a, c, g, or t
  misc_feature (549)..(549): n is a, c, g, or t
  misc_feature (557)..(557): n is a, c, g, or t
  misc_feature (559)..(559): n is a, c, g, or t
  misc_feature (582)..(582): n is a, c, g, or t
  misc_feature (589)..(589): n is a, c, g, or t
  misc_feature (592)..(592): n is a, c, g, or t
  misc_feature (597)..(597): n is a, c, g, or t
  misc_feature (603)..(604): n is a, c, g, or t
  misc_feature (610)..(610): n is a, c, g, or t
  misc_feature (623)..(623): n is a, c, g, or t
  misc_feature (628)..(628): n is a, c, g, or t
  misc_feature (631)..(632): n is a, c, g, or t
  misc_feature (641)..(641): n is a, c, g, or t
  misc_feature (647)..(647): n is a, c, g, or t
  misc_feature (652)..(652): n is a, c, g, or t
  misc_feature (661)..(661): n is a, c, g, or t
  misc_feature (667)..(667): n is a, c, g, or t
  misc_feature (691)..(691): n is a, c, g, or t
  misc_feature (733)..(733): n is a, c, g, or t
cggcggggcaggcatgggagccgcgcgctctctcccggcgcccacacctgtctgagcggcgcaggagccgcggcccgggcgggctgctcggcgcggaacagtgctcggcatggcagggattccagggctcctcttccttctcttctttctgctctgtgctgttgggcaagtgagcccttacagtgccccctggaaacccacttggcctgcataccgcctccctgtcgtcttgccccagtctaccctcaatttagccaagccagactttggagccgaagccaaattagaagtatcttcttcatgtggaccccagtgtcataagggaactccactgcccacttacgaagaggccaagacaatatctgtcttatgaaacgctctatgcaatggagccgcacagagacgcaggtgggcatctacatcctcagcagtagtggagatggggcccaacaccgagactcagaggtcttcaggaaagtctcgaaggaagcggcagatttatggctatgacacgcacggttcacgcacttttttggggacggncttccntgctcacncncccctattctcacacctaccgtnaagtatntcncccgnggctgnncccggnccccctgtgtggncaganaanncatgtcctnaaagcntgccnacctgaaanaaaccnatggaaaaaccctattgtgaaaangaacccacgaaagcttctgacgtgggccttccttaaagcccnaagttttaaagatgggtggtcga

SEQ ID NO: 677526 - DNA, 202 bp, Homo sapiens
  misc_feature (57)..(57): n is a, c, g, or t
taatggcgatccgcacaggagcgaggcgagtcaggttgtgcgtatatggatcctagnaccagcatgccagtgtgccaaggccacaggaaagcgagtggttggtcaaaatccgtgaggtcggcaatatgttgttttactggaacttactccctactgatgatgtgctccacacggatccgagctcgttcatctttcccagcag

SEQ ID NO: 677527 - DNA, 322 bp, Homo sapiens
ctattgaaggcacaggactacaacggttatacacaagaaattgataatgccagagcaactactagaacagagggattctttgtactcataaacaacaggaagtagaatttcggaacaaatacctggaggcgccatctgtctgacttagagcaacgtctggataaaagtcagaatgaccaagaagcttctcgctataacctgcagacgctcttagacattctggatgtgaaagatctttgaactaacagaattacgagataacttggtcaagctactagaatgcagctcaggaaagttaccctttctgtgcccatttcaaggt

SEQ ID NO: 677528 - DNA, 111 bp, Homo sapiens
  misc_feature (11)..(11): n is a, c, g, or t
  misc_feature (46)..(46): n is a, c, g, or t
acccggcgtanacccctctcttttcagggtcccttctaaacaggtncctcttagtgatcttaccatgctctttaaactcctacctcagccctcctaatgacctccggccta

SEQ ID NO: 677529 - DNA, 328 bp, Homo sapiens
attgaatagaaataatggcttttgaaaatcgcacaaagcaggccaggcacggtggctcacgcctgtaatcccagcattttgggaggccgaggcagacggatcacgaggtcaagagatccagaccatcctggctaactcggtgaaaccccgtctctaataaaaatacaaaaattagctggacatggtggcacgtgcctgtaatcccagctactcaggaggctgaggcaggagaattgcgtgaacccgggcccggtggaggctgcagtgagacgagatcgcgccactgcactccagcctgaagacagcgagccccgccgtctcgaaagag

SEQ ID NO: 677530 - DNA, 272 bp, Homo sapiens
ttattcgtgttgcacggttagaggtacgctggcgttaaacatgtgtcactgggcaggcggtgctctaatactggtgatgctagaggtgatagttttatggtaaaccaggcggtgtaagatttgccgagttccttttactttttttaaagctttccttatgagcatgcctgtgttgggttgaacagtgagggtaataatgacttgttggtagattgtcgataattgggctgtgaatagtcagttcagtgtattagatcctgacggcaggcttt

SEQ ID NO: 677531 - DNA, 168 bp, Homo sapiens
tcgagccggtcctgagatatcaggtagggaaaatgctcacgaaaaagcaatggaagttaacagcgtgagaatattagttcccaaagcggctataactcatgatatccccaacaaaaatacagaaggttcagtctctgggacatcataaagggagaattccgttggtca

SEQ ID NO: 677532 - DNA, 228 bp, Homo sapiens
acaatcagtgcattgctcgtattgtcagtccagcaattgtcacattctatccagaaatcagcctctaataatttcccaggccctcttctgcctcagagtgcacgtcacttccccatggaacccgctttgaccgacaccaactctccctcctggcttatgttactgctcctttgacacatgctgctgaagcaaccatctatcctttccatccagaaccatttgtctcca

SEQ ID NO: 677533 - DNA, 127 bp, Homo sapiens
caacaccttttgggacgcaccggacctgtcacgtctctctgtggacacgtggtcacgcgcactccgtgtcgaggctacgtctgggagggggactccttctacgacgtctgaccctgcatggcactgc

SEQ ID NO: 677534 - DNA, 362 bp, Homo sapiens
  misc_feature (239)..(239): n is a, c, g, or t
  misc_feature (293)..(293): n is a, c, g, or t
  misc_feature (304)..(304): n is a, c, g, or t
ttcatactcccaccagcaatgtagaagtgttcccttttcacaacatccacgtcaacatctattgtttttaaagatgtttaacaacatctattgtttttaattatggtcattgttgcagaagtaaggtggtttctcactgtggttttcatttgcatttccccgatgattagtgatgttgagcattttttcatatgtttgttggctgtttgtatatgtcttttgagaaatgtctattcatntcctttgcccacgtttttgatgggattatttgttttcttcttgctgatgttgtnttaaggtcctngtaagaattctaggatacctagtccggttggtcagaaagcatagttttgccaaagtat

SEQ ID NO: 677535 - DNA, 472 bp, Homo sapiens
gttggggctcattcaggatcatgagcatcatggaataggtctaaagagagggtacaaatatacatttcacctattcagaatgattacatgaaaaaaattcgctttccccaaagtctactatacacattagaggggtagctggtatgtgggccctacactaccaggtgaattagtttaacacttctcaaagacatctgaccaatcattgcagagagggaaagaatggtggaacgggcagataaaataaccctctgctttgcctcgtgtgtatccatgagtcaccagttgatgggttttcacattaagtcaccgtgtctgtcagagatggtctgaagcaagaacagcgtgtcctgtcatagacttagaaatacgcaggggaagtggaggggtcacatgcccaatagtcaaaccagtactcagagggccgtcccagtgcaaagactgtttggcagtcacattggaaatcagagtc

SEQ ID NO: 677536 - DNA, 276 bp, Homo sapiens
attgatattgaaaacttagctagggcttccagccctttaagataatttaaatggaaaattaaatgggtaacccgccatctaatgtcatgtggggggcagtttggatattgcatgaacagctaaggaatcccctgttttagggccaaagatccctccttgctaattttgttctggacagcttatgtaatattttcatgggggagacgggctctgggggctcagggccttgtctctaggaagattttggcaattcccaaaacagttttgaagattcca

SEQ ID NO: 677537 - DNA, 363 bp, Homo sapiens
  misc_feature (266)..(266): n is a, c, g, or t
cgacatatagaggatacccgcacgcggcggtggaatttagaatcacgcccttagcaaacggatgaaggaaacagatgtggggtgattgagtgagagatgacagctgcagggatggttgagagccgctagcgatggagagcagagggagagggccaggctccagacttccacacgcccacacagtatctttgccaggcctaggagaggacaggagcagctcttgcagctctgcgggtgtgcggccaaaggcaaggcccacggtctgnatgtcacttccccgactgtctcttgtgtggcttggccttgtgcaagacccagcctgtcacgacagagccttgtcacttcagaggaggagccaggatc

SEQ ID NO: 677538 - DNA, 164 bp, Homo sapiens
tatggtatattgaagtagagcatgatacattatgtttcaaggcattgaaacactgtcatcttcttattcacttcctgtgattgaatcgtagataactgaggagactgccccatgtggcaggtccttgtggtacggccccacttggcgcaggtggtccctggggc

SEQ ID NO: 677539 - DNA, 417 bp, Homo sapiens
agtttttctttttccaaggtgcccacgccacccctatgtcacgcctgaagtagttattgagaaagtcgtccctttccccttttctataaccaaatagacaggaatggaagattctcctcggggcctgaaagcttgcgggatgaataactcctcctcctcaggcccagtcccaaggtacaaacttgcaccagcagcaagatagcagaggcaggaagagagctggctggaagacacgtaccccctgaagatcaagagggaggtcgccctggtactacatagcagtcacgttaggctgggacaattcctgtttacagaggactataaaacccctgccccatcctcacttggggctgatgccattttaggcctcagcctgtctgcatccaggcgctcattaaacccgcatgttgctccaaa

SEQ ID NO: 677540 - DNA, 256 bp, Homo sapiens
  misc_feature (53)..(53): n is a, c, g, or t
  misc_feature (147)..(147): n is a, c, g, or t
  misc_feature (208)..(208): n is a, c, g, or t
cagaagggagtgaagacagaaaaggaaagtgggagggcagcctgtctgggccnctgtggcagcttccaaaaatcatctcccacaaatgcttaccctctgtgctgtagatgcttcccaaatacactttgtgatttgaatgttcttganacgcccgtgccttgcctaatgctccctttgctcttcatgttgggaatacttagctcatcanatcctgcaaactaacttccatggaagaaaaaaaaagaaaaagaaaaga

SEQ ID NO: 677541 - DNA, 963 bp, Homo sapiens
  misc_feature (66)..(66): n is a, c, g, or t
agcccgttgttgctgcggccccagcgtgaacccccgcctgttttgcctgtctgctcaacgcggagntggttccccacgtggggggaaacaccttgtgtggtggctcccccctgtggtaagagctcctcggctgcctgcagggtgtttcatgtttgccagttccggtcgcgttgcgatgcccctgggagctgtcctttggggcctggttggcgccccactttcgggggtccccgcccacctggtgtcgcaagttctctgtggccgcagcacccactatgggtcccctggccccgcgacacatggtgtctgttgggcaacggccctgctgtgtgcccacccgggtgccgttagtgagcatcctctcgcggggtgcgtcattctatgtggccgcccgcctacacacaggggggctcccttatctctttgcccgcccgcctcttcaatctttcttgagcgtcttttacgagccggacacctctgagcgagagagccccacgacagtttatgagagagagagacatgttggtcgaccacctattcccggcacgaatacaactaaagacgagaggagcgctacttactgtcattcatgtctctgtctgacataagtggtggtggcacaccctcgttctgccacgcatacatgactgacatacctcctgttgagacgacgtgcgcccccctctctcattataggcgcggtgctccaaatcagagactcccgccttgtcgccacgtatgagagccgtgtaccctccttttctaggagtgctccgtggcagccctcatccaccgctcccactaatgtcggcaccccatactgcggtttcctagtcagcggggcagcccaccagtgagagcgctcttggaactgggggctttcttcgactccacatcaatgagtacactgctgtccttagccacgaccttcccataaaacacaaacaccccccgcccgccaac

SEQ ID NO: 677542 - DNA, 230 bp, Homo sapiens
gccctcggcctctatcaatttgcacgccattctgcgatcctgcgtcccgctggtcaacaatgaccctgttgcgcgcaatatcgtcaaagacagcgacatatctgtacgttttgatgccgccggtattaccccgctcactctcatttttgatcacggtaccgcacgcagtgaaacgtccaactcgtccaaagcagatctccgtcttggacttgtctcccccgagcacgtca

SEQ ID NO: 677543 - DNA, 267 bp, Homo sapiens
gtctcaccgtcatcaccaaagagactgaaaaagcagtgccccagagacattgaggagggcaatgtgaagatgctgggcatgcagatccccataaagaatgttgagatgctggcctctgttttggttgccattagtgtacccttctgctcgttgttctggctcttggtggagtggtttggtacaccatcgacgaaaagctccacgaataggaggtcctcctgattgaagcttagcttctttttaaacgtacctctaggcctaggattc

SEQ ID NO: 677544 - DNA, 1723 bp, Homo sapiens
ttcaacatagttacacgagagcgtcggtgtggggcttgtcttcatcttgcatagattattgtgtttgtatgtttgtcgtatggtgaggtcgtagtgcgtgtcgcttttataggctatctcaatatatatacattagcttgttagttagtggttgaagaggtaagtgtgcagacgctcctagcgattgttttgttagtgagtgtttatatatgtttagtagttatttttagtttttatccgtgtcacttacgtaactttgtgttgcttatagttggttaggtttatgtgagtcgcattcaccgccgtaagtatgatgtgggttgactgaatgactacgaggtcgttgtgtgtttattaggttattttgttgtatgtaggagatccacgtcgctgtagttgtgatgtatggtggttggttgtcgtcgtgcgtcagttgttgcgtgagtcggctgctctagaggtcgctgttcgttgttggtttagtatgtttatgttggtaccgttcatacattgctctatttagtgtagttgttttactttcgtagtcagctcgtgtatgtagttgtgttagactaagtgttgttgatgtgtgttgtaatgtatgttaattagtgctatctcttctttccgagctagcgtatgctagtcgatcattcttttatgttttcgcttatttaagtctgtttgttggtatgttagtgtggtgtggcttgctgagctttctctttcgtttgtttttcaccacgtgtctgtgatttatgttgttctcttctgttggtgctgctatttagcatgattaggaaggaggtcggatggttttgttgtatatgtcttctggccgctacagtcatctatctattattatgtatggatgttgtggttttttttttattgttgtttctgtatcaggagggatgtggttgattgctcctcccgccatctttttgttattgtttttctgtggggtgtgaccgtcacaccccgcgttattagggtacgactccactcggacacgagtattacgcgacgctccacatgatgataactatcttcattgttctatgatgtgtgagtatattattattatatatgatgatgttttgttgtgcggtggcaggagaatatattatatatgagatggtgttgtggttgtttgctttaccactgcacacgacatcatcgtgtttgatgttggtggcgcgctcttcttctctctgcgcgagtttatgataccgcgcgcgctctgctttttgtcgttgcgcgtagtgctcttctcgctcgcgcgcgttgtcacatcatcacaccacctctcgcttgtactctctctctctctctctctttctctctggtaggtggcgctctctctctctttgtgttgtttctacacacgcgcgctctatatatatatataatatatatttgtttgtgtagtagtgtgtgtaagaacacactctctctcttctgtgtgagagcagcagagagagaatatatatcgctatatatatagtagtagtagagagagacacacaccctcctccctaccgcgcgcggagggagagaaagaagaagagagacccccaccccctccccccacacccctcggagagaaacaccccgaaacaaaaataatatataagacacacacaaaaaaagagagagagagatcaggacccccccccaccggggtttttcccccccccccttgccctctttttttttttta

SEQ ID NO: 677545 - DNA, 212 bp, Homo sapiens
ttctccaggatcttcttcagtagaactaactgctgataactctgtctgacatactctattttctcctccacccatgccagacagaataattggcttgaaatggccaagcagtccaacctttctttcttttttgggtctgatttatagataggcccagagaatatacaacaaacatgttcttaggctcaggtgagttcaacacgacccattct

SEQ ID NO: 677546 - DNA, 243 bp, Homo sapiens
gcaaaagcaactggccgggcgcggaggctcacacctgtaatcccagcactttgggaggccgaggcaggcgcatcacctgaggtcaggagtacaagaccagtttggccaacaaggtgaaactccatctctactaaaaatacaaaaatcggccagtcatgatggagcacacctgtggaccccgctactcaggaggcagaggcaagagaatcacttgaacccaggaagcagaggttgcagtgagcc

SEQ ID NO: 677547 - DNA, 282 bp, Homo sapiens
cttttttttttttgatacagaatttttttttgttgcccaggtgggtagtgtaatggcgcaatctcggctcaccgtaacctctgcctcctgggttcaagcgattctcttacctcggccttccaaatagctgggactacaggtgtgcgcccactacgcctggctaattttgtatttttagtagaaacggggtttcaccatgttggtcaggctggtctcgaactcctgacctcaggtgatccgcccacatgggctcccatgaatttttacctataaaacgaaatc

SEQ ID NO: 677548 - DNA, 267 bp, Homo sapiens
gtgactctacaggatcattaacgagccgaagacatctagactttgagcagtaggtggccatagagcgatgccggaagagctgctgatggcaattactacaatgcaaggaagatgaacatacaagcactatggtagaccccatatgacgatctttttctatgctgcgaagaaagatacctgagaatctcatacaactggagtcgtgtgataggaggcaacgaagcttgggcatgggtaaatgtcaagtgaggctgttgaggatggcac

SEQ ID NO: 677549 - DNA, 279 bp, Homo sapiens
aacggggacgcgctcatcttatatggtctgagcaggaggacagcgatagcagtgggagctgccacacacacacacacacacacacacatctctctctctctctctcttaaacacacagatctcatgagaactactcatgacaacagcaagacggacatccattcccatgatagagatcacctcccaccaggaccctcctcaaacatagggggatacaatttccacatgagaataggacagagacacaaactccaaaacactatctatcagaaccaagaa

SEQ ID NO: 677550 - DNA, 225 bp, Homo sapiens
tcctgtggaagacggacgactgggaaaagaagaagtgaggcctacgccgggacaggctgaagggcaggtagtgccaggtatgctgcagctcccggctgacgaacctgtcctgtaagagctcgtctatgatgctggacgcgcggctgacgtggtcctgcatgacatccagcatgcgcgtctgatgccggtcgatctccagcagctagactatgcggtgaccattca

SEQ ID NO: 677551 - DNA, 394 bp, Homo sapiens
  misc_feature (304)..(304): n is a, c, g, or t
  misc_feature (344)..(344): n is a, c, g, or t
  misc_feature (373)..(373): n is a, c, g, or t
  misc_feature (380)..(380): n is a, c, g, or t
atccccttggtgactctctaattggatgtcctgggtcctcccagttcttagtcctttaatacctgtttttctccttttcttatttggacttgtgtcttctgtttagtttctcaattcgtacaaaactgcatccaggccatcaccaatcattctatatgacaaatgctccaacaaccccacaatatcaccccttaccccaaaatctttcttcagtttaatctttcccactctaggttcccacactgccccaatcttcacttcaaaggcaaccctgaggaaacattggccattgatctcttccatnattcaccccccaaaatttttcggccggccccaacactttnaccaccatttttgtttttgtttttttctnatttaanataagggagggaca

SEQ ID NO: 677552 - DNA, 104 bp, Homo sapiens
tcggctcatctcaggctgttgatcggcggtgagttgtacacactcttagcggatcgacttcatggcacgtctgctgtctatatcaccacactttctgggtctgt

SEQ ID NO: 677553 - DNA, 587 bp, Homo sapiens
agcgggccgcactttcactctccgtcagccgcatgcccgctcggcgtccggcccccgacccgcgctagtccgccagggatagaaacagaagaaaaggagacagagcgacagctgagggataatcgttgcaaacgcggcaccagacaatcaaaaaacggcaaagatcactagtcagaccaacgcaaaatccgaccaggcacgcaagcacgataatctccagcaagcctaacgaacagaacagaacgaaacacaagaaggagacacacacacaaaaatcatagctgaaactgcggcacacagagcgaagtacacaattagtcacagataacaaccagatagacaaagtaacacacacaccaacacagaggctaagaaagacgacaacgtgcgagcagcacagaaccacataaacacatgaaacaaaacacagagcacattaagaccacagacagagacagaccaaaaaaaacaaaaccgcagagccaacatccaagacagacacaccgccgaaaacatgtccaagacaggcaaaagagcacaaccatgcgaacaaccacacgcaaaaccaacggcgacacacagaaaaa

SEQ ID NO: 677554 - DNA, 494 bp, Homo sapiens
acgagtcgtagtttaaggctcgatgcgtaagctagcgccgtcgtcgtctcccttcagtcggccatcatgattatctaccgggacctcattcagccacagattgagatgttctccgtacatctacaagatccgggagatcgcggacgggtcgtgactggaagtgccctggcggatggtcagtaggacagaaggtaacattgatgactcgctcattggtggaaatgcctccgctgaaggccccgagggcgaaggtaccgaaagcacagtaatcactggtgtcgatattgtcatgaaccatcacctgcaggaaacaagtttcgcaaaagaagcctacaagaagtacatcaaagattacatgaaatcaatcaaagggaaacttgaagaacagagaccagaaagagtaaaaccttttatgacaggggctgcagaacaaatcaagcacatccttgctaatttcaaaaactaccagttctttattggtgaaaacatgaatc

SEQ ID NO: 677555 - DNA, 729 bp, Homo sapiens
  misc_feature (648)..(648): n is a, c, g, or t
gttgtgtaaggccacccgctgactaatctggcctcgggggagatgtcgcaaaacgttgggtggggggccattctggcccaagggtggttcgcgcctgccacccattttgccgtctgtgcgggtcgcaggcgatgtttgtcgctccgcggaatttctaccttcccttggtaggcgtcggttcgccgggccaaaaggcagtggggtaataccctccgcgggcagatgattgctttcttcttgaggtgcctgcaagctttcccacctcactggaggttctactcaggtccgacgcgcgcggtacacacaccgagagagacactatctccttcctcccgcgttgttcttctggttgtgcgagtgtttgtcccccgcgcgtccttgtcttttcttgggaatcagtagtagcaggactgagtgtcgagatatagcgttcatgcaggcgaatcaaagtgtctctatgaggcgtccacataaagaacactgatacaatactcctgggtagcaataatatcacgcctcatgtcatatcccgctccccgcctatcatatcagtggctggatgaaacctccatgcagataggtgggtattggagggcactcttattgaagatggtgtctcaataggcttttctattctatgaacaatanggcatagagtcattgcagctgttccagctttataatttcggcaaacaaaaaaaccatctttctatttctgtccacatgaca

SEQ ID NO: 677556 - DNA, 993 bp, Homo sapiens
  misc_feature (630)..(630): n is a, c, g, or t
  misc_feature (670)..(670): n is a, c, g, or t
gaggggtcatgagggtcctgtgttggcaagtgtgcctgggactcagcccatgtatcggtaacatcctggcatcgtgctcctatgatccggaaacgtcattatctgtgagagaggacataacggcaccgtgggatgaagagaccaacgagcatgcggagacatgactcctctagatagagactctggctgtgcttgtggaccccccagtgagcttacggtccatgatacctggtcctgtgtggagcatcgtgatggggcgcatctctccatgctgacattgactactcggggtaaggccaatggtgaagtaacagaatgatccaacgaacgctcgcacctattcggccttgtcacatcgcctgtcacgcgtcggagccacctgcgtggtgtgtcaccctggcgcatagacctcgattaggaccacgccgagtcggaggcaggaaacacctcaattacgatcgaaggagcgttgtagcatcgatggtcgtgcatgtgacgagacgctcattcagacgctcgtggatagcgcgagagcgcgggaagggagccggccagcgtgggaagcgtgacgggatcgcaaggaaacgctgagatacgcagcatcaatagtagagcgttggagttttgagngactggttgagccgttgggcccgccatccattccgggtanctagctccggccgaggcgactctacttcgtctgcagattgggattctcacaaggtatagggatcgctaggtgtataccacttttagcgaacccttggtggacttgatcggcctacaatgccaagtgacggttgcggttacccccgtagagattgtgtgtgcaacaaggttccaaccggatgtgggtcgctggcatcgtgaggctgggtcccatcacagggcaacattcctgggctgtcgtctggtgggagacgaatacaggtggaccctgttggaacggagtcaaggttgatagggcaggtggggtgtcgcgcatccagtgag

SEQ ID NO: 677557 - DNA, 313 bp, Homo sapiens
catgccagcatctgagcagtattggaaaaacttcatacttttctctactgtgatctgtatagggggtaacatctaaatcaaggagatagattcagtaaagtcagtaatgttcagtaagatgatataattaaatatgtactatggaaggttgattagaacaaagtgggaaaacttgtaaacattgcccagattgtgaacttagggttttgggcacaattgttggtcttaccttatgcttgagcttttagtagatgttcttgtgtccatgtgtataacttggtgattatttctatagttgggattttcttggtgt

SEQ ID NO: 677558 - DNA, 897 bp, Homo sapiens
tttttttgttttttttggaggtgtaaaaagggcttattggcaggggcagcaggaatttaatcaaaagggccaaaccccaggtcatcatctgactctttcagaactcctccttcttctcatctttcttctcctcgggctgcagcaggggcagaaccagcagcaggggctgcaaagacgcctggggggcacgcaagaagacgggttacaggccccaccaggcagggtacacgtgggcaaggctggccaaattacccgggggcaatggacggtcttcaagggtgttttccccatttcaggctcactgggattaacccttgtggttgagaacgccggagctccgtcgtgtccggcgcctgcgaaatacccacggcttggggtgcccaagagatccttcctggatgtgcccctaggagcagctgggggagagaagatgttgggcccccataaaaggggcaacggcccaagaaagggtgttaagagaaggggcaaaatatggtaaagaccggggcaaattccgggggggggagagggccatgaataccatggcggccggggcgggggaggaaaacaaaaaggtccttcccaaaaacggggccggggggtggggcggagaaacccccactcgggtggtgtggccccactatttccccgaggagggggcaaacaaaactccgggggtgggaggggtccccttcttggggagaaacacgggcggccccgaaaaaaagggggggcccccctgggtgtagacaagaatgaccccccggggggttaacatccatcccgatgatagaaatttccgagttcgcgggccagaggagcccgggggaaggcaccacctttatgggaccgaggccgagaaaccccctcggtgagaaaaaccaccggggcacccag

SEQ ID NO: 677559 - DNA, 671 bp, Homo sapiens
agcggacagcgcgcggggcgagccagtgagagtgcgcgagtggcggcgctgcctgtagtcctgtagcctccgtgtcgcgccggcgagccacgtgcgcagtgcgctggttggcggctcattcgtcaaggctagtcgtggagcagactgtcactgggcccggccgtgtttagcaataccgaagatcaagagatgatagaaggcggcgattggcggaagtgccggaccacatagcatcggaccatggtgtgacccgccgaagacatcatggtgcgctgagagctgacacgacattagcttcccagaccgccaagcgtacgcgcaagctggcctaagacagatcgggaacaattggcgccattcccaagagatttgtggcatttgcgactgggtagacacaggggagtctgggagtgtgagagcccgtacttcgacacacctgtgcaagcttagttgacacataattcttctcgttcatacgtgatggggcaccttacacacgaggaacatgttgtggatttggactatgcccacgtggcggaacagcgttaccccttggcgacaaggcggatttccttcacaaggcgaggccaatatggacgaggcgtaagaaaccaagcggtggcttgtatggcgcacagcggaggaagagcaaacattgcgcagacaaaacg

SEQ ID NO: 677560 - DNA, 163 bp, Homo sapiens
gcctgcagcgtggccgaactgcttggcgaaggcgtgaaggcgtcgtcgggaaattgctgcgccggataagcgcggcgcggctggccggcgggcgcgtagccgtcggccggaccgatgcggaacagctgccaggcctcttccttggaacggaagatgggcgccg

SEQ ID NO: 677561 - DNA, 143 bp, Homo sapiens
acagaatagtatatgtgaatgcatatctgtgtaagtatatgacaagtgtatatactactactgatacagatcagacacgaaatccaactgaattacccggtagaatgaatatctgacgggatttctatatggacataacacag

SEQ ID NO: 677562 - DNA, 910 bp, Homo sapiens
  misc_feature (715)..(715): n is a, c, g, or t
ggcgggaggcagaggaaggcggcagaagatgaagagctttcgcatccagggtgacttgtttgaagaacccagctctcgtgctccccatcccgcctcctggccgggtttcagggggacagtggatggatccaggtcttggggagctcaggactgtgggcgtgtgtgtagttatattgtgcctgtttagacgaagagaaagaaatctttgccactcgtttagtttcttgattctgatgactcgtttttcttctactctggtggtcccaatttgtttataaagtgttttgtgagtgtcctatgggccggggcagggtccaagatcttttcccttccccaggccccttcggctccctcccagatcccacccgcagtgccactgattggcatatattaagatcttgccgaacaacccagtactgaccactcatcctcactgtcgcaatggtctgtgatgccgtggaagccccagataaggtttcgtagaatgggggataggggagacaggggtgcgcccatcgaatggtctcgccagatgtgctggcataggtaactgtcttgccctgcaagtcggaatgcggactgtctcctggatttgattggcaaacttgaaggtgggcccggggactccttgtgcggggaatggggcgtgatcggaggatcccatggtggctcacgccatgtttgagtagcggaacgggatcgagtgtggatcttngtctctcttgaactaccccatagctagggttgggcatgaagacggattaaaaaagttctcggaggggcctttgtagggggtggggcaaaaaggttagaaaattgctgctcgttgctcggggaccgaagcccctctttctgggaacaggggaaacttgcggtcccccaatggggctgaagtttgcacccggtaccc

SEQ ID NO: 677563 - DNA, 700 bp, Homo sapiens
agatgtggtggacgaagacagcacctgccgtggttctatatcggagatcctggaccggtcaccctttcttgaggccgcgaggtccctatctcgaacggctcagcgattcgtggtggctgcctgatgggctcattgtcaccaacgcccatgtggtggctgatcggcgcagagtccgcagtgagactgctacagcggcgacacgtatgttgccgtggtcacagcatgtggatcccgtggcagcacatcgccaactgcctagaggattcagacttaagcgagcctctccaccacgctgcctctgggcacgctcagcctgatagtacgcgccaacgggggagtcccgtacgtagacatgggaacgtccctttgcacctgccacgaacacgatgacacatccaggcactcgttacgctctgcctcagccgtccagcccacgagacctgggaactcccccaaaccaatgtgcgaataccctacaaacctgcatgcagctattgactctcttcgcgcacacctcctgcgcactgtaccacccttgggttaaacccgtcggcactgccggcaggcgtcgctcggactgtggaccacacccatacgaaaccgtcaaccccgcctgcaactctcccttcgccatccctacatgcatcgactacagcaacgtatttgcactcgttgcgggccacagaccacctcctccccc

SEQ ID NO: 677564 - DNA, 251 bp, Homo sapiens
tgtctggctaaaattattgagatccctaaagagactcaatgttatgggaatcaacaaaaccatagttcttgagttgctgccaggctcctaaggcattgaatgagcttggttctatgcctcccttgcccttcaagtacccttacagtcatgggactgggtgtgggttttgacaacagaatggaagagacagttacacagtcattcatgactaataagaaagctaaatgtatgtctccacctttagggttttc

SEQ ID NO: 677565 - DNA, 291 bp, Homo sapiens
tctagcgatcctgatttggatgcggctatttagatgtgattcattagattgtgccatgacactggtgtgaactacaagataggagagaagtgggatcgtcagtgagaaagatgtcagatgatgagctgtcacttgtcttgggaacggaaaaggagaattcaggtgtgaacctcatgaggcaacgtgttatgatgatggtaagacataccagcgtaagagaacagtggcagaagggaatatctcggatgcgcatttgctacctgtccatgcttttggaggccagcggggctg

SEQ ID NO: 677566 - DNA, 283 bp, Homo sapiens
cagtttccctttccctagtttcagttacctgtggtcacccccagtcagaaaatattaaatgggaattcccgaataacccattcataagttttggactgggcccccttttgggtggggtgataaaatctccccctgtcctgcccccccccctgctgctgctcccgctgaggggaagaaagtgggagccaagaaagaagaatccggggggtttgatgatgccctgggctttggtctttttgactaaccctcttttataacatgttcaataaaaagatgaacttta

SEQ ID NO: 677567 - DNA, 876 bp, Homo sapiens
  misc_feature (318)..(318): n is a, c, g, or t
gcccgaatgcggtaaccgcgaggtgtgtgcaggatgtgcctctaggactgtccaggagccgtatgagcgcccaggcggacagagcgggcttcatgtcttggtatgccccaaccagcggctgtgcgcttctggagcgcgggccactgtggcacacggcggtatagcaggagatcagacagtagaatgatgaagagtgtagaacacaaaatcttgatacttgtctcgagtgaaaaggacggctgtatggagaaagagcacaattcatgtcgcccactctttgtcccagtggcctaggcagtaggatgataatactactangatgattggctcttctagatcatttgatactatgtgggccatcgattacccaagtataatgggattggaagtgcagagcatgttcagccagagtggctcatggctgatctccaggtgttacgtggaagacaagcctgggggtgatgtcctgtgcgcgactacttgcatacagcagtccgtgatgatagctgtctagtacttgagatggagaacgccaagtaggacacagcggcattgtagtcccaggcagattccttccgagtatgtggacctggcagagtaggtcggagctacctcatttgttggacatccccatcctggaacgtcgggatgaactacctctcgagtcgtccggtaccttgggcacagtgcactatcgattggcagtcatcggatcattcagccatttcccccaggaaggtgtcaactccgaggatgtccgtaatgacagtcatttctgccagtaaggtgaagctggctctcatacgggtgagagcagaacatttatggatcctcctgtccttaggtcgaggagaacttccagtttccgtcaaaacg

SEQ ID NO: 677568 - DNA, 327 bp, Homo sapiens
  misc_feature (3)..(3): n is a, c, g, or t
  misc_feature (33)..(33): n is a, c, g, or t
cancggccagaaggagcccatattttgattaanaaaaagtgcagtacagctgggtgcagtggctcacacctgtaatcccgcactttgggagatgaggcaggcagatcacctgaggtccaggagttcgagcccagtgtgaccaacatggagaaaccccatctctactaaaaacacaaaattagccaggcgtggtggcgcatgcctgtaatcccagctactcgggagactgaggcaggagaatcgcttgaacctgggaggcagaggtggcggtgagccgagatggcaccattgcactccagcctgggcaacaaaagcgaaatccgtctc

SEQ ID NO: 677569 - DNA, 1670 bp, Homo sapiens
attaacatgggcagtgctggagaccctgtacacagtatccatgagaattactggaggcgactacaatgtgcctgctgcaatttgcctggtcgagataccacgaagaggtctcaggtgtcccgacgatacatctcgcagtgatgcgaacgcgccgaacattctcatctaaggatacagaagacacaaaccggcagcgcccctgacacttgtctccgtacaaggtcttccgtgccgtggcatatgcggtctcacaggtcaattggagaggatgatgtgatggagttctgtttgctgctttgaagagcaatgcgccaatagtgctagtattgtgcagcaattgaagaaagcttgccgcgtgggatgtgacatgcacgatcgaaggcaagtgcgagacccgagggtagagtagccagtgtggtgtggatagctgattcgttgcgattacgcggatatatgtagtgcgcccccatgcaccaagtgaactagcgcgttgttacccgctaccttcgtgactataattgccatctatcaagacatatcggagctcattgaataactagaccagagggactagaatattgaggacgaaatgtctcggggtgctcgcctggcatcgcttgtaactcttgactcgactccacgtgacttattttgcctgcggtgggcgacggaaactgacctgacgaataagcggttgaaccattcatcattgctggtactaggcactctctagtaagatggggtccctaattaactggatgtttactattaaagccatgttgaccacgccgagggtatcttttcccaggtactcggaacgttgggtagcgatcagatgcattaaggccaatcccagatgcaggggctgcccatggtaggcagatgaagctgttttatcatgctggccccggttgacatcttaacaggttgcggagacccagctaataaggggtacacctggaagacaaaggtgccgggaaagaaacgaacccaggtgaggtatgtggaaaaacgggggtccgtcacaaagaggaagaccgtgcaaaataacgaggccactcgacaatatggagaacaacaagtcgtatatttttttctctttctcccctcccgcctcccttctctactaacaacccacgcacgcagcagaagacacaaaagacgagacacaaacatacacaaaagaacgcaaaaacagacaacaaggcagccacgaggaagagggaaagcaagaagaaagaaagaagcacagaaaaaagcgagcgaaacagaacggaagagcgcaagacgaagagaggaggcgcgaaaagaacaagaaggacagaagacaacaaactatcgacaggaggagaacaggagcaagagagacgagagggaagcaagaccaaacgagacaacagaaaaggaaagaggaacagaggacagagaaaagaaggaacacaaggcgagcaaacgccgaggagagcacagcagcgaaagaggacggcgacaaaacggcacagagagcggcaggaaaggaagcagagaggggagaggaaagcaacaaagaggaagaggaacgaggaacgcgggggaagaaaggagagagaagagaaagagaaggggagaggaagaggaggagggccgggacgaaagaggcgacggacggagaacgcggatgggaaggacaa

SEQ ID NO: 677570 - DNA, 1347 bp, Homo sapiens
  misc_feature (238)..(238): n is a, c, g, or t
  misc_feature (310)..(310): n is a, c, g, or t
  misc_feature (347)..(347): n is a, c, g, or t
  misc_feature (371)..(371): n is a, c, g, or t
gagatggattacatgttaagtaccaggacagtgcatggcacatatgatttcacacaaagattcatcttcatgtgcagtatagcctgtcctattcgtattctagagcttgatactctctccacctatcaaccagttcctagcaccaatccgcgaggagaggaatcgtactagagactttggcagtcgtgggaacaatcacatatggaaggttaccttggagaggggcaaacacgcaagnggagaggagttcgttcggtatggatactacaacaaccagggtggttgagagtgacgtgttctcaggcacacnagccagggcattcgtctaacccgtgcgtgtgaccagnctagactctatgacagacagcaangacagaagcattcacacaaagaccaacctatgcaaggcaactagtgtcgaggagtaagttagaatatgacgatggtggtccatcgcctcagggacacaggaagggatcgaggctaggctccagcaagtagaacatacaatcttgaaaccatcgtcgtcccagtggacagcactggggtcggtcggctcttgcaggagaacgcctcgccttcagtgatgccggatgagggaagagtcgaagaacagagatcaaagctaagtaatcactcctgggaaacggacgatggtggcgagtaccagacgataggcagcctgcatgggcgccctacggaagcaaagagggcccggggctggaaactcccacctgcttgtaaaggtgaagggagcgacggttatagagaaattaggaccctggagggctcaggaagtgtaacgagtacctgaaggaaagttaaacaatccattggactttgcttcgaagggatttggggacctatagtgtacccagtgcaagaaaggcaggttggttggtcagacgttccctggcgaagcacaagaggtgtttgcatgggcgaattgctgaggaggggagggtattgctacattggggaaggaaatcgggcggtgggaactgtttgactgaatcacggggaaaaattgcgcgagcagaggaaaacctggtgggcggaggaatacgtagagaccatctttcacggttcacagatattgggcaagccaagaggtgggttttaccccacatgtaagaaggcccccgtatttgtgtgaaatcacctgggggaacccctaatgtcccaacggtcatcgagtgttgtgtacggcgccaactttgtgataattgtgtgacagtcggctagggaggtacaacacctgtctaaagaaccgcttatattgacgacatcagcacggacaatgtatccccgagcagctacttaccgcgcatagagtgcgtatgcacg

SEQ ID NO: 677571 - DNA, 269 bp, Homo sapiens
aaaacaccagccagtgctcttccaagtggaggcatgggattctcctgcctcagcctcctagtagctgggattacaggtgcccgccaccacacccggctaatttttgtatttttagtagagacagggttttgctgtatcaggtcttgatctcctgacctcgtgatccgcccaccccggcctcccaaagtgctgggattacaggtgcgagccaccgcacctggccaaatagtccataattttatcacgtgtagatttctgtatccaccagt

SEQ ID NO: 677572 - DNA, 1637 bp, Homo sapiens
  misc_feature (311)..(311): n is a, c, g, or t
  misc_feature (731)..(731): n is a, c, g, or t
ctatgactcttggggccagccacttgttcgtgctgttagccaatagatcaggacatggtgcttcccgcatagggttgcgccctcttccattaatttctcctcctcctcctggattgtgtcctttttgctgtaatatgtgtggctcctccccactcgttgtcggggagatgctactaaactgcggctctaaagggtgccccatcaggcggacagctggctccgtcctcccagaagctgtgtgggcggccaccccttttacaaggttgttcctcttctccccctccgcacatgtgtattctctccatagggcngcgcaactccaaagagacaaggtgccctttggactaatatctttggttatgtaagccctggggggtcacaccacgtttctgtggaactggcgacattcgccgcgaggccttatggggttaattccagaacataacgggaagtcgctgtaactccaatatccggaaatttccgcgccatctccctttcgcgcacatcgcgctgtatcggtaaatattcccggcttcggcataatcctttggggcccccctttttccccggaaacaccaaactttggcttcccctcttcgtggtccgaaaagttccgacagctagcggaactttcagtgtctggccggtccttcgatcggtctgtattaaccggggaaggccccatcaccatctttaaatcggctcgttgaatctatgcttccagtttccgntatctcccctccctaggcttacctaaaatgccttctaggggattctaacctaccaaaatcggggcgcaccttagccacttctcgtaacttaacataaggaggaaggggccctggtgaacaaatgtcggtacactgaccacgttcctccaataggggctttgtggcaaacgaaccacttgggaacaccatttccatcgccttcccagccggctcttctttgggcccctggactagatgctcgaatacgaccgcgaaactggagcttcacctgttggacaagcaggcccctccgccgatggtgtcacatgacacatgtccaaaaccattctgagcctttcaaacaagctgacttgtgcccatgcagacggacgggtacacctgtgcctttactgcccaacctaggtcctcttcgaagtttccccagttatcatcggacatcatgggaatgtcaagaagcgagtgtattctatcactgagtagtgacttacactgtacccgttgtagaggactgggtcgagagagtatcatgtctggcgaccgactcaggcaaatctcaggccactaagcagcgcagacgaacaagaccagggacccttcgcgacattctactccatcggaccaatggacttcacaggagcacgagcaggttgctgagcatgtcgctgcgtccaactctgactatccggattgcgcatgatggcccaggcgtcgtccacagcccgtgcacgagcccaggggcttgagcgtctcctaggcggtttcggggcatcacccacttccatctccctccctccacgcagaacgggaggttttaaggggcctgggctggggggatggggagggcaccatcgtgactgtgtttttcataactatgttttaactactgttgcattacgccaatatcag

SEQ ID NO: 677573 - DNA, 831 bp, Homo sapiens
gcgcaacccggggtgctcttcttcgccgacgatgacaacacgtacagtctggagctcttccaggagatgaggaccactcggaaggtttctgtctggacctgtgggactagttggtgggcgacgctatgaacgtccgttggtaaaaaatggcaagagttgtggctgggtacaccggatggagagaagacaggcctttgccattgacgatggctgggtttgcgttgtgagtctgcaagtcatcttgtccaatccgaaagctgtatttaagcgccgtggatcccagccaggatgcaagaatctgactttctaaagcagataacaaccagttgaagaactggaaccaaaagctagtaactgcaccaaggttctcgtgtggcacactcggacagagaaggtcaatctagccaatgagccaaagtatcacctggacacagtgaacattgaggtgtagccgccaggaccagcaggtgaggacaggaagtctggagcgtgggctgctgcccattcaggtactgttcctttgccttcagcctttccttaccgccgatggacggcgtttcgacagctacctgggatgctacaaaaaattgtgttgtcttcattgtgtctggattgtgtttctgaactggaagagtttgtaggagtgaaggccacatgtcactgaaacaggacaacgaagtatctcacactgtccttcccctccagcaagccgtctgaatgctagcttgaactggacggtaaagcaggtgatggggagctgtcagtcaatgaatatccacagtgagatgcttggcttaccagactaactattggcacagggggggcggggta

SEQ ID NO: 677574 - DNA, 121 bp, Homo sapiens
atgtaaactgacggctagtgtaaactgacggccagttaaactgacggccagtgtacactgacggccagtgtaaactgacggccagtagtaaactgacggccagtgtaaaactgacggccag

SEQ ID NO: 677575 - DNA, 438 bp, Homo sapiens
  misc_feature (99)..(99): n is a, c, g, or t
  misc_feature (120)..(120): n is a, c, g, or t
gatcctgccgtcgtagctactggtttaccgcggggaggcgccgtcgggcccaggtcgcagccatacatcctctgccagtgtgagaccggctcgctctgnttgtagtagcgcgcaggtccngcaggctctctcggtaagtctgtgtgttggtcttggagatctgtgtctcccggtcccaatactccggcccctcctgctctatccatggcgcccgcggctccttcctcggactcgtggcgtcgctgtcgaacctcacgaacagcgtgtcgtccacgtagcccacggtgatgaagcggggctccccgcggccgggccgggacatggcggtgtggaaatacctcatggagtgggagccggcccaggtctcggtcagggccagggccgccgagagcagcaggaggacggttcggggtgccgtgacccgcatctcggcgtctg

SEQ ID NO: 677576 - DNA, 264 bp, Homo sapiens
accttattaaaacctaaaaaaaagacactagggcaatgtagagtgtggactacatattaccataatatttaagttctttggatctgaccatggtatagtgggaaagtagagaaatgcatattttcttagaaaacctatgcggaagtatttatggcacactcccagtcatgtcagtagctagcattatgaatcgcccatcataacgaacaacaccataagtgcaaatatcgcaacgatgtctcaaacaccctaaatagccaaaac

SEQ ID NO: 677577 - DNA, 111 bp, Homo sapiens
cgaggattccgtgcgtatgcgacggcgctgactgcagtctacaggctgtatcaatggattccccctcccccctgtggcaagaggagaagtgtcaatgcagtgaggcaaggg

SEQ ID NO: 677578 - DNA, 658 bp, Homo sapiens
agcggtgtcctaacctgattcttacttctggatgtcatctggcttctgcagaatatatgtagtttgtagtctctcacagagtggaagagtggcttccttatttatattaatgaataggagtctaagcactacaatctgggaggaagaaacagtatgtgaaatgtttttgtgcattaagcaaggcttttgagttaaacatttgatggatttatagggcttctgttcttaaaataaactaagttggaaggtactcttaccagcagagaacatgctcagctgtgcatgcttctctctgaaccttctgtgtgtgaacagatcatcctcatacccctgcccccaagctggtgcatctcatctgggatatgggctgtatgtgaccatcttacattcatcccctttccaaggaaactgggaggagagcactcatggctgaaagtatttgcaaactggatattggatggacacccttaggaaacacttcttcccttcccttatgtagaggtcgatgacggtctaagtccgggtcatccaaggccgatctgcaatgcctgatccccactatcctaagttctgacctgagcagcaattcttctcccacgtatccgggcagaggacttctttctggccactggccaactagatccggatctcgcaccag

SEQ ID NO: 677579 - DNA, 1630 bp, Homo sapiens
gagttatcagatcgacccccggatatggaaactacgtggcgagtatagcggtgttcgcttttgccttccatcttcctggcagcctgtggcgcctgcctctcccttaggtcggagctgaccagggcaaatccacagaaacgaacaccatctcgtctctccacatggactcttatcttcgatccttatgaacctggggaggactcagcaaaatggcagggtgcacacgattgcgatcgtctggcgtggcgtccaggtcgctgaaggccgagaatgacccgtgagctgcgaaggacaaacgccgtccgatccatcgttcgaggaccccgagacagaccacatctgtgtgtcatcatgttcaccttctcggtcgttgccttactcattcgcgcacagtatgtcctcgatgtgtccatcggccctctcctggtcacgggacgtcacagggctgttccgtgacaaggaattttgccgagagactcgatgcacaggtaactcccgaaatttatacatacacctggcaggggaggaatgtagcctgggaccagttattggattcgtgaccatatggttccacgcaagatgcaccgctaagcccaatgcgtggtcccacgtagtttcctagtgtccaccgtcgttgtaaaccaccttgagtaacgacagtgtgtccctacctagcacgaggactagaaggcgccctacgacttatagattcgtttcctacactgaaaaaagttccctgtccccagtggtctggtcgccattatctcccaaatcgttccaatggggctgcgcatggctaggtatgccggtactcaccccatttaaccagtttcaatctccagcgaacaccgttgtgcgtatctgggcaagatcaccacggggcagagctacatttttcgaccgcggtaacactgccttgggcattctctaggggcctatcgcacaaaccgggggactctcccgaaagggcaacagagccgtatcctagttcacacttgcggtccccgcttgaatacggaactctagtaactagccggcttttggccctgtggtcttactttcgcaccgcaattatatggcctttgcgtgtgccaagttctggttagagtgtccccgatagtgcaatgaacactggcgcgtccgcgtggggttataccatctcccaattgcgcagtacacttggggaatccgtgaaggcgaaacgcaaaaggcacttgtctcgcgcaattggctcctcttgtggacgcaactggtttggccgtgcagcacgtgcactttgcacgacacaattggtgtgctacgggttctatccttgtttgagacctcctcccctgttaaaaaaatgaagggcttgtcgcgaggtgactggctaaacccatagcaccacttaaagcacccaatgtggcacaaagaatactagtgtctctctgcaggcaatgcaagcgtaatcacatacgtgtgcctcgagaggtaaaatatggtgcgcggctccccgtactgcgaaacacgactttccccctgtattgtgcctgtgtccatgggtcgtacactgtcacgacgacgaacaactttcacacgctccccagtgatgttactccggtagaacaccgatcacgaagctatctcatag

SEQ ID NO: 677580 - DNA, 122 bp, Homo sapiens
cgcctattaagtttgtggccaggagttgatactctcgggcagtgagagtgagtagtagaatgtttagtgagcctcagggtgttgtgagtgtaaattagtgcgtggtccgagcggaccgggta

SEQ ID NO: 677581 - DNA, 101 bp, Homo sapiens
cagcggaacggatcgacggcagatctgtgacacttgtgtgaaaatgcagctgtgcttccatcatcatcatcatcattagacccaggtttcttgtacaaagt

SEQ ID NO: 677582 - DNA, 140 bp, Homo sapiens
gaagaggtggtgtctccccatttccatgtgagtgtactaacagcctaccacccagcggaaggacaggccgtcgggaacagccatgcaaggcagggaggaagcacctcgagtcgcagatattgccagtacactatgaacca

SEQ ID NO: 677583 - DNA, 383 bp, Homo sapiens
aatctacgtcgtgcaggacggggggctaatagtagtttccttctccacccagccgccaggtgtcgcctgatgatgagtattctgacttcgtcctatacgaagatgataagagagtaggggaaggcatagaaccaccaggtaggtatgaggggatacagtcctacgagcaacaccgattccaggggagtatgacaggaaagctgtctgggctgtctcttcaaagaggcctaatatcaagatcttgttcttcatcccctgctggaatatcgaattcctcctggtcttatagataagcaagtcggcccactgcagcatcacgatagtgacgaacaatgctgtgtggcaggtgaactccacgatttttctctgcaaggaatccacgc

SEQ ID NO: 677584 - DNA, 89 bp, Homo sapiens
ggatttgctggtgcagtacaactaggcttaatagggagctcgaattcgagctcgaattcgacctcgaatttaagcttctaacgttagaa

SEQ ID NO: 677585 - DNA, 221 bp, Homo sapiens
tctgtgttcagagctagcgtgcaggggtgtgatctaggcttactgcaacctccgcctcctgagatcaagagattctcctgcctcagcctcccgagcagctgggactacaggcacaggccactgtgcttggctatttcgtgtgtgtgtgtgtatttttagtagatacagagtttcgccacgttggccagacttgcctcgaactcccggcctcaagtgatctg

SEQ ID NO: 677586 - DNA, 149 bp, Homo sapiens
atattactttaaaaccccttttcccccatgggtaatagtttatgttaatgccggttcgggtttttttcccattgtttgtgccctgaaaaagtttaaaaaagcccccgtttttttcttctataaaaataaaaaagatagaaggcccgtta

SEQ ID NO: 677587 - DNA, 144 bp, Homo sapiens
agagaaccagtatccggagagcatgttaagtaagagacgacgatatgatagaggagtcaaagccccccagggtgcactctgctctctaggaacccatgtgctgtgggaaaaaaggagcaggagaaaaagtgacagaaggaaaat

SEQ ID NO: 677588 - DNA, 147 bp, Homo sapiens
gatatgtaaaccattctgtgtatagagtactttgtctttcctaagaagatcattgtacatttggtcatatgtggttctagaatacataaacattgggcttgtctgggagctggtcctggtaagcttcagcgtgagtcccgtgttcca

SEQ ID NO: 677589 - DNA, 191 bp, Homo sapiens
cactgtggccaggatgctataaatcaccacggtctttagccatgcacaaacggtagtttgtgtgttggctgctccactgtcctctgccaggccaggagtgctgagggcctggccggttgactgtaacgatccccgggtccgggctcgatcacgtcctggcaggaggcgggtacctgcgtgtcggaagtgca

SEQ ID NO: 677590 - DNA, 106 bp, Homo sapiens
tacaaaagtgctgttattacaggcgtgagccaccgcacccagctgattgtgaatatccactaccatgtgtcctctaaaactcaatgtccccctgccataaaacaaa

SEQ ID NO: 677591 - DNA, 188 bp, Homo sapiens
  misc_feature (99)..(99): n is a, c, g, or t
  misc_feature (104)..(104): n is a, c, g, or t
taataatccccccccccccccccccctcggacccatactctactcatccttctggccaggcgaagcccacgatttgacatgccggagaccgctccgtgngtcgngtttgtacagccaggactcgactcactggcagaaaccctctaaggagacacttaccgacctggcgggcagcaggcaggcgagaa

SEQ ID NO: 677592 - DNA, 143 bp, Homo sapiens
  misc_feature (133)..(133): n is a, c, g, or t
cctgtgtgatctagagatcccccggtacgagcggtctcacacaggccacagagctggagctggatctaccatgaaagacctctgaatccaggaagagagactgactgagcaacatgttattcatgggtctccnactctgttgt

SEQ ID NO: 677593 - DNA, 134 bp, Homo sapiens
aaggaagacctgtgtacacacaaaaacctgtacactaaagttgagagcagcattattcatagtcgccaaaacttagaaataatatctgatgtcctctaattaatgaatagctaaacaaattgtgatacattcat

SEQ ID NO: 677594 - DNA, 559 bp, Homo sapiens
acgcccaccgcgtacaaataaaacactatttaatcttccagatatcactttttgtcaaactcatagagttatgaatggaccttaccatactggtgctttctgactgagctcctctctactctgaatgcgagagaccctcataggtaggcagaaatatcgcccctattcagccggaagaagttatagaggatggatcttcgtccctctgcaacccttagaattaagggttctcttataaaagggaagggggaaaatgttggaggcgtgtgacccagagctccatctttaacaggagcagggtaaaatgaggctgagacctaccatgcagcattcccagagaggaattctatgtcacaagatgagatgggaggttagcacaagatacaggtcataaagatcttgctcgataaaacaggttgcagtgaaggagctggctaaaactcgccaaaaccaagatggtgacgagagtgacctctggtcgtctttactgctgacgccccatcagcgccatgacagtttacaaatgccatgggaatgtcaggaagttacctatattgtc

SEQ ID NO: 677595 - DNA, 102 bp, Homo sapiens
ggcgggacttaaaataaccctgaaaaataacactggaattccttttctagcattatatttattcctgatttggctttgccggcgcctcttgccgccgttcct

SEQ ID NO: 677596 - DNA, 215 bp, Homo sapiens
ctgtgtctagcgcttcgctggtgatggggcctgtgtcgcgggtcgctgttctgtgtctgcgcttcgtggtgatggggccgtgtagcgggtgctgttctgtgtgtgagcttcgtggtgatggggccgtgtcgcgagtgactgttctgtgtgttagcatcgtgatgatagggacgctactcgcacgggtgctagcacccgatatgaaactcgggaga

SEQ ID NO: 677597 - DNA, 735 bp, Homo sapiens
taatgccggcgcaggctcggtgaggaggctaggtctgaggggagaggctgactggaggaatataggcccccggaggagcatgaaggagaagatctgcagtggtgtctccattgcccagtctcctgcccacactcccgcctgtagccctgagcagagtcatcatgcctcttgagcagaggagtcagcacatgaatgcgctgaagaaggccttgagtgcctgaggtgtatgaggccctggggcctggtgggtgcgcaggtcctgctactgaggagcaggaggcttgcctccatcctcttctactctaggttgaagtcaccctgggtgaggtgctgctgcggatttcacagattcgtccccaagaggtcctcatggtggatgcctccaaaacttcccccaataccatgaattatgcctctcttggagcccaatcctatgaggactccagcaaccaagaagagcgacggggcaaagcagctttctctgacctgcacgtccgagttccaaagcagaattttcaagtagcgacgcgtggcccgagttgggttcactctacttgctccatcactgtatcgcgccacggaagcacggtcaaaatggccggcactggttgtcggactgtcgtgggaaacttgccggatgcccccctcgattcttagcacagtaccagctcctgcagtggtttggcaatggagatatgacatggacccatcgccatgacctttgggagtgctgac

SEQ ID NO: 677598 - DNA, 162 bp, Homo sapiens
gcaggaactgctcctggctgaagaaactaggatgaggctgttgcacacacggagtacagcgaactgcttcactgcctagctctatgctgtaccgcctcgactcctcagcacctaccccactgctggaagcgccagactgagcgcaaaccacggcaaacgaaa

SEQ ID NO: 677599 - DNA, 167 bp, Homo sapiens
cagttcgccagggataaccctggaggatacagcatacataaggagcatagaattcacccttttaaagtatacacgtccggtggtcttacattcagagttgtgcatccgtcactaattgcagaacgttttcatcacctcaaaaaggaacccatacgcccaggtcagca

SEQ ID NO: 677600 - DNA, 417 bp, Homo sapiens
ggggtgtacgattacagaacaggctcctctagagggatatgaagcaccgccagttcttggagttttaagctggtggttcgtagtgttctgggcgagcagcttggttggatttaactggtggaggtttagggctaagcatagtggggtatctaatcccagttggggtcttagctatggtgtgtccagatatgttaaagccactttcgtagtctatttggtgtcaatgggagttttttacaactcaggtgagttttagctttatgggggagggggtgatctaaaacactctttacgccggcttctatggactggggttaatcgtgtgaccgcggtggctggcacgaaattgaccaacccgggggtaagtatagcttagttaaactttcgttcatggctaaaggttaatcactgctggtt

SEQ ID NO: 677601 - DNA, 340 bp, Homo sapiens
aggggggcccgatgtctgttacagagcgtgttggcgatatgcactgtctgtgcagcgttggtgcacagctagactcaaagtgcttgcatgccagctcttcccctgtacagcctggattaacactgatgctagcgagactcctttgcacaagtgattagctttcgtaactaccacagctttcttactgctagtcattctgtgatgggattatgctaggtgcttgaactccttaactccagttccttggctatctactgagtacatactgaataaggcaataattgacttacctcttttgttttgctcccctgtggtcgtattctaggggtactgaccgtcg

SEQ ID NO: 677602 - DNA, 225 bp, Homo sapiens
ctagaataaaaaacaagaagcaacaaaacaaaaagctaccctgtactgtgtttatcacctccttttagttccacccctgaacccccattccctggtgtccttctatagagatgaagaagtaataaggaaacatctttcatagccactttaattaagagaaactgatatacattattttttacttttgaaagatgacttataaaaaccctgaagattgtcggctgg

SEQ ID NO: 677603 - DNA, 465 bp, Homo sapiens
taaacgtgcacctcataggggtgctcggaggctcaaataaagcagagccagggcaaaaaaaaaaaaaaaaaaaaaaaaaaattttgtctgggccgccctcgggcccccgaaaaaggtttttaaaacccttctgtgttgggggggggggccccggggagggaaccggggccagtgttgtcccaagagaacatcgggcgccaggaatacattgggtgcgcgggggttctcccaccaaaaaaaaaaaaccgccgcggggggcggcacacgcggggcgttgctgtgaaacaaactcccaaaggggggcgtccggaggggcgacgcgacgggggcgtctcctcacccaagggaggtgcccacgcggagcgcccgatactcaaaactatccggccgccgcgcgaggctagctgaacaaagcacataaacaaacagcaacaagacaacaaaagcaaaaagacgaaccaaagc

SEQ ID NO: 677604 - DNA, 269 bp, Homo sapiens
  misc_feature (21)..(21): n is a, c, g, or t
  misc_feature (136)..(136): n is a, c, g, or t
  misc_feature (161)..(161): n is a, c, g, or t
agaacacagaagtataggctnaagacagagacggacgacggatcttctggtccagacatatcatgcagtagtctcccggacagctgagcctacgaagggaggcgttcacctggagtcattaaaggtagtcacgccnagaaaaaatccaagtccaagctggnagagaaaagcgaagactccatagcttggtctggtgtagaacattccactccagactttgaacccggttaagaagaatcctgggtctcaatcaagaagtttattcctgg

SEQ ID NO: 677605 - DNA, 133 bp, Homo sapiens
gtgcatcttaatatagactagcttactctatagcttgtataatgacgatccctctatacggactccacttcttactccctaaagcccatgtagaagccccccatcgctgggtcaatagtacttgccagcagta

SEQ ID NO: 677606 - DNA, 202 bp, Homo sapiens
ggggttttagccttttttaaaaaccccctttaaattaaatttggaaccaagaaactttaatcaaaaggttagccttgaaattgtgaacttttggaaaagttattagggaagtttgcaactaaaataaacctgtaaaattattatggttggttttaaaaaattaatgaaaaaaaaaaatttttgtccccctgaattatgggta

SEQ ID NO: 677607 - DNA, 936 bp, Homo sapiens
  misc_feature (26)..(26): n is a, c, g, or t
agaaaagtgtgtaaaaaaagaagganggtaaggtaaggaattaaagggatatgggttagaaaaaggaaaaagaaatgagagtaatggtgaaggaatggtatatggaagaagaaaagggagaaaagaggaaaaaaaaaagaaaagaaaaaggaagaaaagtgggaatggagaagatgaggaggataggggtgatataatggaagatggatgatgaaaaatatgagaatgataaagaattagaaaagataagaagagagaggaaataataatggatggaaataataaaaatatgaaaagataaaataaaaaattatgaagaaaagattaagatgttataagaggagaatttgaaattggaagatgagataagataaataatggatggaagtgggtaattagatgtgagggaaaaggaggaaaagtggataaggatattaatggagaagggagaaatggtgaagataaaagaggggatatataaaagattaaaggtggaagagaagaaataaaagaaggaaatgaggatgtttgtgggagaaaaggtgtggaaagagtaaaaaaggaaagatgaaaattttgaagaaagagggaagtaagtgaaatttatggaaaagaaagaatagaagtgatgaatgggaaataaaaagtgaatagtaaaggtaaaaaatgtaatgaatgagaagaaaataaataaatttatatttgattttagaggatagaattgaggatagattatatttaatttgtaagattatttgataagaatattttgtaatgaaaggatatagaaagaaaattggaagtgtaaagagtaaaattaattttatgtaaataaataaagaatggtgggtaaatggaaatgtgttagttaatgaattaagttgagtaaaaatgaaagtttaatataaagaaatgaagttaattagatgaaaatat

SEQ ID NO: 677608 - DNA, 152 bp, Homo sapiens
gacctctaaatcccttgtaaatttaactgttagtccaaagaggacagctctttggacactaggaaaaccttgtagagagagtaaaactttaacaccatagtaggcctaaggcagccaccaattaagaagcgttcagctcaacaccctaccta

SEQ ID NO: 677609 - DNA, 443 bp, Homo sapiens
taataggcacgctgtagagcagtgtgctgtatcccagccactcgggaagatgaggcagagaactgcttgaacccaggaggcgaaagctgcagtgagccaagatccagccactgctctccagcatgggacaaagagcaagaccctgtctcaaaaaataaaaataaaaaataaattagccaggcatggtgggcacacctgtagtcccagctacccaggacgcagaggtgggaggattgcttgagcccaggaggtgagggctgcagtgaggtgtttgctactgcacaccagcttgggcaagactcagtctcaaaaaaaaaaggagagtttggaaccattcttggaccccggtctctattaaaaattccaaaattaagtggggcttagggttgtgtccctgtgtccccggttaattgggaaggtggaggggggggattcgttaaggc

SEQ ID NO: 677610 - DNA, 186 bp, Homo sapiens
atccaacgctgctcacactggggcatgcagcaggttccgagatagaaatctggattccaaagcacaacagatctttggacaacaaagtgtctcaggaatacacaatgactcagcagtacagaaatttaagaaaacttttttttaggtttttaagtacaatgtcatgaagtagagtacaattctggt

SEQ ID NO: 677611 - DNA, 282 bp, Homo sapiens
ctggtctctttgtttctgtgtctttgttttttgtttttaaagacagagcctcgctcttattgcccaggctggagtacagtggcgcaatcacggctcctggcagcctgaaacttgtgggctcaagaaatcctcctgattcggcctcccgggtgcggtggtgcgtgcctgtggtcccggctgcacgggaggctggggtggggggatcccttgagcccaggttgcagtgagccgggatcgagccactgcactccagcctgggtggcagagcaaaaccctgtatca

SEQ ID NO: 677612 - DNA, 138 bp, Homo sapiens
gagcagagattacgtcactgcactgtagtctcgctcttgtcacccagactgtagtgcagtggcacgatctgggctcgatgcaacctctgcctcccgggttcaagcaattttcctgcctcggaagagacggggtttcac

SEQ ID NO: 677613 - DNA, 168 bp, Homo sapiens
cgtggtggttctgcgcctttgtgggggtgcatcctattagtggacctaagagccagaggttgtgtagcggcccctgttctcacctgccagtctcgtcagagatggggttgctgcagtgttggcgtaggggcagagggagggagcctaggtcactccaataaaaccagc

SEQ ID NO: 677614 - DNA, 125 bp, Homo sapiens
agattttttctcaagagttgtgcttttgtgttatttgttttcactcaaatatttgcctcattattcttgttttaaaagaaagaaaaacaggccgggcacagtggctcatgctgtaatccagcact

SEQ ID NO: 677615 - DNA, 174 bp, Homo sapiens
attctgatagggagagaacagaagagggattacggcccagagaattagcagcttgacatatgctgagagactagctaagcactggctgaatgaatatgtaggacaaccatgaccaggagtgtcatctccagaattattggggtcacatatgtcccttcccagtccaatgccatc

SEQ ID NO: 677616 - DNA, 332 bp, Homo sapiens
  misc_feature (318)..(318): n is a, c, g, or t
tgtgtatgcacaacctagggtcagttctgcaggttataagccatttaccaagatagttgtaggtaaagaagggcagatttattagagaaattgtgaaaatatgttgcagtgggcagctcagcagagaaggggctacctgcaaagaggcaagggctggaggaaagttttatagggtcctgctgaagggtgctacgtgtggaatgaggtcattgtgcccgcaggttgtttgtgattagctgtttctaacaattgttcatacaataattgttcattattgttctcaacttggggctctccccaacctggggacccttcctntattggttgctacc

SEQ ID NO: 677617 - DNA, 2342 bp, Homo sapiens
  misc_feature (631)..(631): n is a, c, g, or t
cggaagtccttccagaaggagcttgtgatggccctactgaagatggactgccaggcctggtggtcagactcatccaggacttgtgctcctgaccacggctgtagaggtggcccagcgctggcgggagctggctgagaagctggccaaggtctccaagcagcagatggacgcctacgagtctccccaccgggacaggaacggggttgtggacagcgaggccatgtggaagcctgcgtatgacttcttactcacctggagccatcagatcggggacagctaccgggatgtcatccaggagctgcacctgggcctggacaagatgaaaaaccccatcaccaagcgctggaagcacctcactgggactctgatcttggtgaactccctggacgttctgagagcagccgccttcagccctgcggaccaggacgacttcgtgatttgaatgggtcccctcccctcctgctgctctggagtgcaagccctcttctgccctgcgtgccctgctgtcaccgcggagctgaagagggaggaaggggcggctgctcagacagatttagggcccgccagctaggctacacccatcatgcgccgccctcctccatcgagggagaggcctgaagggactgcctantgcagctcgttgccaatcacatagctttctatttgttaagtataaatttaaatttaaaatcacttttttaacgaatggggggaagggatctatgagaaaggtggtatctaatttttttatggaccataaaggtttaaaagaaaataggggcacaggctgttgaggtttttatgttgttatagacctttttaaattatgttagagatgtatataggtatttaaaggtcactgggagcgtttctgattcccggccacactttgcatttcaacactcagcccggaaagatgctcgttcggttgttggacctctttcactccctgcgtgtaagaaggtgaatcacgtgggaaaaagtggcttttcagtaaacgggtacagctcattctttctgagaaggccccaggtcctgctccctcctcggatttgattgtcttccgtgctttgcctcactcgtagtaaatgaccatccatagaatatgtgaatctttggtgagcttcagtgggcagagtgaagtcccgcattagcatttaggtgccctgagctgtttctgccaatagattagaaagcagccatgagttgacagtctttagggcccctgccagtgtgcaattagtcattgacaagaacaatgccatttgagagtgaggtggtccctgctgctacgaggccattgtactgttttttccttgaggtcaaagcagtgcttcccatagagtttgctgcctcttctgtggacaggaagaaaacttcatgaccgaatcagagccttggtggccactgactctcgtgcttattgcagatgctgtggttggcctcacaagcaacgccttatgctgatgtgcagaggtgccagctgccatttgccaaactctgcatttcatttcatctaaggcttaacccctcttccttcctggtgtacctgtgtctcctcggaaggaagtcatagtttagatgaaaccattttttgtacaatgtaaagatcatctgagcaagatgagcattttgtaaaaatgaaaatgtgactcacataaaatcaggaacttgacacagtgttgcattaataactttagggtgcagacatgctgtgtgaatctcacaatgcgtcgtagatgtcgcgtgttggaagggagcaggaggaaggactgatactggcaaatcagtagagtgaggtgatccttagcaacgtgccaggacacttcctgtgtgcctgcagttgtcagggaccatttgggatcccgaatctcattctctaaaactgctttcttgaaacatgttacttccttagtataatcaatgtatactcccttactggcctgaaacgttgtatagctacttattcagatactgaagaccaacggactgaaaaaaagaacaaacattagctattttatgctgcaagaaccaggacacacaattcgccaatcatcccaccatataaccttcgattgtgcttctcaactccaccccataatttctcccagagaccatctatcaccttttccccaaagaagaaacaaaaccagttgcaccttaaaccatggatattttttcctcaggggctttaaatagtttcctatgcaacgtgtcttgtagcacaaataaaattctacaaaagttgcagtaaattttatttggatattttaacctgttaagtgtgtgtgtgttttctgtacccaaccagactttaaataaaacaaacatgaaacctaaaa

SEQ ID NO: 677618 - DNA, 129 bp, Homo sapiens
tcagagtgtggcagctgggggcagcacatgcaatgtgagcagcgctgatggcagaagtgcacaactggacaccagaacgcagatctggacagatggactttacccctgacagtgagcgtggccgaggtc

SEQ ID NO: 677619 - DNA, 1466 bp, Homo sapiens
ctccctgcgtgtaagaaggtgaatcacgtgggagtgaaagaggtccaacaaccgaacgagcatctttcactccctgcgtgtaagaaggtgaatcacgtgggaaaaagtggcttttcagtaaacgggtacagctcattctttctgagaaggccccaggtcctgctccctcctcggatttgattgtcttccgtgctttgcctcactcgtagtaaatgaccatccatagaatatgtgaatctttggtgagcttcagtgggcagagtgaagtcccgcattagcatttaggtgccctgagctgtttctgccaatagattagaaagcagccatgagttgacagtctttagggcccctgccagtgtgcaattagtcattgacaagaacaatgccatttgagagtgaggtggtccctgctgctacgaggccattgtactgttttttccttgaggtcaaagcagtgcttcccatagagtttgctgcctcttctgtggacaggaagaaaacttcatgaccgaatcagagccttggtggccactgactctcgtgcttattgcagatgctgtggttggcctcacaagcaacgccttatgctgatgtgcagaggtgccagctgccatttgccaaactctgcatttcatttcatctaaggcttaacccctcttccttcctggtgtacctgtgtctcctcggaaggaagtcatagtttagatgaaaccattttttgtacaatgtaaagatcatctgagcaagatgagcattttgtaaaaatgaaaatgtgactcacataaaatcaggaacttgacacagtgttgcattaataactttagggtgcagacatgctgtgtgaatctcacaatgcgtcgtagatgtcgcgtgttggaagggagcaggaggaaggactgatactggcaaatcagtagagtgaggtgatccttagcaacgtgccaggacacttcctgtgtgcctgcagttgtcagggaccatttgggatcccgaatctcattctctaaaactgctttcttgaaacatgttacttccttagtataatcaatgtatactcccttactggcctgaaacgttgtatagctacttattcagatactgaagaccaacggactgaaaaaaagaacaaacattagctattttatgctgcaagaaccaggacacacaattcgccaatcatcccaccatataaccttcgattgtgcttctcaactccaccccataatttctcccagagaccatctatcaccttttccccaaagaagaaacaaaaccagttgcaccttaaaccatggatattttttcctcaggggctttaaatagtttcctatgcaacgtgtcttgtagcacaaataaaattctacaaaagttgcagtaaattttatttggatattttaacctgttaagtgtgtgtgtgttttctgtacccaaccagactttaaataaaacaaacatgaaacctaaaa

SEQ ID NO: 677620 - DNA, 2253 bp, Homo sapiens
  misc_feature (631)..(631): n is a, c, g, or t
cggaagtccttccagaaggagcttgtgatggccctactgaagatggactgccaggcctggtggtcagactcatccaggacttgtgctcctgaccacggctgtagaggtggcccagcgctggcgggagctggctgagaagctggccaaggtctccaagcagcagatggacgcctacgagtctccccaccgggacaggaacggggttgtggacagcgaggccatgtggaagcctgcgtatgacttcttactcacctggagccatcagatcggggacagctaccgggatgtcatccaggagctgcacctgggcctggacaagatgaaaaaccccatcaccaagcgctggaagcacctcactgggactctgatcttggtgaactccctggacgttctgagagcagccgccttcagccctgcggaccaggacgacttcgtgatttgaatgggtcccctcccctcctgctgctctggagtgcaagccctcttctgccctgcgtgccctgctgtcaccgcggagctgaagagggaggaaggggcggctgctcagacagatttagggcccgccagctaggctacacccatcatgcgccgccctcctccatcgagggagaggcctgaagggactgcctantgcagctcgttgccaatcacatagctttctatttgttaagtataaatttaaatttaaaatcacttttttaacgaatggggggaagggatctatgagaaaggtggtatctaatttttttatggaccataaaggtttaaaagaaaataggggcacaggctgttgaggtttttatgttgttatagacctttttaaattatgttagagatgtatataggtatttaaaggtcactgggagcgtttctgattcccggccacactttgcatttcaacactcagcccggaaagatgctcgttcggttgttggacctctttcactccctgcgtgtaagaaggtgaatcacgtgggaaaaagtggcttttcagtaaacgggtacagctcattctttctgagaaggccccaggtcctgctccctcctcggatttgattgtcttccgtgctttgcctcactcgtagtaaatgaccatccatagaatatgtgaatctttggtgagcttcagtgggcagagtgaagtcccgcattagcatttaggtgccctgagctgtttctgccaatagattagaaagcagccatgagttgacagtctttagggcccctgccagtgtgcaattagtcattgacaagaacaatgccatttgagagtgaggtggtccctgctgctacgaggccattgtactgttttttccttgaggtcaaagcagtgcttcccatagagtttgctgcctcttctgtggacaggaagaaaacttcatgaccgaatcagagccttggtggccactgactctcgtgcttattgcagatgctgtggttggcctcacaagcaacgccttatgctgatgtgcagaggtgccagctgccatttgccaaactctgcatttcatttcatctaaggcttaacccctcttccttcctggtgtacctgtgtctcctcggaaggaagtcatagtttagatgaaaccattttttgtacaatgtaaagatcatctgagcaagatgagcattttgtaaaaatgaaaatgtgactcacataaaatcaggaacttgacacagtgttgcattaataactttagggtgcagacatgctgtgtgaatctcacaatgcgtcgtagatgtcgcgtgttggaagggagcaggaggaaggactgatactggcaaatcagtagagtgaggtgatccttagcaacgtgccaggacacttcctgtgtgcctgcagttgtcagggaccatttgggatcccgaatctcattctctaaaactgctttcttgaaacatgttacttccttagtataatcaatgtatactcccttactggcctgaaacgttgtatagctacttattcagatactgaagaccaacggactgaaaaaaagaacaaacattagctattttatgctgcaagaaccaggacacacaattcgccaatcatcccaccatataaccttcgattgtgcttctcaactccaccccataatttctcccagagaccatctatcaccttttccccaaagaagaaacaaaaccagttgcaccttaaaccatggatattttttcctcaggggctttaaatagtttcctatgcaacgtgtcttgtagcacaaataaaattctacaaaagttgcagta

SEQ ID NO: 677621 - DNA, 210 bp, Homo sapiens
gatctcctagtttgagaagttcaatagcacgtgtaaccttgactcctgggctcaggtgatccccctcccacctcagcctcccgagtagctgagactacttgtgtgcaccactacacccaactgatttttttattttttgtagagatggagttttttatgttgcccaggctggttgcgaactcctgggctcaagcaatctgtctgcctcag

SEQ ID NO: 677622 - DNA, 673 bp, Homo sapiens
tccccccctattccttttttttttttggtttaaaaaccctttttggggcccccgggggggccggggccccggggggggaacccgggggggggttttgggggggggggggggcccccggtgtgagggggaaatgggggaaacaacgtcctctctttccagagaggggcgggggaccggagacaggcggaggaggtcttcaaaaggggctccaccgaggggggcccctgggcaaaatttctccggggggtatgagcgccccccggtggtcgtggtgggttcatccacacgcgaactacccgaccataagaggaaaccatttctctgacgacaccggatgtgggcaaacacaacgccgtagtggcccttgtggtgcaggagagatgtggggcgctcccccaccacaataaccccagaggggggcctgtgaccacctagaggaagaggagacaccagggggcggggctgtgcgacaaaatatttgtgttcccccccaaaaaaagcctcctgtgtggcgcgaggggaacacaagcgaaaactacttttgtggccaagtaatgatggcccccaaggagggtggggtgtgccccccccttgggagcactttaaaccccaccaaaccggaggtgtaccagtggagctccccaaaacaaagaggcctcaaccggtgagaagc

SEQ ID NO: 677623 - DNA, 2342 bp, Homo sapiens
  misc_feature (631)..(631): n is a, c, g, or t
cggaagtccttccagaaggagcttgtgatggccctactgaagatggactgccaggcctggtggtcagactcatccaggacttgtgctcctgaccacggctgtagaggtggcccagcgctggcgggagctggctgagaagctggccaaggtctccaagcagcagatggacgcctacgagtctccccaccgggacaggaacggggttgtggacagcgaggccatgtggaagcctgcgtatgacttcttactcacctggagccatcagatcggggacagctaccgggatgtcatccaggagctgcacctgggcctggacaagatgaaaaaccccatcaccaagcgctggaagcacctcactgggactctgatcttggtgaactccctggacgttctgagagcagccgccttcagccctgcggaccaggacgacttcgtgatttgaatgggtcccctcccctcctgctgctctggagtgcaagccctcttctgccctgcgtgccctgctgtcaccgcggagctgaagagggaggaaggggcggctgctcagacagatttagggcccgccagctaggctacacccatcatgcgccgccctcctccatcgagggagaggcctgaagggactgcctantgcagctcgttgccaatcacatagctttctatttgttaagtataaatttaaatttaaaatcacttttttaacgaatggggggaagggatctatgagaaaggtggtatctaatttttttatggaccataaaggtttaaaagaaaataggggcacaggctgttgaggtttttatgttgttatagacctttttaaattatgttagagatgtatataggtatttaaaggtcactgggagcgtttctgattcccggccacactttgcatttcaacactcagcccggaaagatgctcgttcggttgttggacctctttcactccctgcgtgtaagaaggtgaatcacgtgggaaaaagtggcttttcagtaaacgggtacagctcattctttctgagaaggccccaggtcctgctccctcctcggatttgattgtcttccgtgctttgcctcactcgtagtaaatgaccatccatagaatatgtgaatctttggtgagcttcagtgggcagagtgaagtcccgcattagcatttaggtgccctgagctgtttctgccaatagattagaaagcagccatgagttgacagtctttagggcccctgccagtgtgcaattagtcattgacaagaacaatgccatttgagagtgaggtggtccctgctgctacgaggccattgtactgttttttccttgaggtcaaagcagtgcttcccatagagtttgctgcctcttctgtggacaggaagaaaacttcatgaccgaatcagagccttggtggccactgactctcgtgcttattgcagatgctgtggttggcctcacaagcaacgccttatgctgatgtgcagaggtgccagctgccatttgccaaactctgcatttcatttcatctaaggcttaacccctcttccttcctggtgtacctgtgtctcctcggaaggaagtcatagtttagatgaaaccattttttgtacaatgtaaagatcatctgagcaagatgagcattttgtaaaaatgaaaatgtgactcacataaaatcaggaacttgacacagtgttgcattaataactttagggtgcagacatgctgtgtgaatctcacaatgcgtcgtagatgtcgcgtgttggaagggagcaggaggaaggactgatactggcaaatcagtagagtgaggtgatccttagcaacgtgccaggacacttcctgtgtgcctgcagttgtcagggaccatttgggatcccgaatctcattctctaaaactgctttcttgaaacatgttacttccttagtataatcaatgtatactcccttactggcctgaaacgttgtatagctacttattcagatactgaagaccaacggactgaaaaaaagaacaaacattagctattttatgctgcaagaaccaggacacacaattcgccaatcggggggggggggggggggggattattcttctcaactccaccccataatttctcccagagaccatctatcaccttttccccaaagaagaaacaaaaccagttgcaccttaaaccatggatattttttcctcaggggctttaaatagtttcctatgcaacgtgtcttgtagcacaaataaaattctacaaaagttgcagtaaattttatttggatattttaacctgttaagtgtgtgtgtgttttctgtacccaaccagactttaaataaaacaaacatgaaacctaaaa

SEQ ID NO: 677624 - DNA, 683 bp, Homo sapiens
taagtaaaacggagtttggctcttgttgcccaggctggagtgcaatggcacaatctcagctcacgggaacctccacctcccgggttcaagtgattctcctggctcagcctcccgagtagctgggactacaggcacgtgccaccacacccagtaatcttggtattttagtaagagagggggtttcaccgtgttacgcaaggatggtctcgatctcctgactttgtgatccacccgccttggcctcccaaagtgctgggattacaggcgtgagccaccacgccgggccttattatattcttgaaaattggccaagagagtagatttcaaatgttctcaggacaaaaaaattgacaacagtgaggtaacggtttatgttaagtagctcaatttagccatgggtgcaaggtgtacctatttcagaatgacatgttttacatgataacatattgtttaaattttataatttctgcacgctaaaacaaaacaaaaacaatttcccaacgggcttgaagatccggcggcaaaaaggggccaaaaacccattaaagggggggcgccggaaccacgcttttggtccccttaagagaagggtaacattcacaacgcatggagaaaaccatgagacaaaattgtccctgtggaacacttgaacacgccacaaattcacccaaaagccagaaacg

SEQ ID NO: 677625 - DNA, 428 bp, Homo sapiens
ctactgactaacacggagtgaacggcgcatcagaccagcacagaggacggcatcaccattgatattagtttggcaaaaaaaaaaacaaattgtaaaaaagaagaatcaaaagggaacacaagcaactctacaatccgattgagtgggcgcaggactcaaaactggccggcactgctcgggtcgcactgcaggaggcgcacaatgaacgggtcgactatgggctcctcgaatgacctcttccaggaagagtttcccgtctctatgggtgtccatctgacggaagaatcttttctgttcttttctctggggtaaactcatcttcaggcatttccattacagaggaaaccatcttatagatggcctgcacgatctctagcatctctgccttgatgatatagccattcccgtccaggtcgtccatgctgaag

SEQ ID NO: 677626 - DNA, 897 bp, Homo sapiens
gaagccttcatgcagatcgtgcttagcgatgcatgggtcactgtatgcccgaattcgctagtccgtcgcatcaaaaggttatgccctcttccttcctggtgtacctgtgtctcctcggaaggaagtcatagtttagatgaaaccattttttgtacaatgtaaagatcatctgagcaagatgagcattttgtaaaaatgaaaatgtgactcacataaaatcaggaacttgacacagtgttgcattaataactttagggtgcagacatgctgtgtgaatctcacaatgcgtcgtagatgtcgcgtgttggaagggagcaggaggaaggactgatactggcaaatcagtagagtgaggtgatccttagcaacgtgccaggacacttcctgtgtgcctgcagttgtcagggaccatttgggatcccgaatctcattctctaaaactgctttcttgaaacatgttacttccttagtataatcaatgtatactcccttactggcctgaaacgttgtatagctacttattcagatactgaagaccaacggactgaaaaaaagaacaaacattagctattttatgctgcaagaaccaggacacacaattcgccaatcatcccaccatataaccttcgattgtgcttctcaactccaccccataatttctcccagagaccatctatcaccttttccccaaagaagaaacaaaaccagttgcaccttaaaccatggatattttttcctcaggggctttaaatagtttcctatgcaacgtgtcttgtagcacaaataaaattctacaaaagttgcagtaaattttatttggatattttaacctgttaagtgtgtgtgtgttttctgtacccaaccagactttaaataaaacaaacatgaaacctaaaa

SEQ ID NO: 677627 - DNA, 289 bp, Homo sapiens
aggcggccttgcggccgatcgactccggcgggaggtcgtcgaggtcgaggtcgtcgcgctttgcgccgtcctccttctccacgtccgcggtggcgataccgaagttgagcagcttgtgcgtgcccttcgtgaagatgatgttcgacggcttcacgttgcagtgcgtgacgcgcgcttcgtgggcagcggcgagcgcggcggcggtgtcgatgcccacctcgacggcgagggcgatccgctttgcatggcccggcggcagatcgacgatgggcttctccgcgagctgcct

SEQ ID NO: 677628 - DNA, 234 bp, Homo sapiens
cccccttgggggttttaaaaaaaaaattttgggcagatttggtcctcctcctggtccttcccctttttttacaaacaggggtccatggagggtcctggttaacctttttaaccaaaaaaaaaatagggatttggtaaacctgaggggatatttcccatggtatccctcccaaatttttcattttcatttaggacttttttaaagcctttggtggagtcctcatcctcatcttta

SEQ ID NO: 677629 - DNA, 1270 bp, Homo sapiens
  misc_feature (631)..(631): n is a, c, g, or t
cggaagtccttccagaaggagcttgtgatggccctactgaagatggactgccaggcctggtggtcagactcatccaggacttgtgctcctgaccacggctgtagaggtggcccagcgctggcgggagctggctgagaagctggccaaggtctccaagcagcagatggacgcctacgagtctccccaccgggacaggaacggggttgtggacagcgaggccatgtggaagcctgcgtatgacttcttactcacctggagccatcagatcggggacagctaccgggatgtcatccaggagctgcacctgggcctggacaagatgaaaaaccccatcaccaagcgctggaagcacctcactgggactctgatcttggtgaactccctggacgttctgagagcagccgccttcagccctgcggaccaggacgacttcgtgatttgaatgggtcccctcccctcctgctgctctggagtgcaagccctcttctgccctgcgtgccctgctgtcaccgcggagctgaagagggaggaaggggcggctgctcagacagatttagggcccgccagctaggctacacccatcatgcgccgccctcctccatcgagggagaggcctgaagggactgcctantgcagctcgttgccaatcacatagctttctatttgttaagtataaatttaaatttaaaatcacttttttaacgaatggggggaagggatctatgagaaaggtggtatctaatttttttatggaccataaaggtttaaaagaaaataggggcacaggctgttgaggtttttatgttgttatagacctttttaaattatgttagagatgtatataggtatttaaaggtcactgggagcgtttctgattcccggccacactttgcatttcaacactcagcccggaaagatgctcgttcggttgttggacctctttcactccctgcgtgtaagaaggtgaatcacgtgggaaaaagtggcttttcagtaaacgggtacagctcattctttctgagaaggccccaggtcctgctccctcctcggatttgattgtcttccgtgctttgcctcactcgtagtaaatgaccatccatagaatatgtgaatctttggtgagcttcagtgggcagagtgaagtcccgcattagcatttaggtgccctgagctgtttctgccaatagattagaaagcagccatgactaattgcacactggcaggggccctaaagactgtcaactcatggctgctttctaatctatgtcga

SEQ ID NO: 677630 - DNA, 159 bp, Homo sapiens
  misc_feature (156)..(156): n is a, c, g, or t
gttgaggctgagaaagagcgccaggtgcactccaaagcctgagcatataaaaattaaagaccggagtagagacaaatataaaaatatctcaaagaaagcaaaagcaaaaccctgacactccaaccaacctaacagaagaaataatataaataatantta

SEQ ID NO: 677631 - DNA, 260 bp, Homo sapiens
  misc_feature (35)..(35): n is a, c, g, or t
  misc_feature (69)..(69): n is a, c, g, or t
  misc_feature (92)..(92): n is a, c, g, or t
  misc_feature (98)..(98): n is a, c, g, or t
  misc_feature (101)..(102): n is a, c, g, or t
  misc_feature (106)..(106): n is a, c, g, or t
  misc_feature (110)..(110): n is a, c, g, or t
  misc_feature (115)..(115): n is a, c, g, or t
  misc_feature (118)..(118): n is a, c, g, or t
  misc_feature (133)..(133): n is a, c, g, or t
  misc_feature (140)..(140): n is a, c, g, or t
  misc_feature (164)..(164): n is a, c, g, or t
  misc_feature (166)..(166): n is a, c, g, or t
  misc_feature (227)..(227): n is a, c, g, or t
gacttgtttcaaggcggggttatgcatcagaagcnatcaagggggcggttgttggtattgatttgggtnctaccaactcctgcgtggcagtnatgggnggnnaacnagcnaaggngcnggggaatgccgaagngccaganccaccccttcagttgtggcctttncngcagagggtgagcgacttgttggaatgccggccaagcgacaggctgtcaccaaccccaacnatacattttttgctaccaagcgtgctcattggc

SEQ ID NO: 677632 - DNA, 163 bp, Homo sapiens
gcatactgcgcgcacactagtttcgctttcgaatgtctggatgggagatgaacttgaggataaccaaagcccagagaactctcatccagggagccccgccaacgtgcctatgattctgagaaattcttccacgtttgggtcggggtggaaggtctcagtgacg

SEQ ID NO: 677633 - DNA, 116 bp, Homo sapiens
cggtatgagcccgaattcgtcattcctgggcctttccttaaatctatgcttaacctcttgaggacatagctagaccgttttccaggagtgctgtgcttataggcatgagccaccac

SEQ ID NO: 677634 - DNA, 305 bp, Homo sapiens
ttacagtttccccgctcggttcccgttgcacggttgacgataactaatgctccagcccgagcaagacgtgctgtgcggccgggtagagcaatatacactatgtatagactctgcgacatcagtccgctcggcgaggcagcgtcctcgccatgtccaggcgccttaaccggggaggagggggcgccattcgggaacggcgggctggcccaccaccgttccttggcactcaaggaggcgcgtttgatgccgtgcctgaatggcaccttcccgatatataaagagtttagagaattctttaacataac

SEQ ID NO: 677635 - DNA, 375 bp, Homo sapiens
gcatggtgatgccccatgttagtactggtgcttgtgagtgtagatctgtcaggtctagcacgcctcactgaagattcggattcacctgttgggtgactcggatgatggtcgttctcctgctcgacgctttgatcttagctgctccctctttggtacaggtagagcggatccctcctatgatgtctcggatggtatgttccacatctcctttatgaggagcttccactgtctttccctctgaggctcttcaaggaggagagactgttattatcttctccttctggattccttcagcccaggaactttttcacagatcctagcattgagccccggttcaccatgcttctctgagaactgtaccatccccctctcagc

SEQ ID NO: 677636 - DNA, 341 bp, Homo sapiens
agtcttcaaaaaggaggctgggcgcagtggctcacacctgtaatcccagtttttgggaggctgaggcaggataatcgcttgaactcaggatgcggaggttgcagtgagttgagattgcgccagtgcacttcagccagattttatctaaaaaaaaaaaagggggggcaaggtcccttatgtaatttaaaacagaccttcccttttgcaaatctgaatttgtttatctgggccaggaaaccggacttctctggagagcccatcgcctgagtgtgaggctatgtcacacttagggtaccatgaatgctgcctggaggcaggcttctagtacaagcttgcactcg

SEQ ID NO: 677637 - DNA, 1283 bp, Homo sapiens
  misc_feature (534)..(534): n is a, c, g, or t
gggtttcatatataaatagaccctcctagcgcctgtcctttgtttatgtgggtgacccctcgttctctgatagttttttgcccctctgtggttgtggtgccccctcttgcttcgctcccctccttgtgttttttggtgccgcgcgtcgccatgtcgggatgtttagccaccccgctggggctcctcagtgtctcagcggctccgtctcgcgggagcattctgttatctcgcctttaggtgtgccgccgcgggcgtcagcggatttattatacaaagctgttgttgttgcaccaacacgggttgtcaagctactgctctgattttgtccgcacttttattgggtcccctcactatttttatgagggcgggatacacacctcatttaatggtggacacacatcgtggttgtgttgacactcacactagtacactccacgtcgtgcttgtgtgctcccgcttgtctcgcgtagaattttttctcccgcggggtggattgtcccacatgggtggggtgtttgtcggggttctctcttnttctctcgggagaatagagtcttacagggggctgcgtgcgtcttgtgggggtgggttagggggagcccccttctcactactcttttagtttttccgcgtcgcgtagcttcatttgatgctccccgtcgcgtgttttcgcgcgtgcaatggcggcgcggccaacggcctcgctcatatgacttcttttgaccgcgcggccgcgcatgaggcggtctggtgttttctcgctgaggtctgcccgcgtggcattttttcttctgggcccctcccatttgtctgtgccgcacgacgcttatgtgagggttgtcaccacatccccgcggaggtgaaatagagatctcaatagcccctctcatgttatagacccacacgccggtgtgtataaatgttcgtgcacccccttgttggcacgcgaggttggttttatcacaaaggcccctcggcgcacaagtgtcacacacgtgggagatcctctaattgtggcagacaataagggggggcagcgtggggagactcttgtgtccacgcacagctcggtggctggcacacacacaacacaggagaggtgtccttgcccccctcgccaccgtgcttgtctggggttccacgccttgagaggaagaaaaaaaatgggacccaaaaaaaaaaaattcccacggaggtttggaatgaagaaacacaggggtttgtgtttttttggagaaacccttttttaaaaaaggttccaatataaaaaggttgacctttta

SEQ ID NO: 677638 - DNA, 216 bp, Homo sapiens
tatctagaggatccgtatgcatctgggcagaagagtgaaactcgtctcaaacaaaaagtaaatacataaattaaaaaaaaaaaattcgccaagtgtggtggcatccacctgtggtcccagctacttgggaggctgaggtgagagaatcacttgagcctgggagattgaggctgcagtaaactgtaatcgcaccactctactccagcctgtgtgaca

SEQ ID NO: 677639 - DNA, 381 bp, Homo sapiens
  misc_feature (310)..(310): n is a, c, g, or t
ggcgcacttcttatatgtgggctattaggtttctcctagcatttggtatgatggccagactctagtattgctgaaaagatgtctgagcaatagatgctcatgcgaagggagagctgtcatcgaggcagatgccctaagaatgtctttatggagaagggaagtactaacctggcccgaggtgatgagtagtagcaaagaaggctaaaaacggaagggagagaagcccaacacaggaacctgtttcctgaatattggaacggccagagcaggacacctcttcctgaccaaacagaacagaggcttctacctngagaacatggatgtcttccaaaagatctggggatgcccacctttagggtgatttaataagaaattaagggc

SEQ ID NO: 677640 - DNA, 334 bp, Homo sapiens
atctctagcaggatccccccatattactgacctcatatgaccccttctactcttccccttgatgcttctcctcagcacgcaggacatagtactttacggagtccctcttggcgatatctaccccttggaattgctcttgcattgtctcgcgtgttgatgacttctaggatgagagagctataccttgatttctctgcacagccggttcaggaatgaattctgacaagtagaaaacactggccactagcggcacgttcaacaagctattggcacactgtgtggatagtctcagttcggattaaggcatgcaagcgtcaaggggccgcatgatcat

SEQ ID NO: 677641 - DNA, 771 bp, Homo sapiens
gtttttatactttcagaaactttttgtgttctaaaagtacaattgagccttactgtattgagtgtggcagaattaagtaacatcagtgagcaggccacgtgattacttcatgactgccacgcatttacagattggtgtcaaagacattcactatgtttttatggttcatgttatatcctcgcccaggatgacagccccttaaggccctcctgtttgccctccatgctccaggttccatgcacaggttgtagcatgtcctgcttcctgttattcataaattaatctagggtgtaagggggtcagtggggaggagaacggtcagaatcaaatgtgatcattctaagaataaactgtgaccttgagagatttgcctgctagatgctgcaatagaaatacaaaataagatccccaaggtttaaactgacccagttaggcattctgacattctaaaagccggcaaagcagtttatagtgggataaatgggaatgggaacgtgtgtgtgcctccgaaatagtctaagtatgatcggtgaggtgtatcgtaaaggaagcctcatattacagagttgcttttgcacctaaatttagaatggtattccatgaactgttcctcccttgtactctgcttgtctcctctgctgtacctctttgattaccacacgtctgttgcttggattcagtttggtctacttcctttcagctgtgtatcccagactgtgaatacagaaaaggaaacatttcagttgtgattttaccattgtttcaaattcc

SEQ ID NO: 677642 - DNA, 539 bp, Homo sapiens
  misc_feature (192)..(192): n is a, c, g, or t
ctggaccagtctggtaaggacgttggagctaaagataggcagacaggttgagctgggtctgacaagtgagggctggaaatcttgtgaatgtggtccaaggtttgaacctgtgtcctttggcgaagtttgaacaagtcttgttggttaaccttggttcccctggaaagagacaagccaaagggttgggttaanacaaagggatgacgaaaccgcatccatcagaaaggtggatgaagcctgggtctggtcgaggtaccgtagagcagatctagcaggcgaggtttcaggggttaaggtgagacacaggtatgtatttttgggtctcacaggttaaggtctgagccactgaggtcaggctctggtttgtatcccaagaccgagaagctgtgttaagcatggtgggtagagtttgtcaggtgacatctatgaaaccaggagcatgcaaagataggttgaccggaacagccatggtcaaaccaattaaactgtcctgcagttgaggtcaggcacaggtagaacggatctatcaggtgaggccc

SEQ ID NO: 677643 - DNA, 250 bp, Homo sapiens
ttagctaagattgtgcttgtgaggcgtattataccattgtccgtcctactttaaaagagtactcgcggcaagatactattgacccaccgatgggggcttcgacatggcgctttacgtgagtcataactgtagctctcgttaaaagtatctttactataaaagctattgtgtaagctagtcatattaagttgttggctcaggagtttgatagttcttgggcagtgagagtgagtagtagaatgtttagtga

SEQ ID NO: 677644 - DNA, 955 bp, Homo sapiens
  misc_feature (944)..(944): n is a, c, g, or t
ggagatgcttctagcctcccagtaggaggccccagcgcttgccttcaacctggcaggaggtgtagccacgtcctcatcctccctgagtgctgatattctctctctctctttctcttcctcttctttctctctcttctcctctctttctctcctctgtctctcttcctctcacgtctctttcacatcgtcttctatcattcctcttcctctcttctcattacctcattctactaatatatccccatccatgttcttcatccatcccctccgtcatctcatcgttccatcatcctctctcttcactacatccatctcatctaccccatccttgtcttctccatcccacatccctcctcatcatttccttcatcctcttcttcttctatctctcttaccatcgtcttcattccctttccatgttctcatctttccctcgtaccatctatacatcattccatgatcacatcctaatcattcctatccccatccatctattcatctatacctctccctactcctcatcattacatctactcttatctctcttccttattctctctctctctcctgatcatcaggcgtgtagtggcgtatgcagagttgaggctgatgatgtatgtggtacctttcccagaaaaagtgccagttagaagggagacatggacattcctgaatgctctactcttggttgttacaccaagagacaaatatttgtgcggatacttgtgaagccaaaccagaattgcagaattcttaatgttggttcccctaggaaaaaggccttaagtctctgtacctgagcagtggatttgaggccacggtcagagaaaaggggaaatacaccggatacactgtgggacaagcggtcgagtcccccctaaagtgatgtataactcgcctgggcgctactcgtttaatattcaggttgccgtggggctcctctnaatatatgtgc

SEQ ID NO: 677645 - DNA, 907 bp, Homo sapiens
gtcccttctatgttttcttcctttctttgttcttttttgtttcttcttcctctgccttttctcctcctctccgttctctctcttctctttcggttgttttttcgtgtcttcgtcttcttcccgtgcgccttttctcaccctccgttgttctcattttcgtttcctttttgtttttcttttttctctctcactcttttatcttttctctttgcttttcctctttgtcttttgttttgtttctccgttcctctctttcctctctttcctttttgtgctgttcttctcctcctgtccccctctcactcttctttgtctgcttattctgtcttctcttttttttctcttctcctgtcctccctcctgcgctgcgccgcccccccccctccctcccgtctttttcttcacccgctgcccctcttgtcttcctccctcctttccggctttcttcctccctcctctcgctttctcttctgtcctcccccgcgttcctcttgtccgtcttcctcttcttctttgctctcctccttttctcctccctacttcgcttctgcttctccctctctccccctttacctctccctgtttgtttttttcttcttttgtttctctttctcctctcttctgtctcctctccttgtctgtgttgtctcttgcttctgctttttcctttcctgtttcttttctcttttgttcttgttcttgttggcttcctcgccccctgcctttctttcttgtgttgtttgttttgctcccctttctcttcttcttccggtttcttgaccccctaacccaactcatacaacataacaaacaaatccaacactccacccaatacaactactatagacaaacatatgaatcactaataacataaatataaatataacgacttaaatacacaaataaa

SEQ ID NO: 677646 - DNA, 480 bp, Homo sapiens
  misc_feature (125)..(125): n is a, c, g, or t
  misc_feature (167)..(167): n is a, c, g, or t
  misc_feature (170)..(170): n is a, c, g, or t
  misc_feature (258)..(259): n is a, c, g, or t
  misc_feature (263)..(265): n is a, c, g, or t
  misc_feature (282)..(282): n is a, c, g, or t
cccaggattatcgctctccacccaccccctctgcgcgtatgtgaggctgcctggagccgactgcatagggcccacctgcccagcagtgccttgggggacagtcctcgggcagaacgcgaagcccnaagagcctctctggccccagctcttgtagacctggagtctgnacncatcgcccggagcacagccctgcaggctgtgtagacacccctccctctttagggagaccaggatgcgtcccgtccccacctggctctnnccgnnntgtgctcactcccccancctgcccctgcttaaccagcaggttccccttgtgtccctgtgatgtgcacgaaggtcccattgtagaagcttggatctgccatccctgcagacactgtgggtatcgaggactgtgtcatctgtccggaaattcacagttaggtgactgctaccccccaagaccactgcacggtggaggcgtgccacaaaggaaggtcc

SEQ ID NO: 677647 - DNA, 313 bp, Homo sapiens
agctctgaattcgatctgggcggtcaccatccattacgcaaccatggtggtccccgctacgagaggtcaacatattgatgccagaactgggggcggacacccgatcggcatagcgcactacagacacagaactcctgggatcaagtgatctgcctgtctcagcctcccaaagatgccgggattacagtcattattcttcacaagccctcaattttcattagaaatgaagtctcgctctgtcgcccaggctggagtgcagtggcgtgatctcggctcactgcacgctccacctcctgggttcacgccattctcg

SEQ ID NO: 677648 - DNA, 174 bp, Homo sapiens
actctgcgatggctgtgagtacgggtctgtaacctctgacttgtcttgttgccatggatgaaccagcacactttccccatatctggtttgcttcttctatcacggttaacagacattatctgatatttactagggaccctgaagatgcttggtggccctgaagattgttggtgg

SEQ ID NO: 677649 - DNA, 102 bp, Homo sapiens
tcatgtatacttataataactaacacaaacacacaaaatgtgtattgcatctgacaagtaggaataggagataacaccagtaaaatatactttacagtttat

SEQ ID NO: 677650 - DNA, 408 bp, Homo sapiens
tcctgaccacgcatcaggctattctctccacattactaattaagaaagatcactcaaatccttcctgcaatggagaagacttgcttgcttcctggtgactttccctaatttatttttaaaccacgtcaagcatcctgttggctcctgcacagggatcctactgcattcacatttttcacatggaactttgtgtggacttagaagacagaaactcgtacataaataattcacaaagaaagacgataggatctagtaatgtgggcaaattctgtgaaatggttacctgaattataaattataagggtctataaagtctcagttttcagaaggcttttaccaaatccaataattaagtgcattgccagaactttctagattctgagctgctttccagcagggacccactcg

SEQ ID NO: 677651 - DNA, 409 bp, Homo sapiens
catagataagagtgtgcacatactatacttttcagttataaaagaagaagtacccacaccaagataaactaatgaaagaccggttggtctccatctctggtaaatgaggaaagggccaaagtgattcttggattccaattcgaaagggtgtccgtgggccaatgcccagggtctccaattgggagcagtcaagctgagcatttctcggacgtggtgctcctaggacagggcggtcagtaataggtcttaagtgactgctgggggaggttgaaggcatctggcaatggcacatgccatttcatacttagtcatcggttcatggccagaccagtgaagggttcccttaatggagggatccagcattctcttctcggctagctgcgggcacacaggggccacatcttccaag

SEQ ID NO: 677652 - DNA, 644 bp, Homo sapiens
cacgatacaacggagacagagaaaagaaacagaagaaaaaaagataaaataaaaaaaaacacaaaaaaaaaagaaacagaaaaaaacaagaaacaagacaaaacaaaaaaaaaacaaaacaaaaagaacaaaaaaacaaaaagaaagaaaaataaaggagagaaggagagacagaaaaagagaaggaagacaaaaacagaagaagagaaaaagaaagaaagaacgaaagagaaatggaaacgaaggaaagagaacgcgaaaacacagaaaagagaggaaaaggagaaaaaggaaagcaaaaaagagatagagagaagagagaggagaaaacaggaacagaagagagacacagaagaaagaaagagaaagaagaacgaaagagagagatagaagaaaaaagagagaagaaacaaagcaaaaaaaaaaaaaagcaaaaaaagagagagcaagagaaacagaaggaaaacaaaacaagacaaaaaaataaaaaaaaaagaaaaaaaaaaaaacaaagaaagaacaaagaaaggaagaaagaaaagagaaaaagaaaagaacagaaaagaagaagaacgaaaaagagagacaaaatgaacaaagaagacaagaaaggacaaataagaacaagaaaacgagcaaaacaa

SEQ ID NO: 677653 - DNA, 1294 bp, Homo sapiens
tgtggtggctcacacctataatcccagcactttgggaggccaaggtaggtggatcacctgaggtcaggagttcgagaccagcctggccaacatgcatgaaactccatctccacttaaagaaacaaacacaaacaaaacagacagcaacagaaaattaagactggggctataggggagtgtgacacggcgcggccaatatcctaaggcacacccacggaggagacggcgtgaagacgcggcacgagacagacatccccaggttgagacacccgtggagacgcgcagagaactgttcggccgcgtggtgggcccacagagatctggggccccatggggagacatcccaggaaccccgggcggaacacacaaaaccgcaaaaaataggccaatgcttccacaacacacaaacaacacaaccacaaagaaagatagacaaaataagacaagacccattttgtttgatacagcgagagacgtgtggtatttgatggcaaaggtgggaaacaccagagagaggattgaccgtaacgtccatgtttaatgagccttccctagtgtgcagatgaagaggcccgattattacatcaggttctacagagaggatctgtgtgaacacaacacgttactgtggacggaggtaagattcacaagcgacaaacttccacagtgacagaatccgcgccaacagcgaataacaaaaggggagatagcgacaaagtatgcgaccacacacacgctgtgtgacaagacagagggactacaaccacaagagtacagtggaggaggcatgtggacaaacctatcagaaaaccactacagggcaagaagcgaaaacacacatgacgggggatcgccatgtgtgagagattaaagcgcgtcaccaccaacaagtgtatacgccaagacatccgccacacgctacgtggacacgctgcacgaaaaacaccatgacgacaacaacaaggagcacatacacaacaagccacacaggactacatgaggaccggagagcacacggggagacagcgtgacacgacgcgggactgagcccccacaaacaaatcggaggaagagccaaaaaaaatggagaaggcacaccacaaaatgaggaggcacacgacagtatacgacaaaccaggcgagggaccaaaacaagcagagagacgcccccggggcagagagacaaacagaacaacgaagcattaaacacggcgaagatgagatggaagcacagcccagtggcacacaccaaccgagagccaacaccacacgacgcacatcgaaggacacagaa

SEQ ID NO: 677654 - DNA, 123 bp, Homo sapiens
  misc_feature (32)..(32): n is a, c, g, or t
  misc_feature (75)..(76): n is a, c, g, or t
  misc_feature (79)..(79): n is a, c, g, or t
  misc_feature (85)..(85): n is a, c, g, or t
  misc_feature (93)..(93): n is a, c, g, or t
  misc_feature (105)..(105): n is a, c, g, or t
aaaagtgtgtattttttggtttcctaagattntcatttttatcttcttttacaaccagtggtccacaggttcctnngtntgtctntatcggtnagcttgtgttantctagtagccttcccacc

SEQ ID NO: 677655 - DNA, 247 bp, Homo sapiens
ggttttgatatgttcaaacttgtcatttatttacgttgttagatatggggagtagtgtgattgagtgtggagtagattaggctgtagtgtagaattagagtgttaagtgagggtgattggttggctatgatttgttggggatgatagattgctatttgtttttttgtgaattcttcggataattgacatcattaatcttgtgtgcccgaagccgtgctgggtacctgagcatctaattctgtaatca

SEQ ID NO: 677656 - DNA, 332 bp, Homo sapiens
taactacaaaagtcgtacagaatacacagagtccgggtaatatggccatatatcggaggtttaaagctgatgcccatggtgctgtgagcaaaaatacacatttagccaggcgggggagctcaggccatataatcccagcacttagggaggtcaaagcaggaggatcacttgaggccaagagttcaagaccagcctagccaacatggtgaaaccctgtctgtgaggtctacctggtatcgaagaattcaccaaaaacaatagcctcatcatccccaccatcatagccaccatcagcctccttaacctctacttctacctggggtaggtcacct

SEQ ID NO: 677657 - DNA, 183 bp, Homo sapiens
cgcatgtttccccattgaatagatcttgtgtatctactcaaaaagcagttgaccataggttgtacggtttgatttctggactttcaatgctgttccagtatgatctatatgtcttatgccggtaccatactgttttgattaccattgcgtttgtagtatacttttgaaattcaggaagcattt

SEQ ID NO: 677658 - DNA, 161 bp, Homo sapiens
  misc_feature (3)..(3): n is a, c, g, or t
  misc_feature (74)..(74): n is a, c, g, or t
  misc_feature (92)..(92): n is a, c, g, or t
  misc_feature (117)..(117): n is a, c, g, or t
ggnaaccaactgccgaaggcatacggaccaccagtgcggaaactacagtaccggccagggtgtaaccgataganggtgccgacgaacagcanaacgtctgaaccttcgacacggaancttctcagccatggacaggcccggtcagcactaccgcgcagacg

SEQ ID NO: 677659 - DNA, 188 bp, Homo sapiens
tatacctaatgctaaatgaggagttaatgggtgcagcacaccagcatggcacatgtatacatatgtgactaacctgcacactgtcacatgtaccctaaaacttaaggttaagacaaggggggtatcacacattcaggtatcaagcagtcgcacctcaatgcaaattataactcatctagctctggggg

SEQ ID NO: 677660 - DNA, 414 bp, Homo sapiens
  misc_feature (89)..(89): n is a, c, g, or t
  misc_feature (302)..(302): n is a, c, g, or t
  misc_feature (308)..(308): n is a, c, g, or t
  misc_feature (335)..(335): n is a, c, g, or t
  misc_feature (345)..(345): n is a, c, g, or t
  misc_feature (361)..(361): n is a, c, g, or t
  misc_feature (392)..(392): n is a, c, g, or t
agctaaaataacctagaacaaaaatttactcttacgtagtttatagtattgtagaaataattaaaatttaaaaagttaaattacatgtnatattttgcaatatctcttcctaatttacagttgtattaattacctcttgtgtggaaaaatatgaaagtttagtttttaatagtaccttatttaactgggtttgcattgaaatagtataggttgtttctattctgaacggcaaaaagctaagtataaataattgtataaattctgcttcttcccaagaaacagagaaaaaaagaagtaaatcntggagnagggcaatgattggttaatggaaatcntacatagccnctaaattaggaaaccngtaaaataaaatatggccgaccaattgaggncaggcaatgcccctaaaaaggc

SEQ ID NO: 677661 - DNA, 213 bp, Homo sapiens
ggccgacctacagcatgaaggcccccacgaagatgagggcgaccagacccagcagcagcagcttgaagccggcgtaagtgatgttactcagaggcagcgggctctgctggaggccggagaccaggacaaggcccaccaggacggagctaaggagcgccagggtcaacacgaagtgaactgggagcagtagagttttttaggcaggaactacgc

SEQ ID NO: 677662 - DNA, 286 bp, Homo sapiens
  misc_feature (216)..(217): n is a, c, g, or t
aggatcccggagggcgcggaacaaaaggaggcaactgtagggaatgaaacttaggggtctgggaaagcgctgtaaaaggagagaggacctggagatccgctttatcctcatccagaaccgggcaggcaagacgcgcctggaccagagtggtacatgcatgtttgagtgatgatgagcaaacagacagctggatcgaggagagtgctatgcctgtgnngtcaccgtccgatgacgccaatacacaccatactttgtgcgagttccggatactttaagactcatttac

SEQ ID NO: 677663 - DNA, 802 bp, Homo sapiens
cccgtatgtttagacctaacatactgcactatacaccgtgctgtgaaaaagctcctcgtacactgtacatgatccttgacgcgaagccttctacacctccaaacgcgacaatcacgttaaatatccttgtgaacatattctattcgcacatcacgtatttccatgccatacgtcaattgtaaccaacacacgtcattctctatgattccagcgcaatacgtattatcatcatcggccagggccattgaaccagtgggacatccttatcgattacgtctacctggtagcctgtaacagtcctcaaggccaccatctcggtggcaacgtgcaacgaagcctcacaccaaaagtcttaattgtataacgattcgcacgcgatcccttgtgttagtctgagacaccagggttttcctcacttgatatgttgaccctaacacggtgacagattaattcccatgacggcaaaaatatactccaatgtgtctataccctatctgccacttggggggatattggttaccagccgttaagctccgaatcgggtagatgatgcacccaacacaagttagtgtccatgtagttggtcctcacaatcgatacttggtaacccccatgtatgacgcaggatatgcacttttcggtcatgccagtgaggatctgccgggactctagaaacgcatggtgcgaaacaaagttgaagataagagagcattctactggagccacaatctcagagagggtcactcatcagtgcgtaggtccacctatatgtggtgtacagacctgtaatgggtcatagacg

SEQ ID NO: 677664 - DNA, 1227 bp, Homo sapiens
ggggcccacatgccatggacaatattaccaggcagaaccaattctagcgatacccaagtcatcgaacaagaaaagcgagtcaggctacgatgaggagaccactggaaatggagcagcagcgaggcgctatcggtcgcatgaaattgaagacagagatgatagcaaggagcgacccaccagcttcctcccgcctgaagcttctcaatgtcaagccagacaggcatgcaattccagagtcgaaagaggccttatgaagaataactcggggatcgggggtactttgaggcacctgagaggataggacggggccgctctccttcagactcctgctgtacgaggatgaagatgactttgatggatacccttgttgctatgtgacacctagtagactgcgaagctccagttcaaggtgggccgagatcggaggtagtggctatccgttcacaattgagggctttgcatagctgtggtcaggagcccgtgccagctatgggggtcacgagaggggccgtgtactgcttcgagcatgaagatcaatgaggatatctccggtgaagcaggcttccgtctacagaggcctgagccatcaagtggtccgtatccggctggtgccctggatgtcctgtggacacccagtgaggcgaagagccttgatcctatgggtatggaggcactgggaacgaagttcagcaataggcgggttgaaagactagggagacgaggttggaggagaacgatgtgatgggtgctttgcggatttgatgtggaaatgacgggggaacgtgtgtttcaccaagaaatgtagaagtagattggcatggtgtcgatgtcaaagagaaacctagggggagctaggcaccacacgagcaaagcacgtgctgaacacacgccaacagtcgggagcaactgaagacttggagggggagatcgacgaagaaagaggccttgaaacacccaggggcgaaacgtagaagctagcagacaactcgcagagaagtgaccggaaacagagggcacgttagagcagcaacaacaagagaccacgcggaacctaaaagtgaagcagtagaaacggaagagacagaaaggaaaaaagaagactcgaccagaggaacaaaagagcaaagcacagaccaaggtgagcacacacgagagagagaagtgcaactaacaacagagcaagcagctagtaccactgagccagattagattagaaaaagaagacaa

SEQ ID NO: 677665 - DNA, 617 bp, Homo sapiens
ggccaatcgggaggcactgagactgctcacctgcccggctggtcgcggaggccctggcgccaatgggcctcgcgctcgtgcctcccgccccctgcgcggcttcccgggctggcgccggcctccgctcccgcagatgtggatgttcctgagcatgacctgggctccgctgctgctccagctgtggaggggagctgggatggcttagcaggcggctctgggcaggcgggtcccccaatgggcacgagacgcgctggttcccagcccaatggagctctgcgccccccagccccgcgctttacctgcgctgaggcctctggacatgacaaacggactgccagactgcctaggcaggaggaggcctcagcctgagcccgcggccccttggcgctgccctgaactggcctgggagggggtgacgggggcgcgcccgcggtagctgggcccagtcgggcgcccccggagcctgagtgtgaccgagggctttctccctcctcggattattaacagagttcatttcctggcgaatcgggtgacgtcaggggctcggcgtcgcggtggcggggccgcctggccggagaaagcccgctccagttacccaattaccgactgtcatgccg

SEQ ID NO: 677666 - DNA, 299 bp, Homo sapiens
  misc_feature (189)..(189): n is a, c, g, or t
  misc_feature (299)..(299): n is a, c, g, or t
cacacgctgactcttcccaggggcaattctcgagcttgacttgtagggaagggagggggcctgaaaaatccctgaggagtagtggaatagcagatggaacactaagaattgatttccttgaggatagatttccatggtgtgaaagaaaatcgagaggttttaacgaggcaggctaccagcttgtaaccntacatgataagacgttatgaaactgacaacagtaatagaatgacgcctatagaggctggaagggagatccttggggtccaagaacaagtttgccttggttgtgggaagtn

SEQ ID NO: 677667 - DNA, 151 bp, Homo sapiens
cacgtactcgctcatacatgtgcgtcaaagaacatccgcagcagtggggggaggctgttctaatggtcactacaagggcctggagggcagtagagcgcctgtagctccttctagctcgtcacacagtgtatatcatgcagcacgcttcgct

SEQ ID NO: 677668 - DNA, 90 bp, Homo sapiens
acgacagccactttgggctttggagccccccaggccccagtagcagataatctcagtgataccttgaagaagctgaagataacagctgtt

SEQ ID NO: 677669 - DNA, 873 bp, Homo sapiens
  misc_feature (600)..(600): n is a, c, g, or t
tcgcccacggtgtgagggcctggcagttgctgcgccctcgctttcttgaccattcccaggtcttctagtggctctctatacccgcgaggctcagcccctagcagcacatgttgtgccagggacctttgcgcgtgatcaagatccaatctacgggacatcacatggggctcggatcgatggagaaagcttcggagatgatgtcgacaaagctgctgtcctccaccacttggaaactgatcgaatgtctctgaagttagtgacctggaacagggaggagcgtcaaccattggtagaagttgtcgtatgctcactagaaggggatgcatgtgcacttgtcgtacagctgtaggtgggtggtaacgcacacgatcactactattcgcactgagagaaaagatctggtatccaacgagatgtgacacgcctgatgggttcctgatccgtagatgcttcatggccaaaccgttagactagactagtgggcacatcatggcgtgcatcggaagcaaaacgttggctagcggaggcagcgatgcatctttggatggcgtgccttggtgacatgggtgcatgcacccacatgattaggtcatgccttcnagggtaccagtagatggcgcagaccatcatgattgccatgttctctcagagtggcgagacacatgacgccccatgttaggcccactatggaagttgcgagcccatgtaccacaagctgacgcatgcgtcaccgtcaaggcctgaaggtgcaatgggggcttctacttgtgctgccaaactttaccacggaccactctgtgggcgcgactgcgaaaacaagttcctcttccaccctttcaatatgctccaacttggtcctgggaattcagcaag

SEQ ID NO: 677670 - DNA, 455 bp, Homo sapiens
tgtggttgggggaatagaaaaacccgggtttatatttcaaaaaaaaaaaaaaaacccggggggtggggggttgtccctcaccccacctctcccagataaaaaacagacggggtggctggggacaacaacacacgtggcggcgggcgtccccacgaggcgaaacttgtggaataacaccccgacggcacgtcgtggtagtggataaaagagacaggtggtgtgtttttcccgcggatgcaatgaggatatttctcccctgtgaagatatgggggaccacaaatgtggagaggggggagggacgaaagtctgcgggtgggaacagaaaaaaaaaatgtttgtggtgggggaccattttgaagagagacgcgggggcatatttatcaagagggattggagaatatgtggttctattgaagggtgctaattttgggacgggggaaaatttaagaaaaaa

SEQ ID NO: 677671 - DNA, 564 bp, Homo sapiens
ttttttttgacggggtctcactttgtcacccaggctgagggcagtggcgcatcattgctcactgtcagtccccgtctcctgggctccagtgatactttcaccttggcctctcaagtagctgggactacaggtgcatgccaccacacccggctatttttgtatgttttgtagagacggggtttcaccatattgcctgggctggtctcaaactcctgggctcaaatgatctgcttgccctggactcccaaagtgctgggattccaggcatgagccaccgcacctggctacaactctttttttttttttttttttggaaatggagtctctctctgtggtggcccaggaggcggaggttgcagtgagtttgagcgcgccatggcaccccagccgtgggttggcgccaaagcccggttgcccccagggggcccagaaggtgccgtgggagtgcatgtgttggagaaagtgcagttcttacagattccttcccctgtgcccacgagggtgcatctcagagaacctggccgtggcaaaaggtgtgatctcccggttcgtggacactcttca

SEQ ID NO: 677672 - DNA, 278 bp, Homo sapiens
tattggacagaagcccaaagcagcaaattgtcacaattgtggaccccacattggcctgagatccaaaacgcttcgaggcacccaaattacctgcccattcgtcaggacacccaccacaccagtgttatattctgcctcgccggagtgggtgtcccgggggcacttgccgaacagcaccttgcgtccccaggtttgcagctctcccctgggcaactaaccatcctggcccgggctgcctgtctgacatccgtgcctagtcgtggatctacatcttgcct

SEQ ID NO: 677673 - DNA, 149 bp, Homo sapiens
gccagcctcagtgacagagcaagaccctgtctctcacaatacattaattaattaattaaacagaatgtacattgtttataggggacatatatacgacataaggacacacaaggtgacatttaacagatggacaagcatgatcacaatga

SEQ ID NO: 677674 - DNA, 281 bp, Homo sapiens
gatcaaagtagtaataagagtaattatgacaaatatattaaatctctgtcggagttttctaatactaaaaatgggatttttgctctaagaaaaagtatgttaggagacctaaatatgttatttaagatgttctccatactactttctgatgagtgatgaggaaagatctgagtgtagcttttttagtccgatgggtatcggtgatcagcctagtcaatgtgacctgtactaatggatacctctgtgttatttgctaatcgtgagtctgtattaactgcttg

SEQ ID NO: 677675 - DNA, 1419 bp, Homo sapiens
  misc_feature (1412)..(1412): n is a, c, g, or t
tgtaagaaacgtggtctggctatgttgtccaggttggtctcaaactcctgggctcaactgatcctcccacttcaacctctgccatagccaggaccctcgaggtgtgttcagccaccacacccacgagcataagttgtttttatcttagtgtaaaaagtgggagctctggcctcgtgttgctcaggcgtggtgtgatagataggggcacagttcattagcctcacgtgtaacctttcaagtgccgtgggccttgaagcaatttcttcccggccctcgagtcttctcccaagtataacgtgggaagtatattagggtgttacaccacaccaagtgcccagctataatataattatagatagcataaataggagcgagatatatagtgttggacaatggagctcttcgcctcgtgtcgcccgaggcttggagttgcagtggccgcagtcttcaggcttcactgtgcaaccttctgtgcctcccgggtttcaacgcagttctgtgtgcctttcagcctcacgtgaagagtggacgtgggaattatacaggcgacccgcacacgcgaaggcccgtggatataacattgtggataatttataaccgcagaagaagtggaggtttacaccaagtgtttgccccagggcgtgggatcttgaacctccccgaccatcaggttagatccaatccgaatagaggcctccccaaaagtgctgggattgaacaggcattagacgccacttggttgcccaagcaccgcccgaactattcgcttcaaacatacactgttcaagaggaacagggaggtcatataacatggtacacccccagaggtatgaaaagggaagaatcgtaacagcacaataggcctctaacagtgacaggccctttcaaaccctcgaggagagacctaaaacgggaaaaccatactaaaagattaagaccctcccccagtagagaacagagagacatactacgaggggaaaacaaccccccaatagtagtggaaaacactataagaggacatacggcaaaaaagctacaggcgtctacgcacacatatgagacagaactagtgactcaacataagctgaggagtacccaaagaaaccacaccacaaacatgtggtaaccaaaaagagcgcgatcacaaagagaggaaccacaaaatccacaggaagaagaaacaattatcgaagaacaggtctgtggtaatatagatgacagggaggactacaacggcggcaaaggaataccacgaacatactaagagacggacaaaaatagtagttgaaacaacatagccgagcaagtcgacgagaaacaatcaaccactcgagacacagacgtgctgattgctgtatggctgtctgtctacctagttgactagctcatgctgtctagtagtagaggggggntaggggc

SEQ ID NO: 677676 - DNA, 228 bp, Homo sapiens
ctgtggctggttgctgacttggaggagtgacttgcagcaggttcttagctcttgaagctcttcctgggaggaggaggtggtggagacaaatttgacgctggagctgctaccccgcgccagtgccaaaggccacccccagccctcggccactgcttgcactgaagccggagccccccacactgagcccaccactttatgccgacacccccactgatgctaggagtagta

SEQ ID NO: 677677 - DNA, 269 bp, Homo sapiens
aagctcgcgtaccgctctttgggtggctcgtggatgcggctcttggcgtggctcgttgtgtggctccttgtgtggctctttgtgcggcccgtcgggtggctcatggtggggctctttgcgaggctctttgggtggcgcgtcgggtggctcttcgcgtggcgcctggtgccggcacttggaggggctcttcgtgtggctccttgtgtggctctttgtgcttctcttcagccccttccctgtgtccacctttctctcctctccccaacgag

SEQ ID NO: 677678 - DNA, 226 bp, Homo sapiens
tgtttaaagagacagggacttgctgtgttacccaggctggagtgcagtgtctattcacaggcacgatcattgtgcactgcagccttgaactcctggactcaaccagtcctcccacctcagtgtctcaagtagctgggactatagacacacaccactgctcctggtgtgatgtttgttttgttttgttttgttttgtttttattgagacggagaaaacctgggcact

SEQ ID NO: 677679 - DNA, 160 bp, Homo sapiens
gatggtggcatggtgagtgcgataggaaaaacatcttcccctgctgtagtgctactgaactggaagcgctggtgtgtgagtgaagctcagactgtgtactccagtgccctgagaacagtgaagagtgtagatggaagtatgactagtgcccagtgctggc

SEQ ID NO: 677680 - DNA, 879 bp, Homo sapiens
gatggtgctgatggaccctagcggagggctgacatgctgagggggaggggggctagaggaatccgattgataaggtccatgcctcattttgtggttgggtagagattgatgtacgaaagtacttggaagagtatagtcagcaggtgtggtagagatttggcagccagcgattggttagaattggtaatctaagtcagcgtgaagattgtgaggagagcacatatgatgatttagaatcgcataaagctgatggagggcctggataaaagtgttctaagatgtcaggagagttgatatgaagctgctcacatgtgtagaaggctgttctttaagtggatccgttggcaggatgggatgaggaagtgggcgaaaattgttaggcagataagaaagtgggaaaggtgggggagatcaaaggatgaaggtgtgtttgaagcagctaagcatgttaacgtttctgcatagctggttgggggatctaagttagatgtggttggcggaactattgtgatggagtaggatagcccgtactggtgtttctaatagaacttgaaaataccaatgcaggtgctggggccgtaccattgcagggtactattttcacaatgccataggtttaacggagtatattctaggagtgttataacgcatgagtggacttcttacttggccattatgataggagtgaggcaatattgggggaagtgtgaatggttgattgtgtgacagttgtaagcctgatgtatgcaagtgtgggaaagatagaaatgtaggggtggaagaggataacaatttagttaatggacaaagacgctgaagtgatgggaagagataatatcaatttgatggaaagtatgctatggccaatgtaaataaaga

SEQ ID NO: 677681 - DNA, 182 bp, Homo sapiens
ttttagaaaagttctaaagttataaaaatgttttttgcagtaaaaaaaaagttttttgggccgggggtggtggctcacacctgtaatcccagccccttgggaggattaggtgggaggatcattttaggccaggagttttagacctgcctgggcaacataatgaaacttccttttcagggaga

SEQ ID NO: 677682 - DNA, 694 bp, Homo sapiens
  misc_feature (138)..(138): n is a, c, g, or t
gaagagaaccaagcctcagtctccattgtggttggctcacacatgggtcttcaggttggcaaggaagtaggaagtccgggttctcagtgtgatggacccccagggtggtcttaagatgaggtaaattctggtcatcantgtgaagtgcctcgggggtctccggggtcctgagtagaagcaaggtctgtttgtcactgtggattcccccctgccaagggtccccaggtcagtcctgaggagaaggcagctcagtctttactgtgatgcagcctctagtgatccccaggtcctgagtagaaggaaggcctggtcctctgtggattcaacccagaggtctgtgagcagaatgcaggtactgcaagcaggctagacaaggtgtgtgcttgcaccccttccttactacctaggcacagtgttggatggtcagtgcttcctgttttgtgatggccatgtgccccctcttgcagtcccagtgaacccctgaaattcaatcttacgattttccatgccataattttggaaaacgaaactgaaatagagtccatcattccatgccttaattggaatggatagagataataaaaggcaaagtagatggccatagacaaaagtcaagtgatttcctatatatttgaaataatgtatagcaataattggaatttgtaatgaataaaatcattcaaaaaaatctgaa

SEQ ID NO: 677683 - DNA, 207 bp, Homo sapiens
cgccggagtgcaatggctcatgtttgtaatcccaacactttgggaggccgaggctagagaatcacttgaggccaggggttggagagcaccctgggaaacatacaacgattccatctctacaaaaaaatttagccccagtgtggtggctcacacctgttatcccagcaactcgggagggtgaggcgggagaatcgcctgagcctggga

SEQ ID NO: 677684 - DNA, 886 bp, Homo sapiens
tatttatgtaacgcaggtacattggataaaatgtaagccctgactgtaaggtttagcactgggtgtacttaatttataaaaaattattattataatcaatctattataaaaatggcctatcactgaacacttcatggattgatgttcgaagtaaggattagaaacatagagctcccaagtatttaaacacctaaactgtgaatagacccatatatacatagcaaagttgtctgccatctagcttcttgaagtctatgggggtctaatactcaagtactatggtaagtatctaagcttgccatcatgaattgagctataatttttagcgttatgcccatttataacgtagttgtatgactcactagttgtgagttcagaaacaaacttaaaatttggggtatagaaccccctcaacaggattacgtaatgcatggaatttcgtatgatgagcagagtaagtgtataaaccagagagtgatttcatttacacctcatagttagggtatgccagagagatacatttccctcttgagggcccctgtgggagacagagcaggcttagattttccctacgtggcgaagggtttttaaaaaagtgaggtaaatgcccgtactattcatcaattgacctctacattgtgtcgtaggaatagatgcgttcaggtgtcatagagggtatccgtctgctagaacacttgtcgagaaataacagcgtcaatcaaagatacctatgccttatggagataccccctcccctttattgcggccggttgaaattctggcaatggagaaagccaaatttactgtaaccgattaaagtaattaaaagccgggttcacaatctaaaacttctggatctttctctttaaaaactgggctcccacag

SEQ ID NO: 677685 - DNA, 160 bp, Homo sapiens
cttcaactattcgagagtccttcattatacatcatctggactcgtcacctgacatgatgttaaggtcttcaacacctgatgcagtagtattaacatagggtgatgaatattatttttctagggacggctcttaagaggaggtgtactcctataatcgccg

SEQ ID NO: 677686 - DNA, 970 bp, Homo sapiens
gggtgtggtgcaggttgagaatgaaaatcattgcgattttgtgaaacttcgagagatgctgatccgcgtgaacatggaggacttgcgagagcagactcactcccgccactatgaacttgtaccgacgcgttgtagagcgtgtgagagagatggggttcacggcacactgaccctgacgagcgaaacccttctggtcttcaggcagacatatgaagcggtagaaggaatgacattcctggggagaactgcagaccgaactggaaggacgaaatgagacaaatgttgttatgagagtgaaggagaaagaagctgaacttacggaggcagagaaagagcttcacgagaagttggaccttctaaagcggacacatccaccgaatgaacaagaagaaagtggagagactaataatgaaggacgcttgaggaggaggtgaaacaaccttccagaagaggaaagcagcggctcagtagactacagtcccaggcccagcaactctggggcccagcaaaccagagaaggaccaggataagaaacacacttcttctttatgttaccatcctgttgaacgagccctactctctcctactggtcatgagcattaccagagcaggagcgtctgttcgcacgtgtcggggaagagttcacctcattcagccatcgactcctgtttctcttaaagtctgggtcacgatcttgtcgctgtggtgtgtacttgtcaacggctgcctagtgcttctggaagtgacttacagtaccagaatggctttcatatctcatcaagcagcgcgctgtgacacgaacgtggccgaccacgcttgtcgggccctgtgacttctgtccgaggcgccgacggggtgagcagggccacatgggccccggccatgtctgggctcttgctgctgagccgcccgggagccacttggtgtgggggaccttcggcgctcttttcccgcgtctgtcgttcggggt

SEQ ID NO: 677687 - DNA, 162 bp, Homo sapiens
taggtcggaccttacattgctctaatggtcagtgatgttgaacttctgtttcaacgcttattggctgcatgtatgtcttctttcaatgaagtgtttctgtgtgtcctttggccaatttttaataatggttgtttgtatactcgtgtaaatttatgttcctta

SEQ ID NO: 677688 - DNA, 451 bp, Homo sapiens
caacaggagcccgagggtctactgcaaccagatattcataaacaatgaatggcacgatgccgtcagaaggaaaacattccccagcgtcaatcctgtccacttggagaggtcatctgtcaggtagctgatggggacactgcagatgtgcacaagggcagtgaagtgcgcccggtgccgcctaccagctggtctcacctttggagcctaatggacgctatcacacatgggcctgtcttgatgaacctgccctggtcgatctgatcgagcgggacctgtatactatctggcggccttggagaccctggacaaatggacagcgctatgtcatctcctacctggtggactttggacatgtgtcctcacatgtctccgggaataaatggcggcttgtgttgatactgtaaccacgggacaacccatccccattgacggagactacttcagggtacac

SEQ ID NO: 677689 - DNA, 680 bp, Homo sapiens
gagaactgggcatcagccaaaactcaagccttgccttttaggaggccaccagcagagggacttggtcctacttgactggtctagagacatgccggcgacctgaggactccactcacactggcgagcaaaaagggagcagtgattctcttttctctccccaccccctgccctttgtgaccaacaccagtttcccagggggtacatgagtttctaaatttttaaaaaatgttttgggttaggtttttctggggactgataagtgctttaagcaatgcccataccccgtcaagactcccagcttagtcattttcttgaatatgtactggcacagtattctgtgtgtgtgcttgttttggcagctgattgtggctggattatatattgagtgatgaatagatcctcttttttccctaagggatatgaactgcctttcttgcgttatattctgcttacgaatagctggagccctcgcgctgtctcgcgtaagctaaggctcgcaagcgagaagagagccggtggaatggacttgtccctgacaggctgaactacctgagtctctgatcttttcagtacaatcttcgcaaggctttaatgccacatcctatcctcttttaccccttctgatgggagggacccggtccacactatatgctgctgtgcttcacccctccattgccggg

SEQ ID NO: 677690 - DNA, 430 bp, Homo sapiens
  misc_feature (150)..(150): n is a, c, g, or t
cctacgtgctactactaaattcgcgggcgggttcgacccttgaaaacattctttttggtgaacctgccaagtggatatttagctggctttgacgatttcgttggaaacgggaatacatataaaaagcagacagcagcgttctgagaaacntacttggtgatgtttgcattcaagtcacagaatggaacgttccctttcacagaacaggtttgaaacactccttttgtcgtatctggaagtgtccatttggagcgcattcaggcttgtgttggaaaaggaaatatcttcccataaaaaccagacagaagccttctcggcaacttgtttgtgatgtgtgccctctactaacagagtcgaacctttctattcatagagcagttttgaaacactctttttgtagaatctgcagtcgacgcggccgcgaatttag

SEQ ID NO: 677691 - DNA, 316 bp, Homo sapiens
  misc_feature (58)..(58): n is a, c, g, or t
  misc_feature (210)..(210): n is a, c, g, or t
aagaaaaccaaagaaaatattgacatcatcacttccattttcattggaagtgaaagtnatcagagaagaaagacaaaagaatatttcattatcacaacttctaagcacagtgaaagaggaaattttctattccttactaaagaataaagaaaaataggacaagtcattactcagcttaagaaataaagagaaacaaaataaacctaaaanaacaggaagaaggaattaataaagataaaagctgaaattaaagggatagaataatggataaataaatccgaaagctgtttctttggaaagaccagtaaaatatata

SEQ ID NO: 677692 - DNA, 193 bp, Homo sapiens
tggacaagcagaataaaaggaggctctcaagaaacatagtggggttttgatttgggatgactggaaggatgatggtgtcatttaaaaaatattttaaagagttaaatatatatatgtatatgtatatacacacacacactacaggcacacatgcaaacatataaacaaactttgaggagaagctgctggaaag

SEQ ID NO: 677693 - DNA, 299 bp, Homo sapiens
gtgatgtatccttttccagaaagcaaatctgcagcagtatttctataataatgctacccttttatttagaatcttttaaaatatgctttattaatgtcaattttaaaaatatttgaccactacaaggatttttatataccccactaattaagacaggattttgtacttgttgatgctctatttacacaggttcattggaaactgctcttcattgccttactgtgatgctgacaatgccttgtgagcggatgctgaggacaggctccctccattcaacccggagggagtatctaaccacc

SEQ ID NO: 677694 - DNA, 645 bp, Homo sapiens
gttctatacttacaattttgtgattcttagtacatgagtacaggctatgctgtgcttgttttgcaatgccagttttaacactatgttacatttttgtttacagtaagttaaaccttatataacattaatgacatttgatttctggatttttcccatgataaaaattagggggataaataaaattgtcactggaatttctctgcttttcttttccccccagtgttatactttattagaattataattgatagaactttaaaatcatcaacagtttgtttcctttgacattttaggtgataattgccctttgagatccattacatagcataatggcagcataatattaagagtgactcatggctaatcagtaggaaataaagatcagttactatcctgtattctgtattgctggctattaaacagtaaggtaattaacaaattgaactacagtttacacacaatggggcaaatggggtagtaagagcaaggaagaaagtttaccaaactaaatatttaggttattgtatgataatattgagactacatttctaaattattttgagaatttcaactttttattctacccaaagtaatctgaacttggacttgttccacgcttactttcttgaagaatggttaaaacct

SEQ ID NO: 677695 - DNA, 898 bp, Homo sapiens
gttcccgcttgctggtgactcaagtggttagtaggttgttatgcttagctgtcctgtggtcttcatcctcctccccttgtaatgaaactatcatctattctgagagcgtatgccatagccgatgaaggtcccagagtgttgggctgtagatttaggtacatatattgcgtgcgtagtatgaattgaaatcaaagtaactgtgagctactactgggaagggatagaggcatgctgagcacatggacttcacctcctgacatactgaatttgaaccgcagtgcctctaaggtaggggtccgatacgctggagtgtccaaggaaggctggtcggctgcagaggattgtggagcctctccggggacaggttaggtaatatctaagtgggtccacggaaccaagctagaccatgtgggggtgtctgaatgtggcatttgcgctgaggaatggcacttgtagtttagctaagaatatactcaacacgatgatgtggacactcttcccaatacataggaatcgtcattgaagcttgattcactcgagttctcagtatccctgtgttccttttggagtggtctactgctatttgctggagagatcctggttaatgggtcttggggactggaaagttggccataaagggattctctgggtccttttttatgttaagacctacttactattgactagacaatgaatggtgcattgcagagtgacagcgcctgtaataggcaagttggggaggctaggcgaggagctcacaaggcagacagggggacaccgggcaactggtggaacccgtcttggagagggaagactgcggacaggggcggaatttggacggcaaaggggggcaaaatgttacggcggaggatcggaaacaaaacagggggcaaaaccc

SEQ ID NO: 677696 - DNA, 161 bp, Homo sapiens
aggggggcgcaagagagaagaacttcacacttcttattgctcagcctagatagcagcagctgggaatacgtaggacaaacaggacgtcgaacaaattactccactatattaaattcactacaccacttattctttcttgaattgtaaacactaagtgtagt

SEQ ID NO: 677697 - DNA, 204 bp, Homo sapiens
gcagatatctgacgtgccaagtcgtcccatgctcgtgtcctccttatctgggatcccgattgcctgcgaacatagactcgcaccatcctcgggctgctgggccttggccagtgccgtgtgttggtgatctcgatcacggatcgcttcatgttgaagagttcgtccttggagatgatgcctttctcatccaggatcatacattgg

SEQ ID NO: 677698 - DNA, 718 bp, Homo sapiens
  misc_feature (36)..(36): n is a, c, g, or t
  misc_feature (64)..(64): n is a, c, g, or t
  misc_feature (74)..(74): n is a, c, g, or t
  misc_feature (109)..(109): n is a, c, g, or t
  misc_feature (111)..(113): n is a, c, g, or t
  misc_feature (125)..(125): n is a, c, g, or t
  misc_feature (129)..(132): n is a, c, g, or t
  misc_feature (139)..(139): n is a, c, g, or t
  misc_feature (145)..(145): n is a, c, g, or t
  misc_feature (167)..(167): n is a, c, g, or t
  misc_feature (183)..(183): n is a, c, g, or t
  misc_feature (200)..(200): n is a, c, g, or t
  misc_feature (212)..(212): n is a, c, g, or t
  misc_feature (238)..(238): n is a, c, g, or t
  misc_feature (246)..(246): n is a, c, g, or t
  misc_feature (261)..(261): n is a, c, g, or t
  misc_feature (263)..(263): n is a, c, g, or t
  misc_feature (266)..(267): n is a, c, g, or t
  misc_feature (281)..(281): n is a, c, g, or t
  misc_feature (284)..(284): n is a, c, g, or t
  misc_feature (296)..(296): n is a, c, g, or t
  misc_feature (303)..(303): n is a, c, g, or t
  misc_feature (314)..(314): n is a, c, g, or t
  misc_feature (330)..(330): n is a, c, g, or t
  misc_feature (348)..(348): n is a, c, g, or t
  misc_feature (353)..(353): n is a, c, g, or t
  misc_feature (379)..(379): n is a, c, g, or t
  misc_feature (381)..(381): n is a, c, g, or t
  misc_feature (384)..(384): n is a, c, g, or t
  misc_feature (394)..(394): n is a, c, g, or t
  misc_feature (401)..(402): n is a, c, g, or t
  misc_feature (405)..(407): n is a, c, g, or t
  misc_feature (429)..(430): n is a, c, g, or t
  misc_feature (442)..(442): n is a, c, g, or t
  misc_feature (445)..(445): n is a, c, g, or t
  misc_feature (449)..(451): n is a, c, g, or t
  misc_feature (453)..(455): n is a, c, g, or t
  misc_feature (459)..(459): n is a, c, g, or t
  misc_feature (465)..(465): n is a, c, g, or t
  misc_feature (468)..(469): n is a, c, g, or t
  misc_feature (476)..(476): n is a, c, g, or t
  misc_feature (478)..(478): n is a, c, g, or t
  misc_feature (480)..(482): n is a, c, g, or t
  misc_feature (502)..(502): n is a, c, g, or t
  misc_feature (509)..(511): n is a, c, g, or t
  misc_feature (532)..(532): n is a, c, g, or t
  misc_feature (535)..(536): n is a, c, g, or t
  misc_feature (565)..(566): n is a, c, g, or t
  misc_feature (568)..(568): n is a, c, g, or t
  misc_feature (642)..(642): n is a, c, g, or t
  misc_feature (650)..(650): n is a, c, g, or t
  misc_feature (698)..(698): n is a, c, g, or t
ttctacatttatctttttatatcttttttaacatantatttctgccgttttttaatacccaganttttatcttntccatcttcatccccacttcccatagcccaaacanannnacataaaaattnaatnnnnagcacanatcatnctccaacaatacaaattccctnctaccaaaccaccatnatccactcttacttttntcacaaactctnctaaaaacaattctctacgttcactnttcccaanggtcattctaaacantngtnnccaccaccccttanaancaagaaaaaaanaaaaaangcaaataaatncagaaggcaaccaaancctcccaaatgcccctanctcangacccattccccgcagcttagcagtngncantcaaggcttngccacanncannncttttctcaatatcctttcagnngcaatatccaanctntctnnnannntctngggatncannaaagatntntnnnaatcactcattccatttctncattttnnnttacatgcttattcttccaanccnnatggagcccttatgcctcatcctcactgnngntcctattcctttaatattatcttaatgtcaactcccaggcctcctcttccagcaataaggaagccatgtctganaggggaanggcaagatgtgccctcagcctcactcaatgagctccacgtattggcanggaacatgccaaaatggcca

SEQ ID NO: 677699 - DNA, 217 bp, Homo sapiens
gtcgtgcagccttcaactccctggctagaaccgatcctcctgcctcaacctcaagtagctgggactacaggctcacaccttgacgcttggctggctttttttttgtggagatggggtcttgccatgttgcccaggctggtctcaaactcctatgctcaggcgatccaccctcctcggcctcccattagtgctggggttataggcaagagccactata

SEQ ID NO: 677700 - DNA, 123 bp, Homo sapiens
gccaatcgctagtaaactgttgaccgctgtgcatgtctgatctaggtgccagtgtaggtagaaaatatcaccatatctcaatgggccacaggtggtctcacctctctgtacttctgtcaccat

SEQ ID NO: 677701 - DNA, 173 bp, Homo sapiens
ctatgccggtctatctgaggatccccccttccccacagttaggggggcacgtcggcctcccaaagtgctgggattacaggcgtgagccgctcacccagcctaagactaattttattttttgggagatggcgtctcgttgtcacccaggctgttgtgcagtcgcgcgacctctt

SEQ ID NO: 677702 - DNA, 324 bp, Homo sapiens
  misc_feature (292)..(292): n is a, c, g, or t
  misc_feature (306)..(306): n is a, c, g, or t
ggggctcttggggttcggctcagctcaacatggcttgacatggtgggcacactggcgcccagtaagagagagagagagccaaagctgtccgttttgcagatggacaggaaggagccaggacacagctcagcttgctcacgcccagagagagaaaaagttaagctgctgaccctgaaggcaagggagagcaggctgcacagtgtgtgtggaagccacgggttcaagcagccaaggcagggcggaacagtgttgagagagctagtgttaagctgtttgatggagagctgtttgntggaattaaaaccntatttcaccttgccaaaa

SEQ ID NO: 677703 - DNA, 507 bp, Homo sapiens
cgtaccttgttcggctctaccttgatccctcggctctaccttgtttctcggctctaccttgtgtctcttcttcaaatctccttagagctaacatggatgggtttgaaggaagagagactataagaagaaaatataagaagatcaaagcatgagtagcaggagcagctgcagctcgcgtgtgcgtaggattagcattagtaacaacagcagtgataatcagcagcaacgagcagctcagtatagggcagttcatatcctggctttcacccattgatgcagtgaattgctatattatccttttggccagatagctacgtttctggttcccccacagtaggtgttttcacataagattagggtccttttggaaagaatagttgcagtgtatatagagatagttgtggtaagaatctagtttattttgcatttggctaattggtctgtgctgcatggttatatactcctggattatatattaaaagtctctgtagacgaggtagagccgag

SEQ ID NO: 677704 - DNA, 438 bp, Homo sapiens
ggcttactagatatgtgcgttactaactaagaaatacaatgcagtgtgcgtgcagggatggattagcgatacgggcctatccggccaacgccaagggcccatgagctcaggggggccctaaaccagagcctctgcgtgaagtcgctgttattaactttgcttgctgtcaattgtttttagactttgtatttgttaatatcagaggtggcttaaatgtatctcttatttgtggttggaagcggtgtattttgttacatgtcctgacccatggtttccataacaacaatacactacaacatgaaacatgaaatcactccaagcaatatgcattagctgacctaaataagatgctatttgttattactttgtttgttatttcaataattgacaattttaatgtcgcctaccattttatgggagcgatgagggacaggtggg

SEQ ID NO: 677705 - DNA, 398 bp, Homo sapiens
gacaaactgcactgactggaatacaacagcagaacactgtctcaagaagccgaagacctaaataagcgggggtggaaagtcccagattggcggctcaggagacacagtgagtgtacgacagctacaccctcacagatgactcgtggtgagtcaccgcaccagctatcagagttctaactagcttgtttgagaagtgatccaaaattctagatggagatgttaacctcttacatactacatcttacagagctatacaactttttcttaaaacttttttgcagagtagaaaagacataattaacatgtctaggggccgtggtggtggctcacgcctgtaatcacagcactttaggaggccgaggcgggaggatcacttgatgtcaggagtttgagaccag

SEQ ID NO: 677706 - DNA, 690 bp, Homo sapiens
  misc_feature (7)..(7): n is a, c, g, or t
  misc_feature (66)..(66): n is a, c, g, or t
  misc_feature (72)..(73): n is a, c, g, or t
  misc_feature (77)..(78): n is a, c, g, or t
  misc_feature (80)..(80): n is a, c, g, or t
  misc_feature (84)..(84): n is a, c, g, or t
  misc_feature (88)..(90): n is a, c, g, or t
  misc_feature (99)..(99): n is a, c, g, or t
  misc_feature (101)..(102): n is a, c, g, or t
  misc_feature (107)..(107): n is a, c, g, or t
  misc_feature (110)..(110): n is a, c, g, or t
  misc_feature (116)..(118): n is a, c, g, or t
  misc_feature (120)..(120): n is a, c, g, or t
  misc_feature (123)..(123): n is a, c, g, or t
  misc_feature (127)..(127): n is a, c, g, or t
  misc_feature (147)..(147): n is a, c, g, or t
  misc_feature (152)..(152): n is a, c, g, or t
  misc_feature (155)..(155): n is a, c, g, or t
  misc_feature (165)..(166): n is a, c, g, or t
  misc_feature (172)..(173): n is a, c, g, or t
  misc_feature (177)..(177): n is a, c, g, or t
  misc_feature (199)..(200): n is a, c, g, or t
  misc_feature (234)..(234): n is a, c, g, or t
  misc_feature (259)..(259): n is a, c, g, or t
  misc_feature (261)..(262): n is a, c, g, or t
  misc_feature (270)..(270): n is a, c, g, or t
  misc_feature (316)..(316): n is a, c, g, or t
  misc_feature (327)..(327): n is a, c, g, or t
  misc_feature (348)..(348): n is a, c, g, or t
  misc_feature (352)..(352): n is a, c, g, or t
  misc_feature (364)..(365): n is a, c, g, or t
  misc_feature (384)..(384): n is a, c, g, or t
  misc_feature (391)..(391): n is a, c, g, or t
  misc_feature (393)..(393): n is a, c, g, or t
  misc_feature (395)..(395): n is a, c, g, or t
  misc_feature (409)..(409): n is a, c, g, or t
  misc_feature (416)..(416): n is a, c, g, or t
  misc_feature (471)..(471): n is a, c, g, or t
  misc_feature (496)..(496): n is a, c, g, or t
  misc_feature (603)..(604): n is a, c, g, or t
  misc_feature (613)..(613): n is a, c, g, or t
  misc_feature (626)..(626): n is a, c, g, or t
  misc_feature (683)..(683): n is a, c, g, or t
agacagnctttccagaccccatcttttatacccaccccaacagtctaactctaaagaggataaagngaatgnntttnntnagangagnnnaggggtaangnnggttnggnatgggnnngngtntttntggtgggttatgagaattgngaaangantcaaatattnncagggnngggngggcaagggggggggtgatcgnntattcagcaacagcgagaactgcatccaaaaatntcatcccaggaattaaataaggggngnnacattcangggcatctcctccactgtagtattgtagaaagtgtcaatgtcacgnagaatcctctngggttcttcagtaacaaagtntatngccacacctttnntcccaaatggggcccctcngcgaatngngnggtttggttttgangattggngggtagatcataatttataaccaaagttacttgttgcacatcaatcccgcgagcnaacaagtcagtagtgatcagaacangacttgaccctgaccggaattccctcatgataacatctctctccttctggtacatgttaccatgcagagcagaaactgtgaagtctctggcatgcatcttctcagtnngccagttcnacttgcgcctcgnattgagaaaataacagcctgtgtaatggtcagtgctcgtacaagtcacaagtgtatncaacttc

SEQ ID NO: 677707 - DNA, 346 bp, Homo sapiens
gcggccgctactactactaaattcgcggccgctcgaccagcctcccaagtggctgagactacaagcgcatcagccatgcacggctaattttttttgtatttttagtagagatggagtttcaccatgttggccaggctggtctcgaactcctgacctcaaatgatccgccctttttggcctcccaaagtgctgggattacaggcgtgacgtaccgcgcccagccaaatttctaacttgttttgttgttgttgagacagggtctcagtctgacaccaaggctggtgtgcagtactgcgatcacggctcactgcagtctcgacctcctgagctcaagtgatcgtcgacg

SEQ ID NO: 677708 - DNA, 201 bp, Homo sapiens
catgtacgtgaggtcatgataggggtcattgatggcatcactatccagctttaccagagttaaaagcagccctagtgactcaggcgcccaatacgaccaaatccgttgactccgaccttcaccttccccatggtgtctcagcgatgtggctcggctggcgacgcagaacaagatgcggctgactgtcgaacaggaagagca

SEQ ID NO: 677709 - DNA, 1122 bp, Homo sapiens
  misc_feature (286)..(286): n is a, c, g, or t
  misc_feature (454)..(454): n is a, c, g, or t
  misc_feature (457)..(457): n is a, c, g, or t
gacgagagaattagtctcgagtttgtttgcacgccagtgagtatgagatacctgacatcgccttgtcttccttcacccaagctaccgatgactgaggcatctgtctctgcagcgctcatcaagtggccacggggcagtcttctatgcaagtcgacgtcgatgcagtcatagtgtgcttgcgctgcttgcgcgtgcgttgcgttccgtatcacacggaatacatgcgttgtacctttcctgccttcgaaacgccatgctatgcaagagcgaccgtgggatgaagaanatacactgagaaagtcagcgcttaccagtgcgtatcacgtcaagcgtgcgagtcgctcgtggcacgcgtacaggaggcgtatggtgtgtcaaaagaactgtacgaatagtgcagtacacatctcgcagagcagtcgtgggaagcaggacgccggcttggtgcgcttcnatntaccatggcgtagagggagatgtcgcgcacgcccgtgtggagaaggcggcacgtacagaccggtacgttggggtgtcagaggtcaagaagtcacgggcaatccgacgtgttgggcaccatacgtacacggtgtgccccgcacgggtcccacgaaggaccctgaggacgctcactcaaacttctcggaggactccgactcctaacggggatcgcctggaagcggcaatccattcaatgctgtgcgttcatgaatgacatgcatggtaaacaacataagtgcgctacacgttgcagtgtccctttccccaagaattgtagacaccaagttgtacctttctgccccgtattgcttacttttaatcaaacctagataccgttgtccatggaaccgttgcgaaaattgtatctcaggaaacaaagagacaggcaattggccacggatgggcaagccgcatggatgcttgtattgcgccaaggaaaatccgcgaaatggagttgccacagttgcttgcccatacgcgcgaggaaccgtggtccccattgtcgtagtgcgaaaccaacacgaaattttatttcggggcaacagaaaaagttggccgagggcatggaagaggccaacgataacgaaattacggctgggcgttccgtatacctgggacaaggaa

SEQ ID NO: 677710 - DNA, 237 bp, Homo sapiens
ccagggacagtcaattagattaaaatggtaagcaatatgaaggctatcaaaggagaaagaacaggatggagataacgagcaacattcaagacctaagtcacgtaggcatcctcagtttccccaggtgcttaggtcgagtttatgccaggattgtctaattcatttccctaagttgggaataagttctggagagaagctcaaaagcgagaacctttctcccccaggcttcagagtcct

SEQ ID NO: 677711 - DNA, 125 bp, Homo sapiens
cacacttcccactcacgttccaccttcctccacctccttggtgactccaaatactcacacagtcatcacccatacccatgcacagatgtccagtcgacgcggccgcgaatttagtagtagtaggc

SEQ ID NO: 677712 - DNA, 433 bp, Homo sapiens
tatggccggggggggcctgcggtgggagtgggaatgaaggcggagggaaccatgcgaggttctgagaattgcgtttagggtcgcctagagagacggcttctgagcaggaattctgaaatcctcaccacttactcccttctggggattagatcccctatggtcaccgctaacagcattatagtgctggatgatgatgacgaacatgaaccatctgtttagccatggtctctatatccatttctggccgtcttattcaggtcgtaacctctatatatttgagcctctatttgctcctacttaatcatttatccccactcaatggaacttttgctcgttcttttcctcctgatagattatttcattttatctgtttttctattcttgctcttatacttcgtgtatccattttcttcctctctccttgtccctttct

SEQ ID NO: 677713 - DNA, 176 bp, Homo sapiens
  misc_feature (85)..(85): n is a, c, g, or t
  misc_feature (130)..(130): n is a, c, g, or t
cgggaagctttagctagcatgggcaacacagggtagatcctggcgctaaaaaaaaaaaagcttgcgcaagcttttttttttttanagatgcttacaagcgtgcatcactatgcccggctaattttttgtntttttaacagaaacgggatctcaccatgctagctaaagcttcccga

SEQ ID NO: 677714 - DNA, 775 bp, Homo sapiens
ggagctcgctgtggcccggatgtcggtgcagctgccagatccgtgatctagtgcttctcgaaaaaaaccttcaggcggcccatggtgtcgatattcaaccagcatgccttggccttcatgtgggaagaccctattatttacaactggctcaactgagaaatctatggagaactgtggggtatgcccaagagggacagaggaacgaatgcccaggaatatttggcacggcctggaaaagaatctctcgtgaattttatgaggcggctctatcgtgggattgatggcgatgcttcctctggttttacgatggtccttcatatgaatggtactcggggaaaaagagttccagcgcactttttccaacacatcactgcatatttgaatgcagcatggcagctattatcaccttacttgtgagtgatccagttggtgtgctcaatattcgtcacatgtcgagtatggatgctttctgactgttagcacgatgctttacaacccgaagtccagattacggtagcaccagtaacactgtactcatgaaagcctgtatagccattatattaccatttgtagttatctattaacgcattcctgttggaataaattgatgctggtcgaactcttttggtggaaacgattgctgtgggtaaggggaatctgattcgattaaagtttttttggggcttaacttcttccaatttaaccggccaaggcgtggggagctttaaattaggttcccattattagggactggacctgcggcagttggttggaa

SEQ ID NO: 677715 - DNA, 569 bp, Homo sapiens
tacttctacaaatgaaatctacctttgaaaagaagatgcaaaggcaacatgaactcagtgagagttgtagtgcaagtgctctacaggcaagattgaaagtagctgcacacgaagctgaggaagaatcggataatattgctgaagacttcttggagggaaaaactgaaatagatgattttctcaatagcttcaaggaaaagagaacaatttgccactgtagaagagctaaagaagagaagcttcaccaggtgatagcaatgcacagccaatttcatgctcctctctagattttcctgaaaccatgaactaccaagagagaaatgggacacaggcctaagcacattgtttctatttatgacttagggatgggcacttgaaaccatggctgaggtccagatgcgctgtagattgtctatcacctgagactgattccggtacagattagaatgactgctatatttgacaaaattctctgcactgtttgcactaaagaggtttattgttgacaagccgtgtgttaaggtcctctgttctgagtaaacatctatgcgtgtgggggggggggggga

SEQ ID NO: 677716 - DNA, 859 bp, Homo sapiens
agctgtacggcccggattacgggatcgctgctgcgcggaagacgatctccagtaccgcgcgcgtcaccgcagtctgccgtgtctcctcccacccctagtccggaccccctcgcggagggatcagctgagcggcaaacggcacggtcgggggagccccgagtccgcagctgcagctggggcctgagaccagagttggcgagggcaaggaaggagcggcccgggcagtggggcggtgcgggcgggcccgaaacagcgaattgggcgagcgctgccgaggaggagtcagaggcgctggggccaggcggagcccgacttacgggagccgagcgggccgcccggtggcggcgaaaaagaacggaagcggggccggcaggccggcgggttgcggcaagcaagggaagtgaaggccggacttcgcgggttccaagaaccgaaggcaacccggcgggggcggggggccggttggccggggtcccgggcccccgcgggcggcggtcacgccggcggcggcgggccggcaagggattgatccaagcactggttcttcgccttggaaggccaggcgggaagcaagggaggggagggaattcggcggcggggccgtggcaacccacagggacagccacgcaaggaagggcgttcggcggggcacagcttggcgggattcccggaaagggcatttaaacgaggccttgaaacccttgcccaaggacggtgttgaatatcacggttctcaagaattcagaacgaacctcccttcaatttcaaggctggtcatctgtcctgatgaggggttctaccagaagtgggaagtttggggtccgttttagggtgggccagggtttacccgatgatcccc

SEQ ID NO: 677717 - DNA, 118 bp, Homo sapiens
gacctgactgccttccgcaatcttgtcctagagcacaggccattgaggcgctgggaacagcctagtgccatcatcactatctttgctttggttacccgattaggaagggcagcattca

SEQ ID NO: 677718 - DNA, 330 bp, Homo sapiens
  misc_feature (280)..(280): n is a, c, g, or t
gaccttttggcccgcccctcccctgtcacttgttgggcatccagggccccgacctgtgcctaaccgccagggttacaaaaggcaaaacttaaacggggtttgggccacgggccaggccactgccttttgtcctcagtgaccatacctccgccaccggccgctgttggggatgccacagccttccacggttgcaaccaaacgttagcttggcatttaagttgcaaaacggcccctggccgggcttgccgtccctgtccagggccgttgtccggtgctgtgnctgtaaaagctgtaggaccctttttaataaatagagaattattaataaaa

SEQ ID NO: 677719 - DNA, 161 bp, Homo sapiens
tatactgcacaccatcatgccgcaggctgcgcttgccgaacgcagactggatttctcactttcctcgatgacgaatcttcctgatccagcagccaattcaacctcgcgcagaacaggggatcgacacctactgtcatacattacacgggggtgtacgtcgt

SEQ ID NO: 677720 - DNA, 397 bp, Homo sapiens
ccctcctgggttttagcaattctcctgcatcagacttctgagtagctgagattacaggtgcatgccaccatgcccagctaatatttgtagttttagtagagacagggtttcaccatgttggccaggctggtctcgaactgctgacctcaggtgatccgcctgcctcggcctcccaaagtgctgggattacaggcgtattccactgtgcccagcctgagtttctgtttagaaacaacagtctatgatagtataatcctctctttttttgtacacagagtaaagaggacaaataggtgaaagaataaatgaaaggctggaatcccacttcccccgctgtcccaggacataggatattgacggataggaggcagcaaaccactcacatggacactcaata

SEQ ID NO: 677721 - DNA, 367 bp, Homo sapiens
cagggagatgatctgaggtcaggagttcgagaccagcctggccaacatagtgaaaccccatctctactaaaaatacagaaattagccaggcatagtggcacacacctgtagtcccagctactcggaggcccaggtgggaggatcccttgagtctggaaggttgaaactgcagtgagccaagattgtgccactgcactccagcctgagcgacagagaaagaccccgtctcaggaaaaataaaaataaaaaagtaggccgggccccgtggctcatgcctcggcctcccaaagtgctgggattacaggcatgaaccaccgcgcccggccactagtgtctaattttcattccgctggccggggccccagaa

SEQ ID NO: 677722 - DNA, 119 bp, Homo sapiens
  misc_feature (81)..(81): n is a, c, g, or t
ctaacttgatcatcaagtcgggatgggggtggtgggagaattgtctttaaaggaaaggcagtttggctcactgagtgaatnagaagggtgaggtgtgagtaatgagagaggtcgggact

SEQ ID NO: 677723 - DNA, 944 bp, Homo sapiens
  misc_feature (307)..(307): n is a, c, g, or t
  misc_feature (800)..(800): n is a, c, g, or t
agcggagtgtggcatcgaggagaaatggagaccaaaactgtgataacctgtctcaaaagcctcctcatcatctactcactcgttttctggatcactggggtgatcctgctggtggcctcggcagtctgcggcaacaacgttactctggggcaccgtagtactcgtccctctaattgatcgagaacatcaaggaaatgtctaccgcatatgtggctcatcgtgaagtggcaacacacatatgagtaggatcattcgagtcatgacaggatgcgtgtgctagcgatagtcgtggttagaccgcaatggnatgcgtggaaaaaactagtaatgaccatggttgtctagtagctcgtggatagctccccatgcgtttgcagtcctccggtaagttgtcgggccaattgtcggaatggatatctgttggctattctgaatcgcatgtagcatcaaccaggacacaactcgttcacgtagaatgaacgtgtacacagactggatagcgccgtattgcacacggatctttgaaccataggtggccacaatgccattggaggacgagacgccccgtgtgctacgttcggcactcgaatgctagacacgacggacgatgtccttgcacgtcatgctggtagtgatgatgacaagaaacttagcaacgcaaagcatggccagaacactcacgtctggcgcgtaaacttcttgtggagagtcactgtgaacatatggcccacgcacagactagtttgggccatgcagacagaaccaactggattgtgtcaccattgccccaggggattctnacaaccaaatgctggaactagttgggccaggtcagacaagatgggtttgaaaacacaggaaagcgggtgagctaactggactcctcgcgatacaggctaagatttttctactggcacgaacattaaatgattgtgggaaattca

SEQ ID NO: 677724 - DNA, 2037 bp, Homo sapiens
agatatgctttctttttctccaaaaggggaggaaatagaaactgagtggcccacgatgtggaagaggggaaagcccagcgtgtacaggaggcctctgtggtgaaggcagaggctaacatggggttcaggagcgaacttgagccgattggcctgaacatctattgtagcagttctgtcgtcactatcatcatctgcttcaactgctcctgactgctgcacatatatacaagacgtgccgccgaccacagtccggttgatcaacaccaccacatccaccactgtggtgcatgccccttatcctcagcctccaagtgtgccgccaggtaccctggaccaagctaacagggctaccacaccatgacgcactacagacagggatgccagcagcaccctagccaatgcagtagccaccaccttacccaggccagcccatgggacccaccgggactaacacagagaacctggctggaggagaagaccgcgaccaaaagacgacagacagccagtccttaaaagccggaactacattggtctgccccgaaggcgggcctactgagaattcactggactctctggctgccactagagaatgtcgagagtgtagagtgatatggtgtgcagcgccggcacgcataagaggcccaggtgagcagagagagatacaggccaggaaacagtacgaacccaagaaaggccgacgcggagacccgacaggaaaccaggggaaacaccgacagctgacaacgatgggagacaaccagacgacgagaaggaacaaacgtgagccgcgacaggacagacgcaagaccaagcaacacaacagcgagaagaacccacaagacaacacggagccacaacaaggagacccaccagaccaacgaccgcggcaggaagcaataggaaggagagacgaagagcgagcaagtacacgttcgcgcgggtctcacgaccgagagagagggatagacagggagcggagagagagggagagagaagagaagggagaaaagagagagaggaagcgaggagagaggagaggagacgagaagaagaggagggataagaagagagagaggaagaggagagagcaacgaggagaagagaagagaacgagcgcaggcaggaggaggaggacgggagaaaggagaggatggagagacggaggagagcacgcgaaacaagagaaggaggcacagaacgaccaagaaaaggacacagacagacagcgacagaaaagagggagagtgaaacggcgcgaagggcgcaaggggcaaagagcaagacacagaaaaacacgaaacacgagacaaggcacagaacagagagacaggaaaggaaaggaaaaagaaacacggagcgcgcacgagacagagaagagcaagagaaagggcacgaagcaagggacagagagaagaacggaaagagagcaagagacggaagcaaccaggagacaggcaggaagaacaagaaacaagaaaagaaacaaagagacgaagaacaaagagaagaacgagagagaaagaaagagagaagaagcaagaaagaaaaggacagcaaacaaaagcaaaaggcacaaggacaaaagaggagaggatagaggaagcagaaagacgagacaaacaggcagcagaaaacgggagaagagagacaaaagaagaaaaacgacgaggaacgacaagaagaacagcgaaacacgagagaaagagcgacagagacagagaacagaagaagagaaagaggaggagagggacaaaacgcgagaacgacagaccggtcaacgagaagcacataggcaaggagggaagcgagagagagaggcgggaacagagagacggaggagagccaagcaaagcagagacgcaggcgagagaggaaacgcagcacagcaaaaaaaggacacacgcagagcaagcaacgaagagcgagagacagcacagagaaagagccgtcaaccgcgacgcaacagagggaagaaacaggacagcgaagacgcaaacaacgaagcacgagccgaccacagcgccaagacgccgagcg

SEQ ID NO: 677725 - DNA, 185 bp, Homo sapiens
  misc_feature (99)..(99): n is a, c, g, or t
tgaaggaaatgactaccttgcactacatgaaaaggatatcgttgccattgtggcgtaattttcgtgccgagtgaatgtggcgcaaacaactatatatcnaaaccgtatatttaaaatgaattactagagagggaatgtaatcatggcaaaagaaattaagttttaagaagatgctagtgctaagc

SEQ ID NO: 677726 - DNA, 318 bp, Homo sapiens
atgtgctaatctttagtacacctctggaataaaccatagtacttacactgttaaaaaataagaccttttctgtcacaaatggacggtgatacattatacaggactattatgtatgatcactcagtttcaaaccattggggcttacgaacacacagtaaataccttgcactaatccgaactattaatatagtcaaaatgtacttatataattgcttgctttatgtctggctcacgcgatggagataaccttcttgacagcaggactgtgtgtgtgctattcgtcccatattgccagagcctacacatgcgcctgccaca

SEQ ID NO: 677727 - DNA, 666 bp, Homo sapiens
agcctgtgggccaggtgttgctctcaggtccgtggatatagcaccgattgaaacacagcgcctctccgtgatgggtacagagattagtcgctattcctggagcgcgaaggttcgtctctcgagtcagagtagtcagtggggatcgattcctcaaagggcaagttatgcgtatataaagtgacagttcatcaaagatagtgagttccttctgcataagtcgcgcgcacgttaatggtagatcgtactatagtcattatatcatagttaccgtgtgtgactacgttataaccgatggtggaagtttgtgtgcagcatacagcaaggtactctgagggcactatctgggtcagtaaatgagatctgcccggagtgttaggcatggtgactgagagcaccagtgaaatatggggcagatagcgtgtgaggatcaggtagggtgtctcagacatacgcaaacccctctggcagggtcccacgtggtaaacaggctagtggcaaagttagtgttagggcacaatacagcagcagccgtaaagacagcagtctgatgcttgagaggtaggcatgggttcaatggcgcaggcattgcagaatgcagcggcccaggcagctggggcaggagcacgggtaccgtcacgccgatagactctgcggtgagtgttacgc

SEQ ID NO: 677728 - DNA, 636 bp, Homo sapiens
gtttgaaagtatgtagccaggcatggtagctcatgcctgtaatcccggcagttgggcaggccaaggcgtttgagcttgaccttgcaactgtgagctcaggagtttgagaccagccttggcaacatggagcaacatccatctgtacaaaaaaatacaaaaattcaattggcatgtgttggcatacacctgtagtctcagctattcaggcaggctgaggtggggaagatggcttgaacctgggaggcggaatttgcagtgagctgagatcacgccattgcactccagcctggacaacaaagccagaccctgtctcaaaaaatacaataaataaataaaacttaccatatcaaataaataaagtatatgacgcctctccccattctcttgctcctctcaccattatgacatgtctgctcccacttcactaccatcatgattgtgagcttcctgaggccctcacagaagctgagcagatgctggcaacacgctttctgtatagccggcagaaccatgagcccaattaaagcttcttttctcgaaagaacaaaaaaatcaaaacacaaaaaaaacaccattgttgaggaccgacttacaccctcagaaaaactttcaagacacacattagtgagggaacga

SEQ ID NO: 677729 - DNA, 747 bp, Homo sapiens
cgcccagtggtaggctgtcctgcccaatcatccaggccgtgctgctgcccaagaagatcagcgccaccgtgtgggcctgaaggcgccctcgggcggcaatgaaggcacccaggtctcccaggagtactaagagggcccgcgccgcggccggccggcaggcctcccctatgctcgaccgacaaaggcccattttaatggggcaccgacgcgccctcgatggtaaagagtcgtgagcctgctttcgagcactgctggtggcaagacgggctcagcggcatcctctttctcacatcatgcatgccatgataagggactgccggtatggcccttctatgaatgcaaccgtatgacgaccacagggagagcacagaaggacggactctggttgttatatccttctgtggccccgcgaggtctgcagcccccttaacgagcaaacatgactttagtgccagtctccaaggtacgtccatcaagacagaacgctgcacagggactcagagcatgcaattgcagagcaaaactgcatacgaaggacggtcaatggacacgcgtgcgacccctggcaggagcaagcctgggcgggcacgtgcccgtcgatcttcccctgtgagggtgcaacgcccttttgttgcagcgcccgtatcttgtgccgcccatgccctggcaggcattctgggcatgcccccacagcctggcccattggggcggttgccagggctggcccgcttccttgccatgaccggg

SEQ ID NO: 677730 - DNA, 129 bp, Homo sapiens
tatgagtacaaatcccccttcacactctgctctatagtataacgtgtacctatcctaactacccttatggagtcaagaggactaagcagacttcctgttatatagattatatttagtagacaagttcga

SEQ ID NO: 677731 - DNA, 150 bp, Homo sapiens
aatgcagcaggaggcgggacccgggcaaggtgcagcaccaagcaggcccacgtggttcttcaacgtcttttcatgtttgacaagccagatcaggagtcaaagaggcttcagctgtatcgccagatcgtgatggcatcatctgcaggcaga

SEQ ID NO: 677732 - DNA, 115 bp, Homo sapiens
catttcatgtcctgaggtctaagagcccaatgaatcaggattgtgattccaatagaaaggaggtcagcatatggaccgtgcaccccgcatgtttatcaccagcgccactcacata

SEQ ID NO: 677733 - DNA, 826 bp, Homo sapiens
gacgccgagaccggtcgcccggagcacagagcctcgctttgccgatccgcgccgtccaacccgccgccagtcaccatggatgatgatatcgccgcgctcgtcgtcgacaacggctccggcatgtgcaaggccggcttcgcgggcgacgatgccccccgggccgtcttcccctccatcgtgggcgccccaggcaccaggccgtgattggtgggcatgggtcagaaggattcctatgtgggcgacgaggcccaggagcaaagagaggcaatcctcacccttgaaagtaccccaatcgagcacggattccgtcaccaaagtgggacgacctggaggaaaatttgtggcaccacacctttctacaatgaggctgcgtgtggctccgaggagcacccggtgttggatgacctgagggccccttggaacccaagggccaacggcgagaaggattgaccaaatcatgtttgagaccttaaaaaaccccaagcaatgtacgtggctatccaggggtgtgttatccttgtacgcctcgtggcaggaaccactggcatcgtgaagggctccggtgagggttcacccaaacttgtgccatctacgagggggtatccctccccaaggcattctggttggacttggtggcggactggtgagcactcaggaaatctcaccgaagcgggaaagtcacaccggcgcgggcgaaccggcgggaataggaagcgtggaggcccccgcatcagcaagaaggcggcggtcaacccccgagagacaaactcagagataccagggcgcggccggccgcagcaccacccgcggtcggccccccacaagg

SEQ ID NO: 677734 - DNA, 199 bp, Homo sapiens
tttggtggcggtgtcgtttcctgggaagtttgctgctgcggcgggaacccccaaagacacacgtagaccatcaccccgtctcgtgacatgaggccaccctgaggtgctgagcctgggcttctaccctgcggaaatcacactgacctggcagcgggatggcgaggaccaaactcaggacactgaccttgtggagaccaga

SEQ ID NO: 677735 - DNA, 187 bp, Homo sapiens
  misc_feature (57)..(57): n is a, c, g, or t
ttattacttaataagatgcaatgaaataacctgtatggcaaggattgcattacctantaaaataggccaaacccaaattgatggacagcatacagtttaacattgcctctaatctttttttttttttttaaaaaggggctatcgcaattattttacccttatgtgggggaaattttgatcatattga

SEQ ID NO: 677736 - DNA, 361 bp, Homo sapiens
taatcagaggctactactttagatgaggcaaaggaaataagcgccttgagccagtttatggtgcagcccactccagaagccatgctacgtcgggcaaagccaatggccagtgatgagcagactcccttggtgaactgtcatactccccacagcaatgtcatcttacatagtattgatggtccagctgctgtcctgaaaccagacgaagttcatgctccatcagtaagctcctctgttgtggaagaagatgctgaaaacaccgtggatactgcttccaagccaggacttcaggagcgtctccaaaagcatggtgaggactggtaatgattttaaggcaatttgtctccttactcaattgtaa

SEQ ID NO: 677737 - DNA, 150 bp, Homo sapiens
gctcgtaccagatatgcagagaaccctagtgtcctgccacaacctggccttgtatcactgtacattttttcataacattttgaacaaggtttatattgactcaagtttaaaagcgaaaaagtgcgactgaaaaatttttacagatgtcta

SEQ ID NO: 677738 - DNA, 445 bp, Homo sapiens
ttaacccagtgcctgtgtgtagtaaagagaacgatatcaagatgcctgactttagaatgtaaacgtgtctggtgttttctctgtgtgtgtgtgtatgtgtttataaagagaacaatatcaaggccttctcaatacaaaagcatccccctggcaattacattcctgtgttaggataagtaagggaagcagacctgccagtgtttgctttggggcttaccacaagataccatccagtccctgtttgaaaatcatgttcatctgccccaactagcttgacagttaccagaattctccatgtacattgtgtttatacaaacatcatttttctctttctaatcagaagtctaatttcaatgaagcaaaatggcttttaaagattttgtgtttctgactcaaaccagttctcatatagtcctgagacatgaactggcttactctgattatc

SEQ ID NO: 677739 - DNA, 347 bp, Homo sapiens
  misc_feature (167)..(169): n is a, c, g, or t
acgctggttactagtgaattaaaacattttggctgtgtatcagttgataaaactgctttgagatctgtaatcattgggatagtctaatctttaagtacaatggagacagataattaaaacattttgctgtgtatcagttgataaactgctttgagatctgacacatnnnccattgtccttaaagattagactatctcaatgattgtttcctttgtgaatgggaaatattgctggcacataaactagtgatgaaaggcctaaaaatgtcctgttttgtttttcatctttaaagctcctccttcctatgtcctaactgggaagtactcttactaactagatatcaaggt

SEQ ID NO: 677740 - DNA, 148 bp, Homo sapiens
tccaatctcaagccatttttatttgccatttccagggaatgtgaaatgggactaatttacctctgattcttctttatactgaggatataaattttggtctagctttagggtagagctcctgtgtgatgctctatcttggaaaacctag

SEQ ID NO: 677741 - DNA, 169 bp, Homo sapiens
gctactacagtacgccatattggtagcagccaggctctcttatcacgcatctagcagtcacgagtcatggcaatgaccattagaataaattcgagtcataaaccgtatcttacacatacgtctatctataaattactgttgcaactatggaagacccaagtagtgttgc

SEQ ID NO: 677742 - DNA, 174 bp, Homo sapiens
tcatactacttcttgagatcttgatggacgaagttgtgcgcaacaacttcgtccatcgagacttttctgcgagtttggatcttcggcgtgtgcagtatggttattcggcgtgtgcaacacgccgaagctccaaacgactcgagctccgaggattccgacgctgaaacagatgga

SEQ ID NO: 677743 - DNA, 353 bp, Homo sapiens
gaaccttccacattttaatttaagatttgcaggctttcaatggaacctccaccacagtagcaagctgcaagctgcacataaagctattacagaagagattgcttttaagaaacaaattggcaggcgatggctatgtacttaaggtatctttggcttaggaagacgagaatatcgattataggccaaacaatccccacaatgcaaattgccatttggattctgcccgatttcttttcgttgaggtattggcctaggaatgctcgactgggcctggaagcttgggggctttagatggaggctggatgatattccctagccgtaaattcgagcttaagagtccataaaccgtatga

SEQ ID NO: 677744 - DNA, 237 bp, Homo sapiens
accccgcgactagcccgacaggtaagaggaagaaccactgcgatgatgagcactggcaacagagagccgggggtagcccccgtggattatggtctgactcaggacgaagctgtgccccgatacccagggcaatcagtcccattgcacaggcgcaaaaggccagcaggaggacgtaaagcgagaacttcacacattgcattcgtccttccaccgacatggctgtcgggcgagtcgggg

SEQ ID NO: 677745 - DNA, 225 bp, Homo sapiens
gttattatacctctcaacgcttctacttcgtaacgcttatacttctcaacgctttatacctctcaacgctttatacttctcaacgctttatacttcctcaacgctttatacttcctcaacgctttatacttcctcatctgcctccttcggccttcttcctcttctcctttgatttttgggcgatactcagagcagaagaggaagaagatgaggaagtataaagcg

SEQ ID NO: 677746 - DNA, 438 bp, Homo sapiens
ttacggtatctctgaatcacaggcctcttctgattctgctgctaccttcgaggtgctgagacagtgccccactgcagaatacacctgaagcatgagcatacagcatataatatgccatcattgatatcctccactccttccatgtccagccactacatcattgtcgttagcagctagatcctgtgaatatctcaaaaaacaccaaaacaaattttgtttccctggagaacactcaaatccctcgaacaagcccactgtggaagataaccatggtccttacatatccaaactgcgtagttcatgtcctcatgttttaaaagggaataaaagtacatttggctctcaaaagcaatctggtgataatttaaatgatactttacgaaaggccaaagaggtgctacagtgtcatgagtcattgcaaaatccactccttagcac

SEQ ID NO: 677747 - DNA, 294 bp, Homo sapiens
cgagagaccgcccgtccccccctctctttaggcgccgcacgagctcggacgcccccgggccctctcctcctcatccctttctcgtgtcctcatcggcacgtggctggctggcttgtgtccaccaaccccacttctgttacacattctcctctgcagaccacaggagagacaggttaggccaccacgggcgatctctgtgaaaggggggatatggggcccgagagaggactttttgccagggtttttcgttaaacgcaccttgattctttattttcacattatcaataaacaaaa

SEQ ID NO: 677748 - DNA, 176 bp, Homo sapiens
  misc_feature (33)..(33): n is a, c, g, or t
  misc_feature (166)..(166): n is a, c, g, or t
tgggaaacgggtctgggggacagggaggctgtncgcgccgggccctgcgcgaggagaaggctcgggggacacagctgccaggagcactccaagttctggtttcctctggaagagcgattagggcgtcctgcaccgggtccttttcaccagacaccttccaagtccntttagacaag

SEQ ID NO: 677749 - DNA, 120 bp, Homo sapiens
taacgggaaaaggaaagattctaacatactggcacttaggatagacggaaaggacctcctgtactcctggtaaacccccatactttccaagtcagattgtcttctctgctggatatctga

SEQ ID NO: 677750 - DNA, 126 bp, Homo sapiens
tgagggggcaggacagcaaagccagtagtcatggtgcatatcgcagattaaacttactccatttcttctgcctgcatttcctcatctcggagaataaaaatcattctacctgccggatgaacctct

SEQ ID NO: 677751 - DNA, 960 bp, Homo sapiens
  misc_feature (493)..(493): n is a, c, g, or t
cgtagatcgtacacactgcacaaaaagatagcaggagaatctactctaacagctaaggcaacagaagccacacaaatggccatttgcaatcatttctcttttgattccatagtttaacacgctcaactttgtgatactctcctcagaaaatgaatgcaactaaagctgtctttccacacaacagccctagcaccctcactgcttcctttcatataaagcacgtgcctttaggagtaaagcacatgaatgggccctgctgcagcaggatttggggagagccactcaaactctgcacctctgcttcccttccccagctgccctgttatccaaactgctgaaaagtctctacaaccctgcacgtagctcatggtgttacgaagcagatgttttgcacttgtcaccacagcttcatatggctgcaaaggttcattaaaagcttgttcagaagcccaagtctatcaggtgacaggtgtctactgccttaatgaagaanggcataaagctgctgctaacaccagtggcagtgacctccaactgagggctttaccatgcaccaaagcttatgctggcctagagccaattctggttttagccacctattcagagacctctcctcagactaatttgcccccatcccactgttcttaatcatgttccctgactcattttcctcattacctataacaacctgatataattttgtttcctgtgaactgtatgcccacctctctagaatggaacagccaccagagtggaaccttcacgtatcttgctcaacactgtgtcctcagcagctaaaacagtgtctagcacagagaaggtccctcaagaaacacatgctaaaccaaaagaatgaatgcactgcaacaatcagtaaaggaacgctatacccctaagaaactgaggcaaaggatttaatctgcgtgaggcagcaccgaaatgccagaatcctctagcgtc

SEQ ID NO: 677752 - DNA, 207 bp, Homo sapiens
  misc_feature (21)..(21): n is a, c, g, or t
  misc_feature (40)..(40): n is a, c, g, or t
  misc_feature (58)..(58): n is a, c, g, or t
  misc_feature (77)..(77): n is a, c, g, or t
  misc_feature (83)..(83): n is a, c, g, or t
cccagaggttgcgagggagantttgttgctagatcatagngatgcgtgatatatgttngcaggaggatgcccgatgngcttgntgccatctagcattttccatgcctgagagatgaggatagatccccgaagatctagatctccatatataaaataatcatatatcatatatcatatatcatatatcatatatatatatatccccta

SEQ ID NO: 677753 - DNA, 340 bp, Homo sapiens
  misc_feature (211)..(211): n is a, c, g, or t
gcaggagaatcgcttgaacccaggaggtggaggttgcagtgagatgagattgcaccattgaattccaccttgaacaacaacagctaacctccatctcaaaaacaaaacaaaacagacctctatcattccttataactgctacaaaatatgccacagaatatatcgttagggctgggcacggtggctcacgcctgtaatcacaacaccttgngaggccgaggcaagcagatcatttgaggtcaggagctcgagaccagcctggccaacgtagtgaaaccctgtcctactgaaaatacaaaaattagcctagtatggaggcaggcgcctataatctcagcta

SEQ ID NO: 677754 - DNA, 467 bp, Homo sapiens
  misc_feature (1)..(1): n is a, c, g, or t
  misc_feature (19)..(19): n is a, c, g, or t
  misc_feature (236)..(236): n is a, c, g, or t
ntcggaccatcattaaaanttacaaactttaggtgatgccacggtggcctcacgtctgtaatcccccagcattttgggaggtcaaggagggaggatcaccttaagccccgggagtttgagacccagcctcaacaacacagaaagaccccgtctctacaaaaatttaaaaattagctggctgtggtggtgcacacctgtggtcccagttactcaggaggctgaacccaggaagattngctaagccccggaggtagaggctgcagtaggccatgattacgccattgcactccatcatgggtaacagagcgagactctattaaaaaacaacaacaacaacaacaactttgtacatgaaaggacaccatcgagagaatgaaaagacaactcacagaatgggggaaaatatctgcatatcatatatttgataagggttcaatatccagaatatataaaactcttaccactca

SEQ ID NO: 677755 - DNA, 746 bp, Homo sapiens
cggggggagtgggagagaaaagatgcgtgtgtcgatagtctcgtaatttgtcccatgtgggaagacgacttgtagtgtccctcatcgggttgcatgcacaaagcaaggtggtcgtcttctacggggtagaggtgtgctcgtcgtggagatgtatatttctccctcgtcgtaggaatacagtctctgcgacccgtcgaggatgtgcgttcgccagcaggatataatgatgagagcccccccctgccgcggagccccgtctcttgttataaagaatttataattctgctccgttgggtaacacccaagaggggagatttgttcacacggcaccaaattggagtacaccatcataggggagatgattataggggccatcgtattgttccctgccggctacaacttcaccgcgccgctccaccacagtggggctattttcctagcgccccacagatatgcccccccctctccagaggagatttttgtggggcccacacactgggggccctcaacgcacacaggggttgctgggcacacacacaggccacacgtgtgtctgagagataatagtgtcggccgcgtggcacgctttctttgtagcgaacaatatattgggcccaagcagttttgttggggggggcatagtcttagacacgtcacgccccccacgatggcccacacattcttaaggaaggttagaaaccccactgagcctttcttgatataaactgcccaccaatgatacgcaa

SEQ ID NO: 677756 - DNA, 519 bp, Homo sapiens
  misc_feature (8)..(8): n is a, c, g, or t
tccccganagtgccaaggtccagtgagggaagccgagctgtccctcccagcgtcagaggaggacgccccatagggtgttgttttccccagacccctttgattggatggatgataagtatccaagggtaggagaaaaataggatcccctgagcaagtttcctcaccctagcttgtccattcccatttatatttagacaagaagtatagcacctaggtaacaggccggctatgtgttaaatgcttagtgaatgatagtgtattactttttattatgctgataatgagtgaaaaggaaggaagtggggaagtgattcacctcactggaatgacccgttgcagtctgcctttccttctggagagaagtagatgaaaacaccccagagccactgcctgtcatgcccagacacagcgtggtcatggctggtctgaaacaccaatgtaatttataatgtgatggttctagtaccttgataatttattttgtatacattctttaaagatagctatgattagtgaaaa

SEQ ID NO: 677757 - DNA, 492 bp, Homo sapiens
  misc_feature (2)..(4): n is a, c, g, or t
  misc_feature (7)..(7): n is a, c, g, or t
  misc_feature (14)..(14): n is a, c, g, or t
  misc_feature (215)..(215): n is a, c, g, or t
  misc_feature (431)..(431): n is a, c, g, or t
  misc_feature (437)..(437): n is a, c, g, or t
  misc_feature (469)..(469): n is a, c, g, or t
  misc_feature (480)..(480): n is a, c, g, or t
tnnncangctgagnaatgaggcgtcggatgttattacccaagacaacagggtaaaatgtctccaggtcatgtcagaggttttcacggcagcccctcccatcacaggcccagaggcctaggaggaaaaagcagtttcatgggctgggcccagggtccccatgctgtgtgcagcctagggacttggtgccctgaggcccagctgctccagccatggntaaaaggggccaacacagagctcaggccgtggcttcagagggtgcaagcctcaagctttggcagcttccacgtggtgttgagtctgtgagtacacagatgtcaagaattgaggtttgggaacctccacctagatttcagaagatgtatggaaatgcctggatgtccaagcagaggtcttctgcaagggcagggttctttgtggagaacccttctgntagtgnagaagggaaatgtgggattgggggtcccacanaagagtccctncttgggaaattg

SEQ ID NO: 677758 - DNA, 420 bp, Homo sapiens
ggctttgggcaagtcacctaagctcaacaaagccccattgtcttatctgtaaaagtgggagtactattacctatctcataggatgaggattgggtgagttatatgaaaagcacttagaggctggacgcgttggctcacgcctgtaatctcagcactttgggaggctgaggcaggcagatcacttgaggtcaggagttcgagaccagcctgaccaatgtggtgaaaccctgtctctactaaaaatacaaaaattagccgggtatggtggcacacgcctgtaatcccagctactcgggaggctgaggcaggagaatcacttgaacccgggaggtggaggttgcagtgagctgagatcatgccattgcactccagcctaggcaacaagagtgaaactccatctcaacaaaaaaagggcggccg

SEQ ID NO: 677759 - DNA, 1645 bp, Homo sapiens
gcctgcgcctgcgcggagctggatgtctggctgggccgctgccgctgggagaccgtgcggttgccgtggggaccggtcgggcccctccctcctccggtcccccggcccatggtccttccccaccgagactgcgccggcggaccgcgtggcgagtgcagccggtgaccctggcagagaggcggcgccggtcccaagatgtcgctagacggccatgtccgaaacctacgatttctttgtttaagttcttggcttattggaaatgcagggaactggcaaacatcttgcttacttcatcagatatattgaaaaaaaattcaaagatgactcaaatcatacaataggagtggaattaggtacaaagataataaatgtgcgtggtaaatatgtaaagttacaaatatgggatacaggaatggacaagaaagatacagagtccgtgacgagaaagttataaccggaggccggcggcagggagctcctcctcgtactattgatatcaccagtccgagacacctacaatgccgcttactaataggattcacagactgcccgaatgctagcgagcagaagcatgtgatcatcctagtggaaaaagaaggaacctggaagcagatcgacgaagataaccaacatagaaggcaccaaaaatgctccagaacacgagcggcagtacggcaacaagggccccaccggggcacacctacacagcgcagagaccggggccgccacagacgacacgaaccgagacggccccaaaaaggcaggaaagagggaacgtcgtaaagcagtggtctcagcgacgaagcaaacaaaagagatgagaagcgaccagtacggaccgcacacgcgacggcaccagtactgtcatcagcctaacgaatgtaagcaagaagcgaacatctcctgtgtggccggggcgacaaggggagaaggcgaaagaagcagcgaaaaaccacagagaacatcgagaaaagacaaggaaagaggagaaaacaaaacaggagagaacagaaaagaagaagggcgaagagccggcacggcagaaacgagacacaagggaaagtaaagcaggaggaaggaagagggagaaaaagaaaagagaaagagggagaaaagccacagaaaaagaagagaccacagagagaacaagagacaaaaggaggaccgagagaaaggacagaggacacggaagaagacgaaaagaaaaaagacggacagaaagagaaccaaaaacaaccagagagaagaaagacagaaaagagaaaggagaaaggagacgacagcaaagagaagcagccaagagaaaaaatagaaggaacaaagagaagagaaggagacagaaacagacaaacaagcacagaaccgaagaacgacgatagagacaaagacaacgagaagagaagaagaaaacaagcagagacgacagagacaggaaaagacgagggaaaggaagagaaagagcaagagagagagcagcgtgaggaggagaacgatcaagacagaggagacagaggaccagacagcaagaagcaagaaaaccgaaaacgaaacgaaagaagagaagaagaagcagacggacagaagacgacaagcaaacaccagaagaaagaaagagaaaggagacacacaacacgaagacgaagag

SEQ ID NO: 677760 - DNA, 493 bp, Homo sapiens
ggtgctgtctagaggtccccgccagaaggtggtgccaggtgaaaggatctctaccgacgaaagacggtaaaacattgatgcagaaaatcgaagaagacacacagaaaaggaaaagttacgtctgtgttcatggatgggaagaatcaatattaaaatgtctgtactacccaaagcaatctacaggttcaaggtaatccctatcaaaataccaatgacattcttcacagaaatagaaaaaaaaatcctgaaattggtatggaatcacaagagacagaatagccaaagccatcctgagcaaaaaacaaaactggagaaatggcattatctgacttaaaattatactacagtcacttcctggtctttttgggcttagatcaagtgcaaagtttactagaaaggtataccaaaacagcatggtactggtataaaaacagacacctagaccaagggaacagaatagagaacccagaaacagatctatacatctacagtg

SEQ ID NO: 677761 - DNA, 129 bp, Homo sapiens
aggagaccaggctgagtggggagggtcagccaggttcaagcccagcttcttgccccttttcctcttttttttgtttgagacagagtctctctctgtcacccaggctggagtgcagtggcgcgatctcgg

SEQ ID NO: 677762 - DNA, 603 bp, Homo sapiens
cccccacccgccctcattttgggggaaaaaaaaaaaaaaacggggtgtcccgcccctttttgggcaaccgcccgcccgaaaaataataacccccccttcccccaaatagttatatgtgtggggagggaatttttcaaaaaaaaatttttttaaatccccttaaacaagccaaattccaaaaaaaaaacccccaccgcaccctttatttccccttgaaataaaatcttgggcaaattttcacacccaaaggttcaaagaatcccacccccatccagggtgcccagccaatcccattgttttttaacccgtatagggccctttatagtacacactttgggttttcaaagagacccccgtttaacctccagaccagacggattttttttgggcgcggtcccttcaaaagtggcaaagatctgggcccccggtcttaaatccctttcttggggaaaaagcccccccggcccctcaggatgaaaattccccccaagggattctccagctgtcccagaatttccccaattttccacctgggagaaattctttacaacacacactctgaaattcttaaattgtgcaaaacgcttattttctccccgggcc

SEQ ID NO: 677763 - DNA, 1025 bp, Homo sapiens
agcaaaagacaaaataggctaggaggaggcccgctggttaatgcaggcagaggctttccaatgggagttgttgtgtgatcgccatctatagtggaaaagatgtactcgtcctgtggcgcacctggcagcgggctgaaccccttcaacacgccacatctgcagctggtgcacgatggtctcgtgtggacctccgcagcagctccccagtggcccacgtggccaggcccctgcccgacctcgcaaccctggacagcctgccgcctgtggaacgagtaacagtttgtgaatatttgcgctacctgcgaagtattattgcacttgtgttggctatatgtgttgtggtgtcttaagtttgttggtactatgacacacacttgctagtgtgttcccctggaatatttatgtgaaattgcctgtcattgcagtgtgtgagcccccaaatatgtacaatggtgcactatattaacctgtgatatcatacatgtttacaacatataaaagatggatagcgtagttctgttgcgtctctgtggctaccctgtgatgtgtgctcacagacctttaccctatgtgacataactccacattgcaaggggacctcttgcacacggtttcatggcctacctactagcacagcatccttctcacacaggtcctctgtaactagacccaattactggccatgcgccgacgggaggacatacttacttctactttagccggccaccataccactaattattctgggctatggcctacctggccagttgcattgacatttcttttatgcgtggacatttgccacctggattccctaattggcagcatgactaaagggatcccgagaatacacaaaccccaggcgcacgggtactgaccaacaactcttgacgggaatgcacgctcccccccattgtctcacgggcgacacggcctaaacagccttactaacggtgggtgcgtcccccttgattacgcagataccctcaacaatagcggtaggctggtgacagtatggtaatcat

SEQ ID NO: 677764 - DNA, 435 bp, Homo sapiens
tgtgtaaagaaataagagacaaaaatataaaacaaaaaatctgacaagcaatttaaatatccacgccaatcttccggagatgaaatgcatcatggctggcctgtggaccttagcagacagatctgacggccgatcacacacggcagagaacgccaagctggagacactgcaaatagcatccaaacctgagaggcgggaccctggcagcagccgataagaaacaagggggcttggactgagttccaagaagagaacagaggaaggggagaaacagtgtttgaagaggctctggtggctgaggaatttctaaagccagcaagaccccaaagcccaagaagtgccaggcaggtaaacactcacccggccaacaggcaggtaaacaaacactcatctggccgactcccggccaaaccagagtgaaaccgcagaacccca

SEQ ID NO: 677765 - DNA, 942 bp, Homo sapiens
  misc_feature (286)..(286): n is a, c, g, or t
agcgggttcccgctagttcccacatgcgacaaagtggggcctggagatggggctgtcttttttctccaaacacgtgccccatccaggaaggccagcgcgtgggtgcattgaagactccaggctgagcatcatctctaccggttggaggttcagcacacagcgggagagctgcgtggccgacaggttgataagggcgggcgggtcgctcatcttccagcgggaatcagagagtgtaaaaatgcagcccacacagtcccagggctgaagatacgactgctgtatcgangcatcgttgtcctcgagctcgacggagtccggagtttagagctactgctcaaaggatgcctgcgatgcatagaaggatcaatgatcgtcgggatcaagtggctcccacagcatgaacgccgaccactcactccgtgtccaccgaagcggatacaaacgtatcaaagtaactggaagattaccgaacgacgataccaaggcccgaaggagtacaacctgagggagtgaagaggggaaactgagcggaccgtgtccacggtgacgtcagctgcgaggtgccagtgctgaacgcccagggatctgatggtggaaggtgagccctcggaggatctttgccagtgggcacaactaccacatcaactccatctccgtcaacagtgactgcgagacctactatgtcggcggatgacctgcgcatcaagctctgggcagctggtcatcaccgaactaggagcttcaacatcgtggacatcaagcctggccaagaatggagggaccttagggagcgtgatcaccaggtatctgaggtttccatgccggaaccactggaaccctcttggtgtacacgcagccagcaggggcccctgggggtctgggacatgtgggcaggctgcctgtgtgacacggcttccagggctttgagagctgtggagcccg

SEQ ID NO: 677766 - DNA, 951 bp, Homo sapiens
cccggtgcgcccgagtgcactgaagatggggtgtgtaggacggttgctcggagcgtcgttgcccgaatgtgagtgcatccttgggcattctgccatgagccctcaggctgtgatgtgaagacgagttgaaaatttatgtgtgttctgtccagtcaagcaaacatttattccagcaccagttcctcatgcatgaccttgttgtcaccaagtaatgaccctatttaaggggtacagccgtgtgtcagtggagagttacaaagaccttaagctttgatggacttcaaggggaaatatggggggctttctctatccttggggaattccaccttttgtgtgtcctacaagaaattgtggttgtttttaggttgacaaaggctaacagcgatattccacgatgtgaccgtggtggaagtttggtccgcaggtctcaggtggattccccaaattttacgccattctttgcctggaattaagttacaccaagaaaaagaagtggtggcttgtgcggccacattgaacattcggcactctttgtacaagacttaactaagcaagatttccccgagactacggtggtgctgcaaaagggttctggtcttgcacaaagaggtctcttcataaatttgccccaagtgggcgtcatcaagccatgtgaggcgaaaagactccccggttgggcggagcgtggaaaaacctcccgttgtgagggaggtgtccattttttcacccttggaagtctgccccgcgactggagaccgattctctaaagacaaggcaatccaggtggtccaaaaaggagcttagagggaaacgtgaggccccgttttttgcctctcctcgggagaagcagcgggacccggtcactcaacggtgcttgtagggggcctcgttctagatcacctggtgcgtgtggggaccacacgtggggaacaacttctatggtggggcaca

SEQ ID NO: 677767 - DNA, 540 bp, Homo sapiens
  misc_feature (17)..(17): n is a, c, g, or t
  misc_feature (22)..(22): n is a, c, g, or t
ggttcttgcttacaaanaatcntacattgccactgaaacatcaatgttttactggctctgccccttagtggtcctggtgaccctacctcaacaatgcatttgggcaaagatcttactggctgggtggtacaaagccaaatcagtaaaattgtcatcttggtattgtcctgaaaatagtcccgaagaatccaatgccggtaaagtactgtaatagtgatgtcaccccttgtgagctcccagtactagtgattgggtctgcattcccagtgaccaaaatcagctatgtggccaggtaattcactgctgagggctttggattttcctttatgaactactgaaatgaggtcaacttgactattactaagggacattttgctacaaagaatgttagttttgccaattccctttccaaatctaaaatttattttaaccaggattttagatgtaaacatcaagtagttttggttgtttcaatgaagtaacatgtttaagctcacattatttgaagtacttcagttcctattgccatgaaaattgtat

SEQ ID NO: 677768 - DNA, 639 bp, Homo sapiens
  misc_feature (43)..(43): n is a, c, g, or t
  misc_feature (112)..(112): n is a, c, g, or t
  misc_feature (197)..(197): n is a, c, g, or t
  misc_feature (199)..(199): n is a, c, g, or t
  misc_feature (224)..(224): n is a, c, g, or t
  misc_feature (241)..(241): n is a, c, g, or t
  misc_feature (331)..(331): n is a, c, g, or t
  misc_feature (387)..(387): n is a, c, g, or t
  misc_feature (454)..(454): n is a, c, g, or t
  misc_feature (530)..(530): n is a, c, g, or t
  misc_feature (536)..(536): n is a, c, g, or t
  misc_feature (553)..(553): n is a, c, g, or t
  misc_feature (560)..(560): n is a, c, g, or t
  misc_feature (565)..(565): n is a, c, g, or t
  misc_feature (616)..(616): n is a, c, g, or t
ttcagtgtaaaatttcaaatcttccaaaggatggagtcattcngggaggatgaataaggataaacaacaaaaggtggcccaaaaaaccacaccagaaaccctgtattccccngggtagagccgaacaaggttgggaaagccccaacaggtaggcagtagccattggctttttaacaaatgggcaacaaccctcccancncaacatgtcagaacaaaggccagcnagtcagcaacatgtacnaaaaaccaaagcaaaaaaccaaaaaacaacaacaatataacaaaaacccccaacccaaaaaacaaccaaccctaaaaaaatcaaaactcnaaggtgattaaaaagtagaaacccatcccaaggccacaggcaagcaaaaggaaaanaccaaggcaaaggaaaaaaaaattgtgggtataacactcagtatgtaaatccctggacctcacaganagacactaatcattaatcagaccatcagtcatgtcacaagagaaccaataccaacattcctcccgtcgagcacagncataangagattttttatttatntgtttantatanaaaggggtgggtagagaggagaggaggcagggaggtgaatgtattatgtanaaagagaaatgagagagagcatc

SEQ ID NO: 677769 - DNA, 229 bp, Homo sapiens
  misc_feature (33)..(33): n is a, c, g, or t
  misc_feature (42)..(42): n is a, c, g, or t
tgcactccttcccatctgcaagtagctagtgcngtagtgcantttcccattatatcactccactagtagtctgacctctcctgtcagagtgctccaggctaccacatagcctttctttccataacatacagctaagatgtttatttccccattgtgcctatgctatggtctgaatgtttgtgtcccttcaaaattcatatgttaaaatcttaacctgccaaggtgatgc

SEQ ID NO: 677770 - DNA, 2043 bp, Homo sapiens
  misc_feature (1756)..(1756): n is a, c, g, or t
  misc_feature (1884)..(1884): n is a, c, g, or t
tggtttcgtacgtcgggtgcgtggtctgggttctgggcgtccttgcgctaggctggcttggtgggagtggcctgagctattgttgtggtgcgtggcttggattgtatttggggtgcttgtgtgctgcgcgcgcctcttcgtgtgggccgttggcgtgtgcgggtggtggtggtggtggtatgtcaccactctgtgtgtggtgcgttgcctgcttgcgctggtgtgttgtatcttcgtcctcatcttctgtgtggggtggggtgtagcacctactcttggcgtgcttgggtgcttctgtcatgctcgtgcacctcttgtggattgttggttcgcggtggtttgttttttgtttgttgcggcctctgcgtgtttttgtggtgggtggacggttgtctgtccctcgtcgtcttgtcgttgttgtgtgtgggtctgtgtgtggggtctatttttctctctgtggtgtgttggttggtggtttcctctctctcactgtggttgggtgggggggccgtctggtggtgtcgtgcgatgctaggcggtggtgttggtggtgtcgtgtggtggttgtggtggttgggtcgtgctgtggtgttctcggtggccgtgagtggtgggttggtgggggtggcgtccggggtgatgtgtgggtggcgtgttggggtgtcgtgttttttgtacgttgtggttgttgtgtcctagcgtctgtgtgtggtgttgctcgtggttcctggtgtgtttgtgttggttttgtttgtggtttggtgcttctgtcttatgtctgtgggtggtgtggttgttgtctcgcttctggtttggtctggggctcttgtgttgtgttgttgggtgtgtgggtgttggtgtttgtgagtggttggtctttagttgtggtgtgtgtggtgtggtcactgtgttggtgtgtgttggttggtttttgtgcgtcgctgtgtgttgcttgcgcgttgcgtcggctgtggtgctgttttggttggtgctgcgctcgcttccttttactggtgtcgggtgtgtgcggtgtgtgtgtgtgtggtgttcggtgggtaggtgtgtatgctggttcgtctcttctctactcctgtgctgtgtgtgcgtgcactgcgcgcgtctcgctgcgtcatgtggttgtcctcgtccctcgctctgagtctgtggcgtgtgtggtgtggtgctctctctggtgtagttgttttgctcggcttggcgggtcatcgcgctctgctcgctgctgtgctttgctcgactcgctctgcgggttgcgtgttgtgtggtcgtcgctgcgttgcgtgtgtcgcttctctcagcctcttctctctcgcctgcgtgctgtgttgtgttgtgggtgtgtggtgatgtcgggggtgctttgcgtgctgtgggtgctcagcacgctcgctgcgcgctgtcactacctacctacatcgctgttgcgtcacacctcactctgctcgctcgccccctgccctcgtccgtccgtgcgcgcgtggggtgtgattgttcgcgtgtcggcgagtgtcgattgtacgtgacatcgcgctccctgcgctgcggcgctccgcgcgcgcgcactggtgtctctactgctgtgcagagagagctgcagctcctgctccgtccccgtcgcgcgtgtgtgtgtgtgtgtgtgtgtgtgacatccgcacgtcgattcacttcgcttgtgtctttttgatgtgcgtgtgccgcggcagagaccgcttcaccaccgtcgcggtctgtctgtgtnctaggtgttgtgtgtaggtgctccacgccacctgtctcttgtcgctctctctccgggcgtgctagcccaccgcacgtcgtcggtttcgacgtgcatctgtgtctgtgtggtctggagtcggtgatgcngtttgttgtgttgtgcggtgcgccccacctgtcgtcctgtctgtctatttccatcaccttcccactacgacagagtaaaaaataaataacaaaataaataagaaacataatatgcaataataataaacaaaatcaattatacaataaattagagattta

SEQ ID NO: 677771 - DNA, 871 bp, Homo sapiens
tctctctgcctagcgtgcttgctcgctctattgctttccttccctccctcgtgtcttccttcgcacgctgtttggtgattgtggctgctcgcgacagacatgggaggctggtgtgcatgaggacacttgtcatggcctgcctctaaacctgtggatgtgcagctggtggtctgcagcctgctgtacctgatgactccgtgagagtgtgtggtggtgctgtgctgtgctgtgtgacgttgctgtgttgccctgtgtgcactggtggtggtgcgttgcctgctgatgtgcatgcttgtgttctgtgcgtgtctgtgtgtgcaccccgtgctgcttgtgtgctgctggtgtgccatataccttgtggagtctgtgcagcaactgtgcgcctgtggatgtgccatgatgtgccgggggcggactgccagctggcctgaagctgcaacatgcgaactgtgaagacccctgtgagtggcatgggacagtcctggcccctgggcagcggacaccctgaatggtccctggtgctcacttggacatgaactctcttgatagagcccaagcagccaagaataaaggcaataaatattttacaaggcaaggaaaatatgaacaagctattcagtgctatactgaggctattagctttgtgccctacatgagaagaatgttgacctttctacattttatcaaaacagagctgctggcctttgaacatgttgcgaaaattggaaagaatgtggcacaaggactgtacaaaaatctgttgaacttaatcccaatatgtgaagctctcttaagacgtgcaaagcccatgaaagctgacataagaggcatgttaaagagtcctggcgggggatatagaagtgtccaa

SEQ ID NO: 677772 - DNA, 682 bp, Homo sapiens
ccttccggtgtgtgggttgtttgttctttcgctcttcgcagtaaattttgctgctgctcagtccttgggtctgcactacctttatgagctgtaagactgactgtgcaggtctgcggcttcatttctgaagtcagcaagaccatgaacccaccagaaggaagaaacaaactctggacacatctgaacatctgaaggaaaaaattccggacacaccatctttaagaactgtgacactcaccgcaagggtctgtggcttcattcttgaagcaatgagacgaagaacccaccagaaggaaccaattccggacacattttggcgaccacaaagggaaaatcgactatcaccaagcggtggtctaatactcaacatttgtcagtgcccactggaaaccattctgagactccctgcagctgaggatcacagcttttcattgtaatgatgtgaattattgctgaactgatgacctcaaactcctgcaaacaacttggatatcagtgaccccatgagaatctgtaatatcactggacatgaaaagaagcctggtcccttctacaaccatgacatatatttgtatttatggtcctctggagaatcttgccttttcccaccaatttttattttactctatctatagtattgtaatttcagaagaagaaaataaactacattccattcattgcc

SEQ ID NO: 677773 - DNA, 602 bp, Homo sapiens
aggtctgagctgttcctgtgtatccctgtacttggtagatcgcatcacattgttggactagaaaacagcagtttcacgtggttcaacgtgatagctgttcaacaggacattggggggtttcctatttcttgccattataaacaattcagcaggtcaggtgcagtggctcatgcctgtaatcccagcactttgggagaccgaggcgggcagatcacctgaggtcaggagttcgagaacagcctggccaacatggtgaaaccccgtttctactaaacatacaaaaattagctggccctggtggtaggtgcctgtaatcccagctacttgggaggctgaggcaggagaaccacttgaacctgagaggcggaggttgcagtgagccaagattgcatcactgcactccagcctgagcgacagagtgagaccctgtctcaaacaaacaaaaaaaaaaattcagcggtgaatgtccttgtatgtccttaacggagtttaaccatcgtacccccaaagcatgacacctctttggggcatctagaagagtcaggaggatggagctgcccatttgcatggcacggggagaccagcagagactgatacataac

SEQ ID NO: 677774 - DNA, 915 bp, Homo sapiens
ctcaagatgtcctctaccttcatctgggatggcctgcctggggcgggatgtcacacactggccccgcggcctcaaagatgtcctccaccttcatctgtggaacatgcactggccatccatgtgagctgttcaatgctgcatctccgagcatgttcacggccatgttcctgtgcgcaaggccttcctgcactgggtacacggtgctgagtggtgcatgtgactgatgatgtgatgttcacctgaggcctgagatgcaacatgaactgacctgtgtgtcctgatgtaccagcagtaccatgtgaacgccactgtgcctgatgtggaatgatgtgtgctggagatgtactgaatgactgaccgatggaatgtgagtctgtgagttgcccagtggcccccaatgatgaatgcttgctctgcagcattggcacgttgcatgagtgcagtgttgtgcctgtgacctgtgtgtgcctgaacgcacaagacaagttagtactaacacccaccacgtgaagaccatactacgactgcactgacaaccctagctattaccccatcgcccatattgagctcccacatttgcaccgacacccattcacttgactatgtactataaatagtgccctacattcacatacccccaaacacataaacaggcacaaccgtatcttgcaacccttagccatcaccttgataccttccatgcatcactttaattttgccaagccctccctatgatgaccttggacacgtataccaaacgtcgcaattaggtccaaacaaccgaaccttgcggatcacgacaggttcactacattcatcaccgacggagataactactccactacaaactcctcattacggctttgtccacaacaaagaacaacacacacagaaaacacacacacacacacgccc

SEQ ID NO: 677775 - DNA, 205 bp, Homo sapiens
aacagctccatcggagggtcacactgcgcatatgcaaatggcaggatccgaggggctgtatatcttcggaggaacagaaatagatagggaaaacggagtcataaaattagcacagaaacctaaaacctaaaagacgtaccaaggaggaaacagtgactagtgatctgggtctcttgcggaatccattttcttatctttactttct

SEQ ID NO: 677776 - DNA, 555 bp, Homo sapiens
ggaggaggagaaggagaagaagaagaagaagaagaccacaaaagacatgactatccaatttttattgacaaccggcaaggatataagaggaagaataatgtccagtgtacgtgtaccacaagaagttctgtactgcatcttaggacctagaacgttgatccattatcacgcttgatcaagagacgtttttgaactctattatcacttagcagtttaagcaacgaacagacactatttgtatgtagatgctttgtatcttaactgggtctcaacaacaaaactcttttccttactaacagcacgcatacgagtagaaacttcagtcgaagctccttgtgggatacctattgtaccacgactacaaggcatactacgacttctcttgctgtccgaactacttaacaaacagcaaggcatgtctaaccacttaagcatctatccaacagtcatggctgggccgcacgtggctcactgcctagtaatcaccagccagctttcgaggaagcggagcaattaagggcttggagaacacacgggaggcaacatttcacaacc

SEQ ID NO: 677777 - DNA, 274 bp, Homo sapiens
gcatccccctttgttgctaaccaccattaggcttccttccccaagggttaaatggaaacctgcccttttgaaagacatgctccattctctgagatcaaccagctgtctgatgctgccccttccttttgcaggttcgacacaaccgaccagcattccttcctgataagaaacccctgaccatggagtggctctgactagcctatggaggctggacacagacaggcttcgcatccttggcttcaccctttgacatatagggcctactggaatccat

SEQ ID NO: 677778 - DNA, 148 bp, Homo sapiens
cctctccgtgaggacagggcagtcttggtgcgcagcccctctcctctctgtcccctgacactccacagtgcgcctgcaacccaggcggccttatccgcgcagtggcggcagttcagaaataaagggcccatttgcgggatgccgcatt

SEQ ID NO: 677779 - DNA, 193 bp, Homo sapiens
ctgccgaatagcatacaccgcagttcgccgaacagtgcgtctctgcgcccagtactgcaccgccagttgtgcaggcggacatggttgtcgaagtactgcacacaacgcaggtttgaggccggctttctcattggcctcgtatccacgccagcaggactttttcctggttggtgccggagccgacgcatgatct

SEQ ID NO: 677780 - DNA, 449 bp, Homo sapiens
ttagaaaaggaattaggttttagatggcatagtggcttaactggactgaatgcaactattctttcaacttcatctcaatagtgatttttgtatcagaatcttggccaagttgtttcattgatttactagatgttgtgcttccaacatctttcattttaagaagttcctagtgtctgatttggcccttgaggttctggtaattgtcgacctgtatcctaagatgtgtaattcagaaatccttgtatctaataaatgcttgttgtacataactgataattttaaaatgttttctttgtgtgcttttggtcatgattcatgtcagcatccttaagcatactatgtgtggctgtcccatttggaatttaaagacaaaaatacctcaacgagtcatgctgacataatcatacggggaaatgctgtattccagaataaatttctatggtaccata

SEQ ID NO: 677781 - DNA, 281 bp, Homo sapiens
tctaaaaaaaaaaaaaaaccccccttttttaaaaaaaacccccccccaaaaaaaagttttccccccccaaagggggggggggccccccccccccccccttaatttgtgagaaaaaaaacttttccctcaagggaaattgggggaaaaaattttcccaaaaccccccggagggggggtaaaaaccaaaaatttttaaggagaaaggggggggcccccgggggggagggcccccccctttaaaaaagacgaacgaaaaggggttcccaaaaactgtccggggg

SEQ ID NO: 677782 - DNA, 408 bp, Homo sapiens
  misc_feature (25)..(25): n is a, c, g, or t
  misc_feature (33)..(33): n is a, c, g, or t
  misc_feature (356)..(356): n is a, c, g, or t
aattgtgatgttagggtgtcaattntagatttntcctgctttctcttgtggacatttagtgctataatttccctctacacactgcttgaatggtcccagagattctgctatgttgtgtctatgttctcgttggtttcaaagaacatcttatttctgccttcatttcgttatgacccagagtcatcagacaggtgtcagttccagtagtagtggtttagtagttctaatctgagtctagttgatgcctatgtctgaggagagtttgttataattctgtctttacattgctgagagtgcttactcccactaagtggtcaaatttgggaataaagtgcagtgtggtgcatgaaaagaantgtatattctgttgatttgggcgtggagagtttcctcggtgcccgaaattcc

SEQ ID NO: 677783 - DNA, 110 bp, Homo sapiens
agtttccctgatacactacctgtatcacctgaaccacacgctgtacaatgtgcagagatgggcaccaacagccacgggatcctcagcggcttcaacaatgacggttctgc

SEQ ID NO: 677784 - DNA, 982 bp, Homo sapiens
  misc_feature (779)..(779): n is a, c, g, or t
tactacagatatcagatgtgtgttcataatggtatctaccgatagtcgcggaagccgcagtggagtacgagctcgatgagtggctatagttttatccccgcggccacagttaaaatggtttaaaccaacaagggggagtgcgcccaataccggggagcgtgaacccgccacttcaaacggagatattcgaccacgtatctgccaggggtcttcggggccgtaaaacacaccgttgtgaccaactgggtccccaagagcagcgctcggtgaagtcgtgtgtgccccccgcatgccaactaatgataatcggttcatttgccgcacccaccagtgccggggtgttggtttggaatgtagccgcacgcatattgtggagagggtcagtgccgccgcctccgcggcctcaattgttgataacccggggaacaatacacacacggtctgttaacagaccccggcgcaagctcaatattggaaacgcccccggctagtgcacgctcacgctcgtcagacccgcgccccaaaacaatggaataagggacacaacaaaagggggcctcgcggtgaagaggacacgcgggggtaaaaaaaacggaaatgaagccgcgcgaaaaaaatcgattctttggtaacgccccatgtggggcacccaagccaccagcccggtcccccgacatctcgcgaaccagccacactgaaacacctggttcagacggggaatttacaggcaccgcataagtgcccaccacccacgccactggggacaaaaggcgttagantgcacccccctccacgcgccccctgctagagagaactaaaggactctccgtgcccccgggagggtcccaaccatctgcgcgagagaccacgggcaaataccccacgcgcgatccagagggaggaaaaagaccaacgaagaacaaaagcacgtctcaataaaaacctgaacccaaggaggtttttcaaaaggcaccacaagaca

SEQ ID NO: 677785 - DNA, 886 bp, Homo sapiens
tctgtccggggcgtgcgatatgccagcctgggaaattcgccaaggtccatcttgggatgccatttctaagacctactggtaccgtgacccccgacctcatgtggaggcagactgtgattcaccaagtctccctagttcagcgatttcactgaccacctcgttgagacaatgccagattctccgtgcagcggattcaggttccaggtgtggctcacaagcatagggttcttctgcatgatccagtctgtgtaagttacgcgtgtaactgttgacactctgcaaatacctatgagaaaaaggttattggaaatctgtacgggtttaggccgcagcaatgccaagatctgaagttgggtacggcttgtattgtgtggcaagcggtcccaatcttaataaactacagtaatggaatatcacccaggataatatgtcacttgtgcgttttgggtctgcaaaggtagatagactccgaggtgtatccttagtcctcagttagaaggaacacctcggggacgagtcctcttgacaggagaaggcacttgaacacggatactggcatatgaactaatttccccgcggggggggttaatttccacccttatggtcaccagtccttacagaccatttgagggcttcctcattcgaattaaagaccgtatcgcattattgggatcccgagaatgtgaggaaacaaggtggatggcttcttatagaatgcttggcggatgctacttttataacacttccaaatgctgatgccattattaatgcccgggggatacttggaacgttcacgacgactggctcgaaaaaaattctcgcacgtaatattgaaggagagctaatagcccatgttgtgtccacaggggcttcagggcacaaaaag

SEQ ID NO: 677786 - DNA, 512 bp, Homo sapiens
aatggctgacagcatcattgtgcccaccaagggctcaatgatttggtttggctgtgtccccaccctaatctcatcttgaattgtagctcccataattcccacgcgttggggaaggacccggtaggagatgcttgaattttgggggcagtttcccgcatactgctctcttggtagtgaatcagtctcacaagatctgatggttttataaggggcttcccatttcacatggctctcattctctcttatctgccgacatggaagacatgccttttgccctccaccatgattgtgaggcctccccagcaacctggaactgtgagtccattaaacctctttttctttataagttacccagtctcaggtatggctttatcagcaacatgaaaatggactaatacactcaggaagctgggtggtgcccaggtcagagagaagggaacctgggataagaaaggctctgagatgaggtgcctctgtgcagccgtcccggaaacaaagcagccagaaaaaaa

SEQ ID NO: 677787 - DNA, 112 bp, Homo sapiens
gtccaacctggcttgagtctctttgctgtagtgggggctcagagcgcttcatcttgcgccaaggtattttgcgcaaacatattatccctgtgattgccacctgcgcgctcat

SEQ ID NO: 677788 - DNA, 286 bp, Homo sapiens
gagcatggacggaactgaaaagctactggataagtcttgggaagagatcagggctcacactaaggcagtgaggatgggaatgagaggacggctgacaagagtagaagacaggtcttgagaccatctgcctggatgtgaaagactggagaagtaccagatcagtgagggactccgtgaaatgccatggctcggtgaacacgagacatggaattcttttgcttgttggaagaacggagtctcagctcggtcgacccgcccaggtgggcgtccgggggctgtgatcaca

SEQ ID NO: 677789 - DNA, 850 bp, Homo sapiens
ggaggaaacggttcagtgtcccagcaggtttcaggttcttatcatcatctgtgttggcggttctggatgcgcctcctggtgcttgctggaagctcatccatggtagcctgaaagatcatccagtccgaatgtagaataagctgatgctggccaattggtgtcccagtagatgagcatcactcggtcttggtcttttacatgagtggacgatcatctgttcattatttggtgttcccgcctgtgagttctttcaccacaagttggaccatcctgggagtgcctgtctgtggtggtggtctcattcagtcctcgacattgtcctcctgttccgggacgcgccagtgatgatggctctgggcctgctgattctgctccggctgtggcgggtggcccggatcatcactgggaattatcatctcacttaagacacgttcagaacggcaactcttaaggttacacaacatgatgaatgtcacaattggtccagccgaagattcatacaccttgagttcgagctgctctgagaaggaacacagacattgaacatgacttaacagaactattgcgacacgcatggacttctgggtcgaagtgaactaggacccgggaccagttcccctcaggtaggaagatcactgtctcatgggcctgtgctgtcacgagaggaacagtgccctcctggaccgttggatgagagggtcggttagatactatgctccctcctgcagcatggatctgggtggaacagctgtgtggaagtccgtaccacaagagctgccatacattcacccacatgatcaatgttccatttctcagtgacattacctaatgaatgggacaacgggatggc

SEQ ID NO: 677790 - DNA, 600 bp, Homo sapiens
  misc_feature (1)..(1): n is a, c, g, or t
  misc_feature (7)..(7): n is a, c, g, or t
  misc_feature (63)..(64): n is a, c, g, or t
  misc_feature (67)..(69): n is a, c, g, or t
  misc_feature (71)..(72): n is a, c, g, or t
  misc_feature (74)..(74): n is a, c, g, or t
  misc_feature (574)..(574): n is a, c, g, or t
  misc_feature (599)..(600): n is a, c, g, or t
ngggggnacccgggaatgcggccattatggctcggggcttccttttcttcagcgaggggggcnnctnnntnntnagcgaggcggccgagctgacgcaaacatgcagatctttgtgaagaccctcactggcaaaaccatcacccttgaggtcgagcccagtgacaccattgagaatgtcaaagccaaaattcaagacaaggagggtatcccacctgaccagcagcgtctgatatttgccggcaaacagctggaggatggccgcactctctcagactacaacatccagaaagagtccaccctgcacctgggtgttgcgcctgcgaggtggcattattgagccttctctccgaccagcttgcccagaaaatacaactgcgacaagatgatctgccgcaagtgctatgctcgccttcaccctcgtgctgtcaactgccgcaagaagaagtgtggtcacaccaacaacctgcgtcccaagaagaaggtcagataaggtggttctttccttgaagggcagcctcctgcccaggccccggtggccctgggagcctcaataaagtgtccctttcattggctngagttgtccccttggaaaaaattann

SEQ ID NO: 677791 - DNA, 610 bp, Homo sapiens
  misc_feature (1)..(1): n is a, c, g, or t
  misc_feature (7)..(7): n is a, c, g, or t
  misc_feature (63)..(64): n is a, c, g, or t
  misc_feature (67)..(69): n is a, c, g, or t
  misc_feature (71)..(72): n is a, c, g, or t
  misc_feature (74)..(74): n is a, c, g, or t
  misc_feature (610)..(610): n is a, c, g, or t
ngggggnacccgggaatgcggccattatggctcggggcttccttttcttcagcgaggggggcnnctnnntnntnagcgaggcggccgagctgacgcaaacatgcagatctttgtgaagaccctcactggcaaaaccatcacccttgaggtcgagcccagtgacaccattgagaatgtcaaagccaaaattcaagacaaggagggtatcccacctgaccagcagcgtctgatatttgccggcaaacagctggaggatggccgcactctctcagactacaacatccagaaagagtccaccctgcacctgggtgttgcgcctgcgaggtggcattattgagccttctctccgaccagcttgcccagaaaatacaactgcgacaagatgatctgccgcaagtgctatgctcgccttcaccctcgtgctgtcaactgccgcaagaagaagtgtggtcacaccaacaacctgcgtcccaagaagaaggtcagataaggtggttctttccttgaagggcagcctcctgcccaggccccggtggccctggagacctgacgaccttttacaatactcctcggtcccccccctattgcccttacattataacaccaacan

SEQ ID NO: 677792 - DNA, 328 bp, Homo sapiens
tcacgggagaagtcttgctctgtcaccaggctagagtgtgggtggcatgatctcagctcactgcagcctctgcctcctgggcttaaaagattcttgtgcctcagcctcccgagtagctgggattacgggtgtgtgtcaccacgcccagctaattttttgtatttttagtagagatggggtctcgatatgttgcccgggctggtctcaaactcccagcttcaaatgatccacctgtcttggcctctcagggtgctgagattgcaggcatgagccacggcacccagccctagtatgtacatatttatacaaacataaaacgcattttgtg

SEQ ID NO: 677793 - DNA, 689 bp, Homo sapiens
tacaaggcgtgcgtggacagcttcctccagcagcagcatgtgctggtggtgcctggggtgtggtcctgtgccctgactcaaaggtggagtgaacatgccaccccagcccccgctgtgacccccagaacctgtgcaagacctgccatgcccctgcccagactgaggctctttcccaactgttctgctcagtgagtgacactgactgccaaggaggagctatctgcagaccctgctgtgacccacctgatcctccacagtgtgccctgagcccacggcatactccaaggtcatgactggggacagctgcacactgcttgtgctatcaagctcatgaccaacctggcgctgggtcgaggtgtgccttcctggcctggtgatactggtgcttctcggatgagctggcacgtgggacgtggtggtatgtgctggcccatgcgggaccacaccctgaaggaggtacgctttctacaaccgcactgtactccgttccttctgtcttcacacacagccgtacgacaccaaggcccctgaaaatggccagcatccaccggctgatggaggccttcatcctcagtgctgcagacccagttcccctccactgtcagcactgtgtactggacaagtgagaagctggtgaaggggccccgggattgccctgctgctggcgactccggccccgctgcctctct

SEQ ID NO: 677794 - DNA, 683 bp, Homo sapiens
ttaggggtcattgggccccccaacgggcctactcccccgtctttaaccgcccgttgtatgtcgccccccccgtttacacaccgcccgcgctgttttgctcgcgcccacccgggtggtatctcactcaccccctggcgcgtgccccccacattgtgttgttatatataggagaccctacccgccgtagtgaccgctccgcactatataatatgttgcgcatagccgcggcgtgtgtggctttatcgtctcgcaccaccaacttgttatttcagcgtgcggtgtctcctttaatgtggtaacacccccctctctggcacacaacgccccccagagagtctccattttcacagtttttctccctcaacccacaccttttctcctgccggcgaccttttcggtagcggcagcacacatcttcttgtggttagaccccagggcgcttctccccggggcatctctccgcctccctttttgtgtggcgcctacctatctccctacgctaatcgtggttcaatctccccccccctgtaaatttgctccccatcaccacccccacaacacacgctctggtattagaacactcgccccccctctaatatcgtgcccttttcgttagaactggtttttacaatactgataggctactcccactttatgagattaagggtcttccccacaaaaca

SEQ ID NO: 677795 - DNA, 867 bp, Homo sapiens
  misc_feature (41)..(41): n is a, c, g, or t
  misc_feature (74)..(75): n is a, c, g, or t
  misc_feature (93)..(93): n is a, c, g, or t
  misc_feature (378)..(378): n is a, c, g, or t
gcactgtagattatgattcagaaagttcatcctctgggctnggacacagtagtgatgacagcagttcacatganntaaagtaaatacagctcngcaggaatcctgaaaaataattctaatgttagtatcttaggaatagcaaataatgtgcaggtcaatagagaagaaagcttcggtaagtaatacatgcttacctaaaagcttcactgtcatgatgtgaggtatgtaaattcgttaaagatgtgggtgtaatataagtggtattgtagagtgtcgtcgtcattttagggtaagactgctgtgtaaagctaaaaatcctgtgaatacaatactattgcttttacaggcagatcatgtattgtgtaaacaagatcttgntcctccaatgaaatgacttacatgtttataaaaagaccgagtcggtgttattgaatttgacaaagataggtgaagtaagtagcatttaaaatcaaagatgagagcattccttcttgtatcagtgggggaggttaccataaacacgggtatatgtggttaaacctatgaagagtaacagtgtagaagcagactggctgtctcagatatgtgctgatattttgggatacctcccctgtagctggaaagcattatgttgggtgttagagggagtattttaaaagtatttagctttcagatctggacgctaatgggaagttctttgaggtggagcatcacaggtggtgttttaagaaatgattggcggaataattggcggagaaaatgaaaattttttcaaacacgccagggtggggaaaacgtggcgcgataaggaagatgaagggggccaaacaacggggggaagaagaaaaaattaaaaaagggggaggg

SEQ ID NO: 677796 - DNA, 251 bp, Homo sapiens
ctgaccatttatggataatacgcctgcattgaagtcgcctactgcttctgctaccaggacatttaggtagaaggtggctcggtcccttacttacattgtcatcatccatcacacacctcttacagcaacaccaatgatactagggtaacattctctatacatcctagggctccaacagttcgccagagttactcacatgcacctgcccaggacctacctcatgctccaaagaccactcaggttaatagatg

SEQ ID NO: 677797 - DNA, 474 bp, Homo sapiens
ctcggctcactgcaacctccacctcccaggttcaaacgattctcctgcctcaacctctcaagcaactgggaccacaggcgtgcaccaccacgcctggctaatttttgtattcttagtagagatggggtttcaccatgttagccaggctggtcttcagctcctgacctcaggtgatgcacctgcctcggccttccagagtgctgggattacaggtgtgagccaccgtgcccggcctatcatatatgtttttaattatttattttctttttagagacagggtcttactctgttgcccaggctggagtgcagtggtgtgatcacagctcactgaaggctcgaactccagggctcaagcaattctactgcctcagccttccaagaagctgggatcacaggtatgcacccacgattcccacgctaatttttaaaatttttggttcgacgcgggcgcgaatttatatgaagtggtagtga

SEQ ID NO: 677798 - DNA, 252 bp, Homo sapiens
tataaaggatagccaaagataaacacgcagatgaacagaacgcgaggtaagctcaaggagaaatatgacgaaggagatcgcggcatatcgtgccaagggcacaagtgaagcaggagagaagggccctggcaggccaacaggctcacagaagaagcacacgcaccagaagatgaggcaggcaggcaggcaggcaagaagaagcatgcaagatgcaggcaggaagcaggcatgtagcatatagcaagagtgcag

SEQ ID NO: 677799 - DNA, 407 bp, Homo sapiens
ctccgtaatgtgtgtccactctctcccagggggctggcgctgaggtcctgagggcaggcaaggctgtgtctgctggcagtgctaggcccatggtccagccctgaagcctcttcaccccacatgtttttttgtttgtttgtttgagataggatctcactgtgccctagactggagtgcagtggtgcgatcttggctcactgcaacctctgcctcgcaggctcaagcaatcctcctgcctccatctcctgagtagctgggattacaggcgtgcactatcacacccagctaattttcgtattttttgtagagatgaggtttcgtcatgttgcccaggttggcctcaaactcctgggctcaagcattctaccagccttgctctctcaaagtgctgggcacacattatggag

SEQ ID NO: 677800 - DNA, 443 bp, Homo sapiens
  misc_feature (27)..(27): n is a, c, g, or t
  misc_feature (59)..(59): n is a, c, g, or t
  misc_feature (437)..(437): n is a, c, g, or t
ataaccttagtttgatttgggataaancccctgtatttgagccctcagttcctcctatnagatgccctgtaaaatgaactcaaaaacgctttccttcagaaaattgctcaagtatcaaatgagataacatataagaaagtaattgtgggctgggcatggtggctcacacctataatcccaatactttgggaggctggagtgggaggatcgcttgaggccaggagttcaagaccagcctgggtaacatggcaaaacctcatctctacaaaaaataaaaaacctagcccagcatggtggcatgtgattgtggtcccagctacttgggaggctgagatgagagtatcacttgagcccaggaggttgaagctactgtgaaccacatgccacttcacttcactcctgccttccagcctgggagacagattgataccctgccnaaaaaa

SEQ ID NO: 677801 - DNA, 497 bp, Homo sapiens
  misc_feature (491)..(491): n is a, c, g, or t
ggaaaaaaaaaaaaaaaataaaagaacttgttaattacaaagctttgtttatggtggcagttttatggtagaggggtaaatcctgtggacagattgttgtgtttggccagaaaagtgttttttttttagttgaatgggaatgcctccagtttgtcacagactttatcgctcttatcttaattcacctgcctggctgctgaagacagatatgtttgtgtaccttgcaaaaatgaggagtgcaatgcatagtaacacaactatgttactgagcatagcctatgtagtaggcactatgtactaggtactatgctagatgctagctgatgtggttcctatccctgggagctctcagtcagcacataaattacagctacttgggaggctgagatgagagtatcacttgagcccaggaggttgaagctactgtgaaccacatgccacttcacttcactcctgccttccagcctgggagacagattgataccctgccnaaaaaa

SEQ ID NO: 677802 - DNA, 1354 bp, Homo sapiens
  misc_feature (464)..(464): n is a, c, g, or t
gccaagattgcacagctggaggagcagctggacaacgagaccaaggtagcgccaggccagccatgcaagacaggtgctgtcgtgacctgagaagaagctgaacggatgtgctgcttgcaaggtggactgacgatgctggaggatacgccgatgcatgtacaagggacgcaaggctcgagcgagatggctagtctacctcgcctgaaggctatgctcgaatgctggacagactgggagtgaggctcgaagtagggaggcccgagcggtgccagacggacctcgcgcgtccgcgaaacgtgtcgacgactgcagagcctggagggacagccaactgcagatcgggcacgagtagcgcatgaatcgcagcgaaagtcaagtcatccacgtagacaggaagcaacgtctctaggacgctgcggggaacctagtcctgctctgtgtaccgtagcacgcctgccggaganttggctccagtgaagatgggtcaggcctggcggactagagcgtccggaccgaacgacgagtaggaatcggcataacgcgggactaggtggctagacgtgccaaaactcgtcgcgcagtacagtaaagtgcacctcctgtcataccgtggtcgagactccctgaaggaatcgggcatgggactcgaggaacacgagcatcccaagagagcatacccgcatattccgcaagaaagcgcccgaaggcacagcccttcgtgccacccaaaccctacactttgagaggacctgggtctgcgggacaaccaaattggcaatgttcccgtgtgcacgggctagcaataacgtggcatggcaaacgaaatgcgcacaccggcccaggctacagcccccgggaactacagacgctaatacaccacaagggacatggatctccgacacacagatacgcgcacgcgcacctctacaggccgcacatctacacctcccatcaccattgggacagattcgctcgccactcacctccacacgcactaccaacaccccagccacatcggccaagaaacgcatacggctcaccacgcacgcttaaccccaaacaaccacaacaacagacgaacacacacacagaacagccgcacgacgcaccacgcacacaaagcacgcacaacaaagacaggaaccaccactcaaaaagaaccagacaacaaaaggcagcacacacaacaaacaccaacaaagacaagcactgcaaccgaggcaaagacaaggatccacagacacacccacagcagacaacggcgctacaacacagaaactcacacaaacagcaacagagaaaacacatacatacacgaaaggcgacgagcaaaaaagcgaagaaacaacgagca

SEQ ID NO: 677803 - DNA, 1310 bp, Homo sapiens
aatgatgtggaagtcccagccgagatagtttttttaagatagctctcttttttctgcaaataaatacatttttgaatgagaataaaaattaaggcactccttttttgtagggtgaaggatcataatgatctttgttttgtgtgaggaagagatgtcgatattttttcttgctggaggaatggccattacttattcttgtatgttttagaataacgcacctctgtcgctgggagaaataatttcttcttgtggttaaatacatcagagaggatatatatacttgctcccccctagactatagtttgttgtttggtctgaagaatattgaaatatgtatattccggcctttttgtttgcgtgatattaaacacccaactcgggtgggttttttctatggatgggtgtttgttgagaaaacaaaacactttttgtttttcttctctctcctcgctgatgattatttgctttttgtgataatgggtttcttctctctccacagagtaggttatttgttatttataaccacgcgacttttattaggggtgtgttgcgttggtagtcccccttttgggtgagattactctctctgttgtttttgtctttgttgtggggctctccctctacgcgcgcgtgatactctccttctttttttctctctccccctcgttggtgagtagtagattacactctgttctttgtttgtctgttgtggtgctcacacacacgcacttttgtttgtttcttctctctctctctctctctctttctttcactctctctgttttcgctctcttctcttgggggggggggtgcgacacacagatatatgtttgttatatatatagaccacctctctatgggtgctctctgcgtgtgattacacacacagagaatgataatatatatagtgagagcgcgtgcggagcctcacatctctccacacacacactctgctgttattcttcctctccacctctctcgcatgctttatatgaatagacacaccttggggattctattgcgccacacacacccctgttggatactttaagaacacaccctgtggagagagtttaggggcgggttttttcccctcttctcccaggagtttatttataaaaaagagaaagaaaataatcccccacacaaccctgcccatcatgtgttagcacaccatgaaaacactatttgtggttttggttttctttgtggtgggacccacacacacagtggttgtggtgcccccccccccccggtgtttttttaggggggcccggccccccttccccctttatcacataccgggggga

SEQ ID NO: 677804 - DNA, 298 bp, Homo sapiens
  misc_feature (37)..(37): n is a, c, g, or t
  misc_feature (203)..(203): n is a, c, g, or t
aagtgacaggtggagtggctcatgcctgtaatcccangtactttgaaaggcagaggtgggaggattacttgagctcaggagttcaagatcagcctaggcaacatgacaagatctcatctgtacttaaaaaataaaaaataaaaaaaaaaaacaaacgaaaaaaaaacagccgagttatggtagtgcacgccgtgtaatcccangctactcagggaggcttaggttacaagaaattcgcttgaattccaagaaaggcggaggtttgcagttagagccaagaatcgcgcccacgtggcac

SEQ ID NO: 677805 - DNA, 318 bp, Homo sapiens
ggaaaattagcgacggattgggcaatgggtaaagaatttgactgaattagtgctaagtatataggaaacgcgacaaagaaaaaatcaagacaagtattcactaaagaggaaaggaaacttgtgcagaaaagaagaaattatgatttagtacatgattcaggatttacctagtcataatacaggaaacgctaaatagtcatataaccaaaattatgagaactaaattggaagagtgggagaaacaggaaatgtgtgtacgtgttagtgtgaggcgtcgggtaattttccggggtacgagctcgaaattcggaatccatg

SEQ ID NO: 677806 - DNA, 349 bp, Homo sapiens
ccttcgttgaaaacttgcatatcttctcataaaaatcagacagaaggattcccagaaacttcttagtgatgtgtgcattcaacttacagattttaacttttcttttgatagggcagttttgaaacactctttctgtagaatttgctagtggatatgtgcctccctttgaggcttattttggaaaaggaaatatcttcacatagaaagtagaaggaatcattctcagaaactactttttgatgtgtgacttcaactcacagagttgaaccttccttttgatagagcatttttgaaacacactttttgtagaatctgcaagtggatttttggagggctttgagggggtacc

SEQ ID NO: 677807 - DNA, 240 bp, Homo sapiens
gcccaaacccactccaccttactaccagacaaccttagccaaaccatttacccaaatagagtataggcgatagagattgagaccttgcgcatagatatagtaccgcagggaaagatgagaattatacccaagcatatatagcacggactaaccctataccttctgcataatgattaactagacatactttgcaggagagcaaactaagaccccgagacagcgagctactaagacagctaa

SEQ ID NO: 677808 - DNA, 1037 bp, Homo sapiens
gcttctctcaccatgagctggctctccagttcccaggagtggtactaacagcctagcaccccagcggcaaggaccaggccgtcgggaacagccatgcaaaggcaggggaggaagccacctcgagtcgcagatatggccagtacactatgaaccaggaaagcaccaccatcaaagttatggagaagcctccatttgatcgatcaatttcccaggattcttgtggatgaactatctatgggaagactatcggataggaactcgaaaacagtcaacgagaatctcaagtgataaacagccaagaagatcaagaggtggttgttgtccaaagagcctgatgagggagcaattgcaagcaagagtggcttaaagcaggccggttctatccaatctcttcggcaacagtctgctggacgatccacaggaaagcattgtgtatttatcaacattgacgcggaccccaggcaagcatgcagttcacaagcgagctagtagacaggtctcccagaaccttgagggaacaagagaacaacacatgtgaccagattcctgcacgtcgcgagaccatatttgctcaagcagagagaatcaaaagaaacagctccaggtggcactgaatcgcagtcaacttagaaccaaaatgaaaacaaaatacaaggaagagatgacgaggcatctaaccttgttggtgaaacgagaagctgatccccacctgaggagacgcctgccccttaaacggacatcaaccgggacgttcactggcgaagcaggcactcatcgaacggcgggctccaggagaaatcagaaacaaggggatgtaggcacattactagttcaatggccaagacacaagcgtcaaaggatggggcccccccccggcattacaagttgccttgctagggagcagcccatagtgggcgaggtgcacagaggtgaacaactgtgttggtgccgcctaagagaaacgcagaacctaagtctcaaggacaccgcgcgtgtaacacggggggagcgtttcccactgcactgcacacatatct

SEQ ID NO: 677809 - DNA, 377 bp, Homo sapiens
  misc_feature (10)..(10): n is a, c, g, or t
  misc_feature (66)..(66): n is a, c, g, or t
  misc_feature (129)..(129): n is a, c, g, or t
  misc_feature (152)..(153): n is a, c, g, or t
  misc_feature (171)..(171): n is a, c, g, or t
  misc_feature (190)..(190): n is a, c, g, or t
  misc_feature (193)..(193): n is a, c, g, or t
  misc_feature (219)..(219): n is a, c, g, or t
  misc_feature (229)..(231): n is a, c, g, or t
  misc_feature (239)..(239): n is a, c, g, or t
  misc_feature (244)..(244): n is a, c, g, or t
  misc_feature (247)..(247): n is a, c, g, or t
  misc_feature (259)..(259): n is a, c, g, or t
  misc_feature (263)..(263): n is a, c, g, or t
  misc_feature (279)..(279): n is a, c, g, or t
  misc_feature (286)..(286): n is a, c, g, or t
  misc_feature (289)..(289): n is a, c, g, or t
  misc_feature (296)..(296): n is a, c, g, or t
  misc_feature (356)..(356): n is a, c, g, or t
ttcatgatanatgtattaatatctaaatgagtagtgagttgacataagaaccatagttccataatnattatcttcaaatcaatggatatcttaaatgtgtatttttcttccttagagattattattaanctgcatgtatttgataataaagnnttttaggactgagaaagntaagtttttcttacccatnatnagatatatgacatatataacttatcnccccgaaatnnnatgacatnaaggnggntatccctaaagncatntaccttagtcacttgncattaantanggttacntcggaagaagaagtatggccctaaagctactgtcacatgaatcatgccctaatgtgcacnatatatgacctactttggtca

SEQ ID NO: 677810 - DNA, 179 bp, Homo sapiens
actctactcggatccccgtttcaggcagttcgttctgtcctctgacctcctaatctaacttggattacaggctcatgccaccactaccctcgtgttatttttgtattttttgctacagagagggtttcatcagcgttgtccttccaactctgactctcaagctgatcccacacacctta

SEQ ID NO: 677811 - DNA, 1207 bp, Homo sapiens
ttttaaaagttcaaataaccccaaaaaggcttgtccacggctgtgccccagatgtgtgggtactgacccacaccagccctgtgtctgtcctttcagtcatttgtccctgcgtaattttaatctgtattccaaagcccaattatgtgatggttttcaggttactgcaaattacagaagagccagccaatgatcacccatggagcttgtgcccccagatgggccacagaaagagcctatgaaggacgaatgcagaagcagactggctggcctggctcaccttcccacgccagtgtgtggcaggggtctgcttcaggacatggacgctgtccaggaaatgagcacgagcttcacaagacagccacttctgcttctatgttgcagtacagtactctatacttcgacacctgcagcaagtcagtaatcccccgtggcatcacagctaagtagctgtggccaccggcagttacaacatgcatcctgaacgctggcactgatcgtgactatcagttgacaagacagcttcacttttcaggtctagaaaactgtagcatcttggccactatgcattcttcagtagtactgtcctcacctccctcatgtgacttgctgtcacttctacttttcaaccacatacacgttgcacccgtcagccagtgctgtccataccctcggcacacatcgtcgatcctcctatagaaagaacacttctcggtaccttgcctctataccccactggactatggactcctatctacttccaactccactgggccctcacacactatacacacagcgtgtctacccctcgccctacaccaccaccaagacataatcaagcctacacaccacctcatcttatcaagaatctatacgtcccaacaattcgccacaccaatccgtgtttcattctgtacccattccccatctcacaactctccgctcacatcaatttttcgtacaccagtaccgaccttttctacaaaatcactaccactccataacactcttcttactaccatttccacttacattatcattaatcacaaaataaaacttcctcatcctccctcccacacccgatcccccacacacacaccctcatcactcctctattcattcgtacttgcttcctgtctcttcttcattcactcccatctacatgtatgaagctatacaaaaacaattctatcattcttcctcttccccc

SEQ ID NO: 677812 - DNA, 149 bp, Homo sapiens
gctggtggataatggtagcgggaatataggggagacgcctgtaccagggctgatagcgatggggctatattgacaccggcggtggacggagcgctctaccgagcggacttggtggccagctgctatgcgcggagccttgccgccggctg

SEQ ID NO: 677813 - DNA, 729 bp, Homo sapiens
ccacacccagcccatgttcccgccgctgccgctgccagacacagtcgctgcccctaagcgtgctgtgcccagtgtgctggcctcctgttcttgcctccctcgctgtgaccgccgggcagccgatgctgcggctggcagcacaacttcatcgcctccgtgcgcctgtctgctacctggccaacgatgacgaggcctgtctgcaatcttgagtcctgtcggcgcgaacacgcatcgcgccatcgttggtctgcctggctgccattctgctcggacgctgcggggaccctgtctgttgcccgtgctagccgtgggatttgctataccctgtgcatgtaccttcatctggagcgacgggtccatgcatgctgctggccgtgtgttcaacttttgacgccactctcaatccgtctaggcacagcatacccagtctagtgcagacgccttgcgactgtgaccgggcgccccgtgggacttgactttgtcgcgcgaagaccacttgggatgtgatccgttcggagccttctccgtacaatgcagacgtctcgatgcaagctcgtcctctaggggagtgcccctgtgtgctcgtccgtggcgtcaactgtccaatcaggtctggtgcgtctcgaccgactaactctgtttggctttctggttgcccagcctggcgcatttttaccgcgcctgctacaagcttggccctgcgcttggacatgacctccgaaccgcctg

SEQ ID NO: 677814 - DNA, 127 bp, Homo sapiens
acctcgtcgtttttaaaccccagctcgcgcagcaccgccgcatcggcgcgctcgcccgacatcttcggcgcacggtggtgctgaccgaaagcgcggcgccggggccggctgggtcacgccgcctgcg

SEQ ID NO: 677815 - DNA, 240 bp, Homo sapiens
actcggggcgccccctgcccatggcccagcctgcgcaccgcacctacaaccttcaggagaggaggcgcatcgcgagcatgactggggctgagcagacactgatgccccggatccccacggatgagattgaggcccacacgctggccacggccgacctagacctcatgaacagtcaccgacttgaggacgttcctggggtgcggcggcactggtggcggaagaatgccaaaggttccacac

SEQ ID NO: 677816 - DNA, 437 bp, Homo sapiens
tgccttccatcttttctaccatgtgaagactcaatattcaaggtgccttttagaagcagagataccagacactgaacctgctgtcaccttgattttggactttccagcttctagaacttttagcacaactggggagacctcagaaaacttaacaatcatggtggaaggggaagcaaacacatccttcatcacagggcagcaggaaggagaagtgcagacaaagagatggggttttgccatgttcctcaggctgttcttgaactcctggactcaaaagattcacctgccatggcctccaaaagtgctgggattataggtgtgagccactgaacctggtctaagagacagttccttagggatgaagagttatgcatgctcattaacagaagaatgtgtaccacagcaggtactgcatgctaaacccacgacttatgacc

SEQ ID NO: 677817 - DNA, 427 bp, Homo sapiens
cggctaacttgtttaaatgctttttccccaatgtgcataggatacatgacatcatccaaaaagaagtacataaataattgtggaaggggtccagtggtggccaggtaagctcttttttgtacaacaataacagtgtagattgctaagcccactggatctcctacttctccagacaaacagagtaagtttctatccaggggccagggccatctcctccaccagtggcccccatccaggagtgcaatgcccactgctgtttcagatgagaacaggttagatttcacaggtcttgcccaaagtcattgattttatattaaaaagaataaccagtgtttctgagagcagtattgtagcctgtattttaaaaagattctattttgtatacattgtcaagtgaacagtgaatctattaaccatctttgtttgt

SEQ ID NO: 677818 - DNA, 275 bp, Homo sapiens
ggagttcaagaccagactgaaccggtagtgagaccctgtctctacaaaaataaataaattagctgggtatggtggcacacgcctgtaatctcagcactttgggattagctactctggaggctggggcaggagaatcgcttgaacctgggaggcagaaatttcagtgagccaagatcgtgccactgcactccagcctgggcgacaaagtgggactcaaaaaaagacgaaacagaaaagggagcaatggacctaaatggacaatggacctaaatgga

SEQ ID NO: 677819 - DNA, 892 bp, Homo sapiens
gggttcctgaagctctaaatgccctatggaatgtgagggaaggtctataaactgccatttttctaattataaacttacattctcttacttatttacaaaccctgtgagttctttttgtaaattgtggaacacaaatgatgctagaggttgtgcttcttattttattttattttaaatggggcatccatttgaaatcagaggaacattgtgaattgtaaaatgacttctgttttctcaaaggccatgccatgtaaatgttagtgttcgccaaaggacagccaagctttcttttaaaaagtgataaaagtcttattttaatatgctttaagctgacaagacaaaaccaataaggaaacaggcaggtgttttaaaaaccaccacagattgcacaacgtgtttaagagtatgttcgaacatatttaattctcacgtcgtagtagtgtctctcggtaatgccttcttttttgcagatgtggtcccaatttatagcaatcttctcaacagcacgtaggcatggacacaagacttcttttcatacttctcacctaataaaagaaagctggtttgagaaggacatatggttgtcatttcaacggatgggcttacctagtgagaattcttcatcgggtactaccaggtctcatgtggtggtcttctaatatattcaggtcgaaagatccggcaggatcgtcagagccgggtatcctagggtaagaacagacagcgacccttcacagaggggactataggatcagggggttgggcacgaagcataaatggcggacgactgcaggagctgatacagctctaacgaggagacatcacgaccgcaagtggaacaagacaacgcaaacagagggagaaaggacgtcaaacaccggacccccaggga

SEQ ID NO: 677820 - DNA, 454 bp, Homo sapiens
caggaggctatgtctgaccagaggctccttggggctccctggacagagtcccctgccctaggagagtgtcaccacttgaacagaatgggtaacactgccccagctatgtcactagagggagtctctggccctggtatctgaccaggtagaattcagaaagggctacctttccagagaagtcatggacatttagttcaccaccagggtggtcttttgaagcagatctatcctagccgggaggtgttgcgacatgaagggtgaggccagcccggaacaaatgccaagctggtccattggctgtgtggctagctgtagaggcttcaactcagtacgagccagtgccatgtgaaggaacaagctggtcttttggttttctttccccctccagtttcaatgttatgtaatgtatttaaatccttatttaaataaagcttgttttcagaaaaaaaaaaaa

SEQ ID NO: 677821 - DNA, 617 bp, Homo sapiens
  misc_feature (563)..(563): n is a, c, g, or t
gccacggcggtcgactggtcagacatgtacttgatagtgcaggtatttcgaagactccgcgaattgagatatggaacttcgaataggagatagtgatattgggagaaagaatactatagtacgacgtgtgtgttctcgtgtacacaattccaccaggcgcagtgcgaaacacgtcctttctctgcagatacgcctcatatacccgtgtgagtgctcccatgcggttctgcgtcatcgaactacgcatcatattgagaagtacgacgtatcatacaggttgttctggtaaagtggaggtcatgaaagtggttgtgactgcgatctaagttttcttccacgaatccaaaatcattgtgcttgtaccaacaggatcaagatggacgagctctagtgggaggctagaagggaagataatcagggaaaaatgtcaaggggctcacattgtccttgaagttcctccatatcataacccagcagttacagctgcagtgcaggtgcactgtttatctttgcaatggcaagaggaaaaaaagccagtctcaacgttttacttatacaccagntttggatgaagcaagaacagcggagaagagattgatttgtcttcagttccatct

SEQ ID NO: 677822 - DNA, 208 bp, Homo sapiens
caggagggcaggcaggccaaaggaggggcagtgccagcatgccagtgtcagacctgggattgtcaggccaggtcagggtcaaggctgggccagggccagggccagagcacgggcagggccagggagaaagcagaaccagagaggatccagagcaaggccagggtcagggcagacacaggaccaggataaggcaaagccaagggccagg

SEQ ID NO: 677823 - DNA, 363 bp, Homo sapiens
gaaaaggctgggtctccagctccatcaaatcgattaaatgattcacctactttaaaaaagctagatgaattgcctatttttaagtccgaatttataacacatgatagccatgatagtattaaggaattagactctttatctaaagtgaagaatgatcaattaagaagtttttgtcccatagaattaaatataaatggatctcctggggcagaatctgatttggcaacattttgcacttctaaaactgatgctgttttaatgacttctgatgatagtgtgactggatcggaattatcccctttggtcaaagcatgcatgctttcatcaaatggatttcagaatattagtaggtgcaaaaaaaaa

SEQ ID NO: 677824 - DNA, 359 bp, Homo sapiens
gtaggattgtctggaataaaccgttgtaataaataaccggcaaaaaaaggcgccattaaatggcgcccaataaacctttgccaacggagcagaatggcgcagggtgctacggattaagtaagcattaactcagctgttcggttgcgcctgttcaaccgtgtcggccttgaccgacttgccatcggcgctggcaacttgtcgctcagccttgccgtgggttttttcctgaatgaagctgaagttgttgtagaactccttggagcgctctgcgccgccctctgcaaaggcagcggcagaggtcagggtcatcaggctggccagcatcaaggtcgagagtttcatagtggtatccccattaa

SEQ ID NO: 677825 - DNA, 1091 bp, Homo sapiens
acccctaatgtcagcttggctgtacggactccccgaggttcggtctgtgctagaacaatgggaggctgtgatttagctgtgtaagctcacatccagccttggactctaacgggcattcacaacccgagttaccacttaccactccctgcttaggattactgttccctgggctgaaactgcacacatcaagctcacattttctcgggtccacggaggccagtcaggggcaacctcaggcagggtgtgcagtggcctttgtccagggcattctcagccccatgcacgtgtctcattgcacacccctcactatatactggcacgctggcaggtatgcaatcctggcacagctatatatctcagccacactgcaaccaacaagcctccaggcttctgctccctaggatccatggcaccattgacgcatatacaacgccaccgatatgcccggtactatcgcacttagccacccttatgggacataccctgggtcgcctatcctaattactacctctggggacattcaccgttctacttacactacttggaaaacactagaccttgatgaccccagcagcatgagacgttcccttcatttcccaaagggtatcaccatggatacatcatggcaaaggccttgggcgaccatcaacttcagagtggctcgatcacggccattcacacgaaggacacaaaacacatggttacagcggagacctacagcacatcagggagccctattcccgggggggaaaaaaccatcaatatcgccacccacacctatggcggacacacaccacccacgcgggcaacccccgagcgacacacggcaccggaaccaacgaggaacactaggcagagtaacacaccaacaagggggtgtatccacgcgagaccacccccaaaacatcacaccgaaggagcatacacagcaaccagggcgaaaacccgatccaccccatgggccaatagcaggagccacgacgggagctggaacaacaataggatcaaccgcacaagagacaaaacaagaagaaaagacatccacaacaaaggccacacatagcgccagagaggacaacactacacaaacg

SEQ ID NO: 677826 - DNA, 251 bp, Homo sapiens
  misc_feature (1)..(1): n is a, c, g, or t
  misc_feature (222)..(223): n is a, c, g, or t
nccgggccgggctgggggccgggccggctgggactttttgtatttttaggagagacggggtttcaccatgttggtcaggctggtcttgaactcctgacctcaggcaatccgtctgtctcggtctcccaaagtagggggattacagatgtgagccaccgtgcccaaccaacaatgatctttattttgaaagatgattttcaaccactttagtaccgagcccgnngccggccgggtacggagctcgagatcgt

SEQ ID NO: 677827 - DNA, 413 bp, Homo sapiens
  misc_feature (153)..(153): n is a, c, g, or t
  misc_feature (159)..(159): n is a, c, g, or t
  misc_feature (163)..(163): n is a, c, g, or t
  misc_feature (220)..(220): n is a, c, g, or t
  misc_feature (245)..(245): n is a, c, g, or t
  misc_feature (261)..(261): n is a, c, g, or t
  misc_feature (287)..(287): n is a, c, g, or t
  misc_feature (307)..(307): n is a, c, g, or t
ggacgattaacaagaacaatagccaaggaccacaggacatctcaactggttcaaaattgaagttgagcaagctttccactcgatgggtgccaaaaccgttgtgcccagatcagctgcagacaagagcagagctttcaatggaaattttaaacnagtggnatcnagaccctgaagcatttccttgaattataacaggagatggaacaggactttaccagtnccatcctgaagacaaaccacaatcnaagcaatggctaccangaggtagaagtggcctagtcaaggcnaatgtggacaagtcaaagtnaggtcatggcaacagtttcttgggatgctcaatgcattttgcttgttgactttctggaaggcccaagaacattttttttttttttttgaaatggagtctcgctctg

SEQ ID NO: 677828 - DNA, 525 bp, Homo sapiens
  misc_feature (19)..(19): n is a, c, g, or t
  misc_feature (76)..(76): n is a, c, g, or t
  misc_feature (102)..(102): n is a, c, g, or t
  misc_feature (108)..(108): n is a, c, g, or t
  misc_feature (116)..(116): n is a, c, g, or t
  misc_feature (210)..(210): n is a, c, g, or t
  misc_feature (222)..(222): n is a, c, g, or t
  misc_feature (237)..(237): n is a, c, g, or t
  misc_feature (284)..(284): n is a, c, g, or t
  misc_feature (286)..(286): n is a, c, g, or t
  misc_feature (288)..(288): n is a, c, g, or t
  misc_feature (321)..(321): n is a, c, g, or t
  misc_feature (326)..(326): n is a, c, g, or t
  misc_feature (332)..(332): n is a, c, g, or t
  misc_feature (337)..(337): n is a, c, g, or t
  misc_feature (341)..(341): n is a, c, g, or t
  misc_feature (353)..(353): n is a, c, g, or t
  misc_feature (364)..(364): n is a, c, g, or t
  misc_feature (410)..(410): n is a, c, g, or t
  misc_feature (504)..(504): n is a, c, g, or t
tgttcacctccctccaaantttccaaaattgaaggactcctaccaaaacaaaaacaaaaacaacacacgcccacangaagaaaataaaaagggaacaaaaantcacanttcctaantggggggggtcaggtgcatttgacgcaggttttcgcgcgtgtcgtgtcataaccattcctttcacgcctcgacttttcaaaaaaaaaacacccnctaacgcctcantcaaaattattacanttttccattttcgcgttttttaaatttaaaaattaatttatttaaanananagagggaaaacttttaacgcgagatttcacaantcaanttgccntgacntcanttttgattgtantgtacacgcantattggagggtgagggagaggcgcgtttttgcaggcacagtgtgantttgggcgcctacttgaatctttcacgcgcgctttacgcctttccttccaaaacacgtcgtaaaaatacccaacaatttccacacgtattgaangggacacaagaccgatcctcc

SEQ ID NO: 677829 - DNA, 1014 bp, Homo sapiens
  misc_feature (1014)..(1014): n is a, c, g, or t
ctcgctcgcgggtcccgcggtctgtgtctcgtgctcacaagtgtgtggcgcggaacatctccggacactctctcacactctgagagcgctctgagatctctctgctggtgacatctcgcggacaacccattttctcgggcgattaatccttgtgccttcgtggaccatcgtcgacgagccagctgtttgtgtgggtggagctctcttttgctgacacaaaaacatgatgcatctccacgatatgccgtcgaaataatttactctcccagcagatgtgggagcggccggtcggacaaagacgcccttgcgcatattgttgccatcgtgggggtccttataccatatatctcctcctcggggccttatatcgagcagcgagaatatgtggttcttctgaaagagggtgatgaccaccattttcctcccgagtttgggcgacgaaggaagagcgcgagggtgactacagagtcttcttgtagagatagttagaaccaccgtgtgggggggcgcgctcttctccagagggatcatcagaaaacgacgctggtgaatagtgtggggtagataaaaccacgaagagcgatgaggaaatggttgttgtggcctcggtggaaaaaaagctgtgccccaggcctctttgggtcttccaagtgcctggtggttgtgccccgcaaagacccaatatctgtgagatcctgtggagacacatccagataagagagggggagcgctaaacgacgacgtgccgcgacctcgttgcacatctccaggcgggggggccgggaggggagggggcgaggtttcactcgcaaggggccctcaaagcagaataaaccttggaccgagtttaagggcctgatagaaaggtgggaaagccccaacaaggcgtttaatctcaaccggcaagggaactcgttccaacaaaaaaaagtgccggcgcaataagatgcgggaaaaaggtcactgccgtcacccgcagtcctcaagcagcccccacccgagtacaagaagagn

SEQ ID NO: 677830 - DNA, 407 bp, Homo sapiens
cttaagttacccaatcaacaaaatgcgacgtactcaagcgggggcttcgaatcctaaggtgatattatggatgtgattgacaataatagtatggcgggatgaatcaaattgtgaggaaagttgatccaatacatgccttgagagtcgaaaaaccctggggctacaaaaaatgttgagccgtatataccgtctcaaatggtgaagggctacttcgaagtactctgaggcttgaaggagggtaaaatagagacccagataaaattgtaataagcagtgctagaatatatatggtaacggttgttctcatattagactatggtgagctcaggtgattgatactcctgatgcgagtaatacggatgtgtataggagtgggactactaggggattaagcggggtgatgcctg

SEQ ID NO: 677831 - DNA, 2222 bp, Homo sapiens
aggacttcggaaccgccccgtcctcaagatcgaaaagcccagagccgcgcgctcaagcacggtgttgggggtggggtctcaggagcgcccagcaaggcgcccctgtcggcgtggacccgcgggctcaaaggcagttccccggtgacccgcccagcccctctatgcgaactcgaacgacagcaccacagcccgccagcgtcgagactcgcgctgtgccccaacccaggtgggcgccgcggagccgcgagcctgagcccgccctgcaggtgacccgcggcccttcctcctccaggtaccccttctcctgcggccccgtcccctataggtaacctttacctcccgcggctccttcccctccaagcgacccgcagcgcccgggccctccaggtgactgcgcccccgccaacccccgccccaccacacacacacaccccctcgccttcttccgccctactccctccaggtgaccccacccccgcagctcctcctcctccggacaacctgcagccccgcccctgcaggtgaacggcggcccagtccctgcaggtgacccgcggaccctccccgcccgtcctactaccgtcataggacgcctccgcaggcgcactggagccgattgcgcaggagccgattgcgcaggcgtggctctcacacgcgctgccctgttggcgttggtgcgggactgcgcaggcgcgcgggggcaagactggcagtgcgcctgcgcgcgtcggcgtgcggaacgccgcggtgtctcggcgcctctgcgcgcgggaagatggcggaacaggctaccaagtccgtgctgtttgtgtgtctgggtaacatttgtcgatcacccattgcagaagcagttttcaggaaacttgtaaccgatcaaaacatctcagagaattggagggtagacagcgcggcaacttccgggtatgagatagggaacccccctgactaccgagggcagagctgcatgaagaggcacggcattcccatgagccacgttgcccggcagattaccaaagaagattttgccacatttgattatatactatgtatggatgaaagcaatctgagagatttgaatagaaaaagtaatcaagttaaaacctgcaaagctaaaattgaactacttgggagctatgatccacaaaaacaacttattattgaagatccctattatgggaatgactctgactttgagacggtgtaccagcagtgtgtcaggtgctgcagagcgttcttggagaaggcccactgaggcaggttcgtgccctgctgcggccagcctgactagaccccaccctgaggtcctgcatttctcagtcggtgtgtaatcacgttccagggcccaaagccagctctttgttcagttgacttactgtttcttaccttaaaaagtaattgtagatggaaatcagttgtgtttggcaggagaatcaataaaaatgtttgattcagacagcttatggggtattttaagcattcttagactagttgaacatctcactttgccccagttacaaaaatagtagaacaagcaacataaaacaatgaaggaaaacctcacttgaaggcccaggtcaacatctaagcctgttgagacttagataatcgagtctacctcttcagtaggtttgtgtggatggcctggaggcaggtgcttgctccccagtgctacctctctcttccctagggccttttgtggattgacagtagtcccctccgtagagctcacagtctagattagaagtgttttaatttctacacacccatagtgcacacttgtatattgaaaagatagggaagagagaaacatttatggaatcagtcgttggcaccttcaatacttcatgatttttgtcgagtttacttcatgaggaggtcagcccattggctcccatctgaaccactttgcctctgaaacttaattacatccagaaagaaggacacttgtatgctagtctatggtcagttgaggaatatgactgtttttatatgcacatgtaacccaaatgtccaatataaattggcttattttttaaaataattttaaaagttgggaaaagtgttattatttggcatgcttaaatattgaataagtattcttcatcagcatttaataaatgtataggcagatgtaaggtaatttctgtgtattttgagataatgtcaaaatcatgaatatttcaaaataaactggggagttataaaaatacaactagagatat

SEQ ID NO: 677832 - DNA, 198 bp, Homo sapiens
  misc_feature (59)..(59): n is a, c, g, or t
  misc_feature (70)..(70): n is a, c, g, or t
  misc_feature (77)..(77): n is a, c, g, or t
gattatgattacgtgtagttggagtcagcggggaccctctggactccttcacagcctgngcatcttgagntccaagncctcattcagctctcgagaacatctcgaagcgctcacgcccacggatctgaagggtgaaatattctccatccagtggtttcttctttggctggggagaggagctggtgttgttgggcagtg

SEQ ID NO: 677833 - DNA, 131 bp, Homo sapiens
tgctcggaggttgtgtactgctccgagtcgccccaccgaaattttaatgcaggtgtggtagttacgtgacctgtgtggttttgttccggtaatgaatgcattaataaattaaagctccatagggtcttctc

SEQ ID NO: 677834 - DNA, 2222 bp, Homo sapiens
aggacttcggaaccgccccgtcctcaagatcgaaaagcccagagccgcgcgctcaagcacggtgttgggggtggggtctcaggagcgcccagcaaggcgcccctgtcggcgtggacccgcgggctcaaaggcagttccccggtgacccgcccagcccctctatgcgaactcgaacgacagcaccacagcccgccagcgtcgagactcgcgctgtgccccaacccaggtgggcgccgcggagccgcgagcctgagcccgccctgcaggtgacccgcggcccttcctcctccaggtaccccttctcctgcggccccgtcccctataggtaacctttacctcccgcggctccttcccctccaagcgacccgcagcgcccgggccctccaggtgactgcgcccccgccaacccccgccccaccacacacacacaccccctcgccttcttccgccctactccctccaggtgaccccacccccgcagctcctcctcctccggacaacctgcagccccgcccctgcaggtgaacggcggcccagtccctgcaggtgacccgcggaccctccccgcccgtcctactaccgtcataggacgcctccgcaggcgcactggagccgattgcgcaggagccgattgcgcaggcgtggctctcacacgcgctgccctgttggcgttggtgcgggactgcgcaggcgcgcgggggcaagactggcagtgcgcctgcgcgcgtcggcgtgcggaacgccgcggtgtctcggcgcctctgcgcgcgggaagatggcggaacaggctaccaagtccgtgctgtttgtgtgtctgggtaacatttgtcgatcacccattgcagaagcagttttcaggaaacttgtaaccgatcaaaacatctcagagaattgggtcattgacagcggtgctgtttctgactggaacgtgggccggtccccagacccaagagctgtgagctgcctaagaaatcatggcattcacacagcccataaagcaagacagattaccaaagaagattttgccacatttgattatatactatgtatggatgaaagcaatctgagagatttgaatagaaaaagtaatcaagttaaaacctgcaaagctaaaattgaactacttgggagctatgatccacaaaaacaacttattattgaagatccctattatgggaatgactctgactttgagacggtgtaccagcagtgtgtcaggtgctgcagagcgttcttggagaaggcccactgaggcaggttcgtgccctgctgcggccagcctgactagaccccaccctgaggtcctgcatttctcagtcggtgtgtaatcacgttccagggcccaaagccagctctttgttcagttgacttactgtttcttaccttaaaaagtaattgtagatggaaatcagttgtgtttggcaggagaatcaataaaaatgtttgattcagacagcttatggggtattttaagcattcttagactagttgaacatctcactttgccccagttacaaaaatagtagaacaagcaacataaaacaatgaaggaaaacctcacttgaaggcccaggtcaacatctaagcctgttgagacttagataatcgagtctacctcttcagtaggtttgtgtggatggcctggaggcaggtgcttgctccccagtgctacctctctcttccctagggccttttgtggattgacagtagtcccctccgtagagctcacagtctagattagaagtgttttaatttctacacacccatagtgcacacttgtatattgaaaagatagggaagagagaaacatttatggaatcagtcgttggcaccttcaatacttcatgatttttgtcgagtttacttcatgaggaggtcagcccattggctcccatctgaaccactttgcctctgaaacttaattacatccagaaagaaggacacttgtatgctagtctatggtcagttgaggaatatgactgtttttatatgcacatgtaacccaaatgtccaatataaattggcttattttttaaaataattttaaaagttgggaaaagtgttattatttggcatgcttaaatattgaataagtattcttcatcagcatttaataaatgtataggcagatgtaaggtaatttctgtgtattttgagataatgtcaaaatcatgaatatttcaaaataaactggggagttataaaaatacaactagagatat

SEQ ID NO: 677835 - DNA, 123 bp, Homo sapiens
ctagaggatcccggcagaggtagggctgagggcgggacattgtctagacagttcttggagcccggttcttgaagcggtgcagtggtagttgccgtaatccttggtcaggccctggtcgtacgg

SEQ ID NO: 677836 - DNA, 674 bp, Homo sapiens
agcggaattctacgagagccatcactagatgactgggaagtaccgacttgagcagtcagagacagctttctctgtagaatggtcagtctggaatactggcattgctatgtatacctcgtcgggctcccatttgaccctttttgagaacaagaagaaatagagtaacggaacatcaaatcgtcgtatgtcctgccgtgtgtgcatcagtggatcaagcatgtgatgagttgataccagagtatctcagatgttagtccgtggtgtgggtgactctgaggatctgcacttgaatcatctcccgtagaaagtgcgtccatgcgagagacaatgatcgttgacagtcattcgcaaaaagcatctgttaagaacgtgccttggtgagcttttctctgagctggcagaacggacaaggagaattacgagaaattctatgaggcattctataaaaatctcaagcttggatatccacgaagactacagctaaccgccgccgcctgtctagagactgcgtgcgctgatcatacctcccagtctggagatgagatgacgatctctgtgcagagtatgtttcatcgcatgcaaggacgacacgagaagtccgatctattacatcagtggtgagagcaaagagcaggtggccaattcaggttgtgtggagcgagtgcggaaacggg

SEQ ID NO: 677837 - DNA, 177 bp, Homo sapiens
caaatcaccacacccacaccccccatacacacacacacacacacacacacactcacacacaaagtatagagtatatataattaatcaaaatggagtttctcttgaagaaatgaaatattgaatatcttaaaaattattcacacataatatcttctagtgtattcaatacagtaaggg

SEQ ID NO: 677838 - DNA, 209 bp, Homo sapiens
aaactggtaactttaaataatctaaattacttccttaacgaggagggaaagcaacaggcttttaaacaaccgggtaagattaaagggcaaaaccagggccaggcacggggggtccatggccgtgtattcccaggcactcagatttcatacccattaaacattttcacttggatactggcatttttaatttggctaatacaattaattca

SEQ ID NO: 677839 - DNA, 178 bp, Homo sapiens
caagacgtagagactttatcgttgaacaaacgaacctttaatagcggctgcaccatcgggactgtcctgactccaacgtcgagttcgtaaaccctatcgttgatatggactctagaatatgattgcgctgttatccctagggtaacttgttccgttggtcctacatacttgattgaca

SEQ ID NO: 677840 - DNA, 119 bp, Homo sapiens
tatctatacatcatcatgacagcaaaatgtcactcttaaacataaccaaatagtgcatccaaaccccaaaataaatgacttaatgtaataccattatatatgaagtacatatgctgaga

SEQ ID NO: 677841 - DNA, 529 bp, Homo sapiens
ttcgctttctttcttcttcttttttttcctcgagccggagtctttacctgtctcccaggctggagtgcagtggtgtgatgtcagctcactgcaacctctgcctcccatgttcaaacaattctcctgcctcagcctcccaagtagctgggagaacaggcgcctgccaccacacctggctaatttttgtattttaagtagagacagggtttcaccatgttggccaggctggtctcgaactcctgacctcgtgatccgcctgtctcgggcctcccaaagtgctggtgtgagtcaccacgcctgccaaatgtttcactttcttatcattcatgtgtttactggagtagcacttttaatttcctttaagagcatttcctttgcatgcataacttggctacctacttggcaaaagcagcctagcttttggcttagctcagcttttgacatgcattccttactaagtttaattatttctcacttttgatttaaagtgaaagacatgtgactcttcccttcacttagaagccactgt

SEQ ID NO: 677842 - DNA, 373 bp, Homo sapiens
  misc_feature (30)..(30): n is a, c, g, or t
  misc_feature (91)..(91): n is a, c, g, or t
  misc_feature (99)..(99): n is a, c, g, or t
  misc_feature (155)..(155): n is a, c, g, or t
  misc_feature (157)..(157): n is a, c, g, or t
  misc_feature (165)..(165): n is a, c, g, or t
  misc_feature (189)..(189): n is a, c, g, or t
  misc_feature (197)..(197): n is a, c, g, or t
  misc_feature (261)..(261): n is a, c, g, or t
  misc_feature (306)..(306): n is a, c, g, or t
  misc_feature (341)..(341): n is a, c, g, or t
  misc_feature (345)..(346): n is a, c, g, or t
  misc_feature (348)..(348): n is a, c, g, or t
  misc_feature (353)..(353): n is a, c, g, or t
  misc_feature (355)..(355): n is a, c, g, or t
  misc_feature (359)..(359): n is a, c, g, or t
  misc_feature (364)..(364): n is a, c, g, or t
taaaaaaaaaaaaactctaagaataaaaanaaaaaaaaaaaaaaaacaaacaaaaacccaaccaaacaatagtactccttccactctatgntaacggangaattctcacaccagccagttaaacaatgaaattattaaacaagcagcctgctggnantgcatgcngagctaaaatgcaggtgtgctganttcttggngctggtgctgaggaaaacatcaaaaagcatatctgggatctatcacagctttctttcttaagcnaattaaaatgcaaattagtttcataaccacaattcaatttatcanactttttctgaagaattttcatttaattatgtttncgtnncnggggntncaanttttncacaaactc

SEQ ID NO: 677843 - DNA, 125 bp, Homo sapiens
aatttctctaaagggaaagggcttttgcatctaacacaatagagttgaagagagcttaggatctctctctctaggtgctgagcctcactctgtcagctggactaatgtacctgctctctcaatgc

SEQ ID NO: 677844 - DNA, 1661 bp, Homo sapiens
  misc_feature (376)..(376): n is a, c, g, or t
tttgtggggcgtgtgattgattgtaggataattatggttgtgtgtgataagaaagagtcgtcccttacctctcctttttgtggcgccggctaataattatgggttgtggccagccaaaatatgtatatgattttttatagaagggggagatggaatttgatcaactttttggtgggggagtaaaaagagagagagtaccgcgccgcttttgcataggtgtttgatactacctcctctccaccggggaggatgctttcctcccctcacaaggagggagtagttatctcctccccctattctgaatatgtttggtgtgggcgaccgagcatattcgtctccgtcggtaaagatattgggagcgggttgtttctcttcntaccagacaacacagcggggggggtttcccacaccgatggggagtgtggtgtattatgttgaggcacgaaacaccgtttggaataaaggttgtctctctctgtggcgccccttatggaagaatgttggtggctcccaccaggaagataatttcagtgtcgtatgggagagacacgtgtgttgggcccaacactgtctttttatgaggcagcatcagaataatgtttgcccaaacagccctctcgggaaagatttttattcaaccgtcggcagaacagaagaattagtgtttttctcaaacaggggggggttatttatagcataatatatgttgtgtgctcccttctggaaggagcggtgataaagacggttgtggtccccaccattcgggggaccaacattggtggaagatttcttcttgtgtatgaactgcgcccgcgtgggagaccaccaacaacaataatagtgtgtgggtgtttgccaccacgtcggggggtgtcccacaacaaaacataaaaatgtggggccccaacaggaacacatccatcatttgagcattcttccgaagaaaaggtcgcctttctacgacaccagcgttgttgaagatcttgttctccccacaggatgaacttattttctccgcagcattagggggtgattaatacgtggtgggccgttgttagatgcttctacgggtgtactcgtcggtgggtgtggcgcgtttttataccttatagacacacacacgcgcacacacacactgtcacagagatatacgcgagaagagaccctctcttatatggtcttcaagcacaccctctctcacggtgtcccgccccacaatattcccgcgaaaagacaagacatgagatgtgaaattttcacgtgagacccgcatgatgtgtgcactgagccacactgagacttgagaacgacaagctggggtctcaatataatttgaatttccacgagtacgccactttggagaaaagaacacatagggacacaagtgtctgttccacacattgtagtttatccttctccacatgaacgtccttcgttatgagaacacgttaaaaatgctgagagaagccccacagtttgagagattggggaagctcactggaggcttcacatggggaagggcacgtatgttttgggaaaaccacctggggacgagacacggtgctaaaggtgacgagctgatggatatggagccccccggcccagaatctgttgaaaggtcagagctcaaataggggccaaaaaaagtgcaaatattggga

SEQ ID NO: 677845 - DNA, 425 bp, Homo sapiens
ttgaaaaaaactcctgcagctagctcagtgtctgcccaaacagctgcccagttatgtgcttgaagcccagggtcctggtggtgtaggcacacaagataatcttctgatctgcagattgcaaaaaccatgggaaaagcatagtaacccagctgggtagcacagtccctcatggcttcccttggctggcggagggaggtcccctggctccttgcgcttcccaggtgaagtggaagtgacgcaccaccatgcttctgctcactctccgtgggttcatttttccaatgaaatgaacggggcacctcagttggaaatgcagaaatcaccctccttctgcattggtctcactgggacctgcagaccagagctgttcctattcggccatcttggcctctcctcctttgcccatattttaaaatagagtttct

SEQ ID NO: 677846 - DNA, 430 bp, Homo sapiens
  misc_feature (334)..(334): n is a, c, g, or t
  misc_feature (357)..(357): n is a, c, g, or t
  misc_feature (370)..(370): n is a, c, g, or t
  misc_feature (380)..(380): n is a, c, g, or t
  misc_feature (410)..(410): n is a, c, g, or t
  misc_feature (418)..(418): n is a, c, g, or t
atgtgtttttcttgttggaagactttcctgaacacaaattagcagactgaaaaagagatggtaatatttacatttgccatttcttttttaattgaaaaactcaaaggaccatatgacagactgagttgtttaacgatattccagaagggcagcatacttggagtgttttaatatgcattcagccgtctcttcctgactggtggggtggttcctgttactcagatggcctgggcagttgggatgggatgttctcaaggtgcttttttcccctccgacctttgctagtgtgtgtgatgtgatgtgttgaaaaccactgtataaacgataagcaccngctactcatttagagtcatggantttcagagctggnaaagaatccntagacggtttcagtgagttatttgactccnccttaccnttaggagatgat

SEQ ID NO: 677847 - DNA, 192 bp, Homo sapiens
ccctattccatggctagatcagaaataggttgagcctgtgttagggtcctcattaggtatccaaaggtagcagctccatcttaccaagttatatcttctgtttacgggggactgctaaacaggttcaagtggcataaactgggacagcctcaaaaagtgttgatgtggcctgcagtgccaccacactccttt

SEQ ID NO: 677848 - DNA, 145 bp, Homo sapiens
catgagactatgtgtagaagatctgtgtggtagggcatgggaagatagaaatcatgatccctgctgatcatacggccacagatacctagtatctatggttattcctcctacttaattctatacaatattctatttatgccaccca

SEQ ID NO: 677849 - DNA, 181 bp, Homo sapiens
gagaccccggcacgctatccggttcaatcaggtgtgacatttacatattatgcaaatgtactttcattggccagagccatcttgtctactccttactgtacatgtggctggcagagaagggaaggtggagctgccatcttgaacagtcttgtccctagtacccatataagttcccagcttg

SEQ ID NO: 677850 - DNA, 885 bp, Homo sapiens
ggggggagaagggtcggggcggcgggacccgggcctggcccgtatgtgtccttggcggctagacataggccgtcgactgatatggtctatcagccacagtcgtctgcatgtttccagagagcaagcagagaaatgaacacactgcaggggccagtgtcatgtcaaagatgtggctgctggagtttcacccaggaggagatggtggcaactggaccctgatgagaagatagcatacggggatgtgatgtggagaactaacagccatctagttctgtgggcgtatgatatatcaccaagaccataacatcatcatggagtggaggtgacggaagtggagcagggagaggagccgggctacatggcatggtgaatttccactgtcaacgatagtccagtacagaaccggctaaggccatcacaccctatgtgatcggaagtcagtccgtcagatttgctctgggccagtggtactgagtcttaagcgctgcggggaaggagttagtagaaacacagtctggatgcttggtgacactaactatggattctaacgcctaacgggactatggagtgggcatctcatagaagtccaggacaaacgggactgtggcgtagacgcagaacacttggacaggcgtacctcttcgcggccgcaacatcgacgcatgtaagatcacgacgtgccgaactaactgagttggaacgtccggattccagggggacgctcgggacaaccggtgtgcacgggggaggcaccattcaccgcacaagtgcgggaaggtgtgacccaagggttgaaccgagggaaacgccacgaccctaccaacaaggacagcagggtaagcaatcaccacggcaagaataggacagaagcgccactcgcggaag

SEQ ID NO: 677851 - DNA, 177 bp, Homo sapiens
tgagtgaggtgacctttcggggcgcgcgcggggcgcggttgtggagggcaagcctttagcacacctccttgcccgtgttggtgcccggcaggatgatgagctgcgtgagctgcgccgcgtgctccttggcgttgagcatcagcgcggatatgatagaggcgcgtctgtctgcggccg

SEQ ID NO: 677852 - DNA, 104 bp, Homo sapiens
aaactagagcatcagtaatatactaatcacaactacgagaaggaaacaatgatgcacttcagtcagggcactgcttacccacatctggacagatgacccatcct

SEQ ID NO: 677853 - DNA, 374 bp, Homo sapiens
  misc_feature (257)..(257): n is a, c, g, or t
  misc_feature (328)..(328): n is a, c, g, or t
  misc_feature (357)..(357): n is a, c, g, or t
tgtcgcccaggctggagtgcattggcgcgatctcggctcactgcaagctccgcctcccgggttcaggccattctcctgcctcagcctcccaagtagctgggactacaggcgcctgcaaccatgcccagctaattttttgtatttttagtagagacgggggtttcgccgtgttagccaggatggtctcgatctcctgatctcatgatccacccgcctcggcctcccaaagtgctgggattacatggcgtgacatcgcngcgcccaggccaagagctccttcttaaccgcacaggcactgtgaggcccagaagactggctctgccaccangaaggaaggattgtttcctttcaaccaancttttgggttgctaacc

SEQ ID NO: 677854 - DNA, 105 bp, Homo sapiens
ggctctcgttgattatgggcgttgattagctaggtagcttacgtggttgaaccttgtttgtcggtgtatatgttgtccttgagattgctcgggggcgtgtctggg

SEQ ID NO: 677855 - DNA, 335 bp, Homo sapiens
acaaggacaacgggccgagacagatacccaaggcttatgcacctctaaggacagggaacgaaaagagaaaaacggtggacaatcaggtcccagatagcttgctcaggcacgaatgaggtaatttcgtgcctaggaatgcaccatcccacagcttgattttcaccacctccatttgttctctcgagcatccttccagatgttactccccgtctaaagccagcatatttaaccttcccgtgacatgcccacctcaggactcatccccctccaggccttcctggatgcagatatactcaaagatggaagctgggcggaagctgatgcaaacattggac

SEQ ID NO: 677856 - DNA, 1465 bp, Homo sapiens
gggctcgctggccgcgtggagtgctgctcccagccgctgcgcgagtcagactcgggtgtggtggtccctgtgcgtgctgtgtatgctgtgctgtgctgtgctgtgtgcgatgcattgtctgttgtgctcttctgtgcattaacaatggtgccccaatggtgttgaatgtgctgctgtgtgtgcctgcctgctggcctttgcctgccctgctgcatgccctgtgtgtgcctgatgtgtgctgtgctgtgtggacctgctgggtttgggatgacctgtgcctggctgcccaatggacaaattgtgatgcaagcttctgaccccacctgtgccttggatgctgctgcctgccaattgctgtgctgctgctgatgcttggatgcactctgctgttattgccaatggactgcccttgaatcttgtgcacaggatcgcatgtgaggcaggactgcttgcaagtttgtgatgcaacatgtccaaatgctcaaatgatgtattgatgtgcctgcctgttggagcatgctcagaggagcgaggcatgactcctgtggctgcagtgcttgatgtgagcaggctgtgaagacccttgatgctgatggagaaccctgtgacagtgcaccaatgtgccaagtggcgccacggtaatcaagagaacaaggccttggccctgtgcaaggctgcttacgaaggtgacccagagcttgaaatggcaatggcatgcagactttcctcaacttgatgtgacgaacattttacctgggaagggcagtgatggacgtccctgtgcaggagccgcaggtgacagccacttgctgggtgaggcccaccggtggaggcggggcagactggcaggctgtggggcacacacgaacgtgtacgcattgcgtggcggaagttggaggtgcccggatgggcccagggggcggccgtcctgccatggggtcccgagctggatactgaaagtgtcagaaacggttagtccggcggaaggccagtgatcccgtgcgatgaaagtgggggccgggagcaccgggcacggagaagcggtcgtagggacagtaccacttaagcgctactggctgtgacaacctatggatagagagggaaagtggtattacgaaggcatttagttgagagagacattggggagagaagtgtgagaggacaatggtgggattaggatagtgattggatagatgggtgggggggaccagctccagaccgacgcgacgccgcgacgcgtccgaggcagacggcagaacagagatgagcggatggggggagcagaccccaggcggggagcgaagacgcaaacgacaagggggagtgaaccccccaccgagtgggcggggaccacgaggaaccgcggacgtcagagatgattgtgcgcacaccgaggagaggaagcgcgagtggagacggagggagcgatgaacatcatggacggagcgatcgggaagcgcacgcc

SEQ ID NO: 677857 - DNA, 210 bp, Homo sapiens
gccatcgctttgttgtgtcatgcactacgcggcatttagtcagctcccccaagatgagctgcagccccagagagagctctgacgtcacaagtaaccaggcccagctccaggccccaatcgccagctctcccgctctggatactgcactctaacactcgactctgctgctcatgggaagaacagaattgctcctgattgaacacaccactg

SEQ ID NO: 677858 - DNA, 792 bp, Homo sapiens
ggacgtgggccaagactagacttatggtggagtgaatgcggcgtacagcagttatccaaccaatgtctgtggatgagtcagtgacgagcctgaggctggtccctcacatgcacggctagatgggcgaaccctgagaggcatcgggctggggtcccgggaggggtgatccgaagagctggtacccaagggcccatggtcctggatccaaaaggttcttgagcagattatggactcaccgtcgccagtgtgtctaccccctcggaggtggtgcctgtaactgtgctggccgtccaggaggtacctgttagagcgatgagccacgcgacacggtgcccaaggctcccctttatgctatgatgtgacgagtctcagatggaggtgtaccaggagaagtgtctaccatggacccagcttgaactctctcgtaatatcaaagatattcttaaagttcggcattcaaatgagaatttccaggggtctcatgtctttacaactgagaaaaggataggccaggggatcctgtgcatagataacgtccacgtgtggggagaccttcttgacagtattgcctttagagaactcccttcagagatagagcgcatccagggagaaagcagagaggcctttacgaggcgggacacgattccttgacctgcgctgtgcacatacgaaggatccctatggggaatatctggttacagaccagcaccttgggaaaccacttttgcgttcccaaataattcccttctcacctctggaatggccgggcttacacgcgaaattccgcatggg

SEQ ID NO: 677859 - DNA, 112 bp, Homo sapiens
ttaaaagtggcgatctttgggcgcgtgtcgtctcatcctttgcggtcactccccaacccagcatcgaggtgtggcgcacccgcgattgctcctgctgcggccctcctctgtg

SEQ ID NO: 677860 - DNA, 100 bp, Homo sapiens
  misc_feature (65)..(65): n is a, c, g, or t
  misc_feature (74)..(74): n is a, c, g, or t
aaagaaaagggaccctttaaaaagggccttagggttgggaaaaacaaggcaaattttaattaccnccccttttnttttgccctttcccctgccccctgcg

SEQ ID NO: 677861 - DNA, 318 bp, Homo sapiens
  misc_feature (313)..(313): n is a, c, g, or t
gattgtgacaggagacagcagggttggaagaatcaggccagtgtggtgccatgtgctcctgtggattggtcctgtctgcctctgcccaccccagggagagggagcacaacctttctgtgcctcaataatgggataataggagtgtctcctcgcaggcttgtcgggaggtctaagtgacagggggcttgtcaacagctggttataggccacagcccacagatgtgaaggttggcaccatccatccatctcccgctgcctgtgccagttacccattgccaatcatttattcccaccaaataaaaaatattctttntacta

SEQ ID NO: 677862 - DNA, 408 bp, Homo sapiens
ttgctgttcggatatgagcaaccagttcggtgggttcttcaaaccagtgggcaaaaaggctggtggagctggcaaggtccccaagtttgccccgaaaggtcagaagggtaaatggatattatcccttatacctgccccccccctttttatcagtggtggaagaacggtttcagaactgtttgtttcaattggccctttaagtttagtagtaaaagactggtttatgattaccatgccttgttaaaccttcagaaggaaaggagaatgttttgtgggcccctttggtttttttttttggggggggcagttttaaggtattagttttttaaatcaggactttttaatgggaaccacttggcccaaaatttgtcccagaatttttgggcccctttaaaaagtttaattgga

SEQ ID NO: 677863 - DNA, 201 bp, Homo sapiens
tgcctagatttccctgcttcagaaatcgcggtcatacccagaaacaatgtttaaactgggcacctggggccagtccaggtgacacataaaaggaaccagcatagaggcaaacgatctctccttcttcatctcttcctcttatctgctgccctgaatttggactgatggctggagctccagcagccatattgggccatgagg

SEQ ID NO: 677864 - DNA, 748 bp, Homo sapiens
  misc_feature (160)..(160): n is a, c, g, or t
  misc_feature (162)..(162): n is a, c, g, or t
  misc_feature (291)..(291): n is a, c, g, or t
  misc_feature (303)..(303): n is a, c, g, or t
  misc_feature (416)..(416): n is a, c, g, or t
  misc_feature (491)..(491): n is a, c, g, or t
  misc_feature (557)..(557): n is a, c, g, or t
atttcgctgcattgagccagagctgaacaacctaattgcattaggagacaaaattgatagctttaactctctttatatgttagtcaaaatgagtcatcatgtgtggactgcacaaaatgtggaccctgcttctttcctaagtactacattgggaaatgtntnggtgactgtcaaaaggaactttgacaaatgcattgtaagttttcttttttaaaaaaataccttagcatcctagtcattgcaaaatataggtaaatgtatttaaaatcgagggatttccagctttctgtnggggaatctgtngtttatgtccctcgaagcagggcatggcaacaatctacatgaacagagttagttgggtggcactatgccagctagtttccattccacactgtgaatcttggcaagttctggangaagtggcacagtggcaccagttgcttaagagatccactggaggccagacgcagtgactcacacctgtaatgccngcactttttaaggccgaggtgggcagatcacctgaggtcaggagttcgagaccagcctggagaacntggcgaaaccccatctctaccaaaaatacaaaaaaaaaaaaaaaaaaacaaaaaattttggggcgcgctagggccccgaaaaaccttcgaaaccattggtggggcaccgaggcccaaatggtacagggaccaggggcacaagcggtgtccaagaagaaccgcggccaagaacatgggcggggattccccaa

SEQ ID NO: 677865 - DNA, 101 bp, Homo sapiens
ccactggattcatggaaatctttttttttttgggttggtttggttttttaaagacaggttcttgctctgtcacctaggcgggagtgcagtggcttgatctt

SEQ ID NO: 677866 - DNA, 563 bp, Homo sapiens
  misc_feature (160)..(160): n is a, c, g, or t
  misc_feature (162)..(162): n is a, c, g, or t
atttcgctgcattgagccagagctgaacaacctaattgcattaggagacaaaattgatagctttaactctctttatatgttagtcaaaatgagtcatcatgtgtggactgcacaaaatgtggaccctgcttctttcctaagtactacattgggaaatgtntnggtgactgtcaaaaggaactttgacaaatgcattgtaaccaaataaggcaacatggaacgaagtaaagatctcaacaaaagagtaaacgttggaattcttccattcgttgctgaatctgaagaatttgctggacttgcagaatcaatcttcaaaaatgctgagcgtcgctggagacctggataacagcatacaccaaacttactcagcaggacgtatttcgtctactcgtggagaacagtagcacaatgacaagccagaagacccccagggcatgtggtctatgatcggacaacactttcaccatattctttgcaactctttctcgatcgacaatctcatgtctagaagcagcaacaccacagaagccaaccaaacacaaaaaacccaacacaaccaacaa

SEQ ID NO: 677867 - DNA, 734 bp, Homo sapiens
  misc_feature (160)..(160): n is a, c, g, or t
  misc_feature (162)..(162): n is a, c, g, or t
  misc_feature (291)..(291): n is a, c, g, or t
  misc_feature (303)..(303): n is a, c, g, or t
  misc_feature (416)..(416): n is a, c, g, or t
  misc_feature (491)..(491): n is a, c, g, or t
  misc_feature (557)..(557): n is a, c, g, or t
atttcgctgcattgagccagagctgaacaacctaattgcattaggagacaaaattgatagctttaactctctttatatgttagtcaaaatgagtcatcatgtgtggactgcacaaaatgtggaccctgcttctttcctaagtactacattgggaaatgtntnggtgactgtcaaaaggaactttgacaaatgcattgtaagttttcttttttaaaaaaataccttagcatcctagtcattgcaaaatataggtaaatgtatttaaaatcgagggatttccagctttctgtnggggaatctgtngtttatgtccctcgaagcagggcatggcaacaatctacatgaacagagttagttgggtggcactatgccagctagtttccattccacactgtgaatcttggcaagttctggangaagtggcacagtggcaccagttgcttaagagatccactggaggccagacgcagtgactcacacctgtaatgccngcactttttaaggccgaggtgggcagatcacctgaggtcaggagttcgagaccagcctggagaacntggcgaaaccccatctctaccaggaatgcaagaattagccgggcgtggtggcacatgcctgtaatcccaactgctcgggaggctgaggcaggagaattgcttgaacctgtgaggtggaggttgcggtgagccaagattgcaccagtgctctccagcctgggtgacaagagtgaagac

SEQ ID NO: 677868 - DNA, 805 bp, Homo sapiens
taccccctcctatagtcttatatgcgctcaaaaaccaaataaaaccccccccccaatgtaacgggggggcagggacaaaagcaaaaacgcaaaaacccagcctgtgagacccccacgtttctcttgccccccgccattttaattccgccctgtgattgtgatttttgtttttcactcttgctcccttgtggctggggtaagagtgagatgtgtggagcctcttcctgtggggggcacgggccactgtgacgcccccttggtgaaaacgtcagaggggattttggaaagggccatgtgtctccggcctgtggttatctgtggggacaagtgtgttgtggtctccccaagaaagtctccgtgaagggcggtaaggggggaggttgggggcagggactctctccttccggggtgttcaggagggatgcctcgggaggcccacagggaggggtgcctctcgttggtgtggccgagagggtctgcgccgcgtagtggcgaggggtgtcaaccacgcgtgttgttgtaaccggggggtgtcccatcagggttcgggggcagggtggggccgctcttccgcgcgacacctgtgtaggagacaccccctacaccgcatatctaccgctgcggtgtgagaatatgttgaccacgcaccactaagaacacccatgcccatgatctcacagggaagggtcgcagaagctcgtggtgtggaccccctgtggtgcgacagtgggggattaagcacgggaaaataggaagccaggcgggatggagaccccaaaagatggaagtcgaggttttccaagag

SEQ ID NO: 677869 - DNA, 1290 bp, Homo sapiens
ccatgaaacaacgcaccaaataaaaacaagcaaacaaacaaacagcaaacaagagacaaaaaacacgaccaaacaccacaacaaaaataaagaaaaacagaaaataggacaagaaacacgaagcaacggaacaatgacagacaacagaacaacaaactacacagaacaaccagacaggacgaagaacgaggacaaaaggaagcacacagaccacaagggacaagagagagacacaacgggtgtacagcaagtgggaagaaacatcaacaacaaacgaatacacacagcacgacgcggacagtagacaagagaaacaaaagaaccacacagaataacgacacgagacaacaacaaacaggccaacaacagaagcagacacagacacaaacggttgagaacgggcacaaagagagaacagacagatagggacacagcgcagaacgcacggggcacgcaagacgtaacaacaaacagagcgacagaaggatcagaacgtaggacacggaggccacagggacgcgaccaccagaaggtccacacagtcggcacaccacccggcacaactgagcccacagacgaccgagaacaccaagataggagagacagcagctaggagcgccacgaaggacaggagcgagcaaaaccagacaaccagaaaaactgaacaccaactgacaaccatgtgggcacaagcacacgtaaacaccaaagacgcgactcaactggccacaaacaaaggaaacaaaccgaaacgaacgcagcgatcaagaacaggcgcgacaccggggaaacacccacgacacacggacgcccgacgcgatgagcaaccacacgccaagcaacactagctgcacaccgcccagacacaccacgggaccaacacgcagcactccacaagaccaccacacgcagagacaaacccctgacaaacagaagggaaccccgaccaacgcacaacaccgccacaccaccatccacaggcgaccacgaagccgcacagagtagccacagcaagcatgcacacacacgcggcccagaagcaatccagcaagcgccccatcgtacacaccagtgacagacgaccgtagccacacacaacccgccgacactagacgagagagccaagcacaaaactacacacaacggaagccaacaaccccgacacgagcgaacacagtaggacagcacacagacgaggagcaaaacccagagatcgacacacggagcagaagacacaaccaatacgagcagataagaatgcgcgccacgcgcagaacaaccgcagaacaa

SEQ ID NO: 677870 - DNA, 895 bp, Homo sapiens
gatcggagtcaagatggaggagtacgcgcgagagccttgcccatgggaatgtgtggatgactgtggtggggccttaacgatgggtaccattggtgcgtggtatctttcaagcaatcacaggttttcgcacttctccagtgggagtagaccacagactacgagggagtttgacagttattaaagccagggctccacagtctaggaggtagcttggcagtccggggagggctgtttccatgatgtgactgtagtatggtgcaaagtcagaggacaggacgatccctggaaattccatcacaagtggtgccttagcgggagcatactggagcaagagattggaccagtgccatggtggggtcagcccgcaatgggtgcatatcgtaagcttaaatcgaaggagctggtatctgtgtggacaagattgtgcctctgcgaagttgtcccaatgtcctcagttggcagaagacccctccagttgcattcaactcagtgacttcctcaccttgtgagatatcgcaatatcaggcaggatgtctcgcctagggattggtgacgcagaaagagtggggccgacaaggattcaggaagatccagggtgccaggcagggctaaaaccatagcggaccagaaaggcgaaaggcagaagacgcccattagactccgcgcatctgacagacccacgcgcggacgcggccaagagaaacacggtactaaacccacctgatggcttgcgccacacaacgtgaaaccgacagaacacggcacgcgcagatgaggccagcaaaagggaaggacaactggagctgacgggtgggcgagccacagagggggcaccctaaacgggagggaggcaagtaggagaccacccacgacgaggggagaaaagcgtgcgcgc

SEQ ID NO: 677871 - DNA, 146 bp, Homo sapiens
caaggggggggggcccctgggggggggggggaaagttttcccccccccttcccggggagggggaaggaaaaaaattttgggggggggggggggccaaaaggatccccccccccccggttttcccccttttttttttttttttttta

SEQ ID NO: 677872 - DNA, 250 bp, Homo sapiens
aaaaaccttactttttgtttaatttgttttgtccaaacaaacacagcttgctaaaactttagcttctgactaattgctacagctaaaatagctaatttgctaaccagcttagctcaaacaaaacagctgctataactagcttccttgcagtctgatctcatcatgcagtcatcagatcctgtaatcgctctggaatagtctagagcagagcacagatacagtcatcagatccagctgcactgagagcata

SEQ ID NO: 677873 - DNA, 397 bp, Homo sapiens
attcgcggccgcgtcgacgtaaataaattgctttatattaaatttacatttcataaagaaagggaggtttttagaaaatatgatatcaactggccacagtggctcacacctgtaatgccagcactttgggaggctgcggcgggtggatcacctaaggtcaggagtttaagaccagcctgaccaacatggtgaaaccctgtgtctactaaaaatacagaattagcctggcatggtggtatgcccctgtaatcccagctactcacgaggctgaggccagagaatcacttgaactcaagaggcggaggttgcagtgagtcgtgccattggactccagcctgggcggtaacaagagcaaaactgcatctccaaaaaaaaagcagcctgaccaacatggtga

SEQ ID NO: 677874 - DNA, 836 bp, Homo sapiens
  misc_feature (191)..(191): n is a, c, g, or t
  misc_feature (262)..(262): n is a, c, g, or t
ccggttatatttctcccacagagcccccgcgttgggcgccgaaaaaacacaggtgtttctctaacataggggcgaaacggacatagtgcttctgataggtgattggtggctcgttggccgcccccccccccccgcatagagattaattaccgcgggagagtttatattatcaagagaaaggggtccctacnttttattacgcgcccgcacgcacacacaccttgttgggcgcccatacgcacactggcgcgctctgtgtggncaacacactcaggcatagcgcgcgcccacacattataagcgaacacacatcggttagtactgttttcgtcgcccgcacatattatagtgggactcgtgcccggcccccctctttgaccacgcaatgggttgatgcataaatgcggggggacccacacccacatggtgctttttgtggcagcaggagcaacccgacaggagatccatctgtgcttgttcgacacccacggaataggactggtgtccactacttctgctcttaaaaccttgcccgcacaaactgagttctgttcctcgcctggagcaacctaatgcgtgggagaccgtcacttcttctcggagataaaacatttactgtgcccacttgccaccaggcccgatcaataatctaccgctgttttattactgatagtgcccacagactccactgtcttttttatttccagagctaactcctccctgatagcagccccaccttcatggcccacatgcactgcgtgatagcaggaactcgttccaaattcaaaatttataaagtccacagttcctccctccaaatactgatcattaaacac

SEQ ID NO: 677875 - DNA, 265 bp, Homo sapiens
ttgagtaatctatttcagtacattttgcacgatgacattctgaagaaagatccgaagagctgcgtctagcatccaatgtaaattggccagttctcccacatctgggcacagagtggaatttccttcaaggttcacaagactgtgacaactacagtagctgatatacttggatataccacttctacgctgcccccaccccccagaatcaattttttggctccaaaataaagtacaataataaactcttgatgagaaatgggcttcg

SEQ ID NO: 677876 - DNA, 502 bp, Homo sapiens
  misc_feature (305)..(305): n is a, c, g, or t
tgcaacctgttctcgattccagtcattttgtgtgtccagggcctggcagcgacgctaggctttttggccgacccttataatacaaaaaaccacaagattgtctgcataacgagcccgcagtttctctttgaaggcaggtttttgttgtgagtagtagcttccgcgcgcccccggttcctccatccgacgagattgatctcgttgcgctttttcaggctatctggaagcagaaaaggttagtcatggccgctacggcaggcgccgggcttattgctgcgatctacgcgtttctcgcgcctcctcantatgaagtcagcagtgtgttgcgcccggccgcaatcaatgagctggatgctttgaatcgctccgagatatatacacttcctcccggtgatgctcttgtcagagtgggcgcgtcattggaatcctacgatactcgcttgggtttttttcgttcgaaccagaagctgttcaaggcttttgagcagcctggcaggacctt

SEQ ID NO: 677877 - DNA, 620 bp, Homo sapiens
agagatcgtaccaagaaactgacgtatgctgcgacattggatcttagattccagcctgcagaattgttagaaaataaattgtctatcgtttaagccaccagtctgtagtattttgttatggcagtccaagccgactaagttacggtacccaggcgtgagatgctgcgacaacaaatacctaatcatggtcatatgtgttaggaaattggtgatgggtaaaggctggaagagattgaggtcatactagaaaaagccaattgtgaagggactattgaaagaaatatggacattaaaggcaattctggcaaaggctcagaaaggaagagagctggacagaaagcttccattttcatagaaacttagatttataacgatcatggatagaatattaaatatgctggttaaaatatggactttaggccaggcgtggtggctcacgctggtaatcccaacactttggaagactgaggagggcagatcacttgagctcaggagtaagagaccagcctaggcaacatgtcaaaaccccatctctataaacaacaacaaaaaattagccggggtgtggtggtgcatacatgtagtcccagctacttaggaggctgaaggtgggaggattg

SEQ ID NO: 677878 - DNA, 1945 bp, Homo sapiens
  misc_feature (1110)..(1110): n is a, c, g, or t
ggcgcggagccctgtgtccccacggtggcagaagggtggtggaggtgctgaacgcggagggggcggagggagccctgcggctggcggcagaagatacagcgaaaatgggcaggaaacgggtggttgacacccgggcgactgatcaccaaaggcgcgcagacacttgactgaccgccctaaggggaacccccaaaggaaattcctcgacgatcgattgtgaagcaacccggaccaaacgggctgggcgcagtcgggcagggcggcccggtttccaccattttaacagacaactcggggctccacgcacaaattcttcccttattgtcacaacgccttgacaggacacttctacggtggtacagacacgcaacagcactacgagctgacacctttgcgacacttgcctgaccaaaggtggaccttcaaccacaaagcagaacgacagcccagcggttcgtaaagatccccacgcggactcccgtgtggaaaacaaggccggatgaagaggcagggatcacaaggcctccactttaacacgcaagggcacgacgtggactgcgcaacatacatgggaacgagccaccaatttcatcatgggcggcacacgcaacaaccgacgggtgctcggacaccaggttcaatataccacccagcgcccgggagagaaccactccgtgctggcacaagaaaacggaaactgttgggtctttacagcagttggttgtcaccacagcatgtacaatataattgttaaagaggttatcatccagttctaaataaggaacgtggcgtgaatttgggcaaggaaggagcaaacgagggtaattattaacctgattgatatgccgccgtgtgaaaacgttaacctataggagtgggggcgacaacgggtatacagcgcgtaggagataccaaccctatatcatccagtgggttgtgtaaggggcgagcaaggattctcggtgtaaaaagcccaacaggacataaaacgacttggagacaagtggcgaacacacatgtgtctgtctgatgggcgaataatgtatactctctctcttctttttgatctccctttttcttcctctgttatgcatcctgttgctgcttgtncaagacgtagacgacacaccgaagaagaaagaaagaacctagacaaatagcgagtacgataagatgacgacacaatcgacttgacaaacacgcaacgaagaggaggatgggaagaaacgggggaggaagcagagacagagaagctgagaacagccgacaggagacagagcgagcgaacagacgaagagaggcggacagcaggaggagagagacgaccagcgaaagagaagagagagcgagggagagagagggagaggagaggagacggagacagagagcaaagagaaaggagaaggagcgagagaggaaagcagagcgagagagaagaagacgagggcaaagcaagaagggacacgaaccgcagcacgcgcagagaaagcacggagagagagagcaagccaacagagaagcaagcgacgacagaagaagagaggaggagagaagagaagagagcatagagagaggagagcaaggaaggacaagaagaggagagaagacaggggagagaataggaagaggagcgagaagaaaagaaaagcagcaaaaccaggaagcgagcacacagcaggacgcgagaagagaagaagagacacacaaagagccgagcaaggagcggagaaaaacagcaggaagcaagacgaaagagaagagaacagagaggagcagagacgagggaaaagaaggggaagagaaggaacggagaaacggaggagaggagaggagagagaggaagtaaagcacgagacgggccacgcgaagggaaggagacgagaaggcgaaagcggcagaagagagaggcagaagacggcaggagaagaagagagaaaggacaacc

SEQ ID NO: 677879 - DNA, 294 bp, Homo sapiens
aatatttcttcggcactatgtctgttagaaacgttttctcttaaggttgaaattaatgtattttcctctaagagaaatataaatacttattgcctatttaacctttggtaatatatattacaaagtgtgtggttgttttaattatctgaataaactttgtgatagagggagggcataatttactatgcctgctaacacaccagctggtagttacttagtattattacactgagttggagtgggatgaaaaactatgaggggctcaacagctggaggtctagtccacttaatttt

SEQ ID NO: 677880 - DNA, 438 bp, Homo sapiens
tgaacactatacaatgatttctaacggccctgacacaactcctccatcccaacttttcatcccttttattcttctgcaggcttcattctaacataccaattggtcagaatatctatcaaatcttgaccacgtaaagcaccccactataaaccctataatctgccatttcactctcaaacatcccaatgaaatgactgcatcaaggacatggatccaccgttctgtcattgttcgggccttcttctaccgtcttctcattgtagagaatttctttttcttcctccttctggagcctcagaacgttctggatttagaagcgataggcattgtaccactgggagcagtacatccttgaggacgttcatctgacccatcttggacttcaatgtccgccgcggctacctctctgtgaccctcatctacatcgcctccgtcagc

SEQ ID NO: 677881 - DNA, 1277 bp, Homo sapiens
  misc_feature (430)..(430): n is a, c, g, or t
gcgcataatcgccatgtgatgacttccaacctggtcatcggaagtcctgactgcctcacgtccgagtccttcgctatacatacttgtgattcaatcactgccagagcggcggaatgcgcgatgtagcttcataagaggcatagatgaaagcggattgtcagagaaggaccgatggagacgttgtctgcgtcaaggacgacgcctgatgggccgagaaggtcctgaggatcaagcatgatagtgtggacgtcgccgcgatgctttgagtcctacatgcatgcagtcagacgtgatcactcacggtgattcgcagaagtgccctgtcgcatgcgaatcttcccgatagcctcgcatgtcgagttcagcactgcgtcccaaagtacaaggtggcggtccccgcgcgtcttgactgattgtcacttcatacctngagaccactctgaacccagtacaagggtggcatatagacgttgacagagccgcctacattcggaatccgtgtgcgtcgcaggagcaaattggcagagcatccaaaaagggttgattgagcccgccgtgtagtgcacacacttaggatccctagtcgggatcaaattcctatggtctccaaaacggagacatttctcacagacatttgagaacggaaggccaacccggacgccggcaccgcaaggctatgccccattgggaatctaccaatggacgtatgaccgcaaaaagttagcagatgtgcgacctccccgttgattccaattggtagcctcgcttagccaccagctcctaggtaacaccaaacagaaaatctaggagacgaggatacgagcccatgtttcttagagggggaaccgctctcgagaggcccgatccatagactccgatggcgcccctttttagcgttttcattgctagggtgagtttcgaactgccctgaactgcattacgccaacagaaacgctccaagaaccagcagagtgcaacaacggtaaccccccttgggtgaaacccaccggcgggtaattcggggcgcctttctttgaaccgccaaagaggaaagggggcaagctacacgacgaagagggctgccaccaaattccttaccagggctgttagtggtaaccaaacgtggaatgccagggaaagttattccgccaacgggcacggaagaccctcttatgggtccgaaccccttacactgtggcatagtttgtttacagaggccggattcactacttaggaagacattccaattcgccgaaagagtgggttccccacaggaa

SEQ ID NO: 677882 - DNA, 80 bp, Homo sapiens
tcaagcttcttaacgaatgtacggggaccatgataatttctttgtatataaaataaacatttgaaaaaaccgaaaaaaaa

SEQ ID NO: 677883 - DNA, 194 bp, Homo sapiens
  misc_feature (96)..(96): n is a, c, g, or t
tgagaggatcccccgatttatccccaacacccagctgaatttatcttttttcagatatctttttaggttgttttaatggcagttaatggggagagnttagatgctagtatttaatacatcatcatgaactagacatgacacattcttcagactgagtgtaatgtgttggcgataacatcacgggacctctagaa

SEQ ID NO: 677884 - DNA, 160 bp, Homo sapiens
  misc_feature (129)..(129): n is a, c, g, or t
  misc_feature (154)..(154): n is a, c, g, or t
gagagtgagaggggcctctctcaccgcttggttttgctgagtctgctggggctcagtcctgaagtctggggtggagaaagtgcctccagcacgtggtgctggcccttcctggcagaaactgcttgaacnatgtgttttgtcgtctccgtgccantcttac

SEQ ID NO: 677885 - DNA, 448 bp, Homo sapiens
  misc_feature (95)..(95): n is a, c, g, or t
  misc_feature (219)..(219): n is a, c, g, or t
  misc_feature (235)..(235): n is a, c, g, or t
  misc_feature (269)..(269): n is a, c, g, or t
  misc_feature (405)..(405): n is a, c, g, or t
  misc_feature (430)..(430): n is a, c, g, or t
aacaacaggcaataagagaacctatcaggccggggcggagccatgcctgtaatcccatcacttcctgaggccaagacaggaggatttcttgagcntaggagttggagaccagcttaggcaacataaggagactccgtttctatttaagattaacaaacaggccgggcgcggtggctcacgcctgtaatcccagcagggaggccgaggcgggcggatcanttgaggtcaggagttngagaccagcctggccaacatggtgaaaccccatntttgctaaaaatataaaaattacccgggcgttggtggcacgaacctgtaatcccagctactcaggagattgaggcctgagaatagcttgaatcggggaggcggaggttgcagtgagccgagatccggccgttgcantccagcctcggcaacagagcgagantccgtttcataaataaat

SEQ ID NO: 677886 - DNA, 344 bp, Homo sapiens
  misc_feature (344)..(344): n is a, c, g, or t
tgtggtggctcatgcctgtaatctcagcactctgggaagctgaggcgggcagatcaccaggtcaagagattgagaccatcctggtcaacacggtgaaaccccatctctaccaaaaatacagctagcttaggcctaaagagtcaggatcatcaagatcattgttttccatctccatatcttgccacactggaaggtcttcaagggcaataacatatatggagctgtcatctcctatgataacaatgccttcttttagaatacttcctgaaggacctgcctgaggcagctttacagtttattttcttcgtagagagtacactgtaggccaggcgcagtggctctgn

SEQ ID NO: 677887 - DNA, 202 bp, Homo sapiens
gttaattatggattccggtttacaaggaacacgcgtcggcgcgtttgaagtgtcaagaaaacatgcccggttttatggtcaacgttgcccatggcacaaggtaatggattatggaggatttaatcccatttggtgcaaagcgacccgttaaggaaaataacggggtaacactcgagacagaagtacgtattataggagaaag

SEQ ID NO: 677888 - DNA, 344 bp, Homo sapiens
  misc_feature (117)..(117): n is a, c, g, or t
ggctgatgcctgtaatcccagcactttgggaggccaaggcaggaggatcacttgaagccaggaatttgaaaccagcctgggcaacatggtgaaaccctgtctctacaaaagaataanaaatgagctgggtatggtggtgtgtgcctgtaaccccagccacttggggggctgaggtgggaggattacttgagcctgggcggtcaaggctacaatgagctgtgactgcatcactatgttacagtgagaccctctcttcaggaaagaataaaaattaaaaaacaacatctggtccatgggttccatcaaacaagtgctatttcctttttgtcttgttcataaaaact

SEQ ID NO: 677889 - DNA, 415 bp, Homo sapiens
  misc_feature (204)..(204): n is a, c, g, or t
  misc_feature (291)..(291): n is a, c, g, or t
  misc_feature (413)..(413): n is a, c, g, or t
gaacactccacaaaatgatccccattttcctttgtcctcccctgcctcagtgttccctttccctaaccccccatgatgccttcccctttccctgccctctgacatggtcacattcagcaaaaacaccttaggggttgggtgtggtggtttatgcctgtaatcccggcactttgggaggccaagacaggaggatcgccttgagtnccaagagtttgagactagccctggcaacatagtgagaccccatctatacaaaaaataaaaacattagctgagcatagtggcgcacancactgagtccctgcaactccagaggctgaggtgggaggatcacttgaacctgggaggtggaggacgcaatgagctgagaccacaccattgcagtccagcttgggtgacaaagtgataccctnaa

SEQ ID NO: 677890 - DNA, 315 bp, Homo sapiens
tctttattttaattatggtagggtaccaattcagagtaattatggattagggggctccaacttaggtaacggggggaaaaaaagttccttacagggaacatcaagagtcacgggggtatgtggctcaggagctagcagggtttctcctcggctcagccacggtccactaaagccacattccaaatacacatcaccaagttaccacccagcagatctgatccgggggcaccaaaaggcctcagcagtaagtacccaggggccagagaagctccagaatggaacaagcccaggaagcacaacaaggtagggcacaga

SEQ ID NO: 677891 - DNA, 677 bp, Homo sapiens
  misc_feature (15)..(15): n is a, c, g, or t
  misc_feature (63)..(63): n is a, c, g, or t
  misc_feature (102)..(102): n is a, c, g, or t
  misc_feature (125)..(125): n is a, c, g, or t
  misc_feature (175)..(175): n is a, c, g, or t
  misc_feature (187)..(187): n is a, c, g, or t
  misc_feature (213)..(213): n is a, c, g, or t
  misc_feature (221)..(221): n is a, c, g, or t
  misc_feature (232)..(232): n is a, c, g, or t
  misc_feature (239)..(239): n is a, c, g, or t
  misc_feature (266)..(266): n is a, c, g, or t
  misc_feature (282)..(282): n is a, c, g, or t
  misc_feature (288)..(288): n is a, c, g, or t
  misc_feature (295)..(295): n is a, c, g, or t
  misc_feature (358)..(358): n is a, c, g, or t
  misc_feature (366)..(366): n is a, c, g, or t
  misc_feature (379)..(379): n is a, c, g, or t
  misc_feature (385)..(385): n is a, c, g, or t
  misc_feature (408)..(408): n is a, c, g, or t
  misc_feature (415)..(415): n is a, c, g, or t
  misc_feature (417)..(417): n is a, c, g, or t
  misc_feature (552)..(552): n is a, c, g, or t
  misc_feature (574)..(574): n is a, c, g, or t
  misc_feature (585)..(585): n is a, c, g, or t
  misc_feature (597)..(597): n is a, c, g, or t
  misc_feature (674)..(674): n is a, c, g, or t
ttttttatataaacngggttttttagggataatttatacacagaaagtcattttatgtaacanattggccatgttattacctttttttttcttacttaaaanaatttttttttaacaagaaaacncagaaaatgcattatttgcggggcatccattccatcccgccttcggggtnggttttttttancccagacaagggggtacccggggggngacaaacncgggcaaaccnccccccncacccccacgggcgtaggaggcggacnggggttttcaccgggnggcgcngccgacnggggggggggggggggcgcgcgcaaacatccaaatgaaaagtggggaacaaaacccaaatggnttccgggncgttccccgatgnggcgcnaaaaccccggggggttcccaggnggggggnangggggggggggggagacatggccaacaatccactggagttagaggaagtggagtcaactttaaaaccaatttttgtgtatgttatagtttttattaaaaattcttttctgtattggaaatacgtatctgcggggntctgccttaaataaaatagggnctcttctgtgntctaacaatgcngtattcaatcatgatacgaggcatgtaagcaaatggcctgtgtgccccatagctgtcatcgcttatgtgatcactgngca

SEQ ID NO: 677892 - DNA, 299 bp, Homo sapiens
  misc_feature (57)..(57): n is a, c, g, or t
  misc_feature (296)..(296): n is a, c, g, or t
ggaaacccaaaatacagagtagctgtctatgtgaattgaaatgctcaatgagcctgngcttaggcagttataaaaggcattgtgcaaattttatttttttaaaaatgtcatttccaccaactaattttcaagtctcttcttgtacctagatcacttgactgctcagagaactggttttaaacagtagccaagatgtatgtaggtagggaaatgacttggggtataaggaacgattatggaccaataatggatggatgggtgatggatggaaacctggggcactttattaggaaggnatc

SEQ ID NO: 677893 - DNA, 392 bp, Homo sapiens
ttaaataatcaacaccctcctaccttactactaataattattacatttaagactaccacaacctcaatcgagctacatagaaaaaatccatgcccttactgagtgcggcttcaaccctatatcccccgcccgctatccctttctccattaaaaattcttcttcatatatctattaccttcttattatttgatctataaattgccctccttttatccctaccatgagccctacgaacaactaacctgccgactaattagtattatgtccatcccctctttatttatgtcgatcgatccctagccctaagctcctggcctatgcagtgacttacaacacaatggattacgcacttgagcccgtaataaccatatagatacataacaccaaaaga

SEQ ID NO: 677894 - DNA, 841 bp, Homo sapiens
gttacatttcctgttgtgcaactatcacttctgtttccaaaactgtttcatcatcataaacagaaactttgtactcattaagcagtaactcctcatttctcctccctctagcccctgctcacatctaagctactttctgtatctgagtttgcctgttctagatatttcatataactggaatcgttcaatgtttgtccctttgtgcctggtttctttcacttagcatagtgttttcaaagttcattcatagtgtagcatgtgtcagaactttattccttttatggggctgaatgatattccattgggtggatgtgccacatattaaagtaagtaaagtaatgagatggagtcttgctctgttgccaggctggagtgtagtggcatgatcttggctcactgcaacctctgacccctgggttcaagtgattctcctgcctcagcctcccaagtagctgggactacaggcatgcacaacaaacccaggtaatttcgtatttagtagagacgggttttcaccatgttggccaggatggtctcgatctcttgaccttgtgatctgcccactcggcctccggaaagtgtgggattacaggcgtgagccaccgacccagcctcactgtgatttgatctggatttccttcatgactaatgatgtagcccatctttactggtgcatggtggccatcttatagaattcttcacttggcagaaaatggtctaattcagggtccctttggaccatttttacaaatagggtaggtgaatctaacaggatgctagaagtttagaaaattctatcaatattcctggatatcacttaacaatgactccaagaatataa

SEQ ID NO: 677895 - DNA, 289 bp, Homo sapiens
ctggcaaccacgcatggcggaccttgatcatggacacacatagaggctctgcagtccccattttcatggtctgttcttttatgtaggattcactagcattattccacatatctccagatcagactccataggaatccctgtacatcaaatcattctcaatgggtagtataatacaataaattctcgattacagtgattgtccaatgctcaatgttagttaacaccctatgcaatggttatagcctgggtcccaccgctctcgttccctctcctctcatttcttcctttt

SEQ ID NO: 677896 - DNA, 372 bp, Homo sapiens
  misc_feature (125)..(125): n is a, c, g, or t
  misc_feature (133)..(133): n is a, c, g, or t
  misc_feature (144)..(145): n is a, c, g, or t
  misc_feature (151)..(151): n is a, c, g, or t
  misc_feature (166)..(166): n is a, c, g, or t
  misc_feature (169)..(169): n is a, c, g, or t
  misc_feature (173)..(173): n is a, c, g, or t
  misc_feature (178)..(178): n is a, c, g, or t
  misc_feature (189)..(193): n is a, c, g, or t
  misc_feature (211)..(211): n is a, c, g, or t
  misc_feature (213)..(213): n is a, c, g, or t
tcaggccgcaccatctgagacccctcctctgagaggcagggcacagacagggccgaggggcagtggagatgggaacaggaggggggctcagaccatgaaaacattggagaatcttagcgggactntggcctgntccatacaganntcgtanttgcttagatatgcntantgtnttcanccaattttgtnnnnntgtgcgtgtgtgtgcgcntntgtgtgagcaggtgggcgcttgcgtgtgcaacgtgtgcgctgcgtgtttgtctgctgtcacctgtgttcatgtatgcgctgcgcatgagtgtgtgttctgtgtcaggaagtgtctactgtggttatgtagtgttggctgcaagtttttttaccctcagg

SEQ ID NO: 677897 - DNA, 137 bp, Homo sapiens
acgctgcaccgccgtcaaagttaagaacgggaagaatgggtggcacggtggctcctggaagagctcacccagcgcagttccttgagctcgggcgcttggtttcgtgtccctggggatatatatatttaataaatttt

SEQ ID NO: 677898 - DNA, 441 bp, Homo sapiens
  misc_feature (36)..(36): n is a, c, g, or t
ggcggcggcggcgcgggtcggcaacgggagggcgcncggccgagcggaggcggagttggcgccgagaacatgtttcctgtgggccgcatccacagacacttgaagactcgccccccaagccatggaagggtgggggcccctgcttccgtgtacagtgctgcgattttggagtacctccctgcaaaggggtgatccctcccatccccaaatttttgattggaaaaaaggggcagcagaaaactgcttagagggatgctttaacccaccctcttcctccccgtcattgtactgtaactggggcagaaaaaataatggggatatgtagaattttttaccaccgtttaatggaaaagcatagaccatttctgtagacatgataaaaaaaacctttgtatgtttttagactcgaagtttgataaaaggaccctttcatgtggtgga

SEQ ID NO: 677899 - DNA, 286 bp, Homo sapiens
  misc_feature (40)..(40): n is a, c, g, or t
  misc_feature (123)..(123): n is a, c, g, or t
  misc_feature (255)..(256): n is a, c, g, or t
cccgccgtaccagttgcgaggtctgattgagctgatctgntctcccacatacagtagcttccaggcattcgctccagtcacaagtacatgtttgaactgatgtaaagccaggacacttcactngtaactaacttcaactaaaaacagcaatgttttctctctcccttactttcatgtaggctattttttctttgatcatatcagaaactctattttcccatgtgctctgtaatttattcatctgttctgcctctnntgcaccacggtccgcaactggtacggcggg

SEQ ID NO: 677900 - DNA, 258 bp, Homo sapiens
gaagttgtcgttgccagtggggcacagttagaacgtgattgtgcacggattgtgcttgatgctgaatgttcaggcgagcccttttgtcgccgcgacgaaaaagcaagccgaacaactcgatatcagcgttcgtaaggagcgtttcaatgctggtcagcagactgttaagttgagtgaacaagccttgcaacctaaacaagcggcgttggataactccgccaaaatgatagtttggaaaaaataaggtgttgcaaaagg

SEQ ID NO: 677901 - DNA, 577 bp, Homo sapiens
  misc_feature (23)..(23): n is a, c, g, or t
ttcggtgtaccccctcgggttanttgatgcgcgcttaagtaactagtccgtgttcgagggccgccgtatttttttgcgttggtggggcggcgacatgacggggtacactccggatgagaaactgcggctgcagcagctgcgagagctgagaagtgcgatggctgaaggaccagtgagctgagccctcggtgagccggatgctgaccccacagaagatgggtgcctatggagaggttctggaataaattttggagaataaatccgccttggaggaaaatggctccatggggtatacaaaaagagtatacttatgtaaacactacatgtactatgtaccttgtctggattattcattattaacatgaagtatcatgtttctgacaagaaccatatggcatacgttcgaagcagaagtccagaatatatccctggtgactacaattctgggagacttggcagacaggtaagtcacaaccaactgaaagaattttcctgcatcgaaagatcattcaaaggattatgtagaacaagttaaaaggcttattgagcctagagtatagtacctactattaccaaa

SEQ ID NO: 677902 - DNA, 893 bp, Homo sapiens
  misc_feature (150)..(150): n is a, c, g, or t
  misc_feature (691)..(691): n is a, c, g, or t
  misc_feature (744)..(744): n is a, c, g, or t
  misc_feature (755)..(755): n is a, c, g, or t
  misc_feature (787)..(787): n is a, c, g, or t
  misc_feature (791)..(791): n is a, c, g, or t
  misc_feature (800)..(800): n is a, c, g, or t
  misc_feature (809)..(809): n is a, c, g, or t
gcccctcccaccttctacctatgtggagtttacagtgtctggcactgactgtgttgctaaagaggccacagaggcagccaagtgtaacctgctggcagaaaagcaatatggctgttgtaaggcaacactcagtgagaagcttggtggggnagaggttgcagtgacctgcacggtgttccaaacacagcccgtgacctcacagccccaaccagaaggtgccaatgaagcagtccccacccccgtggtggacccagatgcacctccgtcccctccacttggcgcacctggactccctccagctggctcacccccagactcccatgtgttactggcagctcctccaggacaccagttgcaccgggcgcactacgacctgcgccacaccttcatgggtgtggtctcattggggtcaccctcaggagaagtgtcgcacccccggaaaacacgcacagtggtgcagcctagtgttggtgctgctgctgggccagtggttcctccatgtccggggaggatcagacacttcaaggtctaggctagacatggcagagatgaggaggtttggcacagaaaacatagccaccattttgtccaagcctgggcatgggtggggggccttgtctgctggccacgcaagtgtcacatgcgatctacattaatatcaagtcttgactccctacttgccgtcattccncacaggacagaggcagagtgggtggtgggtatgtttgacagaaggcattaggntgacaacttgncatgattttgacggtaagccacatgatgggtntctnctctgttgnccttcaaancattggactgtgatttgaaggtgctttgtagctatatgtgctgtaatgaagtgctgaagacttctataaaaaggtctagcgaaa

SEQ ID NO: 677903 - DNA, 943 bp, Homo sapiens
gcgcaggcatttagcttctagttgtttttggcattctgcctggagaggaaagaattttcctgatgtcataaaataccagaacaagtttttagcttaattgtaaacaataattttgtgccaagaaaatgaaatctcagaaatacaatttttgacctaaaatggccacctagttagaataattactgatttacttttagataacattatttatttagaaattttactatctaggtatagagaaaaacatgacaacttccctttcctctccctgccatacttttgtttatgcattgtgagatcaaaaactagtgagcacagtaaaggaggataatttcagattatccttttctcattctgcattttaaatcaggtttgtccatcacttccatataaacggggctatgaagtaagactattttaaattgctaattgataacacaaaaaactttaacttgtactgtaataggggattttcaacttttaacatcaggactaagttatttcattattagttgaggcgtcccaaaatactggcgtttcaaatcactgtagctatgaaaacttgtaatcccttggattcctttattacatttacacatcaaactttgcctagtgagaagatatactccttcaaaatatagtcaacgcagtgaactgacgtactgagcgaaatgaacacacaattaaaagtaagacaagcagagcagaacggtacatcatacgaaggggataaggcaccacaaaacgacaaaacgcagaagacaataacacgagaaccactaacagccatgcccaacaaaatggacacgatagaagatcggcagggacatagaacgacaaggtgagggacccacgagagaccacggtacgcagaacacgtaaacataacgaaagcaaagaaaaaatacagggacagacaccacgtagacgcaaacaccagaga

SEQ ID NO: 677904 - DNA, 831 bp, Homo sapiens
tggaggatgaaagcgccaaggtcaagaccatgatcgtggcgggcgtgtgtgtgcctgctcggatcggccttatggtgactaagtgccggacgtaatggacggcccagaacatcactccaatggacttctacaatccgctgttggcctccgtgtcgaaagcgaggagatgggtgcctctctctacgtcggctgggccgcctccgcgcctgcttgctccttgtgccggggggctgctttgctgccaaactgtccaccccgcagcagacgaagccttactccgccaagtattctgctgtcccgctctgctgctgccagcaactacgtgtaaggtgccacggctccactctgttcctctctgcttgttcttccctggactgagctcagcgcaaggcttgtgaccccaggagggccctgccacggagccactggcatgcttggggactcggcggactggccagagactgagccaggcaggacggcagaagcttgagccctctctggcccactcggacaagttcccaaggccgctcctgctagcaagaaccagagtccaccctcctctggatatcggggagggacgcgacagtgaccaggtgtggtaggcggagatggggaggctgggcttcttgcgtggccagagatggttaacccctgactttgggatctgcctgaatcggtgttggacactgtccccattaccatttacccactactgtctgcttgaattcctctggtgcggcaggcttgaataccttggacgggcctggccaccgaaccggccacgaaatggtgagctgccaaccctcgcggagccccccacgcggcaacaga

SEQ ID NO: 677905 - DNA, 985 bp, Homo sapiens
  misc_feature (574)..(574): n is a, c, g, or t
  misc_feature (627)..(627): n is a, c, g, or t
  misc_feature (638)..(638): n is a, c, g, or t
  misc_feature (670)..(670): n is a, c, g, or t
  misc_feature (674)..(674): n is a, c, g, or t
  misc_feature (683)..(683): n is a, c, g, or t
  misc_feature (692)..(692): n is a, c, g, or t
  misc_feature (874)..(874): n is a, c, g, or t
  misc_feature (931)..(931): n is a, c, g, or t
gcccctcccaccttctacctatgtggagtttacagtgtctggcactgactgtgttgctaaagaggccacagaggcagccaagtgtaacctgctggcagaggttgcagtgacctgcacggtgttccaaacacagcccgtgacctcacagccccaaccagaaggtgccaatgaagcagtccccacccccgtggtggacccagatgcacctccgtcccctccacttggcgcacctggactccctccagctggctcacccccagactcccatgtgttactggcagctcctccaggacaccagttgcaccgggcgcactacgacctgcgccacaccttcatgggtgtggtctcattggggtcaccctcaggagaagtgtcgcacccccggaaaacacgcacagtggtgcagcctagtgttggtgctgctgctgggccagtggttcctccatgtccggggaggatcagacacttcaaggtctaggctagacatggcagagatgaggagggctggccacgcaagtgtcacatgcgatctacattaatatcaagtcttgactccctacttgccgtcattccncacaggacagaggcagagtgggtggtgggtatgtttgacagaaggcattaggntgacaacttgncatgattttgacggtaagccacatgatgggtntctnctctgttgnccttcaaancattggactgtgactgtgagaggggcggttgctgagctgagatgtgcctgggaatgaaagtgcgtgagagaccttgcttgataaaggaggggggtaggcttggaggaggggggggggcgggggggaggaggggaggggggggggggtggagagagcgggggggggacgtgggggggggccgngggcgcttggcggtagtgggggggagggaagatgaggggcgcgggttggacgaggcngcagggaggagggcctgggtgtgcgcagagtgggcgcgggggggggtggggcgg

SEQ ID NO: 677906 - DNA, 133 bp, Homo sapiens
  misc_feature (45)..(45): n is a, c, g, or t
  misc_feature (78)..(78): n is a, c, g, or t
  misc_feature (85)..(85): n is a, c, g, or t
  misc_feature (120)..(120): n is a, c, g, or t
  misc_feature (124)..(124): n is a, c, g, or t
ctccccaggagaaatccattttgctgccaaatgtgaccagcaganttgggcagagtacatcatagcacaatcacagtnctgtcanactgccaacgtggcccaaggcatggcgtgcagggnagtntctctggag

SEQ ID NO: 677907 - DNA, 221 bp, Homo sapiens
gcgtcgactgctgtgagccatgacggcaccactgcatatcagcctgggtgacagagagagaccctgtttctgaaaatgtaataatgataaaatgtacatcagtgtaggaggctgagcatcgctgcggggagggggtgttggctccagcacacagacgcctcatgcacaggccgagggacctacagccaaggccgtggttctgggaaggctccaccgttctg

SEQ ID NO: 677908 - DNA, 534 bp, Homo sapiens
  misc_feature (54)..(54): n is a, c, g, or t
  misc_feature (57)..(57): n is a, c, g, or t
  misc_feature (64)..(65): n is a, c, g, or t
  misc_feature (75)..(75): n is a, c, g, or t
  misc_feature (81)..(81): n is a, c, g, or t
agtgggtcctcgcctccttcgctgctctctgtgcatgtggctcgggctcctctnctngctgtcnntgcctcttcntgtgantggtggcgtccaggttcctcctcagcactcgcatgtcgcctgcctcttcatgtgaaatggtggcgtccggggttcctcctccagcactcgcatgtcgcctgcctcttccatgtgaaatggtggcgtccagggttcctcctcagcactcgcatgtcgcctgcctcttcatgtgaaatggtggcgtccggggttcctctccagcactcgcatgtcgcctgcctcttccatgtgaaatggtggcgtccagggttcctcctcagcactcgcatgtcgcctgcctcttccatgtgaaatggtggcgtccggggttcctctccagcactcgcatgtcgcctgcctcttccaatgcaagaatggacgtctatgcaagaatggacgtctatgcaagaatggacgtctatgcaagaatggacgtctatgcaagaatggacgtctatgcaagaatggacgtct

SEQ ID NO: 677909 - DNA, 132 bp, Homo sapiens
tgtatatattgatctaacaaatgagtccaggagtggacgttagaaaggaaggagtagaaagaatttaaaacagcagagaacagctccactgggaggcccagtgtactcctattttgcagtagaaatgagggg

SEQ ID NO: 677910 - DNA, 725 bp, Homo sapiens
ggtaactgaaaatccacaagacagaatagccagatctcagaggagcctggtaagcaaaagcctgaagaacggtgcctaatttacagcaaccatgagtacaaatggtgatgatcatcaggtcaaggatagtctgagcaatgtgagatgtcacttagacatgggagttatccattgatgaggatgaaatgcctgatttagaaaacagagtctgtggatcagatgtgaattcctagataccaaatacagtgtgggaatacacaagctatagcctatgtgagacagctgaaaggggcagaatgaggaagccctgaagagcttaaaagaagctgaaaacttaatgcaggaagaacatgaaaacaagcaaatgtgaggagtctgggtgacctggggcaacttgtgccgtggatgtattaccacatgggcagatctggagaagccagagttacctggggacaggtggatgaacattgtgcaagaagctttcaaatcccttcgcgttatagaatggagtgtcgcagaaattagactgtgaggaaggatgggccttggttgaagtgtggaggacaggattatgaatgggccaaggcctgcttgtgaaacggtgcttgaaaggtggaacctgtgaaaaccggattcagcgcgggatagggaaactctgactatacgtggatggtgtacttaggcgaaaaattacaagccattgtttgggtccctaaggaagttac

SEQ ID NO: 677911 - DNA, 264 bp, Homo sapiens
actacgtcgcatatctcttacaaatgtagtataaatgttatggatgaattaggaaatattggcatagtatatggtattagtgaaaagacacaacttcacaataacatataaaagattaacatgaaactattacactacttaaaaaatattttctcccatattattttagcatttttgactagtttaataatatgaacactgccaaaaaatgggttcaaagtcgcctggagaaacagtttcttcttctggatatgcgacagtggt

SEQ ID NO: 677912 - DNA, 275 bp, Homo sapiens
cctcaaaaaaaaaaaaaaaaaaaaaaggaaaatggatttgactttataaaatagatagagtggtgttagcctttatattgtaggcatttagcactataaattttcctcttgatactgtttttgctgcatcctatagattttcatatgttgtttctatgttttcattaatgtcgaagaattttttgatttctgccttaattgtatggtttatcccaaaatcgttcaggaacaagttgtttaatttccatgtagttgggtcttcttggtattgattt

SEQ ID NO: 677913 - DNA, 397 bp, Homo sapiens
tatcccctctacatgtcactgtgaccttggacgtgtcctttaactttagttgtctttcctaaatggggtacaatacatctactttagtgtgttcagcataattcttagcataggttcttaactatcgtatatggcacaaaactgttcagaatttgaatttgtccatgttcacatttcctaacttctctgaacctcatttccttcatttgtctagtggcaattaccacttggagggttgtgtattgtttcattgagattatctatatcaaagtgctttgtagattttcagtgctatctaaatcttatttttggctgctgttattttgtatagtatttttttccaaagacaaaacttctggagttactacttacagagtctagacctgagcaagccagg

SEQ ID NO: 677914 - DNA, 489 bp, Homo sapiens
  misc_feature (212)..(212): n is a, c, g, or t
agtccgagtggagagagcgagctgagtggttgtgtggtcgcgtctcgggagaaccggatagcgctgtggctgtagtggctgagcctaactgatctgatagaggcagattgcagaattcaaagaagctttgttcactagtttgagcaaagatggtgatggaactatagacaacagagaggaattgggaacctgtcaactggacggatcctccntgtgggcgagaattcccagcatgaagcagagttaacaggacagtgatgaatgaagtagatgctgatggtaagtggcacaattgacttccctgaatttgctgacaatgatggcagagaaaagatgaaagacactagacagtgaagaacgaaattagagaagcattccgtgtgtttgataaggatggcaatgggtatattagtgctggggaacttcgccatgtgatgacaaactgggagagaagttaactggtgaggaagttgatgatgtgatcaggga

SEQ ID NO: 677915 - DNA, 211 bp, Homo sapiens
aggcagtgggggggggtcacgcgatgctactcgggcaccttgaagccacagctggcctccacatgaacgcgcacggtcccaatgcgcaggaatgtctcgatgttgtaccatgtgctttctgaagcattaaaacattccgtagtttttgagcagggcgtcctggttgtgcgagtttgtgtcacaattgctgtaagtctgcttgagtgatctg

SEQ ID NO: 677916 - DNA, 113 bp, Homo sapiens
gctctggtagctgtgacggataagagaccagccactgccagacgctcagtctacactgagtgcactcaatggatgaggtagagttttgcaccagtctgcaatgaacccacgcg

SEQ ID NO: 677917 - DNA, 945 bp, Homo sapiens
gctaaagctagccccaaacccactccaggcttactaccagataaacttagacagaccatttacccaaataaagtataggcgatagaaattgatgacctggtcgcgaatagatataaaatacgcggcaacgggaagagatagaccaaagttgtacccaagcatagtatacgcaaggactagaccctcgtataccgttctgcagtataattgaattaacgtatgacatgtacttcgcagatggtagagccaagagcttaagaacgccccgaaaatccatgagggagcgtacctaaggaacagcggtaaaaagagcgagcaacccgtcgtatggtagcaacaatagtgggccatgcacttcagtaggtagcaggcgacagaacctcgtaccgagctctggtgatatgcgtggttgtgcgcaatgcataggaatctgtagttcaactcttgaagtttgccgcaccggacaccactcgtggaaatccactcttgtggaattgtaaactgtttaggtccaaatgaggaacagtttgcgttgggacaactacgggaatcaaaggcttggtagaggcatgacgtaaacaaactgattagcaccccataggtatggtgatacataatgctagacaccagatttaaagaacaggcgtgggcggatgctcaagacccattagctgaaaatgtcccaatggcataatgagctgtgattgcctcagcacgtcatgtgtggggccacttctatccacccttatagaaagaaccctcagtgtgagctatgccgtggatgcatgacaacattgctccttctcattaagacttgtggtcgtattattacattgaagactgacaatcaaacagtggcactttgtagcatccaagaccaataggtgcgttaataccctcctggttcaacccaacagaggattcccataaggacacaggtctaaa

SEQ ID NO: 677918 - DNA, 1704 bp, Homo sapiens
  misc_feature (374)..(374): n is a, c, g, or t
  misc_feature (379)..(379): n is a, c, g, or t
  misc_feature (486)..(486): n is a, c, g, or t
ggacacttgacggttcattcctgtagcgctgacgaaggcagaacgcgagtgcacaagtccgagcaggacgtatagaggttgattcggccttaaacaagcgctaagttcgcgagtcaagtccaatgccttcgaggaagaccgagccatagtcgaaggtacccagtggtgacagtccgagttagccgtgggcccccagccgccttcgaaaccaactccacccaagatgctagggcgcaaggtggtggcatagcgctcgcaaagcgcgaaatcgaccccagagtgacccttcggctgatcatggtatccacctgagccaatgtgggactccatcatatacggggaacccatttgcatccatacctgaacgtctacgncctgnggtattggggcagcgaatgtaatatgtgaaggatgacacaaacgacgtggaagcatcacggtcgttttctagaccctatgggaatcggcgtacacacacgtactagncctattcaaagcccttctgttcgagtatggctgggccaaaggggccgtagccacaggaacaccagcaagggaatgtaagattttatgtaccgaaacgtgccttggctcgtatttatccgcgatcgcagccgaggttggtcggagagtggcaacctcctttcctccacgccaatgtctggtatattgccaaacacgggcgatgtatccgactctagagtgcgcttttcgtcttaaatggtgagtgtactcttggccttcttgcgcatacaaaaagagttagcgctgtgccctcaccattacgccaaaatagcgtcttgcctctatggagcaagtcccgatttccttgctttagtccttttaggcgcatatggcgaagctaaaacacaattgtaataaggctccgtccctaaaaagccccccggtggggaagcgttaaggttgcccgttaagccgcaactgggaaaacccgtgtggccccgttctttcagaatgtgctgtgtgaacgaccctattattactgatgagacaaccgaccaaacctttcgcgaagaatggaggccctcataaggtaaaccggcgttctatacaccccttagaggttgaaaaccattttgtttcggcccttggagggtatggtgaccagacccggggttgctctttacaccgaatggacccttagggttccggaaattgccaaggttttgcgtcggaaacggaaccacggattgtgcgcggacccaattagtggccaagccttgtggggaggggacattcggatgaggcaacctagggggcgaatttctctgacgctggggctcgcttcgggaatcctttttggggggggccttacaattgtattcggcacttgggggggttcccccttttggggcgcaatttctttctcccccatgggtggtaccattgtattttggcaagggaccaagaagcgtccggtgggaatccaaaagatagaaaccatttccaaattggcaacaacggacatggaaacccaacggttcccgccaagggaccagatttccctcacaatataaaagagcagggaatccgagagaggccttttgtattggaaaatttgaagagccggggggcctgggaggttcccacggcaatgttggggccccttaaagtggggggcaccactttggcgccccttggatttccaaggggccgccttggaagaagggcgatccattttac

SEQ ID NO: 677919 - DNA, 275 bp, Homo sapiens
tcggtggacgttgtatcctaaccataggtggaaggatggagacgggagcgaggtggtctctccaccagcacattactattcatctgttccagtgacctaagaaaagctgagcgaggaagaaggcaaagactggctgccttggaggggtcacatgagggagacctgtgcctgatttcattaggaaatccattctgttatttttatggtgctgttggctactttatcaaaaaacccttcaatagcatccttaagatttaccaacaacacgaccaaca

SEQ ID NO: 677920 - DNA, 133 bp, Homo sapiens
cggtcctcgtcgcttcctgcggcacgtttctccttctcctcctcatcctctctggtcctgatccttgagccgccgctgctgcatgatgctgaagtgattcagcaacaaaaaaggaaagaagtgcgcctgggtg

SEQ ID NO: 677921 - DNA, 183 bp, Homo sapiens
tagtccgtgatgtctacacagctactctctttgctgcaattaatgtctttttttttttatttggaaagagagtctctttctgtcccccaggctggagtgcagtagtgcaatctcggctcactgcaccctctgccccccagaattcaggcaattctcttgccttagcctctcaattagctgtga

SEQ ID NO: 677922 - DNA, 169 bp, Homo sapiens
gctcgccagttcaagctgaatttttgtcatatctatgttcctataacatcattttacatactttttgattccataatgaatctggaatcacataaatataagtcctctctttaaaggtacagagaaaagttatctttttttttttttttggaaaagctgtggtaactgg

SEQ ID NO: 677923 - DNA, 122 bp, Homo sapiens
atcccccctagtcctagaagtttcaatagcatataactattacaatgctattctgctgactttctgatttgtaaaagcttatgtatatatgtgttaaacataacctttttaactacgtactt

SEQ ID NO: 677924 - DNA, 363 bp, Homo sapiens
cttgtctttcaggactcaactcaaaaacatgtttctcagaaactgctatctgacctttttatcatagtgattagaaattaactcagtcttgcttatcttgccatcagaccatgagcttctccaggcaggctctatgtgtttggttttacttaccccagatgccctagaacataccttggtacgcagcaggcattttcattaaataaagacacataatttcattggagaaattattgtaatgttttcagctaagcatcaaacgtatgaaatgaatgttagctgtaaaacaacacaatgaacaacaaaccacaaatgaaaagaaactcaaaataataatgggttgcaaagcagaaaatattctta

SEQ ID NO: 677925 - DNA, 627 bp, Homo sapiens
gagagagagagagagagagagagagagagagagagagagagagtgagagagagagagagagagagagagagccgctccgctcgtccgctccctcccccgcgccgtgcacgtcttggttcgggccgggcatgtgatcgcccgtgcgtttagcctttgcccacgcagctttcatacatggcctccgattacccgcgcatctgaaagccagcccctgacttcaaggccacagcggtggttgatggcccctccaaagacgtgaagctgtctgccttcaatcggaagttcgtgctcctttgtctctacccctttgacttcacttttgtgtgccccaccgagatcattgcgttcaccatccgtgcccacgacctttcccagcttcgctttgaactgctgggcgtctcgatggacttttaattcaccccccccgctcggattcacacccccccggaatgagggaagctttgtgccccctgacattcccccgcttgcttgcatgaccacacccctttcttaggatttcggggggccttaaacctattatggcacttgccttcgccctttttttactcattgcgggggtccctctgcccatcactgtttatgttttgccccttgtcccctcccccc

SEQ ID NO: 677926 - DNA, 165 bp, Homo sapiens
gtctcttctacatgtactaacctcttctttcttttctgtgttttggttttgttttgtttttttgatagagtctcactctgtcacccaggttgcagtgagttgagatcacacaaactgcaacctctgcctcctgggttcaagcgattctcctgcctcagcctcccg

SEQ ID NO: 677927 - DNA, 116 bp, Homo sapiens
taccatcgggggtatgctgttcgaattcataagcaacagtgcagttgcagctggtacctggttggcagagatcttggtgagtgaaggtcttggtgcagtgccgcatgcaaaccatg

SEQ ID NO: 677928 - DNA, 991 bp, Homo sapiens
  misc_feature (447)..(447): n is a, c, g, or t
ttacgccggtgctctaaatgtgccccagactgccgaggtgttctcacagcatgcccttgcaacgtgtgccaccaccccgcggggggtcccgttagcccaccacgtgtgttcctcagatgttccccgtgtatgtgtgttcgactggacaccctcacgcgtgggtggtgtcgcggcgcagcaacctgtaccctgcgatggacggtccgtcgccccacagtgtctgtcaacacagcttgtgtgaacaaggcggtagtcccccccattttccccaggggagcacacttctcgttggtgcaccacagggtcatccccgctgctctgctcagaccctggaaaaggagccccgctgttggtgccactcacgctctggcgcccggacccacttctttgctgcccgcagtcagtgcgccccgcggtaccctatcctcgcgggctggcggttagagngctgtcccacgacccaaccggggcagcgtgttctctcgtatatttgctctcacacccggggccccggtccctgtaggttgtgtgcggtattgcccccggcctgcttccaacgtttgtaccgctagtgcgggcacacacgcgcgggttaagacccggtgttcgaattcttcgctcgcgggtggaagagtcttgggttgtgtcccttcgctccgcgtggtaacttctctgcgcggccccccagtacatcttgccgcggcgtttttcgtacgcgccgccgctgggcacaggcttcccgcggcgttcttgcacaggtttcgaggggttcacccttcgcgaggtcccaatgaggtaccccacagaccctgccgctttctcaaccgcgggtgtctcccaattacacgaggcctggacccaacccgcgggggtgggcaacagtgcaacccccaaaaaagtccccgcgggcaggtccaaacagtgggaaagaggtccccgacagggccaacaaaaataaatcaaagcggcccccgaaccgaccatggacgac

SEQ ID NO: 677929 - DNA, 258 bp, Homo sapiens
ttcagacgctaactatgtgtagtgggctaacactgtgaagccactgtgtctccatccctgggccacttagcaagacctcatttctaaaaaaacatactaagaagatgatggttactaggtgagaagacatggtgaatttgggattaaaccaaacctctaggactgatagtttccctttattttcctagttttcaggccctatgctggatgtctttgcatgcgtcatcttattaaatccccacatagttcagcgtctga

SEQ ID NO: 677930 - DNA, 108 bp, Homo sapiens
gcctgttaggggggcagaaggttagcacgtcacttcttgattgtagtgaactgaggcaagctagtccatcttcagcgccatgacggccataatctcttgacgaacact

SEQ ID NO: 677931 - DNA, 203 bp, Homo sapiens
ttcgtttattttctaaactcgataggctcattctactgtcttctccaggtctcttctacgaaacagttacaaacctacggccaggccaggcagtggctcacacctgtaatcccagcactttggaatgctggggcaggaggatcacttagaggtaggagctcgagaccagcctgggcgacaaaagcaagactccgtctccaaaa

SEQ ID NO: 677932 - DNA, 994 bp, Homo sapiens
  misc_feature (47)..(47): n is a, c, g, or t
  misc_feature (73)..(73): n is a, c, g, or t
  misc_feature (92)..(92): n is a, c, g, or t
  misc_feature (170)..(170): n is a, c, g, or t
  misc_feature (219)..(219): n is a, c, g, or t
  misc_feature (243)..(243): n is a, c, g, or t
  misc_feature (263)..(263): n is a, c, g, or t
  misc_feature (274)..(274): n is a, c, g, or t
  misc_feature (279)..(279): n is a, c, g, or t
  misc_feature (295)..(295): n is a, c, g, or t
  misc_feature (300)..(300): n is a, c, g, or t
  misc_feature (315)..(315): n is a, c, g, or t
  misc_feature (330)..(330): n is a, c, g, or t
  misc_feature (337)..(337): n is a, c, g, or t
  misc_feature (368)..(368): n is a, c, g, or t
  misc_feature (373)..(373): n is a, c, g, or t
  misc_feature (397)..(397): n is a, c, g, or t
  misc_feature (422)..(422): n is a, c, g, or t
  misc_feature (441)..(441): n is a, c, g, or t
  misc_feature (449)..(449): n is a, c, g, or t
  misc_feature (464)..(464): n is a, c, g, or t
  misc_feature (467)..(467): n is a, c, g, or t
  misc_feature (475)..(475): n is a, c, g, or t
  misc_feature (493)..(493): n is a, c, g, or t
  misc_feature (495)..(495): n is a, c, g, or t
  misc_feature (567)..(567): n is a, c, g, or t
  misc_feature (578)..(578): n is a, c, g, or t
  misc_feature (599)..(599): n is a, c, g, or t
  misc_feature (605)..(605): n is a, c, g, or t
  misc_feature (624)..(625): n is a, c, g, or t
  misc_feature (653)..(653): n is a, c, g, or t
  misc_feature (740)..(740): n is a, c, g, or t
  misc_feature (743)..(743): n is a, c, g, or t
  misc_feature (858)..(858): n is a, c, g, or t
  misc_feature (892)..(892): n is a, c, g, or t
  misc_feature (982)..(982): n is a, c, g, or t
cgcaggcgctcggggttggagccagcgaccgtcggtagcagcatggntctcctctttctcctaccccttgtcntgcagggtgtgagcagggntgagatgggcaccgcggatctggggccgtcctcagtgcctacaccaactaatgttacaattgaatcctataacatganccctatcgtatattgggagtaccagatcatgccacaggtccctgttttnaccgtagaggtaaagaactatggngttaagaattcagaatggantgatgcctgcntcaanatttctcatcattatngtaanatttctgatcatgtnggtgatccatcaaantctcttngggtcagagttaaagccagggttggacaaanagaanctgcctatgcaaagtcagaagaanttgctgtatgccgagatggaaaaantggaccacctaaactgganatcagaanggaggagaagcaaancangattgacntatttcacccttcagttntngtaaatggagacgagcaggaagtcgattatgatcccgaaactacctgttacattagggtgtacaatgtgtangtgagaatgancggaagtgagatccagtatanaatacncacgcagaaggaagatganngtgacgagattcagtgccagttagcgantccagtatcctcactgaattctcagatactgtgtttcagcagaaggagtcttacatgtgtggggtgttacaactgaaaagtcaaaanaantttgtattaccattttcaatagcagtataaaaggttctctttggattccagttgttgctgctttactactctttctagtgcttagcctggtattcatctgtttttatattaaganaataatccattgaaggaaaaagcatatattaccnagtcttgatctctgtggtaagagtgctacttagagacaaacctgaatcaaatatgtacactcacacgtcatacagccatttcttagaaangagtgtctgtga

SEQ ID NO: 677933 - DNA, 142 bp, Homo sapiens
tgtggagactggggtctcacctggtagccaggagggtcttgatctcctgaccttgtgatccaccagcctcagccttccaagggggctggggattacagggcgtgagccactgtgcccagccaagaatttttttattcgataa

SEQ ID NO: 677934 - DNA, 895 bp, Homo sapiens
taaatactatctctgtggttagtcgtcctgcggaatcgttcacaaatacacgtactgatcttgatgtatttggaagcacgagataacgatatagcagatgtcaggcaatatttggtggaatgatgacgatgtggatggacggagtagaccacgctaacacgcaacagagcagagcaaccatggtgaccctaaaagacctgcgagaagagtggatactataacatgaagccgcacgatgtctttgcatcacgccattcatacccctgcgcaccagggctcacgtgattctcgagtagcgctaccaggccacgagagaaaagaggattcttctctagagacaagtgaccagctcctgaggaagtgatctctgcaggtccgtagtagaaaaagaagtgtacactcgtatgaaatatctcactcaatacacagtactgagcatagagctctcgtatcgatgacatgttggctatgagagagattttatatggcgatacttacagagcttacttgcagaaagtatgaacgtagtgatcacgactgaaggccatgcctccgtttgcgccaattgatctctgcacatccagcgaagtcttcttgcgggccgcatgaggccaaatctagtgcacaacatatcgagacgataccaaaagtctcccacggttgctaacatgagcaggtggtgcatgtcacttctgcaagcagtatcgaatgaattctagggttctgacggtacaggtaaggaccgaggcccagtgtgacttgatgacattagctgagccatgtcgaagacatagagagcagctgataagggttccacaaaagtgcgacgaatgagtagagcctgttgcgtgcggcaccgaagaagcaacgtggaaaggtgggtcaaagccttgtg

SEQ ID NO: 677935 - DNA, 102 bp, Homo sapiens
accttctttttttcctcatttccttcttttattcctccccacactcatggcccttaccacggtactcctacctatttccccttttaaattaaaaattttata

SEQ ID NO: 677936 - DNA, 113 bp, Homo sapiens
aggaggagaggatctcagtgtgatcaagggggctcctaggcctgagcggggctgggcagcctcagttctgggtgcgaaggacctgtcgtgggtggacaccaccttgcatcgtg

SEQ ID NO: 677937 - DNA, 647 bp, Homo sapiens
  misc_feature (37)..(37): n is a, c, g, or t
  misc_feature (51)..(51): n is a, c, g, or t
  misc_feature (53)..(53): n is a, c, g, or t
  misc_feature (81)..(81): n is a, c, g, or t
  misc_feature (88)..(89): n is a, c, g, or t
  misc_feature (248)..(248): n is a, c, g, or t
  misc_feature (351)..(351): n is a, c, g, or t
  misc_feature (492)..(492): n is a, c, g, or t
acgagacctatcgcccaacactgtttttgaggctctncgttaggatgcttnanctaccatttctttttgtgcaggtggganagggggnncataggttggctgttatattttagtacataaaggtttcagaatcatagagctgtcaaatgtggtattgactttatattcataaaggtactggtttcatctgtaagaggtatgatatgagggaaagttgtgctttttcattcttcttcaactatattctnttaaattgttttgaaaccacagtgaaattgaaggtggtgttctaggaattaagagatttgggaaagcttgttagtcaatcttgctagtgcttaaggaaagcanagtggaattgagtggaattcgaattttagtgtgagtagaaaagcggggatggggaaggagaagggagtttgagctcctggatataaatggtcacctgatcctaaaactttgaaagtaataggagaatgcctagtagttacngcaatagcaggaaagtcttgtgacaattgaattgcagcctcatagaaagaaagctcagtctcattttgccttgattcacattggagctacgtatatctcttgttctctcaggaatgtgggatgggtgagtaccatcatccttgctagcagacggg

SEQ ID NO: 677938 - DNA, 108 bp, Homo sapiens
atctagtgtgtgtcatgcaggagcaattctgttttcccatgagcagcagagtcgagtgttagagtgcaggatcagagcggggagaggctgggctgcagtttgggcggc

SEQ ID NO: 677939 - DNA, 392 bp, Homo sapiens
  misc_feature (392)..(392): n is a, c, g, or t
ggtaggtccataccgacagcacctgtgctgctcgactccccccactgtgtgggtgcataccgacagcacctgtgctgttcgactccccccactgtgtaggtgcatactgacagcacctgtgctgttcgactccccccactgggtaggtccataccgacaggacctgtgctgttcgactacccgccgggtaggttcataccgacaggacctgtgcccctcaccttcctgtcagacggtgcgtgtgccgcttggctccccaccaggtaggtgcataccgacaggacctgtggcgctcaccttcccaccgggtaggtgcataccgacaggacctgtgccgctcacctccctgtcgggtaggtgcataccgacgcgcgtgtgccgcttggctcgcn

SEQ ID NO: 677940 - DNA, 352 bp, Homo sapiens
gcggccggctactactactaaattcgcgggcgcgtcgtcgaaaaaaagaaaaatacaaaaaaaaattggctcacctagtctgtaatcctagtactttgggaggccaaggcaggtggatcacctgagatcaggagttcaagaccagcctgaccaacatggtgaaaccctgtctgtactaaaaatacaaaaaatgagccaggcgtggtggcgggtgcctagcgtaatcccagctcctcaggaggtgggggcaggagagccactcgaaccagggagacagaggatgcgctgagtcgagatcatgccattgcactccaccctgggcaacaacaatgaaactctgccccccgcccgc

SEQ ID NO: 677941 - DNA, 193 bp, Homo sapiens
ggggggggggcaggagcgagcagtggcgcgaggtgccgcgcacaccggcgcggttagctcccggcgggaaagtgggagagaatcaagtcggtgaacctcgcaccccttagccctgggagtgggtaaggagcggcgcgggcgctcccgcgcgccaaggatttagggtcttaaggtctcaaaccgccttagaagc

SEQ ID NO: 677942 - DNA, 332 bp, Homo sapiens
  misc_feature (193)..(193): n is a, c, g, or t
  misc_feature (255)..(255): n is a, c, g, or t
  misc_feature (301)..(301): n is a, c, g, or t
tagatttgtatttattcatcctatgtgggtattgaggagtatgctaagattttgcgtagctggtgtttggtttaatccacctcaaactgcttgttatgatggataagattgagagagtgaggagagggcttacgtttagtgagggagagatttggtatatgattgagatgggggctagttttttgtcatgtgnagaagaaagcaggccgggatgtctagagggggtgccttggggtaaccctctggggactcagnaagtgaagaggggggctattcctaagttttatttgctattagcctnattatgtattattaatgattgagtatttgat

SEQ ID NO: 677943 - DNA, 147 bp, Homo sapiens
acccctagaaggaaggagaaaaccacgtagcagcttattaactacacccgtgagaccacttgcgacgtgagagatttacaggaacccttccaggagcccactgacgttggagtgctaaaaatgccccttcagggggtaaactgcatt

SEQ ID NO: 677944 - DNA, 429 bp, Homo sapiens
accgtggcatcacactggggctgctggccgtaccagtgcgcggcctgcggcaatggccttcgggtggcgctccacgctgctgaaacatctgcagcagccacagcggggagagcgcctgtaccactgcccggtgtgtggcaaggccttcgggcagagctcgatcctggatacagcaccgtgcgcatgcacagtggtgtgcgcagacggacctagcaagtgcccagcatttgcgccaagggcttctgggacatgaggcatcagcgcgtgcgtccaggacacctgcagcggtgcattaatcgggctgaagcgtcccgtatcgctgtcagcatctgcgcggaaaggccttcagggcccatagccttcaatgtccgtccaaccgaaagcgaccgcagacgggggctgcccttgcagagggttgcaactaggccg

SEQ ID NO: 677945 - DNA, 313 bp, Homo sapiens
tcggtacccttctcatcagctcataaaattaccaatatattatcgaatatcatgcaaaatctaggtccacattcaagattttcgtcaactggctcaccaccgtgctggcgtcccagagcccaccccagtcttttacagatggtttatcaagaagagtccagtaaatatatttcacattgcagtttgagttattacagtaactttgaatcatagaagagttacccagttccactgtccttttttcttgcccaacacttgatattttgaagaaatgaggccagttatcttctataacgcttcacattccagatct

SEQ ID NO: 677946 - DNA, 371 bp, Homo sapiens
  misc_feature (64)..(65): n is a, c, g, or t
  misc_feature (110)..(110): n is a, c, g, or t
  misc_feature (112)..(112): n is a, c, g, or t
  misc_feature (328)..(328): n is a, c, g, or t
gcgctgtcgaattccttcgggttcggcggcacgaacgcccgctgatattcggcccgccgccggnncggcctgattcccggggcgtgccggatacgcccgtccggcacctntngatctcacagggcatccgtccagatagtcacttgcatattagaagtctcaatgttagccttcacgccatgagaacgaccagctttaaatcgatggagtgcccgaccgcgcgcgcactcgactgcatcggcgaattcgtgggacgctcctgatcctggcggggattgcgttaacagggggtgttacacgctttcggacgaatttccaggcgcagttncgggggatttgccaccaataaggttgaacggcgcagatttgaa

SEQ ID NO: 677947 - DNA, 118 bp, Homo sapiens
tagcgatctagaggatctccgaatccgctggacccagattgtagccagactcttcctccatgttccgacaggtagatgttctctgggttgtagagcttgcccgaaggatcaaccctca

SEQ ID NO: 677948 - DNA, 708 bp, Homo sapiens
  misc_feature (101)..(101): n is a, c, g, or t
gaattccgcacgggcaagcagttttgacacggaaaaggccctttatttttaatggcgggttttatacatgcctggatacccggccccaccctccgggtggnaaccgtcggacaaatagaccggaccccttccccccccttttcatggggcccttttacaggcctgccctttcaggacctaagaaagacccggtcccatcctcagacccttcgagacaaaggacaacccaccgcctcccgggtaaaccctggcctctaaattaacacccccgcacgcccgccgccgcgccagcgagcgggccaagccccccccctgaacattctgggtacccctacccggcctgcggtcgcccttacccttcccctctccaccacctcgccccgcccggacacgactttccctccctcaccgccgtcccctccattcccgacgcggggcgtcgctcttctacagccgcgccccacccccttccgcacctccacgccccaaccctcctctccccccccccactccccccccgtcccctgccctcgccctcacgcccccctccgcctcccacccctcccccggctgcaccctgttgctccgctcccccccctcccgcctcgccgcccctcctccccgccccccccccacctccacccgcacccccccgcccgcgcccctctctccatccccactccctctctcccctctcctgcccccctc

SEQ ID NO: 677949 - DNA, 877 bp, Homo sapiens
  misc_feature (777)..(777): n is a, c, g, or t
agcggatcctcccatctcagcctctcaagtagctgggactacaggcacacatcaccatgcccgggtaatttttttgttttttgttgcccaggctggtcttcaactcctcgcctaaagcaatcctcctgagttggcctcccaaagtgctgggattacaggcatgagccactgtgcccagcttcttttctattatttttgttaaagcaaaaaaaaaaaaaaaaaaaaaaaaaaaaaagggttccggtaacctttatttttaaggggctcttttgggccaacccacggttttaccttccggaaaaattttcattgggctaaccccctttaaaaacattccgatggcctattaatatgggagaggccgcgctatatccttgtgcgcctgtgttggcaaaaatcctaaggtggacctggcggggcatatgtggggcccacataatggcgtgtatcccctttgttgctcaccattcgtgggctgtggcgcctgtttgtgtgtgataagcgcccatatttttcgtgccacagtgtctgtgtttgtgtctgcgaaaagaggggagaatactccccaggcagaaagattctcgataaacaccttttccccccttgtggcccgtgggcgtacacaaatatttgcaactccccgcagcttttaaacgacgacctagattttttcggcgtggcataaacaaccaacgtctggtcgcttaaactcctttgaaacgagaggttataacctctttttaagacccccctgtaaatcgttgcgtccacaatacnctgtgggtcgaccctgaaattacacggttgatttatcacgcaaaccaatctttttcaacccactgcgtgtaaagcaccttcgctttttggatttgtttag

SEQ ID NO: 677950 - DNA, 354 bp, Homo sapiens
  misc_feature (27)..(27): n is a, c, g, or t
  misc_feature (50)..(50): n is a, c, g, or t
  misc_feature (117)..(117): n is a, c, g, or t
  misc_feature (275)..(275): n is a, c, g, or t
acttttcagtagatgttaccattaacntatttctaaaattagcaatatcnaaaagatcctttaacgaaaacagtgaattaacactcagacatgttaactcgcctagcgagtgacccnaaaggtaacattgttcattgtctttcttgtcgggggaatcgatcttagtcatattttttggtgcttgatcttgaggatcagaaggattcgagagtatctggtacaattgatagaaaaggttggagcagactgcaatgcttccggggctggaagggttnctggaagatgtactgcaatagatcatttgattccttgccgttctgactcagtattgtttggaattcctgcagcccgggg

SEQ ID NO: 677951 - DNA, 246 bp, Homo sapiens
cagccccacggcaggaccacggaagatcacagttcatcatgggttctggagacttgcggcctaagacaggatgtgcggtacgagatggggagagagcatcgggacagacgtctgtcttgtgaaaacagaaagccagtgctgacgaacgaagtcccctacgctcacctccctcagcttccatgcggctgattccaggtgaaggtgcgtcttgcgtggggcttgctcggtgagcctccctgcctcgac

SEQ ID NO: 677952 - DNA, 632 bp, Homo sapiens
gaaggcttggctcatataaacaagtgccattgagtttcaaatgaccagcaaatatatttagaacccttcctgtttaatgtctgtacctcgtccacccctcaggtaaatagctgcctctcacaggtacagctgtttcttggtaaattcctccgaacctaaagtagcagttttcctaaacttgattagcttgagctgacagacgtgttagaatacagttcgtctggccacgagctgatgagggctttcgtgtactgcacacagattgtgtacttgaccccagtccaggtgactggtacccactcgtagttgtgccagtgcacaatcctgtccagtatatgcatgtggtggccctactgactggtaatggttagaggcatttatggattgtttagcttgtaaggaaaaaccatgacttttaacaaattttgatgggttatatgcctaaatccttatgccacatagtggtacatcattatgagacaatgtgtctgttcataatgggtaggtgccttgggtgagcagggagcataattattggtatatatatggtaattatggtgattatgtaagatatcatgtcatgttaagaaggttgactaacagtttacgtgtgcttatctccaagatattat

SEQ ID NO: 677953 - DNA, 132 bp, Homo sapiens
  misc_feature (37)..(37): n is a, c, g, or t
  misc_feature (102)..(102): n is a, c, g, or t
attcttaggaagggtgacctgcgagggagtgtggganctgggacctcatcctggtccggcgttggaaaccaaggccttgtatgccagcccttatgaaagcantgtttcacagttactttcacttcccgaata

SEQ ID NO: 677954 - DNA, 714 bp, Homo sapiens
gtagtcccagctgctaaggaagctgatgtgagaggatgtgtcagctcaggaggcagaaggtacagtagagccgagatcatgccacgtgcactcgatgcctggacagcagagtgagacccgtgccttaaagaaacagatacaagaagggaagaccccatagttgattgaagatcgtcattaatagaacccttgtatatcagagatatccataggtgaacatcgagaaatacagggtcaacagttctagcgctacgttgtgcctaatttatttccacaagggtcccaaggttgttcaagaaacaattttaaactacagattaaacattaacaattgggtccatcagcagattaatctcataggagaagagcagactggcaacgaattgggaaaattggaaagtaactatgggggacaggggctttaggccatatggtgttgcatggtggtgcgatgatgtggtgtactggtgtggtgtagcatgggaggatattcggtgacataaccaagaaatttcctcttagaaagggcgattccagaagctctggactcaagacgttacatgtttaactctggcgatccgatgacgcttggcgcataagggagttacacatttgtcagttactctcaataaagggcggacaaccattaagggacaaagagcaacatgtctcgtcggccccttttgggcctcttccaagtggaacctaaagcag

SEQ ID NO: 677955 - DNA, 1206 bp, Homo sapiens
gcaggatctgaagttttggggtcgagcaggcatgcttggcatatggatgatttagcgtcattcatccgcaaggcatctgagtgtccatgaatgttaggaaggtcctgtgcgagagcaagggaaagaacatcaaagattatcagcaaaatcgagaatcatgaggcgtggttcggaggtttgatgaaatcctcggcaggccagtgatgtggtatcctggtggctcagtggtcgatctagagcattcgacgattcctgcaagtagaaggtcttccttgctcagaagatgatgattgtgcacggtgcgaaccgagctgggaaggcctgtcgatctagtaactagctcgatactgcctggtagagcatgcatcaagaagaccccgtaccactattccgtggcttgaaggcgagtgtatgctggcccaagtgcaggcctgcgatggagccgactgtatcattgctgtctggagaaacctggcaaaggggacttatcctctggaaggcttgtgtcgcttgtccgtccacctgaattgccacgtggaggcagaaggcttggcattctcacctcgactgtgcgaatgtattatggagggatacatcccagctctgtcgtggtcggcccccatttagcgcagctgaaactccgacatgaacgtccttcccgaccgataagggttgccaggagagaaggccttccctttgcaacagttgtcttgcaacgttggggtgcccaataatatacggtaccgtctacacaaatgttcctgggcaagcggtctgcatctagcctagggttgggtctacgaattaccggaaccaacgttggccgccaccaatcccatttgcttgtgagaccaccggataatccccccatgaacaaggctcggaccagggcaccaaccttggtacaccagttgaccattacttacgccttgtttgcctggtgggctcaggaacaccatggtcgcgaggtgcggccctggtggctgcaggggaccgttggaccctccctggggcttgaaacttttctgggcgtttgtaacttgctgggcactggggcccggaggcttgccttgcaatggaaagggggagacctcgttggtccacttgggggcttgccacggaatgttgtggcccctagcccttcccgggtttttacccttgggccacatggggttttgtgccctagtgccgggatgtgccccctag

SEQ ID NO: 677956 - DNA, 227 bp, Homo sapiens
gacccgtatattttcttcttccgggtctccagggcccgcttggacttctccagctcatggacgttcttgcccacgtcatccttggagctgagcaggtcttccatttcggctttgagcattttgttgaaccgctcgagctcctctttgacttccaaggcctcttcaagggcccgagccaggcacaggcactgtgattgcttctccctggcttctgcctcagctctgtc

SEQ ID NO: 677957 - DNA, 932 bp, Homo sapiens
  misc_feature (78)..(78): n is a, c, g, or t
gtccttccgcttgcgctgtgagctgaggcggtgtatgttgcggcaagtaacatgtcaaccccggcatgtccgcgccantcgatgacccgaccgacccggaatgtgccagcacgcatgcagtgtgacttttccatgcagtgtgattggtgagatactgggtcacggtgtgggcaggaagccttctgcgaggtatcatgatagttcacaagtaatcgataatatagtctgctccgcattgcgtcgcctgttacggcctggttctaccattgagaattattgaatccgtggcgtagtgaccttcagtggttgctgagtattagttgggggctttcaccaaggattcacagggaggatgacagtctgggattcaaatcatggcagcagaaagctatacaccagctttggattggagtcagagaagtagaagaatgggcattgccttctaacaggaaattatgtgaagcggagggttcagctcaggggaggagctgtatctttatatactggcccttatgcacacgagggagaaactggtgagggtgtccacgtgcagctcaggtagctgggcatatccgactatcggggcgttccatgttccaatcaatgggtccatatcggtggatgcataatagagattattcgtagttctccaagtggccaacgggaggattgggtgacgcctttcgggattaccaccttggataggttcgggtaccatcgtataacgggtgggaaaaaaacgttacaaaaaacgaatttgggatgaaaattcccaggccccagatggtggaacccttgttaacaaatccttattgcacaggtcaattgaattgccaaaagcttgcggtgttccaaaccaggcgacacttgcatggggactcggtcccacgagcgaatttcatggtggattacaactcgctaattcttccaaa

SEQ ID NO: 677958 - DNA, 443 bp, Homo sapiens
ctcaattgatccaataacttgagtatagtagttcgctacgcgagggtaacaggaaatgctatgctacagtccatatcaacaataggagtagactacaagtggatacaggaatcccaatggtgcagccgtactaggtcgcgctcacgatcgtcctaccgtgatctagatcagacggaggcacaaccaggatcggctccccgaatctacggtatcagcacgtcactcccatgtacgcacaggcccaagaagcacaataaggcctcacctctcacaaaagcgcctacccccgcacaaatgatatcatcatcacgcgtgaaggtcaagatagcgcacacacacaccaaggaacagggcttccaaacacacaaaaaaaacggggccgcgaggatcaaaatatatacaaagaaggggacacaaggaagacacgacgcacccaccaaccc

SEQ ID NO: 677959 - DNA, 166 bp, Homo sapiens
  misc_feature (64)..(64): n is a, c, g, or t
tctgatagtcttgaaaagccacgtctcttcttggccgggcagtttctcttccaggtcatcaatngtcttttccagtttgcaaccgttctctctgcaaattcagcacgggtctcagcctctttcagttgtcagacagaagtttaatttcttcttcacattggtcctc

SEQ ID NO: 677960 - DNA, 235 bp, Homo sapiens
tagagatccccgtagtagtgacgtgctgcgggacttgcgaaagtgctgaccatcgagacgagtatataagcagctggacaaataccttcaactgagaaatgtcattagcgactccaggaagctaagcactcggagttatatatgcaggtggatttggtctgtaacttcttcgtagacacagtggtcccagatacttcaggcatctttgtggccccatggatatggttatttcctg

SEQ ID NO: 677961 - DNA, 352 bp, Homo sapiens
ctcatgtggctgatactcaccaacttatgtagccaggcttactacctatattgacagactgttctctccatttcacagttgaagtacactttccattgaacattgaagtttggaactacttcttcaacgtttcagtatactcactgaaactcaaagagcctcagatcacatgtgaacagttttgaaacaaggctgtaccatggcattcatgcatagcatgggacagaagaaatagcacggcatgtaactgtgatgattacttccatttttgtccctcggagagaacagttcacggggcagaggtgatatgttctgcctttagaagattactggcacatagttcagcgtctga

SEQ ID NO: 677962 - DNA, 329 bp, Homo sapiens
tgatcccagagctaaaaaagcccaaggcagacccataagcttaggtcaggggttcaagaccagcctagacaacatggggaaactctgtctctactaaaaagataaaaattagccggacatgggggcaggtgcctgtagtcccagctacttgggaggctgaggcaggagaattgcttgaacccaggatgcgaaggtcgcaggggcagagattacaccactgcactccagcctgggtgacagagcaagactcgccttaaaaaaaaaaggtcaaaaagaacaaaatttttttttaatcaagaatttaaaaattaagaaaatgaattcagcag

SEQ ID NO: 677963 - DNA, 643 bp, Homo sapiens
cccctggtggcctggcgtcggcggggtcagccggtgccatgctagtggtgccccagatactcgggtctggccgcgcagaggtaagctgcgggctcgagggaactcgtacctccgtggcgtacttcagccttggcaccgaggggtggctcactctgctgctcagtggttgcagatgtgaggcggtcgtgggtacctgattcagactcggtaagcggtagtcctacaccaagtcaaggctgatcttgcgaggcacgacgcgcattcgcataggtgggtctcccacggaggctcattcgacggcacacttagctggcctgaggaccgagagagtgacccacccgcgaagtcacccctcttcgttggcgtcgcttttccatccattcgaaacaagaggagggcctcttatggcttgaacacgtataagttcagtacgtagcacaccttgctttccttcacgtagcacttagcggatggacatcgtggttccgtcccgaaggagctgcaggggcctcaaggcccttgattggtaagtccgcgcaaagcgccacagctagagttaaagagcaagctcgttggagccagccagtttgacgattctcgcccgcgggtgaggccttggccgggcggagccctagccagtgtg

SEQ ID NO: 677964 - DNA, 981 bp, Homo sapiens
cgtgtcccgtattcctaacacttcttggagcggttccagtctctgtaccttgtgctacatcgtccattcgtcagatatgacatggggtttcgccagttgatcgactttcttgtgagattacagtcaaatctttgtctaaagggactagtcgccgacgcgatatttgaagcttcgtgtgtgttctatggagtcttagtatctctatgtatgctctgcttggagtgtgttattctctgtagttgctacttagtctagtgcgactgttgtagggctgggtagggatatcgttgttggacggtgggaatgttgtcaggtatcatccgagttgttgtaggttttcaaaaggttattaggtgtaggactagacgatgtgacagtttggaattatgcatgctatagtatcagatgtgcattgcactataatagataaggatagggctctgtggaacatgtctgcttgcgtatgtgaataatggagagtgctcttatctggtcaaggtttgtctggaagatagagggatctgttgagttcgggttgtgttattgaacgtagaagtcatattgttaatctagcgatcagataagaagcagagaataattattttatgttataactacaccgatgtattaaaagacccattatgcaaaagattcaaggtacatcatgcagttcgacaagctattgaacaaaatctggattccattatatagctctttccttgaggagattccagattatcaacctgaattccatgcactcagtgtgcgaagaggaatgtgttaaatctcactgcatcattgaactggccagttcagaaagaatcggataggatgcctcttcgtcataaagttgtcaagtagcacttcgatccataaactgctgtacattaaatttatttaaatacttcaattagcaaaggagtaactatctcaatgtaaaaagttctatggcaaaaacaacgtgttgccataaagacgtta

SEQ ID NO: 677965 - DNA, 882 bp, Homo sapiens
tatcatccaattatttggattggagaagagggggcattcaacgtcctctttttcttatgttttattggaaatagagtctcaacttactctagcctgggtgacagagcgagaccttgtctcagaacaacaacaaggtgctggaattgcagacttgagccacagtgcccagccgtcacttctctagactatgatggtgttgtgtcatggcattctataagtctcttttccaatattgggttcaacgattttgtgaacactattaatttcatcattcagtatatgtgggctttctaaaatatgccaatgtgggttccacttaatcaagtttgacttaatttaacacagtgattatatttcaatagttacatttctgtatcttccactcactagccagcttacagtttattagccctgggatttcagctgactatatgattcatgtctgcagcccttcatgatgagttctttctttacgtatacatactgttgttcaatgatgcaagaacaggcaaaaaactactctatggtgatagggaatcagaagtagtaatgggctgaggaaagggtatgagagaacttgagagaacttcctcggggtgatggaaagttcttatattggaatggggtaataagtgacctagttatatgggtctattcagttggaattcctcacactgagcaatttacttggggtattacatttgtggatagtgccaagtaaggtcgggcacaaagaaattctgctgaaaaaaagactcttttattaagccatctgttttataaggcgtgagggcagggaacatatgaaaacggggggggaaagcacatacggggtggcccaaaagaaaaattgggggcggaaaaggggcggggaaaaaaaaa

SEQ ID NO: 677966 - DNA, 112 bp, Homo sapiens
tccaaatggtttatactttgacaagagacctattcattcacatcttcaaagcccatgttcttgtttctctgtgagatatgttgatgaaatcacaaatgtaaacaacttggta

SEQ ID NO: 677967 - DNA, 769 bp, Homo sapiens
gaagatacaacattaaactatggaaaagtttcacagactgtatgtaactgtttaccgatagcagccatcgtggaagtgagaagatattctgctgttcatggacggttatatcaccagatcttcagatctatgtgagcagttattcggcgagattatgcgaaccaacatgatgtaccagaatcaatggtcttctttgtgatcttttgtggtctgaccccgcataaagatgtcttaggctggtggtgaaaatgacagtaggagtgtccttcactatttggatgcagaagtggttgcaaaatttctccataagcatgattcggatcttatatggtagagcccatcaggtggttgaagatggactccatgaatcttttgccaagaggctaggttgtgctcactgctgtcttgtctcgcgccctaacttattagcggagagagtttgacaatgcaggtgccatgatgaggtgtggattgaaacactactgtgttctttgtcagatttctacaacgcctgcagtagaaataaggaagccaacaatgccacgaggacctgtaaggccgtccaaggcggtatgatcacaaaggcaaagtagaagaaatagatcgtccgtttttgacactgcctaatcgggacttgtaaacatacgagtatataaccttcatttttaagactgtaaatgtgtacttggtcagcttgctcaaattagatctggtacgtgaggggcccttccctccatttttgattgagtgactggcttctgcggtccaa

SEQ ID NO: 677968 - DNA, 453 bp, Homo sapiens
ctttgagacagagccttgctctgtctcccagactggagtgcagtggtgtgatcatggctcactgcagccttggcctcacaggcccaagagatcctcctacctcagcctcccaagtagctgggactacaggcacctgccaccatgcccagctaattttttttattttttgtaaagacagagtctcactgtgttgcccaggctggcctcaaactcctggactcaagtgagcctcctgactcagcctagggtgttgggattacaggcatgagccactgtgcctggcctgatttttcttctttaaaagaaatatttgatatttcttggtttttctacaatttcccaactcaaaaagttgaaatattaatatgccccatttctaaaggaccatgaccgggaccctttgggaccacggccaggttgctttgagggcgcagttttaagggcaccctccat

SEQ ID NO: 677969 - DNA, 108 bp, Homo sapiens
gactctagaggtcccctcccaagatgagaaactgtcagcaatgtttaatatctatgtacaaatcttattaaattgccttcaaaaaaaataaaaataatgaaacaattc

SEQ ID NO: 677970 - DNA, 111 bp, Homo sapiens
agatcagctcggtaccaatatctacaatcaaccaacaagtcattattaccctcacgtcacccaacacaggcatcttcataaggaaaggttaaaaaaagtaaaaggaactcg

SEQ ID NO: 677971 - DNA, 186 bp, Homo sapiens
agataaaggaagccgcaagctgttgtcttgcgggggcagtgtgggtgcttcgcttaagtttcaggggagggacggtaggtctccagcaagagaaagacttggggcttcagttgactcaacacggtaattctgaccctccccggacacggacaggattgacagatagatagctctttctcgatgcag

SEQ ID NO: 677972 - DNA, 137 bp, Homo sapiens
tttttttttaaaccccccccccccccggggccccgggggggggggtgtcccccctttctttttgggcccgcccaaaggggggggtttttttgggggggggggtttttttcctttaaaaaaccccgggccctgtttga

SEQ ID NO: 677973 - DNA, 1097 bp, Homo sapiens
tcccggacttcagtgagcgacccgcactaggctggaggacgtccagcgctacctggtccagtgcttcgacaggaagagacgtaaccgcagcaagccactcttccacctacttcaccatcgcgccagtctgagcaccgtacaacgttccgcttcgtgttccatggcgtgtgaaagacaccatctctgcagagagcaaccttgaatggactactcatgctgactgtgagacgaggatagccccgtgggatttggtctgtcggattgatgcagcacccctacggcgtgtccggtcagaacgtctatgggtgtcgtgttgtcgtgtggtggtcacttgtacgtgggttatctgcgggtagtccagtgctcctgggaataccggggcatcaggcaatgcatgtcagatccacgtcgcatggcacacgcgatgcttctaggtcacaacggatcactggataactcgtcacggttaggcttacttgagatcctaggggcgcgagtgaaaatctactggaaagatctcgaagtgatgcatgtatgtggatagtacggtagagcacctgaatcatcactagtctatgcgtgtatgctatttagccagatacacgttgcgctcgtttctcgtgacagcagattcgagggacccgatgtggtagtagatgctagtgtcgttgtacgacagcgctacgtgtgcgtttagatgagcgagtaaacgacaaaagagcgagctaggccgttgcaagactggcttctactagactcatcagagctcttcccatgaggactgacgtagcctgcagacgctttggcctaagcagatagcttggtagcagatccagttggacgccggatgcttgctaagtcagtggctgagcccggtcctgcagcccagccgcaggaggctgggaaggtccaacttcccgaaagggtagcacggttgccctttacacacacttccccgtgggccgattgtactctaagaagggccttattcaagagctcatcacgatgagagcctgaggggcccgggctcaagaaacctacccatctgagagaccggttgcaaagctcgcagcggtgggtacaccctaagcccttaa

SEQ ID NO: 677974 - DNA, 438 bp, Homo sapiens
acgatagccgacagctgaggtgtctgcaggctgtgttctcagtggctcccaccagatacccgatggtcctgtcgattggctgaatcatcaacttccttttctctgcctctggcccgaatcgatgtcccacgttatctggctctctgtagcacaggagtcacaaaatcaaagtcttccttggtgaaccagttcatgacggtatcgatgttctccttccgctctgtctcgttgctgcttgggtgagtgtaggaatccaccagggaccacttgacagcctcaccctcatatttagcacctcccctggaatagtggaatgatgccgctctgttcccctgtaagtacaagaagaaaattccatcagggccatttgtcatacctttctcacaatcagcaaagctcgagttgtctacatctgtgcccctgtcgggctagtcgggg

SEQ ID NO: 677975 - DNA, 1657 bp, Homo sapiens
tacctctgcagtacctcaccagggcagcattccagctatcatgcagggatccctgtgagtctagccaggagcagccattaaccctagctgacttaactactgggagacattaccactactggacggcatggcatgctctcacgtttgtcacaccaccatcagattacaccattcgcccttcttctacggacttgcactttcccaagctgctacttgcaactaacacgcttgactacgtcactttcacggtaccaaacccctctctcgcagctctcaacctgcactcacaaccacaaggcacaacagctgctctacatagcaagcacacacaccttacgggcacaacagcgccgcacacaacacggacacacacacactgggctaagctacacctcgtgacccacgcacacaaacacacacttcaacgtcctactactacctgctacctccgacctctgcgcccaaacccgaaacaccttcgctcacttccgttaaaaaggcttacggcaaaaaccgtcggtaccaaccttctcgaggcccttcacggggcaacacaccacccacacggcaaaacagcaaaatccgtggacacaactgctctcggtcaacacgttccccaactccttgctactgcgccgttcaacaaggaccctaggcgctccccgctgcttctctcggaacggagggaccattcttaacggcgtccaacgggcgtagtccagtttctgcggggaaaaacaacaattgggcgtctccacaacgaggaaacttactatactgcccccctatctgtgccatgtaattgtgaaaggaccgttatgccatctccaacgtagtgtctaacactcgggcgtgacattggctcttaacgccccgcatgtttacgaaggacgtacaagccgtgttccgttcacccgccccaggactttgtctataagagcgtctccatatcccataacgagagaaacccctggccacacacgcgggcaacatatgcccttgtctcgacctaaaccaacttcttagtcatacccaaccggcgatgactggaactcgggccccaactcaaattcgaggggccattcacgggcccctaactcactaccctgtctaaaaacagctctcacccacgtgggcgctcccacacacaacctccagcccgcgggcacacatccggcgcacactaagcaacctgcaccccaccccgtggggcaccgccactcacatccacatccaccacacgaaccccacgacagacgagccacgggcccagacagacgacaaacacgacagaacaagagaccacatccaacacacacgcacaacgaaccacaacaccacacgcgtccgcacgcacaaaccagtcatccgcacacaccccccgaacagaacacccccatccaatacacacacccacggcgaatggcggacacccggagccaccaaacaccgaaacagacaccgcaggccccaaacaccgcgcgcccaccacaagaagcacagccagcaccaccccaccagacgagcgcggcatgacacaacaagaatacagacccccgccgcgccaccgcgacgcctcgagaccaaccccaccagcgaccacgcccgccacacgcgccaccaacagggacccagcgcagcaatacaccaccgccgg

SEQ ID NO: 677976 - DNA, 665 bp, Homo sapiens
  misc_feature (503)..(503): n is a, c, g, or t
  misc_feature (511)..(511): n is a, c, g, or t
ggtcgtcggttggcgctgcaacgggttctaggctgcaggcagctcgaggaccctgcggcccgccccggctcggcctgtgcaggatagcagaggcagtaggccgtgccggtgggggcatgttgtctgtacaccagtggcccaggggatgttacggtggcacagggtcacctggagtggcgggcccccgccatgggtgtaaccatgctgcagtgagtttgtcgggtcatcgagtgtatactccttcggcggagttgacttgctctggctgaatgcactgatgagaactagcgtagctgctcgaggagtagaagtgtgacgacattttctacaatgtctacgttggtcgctttgacgttgtgacaataggcgtgtctcgcccggtgatgaagttctggctatcgcagatgggcatgaggctcctgtgcgtacccgtacagtgcgcctaatggacatctcatgctcgatctctccactcggaactgaagctagcgagttgcactcgntatatggnggctgcggcgggatagtgacgagcctgaacggtgggcgcttgcagattgtgcatcttatgcgcttttttggactgtcggagtactgctacacatggtggttctagtacctccggaggtgtccaggggcacgagtgtccttggggggcccgggga

SEQ ID NO: 677977 - DNA, 321 bp, Homo sapiens
ctttagggcgctacggggatgccaaattccaggggccagaaagagcttgggataaaaagagacttcaaggggacggctttgaccggggctgagtctgcctgtgccatccaactggagtctcaagtcctgaggcaggacgtccagatgccccagtgcagggtcctcctgatcaacacctgctcccctgtactcattagcaacctcacccaccctactctcaaagcacacttggctctcgtgtggaggagctctgcatctgtagattcagcaacagcagatggaaaatattcagaaaataaatggctggcctcgttggcctca

SEQ ID NO: 677978 - DNA, 223 bp, Homo sapiens
cgctcaccacactcttgctgtgagtcagaactctagcttgctctcccatgacacagtcgacgtcccgtggtactacttcaaagctcgtacaagagttgcatttgtcagcgactggctgagcaggtttcggggctgtagggcctggagttgtcgtccccaggctgagggtcatggtagagtgtcttcgaaggagaaacagggtcctggtatcctaagggtgcta

SEQ ID NO: 677979 - DNA, 1209 bp, Homo sapiens
gctactgactcccacacccccaatggtggcggccttgggggcatctgcattggagtatgggggtgccagatgctgtggactgtcactggcatgggactcccctgggacgcatgaacgtgccccaaggtgacttggcgatgaagctgaccgggctctctcatccggataggtcctcaccccaaagactgtgactcctgaacggatggcaggcactcctcacggtgaccggtggcacaggtgcaatcgtggaataccactggtgcctggctgtagcctccatctcctgcacttggcatggcagaccaatctgcaacatgggtgcagaacttggaggccaacactatccgtgatatacccttacaacccacaggatgaagcagtacctgagcaagaccggaccgggaaggtctacctggtagctgcaccaattcaagactactgcagctcctggggcgcacaagacagcatgcggccacagcacggcacaggaccaatggcctcaaagtgcacagatcacacacgaccaacactcaagtccaggcaccgacgcagatccgagcacaccaacgaaacgggaccggatactgcccccacgcatcataggagagagcacaagcggcatggccactaaggcccctggagcacagtgacaaggtggcaacactgaccataggacccagtggccaacacgcgacaggcaccatcaacgacaccggcggcaccagacaccacaacccgaccaccagccacaacaaacagagacaacgtcacacgaggtccaaaaacgaaacgcaagaaccccgacgacaccaccgacctaggacaacagataccaagaaacaaggacaaaagccacggcaccccgggggcaaacaaacaggtacaacccagagaaaccacaccacgtacagggcgcccgacggcacaacccaacagccagaggaaccggaacaacacaacactccaccgggaatacaaccaagaaagacacaacaccaaaccacacgagcaaaaggcacaagagcagacagcaaagcgaacacaaccggaccgcagccaacgccaaagacaaaaagcgacgaaggcaagagggacgggacacgcagaagcaaacagcggaagtcaagagaacggacaaaacaaagagcaacacagcaacaaagaaaaaaggaagaaacgggaagagaagacacgactcagccacgacac

SEQ ID NO: 677980 - DNA, 101 bp, Homo sapiens
tgagctcgtaccttcctctcctcccacctcatttctccactctgatttgtgatttatctaagttatttgtcccagctacttgggaggtgggaggagaggaa

SEQ ID NO: 677981 - DNA, 140 bp, Homo sapiens
gtcagtcggtaccaatacgcactgattttccaggaagaggcagtgtgaagtcataggaaggggcagtgtgaagtctcaggtagaggctgtgatcaggcttcggaaaggaggaagttaggaaagtggagtgggtatggggt

SEQ ID NO: 677982 - DNA, 286 bp, Homo sapiens
cttagaagaggcagtcctgaggctagcaccctttcaacaactcctgttgactccaacagtcctgtggtcacttctactgaaatcagttcatctgctacatccgctgaaggtaccagcatgcctacctcaacttatagtgaaggaagcactccattaagaagtatgcctgtcagcaccaagccgttggccagttctgaggctagcactctttcaacaactcctgttgacaccagcatacctgtcaccacttctactgaaaccagttcatctcctacaactgcaaaag

SEQ ID NO: 677983 - DNA, 184 bp, Homo sapiens
ccggccccttagtcttccttaacttcagaaacaaccaccttttctaaagagatggggctccctctcctcagtgtatccgctaaaccgataccttaggcaataactgcagctgtgttcttcccaatgaagcttttatttcacatttcatatcatttccatttattttttgactagatataaacat

SEQ ID NO: 677984 - DNA, 182 bp, Homo sapiens
ccgagttgactacgcggcttgatatgactacgcggctcatcgttcataatcatccctttgagcgtaatcagagagtgtcatgagggatgatacttctcgatagatgtcatcgtaagcttctcccccaacagggcctctcagctgacggtgagaagcctataggtagccgcgtagtcagatcg

SEQ ID NO: 677985 - DNA, 246 bp, Homo sapiens
  misc_feature (123)..(123): n is a, c, g, or t
  misc_feature (131)..(131): n is a, c, g, or t
tactagtagtacgagcggtgggctttgcgtcgcccagccgagccacatcgctcagacaccatggggaaggtgaaggtcggagtcaacggatttggtcggtattgggcgcctggtcaccagggnctgggctnttctaaggcgtcctggggtaacacgggtgggacttacttgcgtctacgcccaatccaaactgggaaaccccccctttccacttgtgacgccctccaaaccttacccgttgggtac

SEQ ID NO: 677986 - DNA, 385 bp, Homo sapiens
  misc_feature (1)..(1): n is a, c, g, or t
  misc_feature (76)..(76): n is a, c, g, or t
  misc_feature (113)..(113): n is a, c, g, or t
  misc_feature (115)..(115): n is a, c, g, or t
  misc_feature (117)..(117): n is a, c, g, or t
  misc_feature (140)..(140): n is a, c, g, or t
nagactcctcttgctcgtcatgtctggccgcggaaaggcgggaagggtcttggcaaaggcggcgctaacacgcgtnaaagtactgcgcgacaatatccagggcatcaccaagncngncatcccgcactttgctcgccgcngcgctggaaagcgattctccggcctcatctacgaggagactcgcggggtgctgaaggtgttcctggagaacgtgatccgggacgccgtgacctatacagagcacgccaagcgcaagacggtcaccgccatggatgtggtctacgcgctcaagccaggggccgcaccctcttacggttttcggtggttgagcgtccttttcttaccaattaaaaggccctttttcagggcaaccccttaaaaaaaa

SEQ ID NO: 677987 - DNA, 306 bp, Homo sapiens
cacaacaactccattctttaaaaaaaagaaaagaaaacagtcgttaaaggtcaggggcacatccctcccactagcatcggttcctaccccacaaagggaaatagagatatccagttaggaacaatttgatgaaaggaatcaggagaccagagctggaataaccatctgcataactacaatctggtatcagagtggagacagaagtaaggatagtgtagagggcacaatagcaagatgagtcttaccatgagacaatgtggggataatactacccaccagatatagatagatcaatgtgccaaagtt

SEQ ID NO: 677988 - DNA, 398 bp, Homo sapiens
caatacagtagaccagtataaagagaatcagaaacactattagggtacatgctagctaaaagcccgtcagactcgtcatccttagtatttgtcaacctggtatccagtaagtaccaagtcctcattttagtccggaaagacttttgaatactatacaagtgcatatatttattatcacctagctcgtaccttaatgtaagtaataagattccaacaataactagcataatatactgcaacagtttaccaattaaaccgtaaaagtctcatttgttatttactaacaagactgtggttaaacacttatcaacaaatctcctggattactggagtgccgaggttaggcctcaaataagcctccaggtatcattttggctgatatgccattcttgcagaga

SEQ ID NO: 677989 - DNA, 131 bp, Homo sapiens
gggtgacttagaggatcccgtgtaaatcgggcttttgccggtccccgaaatgggcaactgtacacattttgtcacacgtcacacggacggaggagaagtcgtcacacgtgccgtcgagccaccggggaaag

SEQ ID NO: 677990 - DNA, 360 bp, Homo sapiens
  misc_feature (17)..(17): n is a, c, g, or t
  misc_feature (22)..(22): n is a, c, g, or t
  misc_feature (34)..(34): n is a, c, g, or t
  misc_feature (53)..(53): n is a, c, g, or t
  misc_feature (67)..(67): n is a, c, g, or t
  misc_feature (80)..(80): n is a, c, g, or t
  misc_feature (97)..(97): n is a, c, g, or t
  misc_feature (103)..(103): n is a, c, g, or t
  misc_feature (150)..(150): n is a, c, g, or t
  misc_feature (161)..(162): n is a, c, g, or t
  misc_feature (171)..(171): n is a, c, g, or t
  misc_feature (206)..(206): n is a, c, g, or t
  misc_feature (222)..(222): n is a, c, g, or t
  misc_feature (226)..(226): n is a, c, g, or t
  misc_feature (239)..(239): n is a, c, g, or t
  misc_feature (270)..(270): n is a, c, g, or t
  misc_feature (284)..(284): n is a, c, g, or t
  misc_feature (287)..(287): n is a, c, g, or t
  misc_feature (310)..(310): n is a, c, g, or t
  misc_feature (335)..(335): n is a, c, g, or t
cgaaactcccgttagancgagnattctactacgnagagtgaaaggaaaacccnaacagatctgtccnagtgattttaccnttgttctagaaggcgcncgttcngggttgtggtattcttaggttagcggagctttttcctcttttccccncccatctcccnnatattgccngttattaattaaccgctttctttggttggaacccnggcagttctgctcccntccnaggatctgcccgngcattgtagctgcttacggagcacttctccnttttccgaaggtcnacnttctagggtgtgggctgagttcntctgtaaagagatgaacgcaatgcngataaaattgaacgagaacgatgat

SEQ ID NO: 677991 - DNA, 118 bp, Homo sapiens
tcaccgcaacctctgcctccctggttcaagtgattctcctgcctcagccttccaagtagctgggatcacaggggcacagagcgagactccagcctggacaatagagggagactgtctc

SEQ ID NO: 677992 - DNA, 783 bp, Homo sapiens
cgtggtggtgtcagttgtggccggttgctggctcagtaacagccaagatgctgcggaatctgctggctcttcgtcaggatgtgggcagaggacgataagcacttgcttcccgcaggccattttaaaaataacgtcccggagaagcaacaaactgtcccagcgaggctgatgcacatcccactgtatctaaaggcgtgggtagctgatgcccctcccttgtataagagccaccatgattcttacagttgcgtgaacagcattatgccatatatgacgctgctgtcgcttcatttccccaagaagccaggatgtgacctttcaagtccatccccagcaatcgcttgtgtccagttcccatcagctctctatggaccagtaatctgataaatacccgagactctttctcgggcgaactcctattctatgcgccttgtaacgtaacctgccaccaataaagccagttctttacccacaaacaacaaacacacacacacaaacaacacattgttttagccgccacctgcacccacccgaaaaaagttcctctctaacaccaccactcgcttggggcagccgagcccaaagtgtcacgccccacacgtgcacacgcgggcgcccagagcgacctgcccaacaacagcgcgggagcccccacaacacaaccccccgggacccgagcgttctgaccacccccagagcccctcgcgcacacgggctcaccacgcccggcgcgataatgccccgaccgctcggccccagcaccaccaccacacacaccccccc

SEQ ID NO: 677993 - DNA, 134 bp, Homo sapiens
cccaggacagggttgacgtaggatagagttgattgagcgactgttgagaatctctgaacagaatacaattcgtcgtctcagcagagcagtgaaatttatctggatataatactgctatgccagatcagaggaat

SEQ ID NO: 677994 - DNA, 816 bp, Homo sapiens
gagcggagttccctggagccgccgtttgcccgtcggtcgcttagctcggctcggtgcgcgtctgtcccgctccagtggcgcgcttcgtgcggctgctggcatctcgccctgtgctctgggcctgtggccccgccgcgagcctgtgcgggtcccgccaagtcgcgcctattcagctggtgctgcaagcaagcagacaggctccggggccgctagctacggccccaacgtgtgtgctgtgcagtaaggttattggcactaataggaagtacgttcatccaatctgcaagcagtggtaccgaaaggacaaagtctgtggcaagatcaagcagtcagtcaggctagcgagtgctgtcctggatatgacagaggtccctggggagagagggctgtacagcaggcctaacactctcgaagctttactgagagcctgcggagtcgttaggatccgaccgacacagctcagtctgtacatcggagcgacgacggagaagctgagggctgagatggacggtggcggcagcgacagccatcttgcgcccctagcaacgaggcctgggcctccttgccagctgtgagatgacctccgtgtgaccggagggactcttatggggaactggcttagtaccgcgaggggtgggcatgatgaatgggaagtcgtgcaatcatttgcctacagagttgcaggaagctcttcatccttaggccacttagaaaaaggctgtggaactcgagctataaatatgtcttaccaggtggcgtctaatagcccagaaaagtagtgggggagaaagacttgggtggactgaggaaggatcg

SEQ ID NO: 677995 - DNA, 1432 bp, Homo sapiens
gggcgtgagcagctgcagcggccagaggcagcatccagacggctggcgccagcaagattccagatccagttgctttacttatattagctatcaccagacatagtcatcatgccgaagtagaaacgtctccagagaatacagagggcaaagatggatccaaagtacctaaacaggagcccacaagacggtctgccagattgtcagcgaaacctgctccacgcaaaacctgaacccaacaccaagaacaacatctgctaatgcaaagcaacctggcagcaaaagcattagccagcaggtgctaacgggcaagaaggcaggcaccaagcaggaagctggcaaaggacaggtactggaaccatctcgaacatggcagacaactacaaggctgacagaggtacattcacagtaacaataccatcccaactgacttgcaatcagctagtcttacaaacgacacatcttctcaatcccttcagagcgaggaagataagcaacgtacctaaacatagctcacataaaaaataggccttcggtcacatagagatatgcagaatccaaacaatctactacagctcaaacttgtaaactggtcatcaaagcttcccaagaaggcaaacccaaacccagggaaaccagtgtccagtacaaagtgggagcacgaattcgaaaaaccacgagagacgacgtcaaaaacagagttaccagaatccgacgaaacttagttcgcacgtgatatctgaaagctgcacccacaaactacataaattcagtaccacaagttcgacatgaataaataaagaagacagcagcgctgtctacaacacacatcgggcacaacactatgccacagataacaggacatacctggaacgatactggagcgtcagagcacaatagaaaatagataacagcacagaatcaaagtgattaccaccaagcacgtgggtgtcgcgaagagacacacataataccgccctgcgccgcagtaggaaactcacacacaccctacccgacaagcgacgacaccaacagccatagatgcgaagcgaccaaccgctacacaaagcataacgagcgacaacacacactagtaatcacaaaacgtggtgataacataaacagacaggccagataaatcaaagctaccactgaaacagcagcggaaagacaagaaggaatatacgacgcacacatacaacgcgacgcagcagaaacaaatgacatcagaccccggagagccacaggatgtatcgcaacaattaggcggaagagcgagcagcggagcagagaaactaccaaacctgcgagcaagtaggtaagagaaccgatacaggccgacaacagaagtgcgaaaaaacgacagctgcaaccaacatcgagagcgagagagccgacagggcaggagcagtccacacacgccccgtacaccggc

SEQ ID NO: 677996 - DNA, 433 bp, Homo sapiens
  misc_feature (346)..(346): n is a, c, g, or t
ggaattaatgtgttttccaaatcatgttgtggccattgctgtggactggcagtatctattcaccatacataatgactggaaggcggctgtggacaccctgttcctcttggcagcacaggaatggaagtgggtcccagtcctgatgattaacactgaaaagggagactgctggtagcttctggaaaaaatttcctcaagcctaagaaagaagcagagcaagagatgctccttttgcttctggacatcgccttgtctgaaaaagaagcttgcagctggggagctctgattgccagctgagggtgaagctgcactgcgatgcagtcagccgcctccgcattgttgtttngttgaatgcagaatttcctttcccacccagccttctaaggtggacgtttggtgaatgcgagccccagaacattgcaaaccgacgcat

SEQ ID NO: 677997 - DNA, 427 bp, Homo sapiens
  misc_feature (17)..(17): n is a, c, g, or t
cagggtcctttcagcanaatcttgctagtgtatgcaatggtgtcagcgtttggaggctaattataggatggatttctggatatggcagtctctagatggtccatccttttgtctcagctccaaactttgtctctgtaactccttccatgggtgattgtttccaattctaagaagggggcaaagtgtcaacactttggtctttgttcttcttcagtttcatgtgttttgcaaattgtatcttatatatcgggtatactaagttcctgggctaatatccacttatcagtgagtgcattccatgtgtattcttttgtgattgggttatcttattgaggatgatttatcacttaccaaaattaaatcaagatcagataagcagtctaaactgacctattatccctagtggaatagaagcagtggtcgacgc

SEQ ID NO: 677998 - DNA, 203 bp, Homo sapiens
cacgtataaattctaggagccaattgatatcatagctcagaccatacctatgtatccaacctggttcttttatttccgtgagtagtacgttacaactatagggagattattccgtaaggcctggtaggatacacgaatataaaacttcagggttgacctgaataatcagtaatacggtgttggtataagtaatgtgggtctcc

SEQ ID NO: 677999 - DNA, 211 bp, Homo sapiens
gtgctctatttttttgttgttgttgtgactgacagagtgagattccgtctcccaggctggggtgcggtggcgccttctcggctcactgcaacctgcggcctcctagattcaggcgattctcctgcttcagccttccgagtggctgggatgacaggcactcaccaatatgcctgggtaatttttgtatttttaagtacatacaggatttcac

SEQ ID NO: 678000 - DNA, 189 bp, Homo sapiens
  misc_feature (8)..(8): n is a, c, g, or t
  misc_feature (17)..(17): n is a, c, g, or t
  misc_feature (45)..(45): n is a, c, g, or t
  misc_feature (53)..(53): n is a, c, g, or t
ttgagatnagcctgggnaacatagtaagaccctgtctgatccagnaccagccncccgcccccagcccccccaaaattagccaggtgtgtggtgcccacctgtagtcccagctactcgtgaggctgaggcaggtgggtcccctgagcccaggaagttaaggctgcagtgagttgtgatcatgcttgggtg

SEQ ID NO: 678001 - DNA, 1022 bp, Homo sapiens
  misc_feature (342)..(342): n is a, c, g, or t
tgggggggaaaacccctttttttgggttgggggggggggggggggggggggggggggggggtctttccccacaaaaaaaaggtgcgcccccgcgcggggttgtcgtccctgctatcccaagagagaggagggggttttcatcaagcagccgcgggcgacacacgagtgggtccccatcagacagggtgggcgccccgcgggcacgaccgcgcagcaccgcggtgctggtgataacgaagaggtaaccgcccgcgcgcgcgaggaaagtaacacggaagaacacgaaggaggggcgcactgtgagaagagaggtcacacgacagacagagccgcacactgagngcggctcctctgagacgaacaaagtgagagggtggtggattgtgagtgcagcgaggagtggcgacacagacagtcataggcccgcacatacgtgcgccagccaatgagaaaacaggcgtcaccatgatccggtgaacagccactcaccgcaagcatcacgtgcgccgcactatcttatcagcaccgacggcacgcaacaccaaagccggtgccaccgccaagccgcgcggggagcacgggagagagagagagggcggaaagtgagtgagacacacacacaagaaaatcacgcccgcctgaaagacagcacctacttggaagtgaccccagaacagcagaagagggatgagtagatgagaacgagggtcccccgcgtggtaagatacaacatgggtgagacctcaccaagaccccaaacactgggagaaaataaaggcgcccgatgttgctacacacatagtagccagacagatgaaagaatcacgaccaaacaaacaaatagaagaggggggtgtcccccagacagataaaaaacgacagcggtgtgggcgcacccaccacaaccgagcacaggagtcaaacaaagcacaacgagaggactcctcgcgaagaagaagaagtcgtgccacttcacaaccgggggtgtaatcgctctcccggagtaaaccacccaggtacat

SEQ ID NO: 678002 - DNA, 996 bp, Homo sapiens
ctgttgttttgtcgcgcgtttgctttgtcgctctgtctcggtttcctcttcgtcccatcttttgcttggttggtcttgtcgtgttgcatcgtgttcttcttgtttttttctgtctgtgtcttgcttctcttcgcctgttttctgccttctgctctgtttttctatcttggcctgctcttttgcctctcgttttctctttttctcctgtattctccattgttcctcttgtttctcttccttttgtcgtgtgtctcgttctgcttcgttttgcttcctcattcttttgctcctactggtttattgtctgtccattgttgtgcgatctcattttccttttctcagttccccttgttttgttcccggcgaggtccttggtctttcttcctgcttcgtgtcctcaccctctgtgtcgtcgtcttacatctggttcctcatgtgtcacttgtgtatgttgtgtaatacgatattgccagtcttggtatggtcctactcgtcattggctcttccttgctagtcacacttcaagtcttgtgatgatgatgcatttctgtccccatgttcatgctggtcatgatgcatgcgtctggctacttgtgccgcgggcacccttgtgttcccgtgctattggtccacactgctcacgctgtccacctgtccacggtggagtgtatgtcggctgtggccctccctcgtggaggtgtccgtgctttaaagaggccttattgtcccgggatgcgcacagtgttctgaagggagcgtgggagctcttgctctcctgcgtcactgcagaatgacagagataggtgatagctccatgcatgtgtgcgcagggtgtatcgtgcgtctcagggtctcatgtttaagtatcagctaaatgatgtgcttcctccgtgatctgtcatacactgagaccatcaggctacaatgtcctgattcttggataagcctggagaagctggggatatgcagttcacaataactccgggagaggagctt

SEQ ID NO: 678003 - DNA, 394 bp, Homo sapiens
ctactggagtgaggaaaaatgaattacaataagtttctgtagacagtaaaaaatgcctcgccgggtgcagtggttcacgcctgtaatcccagcactttgggaggccgaggcgaacggatcacctgaggtcgggagttcaagaccagcctgaccaacatggagaaaccccatctttactaaaaatacaaaattagccaggtttggtggcacatacctgtaatcccagcttctcgggaggccgagtcaggggaattgcttgaaactgggaggcggaggttgcagtgagccaagatggcaccactgcactccaacctgggcaacagagcgagactctgtctcaaaataaataataaataaataaatattaggaaaataaaaatggtactgatagttc

SEQ ID NO: 678004 - DNA, 833 bp, Homo sapiens
gtggccaatcatcctgttggagacagcgctatgccactgaggaggccatgtctggcgggtatcagcgccatcaccaccggcatcgatgctggtcgccaatgaacggccattatgctgcaagcatagtcgacttactgtggccttactgtgacacttcgtgcaatgtacgggctcggatactagcataaggccaccgtatacatgagcgtatatggagacataggcgatcatgcagagttccccagtccgtacctagttgaaacctttgcttgaatgaatggtgtactagtagaccagactcagagtcctgagacgtacatcctcccaaaaatgagggacaggtcaaaggggccagatgatgagacagtcggaaggtcctcgtaccagaatccttgttgttcgacgtttgactatacagcaaggggtgggaacgaacatcctaagtgattactacaacaatgagcatcaaagtccagaaaggcgggacccctacactccccactaaacacgttattagctagggatccatttcgcataccggacagttttcctattagtaagacggtggacgatgccttcgattcagtgacgaacccctctacgagggaagttcgagatcacgggctgcctttggattagggcataagaatggggacgaatcgctgcagcgctttgacagttgtaacaccccagataggcccacccgagggaggagttccccatagccgagttagggagcggtatcgaagtacgagtaccacaagaaatcacttggtcgacgggatagtatggagacttgtgagcatataaatcaccggaagactcaaaggggg

SEQ ID NO: 678005 - DNA, 109 bp, Homo sapiens
  misc_feature (28)..(28): n is a, c, g, or t
  misc_feature (53)..(53): n is a, c, g, or t
agtcccgccgtggccacccatcaccctnacaccgacgtgttggccacccctgnccttgacaccgacgtgtcctgtacatagattaggacattcctaataaagtatagct

SEQ ID NO: 678006 - DNA, 340 bp, Homo sapiens
  misc_feature (280)..(280): n is a, c, g, or t
ttttgtttaccttttgagtaaactgcaaaaaatattagtaataagaggagagaatttccctaatgctgtttttattatgtcttttgattgtttggaaaactgaatctcccctctgtcaaagagtaaaatttttgctttttgaaatttttgaattatcagtttggctaaatgaataactattatcttacagtgacctgtaatcttattttgatcaagtgttttaaacctttgatatttgacaaactttccaaaatcaaatgtaaaattctaacttaaatgnttttccgacctcaaagctaactttttgggcattaaagcccttggaagtccaataggggcc

SEQ ID NO: 678007 - DNA, 459 bp, Homo sapiens
  misc_feature (3)..(4): n is a, c, g, or t
  misc_feature (53)..(53): n is a, c, g, or t
  misc_feature (386)..(386): n is a, c, g, or t
  misc_feature (403)..(403): n is a, c, g, or t
  misc_feature (419)..(419): n is a, c, g, or t
ttnngggtgggggttgggtaagggaatggtcaagactgagaaaggaatgaaanccattcaggaaatatcgacagggctacacgtgatgtccccaaactgctgctattgaagaacttcccaaaacttctttacaaagccctaaaggaaagtttgcatctatgaaaagccaataggtgagacatccaattgctgcatggaaattgatgtacattcaggggacggcaaaaatagctgtaaaatagtgaaaaagagcagtggttgtgctcttttctggccaatgatttacaaaaggaatctacttggacttctgtcccgggggtggaaatccttaggggttgggaacttgtgggggaacatttcccaacttggctaaggcaggggttccnctgggggaggggaaggntctattctgggggaanttcacccccccggcggcaccacacttttccccccggggtt

SEQ ID NO: 678008 - DNA, 972 bp, Homo sapiens
ttgcgcggaactcccaggggttgcgcgcccccccgtgtccggtttggtcgtgcccatggggcgcctctatttccttggggtggtatcctcccccccatgtggtattctgccggtcctgatttcatccccgtgcctgttaccagagacaggttccggcccacaggctggtttgtccaggagtgcctgcctgccaggtactgtaatagttcgcgctccgtctttcaaatccccagggtccatgtccaccgctcgcggtgtgctccccacgcaacatggtgtctcacctgtgcgtatttgggggggtccacacgggggaacacactccgctaccggccgcactcctgttggtcccacgccacggctctccgaaggagtgagcggcgacttcactttacggggagccccttgtcttgggccaccgtcgatcttggatttcctcgttactgtccagaacactttgttcccccacgcactatcttcggggcactactcctcgattaattgccgccccccaactttgggcaactaccgcgtggagccccccactccgtgtggctgcgaggtatccttctctgctagcaacacaccctcggcgataagtcacgctcaccctccatgagaccgcactcacctccacgtagtgtccccccacgccgttctggcggaggtttgtcctataatcggcgcctctcctaccacacgacctcgggcaaccgcgagcgagtactacatgttccaaagcgaggactcacgatgtcacttcccggatgtagcattttcctatccacgcgcgtgtgcttattataattcctctatcgcgcattctgccacaggcgggtctcttatcgcacacaagtcacgtctttatgccaaccctctcacgacacacaagcccacgcgctaacacaagacaaggcttttccctcagatggggggggaccactaaaaatccccctggcgaaccacataaca

SEQ ID NO: 678009 - DNA, 424 bp, Homo sapiens
  misc_feature (3)..(3): n is a, c, g, or t
  misc_feature (6)..(6): n is a, c, g, or t
  misc_feature (13)..(13): n is a, c, g, or t
  misc_feature (65)..(65): n is a, c, g, or t
  misc_feature (108)..(109): n is a, c, g, or t
  misc_feature (115)..(115): n is a, c, g, or t
  misc_feature (265)..(265): n is a, c, g, or t
  misc_feature (274)..(274): n is a, c, g, or t
  misc_feature (287)..(287): n is a, c, g, or t
  misc_feature (418)..(418): n is a, c, g, or t
ctntgncttagtnatgaagacaagacagattagagggttgacttcactcctctccagcctctggnaggggtggggctgaaggttaagttgatcaccagtggacagtgnnttaatnaattatacctactaatgaagcctccattaaaaacccaggaggacagggtttggagagcttctggatggccaaggcgggtggatcacctgaggtcaggagttcgagaccagagaccagcctggccagcatgttgaaaccccgtctctactnaaaaatacnaaaattagctggncgtggtggtgcatgcctgtaatcccagctactcaggaggctgaggtgggagaaacatttgaacctgggaggtggaggttgcagtgagccgaaattgtgccagtgcactgcagcctgtatgatacagtgagnctcctc

SEQ ID NO: 678010 - DNA, 408 bp, Homo sapiens
gaggccaggtcaggggagggggatacgccccccaatgggtactcccggggagggtgtccgagcggggccgcgagggcaggccctagcctcccccagcccccttttgtggagcaaagcaggttcggagaaaccccaagttttcgcctggggagtcccccccagggggctggggttgcccgtcccaaaaagtttccaccggggggggggttaaagggaaaagggcccccccctggtcctcgggttcaggctggcccccccccctccttggggctttggccctttttccccggggggcccccccctattgggggcccccgggtcatttttccccccccccccccccccccccctggggttttattttggtaaggggggggggggatgaataaataaaggggttttttgcca

SEQ ID NO: 678011 - DNA, 339 bp, Homo sapiens
  misc_feature (62)..(62): n is a, c, g, or t
  misc_feature (70)..(70): n is a, c, g, or t
  misc_feature (104)..(104): n is a, c, g, or t
  misc_feature (108)..(108): n is a, c, g, or t
  misc_feature (124)..(124): n is a, c, g, or t
  misc_feature (149)..(149): n is a, c, g, or t
  misc_feature (153)..(153): n is a, c, g, or t
  misc_feature (167)..(167): n is a, c, g, or t
  misc_feature (176)..(176): n is a, c, g, or t
  misc_feature (191)..(191): n is a, c, g, or t
  misc_feature (200)..(200): n is a, c, g, or t
  misc_feature (204)..(204): n is a, c, g, or t
  misc_feature (212)..(212): n is a, c, g, or t
  misc_feature (217)..(218): n is a, c, g, or t
  misc_feature (257)..(257): n is a, c, g, or t
  misc_feature (265)..(265): n is a, c, g, or t
  misc_feature (269)..(270): n is a, c, g, or t
  misc_feature (278)..(278): n is a, c, g, or t
  misc_feature (326)..(326): n is a, c, g, or t
tctgtccatcacctagaaatccataatgacatctgaagaggattgattttttctttgccacntttaagtngtgtgattaaacaatttaaaatcccatgtatccntggncctttcctccacgttnccccttagaattcctgcagctgcantagntaggaggcagcagnagaacccgngctgtggaatgctcntctgcctcnctgntaaaccgnctttnnaagccataggtcatagtgtattggaggccttcctttcanccacttgnccannccaaaatnaaacatctgtctcaattcttacccaggcaccttgctgttgtggtgagnggtgagaaagaag

SEQ ID NO: 678012 - DNA, 156 bp, Homo sapiens
gggattacaggtgctcaccaccacacccagcttatttatttatttacttatttattttttgagatggagtctcgctctgtcgcccaggctggagtgcaatggcatggtcttggctcactatgctctggccagggcgacaaagcaagactgtctcca

SEQ ID NO: 678013 - DNA, 279 bp, Homo sapiens
  misc_feature (112)..(112): n is a, c, g, or t
ggggggggggggggttgtttttttttaaaaatacccccccccccttctttttgtgggaggggcgccccctggtgttttacccccccccccctttttggggggtttttttttntattaaccccccccccggtctccccccacatttttttttttttttttttgggcccccccccccccccccccccccccccttttttggtgtgggggggtttggggggggcccccccccttttttctgggggaaagggggggggggggaaaatttttttttttggggga

SEQ ID NO: 678014 - DNA, 441 bp, Homo sapiens
cggattagcacaatggatctagaggcttggacgagagagacatgtacatatgtggatggcgccgctatggagtaagctgacgcatgattggtgagtacctgacatcggttaagagcagagggatatgcctgtggtcccgaatttttggatgcatgaggagtgcagactcgtgcccaagactcatacgctactgtgaggagagatagcgcgactgaattctggcttgcagagtagaatgagatgccatgtctgaataccatgatgagatactactagctgatgtgggacattacgactagcttgaggagagacattatgagaagtggccagagcatgacaacagcatctgcaggatatgggcagagagagaggatatcatcatgtcccgagagttcgttacggatggaatagtgagataatgcactaggacttagttgctgt

SEQ ID NO: 678015 - DNA, 200 bp, Homo sapiens
  misc_feature (5)..(5): n is a, c, g, or t
atccnccaatatataaatatattgatatataaaatattgtatagagataactctaactatacctgtagaataattaaataatagatataatatataaatcaagagagaaataataataagagtattaaaataataataataagttaaataaatagaggtaatgagataagtagagtataattggcaaagtatgggcaaag

SEQ ID NO: 678016 - DNA, 811 bp, Homo sapiens
ttggagaatcgtggaaaaagctagttatatttcagagaaatgattttcattatggaaactgttctccctagcaggccattttccctttttcctgggagttagcaagtttaggagagaatagtcatgacaagaaagggacgaaaggggagacgggaagaggttaaaaagtaagtgctcagacctatgaagtaatcccttggctagaaatatttaagagcagctcagctgggtggaaactgagttggtcatcttccatatttgcaggaaggtatttctgactgtgcaatgcggctagatgtaaaattttattttatacatcctagaaagcctttgactagaacactgaataacatatggagggtttcctgtccatatctggcctggatggtgccagaaagcagagaatagacaatgtaatctccaacatccaagcatcgaaacccaaggggtaggcaattctatgtaggtttgacatgaagtgtggggcatcttgttaatgctggctcaatgttattaaaactctctggttatagtctctacattctattagacaagcagtatcgaacactgtgcttcgcacacaaggtctttagttaccaatttagcagctactgtttgtgttaaacacacttttccaccaaataggttctggaggcaaacggagagcaatgactattaaagaaggtttcccagatcattaaattccaaaattaaaagatcatcttcaatgagaaagatccggttgaatggaattaagggaaggcaggccggacacagggacaccattgggttttccacccgggaaaccttc

SEQ ID NO: 678017 - DNA, 118 bp, Homo sapiens
tagagtatccccgcacactgtcttcccgtagagccccgtcctcctctgcggggctctccggacccccttccccctcacctccatggcagggacatgaataatattttgtattgatttt

SEQ ID NO: 678018 - DNA, 773 bp, Homo sapiens
tactgggctgcttggagtaatatttcccgatttggtgccaggtgcacagtcccaggtgtcaggaaagctagcgagtgctgggcgccgggcggtaaaaagcggtggcctctcacgggttattgggtgtctgctgtgtggatgcagaaggtctgcttgctgcagccgcctagttatacagggtgtgggggtggagatgtgtggggatggggggcgacgtggatgcggagtggtggaagacgtggctggttgatgtgggctctggtggcctagcgcctccgaagggcctgaggcgcttggtggttaccccgcctcaagtgtcagggactggtggcgcccaagctgcttggcttgtgctgggactgacccgcctggtgctgctctcctcagaggggcgtcccagagccaaggccaacaggcgagtcaatgcatgctggacggcctggggagtgtccccgaagtagctcgtagcgagactcacatacacctgtgggccatgaacgaggagggtaggactccccgaaaaaagacgctggcccaccaatagacccgggatcacgccttgagggaacacctgcgggggatggggaagtgtgcttcccctggggcacctcggtaccttgctgcacggacctgtttgctggtaattgtaaccccttgcggcgccggtagatatccgtgggttggccccgaagcaaccggtgagggggattgccgcatgctttactgcctgcctgtgcgctcgggcgggaccctcgcggccgtgcccacccggg

SEQ ID NO: 678019 - DNA, 320 bp, Homo sapiens
gggaaaatggggaattttttttttttggggccccagtttccctttttccggaaaaaaaggcctcttggaaaggaggtggtatggtttcccccccaggaaaatttttttccccgggcccggcccttttaaaatgggttaaaccggcccggccttgtggccccccccctttttccccccccctttgggggcccaggtgggtggttccccccaggtcccgggttccaaccccccccggccccccttttttaacccccccttttcttaaaaaaccaaaatttcccccgtttgggggccgcccccccccccccccccccttttta

SEQ ID NO: 678020 - DNA, 561 bp, Homo sapiens
acgggataccagtacccaaatttttctatgtaagctaaaatttttttctgttaattagcccaaataaacctaaattcccagccctgtcctgtagcttttgttgtctcccccttaaagatcatctaggttaacctttggaaaggtgttaagtgacataacagtcccttgctttttaccttggtatgagcagccctcctcctgtttcagaccctgaaattaaaagtgaaaccttcattccccatcttttgttctatatgaaatggagatagaaattatatctggctgggtgcggtggctcacccctgtaatctcacccctttgggaggcccaggcaggtggatcccaaggtcaggagttcaaaaccagcctggccaaaatggttaaaccccctctctattaaaaatccaaaaattagctgggggtggtggcaaacccctgtaatcccagcaacccaggaggctgaggcaggaaaatccctttaacccaggcaccaggggttccagttaacttaaaccgcgcccctgcactccagcctgggcgataaagtaaaattctgtcccc

SEQ ID NO: 678021 - DNA, 174 bp, Homo sapiens
  misc_feature (19)..(19): n is a, c, g, or t
  misc_feature (22)..(22): n is a, c, g, or t
  misc_feature (127)..(127): n is a, c, g, or t
  misc_feature (152)..(152): n is a, c, g, or t
ggcacgagcgcactagcgngcngtcgagccgtggacggaggtggatgaggagggcaagtttgtccggctgcgaacaagtccaatgaggaccagtccatgggcaattggcagatcaagcgccagaatngagatgatcccttgctgacttaccngttcccaccaaagttcaccctg

SEQ ID NO: 678022 - DNA, 790 bp, Homo sapiens
ttgctgccgcatggagcggctggagtcatggctcgggtgcctgtggcagctccgagactccccgaggccccagcgctgcctgttctgccctgccccccggccatgtcgctgcccctggagccctggttgggccccgtgacctgctgtgcctgtgccatgtgcctccccctgcctcctgggccctgagtgccctggggctgcaaggctgtccttctggtgcctcatgcctttgctcccaccttctgcagatgtgcttctgcccttgtgatggagtgctgtcccgtgctgtgcttgctggccaatggaacattgcacatgtgctcgtggacatgtggccttggcctgctcatgccttagatgccttgcctgcccgtccctgtgtgcccccctccttcggcccagaccctgatgaacctgtgtggactgttgcccatgtgtgacatgccaccactgccttgtgcctaggtgcctgatgtgtcataggatgcaacctgtggtcatggccaagtgccacacaccaacttgggtgatgctgtgtaccatgaagatagacagggcttgcttgaggttcccttgaccccacatacccgtctaccacaaccacatcgccacccgtcctagctggcagcggacttgtgcccccatgatgtcagggcaggagtgtgagccaaaggtattctcagtgccaggtgcgggtggaccttcctcccctcctgggggcctcagatctctgttgttatgggcgtgggggctccgaggtcgagggctggaggtgtggtgcaggaccgta

SEQ ID NO: 678023 - DNA, 563 bp, Homo sapiens
  misc_feature (207)..(207): n is a, c, g, or t
gggtgacttgctgtgtagtgagctcagttatacttgggtaagcggggcaccgcatgtggggtgaacccctgcatgtatttggttgaaaagtcctgggcaagctgtagaagtgaagaacttccccgtggcgccttcctggccccaatttgggggccccggaacctgaaaaaaaaagcttcgagagaaggcacacacggggcgagctcnccaagagcacgtggacgaaggacaaaaccaaaaagtgcaaattccgcatttaatctacaaacattttttgtgccaaaaagggggtttgaggcgtgggggggggacccaatgggtggcaaatctggggggttttcctattatggatatgggggggcttggggcccaacaagggggtgtctttctacaaacgaaagcacacatttcttcatcaaccacggggaagaggggggcgcgaattttaacagaaaccaccacaaagcggtttattacaaggatttataacaagaaacatttataaacaaatttgggagaaacacaagaggccccccttttaaaaattttcatgagggtttcag

SEQ ID NO: 678024 - DNA, 314 bp, Homo sapiens
tgcaccgaatgaagagaagaaggaaggcacaaacaaaaggctacttactgccaaagagaagtttcaaaattcatttatatagtgaacatttattgagcacttataatgtgctaaacacactgagatacaaagattggttaagtctttcttttctttctttctttcttcctttcttctttcttttccttccttccttctttccttccttctttctctttctttcttccttccttctttctctttctttcgaaagaaagagaaagaaggaaggaaggaaagaaagaaagggcgagaaagaaagagaaagaaggaag

SEQ ID NO: 678025 - DNA, 246 bp, Homo sapiens
gctgtcctcgctgcttccttttgctcgactctgaggatcccctgcacggcttctgcgacacctggagctgagctacgaccccgatgagccgccctcgctgaagctgctggacatcgacacgcgcctgggcacgcagctcgctggcggaattgcgcgcccacccgagcgcctggcgggaagtgccgctcaatgtgaggcggccgacctgctggccgaggagctcacccaggttcgcagacaatctga

SEQ ID NO: 678026 - DNA, 618 bp, Homo sapiens
cggcaaaataaaaactttttgaaaaagaaagtagaaacaaaaaaaaccaaaaaaaaaaaaacaacacaagaaaaaaaaaaaaaccaaaacaacaaccagattgtctgggccccttgcccccaaggttttagccctgttccatgctttgtttggggcccatattatgggccccttgggaaaacggcctttttgggggggttgttcccattcaccggggggccttttccgcacgtgtcgtgtggaaaaacccgtgggttcccccaattactgccgtgggagataagccccttttgcccgggggggatctacgggaggggcccccccccggggcctttttcaaaaaggtcgcccccctctttggggctgggcaaatgtgcgggccaattttttggtaaaaacccgcgcaaaattttttttaacaggcctgttttttccacccaagggccggttccggggacccttctttttataaaaagttttcccccctatgggggtgggtgttttcactgttgccacggggcgccctttttaagccggggttttccgctttagggcgagcccttttttggggggggggcccccttgggcgcccccccctctagtttttggggggggggc

SEQ ID NO: 678027 - DNA, 850 bp, Homo sapiens
  misc_feature (27)..(27): n is a, c, g, or t
tatgcgaacttttccggaggcggcggnctcggctgccgctgggtcccggggtcgcgggccctgattgcgccgtttccccgcgcagagctcgccggcgccccgacgggccccggagcagcggccccggccggaccctagtgcctctaactggagggggcagcccagccaggagggaagagaacgaagagaaaggccgccaggctcaagtttgacttccaggcgcagtcccccaaggagctgactctgcagaagggtgacattgtctacatccacaaggaggtggacaagaactggctggagggagagcaccacgagacggcttgggcattctttccgtggctaattattggtcgaaggttgcttgaccgcaagattgaaatcccgtaggcacaatcaaaggccccccagactaccaggtgctggagtatggaagaggctgtggcccagatacaaccgttcaaggtgggacctggacggtggagctggtccttccgcaagggaagagcacatctggcctgatccgcaaggtgaacgagaactggtacgagggacgcatcactgggcacaggggcggccaaggcgcattattcccctgcctagctacgttgcaagggtgtactccgtgaagccccggctccggcatctgtgaccaacggcaccacagatcccccaaaagaatgctcccaccagacttaaccagagagccacgcgccgggccacaaacacaggaaaaccacacacagcaaaacccaaatccacacgagcgagacgggaaggaccagagcggtaaaacagacaccagaaactagagagcgaggccaaacagaagcgcccgacagaagagaaagac

SEQ ID NO: 678028 - DNA, 493 bp, Homo sapiens
  misc_feature (52)..(52): n is a, c, g, or t
  misc_feature (92)..(92): n is a, c, g, or t
  misc_feature (217)..(217): n is a, c, g, or t
  misc_feature (347)..(347): n is a, c, g, or t
  misc_feature (392)..(392): n is a, c, g, or t
  misc_feature (437)..(437): n is a, c, g, or t
acagcgagcggaagttccggacggggtcgggagccggggagaagccgtacgnagttcgccgactgcgccaaaggcttcgggctgttctcgcnacctcgtggagcaccggcgcgtgcacaccggcgagaagccctacgcgtgccccgagtgcggcaaggccttcaaccagcgctcgaacctgagccggcaccagcagcactcacagcagcgccaagcnctacgcgtgcccactgtgcgaaaaggccttcaaggccgctcgggcctggtgcaacaccagcgcgcgcacaccggcgagcggccctatggctgctccgagtgcggaaagaccttccgcggctgctcctgantgcgccagcacgagcgcctgcactcgggcgagaagccctacaatnctcgcgactgcggcaaggccttcgtgcgcaactgcagccctgatngccaacctgcgcacgcacacgggcgagcggccctacgcgtgcggagattcggtcgc

SEQ ID NO: 678029 - DNA, 412 bp, Homo sapiens
ctcggcctatcggaaccaatgagcctagtccaggcctggggagaatgtgacctaaacacagccctgaagaccagaactggaagtctgaatgcgagccctgctacaatggcggatgccagaagtactgtcaccatctccgagccctgttggcaaactgaccaagcccaaacctcaagcagaatctaagaagaagaaaaaggaaggcaagaaacaggagaagatgctggattaaaagatgtcacctgtggaacataaaaagggcatcagcaaacgggatcagttaactatggcatttatatgtaccgtaggctttgtattcaaaaattatctatagcttagtacacaataagcaaaaacaaaaagaaaagaaaatttttgtagtagcgttttttaaatgtatactatagtacca

SEQ ID NO: 678030 - DNA, 113 bp, Homo sapiens
tccgccatcattccgagcactttagtgggagacctcgagaagatcgggtgccccactcttggaattccattacccttagcaacctcactctaggcacagagtatgtgggcagg

SEQ ID NO: 678031 - DNA, 946 bp, Homo sapiens
tgactcaggttattctcacatatcctgacttcatccgatcctctcaagtatttacatcctataatatcgcaaagcactcattctttatgctgttcgtaccctcgttcgatctagatcattgggcatctggttaggatggtagtgtagcttgattctgtgtatgtctcccatcgtgataagattgagagacgtgaaggttatcgtctctgtgcggagtggccattaatgacacgctcttcgatgctgtgtgccgtctctctctccatctgtctctaaaaatctctaaggatgtccttagccaacatttacttggagtccaagggctcctccgtgtgtcaagtgactgccatcggtgtcaccgtgatactgctttacacctctcgggcctgcgtacaaacctgttcatcctgtcattttctcagaacaagagcgtccattacctttgattatgactggtacaatgtatcagaccaggcagatttgaagactcagccttggggagatgctggatacgtataattttggagtggtgtatatgtagcgaactcttacctaccacttaagtcgtttatttcttctagttagaaatcctacaaaggaacttacaaccctggaatggtccccagcatggtttcagtcccagatcttatttcctttgacaacctccggggatatgacagtgattgatgacccttgcctgggaacatttgccccttcagggacttcagggacggttgctccagaataactatgattggggcacacaactacacgttctgggcagcacgaccttggagaatcacttgaatcttgaaaacacgctgggtaccacagtacacggtatgtaagcccaataaagtcagaagtacgccggcattggcatctaaaaagtgattggtcagccgataaagcggactttaagcgccggaaaaaagacatcgcgacc

SEQ ID NO: 678032 - DNA, 320 bp, Homo sapiens
atgatgtgaatatagttaacatgcctgaaatatacacttttttttttggaaacaggtctcaatctgtcacccaagcttgcacgcaatggcacaattatggctcactgcagcctcacaatcccaggctcaactattcctgcccctcagtctctcaagtagctgggaccacaggtgtacaccaccatggctggctatttcttagaaaaaaaatgtttgtagagagggtgtctccatatttggcccaggcttgtaacaaacttttgggctcaagcaatcctcctgtcctggcctctcaaaatcctggttttaaagatatgagc

SEQ ID NO: 678033 - DNA, 907 bp, Homo sapiens
attaatccccttggccaacccgtcatctactctaccatcttgtgcggcacactcgtcacagcgctaagctcgaatgatttttacctgagtaggcctagaaatacacatgctagctttattccagttctaaccaaaaaaataaacctcgttcacagaagctgccatcaagtatttcctcacgcaagcaaaccgatccataatccttctaatagctatcctcttcaacaatatactctccggaccaatgaaccataaccaatactaccaatcaatactcatcattatacatcatacatggtctatagcaataacacttaggactagcccctttcacttctgagtcccagaggtaaccaaggacacccctctgacatcggcctgctttcttctcacatgacaaaaaactagccccccatctcaatcatataccaaatctctccctcactaaaaggtaagccttctcctcactctctcaatcttatccatacatagcaggcagtgaggtggattaaaccaaaccagtacgcaaaatcttagcatatcctcaattacccacctaggatgatcatagccgtctaaccggacaaccctaacataccattcttcatttaatattatattatcttaataataccgatctactaatcagttaatccagcacagacctataatatttgacctgaacagtacatggtaaacccttattccatcaccctctttccttagggctgcccgtaccggtttgccatggcatatgagattccaaaaaatgcttattccacatttaggcatgacctttactatttctaggtagtcacactcgaaaagccatacaggaaaggggataaacctttccactgccgcgctattcttattaaaaaaaggcggctatctgcgagagagttcg

SEQ ID NO: 678034 - DNA, 614 bp, Homo sapiens
  misc_feature (18)..(18): n is a, c, g, or t
aacttctgaccctcaggntgatccatctgcctcggcctcccaaaatgctgggattacaggcctatgccgctgcacctggccccccactgtctaattctttgttgcagctgccaagtcactctcagagccggttttcctaatatgcagttagcattctaagagttaacagattgtgttttattttcccaagatcttttttaaaaattttcttaattataggtctaagaaaagcttattttagaaaaattctaaaagatgagaagaaaatcagcatctcctgttatctttgtaacccaaatagctttgcattttacatagctggagtgatagtgatcagaatggtttttttagaaactttctgtattgtgaaattttattacagaaatgataagtgtaacacttcagtgatctacttatggaaaaggtcatctctcccatacttttgatgcctaccttcagagaaaccttcattagcaatctggcatatgtcctgcctcagactcatgaaaatatgaacaaagagagaggggtttctctgtttttttgttttgttttgttttttgttttcttaaaatgcgatcattttatacacattacccttctgtcgtcttctc

SEQ ID NO: 678035 - DNA, 543 bp, Homo sapiens
tgacctttgatacctcttactcgggccgtcgattaccatacagtgtgcataccaatgtattactttattatgtacttgattggacatgatctaggatatgaactcctaaaacttgcaagtgatacatgatctctaagaacatgtgtgaaatattttctatcacttagtttggctcttttggtaaaggtgttatcggtttcttcctaactcatctggtgttctcttaaattactagcattttcattatattataacatttttaattgtattatatgtagtcatatcatctctcagaacacaatctcaaagtatcatgctgagttaggtttgggaagagagcagtaagaatggtttatttatagtagccatcgtaatgctaaccattcatctgaaattagacaaggctcccaacaggcagacgaggtagacacatgtatgcttgaggagttaagctgcgatacatagggttaccatccaatcgaatgtcctctagtgccttacgaatatccgtcaaatttttaacattgcagaacgtatcttcgt

SEQ ID NO: 678036 - DNA, 155 bp, Homo sapiens
acgtcgttgttcggcggttcaccgatgtcgtgcgttgctggacgcctcgtcgactggttaacccgtctacgatcctgttatgatcgctgaccaccgcgtcctctgtcgatgtagttaacctgtgtagatatcgccatgctcatccgttgttcgtt

SEQ ID NO: 678037 - DNA, 453 bp, Homo sapiens
gccatgcagctacatctacctgcctttggactctggaggacagggcattgtcctcagtcagatacaacagtatttgggtccatggtacctgcacacctaaaacacttggccacgcatctgatctgtagtcactgtactatgcctagtggaaggagcaagattcatagacattattgtatggatgtttaattctagcttgttgagaggggaagtggtgggtgagacttagccccaccttgaggacatacaactgggaaatactgatacttgttgcctatttggtatgttgtagtgccccactagatcttacagaagtagtgtgccctccatagacatgtgtagcatctaaacacaaaggcccacacttcctgtctgttgcctgcttggtcactgttttctattgaccccaacccttgatgatatgtatttatcattttgttattttaccagttt

SEQ ID NO: 678038 - DNA, 121 bp, Homo sapiens
ctggccgtcgttttacacgggccgtcgtgtaacacgggccgtcgttaacacgggccgtcgtattacactggccgacgttttaacgggacgtcgtataaactggacgtcgtaaacactggcc

SEQ ID NO: 678039 - DNA, 147 bp, Homo sapiens
  misc_feature (38)..(38): n is a, c, g, or t
  misc_feature (130)..(130): n is a, c, g, or t
tgcagattaaagtcacacttcatagaaagatgcgctgngtatatggacaatcacttcacatgtaaggcggcctctcctctggctccatgtttgtgacagctgactggtacaggaggatgcatgaggaggntggctggcaggcctggg

SEQ ID NO: 678040 - DNA, 333 bp, Homo sapiens
  misc_feature (186)..(186): n is a, c, g, or t
  misc_feature (253)..(253): n is a, c, g, or t
  misc_feature (285)..(285): n is a, c, g, or t
  misc_feature (316)..(316): n is a, c, g, or t
  misc_feature (330)..(330): n is a, c, g, or t
ctaaccttcattttggtgccaaaacccaggaaggggataggctctggctgggcgtccttagaggattctctctctctctctcctatcatcccttacccagccaacctccccttcccgaacctgctaaagaccctaaggatctcccaaaattctcccattgttggccacctcatccaccatcaaagnctctgagagggtttttacagggccgtgttagagccttcacccatgggaacagtacaaggacatgatngtaattccgaggaataccgacagctccagggnacagcagttccctaattacccaggccttttncccccaaaccattnggg

SEQ ID NO: 678041 - DNA, 232 bp, Homo sapiens
  misc_feature (12)..(12): n is a, c, g, or t
  misc_feature (16)..(16): n is a, c, g, or t
  misc_feature (20)..(20): n is a, c, g, or t
  misc_feature (29)..(29): n is a, c, g, or t
  misc_feature (32)..(32): n is a, c, g, or t
  misc_feature (43)..(43): n is a, c, g, or t
  misc_feature (48)..(48): n is a, c, g, or t
  misc_feature (63)..(64): n is a, c, g, or t
  misc_feature (75)..(75): n is a, c, g, or t
  misc_feature (86)..(86): n is a, c, g, or t
  misc_feature (106)..(106): n is a, c, g, or t
  misc_feature (110)..(110): n is a, c, g, or t
  misc_feature (112)..(112): n is a, c, g, or t
  misc_feature (118)..(118): n is a, c, g, or t
  misc_feature (126)..(126): n is a, c, g, or t
  misc_feature (131)..(131): n is a, c, g, or t
  misc_feature (153)..(153): n is a, c, g, or t
  misc_feature (156)..(156): n is a, c, g, or t
  misc_feature (162)..(162): n is a, c, g, or t
  misc_feature (167)..(167): n is a, c, g, or t
  misc_feature (176)..(176): n is a, c, g, or t
  misc_feature (185)..(185): n is a, c, g, or t
  misc_feature (200)..(200): n is a, c, g, or t
  misc_feature (211)..(211): n is a, c, g, or t
tttcggtacttntttngtcncgtctttantgntgtttgagttngtttnccggctttccctatnngatgggtttcntcttgtttgcnccgcgctgcctcgtatcatngggncnttctgntacctttnttccntgcccgctacggaacgcccggncgnttaggncccanaggcccggnagcaccccnaagttgattttgtcngggttctgcancgggccgggggtctgctccgc

SEQ ID NO: 678042 - DNA, 414 bp, Homo sapiens
gctttggagctgccacccgcttcagatgcttcttgggaggaggagttatggctgcgttaggcaaggaacaagcctggaggagtgaggatgggtgctgtgaaggaggttgtgcagctgggcccgcagtcggacctggtgagatcagaggagggggtgccaccagtctgtggacgaagatgagaagctggaatagagcagaaaacaggaggctgccactctccatctttcccaaagtcactccaggagcaagggtgtcatttactgaaatgacagactctccatttcacatttttcccccaagtgcagagtgcagggaagcagatgggctaaatttttagagtcagggttattaatgtatactttacatagtaaactttccccttttaactgttcccctggctttaacaccatgga

SEQ ID NO: 678043 - DNA, 248 bp, Homo sapiens
gggacaaacctggggaattcaatttctcgcccgagcctgtggtgtctgaggggcattcagcgagcgatctccagggggcaggtctggaatgaaagaaggagctgaggccgggcatggtggcgcacacctgtaatcccagcactttgggaggccgaggctggcggatcacatgaagtcaggagttcgagaccaacctggccaacatggtgaaacccccgtctctactaaaaatacaacaattagccggg

SEQ ID NO: 678044 - DNA, 88 bp, Homo sapiens
gggggggcccccccggggggaattttggaaaaaggtccccaattttggggggggttttctttttattggggttttttccgggggggga

SEQ ID NO: 678045 - DNA, 1416 bp, Homo sapiens
  misc_feature (712)..(712): n is a, c, g, or t
agcgggtgcttgtggtgctgggcagctagaccgtcgcagaccgacacgcgtgtgtgatcctcgtcggtgtccggcacagagactaccagtgacagatgctatgactgatggctgatgtgaagtcgcattatggcctatcgcccttgccgatgcgcaactcgtccccaacgtagaggcatactggacctcgatccatgcagttcatgtagacatagtaatgcagtcgttcggaaaggagccgacactgaggtccagctcacaatatccttcacatctagggggtcgatctcctgcatgtttcaatcaggtggactgtgcatgtcaagaagctgactcgtaggaccgatctttgggagattcagtttgctttgctaactcttggctcggcctgtcttgtggtttgaaaagtatcgaaagaatactgattgaccccttaacgatgattttagttgccgactgcccaaagccaagtgacgcacctcgcgtggggatgcacgccacgtagattgagagagctacatacactaggagtcgcgtggtgcgaattcggcccttggatttgcttcgttgctaaccccgatctaagagaagtaaacggagccttcgggccaaagcctcgtagagaacaaggcctacgcaatcccagcattccccagtttcccatgccaagtttcgaaatgtcgaaaagggcctcctgatgtatcgtcttcanagagcccgttgttggcggccgtcccttgctcgacctgggttgcccttccgcctctaggcgccgagggcgctcttcccgcgcgctctcttgaaagtgcttttggtggttatcttccacctcatttttaatatctcttgggtaggtttgattttgccaactttgtcaccggtatatttctcctcctatcggcgcttaacttgtctgtctctaattctgtggtgttatttcaaacacggacctttcttcagtcataaactatatagaatgtacattcccttcggtaagggaaagaaacacacggcctacatggaacagcatagagaacaagattgctgttcctctttctcaaaaagggcctgttcttgtgtgtagaatattcccgtggggcggccaacactaatgacgtgtggggcgccgttggaccctcccctgtgttcgggagggggtgggggggttgcgcccctgttgtatcgacctcacccgcctgtatgttttgtttgtcacccaattcctataggcccgtgggggggggcatatacacatttggcgtcgagaaggcactcggcgggggggttctattacatttacgttgggggctccacttaacgtccgagtggatacttccccggtgtggcctggtggcacgccatgtgttggggtataacttccgcgcgggctcggcaaatgtttcccgcacgccctct

SEQ ID NO: 678046 - DNA, 230 bp, Homo sapiens
cagtaattctgtactcaccctcctccagctccaacttctgagtctcagtgtcgtattccacactgtgcccacatgtacacattattttgcttcacttataagtgagaacatggcctccaggtccttccatccttccacgttgctacaaaagacatgatttcattcttcctttatggctgaatagtattcgtgtgtgtgtgtgtgtgtgtgtgtgtgtgtgtgtgtgtgtg

SEQ ID NO: 678047 - DNA, 264 bp, Homo sapiens
cttcctgctctctgcccaagatcttggtgacttcgcctctcgtaactcagcttcacgctcggggacagtgagtgaccgcctgcacggtcttctagcttctcggtctatctcatgcttcctgcttctgccagggttgattcgggaggatcctattggtgcgcgcggctttgtctgattatgggcgttgattagtagtagtccctgtttgaacattgtttgttgggtgctatatcttgtacctttagattgctcgggggtaccgag

SEQ ID NO: 678048 - DNA, 391 bp, Homo sapiens
gatttggtcgtgcacgtggtgtgtgtggtgtgtgctctgtgacatgtgtgttgtgtatgtggcatgtgtggtgtgtcgtgtgttgtgtggcatgtgtggtctctggcatgtgtgttgtgcatgtgtgtggtgtgtgtggcatgtgtgtggcatgtgtagtgtgtgtgcatttggcatgtgtgtcatgtgtgttgtgtgatgtgttggctgtgtgtctggcatgtgtgttgtgtgtagtgtgtgtgtatgtgtgtgacgtgtgctgtgtggcatgtgtgttgtgtgttgtgcactgtgtggcatatgtatttgtgtggtgtgtgcggcatgtgtgtgttgtgtgcgatgtgtggtcgacgcggccgcgaatttagtagtagtaggcggccgc

SEQ ID NO: 678049 - DNA, 355 bp, Homo sapiens
gggggtaaattaactttttcccccaacactttttgggggcctatccggaatgcccccacgttatcgggctaccccaatggaatcccacaatgaaaatcctatttttcgggagggtcattcatttttctaacagcaggaatattaataattttcatgatttgagaagccttcgcttcgaagcgaaaagtcctaatagtagaaaaaccccccataaacctggaggggctaaatggatgcccccccccctcccccccatttgaaaaacccgtatacataaaatttaggcaaaaaaggaaggaatcgaaccccccaaagctggtttcaagccaaccccatggcccccatggctttttca

SEQ ID NO: 678050 - DNA, 302 bp, Homo sapiens
ggaaaaataagtaataaaggacatgattgggataataaaattagaatattgacttgtataaaaagtattctattgatgtcaaatttcctggccgggtgcggtggctcgcgcccgtaatcccaacactttgggaggccgaggcgagtggatcatgaggtcaggagattgagaccatcctcgctaacatggtgaaaccccatctctactgaaaatacaaaaaaaattagctgggcatggtggcaggcgcctgtagtcccacctactcgggaggctgaggcagaagaatggcgtgaacccgggag

SEQ ID NO: 678051 - DNA, 239 bp, Homo sapiens
tttccagcccaggggttgggctgcccttccccctgaggctcttccctatataatcagaccttttggcctcccgaccccctcctcttctgtcttccccctttccttctctctatacacatgctttctctctttctttttcccctcccatctgtgtccgttcccatggtgactatcccgccttttcccatggggccatgaactcaaccaccagggagccccttcccaataaacgtcgacgc

SEQ ID NO: 678052 - DNA, 197 bp, Homo sapiens
atcacatatccagcacactgacactaaatgccatccatatgtatatcgcatgtaatccttccagcaacactaaggtatggacgatttttatccccgtattacagcatagaaaactgaggcacaggaagtcgttagaaatataccaggatcatgtaattaataagcaatagaagcagaatttaaacctaaggcagtct

SEQ ID NO: 678053 - DNA, 261 bp, Homo sapiens
  misc_feature (40)..(40): n is a, c, g, or t
  misc_feature (50)..(50): n is a, c, g, or t
catccctattatgatatgtgataggtacagcttttcgggngcttggatcngaatttactttgaaaacaattgtaatggtattatttatatttacattggggatttcccctcgcttctgatctatttttaataaatatattttcaaataatgttggctgttaaaaaatgtataataactcagtttttcttggtttatggaaatatctattttaatgtgaaaataatttattttgaattgtgattaaagtgagcaatttgtct

SEQ ID NO: 678054 - DNA, 227 bp, Homo sapiens
cagcaacctccctcctgttatctaccaggagtgctctaataaagggacagagtgacatactgatgcctactgtcggcatctgagatgcactgtgtaggaggttagcctcaatgccagcctctggttgtctagagtagagtagacatcaccatcaaaatcacattgtggtaccattgctggactcaggatcacaaaggcagaggcaaccaactcttatttttcgttta

SEQ ID NO: 678055 - DNA, 340 bp, Homo sapiens
tttgcgagctcggtaccccctcctcagctcccaaagtgctgggattacaggggtgagccaccgtctccggctatattaagtaactttctaatgttactgcttgtcatcctagggaagagtacacttagataagtttttctggaatgaatgacaccttactaggtttgaaagtttacagttgctttatttatacgtttttgttaatttgtttgctttttttcaaagcaagttttattccaagttttacatgctcattacttgaaagatagcagactatatatagaagttaaaaaggcatccatatttacatcagataacctccttcaacattaattatacc

SEQ ID NO: 678056 - DNA, 233 bp, Homo sapiens
  misc_feature (227)..(227): n is a, c, g, or t
  misc_feature (230)..(230): n is a, c, g, or t
  misc_feature (233)..(233): n is a, c, g, or t
gaattctactagactttcaaagaagattaataccaatctgttggactctattccacaagataatgaaagaaggaaccctctctaactcattctatgaagccagcatcaccctaataccaaaatcaggaaaggacacaaccaaaaaagaaaactacacaccaatatccttgatgaacatagatgctaaaatccttaagagaatactagttaactgaatccagcaaaanaantcn

SEQ ID NO: 678057 - DNA, 1722 bp, Homo sapiens
  misc_feature (84)..(84): n is a, c, g, or t
  misc_feature (1049)..(1049): n is a, c, g, or t
  misc_feature (1397)..(1397): n is a, c, g, or t
gtctctcctggggaccactgttggtaggtgtggtgagttgagtcccactcacgatgacgccatagggatctgcctcccatcttntcagagtcgccaacggaccttagggggcaagtgaggaggaaacatgatctagcataggagatctacagagttgctagataatcttggttgctattatgcgttgatcttatgctgactaagcgtacttagggtcattactccgactatgcagtgagtcacgtgagccacagttcctaatactcaggtcatttaccaaagtactcgcaacatagtgtgtgagtctggtgatgtggatggactattcgtgtaatggatgctatgcattggtagcgtgcagtgtggacggtggttgtaagaggtttggagttgctgtatccgacgcaatgtatgaacgtctagagtaatccttgtaattcccatgcgtataatgcgcgggagattcgttctaactctatggcgtaagctttagtagtgatgcgagtactagcgcttctgtggtaaggtttgtctccaattccttagtccaacgagtgtcgatcatatttcaacatatctaacagggatcgctacgacgaagcattgtgcccaggtggccttccatggtgagccatcgatttgctctctttgtacactttcctagatctttgggcccatttgtatcccatatcgagcggtaccttcacaagctacgcagtggttgcgttgttggttgttcctcttccaacgcgtctatgacgattcttctccttgtcttgacctttcgtggaatgtcgccgtccttacccttggacctggtcccctttgtagacccccgtgccgattgatgtggcgcttaatggccccttcgcgttgacaccgaaaccgcatggtggttcctcctcggcgctttgagaggcatcccagggggacggttggggggtatggcgcccgtcccgggtctcccccgtggggggggatttttctcccttagttggggcccgccaggccttttaatttgggttggctttggggcctaggtcctattnaggaggcttgttggcttttatgagatttcctccttcttcctgttggggttcgcaaggcgaggtgcttgagctcttggccatgtaagcccgggtgcggtacctggcccaacggggggttcgttgggggcactcataggggttgtgtgtgccccctgggttcgcgccttgtggtgccggtataggcgcgcccatatccacgttgtgccgcgcggagtgtccatcaggggcacacccacggggttggtgtggcccgggccccccgggaggaattgtggtgcgccaaaaggtggttctttggaggaccccccttgtgcggcccccacagggggtgtgatgtgtcccccgctnttcgcccccccctgctgttcgccctgagagagttggcccccgtgggggtttcaccggccccatgtgaagaggacctatgcgtggggagacggggggtgcatacccccctcgcgggtcgtttacaccccgcggtgtgaggttgcctgtgtgagtaacacgccttcgttcgttgctcgcccgcgtgttgtagcccccctcgtgtgctcagcatgatgctggtgtcccacccgcagtggaggtgagcggtgtgtggtccggtctggctgcagcttggcagactccaggccgtgtgcgaggtcctcgtcgtgtgctgtagaccactcgg

SEQ ID NO: 678058 - DNA, 694 bp, Homo sapiens
  misc_feature (16)..(16): n is a, c, g, or t
  misc_feature (36)..(36): n is a, c, g, or t
  misc_feature (391)..(391): n is a, c, g, or t
  misc_feature (444)..(444): n is a, c, g, or t
  misc_feature (578)..(578): n is a, c, g, or t
  misc_feature (582)..(582): n is a, c, g, or t
cctagaggattcccgngcagaatcacactcaaaacnaaaacagacaaggacacaacaaaaaaaattacagaccaatacccctgatgaacatagatggaaaaatcttcaacaaaatactagcaaacacgatgtaatagtacatcagaagataatataccatgatcaagtgggtattataccatggatacaagaatggttcaacatatgcaaattaataaatatgatacatcatacattacatattacataaacagaattaaagataaaaaccatatgatcatttcaatagatgcagaaaaagcatttgttaaaattcagcatcttttcatggtaaaaaaaaaaaccctcaataaagtaggaacataacttaaaataatagaaggaatacaanttaaaataataaaggtcatatatgataagcccgcagccagtatcatactgagnggggaaaaatgggaagcattactttggagaactgaaccaagataagggtgcctgccttcaccatgcctattcaccatagtactggaagtcctagccaggacactcaggcaagaggaagaaataaaaggtatccnaatnggaagagaggaagtcacatgtcgtgttgtcgatgatgtgatctatatctagaaaaccaaaaggttccacaaaaactgttgattgagtgtatctgccggtacgagctcactcg

SEQ ID NO: 678059 - DNA, 500 bp, Homo sapiens
  misc_feature (485)..(485): n is a, c, g, or t
tagcgagagaggggattgtgaatcacgttgttatgctgcatgaagacatgctccgtgaactcgttcaggttttgcgtggaggagggccaggatttgcactcataaccaccttggagttttttggactggctttcccccatagatttcacctctatcacttcgttttctttggaagagttttcaagttctgctgcccaactgtccttggccacgtcaggctgtggtgtgccgattcctttctctttggccctgtctacttcctcgggcacatcttgttctactacttgtgatgtccgaaccatgcatggagttgtagattttcgtttgctagccatgctgcctgtctgtgtgcaatggcttatttttggagggggataaggagggggcggtgagattcttggaacgaataaggtgaaaggcttttggctttattccccctcaaatggctttggctttccttgtgtgctgaagtctactgtttgagntttcagaatgatttc
